United States Patent Application Publication US 2003/0077808 A1 - sequence listing, part 5

SEQ ID NO: 8751 - DNA, 13189 bp, Homo sapiens
aacattctccggtaccagtctctgggtctgtcaacgctctgggatcagaaaatgcaaagtcagtcctccctgcttattcaccctcccaatttcaagccacaaaaatctttccctagtgagtcccttctctggccatccctgaaccccccataggtgggctgggaaatgcttctcttgcgatctctttaataacaatagcttcatgtaacacgtcctatataagtaagatatatgacaagatctccatcgaagtgtatgcaataatgatgttatgagatttggggcaatttacattttttctctttgcttttctttatgtctagtgtttctacaaagaacatttttcttttgtggggagacagggtctcctgtgtcacacaggctggagtgcagtggcatgatcatagctcactgcagcctccaattcctgggctcaagcaatcatcctgcctcagcctcctgagtagctggaactacagtcgtgcaccaccttgcctagctaattttattttattttttttttatagagacagggtctcactatgttgcccaggctggtctggaactcttggtttcaagcaatcctcccgccttgacctcccaaagtgctgggattacaggcgtgagtcactgcacctgggccaaaaatgacagcaataatgtaggagtgagatgcgtgtttcacatcacctgcttcatccaagcctcaaaacagcctcaaaacaggaagggaatgttaccagctccaatttccagatgagaaaatggagctggctcaagacacgaaggtggatggaaaagggcagggtatccccagtcctaactggacccccggatccttccacgcttgccacagtgagagaccttctcacacaagactcactcactcattcggccggtcagtcattcattcagcaaccatttcatgagcgtcgtggcaggccctggggatatgaaactaagagagggtcccctgcagcctcaggccttacagcaggggttctctacctttgaggccctgatgagagttctagatctgtaccccgcacaaaccacttgagcaactcaggcacacgagggtgtctgcagctttatgaggtttacagccgctgaaccccaccacggttgaacccctgcttaatctgggatggtttgggtgcggcctttattgccccacccccattttaatgcacagaagtgcagctccctgtagatccctgggccccatctctccgtggcccccagccctggactcacggatcggggggcaatgggcatgccgctctcgtccacgggcccgattccctcgtacttgacccagcgcttgtcccgacgcttgctgtccttggtccacgtggctgaccagttctgggtgtgctgggaggcagggatctttgtgcttgcagagggcttgctcccagggcctggccaggtctgataccacgcagggtctgttgggtgcgtgcaggagagcattagtgaaaggcaggggtctccacctgaacctgtgtgtcccttagctcctcagagcatggatctctgtgggttcaaagtttcaacatcgccttgtttgtttgagtggatgactcagagcaccacgggcctctgtttgtttaagtgaatttaaatggatttgatcttgagaatgccgtgcctggccctacccccatccttctttcctgggactatcctaagtgctttcagaataaggtctggaaatcattacttgtagagaatgcaggggacatcccagctggggtgtggcagtaaagatgctgggcttagaggggacagacttgaattcagaccccagctctaccacctattggctgccatggcctggggtacatcagtcaccttctcagtgtctcagtttccacttctgtaaaacaagggtcattgtgacaaggattcagtgacatctagcgtgtgtgactgtacccagcacagtgcctggcacacagtcgagaggctctcagtgaaggtcagaaacccattccccagacatggttgtgactgagtcctcaacttacccataagtgttagcctctaagtagctagggcagcagaataagggctttgaggccagatgtacaagtgtgtgaattgcagctcagcctctatggctgaacatctctgcgaatggggttccttactgggaagctgtcagtcatcatcacccctactttgtcaggatatcgaggggttaaacgaggtgagcctcgtaaagtgtttttacagtgtccagcacgctctgggtgttccataattgtgtgggtgttttttttggttttgttttgtttttgtttttgttttgagacagttttgctcttgttgcccaagctggagtgcagtggcacgatctcagctcactgcaacctccacctcccaggttcaagtgattctcctgcctcaacctcccaagtagctgggatttcaggcaccccgcaccacacccagcaaatttttgtatttttattagagatggggtttcaccatgttggccaggctggtctcgaactcctgacctccagtcatccacacacctcagcctctcagtgtgtgtgtgttttaagtgacagggtcttgctgtgtcatccaggctgatagagacagggtcttgctatgttgcccaggctggataattgttaaatgaataaattcctttacacagcacctgtctagggggaatgcttgataaaggatgtcactttaggagagacatgttcagggctggcctgcacccaggagttcccaggacctctggactgggatctagaactgcctctctaacctcctgctgggtagcctgttgggcctgaatgggacagtctccaccccttcccaagccaacagatacccacatcacctccacccttccatccccagtccctgtgggaggtcctccggcgcccagggctcctgcacgcttcctttccctggcaccaggctggagggcaggggaagggatgcatcagcctgctctccccaagcgggtgtctcttgcagagtcagcaggctccgcagggaggggctcatagtgagcccagaggcctctgaggaacctcctcatggccttgagaaccccatctccagctgctgcccctcccgcttgacacagggcagtgccagatggcagggccctgaccctccatctccagcatgaggctcctgagcagacctacccgggtgctgggaagcatctcgtcttggtgtgtagcccccattgcacacagtcctgggcgcggggtcgtggaactggaaattaagggtgttggagccaccattccggatcacgggcacctgcggggaggggccaggagcggcagctcagggcccagcagggcgggagggagggatggctactaggcacagcccacacccctcggtgacagtcccaggcccgcctgacgattttgtgggaaaccagcgaggccccccagagctctcttcagccctccctccatccctttcatcctcctgcccccacctgacctgctagcgtcccaaccaactccgggcccgcaggacaccctcctccctactgactcactcacccgtgtcccccgggaggaagaccctatgtgggactggaggtggccagggatgaagtcgtccaggctgagcccagcgcggaggctgcggggtgggccctgcatgcttgggtcaaggtgggaggactccgggcaagccagctgctcctctgcgtgtcctctgtggggaaggaggaaggaagggaaagccctgctaggctaggctgcccatgccctcttggctcgaccctgggataggggaggaggggccggctgtgggagggggtcaggaccagctgggtactagctcaaggacccaggaaacaggccacgccaggcacccgcctgcaggctgcccgtgcctgccggctcccaggggcacaatggaccacttgttaggcccagggcaggagctccgggtgggagtgggggagggggagcttgggtgaggaggaggggaggggctggccaggagcccgtggggctctccctgcacgggtgcagctggcttccccactcccccggagggaaggcgcaggggaagtggggcagccggcagagagggggcctgggaacacaggactttgtttcagttccctctgcctcccccaggccgtgtgggcatctcttgcctgcgggcacaagggattactcagccacccgcccactgccctccaggaagcagtcagcagggccttaagcccaatagggccaaggggagcgtcgggggcatttccaggcagcaagacccactcttgcgagctcacagggagcatcgggcccttctttggcctccttcacagaatgaggactcagagggctccgggtgggtggagacagaagcggtgggtgagggcagagctgaacctgctcatgcccatggagagttggtgctgagtgccctggggtgttctgcatgtgggcaaatgtgcacgcacatacacgcgctccctggctccactttctcccgcccctccaggctgttttgtgagtgcagggtcttccctggcagcaccatgcctgcccacagccagcttcttctgcctcatcccaaggctggggaaggggaagggagccctaggcacccagggaatggaggggcaagaggggagcccagagtgggggtgcaagaggacaaaaaggggctcccagtttggggtgtccaagggggctttttgacccagagcacggtgctacggcgtccatccctccgcgtcttggctgctggactggaccagaaacagccaagctctgccactgcccaggactggatggaatcaggtttgcctgtgcctgtggggtccttgggggctctcagggagggctgcaaatgcatcgggaggagctgtgtgtatgtgtgtgttggaatctgggtgcagagctgcgaatatgacttctggggggaccaccggagggaccacatgagctgcatgggggttgtgggtacagaggggtgtcagctgaacagtggtgggaggtgcagtcatgtgagcagtggaagagttgggggcccagaggggatgaaggtagaataaggctgggatgactcagcccctggacccagctcctgcccagggctagcgagggtgtagccaaggctgggggcagctccttgtctctggtttgagtttgtggggactcctgacatttgagttgctgcgacacagctcttctgtgcccatgcctgactggggggagtggagggctgaggctggaggaggagcagctccccagctgggtccaattaggactcccaccaaagcaaaacaggcagacacaccccagtccccacactccacctccccttgcgggggggagttgaggcagggtggggtggaaggtcaggagacctggagctggtcggctcctcgcagcacccctccctgcccagctgactgcttcgggccaaattgcagctcagcagctgccgcctgggccatcagctgacagcgccttccttccctgacctccccgcccacctcgtgctcggtgagaactgctctcttggaggatgggtagggcaggaggtcccccacgacccgtagtcagaggttgcttacccttggtgcccccatctgccccttctcaaccctgccccttgtgtcgccccccaccacaggaacctccagggaagggtggtccgagtccttctcttggcagccaggtcaggagacttagggaggacttacaaggaagagggcagcatctggggactggtcccccatgtagcagagagcggaggggtcctcccagaattcagaccgcccctccaggcaggcagccagccccgggagcggggagaggcccctggagcgggagaggggaggcggctctgctggggtgggcactggcctccctgctctgaacactgccctgaccttgggtgcctggccctaagagctttcccaggtatttctcagcgacaaggccacgtggacaaggacagcttttcttgaatttcgctttttctggtatgagggctggtgggaggtacttcccagagtttgggacgcggaccccggggaggggctaggtgcgattccctggggttgggcacggatccctcccgccggcctcgcctactccccgcccctccttgcccggacctaccttccccggcgagcaggtggctgggcccgaggccgcccgggagcgcaggagcatccctgcccggctgctgcctggcgcgggcgctcgaggaggaagggcaaggagaagcgcgggccgtcgcggccctcgtgactgggtcaggacgggccgggccgggccgggcgccggcgcaggaagagggaggccgaaggggcgcgcgccggaggccggaccgtgagagtcgcgcggcggggcgggcggagtttgggtctcggatctggactgcgggccggggctgggccggagaggagggacgtgcgagtgctctccgtccgtcggggcgcgcgcggggacactggtggccccctgccgaggaggcctggccggcggggaggcggcgccgggaggggccgccgagggtccccggggagccctctctggtttcccagctgccatcccggcccctaccgcagggctggcgtcggggaggggtcgggcggcccgacacgggccactcagagtttccagcgacatttccagagtgtgggaagcgagcggcctcgcagcggagccaggacaggggcaggagcgatgaaccgggcggagccaggacaagggggcaggagtggtgaactgggcaagccgggagagacggacaggccgggagcgagatgagggcgccccgcaggcagagtggcggagcggaccaggggaaggccccgccgcccctccgcgctgggggagagggtgtgcctgcggcggcgcgcggccggtcgtgtgcaaacaaacacgcgcgcgtacactgcaaacgtggggacgctcacacacgtgcaagcacagggaggaaatcagcccaagggagcggccccccgggcgtgccgcgcccctaaagaggataagggtggggtccctttggcggggatgggattaggagggtcttggtgttcccagacactgtgtttgttttgatctgcctgcttttccgctgttctcgctgctctgagctgggtccccagagccccggcccttccggctccccatccattctggtcatcccctctccctgtctctgccccaagcctctgtatggcacttcagaaagtgggaatgcttaaggaacattgaaggaccgtggaaacactctggaatcctttctggcccttgagttggctcagggatccccaagccccaaaccagccaaccaaccaacagttactgatcaactttagctacgagctgggagtgatcaatgctaaattatgaaaactaacgtaatctcctgcattcctactgggtgtcagactggtgccagaggccacgaggagttttggagtgttttccaagctcaccactcaactcaaagtttggaaagaaagagagtagagaaaagactaagtgattttcagtccctaccaccattactgctttagtcttatcttctccctcgttctggtaaagaagctctccccgttgccttgaaacatcacatgtgaaagctggaggagatgtttgggttgagaagcttcagataggcctgctggcctctagcgcctgcggggctgccatgtggacacacagctgcaccagcagcagtgggaccactgggggacacgtcatagggaagcaggtccaaggcttcccaggacaaatttttacatgattccaggggttctgagtctgccagttgtggggcatctatgtaaaggcaactgttgcactgagcggggagctgaacaagatgaccttgaagactccttccaagaacctctgactctccaggaaggcggagagatggggatggcaggggcattgctgtggaggacagctgagcagtgggggaaccctgggacacttcttgagggacgcagcagtgcactgccccccaacctgaagcttagaaaccttcttatccacgccaggtagcctcttccctccctcagggataaaataggtgcccattttcttagacacgcatttttcccacctgtcagggtccttgggactaagaaggaccacatcgctttcactttcttccttcttctcccaagatggtgaagctgaagctcttccgactcccaggaatcctggccataccccctcaccagcagcaagcttctcttattctctagggctctgacctggactccaagataaatatttagtgtagagggtgcagcagagctgacaaagttccccacttcctgtttctcacaaagggaggtggcagccatgggtaaggagctggggactggctaccagtttcatctctatgggaatcgggcgttgagtaaacagctttgcaggaggaggcggggtaggtctacgggagacctgagctttcttcctgagccgctttgacttctgcctgtctacttaggcctgggctctgccgggtttatcacctctctcaggtcagaatccaccatgttccgtggtgcccatctggcctcacagccgagaggatgggagacagtgggccacagggcagggaaaacataaggaaatttgactgattcctccctttctgcccttatctaaagagaagaattccttctctttgaaaagtagattaaggggggaaaagtagcagggtttggagattgagccaggaaccaggtgtctgatttcccgacgcctccctctagcgtcagctccccttgctgcctccacagctggcacggttagggagaggctgaggctgggaagattgtcctagataaggcggctggccggctggctgtcaacaacagaacagattcctttcctttccaaatcccactgcactctctcctttgcatgcacgactcccctgtctaagaggggcctccctccctgcaagtcgcggcttccccacctctggcactgccctttgtcaggggctgcctctgccttctcagagccacctgagccacagtaaacacagttacataactgccctgttttcccagctacctgatcccaggcatcagtattccccgctcaagcccttgaggctgcaccttttgttctgtgggtagtccccaacatcaccgtcaacaggggtctgtccacaacccccacccccctgcaggggaggattagccacgggactaccagtaaatgtggctcttcacagggagggggagaaggcggtggaatgcgggtcactctgaaaagcaatctctgtcaccaaggatgacaaatgaggggaaagagcactgaagtgaaggcggggtgagcggggtgggcagagcacccagttttagttctcaagtgggaaaagggaagccaggggtcccagaagacatgaacccggactcagttcttgaggagcgccttgctctggtgctgggaatcggcaattcagatgagtcaccctctgagatctaccctgggcagctaggcggccctagctctgtgcctcagtacccccatggagatacagggcatctgctcttcctttcttctcctccccagggatgaacttcaggtgctttgagtagattttttggggggttttgctctcagaattctgagtgttttcttccttcctctaagctgagcagtcagaccagaaggggttagcgcagaaagcactgcccattcccagcagtttggacttctctagaaggccacagtgacacaatggtgaggaattgaaaccaagtcacatggacataccagcaggaatctggactatgtttcatgccctgggctccatccctttctcctgggtcctctgttgattcctgctcctgcaaatgttgccagccaagttctactgatggccctttccatgccaaccactcatgggaacaggagcaggcagaagaagggagtgcaaatgacccattgtggggcttcaaagggcctcctatgctgacaatggcatgacgtggctcatctggaattcaagatttctggtagagtcactgtagagtgagggatctgagtgaaaaaatacccagtacaggtcaagtatgatgggtattggggcctgacagccaggatgggtgcatggaaccccataggaatagcgaattaggctctcaggcttgcctggcacagacctttccatagcacacgcatgatgtataatgggcatctattctgggttctcagggccaatctcccaaaggctgcgggagaactcagccgtttgcccaatttatcccgcctgtcctcaaggaagttttgatactgacatcacatccacggctgttctctcttcctcttttcatggatgagcaaacaagcacaatgcacagacggggtgtctttgagaagaactgagctgggtgaacctctcttagttctcaggaaagatgaaacaaacaagtggctgtcaggtctagaaagtagattttataagggaaggataagtaagtgatgacctcagagggaaaaccaagccaagtcaactcagccacaaaggagggcacagacccaggagctgggaaattaggtctgcatcagccttctttcccagctcaggtagactgcgatgggtaggataagagggctgatctgttggcccagtggataccataaagtacggctctggcctccaaacaaagaagaaccttgtcttcccacctccttgaattctatgatgaaccttcgccttaatagcatcaacattaaaaagtctgcttcatttaccattaaattattcatctactgtatcaaaattacattttctttctaaagcctgaaagttgtgataaaaaaaaaaaaaggcaagaccatgcaattacatgcagcaggcaacaaagtgaggaacagatctagatggagcaacaggttaatatgaatttgcattgaagtccttcatttccaggctattaaaaatctttccacaattccagaaatatgggcaaatcttacctaattttactgaaggtttagctaaggtgtagggacattgctacatcaggatgccactgggataacaaagaacccaatgctactcagcttattggaaattagaaacctgggcccgttttctggcctgtaaactgcactgtggcccttaatgtggttgtatttagtgtaaaagtcacctcacttggacctggcagtgctggatttagcttttctacctctactgccataacctgtagagtcccctcactgacacactttcctctccagggccctggctctttccctatccccaattccccacttgcccaggggagcttgtttttccttgtgaatccacagcacctcatgatatttctacttttcagaggcatgaaaaggctagtctgacacttcccgttcttggtaggccaactccacattcaaatcctctttggctgccttggcttctccaagatggaattcaccatgtctattattaggatcacacgcacagtcattaaattacaagagtacaaaactatttttatccttggtaaacaatgtatgttttctgggatgtctttcttccttttcttcaagtagtggcctctattggagaagctgcagagggggctgggacttgggtaagaaggaggccagggttggggagtggattctgagttgggagaaacagaaacacgttgtggccaaccatagctgctttaaaatgaaagggctggagagacgaaagagagaggtcctttttattgtgatgggattccctcccttgggaggggaattccttgttatcatcagagaccagaccagacatcaaaagccaggctttctcctggggtctggaattattaaatgagtaaaagccaaatataagtacctccaccaggaaatacaggaaataaagacacagggagccaataaagttatcatttaagggtgttttcttctttttttaaatcttaagattacctctaatttatagtacaaaagtcctaacaaattaatttcttgttcacaaaaaagacattagatgatttcggccaataagtaacatttccctcgccttctttaacataactgaaagcaagaaaaagtaggcaatctctaagcacaagcaaataatccatcattcagaaccttgaaaaaatatcacaccaccaactggtctgacgtcttgaccacctcaccatttaggaaggaatactggggccccttcttggaaaatgcctgctgacagaactatcgggaaaaacagctatgggggtcaccatgcactgagaaaataaaagttagggatttacagtgtcatcctcaaaaagttctgtgacaaaaacacatctttattgccccaaatcaagatctatgacaggcctgctcctcattacatgcatttcatgttaagagtatttggagacatctacgtcaagggagtgaaggaatgtgggcaagaacttactggaaggcagtgtgcttggccctacttcagagctgctcagagggacagtccgcctccatgtcctcacttcttaatcttaagccacctagacttgccatgagggcatagaagaggagatgatgcataaccctgtctcagacaaaggtgttatttagcaggtcttgccaaggtggcaggggcgtgaggccaaggcctcccgggagggaatatactctccagtatcatctttacctttgtgactgcatagatgaaggcagctaacactgaccccattcactctcgctggctagatataggcaggtcaggtcccaaaccccaatgtaatataggctccctctttcacactctgtcaatggcacaaagccctattgttaatacagttctctactcacactcaagataagagtaaacaacactgtccttcgactacacaactttcttcctctacacacatctgctctgacagctttcctccaggcgtctcatcacagcaatactgaaagggactgtggcaagccagttttgggacccgtcctccaggtaacccgaccctcctcaatccactgctgggccttcctaggctgtcctttactcaccttctagcaggtctcagaaaagatgtggacccggtgccagacaaggtggaagccatggttataaccacaaacaatttaggaaattggagcccatacccacagatgggccctgggttcaccctccctctgccatcttttctgcctgggcaagg

SEQ ID NO: 8752 - DNA, 460 bp, Homo sapiens
caaggatgacaaatgaggggaaagagcactgaagtgaaggcggggtgagcggggtgggcagagcacccagttttagttctcaagtgggaaaagggaagccaggggtcccagaagacatgaacccggactcagttcttgaggagcgccttgctctggtgctgggaatcggcaattcagatgagtcaccctctgagatctaccctgggcagctaggcggccctagctctgtgcctcagtacccccatggagatacagggcatctgctcttcctttcttctcctccccagggatgaacttcaggtgctttgagtagattttttggggggttttgctctcagaattctgagtgttttcttccttcctctaagctgagcagtcagaccagaaggggttagcgcagaaagcactgcccgtttccagcagtttggacttctctagaaggccacagtgacacaatggt

SEQ ID NO: 8753 - DNA, 5265 bp, Homo sapiens
ttcttttttttttttttttttttttttgagacggagtctcgctctgtcgcccaggccggactgcggactgcagtggcgcaatctcggctcactgcaacctccaactccctggttcaagcaattctcctgcctcagcctccccagtagctgggattacacgcatgtgccaccacacccagctaatttttgttatttttagtagagatgggctttcaccatgttggccaggatggtctcgatctcctgacgttgtgatccaccggcctcagcctcccaaagtgctgggattacaggtgcgagccaccgcgcccagcttggatgaaaattcttaaaaggttaaactttatagatatggtacagttgaaaattttggagatcagctaccatatttacataaaatagggcagggtagagggagcagattttagctttactcattctgaggctggagagactcctgaataatgaccatgaacagcaagtccagctgtgtctcatgcaggcatggcttataatatttttcctatagagatcagctgtgcctcaaaccgtgtgtttttaaagcactcagagggaagaggatctaagggacaatgccaaaaggcaaaaaaggccccgaaattatccaatttttaaaaatcttcccttgctccttaatgacattcaataatagtctattgacaaaacaaataagggtttctctgttcctattttgaacaatgtcaggaaatcatccctaagttatcaggatggcaaagaaagctaatcttaagaaggcaaatctttgctattgagagaaacttgcttcattgaattgttcatggaagaaccaaaaaaggcaatgaaagacataaaaaatactgatgttcctggagaggctgagtcttttactcctaggcaaggagcagtatcaagctcatcagagtgtgataagcaattcttaccttgccaatcaatatccagtcacaaaagaccagcaaatcagcaatgcctctacttgtaaccaaagtgtcaccttgagagtttaaggaaaacggaggctatttttgttttatcattctcttaaagaaacacacacacacacacacacacacacacacacacacacacccccttgggttatagttttgcttttgctctaaacattcagaacacggaaataaaaaaaggatatatgttttgaacttacattaaatgagttttcaaatttgtaaaagaaataatcatctgatcgatttaaatgtcctgtgatatgtatgtcactaaaagtgagaaacctggtccatgtgaagcatcattttcaaaatggcatttcagaaaagtttacaaaggagtcctgacatgcctgaggaattgttttgtttttgttttcctaaatgggagaagttgcagaaaaagaaggtccctgtgggccttccacaaggaaggtcctgtgaaggaaaacacaatgtaactgtttccagtatctttagcacacacagggggaaacattcaataaaacagaagagactttgaaaacaccaaaactgcagaactttgacagcaattaaaatgtctgtttaatcatggccctagacaggaaaagtagtcttcgagcaaacccagggcagggtccagccatcttggaagttgttgtttacattaaaacagctacagaacggaagggataactttatctttagaattcaaccgaattttcaaacttaacctcctctaagagttagtgctgctctaaaacttactcaggttttcttgaaccaggaccacctacctctctactctggctgattcctccacagctcagagggaaccagtgaaatactgtatataattttgtgatggttctgtcaaggaaacttgctttatcattctgctttttgagacaatagtgaagccattcctaaataatcatccgtaataaaatattattttttgcttataaggatttacagtaactatttctactactgcctgcttatggaggcccctaagagtggtttctacctgtggattgtatatatgtaacagccttaatgaaaaggagaaaagggataaggtactagcagctctgcagtctgtcacatggaatgactttcatcagtgaaatttccaaagacaggatcttttctaatcctgggattggaaaagaaaggagcataaggatatctaggtgcttaatacccgatttgagttcaacaacaatcaggaaaagacagttactagagacttttccccccttctttcacaggttttactcacaacccattcagagatcctttatctccttcctatctttttattaatggagcaatctatgcaggcagattccattccctaagagtgccttgatttctgccataaacaaatcagaaactgttagaaaaaaagtataggaaaacagagatagatgggctaagtcttcattcttctaatgagaagtatggttttttggggaaaaaaaaaaacaccaccaaaattatgttgttctttgtttttctggtttcctggaaactcccaatatgaagtattactgtctgaaatacttgctttagtgctagactgccgcatcacaaatgacactaaggaatgccataaatgtgcacgttccatgctctgatgtaatgttcccaggcatgtacattcactgcagagctgaccaatgactattatgacacggctcctgcgatgaggctagttaaaatgggagcctaagtagccccaaaatttccttcactagttggttgtgacttgaaaatcaaactaagggaagataattcacacactacatctgaacacttgcttttcgcattccaaaatatgctaatgaaggctgaaataccattcaacctaaagagtaactgatatagaagacaggaaatcctcacttatccaatgttctttagcaagaccttcaattcacaaggggaccattgaactcttgtcagtttctactaccccagctggtttcagtaatactgacagggaacaacagaaggatgatgggaaggcacatgcgagagctgatgccaacagcctagaagggcatatatacatcttgttgtagaaggtgctgctgagggcatttatcaaatatttagaaagtgacttcctttacagaagtcacctggggttcaaaaatgaaagtaaaataatctggcaattgtgaaagctttctgaaaatctttctcctccaaagtcctaaggaaatttaaaccaatcatgcccatggtcagatgaacagattttaagtaaatctaagaacatcccttattattttttattttgtttactagaacatatttaaacgaactgagagtccagagaaagtaggttattatagaaaacatttcccttcgcccttaaaatcactggatttgggttattcactttgaagttctactatgatccagtttcccatcaaaagggaagcacttttagccactgaaatctaagaggactttcttcaatggcacccagcagaaaaggaaaaaaatgaaaaggaaaaaaatcttcttgcatttgaaacgttattagtcttacatgaaagacattaccttccaaaaaacaataatgaagactgactagttcaagtcagaaacccaggtttgaggtttccaaggcccttttattaggggaagttcccctttatagcacaagacttcacaaatgtgttgacaacaatcagattcatttcttaaaattatggagaaaaaagggaaaaacaaaacagatgcactttttatatatattgaacataaattaaaagaatttataaaacagccacctttttacagaataaatgcagactgaattataaatgcacctccacgttgaagttgttttgagttgcttttcattttccaataataaataaatagaatttgttcttgagttttagatccacctgagccacggcaggactctaagtcatgaatgggctttcttcccttggtcgctcctgtgcgcagcatgtgagtgtgctgaggttacagatttcattggcccaccagcgtgtatgctatcctttcggggtggcattcgctcattaattcggtccagacctcgcgcttcttcaaaactccggatcttgtgctgaagcgagaaccctctgatggctacagaaaaacaggaagcaggtggagagagctcaattaggcagcaaagcaacaggcttaaaaaaagtttcttagcacacagcaacctcctagagaaacacacagaaaggtggctatggagcacacgtctagtgaaagtcatgggcaatgtctgactgaatcagtcttggctgcagctactgcttccttaaagcccaaagggcagctgaaattgtgaaagtaattttcataaaagctctatatgcataatcatggtagacatatacctaacaaaaagctaacaagtacttactgggccccagtacctttaagaaagagtgtcttatgcaccagaaacatactcaatgctagaacaaaggcaacactagaataattgaacaagttaaacccagggtagttgcttttcgcacaaaggccacatagaccacaaaaaaaagtaacaaaagagctaatcttttcgtttaggacagctttctatcttgcacaaccaggagctgtacataagttaaaaacttaaaaatagcttctacatattttccttccgattcaacttttataacaccaagttaaggcattcgcgttttgaaccatcttacctaataaaacaattacaagtataatacaagtttatcagttccaatggttttcatagaaacaaagttaatttaacttgcctaccttagggcaacctcagaaatgaattgaactaaattccagtctacttctgcctctgctcttgaaatcttttagaatcgctgaagaggctgacctatttggctctcttgagaatcaaatggatgtctcttgtacatggaagggatacagaagtaaaccacttgacctctcatgaccagttgcttaagcttctgccgttgcattaaagctgatagagcccagaaaaaaaactgtagctgtggtgaaggttatttaaaattaatgcaaagataggacacaaaggaaacacctgcttcgttaacatgcctagaaacaactataccttttctcactgttatagttctggtgatgcaataataaaatatttgaaatgttgataaagcttcgaaaaaccagtacacagacacatggatcacatctatcagagtaatatggccataccttcccgggcctctaccgcttctactgtggctgt

SEQ ID NO: 8754 - DNA, 402 bp, Homo sapiens
ttttttttttttttttttttttttgagacggagtctcgctctgtcgcccaggccggactgcggactgcagtggcgcaatctcggctcactgcaacctccaactccctggttcaagcaattctcctgcctcagcctccccagtagctgggattacacgcatgtgccaccacacccagctaatttttgttatttttagtagagatgggctttcaccatgttggccaggatggtctcgatctcctgacgttgtgatccaccggcctcagcctcccaaagtgctgggattacaggtgcgagccaccgcgcccagcttggatgaaaattcttaaaaggttaaactttatagatatggtacagttgaaaattttggagatcagctaccatatttacataaaatagggc

SEQ ID NO: 8755 - DNA, 408 bp, Homo sapiens
aaaattctttttttttttttttttttttttgagacggagtctcgctctgtcgcccaggccggactgcggactgcagtggcgcaatctcggctcactgcaacctccaactccctggttcaagcaattctcctgcctcagcctccccagtagctgggattacacgcatgtgccaccacacccagctaatttttgttatttttagtagagatgggctttcaccatgttggccaggatggtctcgatctcctgacgttgtgatccaccggcctcagcctcccaaagtgctgggattacaggtgcgagccaccgcgcccagcttggatgaaaattcttaaaaggttaaactttatagatatggtacagttgaaaattttggagatcagctaccatatttacataaaatagggc

SEQ ID NO: 8756 - DNA, 344 bp, Homo sapiens
tgtgggtcatttctttattattttatttgtattggttaacaatgatcagccatgcaagaataaatgattattgtaaaatctgcaaacaatgtagatatgtagagagtcccttccttggagcttgaccttgtcagacaggtatagatgagtgttccggggcagccgtaaaaactgccagagactgggctgcttataacagaaacgcatggtctcccagaagcccacattcaaggtgtccaaaggcctggctcctggaggctctggaggagagcctgttccctgtctctcagcttctgccggttgccagcaagtgttgccgttcattcactccagccactgcctcc

SEQ ID NO: 8757 - DNA, 344 bp, Homo sapiens
tgtgggtcatttctttattattttatttgtattggttaacaatgatcagccatgcaagaataaatgattattgtaaaatctgcaaacaatgtagatatgtaaagaatcccttccttggagcttgaccttgtcagacaggtatagatgagtgttccggggcagccgtaaaaactgccagagactgggctgcttataacagaaacgcatggtctcccagaagcccacattcaaggtgtccaaaggcctggctcctggaggctctggaggagagcctgttccctgtctctcagcttctgccggttgccagcaagtgttgccgttcattcactccagccactgcctcc

SEQ ID NO: 8758 - DNA, 344 bp, Homo sapiens; identical to SEQ ID NO: 8756

SEQ ID NO: 8759 - DNA, 6045 bp, Homo sapiens
taaaatgtgggtcatttctttattattttatttgtattggttaacaatgatcagccatgcaagaataaatgattattgtaaaatctgcaaacaatgtagatatgtagagagtcccttccttggagcttgaccttgtcagacaggtatagatgagtgttccagggcagccgtaaaaactgccagagactgggctgcttataacagaaacgcatggtctcccagaagcccacattcaaggtgtccaaaggcctggctcctggaggctctggaggagagcctgttccctgtctctcagcttctgccggttgccagcaagtgttgccgttcattcactccagccactgcctccatctgcacacagcaaaacagcgtatcctgaagtgctcaaccttatagccattattttaaaatatccggaacacacaggaccgtgggagtggctgttggagaaattttcatgaaggaagaaagattacaactaagttttaaaatgctagttttgtttgttttgtcttggagaggaggtaaaagtgggagtaaaaatagggagtttggtgtaaggtgggaaaagcaaaggaaccccgcatggatgggctgaagggtgtgatgggagaacagtgagaagtacgtttggggaagcaattggaaatagtagctaagcttaatcacaatctatcaaaagggacttgttgaagaattaatgtgtgactaggaacagggaggttatgggcttgtcagctcgacagcgggcactcagttccactaacgaatgatgcccgtgtggacagacagaatgatggacaggcagatgaatgcgtgggctttatgtgaaacaggtcctcttggttgttgacaagatactgttttaaagttccattttgccatacttcgaacagcttgtcattagctcaatttagccacatgtaaaatcactaaggcggacttccagagttcccacatgaaaatcaaatgtaaaccagcagtgacctgcttcaacaccatcatcggaagtcagaagttgaactcttttttgatgtttaaagcctgcataatattcgctgtattattattcagcatattactatttccttcgtgatggaaatttggtttatcccaattttctattctatcaaaacaccgctacatagaaaatccccatgcacatatttctcctaattgtggaaatattttacataaaagactctagacatgggatgaaattcccaggttattggaattttaaaatagataggtacttccaaattgacctcttacaaattatatgaattcgtaagcttccaactgttatggagttacccattttgagaaatctgtgctaaaaggacccaaacaatgctgatgacaatgatcaggataataagtacgctgggaagacaacaaaatgatttagatcttagacaagtcattctaggtgtctccactgtttcagttcttgcgttcgttcattcttgtgctttttcgttttaccaaataaaatagctccttgatgtcatatgaatccacgctatgcttaatgagtattggttagtaaaatgcctataactagtaatcttcatctatgcaattaaatattaattcataaaacacttcaaatgtaaacaataattagtaaatgaaaagtacataatacctcaattagaaaaaaatcactccattaaaaagacattatttgtgtgataaaagagattgccatttttgtatttttctacaaggttaaagaaaactaagtcaacttatacaagtgaattttaaaagactttagggcaggcgtggtggctcacacctgtaatcccagcactttaagaggccgaggagggcagatcacctgaggtcaggagttcgaaaccagcctgaccaacatggtgaaatctcatttctactaaaaatacaaaaaaattagcccagtgtggtggcatgtgcctataatctcagctacttgggaggctgagacaggagaatagtttgaacctgggaggcggaggttgcaatgaaccaggatcgcaccattgcactccagcttgggcaacaagagtgaaactccatctcaaaaataaataaataaataaataaataaaataaataaaagcctttaacccagaatgctgagtaaattggccaaaaatgctaacctatgcatttcaatactataggagtcgcatgggtagaaataaccagatgaaatacttctggtatttcaccttcccaacccacacgagccagtgtttttctgtgaataacaaaaacagcagaatttacttgcctctccataagaggttaccacttctgtgtgttcccccgaaacaggtggtggctgggtgagaaggtggacagcactagggcaggagatgggggctccagtatcgtgggtgagcttcctaaacctctgcaactttcagcccctaaatgggatgagccatcagaatttttagcacaatgcccagaacaaagtaaggatttgacaaatgacgcctctctccacattgttctgtcatcagccaccgcatcctgtacctccaagcccactgggctccggctgtttccatcacatggagaatgactcagagcctggcctccagccaccctcctggcctttcttcttctcactctgccactggctcctcatggaccaccagcctgggtgtcctcagacataccacacacttcactgtgggagtcacgcagccctcaatgctccttctccagggagccacggggctttcctcctcaggaggactctgcaagcagctggatgaagggccctcccgtctctcatccttccttaatttttgtcacagttctccttccttccactcagtgcagtgcacactgattgatcctccatcttccccaaaagacaggaacagcatgagcagtggagagtagattccaatgatagaaaaaatagtcagtgatttctcatttccattgatcatcaatgaagaaaatgtatcctgaaggtcatgtacctcctatgggactgctgcatcctcagcctcctgaatttcagcccagcaccttcctccccagcacagcaacaggtcagcccttaccagcatccctctcttattgcctttgtgcagagccagcaccagggccaggggaggccttgggattgtccctccccaacaatctgtgaaacaatcctttatgtcaccaacaaagcacagccttctgcactggtggtcagtccctctcaacacctctgtcactgtaaagctggcaggcaaccctccaaggttggccttcccaagcactgcacctctaggtgacagagcacgtccttaccttgaagcctgggcgcccagtctatcctgtccaatgagcgagctgtggagaaggggggattccgggttaaggggagactagcagggctcctgcttttatgttgccctgttgggaaggctattaaagaaacataaagtgctaagcagtgaggatagaacatgttttcattatttcaaccaatacattccacagatggaataataagaaatgctacaaccaagctaactgaatccaacagcatatcaaaaagataatccaccatgattcaagtgggtttcatactagggatgcagggatggtttaacatacgcaagtcaataaatgtgatacatcacatcaataaaactaaaaacaaaaatcacatgataatctgaatagatgcagaaaaagcctttgacaaaatccagcatttctttatgattaaaaccgttcgtcacaatcagcatagaacggacataccttaaggtaataaaagctatctatgacaaacccacagccaacattttcctgaatgggggagagttgaaagcattccccctgaggaagggaacaagacaaagatgcccacgttcaccgcttctcaacacagtgctgttcactacagcattggttataagagcaagactggaaacagaacaaatggatacccatagcggggtgcttaagtaattttgggaatagtcatggggtgcagtactttatagctctgaaacaatacaatggatttacatttgaaatgtggaatgataactaaggtgcattgcccagtgatatatgcagaggtgcagaggactttgtgtaaacacgatcacacatcagcctgcattccaggtgcatgcttctatttgcacatagattgcagggatgatatgcaaacaaaaatgttgacttggtgtttggaagttcagagtggaagggaaacttccttgctaaccttttatgatatttagagtttctaaatgtgaatacgtaatacatttagaaatcttagttaataagaaaagcctctgttcctggcctcttgctggcacatgtcaggtggaaatggggctgtcatgctaatgtgtgcaaactgagaaaaatccaagaatgggagtctgcttttttcatcatacaaataattgttaatagaaacagtatgataattgctcattgatataccatgcatattctattagataataataaatttctgaaatttgaactatacttacacatggaaattgaaatatatggatgaaacattgtggcttatataggcaattgttttattggcattttacaaactgatcatcattcctcatggcacgggtccatgtgatattaagtagcttgttatgcttgggaaaggcagtgatgaccacaagaatgacttcaactactaaagtacaatggagatttcaacaatgttttgtttaatatttaaatatttcattgtgctcccaggctttttctcaccctaatagctctcatccatatcatgtgggtcccattaatacagataactccgaatgcaccactcttccattatatccagtcaattgctggttaccttgggcctaccaactgggggagggcaggggctgctggccacctcctcatctacagtaagagtcaatgagcagttaaatggatactgaaaaccatttatcctgctggagtgagaaataaatggtttctttcaatagcgtacgtagtaaaatgcatcttttccaaactatttatatgactcaaggcccatctcaatttcagatgtggttagcctcaattcctgattctcaccaaggtgtgtaatgtcatccacggcccagtgcagaggaacacaggtgctgccgtcagactgccagggtccgatcccgcctcctcactcaccccgggagatccctttaagccaggagtcaacagtgaggatggaaacatgagtgctttttaaagtcctgaaagttcagaggcaaactgtcaatttctcctccacccctgggcacacaccaggagaattctgtctccaggttggaggaagtgcctgtgagagagttgtgtctctcagattctgttcaccacaggtgacactcgatgcaaccccaaacctcttctgcacaatcccaaggggtgctgactaatccaacccaaaggctgtgatgtttggcagaggcagaaaagaaaaggccaggtgttctgggaaagaccacctttaaataacacagcaccctcatagcccagagagacagttctaactattatgccaataaacccggaaaagaccaaatccaatatgacacatatttcctgtttcgttttgatttcatgccccctcccttaacctcccaagcagcatggataacccgaaggcccctgggaactctctccaattggatcttacgtggaaagcagttacctacctacaaatccccatcatcagatatgctctccacaatcaaatctttagaaacacaaacaccaggataagtcattagagagaggcccacccactcctcccaccctagctgaagccatggtgcttcgcacaggatcccctggtgtttcctctgggctcacagatatccctacagcctctctggacatggttttatacttgcaaaatcatttgctctcaccagaccccaaatcctccttcgcaaaaggagcccagaatcaggtttctgtaccctagagatggcgctttttcctcaggaagtgagttatttcagggtacgtatcattctccagtgtcaatggctc

SEQ ID NO: 8760 - DNA, 2297 bp, Homo sapiens
aaaatgtgggtcatttctttattattttatttgtattggttaacaatgatcagccatgcaagaataaatgattattgtaaaatctgcaaacaatgtagatatgtagagaatcccttccttggagcttgaccttgtcagacaggtatagatgagtgttccggggcagccgtaaaaactgccagagactgggctgcttataacagaaacgcatggtctcccagaagcccacattcaaggtgtccaaaggcctggctcctggaggctctggaggagagcctgttccctgtctctcagcttctgccggttgccagcaagtgttgccgttcattcactccagccactgcctccatctgcacacagcaaaacagcatatcctgaagtgctcagccttatagccattattttaaaatatctggaacacacaggaccgtgggagtggctgttggagaaattttcatgaaggaagaaagattacaactaagttttaaaatgctagttttgtttgttttgtcttggagaggaggtaaaagtgggagtaaaaatagggagtttggtgtaaggtgggaaaagcaaaggaaccccgcatggatgggctgaagggtgtgatgggagaacagtgagaagtacgtttggggaagcaattggaaatagtagctaagcttaatcacaatctatcaaaagggacttgttgaagaattaatgtgtgactaggaacagggaggttatgggcttgtcagctcgacagtgggcactcagttccactaacgaatgatgcccgtgtggacagacagaatgatggacaggcagatgaatgcatgggctttatgtgaaacaggtcctcttggttgttgacaagatactgttttaaagttccattttgccatacttcgaacggcttgtcattagctcaatttagccacatgtaaaatcactaaggcggacttccagagttcccacatgaaaatcaaatgtaaaccagcagtgacctgcttcaacaccatcatcggaagtcagaagttgaactcttttttgatgtttaaagcctgcataatattcgctgtattattattcagcatattactatttccttcgtgatggaaatttgatttatcccaattttctattctatcaaaacaccgctacatagaaaatccccatgcacatatttctcctaattgtggaaatattttacataaaagactctagacatgggatgaaattcccaggttattggaattttaaaatagataggtacttccaaattgacctcttacaaattatatgaattcgtaagcttccaactgttatggagttacccattttgagaaatctgtgctaaaaggacccaaacaatgctgatgacaatgatcaggataataagtatgctgggaagacaacaaaatgatttagatcttagacaagtcattctaggtgtctccactgtttcagttcttgcattcgttcattcttgtgctttttcgttttaccaaataaaatagctccttgatgtcatatgaatccatgctatgcttaatgagtattggttagtaaaatgcctataactagtaatcttcatctatgcaattaaatattaattcataaaacacttcaaatgtaaacaataatttgtaaatgaaaagtacataatacctcaattagaaaaaaatcactccattaaaaagacattatttgtgtgataaaagagattgccatttttgtatttttctacaaggttaaagaaaactaagtcaacttatacaagtgaattttaaaagactttagggcaggcgtggtggctcacgcctgtaatcccagcactttaagaggccgaggagggcagatcacctgaggtcaggagttcgaaaccagcctgaccaacatggtgaaatctcatttctactaaaaatacaaaaaaattagcccagtgtggtggcatgtgcctataatctcagctacttgggaggctgagacaggagaatagtttgaacctgggaggcggaggttgcaatgaaccaggatcgcaccattgcactccagcttgggcaacaagagtgaaactccatctcaaaaataaataaataaataaataaaataaataaaagcctttaacccagaatgctgagtaaattggccaaaaatgctaacctatgcatttcaatactataggagttgcatgggtagaaataaccagatgaaatacttctggtatttcaccttcccaacccacacgagccagtgtttttctgtgaataacaaaaacagcagaatttacttgcctctccataagaggttaccac

SEQ ID NO: 8761 - DNA, 6041 bp, Homo sapiens
taaaatgtgggtcatttctttattattttatttgtattggttaacaatgatcagccatgcaagaataaatgattattgtaaaatctgcaaacaatgtagatatgtagagagtcccttccttggagcttgaccttgtcagacaggtatagatgagtgttccggggcagccgtaaaaactgccagagactgggctgcttataacagaaacgcatggtctcccagaagcccacattcaaggtgtccaaaggcctggctcctggaggctctggaggagagcctgttccctgtctctcagcttctgccggttgccagcaagtgttgccgttcattcactccagccactgcctccatctgcacacagcaaaacagcgtatcctgaagtgctcaaccttatagccattattttaaaatatccggaacacacaggaccgtgggagtggctgttggagaaattttcatgaaggaagaaagattacaactaagttttaaaatgctaattttgtttgttttgtcttggagaggaggtcaaagtgggagtaaaaatagggagtttggtgtaaggtgggaaaagcaaaggaaccccgcatggatgggctgaagggtgtgatgggagaacagtgagaagtacgtttggggaagcaattggaaatagtagctaagcttaatcacaatctatcaaaagggacttgttgaagaattaatgtgtgactaggaacagggaggttatgggcttgtcagctcgacagtgggcactcagttccactaacgaatgatgcccgtgtggacagacagaatgatggacaggcagatgaatgcgtgggctttatgtgaaaaaggtcctcttggttgttgacaagatactgttttaaagttccattttgccatacttcgaacagcttgtcattagctcaatttagccacatgtgaaatcactaaggcggacggacttccagagttcccacatgaaaatcaaatgtaaaccagcagtgacctgcttcaacaccatcatcggaagtcagaagttgaactcttttttgatgtttaaagcctgcataatattcgctgtattattattcagcatattactatttccttcgtgatggaaatttggtttatcccaattttctgttctatcaaaacaccgctacatagaaaatccccatgcacatatttctcctaattgtggaaatattttacataaaagactcttgacatgggatgaaattcccaggttattggaattttaatatagataggtacttccaaattgacctcttacaaattatatgaattcgtaagcttccaactgttatggagttacccattttgagaaatctgtgctaaaaggacccaaacaatgctgatgacaatgatcaggataataagtacgctgggaagacaacaaaatgatttagatcttagacaagtcattctaggtgtctccactgtttcagttcttgcgttcgttcattcttgtgctttttcattttaccaaataaaatagctccttgatgtcatatgaatccacgctatgcttaatgagtattggttagtaaaatgcctataactagtaatcttcatctatgcaattaaatattcattcataaaacacttcaaatgtaaacaataattagtaaaagaaaagtacataatacctcaattagaaaaaaatcactccattaaaaagacattatttgtgtgataaaagagattgccatttttgtatttttctacaaggttaaagaaaactaagtcaacttatacaagtgaattttaaaagactttagggcaggcgtggtggctcacacctgtaatcccagcactttaagaggccgaggagggcagatcacctgaggtcaggagttcgaaaccagcctgaccaacatggtgaaatctcatttctactaaaaatacaaaaaaattagcccagtgtggtggcatgtgcctataatctcagctacttgggaggctgagacaggagaatagtttgaacctgggaggcggaggttgcaatgaaccaggatcgcaccattgcactccagcttgggcaacaagagtgaaactccatctcaaaaataaataaataaataaataaaataaataaaagcctttaacccagaatgctgagtaaattggccaaaaatgctaacctatgcatttcaatattataggagttgcatgggtagaaataaccagatgaaatacttctggtatttcaccttcccaacccacacgagccagtgtttttctgtgaataacaaaaacagcagaatttacttgcctctccataagaggttaccacttctgtgtgttcccccgaaacaggtggtggctgggtgagaaggtggacagcactagggcaggagatgggggctccagtatcgtgggtgagcttcctaaacctctgcaactttcagcccctaaatgggatgagccatcagaatttttagcacaatgcccagaacaaagtaaggatttgacaaatgacgcctctctccacattgttctgtcatcagccaccgcatcctgtacctccaagcccactgggctccggctgtttccatcacatggagaatgactcagagcctggcctccagccaccctcctggcctttcttcttctcactctgccactggctcctcatggaccaccagcctgggtgtcctcagacataccacacacttcactgtgggagtcacgcagccctcactgctccttcgccagggagccacggggctttcctcctcaggaggactctgcaagcagctggatgaagggccctcccgtctctcatccttccttaatttttgtcacagttctccttccttccactcagtgcagcgcacactgattgatcctccatcttccccaaaagacaggaacagcatgagcagtggagagtagattccaatgatagaaaaaatagtcagtgatttctcatttccattgatcatcaatgaagaaaatgtatcctgaaggtcatgtacctcctatgggactgctgcatcctcagcctcctgaatttcagcccagcaccttcctccccagcacagcaacaggtcagcccttaccagcatccctctcttattgcctttgtgcagagccagcaccagggccaggggaggccttgggattgtccctccccaacaatctgtgaaacaatcctttatgtcaccaacaaagcacagccttctgcactggtggtcagtccctctcaacacctctgtcactgtaaagctggcaggcaaccctccaaggttggccttcccaagcactgcacctctaggtgacagagcacgtccttaccttgaagcctgggcgcccagtctatcctgtccaatgagcgagctgtggagaaggggggattccgggttaaggggagactagcagggctcctgcttttatgttgccctgttgggaaggctattaaagaaacacaaagtgctaagcagtgaggatagaacatgttttcattatttcaaccaatacattccacagatggaataataagaaatgctacaaccaagctaactgaatccaacagcatatcaaaaagataatccaccatgattcaagtgggtttcatactagggatgcagggatggtttaacatacgcaagtcaataaatgtgatacatcacatcaataaaactaaaaacaaaaatcacatgataatctgaatagatgcagaaaaagcctttgacaaaatccagcatttctttatgattaaaaccgttcgtcaaaatcagcatagaacggacataccttaaggtaataaaagctatctatgacaaacccacagccaacattttcctgaatgggggagagttgaaagcattccccctgaggaagggaacaagacaaagatgcccacgttcaccgcttctcaacacagtgctgttcactacagcattggttataagagcaagactggaaacagaacaaacggatacccatagcggggtgcttaagtaattttgggaatagtcatggggtgcagtactttatagctctgaaacaatacaatggatttacatttgaaatgtggaatgataactaaggtgcattgcccagtgatatatgcagaggtgcagaggactttgtgtaaacacgatcacacatcagcctgcattccaggtgcatgcttctatttgcacatagattgcagggatgatatgcaaacaaaaatgttgacttggtgtttggaagttcagagtggaagggaaacttccttgctaaccttttatgatatttagagtttctaaatgtgaatacgtaatacatttagaaatcttagttaataagaaaagcctctgttcctggcctcttgctggcacatgtcaggtggaaatggggctgtcatgctaatgtgtgcaaactgagaaaaatccaagaatgggagtctgcttttttcatcatacaaataattgttaatagaaacagtatgataattgctcattgatataccatgcatattctattagataataataaatttctgaaatttgaactatacttacacatggaaattgaaatatatggatgaaacattgtggcttatataggcaattgttttattggcattttacaaactgatcatcattcctcatggcacgggtccatgtgatattaagtagcttgttatgcttgggaaaggcagtgatgaccacaagaatgacttcaactactaaagtacaatggagatttcaacaatgttttgtttaatatttaaatatttcattgtgctcccaggctttttctcaccctaatagctctcatccatatcatgtgggtcccattaatacagatacttccgaatgcaccactcttccattatatccagtcaattgctggttaccttgggcctaccaactgggggagggcaggggctgctggccacctcctcatctacagtaagagtcaatgagcagttaaatggatactgaaaaccatttatcctgctggagtgagaaataaatggtttctttcaatagcgtagtaaaatgcatcttttccaaactatttatatgactcaaggcccatctcaatttcagatgtggttagcctcaattcctgattctcaccaaggtgtgtaatgtcatccacggcccagtgcagaggaacacaggtgctgccgtcagactgccagggtccgatcccgcctcctcactcaccccgggagatccctttaagccaggagtcaacagtgaggatggaaacatgagtgctttttaaagtcctgaaagttcagaggcagactgtcaatttctcctccacccctgggcacacaccaggagaactctgtctccaggttgaaggaagtgcctgtgagagagttgtgtccctcagattctgttcaccacaggtgacactcgatgcaaccccaaacctcttctgcacaatcccaaggggtgctgactaatccaacccaaaggctgtgatgtttggcagaggcagaaaagaaaaggccaggtgttctgggaaagaccacctttaaatatcacagcaccctcatagcccagagagacagttctaactattatgccaataaacccggaaaagaccaaatccaatatgacacatatttcctgtttccttttgatttcatgccccctcccttaacctcccaagcagcatggataccccgaaggcccctgggaactctctccaattggatcttacgtggaaagtagttacctacctacaaatccccatcatcagatatgctctccacaatcaaatctttagaaacacaaacaccaggataagtcattagagagaggcccacccactcctcccaccctagctgaagccatggtgcttcgcacaggatcccctggtgtttcctctgggctcacagatatccctacagcctctctggacattgttttatacttgcaaaatcatttgctctcaccagactccaaatcctccttcccaaaaggagcccagaatcaggtttctgtaccctagagatggcgttttttcctcaggaagtgagttatttcagggtaggtatcattctccagtgtcaatggctc

SEQ ID NO: 8762 - DNA, 6044 bp, Homo sapiens
taaaatgtgggtcatttctttattattttatttgtattggttaacaatgatcagccatgcaagaataaatgattattgtaaaatctgcaaacaatgtagatatgtagagagtcccttccttggagcttgaccttgtcagacaggtatagatgagtgttccggggcagccgtaaaaactgccagagactgggctgcttataacagaaacgcatggtctcccagaagcccacattcaagttgtccaaaggcctggctcctggaggctctggaggagagcctgttccctgtctctcagcttctgccggttgccagcaagtgttgccgttcattcactccagccactgcctccatctgcacacagcaaaacagcgtatcctgaagtgctcaaccttatagccattattttaaaatatccggaacacacaggaccgtgggagtggctgttggagaaattttcatgaaggaagaaagattacaactaagttttaaaatgctagttttgtttgttttgtcttggagaggaggtaaaagtgggagtaaaaatagggagtttggtgtaaggtgggaaaagcaaaggaaccccgcatggatgggctgaagggtgtgatgggagaacagtgagaagtacgtttggggaagcaattggaaatagtagctaagcttaatcacaatctatcaaaagggacttgttgaagaattaatgtgtgactaggaacagggaggttatgggcttgtcagctcgacagcgggcactcagttccactaacgaatgatgcccgtgtggacagacagaatgatggacaggcagatgaatgcgtgggctttatgtgaaacaggtcctcttggttgttgacaagatactgttttaaagttccattttgccatacttcgaacagcttgtcattagctcaatttagccacatgtaaaatcactaaggcggacttccagagttcccacatgaaaatcaaatgtaaaccagcagtgacctgcttcaacaccatcatcggaagtcagaagttgaactcttttttgatgtttaaagcctgcataatattcgctgtattattattcagcatattactatttccttcgtgatggaaatttggtttatcccaattttctattccatcaaaacaccgctacatagaaaatccccatgcacatatttctcctaattgtggaaatattttacataaaagactctagacatgggatgaaattcccaggttattggaattttaaaatagataggtacttccaaattgacctcttacaaattatatgaattcgtaagcttccaactgttatggagttacccattttgagaaatctgtgctaaaaggacccaaacaatgctgatgacaatgatcaggataataagtacgctgggaagacaacaaaatgatttagatcttagacaagtcattctaggtgtctccactgtttcagttcttgcgttcgttcattcttgtgctttttcgttttaccaaataaaatagctccttgatgtcatatgaatccacgctatgcttaatgagtattggttagtaaaatgcctataactagtaatcttcatctatgcaattaaatattaattcataaaacacttcaaatgtaaacaataattagtaaatgaaaaatacataatacctcaattagaaaaaaatcactccattaaaaagacattatttgtgtgataaaagagattgccatttttgtatttttctacaaggttaaagaaaactaagtcaacttatacaagtgaattttaaaagactttagggcaggcgtggtggctcacgcctgtaatcccagcactttaagaggccgaggagggcagatcacctgaggtcaggagttcgaaaccagcctgaccaacatggtgaaatctcatttctactaaaaatacaaaaaaattagcccagtgtggtggcatgtgcctataatctcagctacttgggaggctgagacaggagaatagtttgaacctgggaggcggaggttgcaatgaaccaggatcgcaccgttgcactccagcttgggcaacaagagtgaaactccatctcaaaaataaataaataaataaataaataaataaaataaataaaagcctttaacccagaatgctgagtaaattggccaaaaatgctaacctatgcatttcaatactataggagtcgcatgggtagaaataaccagatgaaatacttctggtatttcacgttcccaacccacacgagccagtgtttttctgtgaataacaaaaacagcagaatttacttgcctctccataagaggttaccacttctgtgtgttcccccgaaacaggtggtggctgggtgagaaggtggacagcactagggcaggagatgggggctccagtatcgtgggtgagcttcctaaacctctgcaactttcagcccctaaatgggatgagccatcagaatttttagcacaatgcccagaacaaagtaaggatttgacaaatgacacctctctccacattgttctgtcatcagccaccgcatcctgtacctccaagcccactgggctccggctgtttccatcacatggagaatgactcagagcctggcctccagccaccctcctggcctttctgcttctcactctgccactggctcctcatggaccaccagcctgggtgtcctcagacataccacacacttcactgtgggagtcacgcagccctcactgctccttcgccagggagccacggggctttcctcctcaggaggactctgcaagcagctggatgaagggccctcccgtctctcatccttccttaatttttgtcacagttctccttccttccactcagtgcagcgcacactgattgatcctccatcttccccaaaagacaggaacagcatgagcagtggagagtagattccaatgatagaaaaaatagtcagtgatttctcatttccattgatcatcaatgaagaaaatgtatcctgaaggtcatgtacctcctatgagactgctgcatcctcagcctcctgaatttcagcccagcaccttcctccccagcacagcaacaggtcagcccttaccagcatccctctcttattgcctttgtgcagagccagcaccagggccaggggaggccttgggattgtccctccccaacaatctgtgaaacaatcctttatgtcaccaacaaagcgcagccttctgcactggtggtcagtccctctcaacacctctgtcactgtaaagctggcaggcaaccctccaaggttggccttcccaagcactgcacctctaggtgacagagcacgtccttaccttgaagcctgggcgcccagtctatcctgtccaatgagcgagctgtggagaaggggggattccgggttaaggggagactagcagggctcctgcttttatgttgccctgttgggaaggctattaaagaaacacaaagtgctaagcagtgaggatagaacatgttttcattatttcaaccaatacattccacagatggaataataagaaatgctacaaccaagctaactgaatccaacagcatatcaaaaagataatccaccatgattcaagtgggtttcatactagggatgcagggatggtttaacatacgcaagtcaataaatgtgatacatcacatcaataaaactaaaaacaaaaatcacatgataatctgaatagatgcagaaaaagcctttgacaaaatccagcatttctttatgattaaaaccgttcgtcaaaatcagcatagaacggacataacttaaggtaataaaagctatctatgacaaacccacagccaacattttcctgaatgggggagagttgaaagcattccccctgaggaagggaacaagacaaagatgcccacgttcaccgcttctcaacacagtgctgttcactacagcattggttataagagcaagactggaaacagaacaaatggatacccatagcggggtgcttaagtaattttgggaatagtcatggggtgcagtactttatagctctgaaacaatacaatggatttacatttgaaatgtggaatgataactaaggtgcattgcccagtgatatatgcagaggtgcagaggactttgtgtaaacacgatcacacatcagcctgcattccaggtgcatgcttctatttgcacatagattgcagggatgatatgcaaacaaaaatgttgacttggtgtttggaagttcagagtggaagggaaacttccttgctaaccttttatgatatttagagtttctaaatgtgaatacgtaatacatttagaaatcttagttaataagaaaagcctctgttcctggcctcttgctggcacatgtcaggtggaaatggggctgtcatgctaatgtgtgcaaactgagaaaaatccaagaatgggagtctgcttttttcatcatacaaataattgttaatagaaacagtatgataattgctcattgatataccatgcatattctattagataataataaatttctgaaatttgaactatacttacacatggaaattgaaatatatggatgaaacattgtggcttatagaggcaattgttttattggcattttacaaactgatcatcattcctcatggcacgggtccatgtgatattaagtagcttgttatgcttgggaaaggcagtgatgaccacaagaatgacttcaactactaaagtacaatggagatttcaacaatgttttgtttaatatttaaatatttcattgtgctcccaggctttttctcaccctaatagctctcatccatatcatgtgggtcccattaacacagatacctccgaatgcaccactcttccattatatccagtcaattgctggttaccttgggcctacaactgggggagggcaggggctgctggccacctcctcatctacagtaagagtcaatgagcagttaagtggatactgaaaaccatttatcctgctggagtgagaaataaatggtttctttcaatagcgtagtaaaatgcatcttttccaaactatttatatgactcaaggcccatctcaatttcagatgtggttagcctcaactcctgattctcaccaaggtgggtaatgtcatccacggcccagtgcagaggaacacaggtgctgccgtcagactgccagggtccgatcccgcctcctcactcaccccgggagatccctttaagccaggagtcaacagtgaggatggaaacatgagtgctttttaaagtcctgaaagttcagaggcagactgtcaatttctcctccacccctgggcacacaccaggagaactctgtctccaggttgaaggaagtgcctgtgagagagttgtgtccctcagattctgttcaccacaggtgacactcgatgcaaccccaaacctcttctgcacaatcccaaggggtgctgactaatccaacccaaaggctgtgatgtttggcagaggcagaaaagaaaaggccaggtgttctgggaaagaccacctttaaatatcacagcaccctcatagcccagagagacagttctaactattatgccaataaacccggaaaagaccaaatccaatatgacacatatttcctgtttccttttgatttcatgccccctcccttaacctcccaagcagcatggataccccgaaggcccctgggaactctctccaattggatcttacgtggaaagtagttacctacctacaaatccccatcatcagatatgctctccacaatcaaatctttagaaacacaaacaccaggataagtcattagagagaggcccacccactcctcccaccctagctgaagccatggtgcttcgcacaggatcccctggtgtttcctctgggctcacagatatccctacagcctctctggacattgttttatacttgcaaaatcatttgctctcaccagactccaaatcctccttcccaaaaggagcccagaatcaggtttctgtaccctagagatggcgttttttcctcaggaagtgagttatttcagggtaggtatcattctccagtgtcaatggctc

SEQ ID NO: 8763 - DNA, 2297 bp, Homo sapiens
aaaatgtgggtcatttctttattattttatttgtattggttaacaatgatcagccatgcaagaataaatgattattgtaaaatctgcaaacaatgtagatatgtagagagtcccttccttggagcttgaccttgtcagacaggtatagatgagtgttccggggcagccgtaaaaactgccagagactgggctgcttataacagaaacgcatggtctcccagaagcccacattcaaggtgtccaaaggcctggctcctggaggctctggaggagagcctgttccctgtctctcagcttctgccggttgccagcaagtgttgccgttcattcactccagccactgcctccatctgcacacagcaaaacagcgtatcctgaagtgctcaaccttatagccattattttaaaatatccggaacacacaggaccgtgggagtggctgttggagaaattttcatgaaggaagaaagattacaactaagttttaaaatgctagttttgtttgttttgtcttggagaggaggtcaaagtgggagtaaaaatagggagtttggtgtaaggtgggaaaagcaaaggaaccccgcatggatgggctgaagggtgtgatgggagaacggtgagaagtacgtttggggaagcaattggaaatagtagctaagcttaatcacaatctatcaaaagggacttgttgaagaattaatgtgtgactaggaacagggaggttatgggcttgtcagctcgacagcgggcactcagttccactaatgaatgatgcccgtgtggacagacagaatgatggacaggcagatgaatgcgtgggctttatgtgaaacaggtcctcttggttgttgacaagatactgttttaaagttccattttgccatacttcgaacagcttgtcattagctcaatttagccacatgtaaaatcactaaggcggacttccagagttcccacatgaaaatcaaatgtaaaccagcagtgacctgcttcaacaccatcatcggaagtcagaagttgaactcttttttgatgtttaaagcctgcataatattcgctgtattattattcagcatattactatttccttcgtgatggaaatttggtttatcccaattttctattccatcaaaacaccgctacatagaaaatccccatgcacatatttctcctaattgtggaaatattttacataaaagactctagacatgggatgaaattcccaggttattggaattttaaaatagataggtacttccaaattgacctcttacaaattatatgaattcgtaagcttccaactgttatggagttacccattttgagaaatctgtgctaaaaggacccaaacaatgctgatgacaatgatcaggataataagtacgctgggaagacaacaaaatgatttagatcttagacaagtcattctaggtgtctccactgtttcagttcttgcgttcgttcattcttgtgctttttcgttttaccaaataaaatagctccttgatgtcatatgaatccacgctatgcttaatgagtattggttagtaaaatgcctataactagtaatcttcatctatgcaattaaatattaattcataaaacacttcaaatgtaaacaataattagtaaatgaaaagtacataatacctcaattagaaaaaaatcactccattaaaaagacattatttgtgtgataaaagagattgccatttttgtatttttctacaaggttaaagaaaactaagtcaacttatacaagtgaattttaaaagactttagggcaggcgtggtggctcacgcctgtaatcccagcactttaagaggccgaggagggcagatcacctgaggtcaggagttcgaaaccagcctgaccaacatggtgaaatctcatttctactaaaaatacaaaaaaattagcccagtgtggtggcatgtgcctataatctcagctacttgggaggctgagacaggagaatagtttgaacctgggaggcggaggttgcaatgaaccaggatcgcaccattgcactccagcttgggcaacaagagtgaaaccccatctcaaaaataaataaataaataaataaaataaataaaagcctttaacccagaatgctgagtaaattggccaaaaatgctaacctatgcatttcaatactataggagtcgcatgggtagaaataaccagatgaaatacttctggtatttcaccttcccaacccacacgagccagtgtttttctgtgaataacaaaaacagcagaatttacttgcctctccataagaggttaccac

SEQ ID NO: 8764 - DNA, 6044 bp, Homo sapiens
aaaatgtgggtcatttctttattattttatttgtattggttaacaatgatcagccatgcaagaataaatgattattgtaaaatctgcaaacaatgtagatatgtagagagtcccttccttggagcttgaccttgtcagacaggtatagatgagtgttccagggcagccgtaaaaactgccagagactgggctgcttataacagaaacgcatggtctcccagaagcccacattcaaggtgtccaaaggcctggctcctggaggctctggaggagagcctgttccctgtctctcagcttctgccggttgccagcaagtgttgccgttcattcactccagccactgcctccatctgcacacagcaaaacagcgtatcctgaagtgctcaaccttatagccattattttaaaatatccggaacacacaggaccgtgggagtggctgttggagaaattttcatgaaggaagaaagattacaactaagttttaaaatgctagttttgtttgttttgtcttggagaggaggtaaaagtgggagtaaaaatagggagtttggtgtaaggtgggaaaagcaaaggaaccccgcatggatgggctgaagggtgtgatgggagaacagtgagaagtacgtttggggaagcaattggaaatagtagctaagcttaatcacaatctatcaaaagggacttgttgaagaattaatgtgtgactaggaacagggaggttatgggcttgtcagctcgacagcgggcactcagttccactaacgaatgatgcccgtgtggacagacagaatgatggacaggcagatgaatgcctgggctttatgtgaaacaggtcctcttggttgttgacaagatactgttttaaagttccattttgccatacttcgaacagcttgtcattagctcaatttagccacatgtaaaatcactaaggcggacttccagagttcccacatgaaaatcaaatgtaaaccagcagtgacctgcttcaacaccatcatcggaagtcagaagttgaactcttttttgatgtttaaagcctgcataatattcgctgtattattattcagcatattactatttccttcgtgatggaaatttggtttatcccaattttctattccatcaaaacaccgctacatagaaaatccccatgcacatatttctcctaattgtggaaatattttacataaaagactctagacatgggatgaaattcccaggttattggaattttaaaatagataggtacttccaaattgacctcttacaaattatatgaattcgtaagcttccaactgttatggagttacccattttgagaaatctgtgctaaaaggacccaaacaatgctgatgacaatgatcaggataataagtacgctgggaagacaacaaaatgatttagatcttagacaagtcattctagatgtctccactgtttcagttcttgcgttcgttcattcttgtgctttttcgttttaccaaataaaatagctccttgatgtcatatgaatccacgctatgcttaatgagtattggttagtaaaatgcctataactagtaatcttcatctgtgcaattaaatattaattcataaaacacttcaaatgtaaacaataattagtaaatgaaaagtacataatacctcaattagaaaaaaatcactccattaaaaagacattatttgtgtgataaaagagattgccatttttgtatttttctacaaggttaaagaaaactaagtcaacttatacaagtgaattttaaaagactttagggcaggcgtggtggctcacgcctgtaatcccagcactttaagaggccgaggagggcagatcacctgaggtcaggagttcgaaaccagcctgaccaacatggtgaaatctcatttctactaaaaatacaaaaaaattagcccagtgtggtggcatgtgcctataatctcagctacttgggaggctgagacaggagaatagtttgaacctgggaggcggaggttgcaatgaaccaggatcgcaccattgcactccagcttgggcaacaagagtgaaactccatctcaaaaataaataaataaataaataaataaaataaataaaagcctttaacccagaatgctgagtaaattggccaaaaatgctaacctatgcatttcaatactataggagtcgcatgggtagaaataaccagatgaaatacttctggtatttcaccttcccaacccacacgagccagtgtttttctgtgaataacaaaaacagcagaatttacttgcctctccataagaggttaccacttctgtgtgttcccccgaaacaggtggtggctgggtgagaaggtggacagcactagggcaggagatgggggctccagtatcgtgggtgagcttcctaaacctctgcaactttcagcccctaaatgggatgagccatcagaatttttagcacaatgcccagaacaaagtaaggatttgacaaatgacacctctctccacattgttctgtcatcagccaccgcatcctgtacctccaagcccactgggctccggctgtttccatcacatggagaatgactcagagcctggcctccagccaccctcctggcctttctgcttctcactctgccactggctcctcatggaccaccagcctgggtgtcctcagacataccacacacttcactgtgggagtcacgcagccctcactgctccttcgccagggagccacggggctttcctcctcaggaggactctgcaagcagctggatgaagggccctcccgtctctcatccttccttaatttttgtcacagttctccttccttccactcagtgcagcgcacactgattgatcctccatcttccccaaaagacaggaacagcatgagcagtggagagtagattccaatgatagaaaaaatagtcagtgatttctcatttccattgatcatcaatgaagaaaatgtatcctgaaggtcatgtacctcctatgggactgctgcatcctcagcctcctgaatttcagcccagcaccttcctccccagcacagcaacaggtcagcccttaccagcatccctctcttattgcctttgtgcagagccagcaccagggccaggggaggccttgggattgtccctccccaacaatctgtgaaacaatcctttatgtcaccaacaaagcgcagccttctgcactggtggtcagtccctctcaacacctctgtcactgtaaagctggcaggcaaccctccaaggttggccttcccaagcactgcacctctaggtgacagagcacgtccttaccttgaagcctgggcgcccagtctatcctgtccaatgagcgagctgtggagaaggggggattccgggttaaggggagactagcagggctcctgcttttatgttgccctgttgggaaggctattaaagaaacataaagtgctaagcagtgaggatagaacatgttttcattatttcaaccaatacattccacagatggaataataagaaatgctacaaccaagctaactgaatccaacagcatatcaaaaagataatccaccatgattcaagtgggtttcatactagggatgcagggatggtttaacatacgcaagtcaataaatgtgatacatcacatcaataaaactaaaaacaaaaatcacatgataatctgaatagatgcagaaaaagcctttgacaaaatccagcatttctttatgattaaaaccgttcgtcacaatcagcatagaacggacataacttaaggtaataaaagctatctatgacaaacccacagccaacattttcctgaatgggggagagttgaaagcattccccctgaggaagggaacaagacaaagatgcccacgttcaccgcttctcaacacagtgctgttcactacagcattggttataagagcaagactggaaacagaacaaatggatacccatagcggggtgcttaagtaattttgggaatagtcatggggtgcagtactttatagctctgaaacaatacaatggatttacatttgaaatgtggaatgataactaaggtgcattgcccagtgatatatgcagaggtgcagaggactttgtgtaaacacgatcacacatcagcctgcattccaggtgcatgcttctatttgcacatagattgcagggatgatatgcaaacaaaaaagttgacttggtgtttggaagttcagagtggaagggaaacttccttgctaaccttttatgatatttagagtttctaaatgtgaatacgtaatacatttagaaatcttagttaataagaaaagcctctgttcctggcctcttgctggcacatgtcaggtggaaatggggctgtcatgctaatgtgtgcaaactgagaaaaatccaagaatgggagtctgcttttttcatcatacaaataattgttaatagaaacagtatgataattgctcattgatataccatgcatattctattagataataataaatttctgaaatttgaactatacttacacatggaaattgaaatatatggatgaaacattgtggcttatataggcaattgttttattggcattttacaaactgatcatcattcctcatggcacgggtccatgtgatattaagtagcttgttatgcttgggaaaggcagtgatgaccacaagaatgacttcaactactaaagtacaatggagatttcaacaatgttttgtttaatatttaaatatttcattgtgctcccaggctttttctcaccctaatagctctcatccatatcatgtgggtcccattaatacagatacctccgaatgcaccactcttccattatatccagtcaattgctggttaccttgggcctaccaactgggggagggcaggggctgctggccacctcctcatctacagtaagagtcaatgagcagttaaatggatactgaaaaccatttatcctgctggagtgagaaataaatggtttctttcaatagcgtacgtagtaaaatgcatcttttccaaactatttatatgactcaaggcccatctcaatttcagatgtggttagcctcaattcctgattctcaccaaggtgtgtaatgtcatccacggcccagtgcagaggaacacaggtgctgccgtcagactgccagggtccgatcccgcctcctcactcaccccgggagatccctttaagccaggagtcaacagtgaggatggaaacatgagtgctttttaaagtcctgaaagttcagaggcaaactgtcaatttctcctccacccctgggcacacaccaggagaattctgtctccaggttggaggaagtgcctgtgagagagttgtgtctctcagattctgttcaccacaggtgacactcgatgcaaccccaaacctcttctgcacaatcccaaggggtgctgactaatccaacccaaaggctgtgatgtttggcagaggcagaaaagaaaaggccaggtgttctgggaaagaccacctttaaataacacagcaccctcatagcccagagagacagttctaactattatgccaataaacccggaaaagaccaaatccaatatgacacatatttcctgtttccttttgatttcatgccccctcccttaacctcccaagcagcatggataccccgaaggcccctgggaactctctccaattggatcttacgtggaaagcagttacctacctacaaatccccatcatcagatatgctctccacaatcaaatctttagaaacacaaacaccaggataagtcattagagagaggcccacccactcctcccaccctagctgaagccatggtgcttcgcacaggatcccctggtgtttcctctgggctcacagatatccctacagcctctctggacatggttttatacttgcaaaatcatttgctctcaccagaccccaaatcctccttcgcaaaaggagcccagaatcaggtttctgtaccctagagatggcgctttttcctcaggaagtgagttatttcagggtacgtatcattctccagtgtcaatggctc

SEQ ID NO: 8765 - DNA, 6040 bp, Homo sapiens
aaaatgtgggtcatttctttattattttatttgtattggttaacaatgatcagccatgcaagaataaatgattattgtaaaatctgcaaacaatgtagatatgtagagagtcccttccttggagcttgaccttgtcagacaggtatagatgagtgttctggggcagccgtaaaaactgccagagactgggctgcttataacagaaacgcatggtctcccagaagcccacattcaaggtgtccaaaggcctggctcctggaggctctggaggagagcctgttccctgtctctcagcttctgccggttgccagcaagtgttgccgttcattcactccagccactgcctccatctgcacacagcaaaacagcgtatcctgaagtgctcaaccttatagccattattttaaaatatccggaacacacaggaccgtgggagtggctgttggagaaattttcatgaaggaagaaagattacaactaagttttaaaatgctagttttgtttgttttgtctgggagaggaggtaaaagtgggagtaaaaatagggagtttggtgtaaggtgggaaaagcaaaggaaccccgcatggatgggctgaagggtgtgatgggagaacagtgagaagtacgtttggggaagcaattggaaatagtagctaagcttaatcacaatctatcaaaagggacttgttgaagaattaatgtgtgactaggaacagggaggttatgggcttgtcagctcgacagcgggcactcagttccactaacgaatgatgcccgtgtggacagacagaatgatggacaggcagatgaatgcgtgggctttatgtgaaacaggtcctcttggttgttgacaagatactgttttaaagttccattttgccatacttcgaacagcttgtcattagctcaatttagccacatgtaaaatcactaaggcggacttccagagttcccacatgaaaatcaaatgtaaaccagcagtgacctgcttcaacaccatcatcggaagtcagaagttgaactcttttttgatgtttaaagcctgcataatattcgctgtattattattcagcatattactatttccttcgtgatggaaatttggtttatcccaattttctattctatcaaaacaccgctacatagaaaatccccatgcacatatttctcctaattgtggaaatattttacataaaagactctagacatgggatgaaattcccaggttattggaattttaaaatagataggtactcccaaattgacctcttacaaattatatgaattcgtaagcttccaactgttatggagttacccattttgagaaatctgtgctaaaaggacccaaacaatgctgatgacaatgatcaggataataagtacgctgggaagacaacaaaatgatttagatcttagacaagtcattctaggtgtctccactgtttcagttcttgcgttcgttcattcttgtgctttttcgttttaccaaataaaatagctccttgatgtcataggaatccacgctatgcttaatgagtattggttagtaaaatgcctataactagtaatcttcatctatgcaattaaatattaattcataaaacacttcaaatgtaaacaataattagtaaatgaaaagtacataatacctcaattagaaaaaaatcactccattaaaaagacattatttgtgtgataaaagagattgccatttttgtatttttctacaaggttaaagaaaactaagtcaacttatacaagtgaattttaaaagactttagggcaggcgtggtggctcacgcctgtaatcccagcactttaagaggccgaggagggcagatcacctgaggtcaggagttcgaaaccagcctgaccaacatggtgaaatctcatttctactaaaaatacaaaaaaattagcccagtgtggtggcatgtgcctataatctcagctacttgggaggctgagacaggagaatagtttgaacctgggaggcggaggttgcaatgaaccaggatcgcaccattgcactccagcttgggcaacaagagtgaaactccatctcaaaaataaataaataaataaataaataaaataagtaaaagcctttaacccagaatgctgagtaaattggccaaaaatgctaacctatgcatttcaatactataggagtcgcatgggtagaaataaccagatgaaatacttctggtatttcaccttcccaacccacacgagccagtgtttttctgtgaataacaaaaacagcagaatttacttgcctctccataagaggttaccacttctgtgtgttcccccgaaacaggtggtggctgggtgagaaggtggacagcactagggcaggagatgggggctccagtatcgtgggtgagcttcctaaacctctgcaactttcagcccctaaatgggatgagccatcagaatttttagcacaatgcccagaacaaagtaaggatttgacaaatgacgcctctctccacattgttctgtcatcagccaccgcatcctgtacctccaagcccactgggctccggctgtttccatcacatggagaatgactcagagcctggcctccagccaccctcctggcctttctgcttctcactctgccactggctcctcatggaccaccagcctgggtgtcctcagacataccacacacttcactgtgggagtcacgcagccctcactgctccttcgccagggagccacggggctttcctcctcaggaggactctgcaagcagctggatgaagggccctcccgtctctcatccttccttaatttttgtcacagttctccttccttccactcagtgcagcgcacactgattgatcctccatcttccccaaaagacaggaacagcatgagcagtggagagtagattccaatgatagaaaaaatagtcagtgatttctcatttccattgatcatcaatgaagaaaatgtatcctgaaggtcatgtacctcctatgggactgctgcatcctcagcctcctgaatttcagcccagcaccttcctccccagcacagcaacaggtcagcccttaccagcatccctctcttattgcctttgtgcagagccagcaccagggccaggggaggccttgggattgtccctccccaacaatctgtgaaacaatcctttatgtcaccaacaaagcacagccttatgcactggtggtcagtccctctcaacacctctgtcactgtaaagctggcaggcaaccctccaaggttggccttcccaagcactgcacctctaggtgacagagcacgtccttaccttgaagcctgggcgcccagtctatcctgtccaatgagcgagctgtggagaaggggggattccgggttaaggggagactagcagggctcctgcttttatgttgccctgttgggaaggctattaaagaaacacaaagtgctaagcagtgaggatagaacatgttttcattatttcaaccaatacattccacagatggaataataagaaatgctacaaccaagctaactgaatccaacagcatatcaaaaagataatccaccatgattcaagtgggtttcatactagggatgcagggatggtttaacatacgcaagtcaataaatgtgatacatcacatcaataaaactaaaaacaaaaatcacatgataatctgaatagatgcagaaaaagcctttgacaaaatccagcatttctttatgattaaaaccgttcatcaaaatcagcgtagaacggacataccttaaggtaataaaagctatctatgacaaacccacagccaacattttcctgaatgggggagagttgaaagcattccgcctgaggaagggaacaagacaaagatgcccacgttcaccgcttctcaacacagtgctgttcactacagcattggttataagagcaagactggaaacagaacaaatggatacccatagcggggtgcttaagtaattttgggaatagtcatggggtgcagtactttatagctctgaaacaatacaatggatttacatttgaaatgtggaatgataactaaggtgcattgcccagtgatatatgcagaggtgcagaggactttgtgtaaacacgatcacacatcagcctgcattccaggtgcatgcttctatttgcacatagattgcagggatgatatgcaaacaaaaatgttgacttggtgtttggaagttcagagtggaagggaaacttccttgctaaccttttatgatatttagagtttctaaatgtgaatacgtaatacatttagaaatcttagttaataagaaaagcctctgttcctggcctcttgctggcacatgtcaggtggaaatggggctgtcatgctaatgtgtgcaaactgagaaaaatccaagaatgggagtctgcttttttcatcatacaaataattgttaatagaaacagtatgataattgctcattgatataccatgcatattctattagataataataaatttctgaaatttgaactatacttacacatggaaattgaaatatatggatgaaacattgtggcttatataggcaattgttttattggcattttacaaactgatcatcattcctcatggcacgggtccatgtgatattaagtagcttgttatgcttgggaaaggcagtgatgaccacaagaatgacttcaactactaaagtacaatggagatttcaacaatgttttgtttaatatttaaatatttcattgtgctcccaggctttttctcaccctaatagctctcatccatatcatgtgggtcccattaatacagatacctccgaatgcaccactcttccattatatccagtcaattgctggttaccttgggcctaccaactgggggagggcaggggctgctggccacctcctcatctacagtaagagtcaatgagcagttaaatggatactgaaaaccatttatcctgctggagtgagaaataaatggtttctttcaatagcgtagtaaaatgcatcttttccaaactatttatatgactcaaggcccatctcaatttcagatgtggttagcctcaattcctgattctcaccaaggtgtgtaatgtcatccacggcccagtgcagaggaacacaggtgctgccgtcagactgccagggtccgatcccccctcctcactcaccccgggagatccctttaagccaggagtcaacagtgaggatggaaacatgagtgctttttaaagtcctgaaagttcagaggcagactgtcaatttctcctccacccctgggcacacaccaggagaactctgtctccaggttggaggaagtgcctgtgagagagttgtgtccctcagattctgttcaccacaggtgacactcaatgcaaccccaaacctcttctgcacaatcccaaggggtgctgactaatccaacccaaaggctgtgatgtttggcagaggcagaaaagaaaaggccaggtgttctgggaaagaccacctttaaataacacagcaccctcatagcccagagagacagttctaactattatgccaataaacccggaaaagaccaaatccaatatgacacatatttcctgtttcgttttgatttcatgccccctcccttaacctcccaagcagcatggataccccgaaggcccctgggaactctctccaattggatcttacgtggaaagcagttacctacctacaaatccccatcatcagatatgctctccacaatcaaatctttagaaacacaagcaccaggataagtcattagagagaggcccacccactcctcccaacctagctgaagccatggtgcttcgcacaggatcccctggtgtttcctctgggctcacagatatccctacagcctctctggacatggttttatacttgcaaaatcatttgctctcaccagaccccaaatcctccttcccaaaaggagcccagaatcaggtttctgtaccctagagatggcgctttttcctcaggaagtgagttatttcagggtacgtatcattctccagtgtcaatggctc

SEQ ID NO: 8766 - DNA, 340 bp, Homo sapiens
tgggtcatttctttattattttatttgtattggttaacaatgatcagccatgcaagaataaatgattattgtaaaatctgcaaacaatgtagatatgtagagagtcccttccttggagcttgaccttgtcagacaggtatagatgagtgttccagggcagccgtaaaaactgccagagactgggctgcttataacagaaacgcatggtctcccagaagcccacattcaaggtgtccaaaggcctggctcctggaggctctggaggagagcctgttccctgtctctcagcttctgccggttgccagcaagtgttgccgttcattcactccagccactgcct

SEQ ID NO: 8767 - DNA, 603 bp, Homo sapiens
tttacatgaagatggagtgctaatggaaatgcccaaaaccttcagagattgacacgctgtcattttccatttccattcctggatctacggagtcttctaagagattttgcaatgaggagaagcattgttttcaaactatataactgagccttatttataattagggatattatcaaaatatgtaaccatgaggcccctcaggtcctgatcagtcagaatggatgctttcaccagcagacccggccatgtggctgctcggtcctgggtgctcgctgctgtgcgagacattagccctttagttatgagcctgtgggaacttcaggggttcccagtggggagagcagtggcagtgggaggcatctgggggccaaaggtcagtggcagggggtacttcagtattatacaactgctgtgaccagacttgtatactggccgaatatcagtgctgtttgtaatttttcactttgagaaccaacattaattccatatgaatcaagtgttttgtaactgctattcatttattcagcaaatatttattgatcatctcttctccataagatagtgtgataaacacagtcatgaataaagttattttccacaaaa

SEQ ID NO: 8768 - DNA, 233 bp, Homo sapiens
tccttattagcgaattcgtatacagcatcctcattagcgatgccatatacagcgtcctcattagcgatgttgtatacagcgtcctcattaatgatgtcgtatagagcgtcctcattagcgatgtcatatacaatgtcctcattagcgatgtcatatacagcaacctcattagctatgtcttgtaaagcatcctcattagcgatgtcatatacaacgtcctcattagcgatgtc

SEQ ID NO: 8769 - DNA, 603 bp, Homo sapiens
tttacatgaagatggagtgctaatggaaatgcccaaaaccttcagagattgacacgctgtcattttccatttccgttcctggatctacggagtcttctaagagattttgcgatgaggagaagcattgttttcaaactatataactgagccttatttataattagggatattatcaaaatatgtaaccatgaggcccctcaggtcctgatcagtcagaatggatgctttcaccagcagacccggccatgtggctgctcggtcctgggtgctcgctgctgtgcgagacattagccctttagttatgagcctgtgggaacttcaggggttcccagtggggagagcagtggcagtgggaggcatctgggggccaaaggtcagtggcagggggtatttcagtattatacaactgctgtgaccagacttgtatactggctgaatatcagtgctgtttgtaatttttcactttgagaaccaacattaattccatatgaatcaagtgttttgtaactgctattcatttattcaacaaatatttattgatcatctcttctccataagatagtgtgataaacacagtcatgaataaagttattttccacaaaa

SEQ ID NO: 8770 - DNA, 32212 bp, Homo sapiens
gcctggagtgcagtggcacaatcagatcactgaagccttgagctcctggcctcaagcaatcctcctgcctcattttcctaagtagctggggctacaggtgtctgccaccacacctggctaaattaaaaaaaaaaattggccaggtgcggtggctcacccctgtaatcccagcactttgggaggccgaggcgggcagatcacgaggtcaggagatcgagacaatccgggctaacacggtgaaaccccgtctctactaaaaaatacaaaaaattagccgggcgtggtggcgggcgcctgtagtcccagctactcgggaggctgaggcaggagaatggcgtgaacccgggaggcggagcttgcagtgagcggagatcgcgccactgcactctagcctgggcgacagagcgagacttgtctcaaaaaacaaaaacaaaaacaaaaacaaaacaaaacaaaaaaaaagagtcacacgaacacatgttctgatccacctgaggcaaaaggcgcccctgtggagcccagcacgtctgtgtgggaggaaccgcctggaggagcagagagcaaagcaaaggggcttggggcggaacacgacgggagtggcaggagcagccagcgggaagccagggagagggtttggagatcagccagtcgcgggcaggggtaggcaaaacctgtaggttcctgtggacgccctggaattgtgcagttacttctgagtgaggcatgaaaccagtgagttctgaggagacaactaacgctgcaatttaatttccagttaacctgtggagcttcagaagctctcactcacaactgggatattaacaaggtcggatccggagggaagtccctcagcacatagagcatgaagtgtgcacccccccgtgcagcaagtccacgctcgctcagagatggagggaaataggtaggaggaagtcctcactgggaacattgtatgggctgcaacctggctgctcaaaacaaggtttataactgaagtgtagtttacacaatgctgacctgttggaagtaatggaagaggttcatatgcacacatggataaaattaaatgtttaagtctgagtttaaatcttacaaaaaataaaaaataaaccagatgaggcctaaagaggaaaaattatttacttaaaaaatgcaggccgggcacggtggctcaagcctgtaatcccagcactttgggaggccgaggtgggcagatcacgaggtcaggagatcgagaccatcctggctaacacagtgaaaccccgtctctactaaaaatacaaaaaattagccgggcatggtggcgggcgcctgtagtcccagctactcgggaggctgaggcaggagaaaggcgtgaacccaggaggcggagcttgcagtgagccgggatggtgccactgcactccagcctgggcgacagagcgagactccgtctcaaaaaaaaaaaaaaaaaaaaaaaaaaaaaaaatgtgtagggaccaagtcttgctaagggaggagaccacccctcatattgtcttatgcccaatttctgcctccaaagaaagaaaaagtaaaaactaaaaggcagaaatgaaatccacaagcagacagcccggcatcacaccctgggcctggtagttaaagatcgacccctgacctaatcggttatattatctatagattacagacattgtatagaaaagcagtgtggaaatccctatcctgttttgttcccatctaattaccggtgcatgcagcccccagtcacgtaccccctgcttgctcaatcgatcaagaccctctcacgcgcacccccgtagagttgtgagcgcttaaaaggtacaggaattgctcactcggagagctctgctcttgagacaggagtcttgccaatgccccccgccgaataaaccccttccttatttaactcggtgtctgagttttgtctgcggctcgtcctgctacattgctatggttgcccaagttggtctccaactcctgggctccctcctacctcagcgtccagtgtgagccactatgcttgctgttggttctattttttaaaaaaacaaacagaaacaaacaaacaaaaaacacctactctgccaatctgtctttttattattttatttctatttgatttcaaaatttttatggatgtggcaaatttgtttgcctcagtatcattaaattgtaaaaactagatttacaaaaagatatatatattaaaaaaaccagtgtagtggctattttagactgtggaattataagtaatttccccctttacatgttttatatttttcagtttttctacagcgaatatatactgctttatattaaggaaatgtttacgttaagaatactcagtaggctacagtttcaagatgaattttgtggcctgaaagctggggctgttgctaatattgtaaggcctttggcttccatttgctgtgagatgtggtaccagtggaaggttgtgagcagagaagtgacattatctggcctatgtttataaatacctgctgatttatttatttagagatggagtctcactctgtcacccaggctggagtgcagtggagcaatctcagctcactacaaccttcacctcctgggttcaagtgattctcctgcctcagcctcctgagtagctgggattacagccacctgccacgatgcccagctaatttttgtatttttagtagagatggggtttcaccatgttggcccacctggtcttgaactctggacctcaagtgatctacacacctcagcctcccaaagtgctgggattacaggcgtgagccactgagcccggccgtatgcagttttgttatatgcatagattacatagtggtcaagtcagggcttttagggtatccattacccaaataatgcgcattgtacccaattaggaattacctatcatatgaccccctcatactccttcacccttccaagtcttcattgtctgtcaccccaatctctgtcttcatgtgtacacattttttagcacccacttatgagtgaaaacaggtgatatttgactttgtgtgcctggcttgtttcactcactaatctatctttttattagtgtatttagactgtttatatttaatgtaattacctgtatattaagtcttaggtcttccatagaatttttttgttatctttgtttcctctgttcttggtttctctgttttctttttcgtactttccttggggttactagcacctttttagaattccattttgatatgtctagtgatttagtgtgtatctctttgtgtaaattatttaatagctgctctacatattacattatattgatatctcagtctactagtgttgacattttaccagtttgactgaagcatagaaaccttacaattcttttaagtcattttaccctctctcacttacaattatcttaatgattcttctacatacttcaataaccatgttagacaatgttaaaatttttgcttggacaaagatactctcgaaaactcagcagaagaaatgtctagtgtatttatctatatttttactctttctgttgttctgtgttcctccctgatgttctaagacttatcatttcctttctatttcaagaatttcctttagccatttttttaatggtaggtctgctggtgacaaattcttagtagttcttcatctgagattgccctgatatcccttccatttttgaaggctgttttcactggataatagaattctcgattgacactgcttttctttcagcacttggaaaatactgtgtcacttccttctggtctctgtgatttcggaggagaaatatgccgtcatttaaaaattgcttttcctggcagggcgcggtggctcacgcctgtaatcccagcactttgggaggccgaggtgggcggatcatgagatcaagagattgagaccatcctggccaacgcagtgaaaccctgtctctactaaaaatacaaaaattagctgggcatggtggtgcgcgcctgtagtcccagctactctggaggctgagggaggagaatcgcttgaactcgggaggcagaggtggcagtgagccgagattgcaccactgcactccagcctgacaaaagagcgagactccatctcaaaaaaaaaaaaaattgcttttcccttataaatatggtagaatttctgtcttgctgtttttaatacttttttctttgcctttagttttcaggcgtttgattatgatatatatattgatatagattgcctcagacttgttaggagtttattcggtttaggctatgtcttttgcaatttttggaaaatcttgagccatcatatctttgaatatttttcagcttcatgcttttttctcttttttggggggactttgatgacatgatgttaaatctttcatcacagtcccacaggttactgaggctctgctaatttttttcagtctattttctctctgcagttaatattgagtaatttctattatttaatttcaagtctcatgactctcttctctgttatcgccactctttgaccctaccctgtgattttttttcctctttaacctttagcctgacctgacaatgtttttcttttttaataagtttcttttagtgctatttttttttttttgagacggagtcttgctctgtcgcccaggctggagagcagtggtactgagaggcaaagccagctgggcttctgggtcgggtggggacttggagaacttttctgtctagctaaaaaggattgtaaatgcaccaatcagcgctctgtgactagctaaaggtttgtaaacacaccaatcagcactctgtaaaaacgcaccaatcggcgctctgtgtctagctaatcaggtggggacctggagaacttttctgtctagctaaaggattgtaaatgcaccaatcagtgctctgtgtctagctaaaggtttgtaaacacaccaatcagcactctgtaaaaacacaccaatcagcactctgtgttagctaaaggtttgtaaaggcaccaatcagcactctgtaaaaatggaccaatcagcgctctgtaaaatggaccaatcagcaggatgtgggtggggccaaataagggaataaaagctggccacctgcgccagcgggggcaacccgctggggtactcttacatgctgtggaggctttgttcttttgctctttgcagtaaatcttgctgttgctcattttttgggtctgtactacctttatgagctgtaacactcagcgtgaaggtctgcagcttcactcctcaagtcagcaataccacgaaccccccggaggaacaaacaactcccaacgtgccacctttaagagctgtaacactcactgcgaaggtctgcgactttactcctgaagtcagtgagaccacgaacccaccagaaggaagaaactccaggtacctgtgaacatctgaaggaacaaacgccagacacaccagctttaagaactgcaacactcactgcgagggtcccagcttcattcttgaagtcagcgagaccaggaacccaccagaaggaaccaattccagacacagtacaatctcagcttactgcaacctctgcctcctgggttcaagcgattctcttgcctcagcttcccaagtggctaggattacaggcattcaccactgtgcccagctaattttttttttttttgtatttttagtagagatgggatttcaccatgttggccaggttgatcttgaactcctgacctcaggtgctccacccgccttggcctcccaaagtgccgggattatgggcatgggccactgtgcctgccctggaatctgattcttgcagagcagttgttgatttcactacacttgtcagaaatcttctaagctgggaagggggaggggaaaaaaaagaatcgtctacgcttctttacagcaaaggaaataacagggaagggacaacctacagaatgggaaaatatttgcgaacttgcatctgacaaaggattagttacctatatataaactgtataagaacctcaaataactcaatagtaaggaaacaatctgattaaaaatgggcaaatgggccgggtgtggtggctcaggcatgtaatcccagcactctgggaggctgaggcgggcggatcacgaggtcaggagatcgataccatcctagctaacacggtgaaaccccatctctactaaaaatacaaaaaattagccgggtgtggtggtggtcgcctgtagttgcagctactcgggaggctgaggcaggagaatggcgtgaaccaggaggcagaggttgcagtgagccgagacgtcccactgcactccagcctgggtgacagagcaagactccatctcaaaaacaaaacaaaacaaaaatagggcaaataatctgaaaaagattttcattttctcaaaagaagacatactaatggccatcaggtatataagtaaatgctcaacatcactaagcatcagagaaatgcaactgaaaccacattaataggtatcatctcacctcagttaaaatggctattatcaaaagacagaaaataacaaattttggggaggatgtggagaaaaggaaaccctcgtacactgttggtggaaatgaaaattcgtacaaccattgtggaaaacagtatggaggtttctcaaaaaattgaaactagaactaccatatgatctagcaatcccactgctgggtatacacccaaaagaaagcaaatcagtatattgaagagatatctgcactcccatgtttactgcaggactagtcacaatagccaagatatggaatcaatccaagtgtccatcaacagatgaatggataaaaaacatgctagataaggccgggcgcggtggctcacgcctgtaatcccagcactttgggaggccgaggcaggcgaatcatgaggtcaggagatcgagaccatcctggctaacacggtgaaaacctgtctctactaaaaatacaaaaaattagccgggcgtggtggcgggtgcctgtagtcccagctactcgggaggctgaggcaggagaatggcgtgaacccgggaggcggagcttgcagtgagccaagatcacgctactgcactccagcctgggtgacagagcgagactttgtctcaaaaaaaaaaaaatgtactacatatacacagtggaatactatttagtcataaaaagaatgaaatcccgtcggttgtagcaacatggatgaaaccagaggacattacgttaagtgaaataagctaggcacagaaagatacatatcccaccttctcactcctatgtgggagctaaaaacgttgatttcagggaggtggagagtagaatgatgactaccagaggctggcaagcaataggagggagggaaggatgaaaagtgttggttatgggtacaaagatagttagatagagggaatgatagtactgtacagtgataatagttaacaataatttattgtatatttcaaaatagctagaagagaagatttggaatgttcccagtacaaagaaataataaacgtttgaggtgatgaataccttcattaccctgatttgatcattgcacattgtatgcatgtatcaaagtatcacatgtaacacataaatatgtacaattactatgtatctataaaaataagaaacaaaggaaaacagttgctgtataaacaatactgggataactgtcaaaatttaaatattgaatatattatatatgggaaaattgtacggatatgaaattatctgaatttggtaataattgcactggggttatgtatgaaaacatctttgatcctatgaggttcatattgaattatttagagctgaagaatgtcaatctcttcaatttactctcaagtagtccagcaaaagaaaaaaagtgattgtgtaaatatatacacatatatactgtgtactcacacatacacatagatgtgtgtgtatgagagagaaaattagtgaaggaaggctcactaggttgttataatatttgtataacttttctttatgtttaacatttcttttctaatataaaatatttaattttgaatggttctccattaaggcaacaaattgccagaggatagggagtgcctgggaaaggtgacagatgccaagtcacattctgtttgagttgcaccctgaaacccatgccaggaaaatgaaatgtggagttctgtttgactgcttccactcaacagctccctctcctcaggagaatgcatgttcccaaaacaatactgagagggaggttcaatgtttaattcatcttaaaaattattttttatatttggaagcatgcaaaacacagtaaaatttacaataaaaagcatcctgacaaaatgcagagaagaaaataggcaggagaaagttgtggaaagggactgagcagaggtcacatgaaaccacgcgtttgtagagaatgtgttttgtaaaggagtactactttttcagacatcggttctgttttctttttttaaaaaaaatcacttgcttttttttttttgagacagactcttgctctgtcgccagactggagagcagtggagcgatctcggttcactgcaacctccgcctcccaggttcaagcgattctcctgcctcagcctcccgagtagctggttctacaggtgcacacaccaccatatctagctaatttttgtatttttagtagagacgaggtttcactatgttggccaggatggtctcgatctcttgacctcacgatccacctgcctcggcctcccaaagtgctgggattacaggcgtgagccatcatgcccggccacatcacttccccttatcccatgcaacaaaccctgtcctttccccaggacaaaaattcttgtcagtttctataaattgttcctcacgttgggcaaatagcttttttctaaatagctttccattttgaggggaactagattatcgcattaaagttagccaacatcttcctctgtgaccaggtttttagacagaattttaaagtgaggtaggtaggtgtggccttttgcctcatacttctttattttatttttttttaaagggaaaaagagtaagaaattcagatgatgagaattccagggacactgaaagtatcccaaattggcagaaatactgtgtaaactacagaaaatgcttctcagggcccacactttcttttgaaacaaatattacacaatttcattataaactctttcgcgcatgattttgagaaatctttccaccaatgctttcaaaaagcacaatctgtcttaataaaaaactactacctggtactattattttacattttaaaattgtgaaacagtattaagcctacagaaaagttgcaagtatagtccaaagaacttccttcttgaactatttgagagtcagttttccacgtgacattgcatttctcccaaatccccgcctgtgaagttactaccacctaatcctcagaccccattcaagcttcacccgttgtgccaatattgtcctttacagccaaaggatccagttggggatctcctgttcatctatgacctctttggtctctgccagtctggagccgttcctcaaagctgtctttgattttcatgaatcgtttgaagatggcagaccagctgatctgcagaatgcccctcgatttgggttggccaggacccgcgtcctggcgaaggggttccggttactgaccttcgatgggaacagcacagaagtgataccgcgctggctccactctgtcctctggtggcacgcaattccagtgttccccgcactgatgactttcttgtaccgaatatttacattaattacattctttatagttataatgtaatattacatatgagaccatggggttcatctgattaggtctgcccaatttagcctgccctgcttgctttgggtcacttgcttttgttattttttttctgtgaagctgaaggccgcgccactgagcgctgtaacttaaccttgccggcttccttacagataacatgtatgtcactactgtcatgatcgttcaaattgtttttcaggaacttggggcagctcctgcctagttcaaaccagttgagaccgtgagctttcaagtaggcttgtgcaaacaaaagaagtggccttttgacatcagaggccccaagcgacaccctcagatcacgctaaggctgtcattttttgaacatgtgccctgtgaagtgccacgaaccctgactatgcttgcagtggtcaccgactgcctcattttcccccactgccaatcacctttgcccataccttacaccaccctgcttctctcaccggtaaatatccctaagacttatctttggggaggaagatttgagagctgttctcctgcctcctcactgggctgccttgcgaataaatcttttctcttttacaaaacctgtcacagtgatggatttatggcatgcgggcagaatgaacctgtatcacatgtatgtaataatggtaattaataatatgtattttgtgggagagtactttgaaactgtgtaaatatcctgtttctcatcaaacttttaatttattcagtatctacttttattggtatgaagtgtggcttcccattttatttaacaggtcgaaatgttactatcatcatttcaggccaggcgcggtggctcatgcctgtaatcccagcactttgggaggccgaggcaggaggatcacaaggtcaggagatcgagaccatcctggctaacacggtgaaaccccgtctctactaaaaatacaaaaaattagctgggcgtggtggcgggtgcctgtagtcccagctactcgggaggctgaggcaggagaatggtgtgaacccaggaggcggagcttgcagtgagccaagatagtgccactgcactccagcctgggcaacagagcgagactccgtctcaaaaacaaaaacaaaacaaaacaaatcatcatttcttttaatgctcaagttgttccaaatttggccagtgggagcatggtcttggagctggcttctgcatcgttttgaaacatccccatcattcttggagcattcccttacttgctggcagaacaagatgtcctaggctcatcttgtactttctctgccttaaccccagaaacagccatttctccaagcaacattggttccttttactagagaatgggaattagaaaccaagatctgggtgcaagatgtactgttggggtgtcactgttcccaggccccctacagaccaagtcaggggatgtatgcatgtatacacatgtttacctccacatgtacttctttttttttttttttttttttttttttttggataggggatctcgctgtgtcgccaggctggagtgcaatgatgcaatcttggctcactgcaacctctgcctcccgggttcaaatgattatcctgcctcagccttccgagtagctgggactacaggcgtgtgccaccacacccagctaattttttgtatttttagtaaagacggggtttcaccgtgttagccacggtggtctcaatctcctgacctcgtgatccacccgccttgtacttctttatctatctgtgtatacatactgaaaatcatggatccacactgctaagtccaattccagttcaacactagtgggctcattctccctttccttatttgtaactcctatctctgagagtttcaactctggctccaattatccttaatacattcagttacctggtcatccccctgtatgtaactaatctgtcatctccaccagcaccctgccctccctggacaccacacactgggccactccaataccgggatgtgccacatcttcaaattgcttgggctgtgaccctgggccgggctgcaccagcacccatttgtgtctgacattgtgctgggcagccccactgtgctgccaccctcctcaacctgctccagtccagcaccctgcttgggccactgtggaacatactacacaaacgcccactttgcttgacacacctgatggccttagcacggaattgttcaggagggtaccatgaaggacggaaggaagagccccatagaagtgtaatggatccttacattatatagtccagcctccaacccaaggttcacccttgtccattctgcactggggcagcaacaccaattactttgctccaccgacctaccaagattcagatagaatcattggattgactattaatagttttctgctgatagttgctgcaagcaactgcagcttgctccttagccttctactgacttgctgtatttagcatattttatcaaattttgcaacctcctctcctcattgccctcacttgagtttttgaggttcctgtttgtggacaagacttaccagatgtatgaagctggttatataactgattggtcagcaaatataatgaggacggaccctgcgcccaccaccgtgtacctgtgtaaacaccatactgcgcaaagtccaccagccttccagggagaacatgctgcactgtgggcgacactgcctccgttccagcagcaatgtaagcggagtctgggctgacgatggacgtgtggatagcctgtatgtgtatatctgtgctcatgcttctaacacacatccaccctattatggacacgtttatacatcttcatgccatggtattttgtaccttactgcagaccctaccaacgcttcagtgaggttctggcagctttgggtttttggaggctatttgtctgttgctgcggggacggctttcagaaagaatgatcgctttgggggaattgtaccctgctttcctgcgcaaattccagcggctggagtttgaggcccctagcagataacccttctgcccctacccccatgagtctacatacaagaaatacatctctaaagaggtaataagcctttccggtgtgcatgttacagatctcttaaccttatatatacacagatggtccatcacttaccgtggtttcacttacgatgtttcgacttcatgatgggttcactgggacttgaccccattttttttttttttttttagacggagtcttgctcttgtcgatctctgctcactgcaacctccgcttcttgggttcaagttattctcctgcctcagcctcttaagtagctgggattaagcgccaccacgccgagctaatttttgtacttttagtagagatggggtttcactatgttggtcaggctggtctcgaactcctgacctcaggtgatccgcctgcctcagcatcccaaagtgctgggattacaggtgtgagccaccgcgccccctgaccccttcttaagtggagaaatatctgtatctgcatgcccacaggggagctcctaattacaccatgtgccgcatccaagccacaggccggtgatgtgaagacacccgatccaagaaatacaatagcattaagaaagaaaaaatgctgccatggatactaccaaacgccaaatgactctaacacgtaggctaattgcaaggaccttaaaatcgcaaataaaaaggcgcctgtaggtcgggcgcggtggcccacacctgtaatcccagcactttaggaggcgggcggatcacctgagaccagcctggccagcatggcggaaccccatcgctactaaaatacaaaaattagccaggagtggtggcgcatgcctgtaatcccagctactccggagcctgaggcaggagaatcgcttgaacccaggaggcggagtttgcagtgaaccgagacagcgcaaccgcactccagcctggacgacagaatgagactccgtctcaaaaaaaaaaaaaaaaaaaaaaagcgagggctggaagtctggagcaggtgcgcggctgcaacggcagccgcgggaagctcgggccggcagggtttccccgcacgctggcgcccagctcccggcgcggaggccgctgtaagtttcgctttccattcagtggaaaacgaaagctgggcggggtgccacgagcgcggggccagaccaaggcgggcccggagcggaacttcggtcccagctcggtccccggctcagtcccgacgtggaactcagcagcggaggctggacgcttgcatggcgcttgaggcaagttcggggctcattttggaagttttctttctagcacagacatccaactctgctcctatgccagtcagataattaaggaattaagtaataattgtgctctgcaaattatgatagtgatctgtatttactacgtgcatatattttgggccagtgaatttttttctaagctaatatagttatttggacttttgacatgactttgtgtttaattaaaacaaaaaaagaaattgcagaagtgttgtaagcttgtaaaaaaattcaaacaatgcagacaaatgtgtctcgcagtcttccactcagtatcatttttgtttgtaccttatcagaaatgtttctatgtacaagtctttaaaatcatttcgaacttgctttgtccactgagtatattatggacatcttttcatggcaggacatatagatgtgttaatggcattaaaaataaaacaaaaaactgattcggccgggtacggtggctcacgcctgtaatcccagcactttgggagatcgaggagggaggatcacctgaggtcaggagttacagacatggagaaaccccgtctctactaaaaatacaaaattagcctggcgtggtggcgcatgcctgtaatcccagctactcgggaggctgaggcaggagaatcgcttgaacccgggagcggaggttgcggtgagccgagatcgcaccgttgcactccagcctgggcgacagagcgaaactgtctcaaacaaacaaacaaaaaaacctgatacatggtatgggaagtacattgtttaaacaatgcatggagatttaggttgtttccagtttttactggcacagatacggcaatgaatataattttatgtatacattcatacaaatatatcggtggaaaattcctagaagtggaatggctgggtcagtgggcattcatattgagaaattggaaggatgttgtcaaactctgcaaatcagagtattttagtcttaacctctcttcttcacacccttttccttggaagaaagctaaatttagacttttaaacacaaaactccattttgagacccctgaaaatctgggttcaaagtgtttgaaaattaaagcagaggctttaatttgtacttatttaggtataatttgtactttaaagttgttccagaaaacaaggcaaatactgaaaagcatttcatctgaagtttctttctggtattgaacagagttggatggagagtgaatgcaggttaccgatgtgttcgcaggaacaaaacgggagggagagtaacacaggtgcacggcttcatattgatttatcaaagaacttgcttttggactgttaaaaaatgtgttgcacagttctgacacttttacacaatgatgagcttacaaaggggaaaatgcttaacataaacatagtttcaaagaaggtaagtcctagtttttccacgagctgtttttttttttgagagagagtagtcccaaaatttccctattatgtggtttttcatccaaagtgttgtaatccgtgtgttctaacccgcatattacgattactcaagaaatgcaaaataggccgggcgcggtggctcacgcctgtaatcccagcaatttgggaggccgaggcaggtggatcacgaggtcaggagatcaagaccatcctagctaacacggtgcaaacccatctactaaaaataaaaaatattagctgggcgtggcggcaggcgcctgtagtcccaactactcgggaggctgaggcaggagaatggcgtgaacctgggaggcggagcttgcagtgagccaagatccggccactgcactccagcctgggcgacagagggagactccgtctcaaaaataaaaataaaaataaaaaaagaaaaaagaaatgcaaaataatgtgaacacgtcatcgagactgcggtctacaattgtggttgccatgatggggtgggtcggaagacaccgaggctgcttgaatcatgttcctggcaggttaattttgttccttttagggcatctaaatgttggagttggctttcctggcagagagtccagttgtgagtggagtattgggtggaggccccaccctccccaggttttctgcagcttgttcctggctcttctggggcttctctgaggaccccgattggtcctggggcttctttagtggtgggcctgggccagttccttccgttgctcacctctccccgaagcttaaggataacatttcgggaagatcatgagagaacgtgaaccaaaaaaaaaaaaaaaaattcaggtagggtgggagctaagttagtttagtatttgggatttttgttttgttttgtttgagacagagtctcaaacaaagaccccgcgcctggcctgggggtctttttttgagtcagcagttgagtttgaaaatccccttccttggaatccgcccaggctgttttctctggtggatgcttattgcccctgctaacttcagctgcggtctctctgctcgccttgccctccccatcctccttagaccttttaagcttcactttcctttccttgctgccccgcctccctgtctccccagtgtgatctaccctgaaaggctgctgtattttgtttccctttgggaccgagcctgctcaaatgatctgctccatgaggttttactgctatatcctactgaagtatctgggaggtcttggcggagaagaggacaacatcttggaaaatgcagcctggaacctctctgctctctttcatcagctttccctcaatgatgagctcaaaatcctctttcttgctgatggaattgtctgctgtcatcatttcagttgagtcctcctaggctgggccttgtaagaagaacaactgtttataactattgaaagtcaatatttactaagaaaaagaggttgttgttatctgagccatccaacatgaatttaagaatatattccaggctgggcgcggtggctcatgcctgtaatcccagcactttgggaggccgagatgggtggatcacctgaggtcaggagttcaagaccagcctggccaacatggtgaaaccccgtctctactaaaaatacaaaaattagccatgcgtggtggcacatgcctgtagttccaactatttgggacactaaggcaggggaagtgcttgaactcgggaggcagaggttgcagtgagctgagattgtaccactgcactccagcctgggtaaaaagagtgaaattccatctcaaaaaaaaaaaaggagacagggtcttgccctgttgcccaggctggagtgccgtggcacgatcataactcactgtggcctcaaattcctgggctcaactgattctcctgcctcagtctcccaagtagctgggaccacaagtacatgccaccatgctaggctaattttatttttatttttagaaaataaaatattttttattttatttaggcaacatgctatgttgcctagactggtcttgaactcctggcttcaagctatcctcttgcctcagccaaccaaagtgctgggattgcaggtgtgaactgccatgcctggctttctattctctatttctaggagataagctttttgagctttcacatatgagtgtgaacatgtggtatttatctttctgtgcctaggttattccacttaacgtaatgtactccaggctcatccatgttgatgggaattacaggatttcattctcttgtaatggctgaataacatcccattttgtgtatatagtccacatgttctttatccattcctcttttgatagacacttaggttgattccgtatctcgggtattatgagcagtgctgcagtaaacatgagagtgcaaatatctcttcaacatactgattccctttcctttggatatatattcagcagtggcattactagatcatgtggtatatctatttttaggtttttaaggaatctccatactgttttccataatggctctactaatttacattcccaccaatgatttggttgagtttattcctcactctgagcagcatgttagctggacttaaaccccgtccagcttgtctacatctggcccatcacttgccagtgggaaaggcacttacttctttgtatctcagttttctcatctgtcaaatggaaatataacagtaattaattcacatggctgtgtaaggataaataagacagtacatataaaaggctttcaccttttataagaaatagtgcttcgatgttacccattattattattttatttcatcttatttatttatttagatacaaggtctcatttgttgcccaggctggagtgtagtggcacaatcatagttcagtgcagcctcaaactcctggcctcaagtgatcctcctccttcacccttctcagtatttggggccacaggcgtgcaccactatgaccatctaaatttttttttagagatggggtctcagtatgttgcccgggctagtcttgaactcctgggctcaagtgatcctcccacctcagcctcccaaactgctgggattacaggcctgagccaccatgccaggcctcatctctatatctttagggttagtcactggcaccttaatttgttcatttggtgatgtcatgtttctctgattgaccttgatccttatggctgtgtgtcaatgtctgtgcattgacataggtacctaagccagtcttcattgcctggctttgtttgggctcgtctttcatcaggaaacccataggagattagggagaggctgattggtcaggaccctaagcccatgactgcttcagctgttgtagtgctggggggtgctctaagcccagcatcactgtggttggaattctttggccactgaggctgacacagccctgggttatgcctgaaggccatagctgccgagactggcacagcactggggcacgcccaagacccacagctgtgatggcgtgcttgctgctgctgaagttattcagggcccagggccactgtagttgtcaggtagtgatgtgggccagatcgccagtccctgttactggggctgtgggttctcatctggcactagggtggggtgagatctgcctgtgggtactggtctagtatcagggtgatgaggctctgcccagtactgggttttactgtagtgagcctagtcctggtgacaggtgacagcgtgctggcagccatcacagccctcgctcgctctcggtgcctcctcggccttggcgcccactctggccacgcttgaggagcccttcagcccaccgctgcactgtgggagccccttcctgggctggccgaggctggagtgggctcccttagcttgcggggaggtgtggagggagaggcaggggcgggaactggggctgcacgcggtgcttgtgggccagcgcgagttccgagtgggcgtgggctcggcgggcccgcactcggagcggccagccggccggcctgcaagccccaggcagtaaggggcttagcacttgggccagcagctgctgtgctcgatttctcgccgggccttagctgcctcctggcagggcagggctcgggacctgtagcccgccatgcctgagcctccccaccccgcagccatgggctcctgtgcggaccaagcctccccgaccagcgccgctcccggctccacgccgccgagtcccaccgaccacccaagggctgaggagtgcgggcgcacggcgcgggactggcaggcagctccacctgcggcccaggtgtgggatccactgggtgaagccagctgggctcctgagtctggtggggacttggagaatctttatgtctagctaagggattgtaaatataccaatcggcactctgtatctagctcaaggtttgtaaacacaccaatcagcaccctgtgtctagctcagggtttgtgaatgcaccagtcgaccctctgaatctagctactctggtggggacttggagaacctttgtgtccacactctgtatctagctaatctagtggggacgtggagacgttttgtgtctagctcagggattgtaaacacacccatcagcaccctgtcaaaacggaccaatcagctctctgtaaaacagaccaattggctgtctataaaatggaccaatcagcaggatgtgggtggggccagataagagaataaaagcaggctgcccgagccagcagtggcaacctggtcaggtttccttccatgctgtggaagctttgttgtttcattctttgcagtaagtcttgctactgctcactctttgggtccacactgcctttatgaactgtaacactcaccgcgaaggtctgtagcttcactcctgaagccagcaagaccacaaaccaaccaggagggactaacaactccagacgcgctgccttaagagctgtaacactcaccgtgaaggtccgcagcttcgctcctgaagccagcgacaccacgaacccaccgggaggaacggacatctccagatgcgccgtattaggagctgtaacactcaccgcgaaggtctgcagcttcactcctgagctagcgagaccacaaacccaccagaaggaagaaactccgaacacatccgaacatcagaaggaataaactgcggacatgccccctttaagaactgtaacactcactgcgagggtccacggcttcattcttgaagtcagtgagaccaagcacccaccaattccggacacactgggttccaaggcgaagtactccacttacctcttcttcccccaagcaaacagtgtctctcttcacacagctgtgctgggttgggggagggtacacgggtacccctatggccactgaggctgagacaatattgagtcacacccccagaattcatgccatgagaccagcccagcaccaggatgtgcctaaggccgacaggtagctacagcctgcctgcagctaaggtttatctgactgctgcagctggccggcagtgttgcgggccagaacacgaggctgttctgccagggccgcaggtccccttgggtgttgggcgggttgagaggcttcccctgtatgccagcctggcatcaggggctgagagttcttgcttagtgctggctttttactgaagtgggcctggtcctgggttgtaaagcaaagtcctatgcgcgcttccctgtcctttcccaagagggcgctcccggttaggatttggcagtcggctctgaggatgaatggaaacgcctgggacccaggttaggggatgtgtagcctagctgtcatttccagcctagagctctatgagtcagtctccccaaacatttatctccctctaagacctgctctttggcatcagaacggattacatgaatacacattcctccttctctaattcttgcctacccgcattgtattttcacagagattccatcgtgcctggctcacataagcgcttcctggaagtgaagtcgtgctgtcctgaacgcgggccaggcagctgcggcctgggggttttggagtgatcacgaatgagcaaggcgtttgggctcctgaggcaaatctgtcagtccatcctggctgagtcctcgcagtccccggcagatcttgaagaaaagaaggaagaagacagcaacatgaagagagagcagcccagagagcgtcccagggcctgggactaccctcatggtcattagacccctcccgttttcctcttcttgactgcatgtaaatgttcggctcaccccctccgctctgaagccgcagagctttgtattcgacggctcatgctttcctgtgcctgagtttctgcatcttttagatggggatacagcctgggccatagtgaaaccctatctgtaaaaaacaaaaacaaggtcgggcgcggtggctcatgcctgtaatcccagcagtttgggaggccgtggcaagtggatcatgaggtcgggagtttaagaccagcctggccaaaatggtgaaaccccgtctctactaaaaatacaaaaattagctgggcgcagtggcaggtgcctgtaatcccagctacttaggtggctgaggcaggagaattgcttgaacctgggcggcagaggttgcagtgagctgagatcacgccactgcactccagcctgggtgacagagtgagactctgtctcaaacaaacaaacaaacaaatgggggtaataatagtaccaagcacatagggttgttgggaggattaaatggggtcatctgtggaaactgctttaagccagtgctgggattctagaggcacttagcattagttcccatctttactgctacctttgtatgggtctgtctggaagcaatgtgctcctgatagtctgggagtagaaatctgtgctcacctgtgaccccaggttgttactttcttactgtcctatcttgtaagccaaagccctttccccaagaatcctgagattagtggtacttcccttgtggggtctgctgagcctaaggttgggttggaaaagaggaggttggttgctaggggtcagacaaatgttatcttttgtttttctcgtattcttataagttccttctgcctttcagcctctcagggtgacactggattaggtgaatcttccccaaagtaaccttctgatttatttcctgcctccctgtagtgggaactgggcagagacctctccgctggactccaacatagacatactggggagtccctcttatccctgagccccacagatgcacatttggacttagctccgtggagaacgatttgaatgaaaggaagccatattctcagttatgctttctctaatgtttttttttctctcccaacaattgctcatactactcatttggcagtgagtaatatatacttttggtgacatctcacttttcctaatggactatattaaaacttttcttgttatcgaactttttgtgtgtgtgtgtgtgagatggagttttgctttgtcgcctaggctggagtgcagtggcacgatcttggctcactgcaacatctgcctgccaggttcaagcagttctccttcctcagcctcccgagtagctgggattacaggcatgcaccaccacacccggctaatttttgtatttttagtaaatatgaggttttaccatgtaggccaggctggtattgaactcctgacctcaggtggtcttcccgcctcggcctcccaaagtgctgggattacaggtgtgagccactgtgcttggcccttgtgatagagctttttaaagattcatgtttgatatcttctctccgatttgtttgcaagctgaatgaacacttcgtacttgagagactttacaggacttcatgtccttagtagctttaagaaaaacattagatttttgtcaactttttttttttttttgagacagaattccactcttgttgcccaggctggagtgcagtggcatgatcttggctcactgcaacctctgcctcctgggttcaagcaattctcctgcctcagcctcccaaggagctgggactacaggcacctgtcatgacacctggctgatttttggatttttttttttttttttttttgagatggagtctcgctctgttgcccaggctggagtgcagtggcgtgatcttggctcactgcaagctccgcctcctgggttcacaccattctcctgcctcagcctcctgagtagctgggactacaggcgcccaccaccacgcccggctaattttttttgcatttttagtagagacggggtttcaccgtgttagccaggatggtctcgatctcctgacctcgtgatctgcccgcctcggcctcccaaagtactgggattacaggcgtgagccaccgcacccggctgatttttggattttttttgtagagacatggttttaccatgttggccaggctggtctcgaactcccgacctcaggtgatccgcccacctcggcctcccaaagtactggaattacaggcatgagccaccatgcccagccttgtcaacttctttaccctaggccttgccctcagcatttttttctcttccccttataggcctggttggtttacacaacattggacagacctgctgccttaactccttgattcaggtgttcgtaatgaatgtggacttcaccaggatattgaagaggtaagactgttcttcaggctgatgagcatttgtattatttctttttcctttttttgagatggagtcttgctctgttgcccaggctggagtgcagtggcatgatcttggctcactgcaagttctgcctcccgggttcaagcgattctcctgcttcagtctcccgagtagctgggactagcccgccaccatgcctggctaattttttttgtatttttagtagagacggggtttcaccgtgttagccaggaaggtctcgatctcctgacctcgtgatccacccacctcagcttcccaaagtgctggaattataggcgtaagccactgcacctggcctgtattatttcatttttaatatattcagttattcacagtgacttggactttttgagatcttctctcaaaagctggcagaggaaagattggcttctgcatattctggcctacacattatttctaaaacttcttaggttggtctggggtgcgacccaagtattggtactttttttttttttttttttttgagatgaagcctcactctgtccccaggctggagtgcgacggtgcaatctcggctcactggaacctccgcctcccgggttcaagggattctcctgcctcagcctctcaagtagctgggattacaggcgcccgccaccacacctggctaatttttgtatgtttagtagatatgagttttcaccatgttggccaggctggtctcaatttcctgacctcaggtgatttgcccacctcagcttcccaaagttctgggattacaggcatgagccactgcgcccggccaggtattggtacttttttaaagccctctttgggtgattttaaatgcggccaggattgacagccactgacttggttaaaagacagagttgggactagaccaaagtcggagaaggagtaagtcagtggggagtacacacccctccttccaccaacactcacacaatgcactctctccctctgtctctctctatcactccttttctgccctgtgctctctcctttttcccatccgaaaaatgcctgtgattaaatgaatcattgccaaaccacacggacagcctttcatgttgcctttcttcccaggacctaacccagcatgtgcctctgcagtctggagagctttaggctggacattttgctgcttgcccgagatgtggagccaggacctcgtgcatctgccgtctgctctagcacgattgctgggcagggtgcagaggggccaaggcagcagtcatgctgatccccctctctagagggtcccctgtagagcagattcactcacatggtgcttctcaaccttgaccacacattgaaataatctgaggaactgaaaaattctgataactgcccgcgccccgccccccggacccagaattctggtttaatttgtatgggagtggcctggatatgaagatttaaaatttctcccaggtgattccagtgtgcacctagctttgagaactacatgtaaggaggtttctggctgttcttgtgtggcaggatcacggtgcccaggggagctgacgagcagaggagaagcgtccctttccagatgcttctgctgctggagaagatgcaggacagccggcagaaagcagtgcggcccctggagctggcctactgcctgcagaagtgcaacgtgccctgtaagataccctcccactgggctcctggctgctgatccaaaggggatgggaagcttagagagtgaagagaggaactaacgggcagtgaagcaacaagaagcaagttaggtagcctggacccctcagattatagagacatttgtgtaagaggcacacatctttggaggtgcagaattgatattatttatggacattttacttccatacctaacctttctctgcctctcagtagagtaagtgaaggcatctcctccaagcttattccaccacagtcagggaactgcaggaaaacagaataaaggaataaaaaagagaaaacatgttctacaaaataattcacaaataggttaggtttttttttttttttttagatagctatattgggttgtgcatcacatactgtaaaattcatccatttaaaaacatacaattcaaaggtttgtagtgtattcacagagttgtgcctccatcatcacaatctaatttcataacattttcatcacccccagaagaaatcctacacttacgggttttcccttgtgtataatacattgcttttctcttgctgctttcagaattctttgtctttaacttttgaaattgattatgatgtgtcttgatgtgggttgctttagatcagtcttattggtgtcctttgggcttcctggatgtggatttgtatttccttccctgggttgggaagttttcagtcattataggtatgcgttgcttaccaacagggatacgttctgaaaatgcatcagaaggtgaatttgtcattgtgtggacatcatggagtgcacttacacaaatttagatgggacagcctactacacagctaggctgcatgctatggccactgtgctcatgtggtctgccattgactgaaatgttgatctgcaactcgtgactgttatttctttggataagctttccatctcttctcactctcctccttctgggactctgataatgcctattttggtcggcttgatgtcccctaactctcttaagatatcttcactctttttcattctttttcatttttgctcctctgaatgatttccagtgacctatcttctagtttgctaatcctttcttctgcttgatttagtctgttgagcttctcttttgagctcttattgcagttattgtattcttcagctctgttatttcttttgaacttttttctgtctctttgctgaaattcttactttgttcatgcattgctgtcctagacatggtaagcatcttcatgatcattattctgaattgtctgtaaggtaagtcacttatcttcatttcaccaggggcattttctggagatttatcttgttcttttgcttggaacatatttctctgtttcttcattgttcttgattctctgttattttctgtactttagttaagaaaaatacctctcccaggctgggcgcggtggctcacgcctgtaatcccagcactttgggaggccgaggtgggcagatcatgaggtcaggcgatggagaccatcctggctaacacggtgaaaccctgtctctactaaaaatacaaaaaattagctgggcgtggtggcgggcgcctgtagtcccagctactcgggaggctgaggaaggagaatggcgtgaacccgggaggcggagcttgcagtgagccgagattgcgccactgcactccagcctgggccacagagcaagactctgtctcagaaaaaaagaaaaaaaaaaagaaaaaagaaaaaaagaaaaatacctctcccagtcttgtcccacgggccttgtataagagacgaacttaccaattagccctgccggacactcggagcacctgttgaccctttgtgttgtccagactgtcatctatgttgttagcggccctcaggagattagaatgtgtcaagtcctgtcagtgccctagacaggggagatagaaaccagccccttgaggtgcaggtggagacgttggggcattaaatgtgtgttccagtttattctatcctcagggaaaagctgggagcatgagttaatccgccacttgctctgcaaaacgctggacagaggatctgtggcaagtgcctgcactcatattgaaactgcacactccttcacgcattgttttactctttgtcacccccaggggcctagcgaatgctggctgctctctgcttagagacggacaggttagttggaagcttgacgctatctgttgagcaaaccagtgggagcagctgtggaggtgctcacctgcctgttcagggtctcagaggagcactggtttcctgctctgtcagctcccagatgcatagaaaccccagggcagcagctgcactgtgcagacaaactccttctagggagaaagtaggagccgggcctttttgcctgttcacgctgcactgggcctggggggatgttctttggtctctgtgcccctgtgggacttacaaatacagagccttgtcagctcccaaagctcggtggtcgaggagctagaccttcatttgagaggggtaaatgtgtactcaatgtgtgaagttagagacctgattttaccatacagcagggggtgggagaaggcatgggacttgcccacaggcctgtccagactcctggaaatctattgtttacctgcctcattggctccaggtgcaggccagttattaatagaagcccatccctcgggcaacagctaggagagcccgcagacatatccttccagggagaaactggaagcctggcatttctgcctgtttgctctgtgctgagcacagctgctggaagtgctcacgtgcccgtttaaaactgcctctttgccctctgtggtcgcagaggattcataactgctgacccatgtctgctcccagagctaggtgacccagcagccaagcccttgagtgggaactgcaaaagctggggctgcctatgtgtggtccaaaccctcccctctccaggagaaagctgggagtagggattccttcctcacagtaaggtactgtgtctggggtggggcttgtggtgcgagtgtgtctcagcttttccaaccggttgcgatgtgggtgttctccccattgccccctgtgcaggcctctctcagctggtttctgggtttctttcagagggagttgatctgtgtgtagatgagagttttaccgtgtgtccatgggagaaggggagcaccaggagcctccttctctaccatctcgcttgtgtcaccctctgtgattctttttatacatagttgaatttgattcactaatattttgttgaggaattttgcatttatgttcacgggagatactggtttttaggtttttttcttacaatgtctgtctggttttggtgttaggataatgctggcctcagagaatgagttaggaagtgttctctctgcttttgtcctctggaagaggttgtagggaattggtataatttttcccataaatgtttggtagaacccatcgttcactagtgaacccatctgggtgtaactgagtactcccattttctaagagatagttatattagttttcttattactttcttttcacttctcctcttcccatccctcacccctcaccgcggccgtgtttcctgtttcctgttagccctttagaaatgcaaatatcacctttcgcctacccctctccagacattccctgctgggcaaaaggaagaatctgtaaatggaggtaggctgatggaggtttgattgagaacgggcaagttcttccagctgatctttcctgagacttggcagtagatttgcagcccaaagcatacccaccagggaactctccctgccagggggtggcttcgaaacttccaccctctaggggtttgtctttcacccactaggaaggcatggagaaagcatgcccactcggccacttttctgcccggaaaggcgccaactcagctgctgggaacttgataactgcccggtagaaaaccgccattgctcactccccccacccccacaacacaccttatgaaaatgcccctctctcctccaaaggagaaatggcacattaaaaggcaggatgtgtcttgctccttgccccaggctggcttcagaataaattcacatttgtgtataaaaccttttgtatcacatttttttttgtatcagagttagttgagctctacacgcagtgagcagctcctcagcttttcgctgcataggtactgtgttcagctttccttccgtcctcagtctggagaacctcaatcaacctagctccaggtttatggattctttcttttgccagctctaatctgctattgacctcctctagtacatttttcatttcagttatggttctcctcaactcaagatttctgcttggttcttcttttatagttttttctttattgatactttttatttggtgaggcagcattttcacactttcttttacatcttttgacatggttttctttagttctttgaacatattataacggctaaagtctttgtttagtaacgccaacatctagggcttctcagtgaaaggttctacgattgctgttttcctgggtggccatgcttttctgtttcattgtaggtcttgtctcttttgttggaaaatgaacattttagataatgtaaggtggcaacactggacatcagagatccccacagcagggtttgttgttgttgctgttttatcgtttctgggcagttcatgattctgtattcgccttcattgctttcttgcatgtggccttgttgtcagccagaggggagggatctgagccctctcaggtcttacttgggcatgcgcctggccttctagatcctcaggaatgtatcagtgcttttcaaagtccctgtggacatctcattccccaggctgagtgcagtggtgacatcacagctcactgtagcctcaacatcctgggctccagtgatcctcctgcttcagcctcccaagtagctctgactacaggcgtgcaccgctactctcaagtacttttttaaattttttatcgagacggagtcttgctatgttgcccaggctggtctcaaactcctgagttcaagcgatcctcccaccttggcctcccgaagtgttaagattataggcatgagccactacatctggcactggagcttaagttttaagaggcgttctcaaaaatcaataccaaacttactgttcatttattgatcacttcttctgtcgtgccaacttagccttgcagtggggtggagggctaggaagagacaaagtgatgagtgttcatgtgtgtctaagtaccagggcatgagaagcgactctgaagacctcactaattggctgttccttttctctgtggccagtgtttgtccaacatgatgctgcccaactgtacctcaaactctggaacctgattaaggaccagatcactgatgtgcacttggtaagaacctagaaccagagcactcggaagcttaagatgctgctcatttcactcattcagctgttgttcccgtagtgtgtagaggaataaaagagttaatcccctgtaatcccagcactttgggaggctgaggcaggcggatcacgaggtcaggagatcgagaccatcctggctaacacagtgaaaccctgtctctactaaaaataccaaaaaattagctgggcgtggtggcgggagcctgtagtcccagctactcgggaggctgaggcgggagaatggcgtgaacccgggaagcggagcttgcagtgagccgagatcgcgccactgcactccagcctgggtgacagagcgagactctgtctcaaaaaaaaaaaaaaaaaaaagaaaaaagagttaatccacataaaacacttatcacagtttcataatattgttactggtattattttgcacctttgtgaggagcttctgtctcttggctccaccttctggcagttggcctgacctggcttatggtggtgttcccatctcacctctccgctctccctcttgcaggtggagagactgcaggccctgtatacgatccgggtgaaggactccttgatttgcgttgactgtgccatggagagtagcagaaacagcagcatgctcaccctcccactttctctttttgatgtggactcaaagcccctgaagacactggtaaggggattctcttggtatttgctgcccctgtatgtgttagtccattttctgttgttataactcaatatctgagactaggtaatttatttcttacagttctggaggctgggaagtcaaggttgaggggctgcacctggtgagggcctgcttgctggtgggaactctcagagtcctgaggcgaggcagtgcagggcatcacatggcgagggggctgagcatgctaatgtgccagctcaaatctctcttcctcttcgtatgaagccaccagtcccactcccaggataaccgattaacccattaatccatgagtggattaattcatttatgagggctgtgccctcatgatgcaataacctcccccccc

SEQ ID NO: 8771 - DNA, 233 bp, Homo sapiens
tccttattagcgaattcgtatacagcatcctcattagcgatgccatatacagcgtcctcattagcgatgttgtatacagcgtcctcattagtgatgtcgtatagagcgtcctcattagcgatgtcatatacaatgtcctcattagcgatgtcatatacagcaacctcattcgctatgtcttgtaaagcatcctcattagcgatgtcatatacaacgtcctcattagcgatgtc

SEQ ID NO: 8772 - DNA, 603 bp, Homo sapiens
tttacatgaagatggagtgctaatggaaatgcccaaaaccttcagagattgacacgctgtcattttccatttccgttcctggatctacggagtcttctaagagattttgcaatgaggagaagcattgttttcaaactatataactgagccttatttataattagggatattatcaaaatatgtaaccatgaggcccctcaggtcctgatcagtcagaatggatgctttcaccagcagacccggccatgtggctgctcggtcctgggtgctcgctgctgtgcgagacattagccctttagttatgagcctgtgggaacttcaggggttcccagtggggagagcagtggcagtgggaggcatctgggggccaaaggtcagtggcagggggtatttcagtattatacaactgctgtgaccagacttgtatactggctgaatatcagtgctgtttgtaatttttcactttgagaaccaacattaattccatatgaatcaagtgttttgtaactgctattcatttattcaacaaatatttattgatcatctcttctccataagatagtgtgataaacacagtcatgaataaagttattttccacaaaa

SEQ ID NO: 8773 - DNA, 603 bp, Homo sapiens
tttacatgaagatggagtgctaatggaaatgcccaaaaccttcagagattgacacgctgtcattttccatttccgttcctggatctacggagtcttctaagagattttgcaatgaggagaagcattgttttcaaactatataactgagccttatttataattagggatattatcaaaatatgtaaccatgaggcccctcaggtcctgatcagtcagaatggatgctttcaccagcagacccggccatgtggctgctcggtcctgggtgctcgctgctgtgcgagacattagccctttagttatgagcctgtgggaacttcaggggttcccagtggggagagcagtggcagtgggaggcatctgggggccaaaggtcagtggcagggggtatttcagtattatacaactgctgtgaccagacttgtatactggctgaatatcagtgctgtttgtaatttttcactttgagaaccaacattaattccatatgaatcaagtgttttgtaactgctattcatttattcagcaaatatttattgatcatctcttctccataagatagtgtgataaacacagtcatgaataaagttattttccacaaaa

SEQ ID NO: 8774 - DNA, 235 bp, Homo sapiens
catccttattagcgaattcgtatacagcatcctcattagcgatgccatatacagcgtcctcattagcgatgttgtatacagcgtcctcattagtgatgtcgtatagagcgtcctcattagtgatgtcatatacaatgtcctcattagcgatgtcatatacagcaacctcattcgctatgtcttgtaaagcatcctcattagcgatgtcatatacaacgtcctcattagcgatgtc

SEQ ID NO: 8775 - DNA, 234 bp, Homo sapiens
tccttattagcgaattcgtatacagcatcctcattagcgatgccatatacagcgtcctcattagcgatgttgtatacagcgtcctcattaatgatgtcgtatagagcgtcctcattagcgatgtcatatacaatgtcctcattagcgatgtcatatacagcaacctcattagctatgtcttgtaaagcatcctcattagcgatgtcatatacaacgtcctcattagcgatgtca

SEQ ID NO: 8776 - DNA, 603 bp, Homo sapiens
tttacatgaagatggagtgctaatggaaatgcccaaaaccttcagagattgacacgctgtcattttccatttccattcctggatctacggagtcttctaagagattttgcaatgaggagaagcattgttttcaaactatataactgagccttatttataattagggatattatcaaaatatgtaaccatgaggcccctcaggtcctgatcagtcagaatggatgctttcaccagcagacccggccatgtggctgctcggtcctgggtgctcgctgctgtgcgagacattagccctttagttatgagcctgtgggaacttcaggggttcccagtggggagagcagtggcagtgggaggcatctgggggccaaaggtcagtggcagggggtatttcagtattatacaactgctgtgaccagacttgtatactggccgaatatcagtgctgtttgtaatttttcactttgagaaccaacattaattccatatgaatcaagtgttttgtaactgctattcatttattcagcaaatatttattgatcatctcttctccataagatagtgtgataaacacagtcatgaataaagttattttccacaaaa

SEQ ID NO: 8777 - DNA, 233 bp, Homo sapiens
tccttattagcgaattcgtatacagcatcctcattagcgatgccatatacagcgtcctcattagcgatgttgtatacagcgtcctcattagtgatgtcgtatagagcgtcctcattagcgatgtcatatacaatgtcctcattagcgatgtcatatacagcaacctcattagctatgtcttgtaaagcatcctcattagcgatgtcatatacaacgtcctcattagcgatgtc

SEQ ID NO: 8778 - DNA, 603 bp, Homo sapiens
tttacatgaagatggagtgctaatggaaatgcccaaaaccttcagagattgacacgctgtcattttccatttccgttcctggatctacggagtcttctaagagattttgcagtgaggagaagcactgttttcaaactatataactgagccttatttataattagggatattatcaaaatatgtaaccatgaggcccctcaggtcctgatcagtcagaatggatgctttcaccagcagacccggccatgtggctgctcggtcctgggtgctcgctgctgtgcaagacattagccctttagttatgagcctgtgggaacttcaggggttcccagtggggagagcagtggcagtgggaggcatctgggggccaaaggtcagtggcagggggtatttcagtattatacaactgctgtgaccagacttgtatactggctgaatatcagtgctgtttgtaatttttcactttgagaaccaacattaattccatatgaatcaagtgttttgtaactgctattcatttattcagcaaatatttattgatcatctcttctccataagatagtgtgataaacacagtcatgaataaagttattttccacaaaa

SEQ ID NO: 8779 - DNA, 488 bp, Homo sapiens
gagattttgcaatgaggagaagcattgttttcaaactatataactgagccttatttataattagggatattatcaaaatatgtaaccatgaggcccctcaggtcctgatcagtcagaatggatgctttcaccagcagacccggccatgtggctgctcggtcctgggtgctcgctgctgtgcgagacattagccctttagttatgagcctgtgggaacttcaggggttcccagtggggagagcagtggcagtgggaggcatctgggggccaaaggtcagtggcagggggtatttcagtattatacaactgctgtgaccagacttgtatactggccgaatatcagtgctgtttgtaatttttcactttgagaaccaacattaattccatatgaatcaagtgttttgtaactgctattcatttattcagcaaatatttattgatcatctcttctccataagatagtgtgataaacacagtcatgaataaag

SEQ ID NO: 8780 - DNA, 4800 bp, Homo sapiens
gccaacatcctcaacatgaaagaggctggaactgtaatggtgtttctagtttcttccagcatgagttcgtttcgagttataacctacaaggcaagttaaaaatcgtatcaaagatcataaagtaactgtattttttccttgaagatcaggcaaaccgtaaacaatcagccagtaccaggaggaattacttcattctttatgcgtctgatgtctatatttctgccttaagtctattcaatgccaaataatcactgtaacttgtatttaaaggaggaaggtcaaagaacacaactctttcaaatggcagaaaaacaaaggtcaaattttgaggctacttaaaacatttaagaatttaatttagcttttacttgcaatttgcttctcagagccatttactttgttggctccttgttttccctataggagaactgataactttagtgacgaaatacagttaaattattatccatgggccacttgaatcccttgaaaagatgttaccttgactgaggcagagtagtcttggaaaataaatttttgggcaagggttaacaagaaactgagccttaagtaccaagaataggattacttgaatactcgtgaacacccagagatgcaatatgtaaccatgagcaaaggaaaaaagtggaaaagcaaaaaacatggcaaaggaaaaaaaggatgaaagaaagagtatgagaggaagagaaagatgctactctgatcaacagttccccaatactgaaataataaattcccaactcatcagggtgccccacagggcccttcacaatcttaccctcacctaaccgtttagtttgattaagctacttttgtgcatgtactctagggttccaggcacactgatggttcatttaccctctcatgctttggcacatgctgatccttctgtcttaaatgctgctttgctccctgtctgcctagtgaactattctcagacttctgtccaattcttatttcttctgtgaagacctctccatcctatctaccccatttacaaacagctgttcctctctgtgggcttccaaaacactatgtgtatacctctgactgacacagaccccactacagtatgttctagctgtttacattgtctttcccactaaactctgagggtagggccttatcttttttacacccagcattatgtatacaatacatcaactgttttataaatgcctattcaatgagtgaaagtatacatgggaattgtgctacgaacagtcagtgttagtctagagtagtggttttccaacttactaacatttttagcaatggattctcattttcataagaaatagtatatgagaacccacaaataaaaaccctggttgaagttggggaggaaaggcccagagtaatgccttcctattatccaccttccctctcccatcccagaagaaatccagagctccaaagaactcaggctgaaaatactgttttaacaggcttaaaaaaatcttaaaatataatgataaaggaaaagattcttcactcatttgttctgctatatactaatcctgaaaaacaaagttccatttcctttttaagaaaaactcaaaatggaaaaatagctgtactaaaaatggaaaaattgctaggcttttggagaaacagttataataaaattattttcttaaaaggacagatttttttgtgtgtgattctttattgtaataacatgaatactcaaacctgtttttcttaaactactatacacctaatctggtgttaccgatgatgaatattataattagtaagctactatttagattttacctccctagtattatagacatccttttatcttaatttttctttttcttaaaatttgacctccttaactgcattaacttgtttcatgttagcaactaataacttttaatttttcttagggaagcattttaggaacaaattgaaatatggtctatagtaagtacaataaaaatcttacttcatcagcaagttttcggttaaaaatccttgactcttctaatggtgaccagatctttatgtcataatctatgccagatgaggctaaaactagaaataaaatttatatattaatatgaagcctagaaacatgcaattcaggatatgcttatattatgcatatatgtatatatagcaaaactaaccttgaacagcaattgtacactatatatttaactgttaattgaaaatattattttgacaatttgctaaatgttatcctagaacgtaattttaataccatgttgaagtcactcagattcattgttgaagtcacttattcattgttcttttatgagatatgtgggcaatttcaaaaagaagacgagcaatgctcttttgttctgataaattaattcagctatgtgaagactaaaaatgactggatgttcaatttggatatacaataaaaagttcagtcacaccaaacctcttacagcttgtaaaacttagaagaaatattgggagaataaactttttaacctattttcttttactttgtgcaaaaagcagattacaggtgtgtttgaagtgcaagttcagctgtaattgactctactggtgcctagtcagatagtttggattattcttataatattaacaattaaaaaagaataattttgtatgactgatgagtcatgcaaataatttctagccctcgtcctagaaaagatatcttacttgggtcaaacggatgtggctgcaggcagtttaccacatgattatcagcttccagaagcatcaaatgctcagcagtgtgccgatcccagatgaaaatgtggccacagtcagaaccactcattacaaagttagcaccccagaaattggcttcttttatctaagggttaaaaaaaattatttaaaaattcaaatcaaagttattaaaacaaagatttatgctattcttacatttttttatttgttttaattcttacattttttaaaaaactggcttagaaaatagtaaaattaaaaattgatgctgggcgcagtggctcacacctgtaatcccagcactttgggaggccaaggcaggaggactgcctgagctgaggagtttgagaccagcctgggcaatatagtgagatcccctatctataaaaaaaaaaactgacaaaaatctgtcttctagcttctttaaattatgataggcattcatcagcaagggtaagatggcagtaagtaatagaaaatcccccgtaagaagagggactttgctttgttcaatactatatttacagcacctgaaatggtacttgggatacaataggtgcttaattattaactgctaaatgaaagaataggatttctgggttttgggcagtataatggcaatttacatatatgttgctgaactttccaaaaattgtaccaatttagctttataagacaatgaaataattcacagaaaaaagaaattgtcttttgtattttgctttagacccaaagaatagaaagaagatcattagctattataagctaacacaattgagaaagatacaaacatacttaattttatgaagcagaatcaaaggcatatgatatactggaatagttataatgacatttttaaatgaatgcacatgaatgaaacatcaaaaatctttgtatttcaaacaaggattttaaaaaattttaactgcagctgctactttgccatttttggtgctctcacaaaagaggggagacaattttattgttatctgagctactgttaaatttacttatcttctcttttctcactccttcctctaattattttcatgctaacttttaggcaataaaatgcaagaaatataaattggttacttctattaataatgagtaaccttttaaaaatgagtaaattgttactagcaatgacatttatagaaagagctaattacttccccaacccaaatgttattttttaacctagatcctaaagaaagcaagctacaaattcatcagcaagggtaatatggcagtaatatggattaaaactgattctgtagataccttctgatgatgcaatgtatatgaggagaacaacactttctagttatgaagggatcagagtaacagttacactagtcatctcaaaaacttttcttattaagtaattaatattacactgggtgtagaaacttgtagatcgtaaaaactacaaaagatcttagagatctttctggtctattcttatttcatctggtaagtcactaaaacaaattttcacttgtcaatcttaaaaatgggtataaagtggcctgacaattttttgcaatcaacttagattttatagatccaaatccttctctccaaaactaacaaagaatgctaatacaagctaaaaaaaaaaaaaaaaaaatccaccagaaacttttcaggtagacagcaaatgtgagaaagagaggggaaaaaaaaaaaaaaaccaaaggcattgattccttgtttaaactaaaaatttttttaatctgcatttttttagaaaagtttttttgaaaaaaataatgatctttcacaatatattatagggctaaaaaaaccatgttggataaaaaaataactgaaaatttaataatgtaatactgaaatcccattggcaatatatgaaaataaatctttttggaaaaacactcaaagcatgaaactgcattttcaccaaaaaatgccatgaacatttggtaccattgtcctggagttgcaatggcctttataaaccatttttactaccggccttctaatgttcaaagtatccaattcttccatttctttccttttttttctccggcggaaaaactcctgaat

SEQ ID NO: 8781 - DNA, 4845 bp, Homo sapiens
gccaacatcctcaacatgaaagaggctggaactgtaatggtgtttctagtttcttccagcatgagttcgtttcgagttataacctacaaggcaagttaaaaatcgtatcaaagatcataaagtaactgtattttttccttgaagatcaggcaaaccgtaaacaatcagccagtaccaggaggaattacttcattctttatgcgtctgatgtctatatttctgccttaagtctattcaatgccaaataatcactgtaacttgtatttaaaggaggaaggtcaaagaacacaactctttcaaatggcagaaaaacaaaggtcaaattttgaggctacttaaaacatttaagaatttaatttagcttttacttgcaatttgcttctcagagccatttactttgttggctccttgttttccctataggagaactgataactttagtgacgaaatacagttaaattattatccatgggccacttgaatcccttgaaaagatgttaccttgactgaggcagagtagtcttggaaaataaatttttgggcaagggttaacaagaaactgagccttaagtaccaagaataggattacttgaatactcgtgaacacccagagatgcaatatgtaaccatgagcaaaggaaaaaagtggaaaagcaaaaaacatggcaaaggaaaaaaaggatgaaagaaagagtatgagaggaagagaaagatgctactctgatcaacagttccccaatactgaaataataaattcccaactcatcagggtgccccacagggcccttcacaatcttaccctcacctaaccgtttagtttgattaagctacttttgtgcatgtactctagggttccaggcacactgatggttcatttaccctctcatgctttggcacatgctgatccttctgtcttaaatgctgctttgctccctgtctgcctggtgaactattctcagacttctgtccaattcttatttcttctgtgaagacctctccatcctatctaccccatttacaaacagctgttcctctctgtgggcttccaaaacactatgtgtatacctctgactgacacagaccccactacagtatgttctagctgtttacattgtctttcccactaaactctgagggtagggccttatcttttttacacccagcattatgtatacaatacatcaactgttttataaatgcctattcaatgagtgaaagtatacatgggaattgtgctacgaacagtcagtgttagtctagagtagtggttttccaacttactaacatttttagcaatggattctcattttcataagaaatagtatatgagaacccacaaataaaaaccctggttgaagttggggaggaaaggcccagagtaatgccttcctattatccaccttccctctcccatcccagaagaaatccagagctccaaagaactcaggctgaaaatactgttttaacaggcttaaaaaaatcttaaaatataatgataaaggaaaagattcttcactcatttgttctgctatatactaatcctgaaaaacaaagttccatttcctttttaagaaaaactcaaaatggaaaaatagctgtactaaaaatggaaaaattgctaggcttttggagaaacagttataataaaattattttcttaaaaggacagatttttttgtgtgtgattctttattgtaataacatgaatactcaaacctgtttttcttaaactactatacacctaatctggtgttaccgatgatgaatattataattagtaagctactatttagattttacctccctagtattatagacatccttttatcttaatttttctttttcttaaaatttgacctccttaactgcattaacttgtttcatgttagcaactaataacttttaatttttcttagggaagcattttaggaacaaattgaaatatggtctatagtaagtacaataaaaatcttacttcatcagcaagttttcggttaaaaatccttgactcttctaatggtgaccagatctttatgtcataatctatgccagatgaggctaaaactagaaataaaatttatatattaatatgaagcctagaaacatgcaattcaggatatgcttatattatgcatatatgtatatatagcaaaactaaccttgaacagcaattgtacactatatatttaactgttaattgaaaatattattttgacaatttgctaaatgttatcctagaacgtaattttaataccatgttgaagtcactcagattcattgttgaagtcacttattcattgttcttttatgagatatgtgggcaatttcaaaaagaagacgagcaatgctcttttgttctgataaattaattcagctatgtgaagactaaaaatgactggatgttccatttggatatacaataaaaagttcagtcacaccaaacctcttacagcttgtaaaacttagaagaaatattgggagaataaactttttaacctattttcttttactttgtgcaaaaagcagattacaggtgtgtttgaagtgcaagttcagctgtaattgactctactgctgcctagtcagatagtttggattattcttataatattaacaattaaaaaagaataattttgtatgactgatgagtcatacaaataatttctagccctcgtcctagaaaagatatcttacttgggtcaaacggatgtggctgcaggcagtttaccacatgattatcagcttccagaagcatcaaatgctcagcagtgtgccgatcccagatgaaaatgtggccacagtcagaaccactcattacaaagttagcaccccagaaattggcttcttttatctaagggttaaaaaaaattatttaaaaattcaaatcaaagttattaaaacaaagatttatgctactcttacatttttttatttgttttaattcttacattttttaaaaaactggcttagaaaatagtaaaattaaaaattgatgctgggcgcagtggctcacacctgtaatcccagcactttgggaggccaaggcaggaggactgcctgagctgaggagtttgagaccagcctgggcaatatagtgagatcccctatctataaaaaaaaaaactgacaaaaatctgtcttctagcttctttaaattatgataggcattcatcagcaagggtaagatggcagtaagtaatagaaaatcccccctaagaagagggactttgctttgttcaatactatatttacagcacctgaaatggtacttgggatacaataggtgcttaattattaactgctaaatgaaagaataggatttctgggttttgggcagtataatggcaatttacatatatgttgctgaactttccaaaaattgtaccaatttagctttataagacaatgaaataattcacagataaaagaaattgtcttttgtattttgctttagacccaaagaatagaaagaagatcattagctattataagctaacacaattgagaaagatacaaacatacttaattttatgaagcagaatcaaaggcatatgatatactggaatagttataatgacatttttaaatgaatgcacatgaatgaaacatcaaaaatctttgtatttcaaacaaggattttaaaaaattttaactgcagctgctactttgccatttttggtgctctcacaaaagaggggagacaattttattgttatctgagctactgttaaatttacttatcttctcttttctcactccttcctctaattattttcatgctaacttttaggcaataaaatgcaagaaatataaattggttacttctattaataatgagtaaccttttaaaaatgagtaaattgttactagcaatgacatttatagaaagagctaattacttccccaacccaaatgttattttttaacctagatcctaaagaaagcaagctacaaattcatcagcaagggtaatatggcagtaatatggattaaaactgattctgtagataccttctgatgatgcaatgtatatgaggagaacaacactttctagttatgaagggatcagagtaacagttacactagtcatctcaaaaacttttcttattaagtaattaatattacactgggtgtagaaacttgtagatcgtaaaaactacaaaagatcttagagatctttctggtctattcttatttcatctggtaagtcactaaaacaaattttcacttgtcaatcttaaaaatgggtataaagtggcctgacaattttttgcaatcaacttagattttatagatccaaatccttctctccaaaactaacaaagaatgctaatacaagctaaaaaaaaaaaaaaaaaaaatccaccagaaacttttcaggtagacagcaaatgtgagaaagagagggggaaaaaaaaaaaaaaacaaaagcaatgattacttgtataaactaaaaatttttttaatctgcatttttttagtagagttttcttgtaaaaaataatgatctttcacaatatattatagggctaaaagaaccatgttggataaagagataactgaagatttaataatgtaatactgaaatcccattggcaatatatgaagataaatcattatggaaaaacactcagagcatgaaactgcaatttcaccaaaaaatgccatgaacatttggtaccattgtcctggagttgcgatggcctttataaaccatttttactagcggccttctaatgttcaaagtatccaattcttccatttctttcctttcttttctccgtctgaagaactcctgaatacgggcaacagcagagcgtctatatgaattacatattaaaaaaa

SEQ ID NO: 8782 - DNA, 212 bp, Homo sapiens
catttcttagcatgtcacatttatttctgtttgggctatgactgattttcaacaaacctaccattaaagaatatgcacgataatatatcctaaggttatgtactctaagaaaacagcagctgataagagtttttacgtgactctggtcttttcattttgaccattttacgacaaatgtagttcatgaggaactaagttactgtgccaagatc

SEQ ID NO: 8783 - DNA, 669 bp, Homo sapiens
agaataatgagaaacttatgaaaatatagtaagtctaggaaatacataaacacactatctcaataaggcacccccaaccaaaagcataaaaacgcagacacaacagtgagaagtcagactagttgagttactacaacaaagtattttagttaagagatcacttagaaatttggtactggatgaaaagtaaaggcaatagcatgcggcaaactggtttttaaagggctattttataaaaacataatacagacaaaattcatgtgcaattttactacaaatataacaaattttatccaatgttctttcccctcttctccatattaagaaaacacataaagagaaatgaaaagaaactaaaggtaatatataatagcagtggatagacttctattttgatattttatttaaaatgtggtttaaagatgttccaaaaacagactactttaggtaaaaagaataatgaaaccccatctctactaaaaatacaaaaaatcagccaggtttggcagcgggcgcctatagtcccagctactcgggaggctgaggcaggagaatggcatgaacccgggaggcggagcttgcagtgagccgagatcgcgccactgcactccagcctgggtgacagagcgagactctgtctcaaaaaaaaaaaaaaaagaatattaatat

SEQ ID NO: 8784 - DNA, 212 bp, Homo sapiens; identical to SEQ ID NO: 8782

SEQ ID NO: 8785 - DNA, 257 bp, Homo sapiens
gtccgcctagccacttaggcctggactcagggttctgcggaagttacacccctggtcagacgtggtagcactcccatcttattcaagatcctgtttgaaaattactgaggcagaaactaggaggtaattaaaaggcctcaaaaatctcgcctcattccatccacagaggaaactaatgaggttttgttttttttttctttgagacaaggactcgctacgttgcccagtctggtctcgaactcctgcaggctcaaggg

SEQ ID NO: 8786 - DNA, 124 bp, Homo sapiens
gcctgtagtcccagctactcaggaggctgaggcaggggaatcacttgaacctgggaggcggaggttgcagtgagccgagattgcaccactgcactccagtctgggcgacagagtgagactccat

SEQ ID NO: 8787 - DNA, 6598 bp, Homo sapiens
gtatctccaagttgaatggaaatgttgacattggagatggaggtgctaaagatgatgggagccaggatttgggggaaggttctgcataggaacaagacatcattgtttggtaagaaaagaactgcagcttcctatcatggaacagtttctgaagctctcacaatcagagtgagaattcagagttttattgtgattcttaggacgagacacacctagaagataaaaggctgaactcatcagtttattgctactcttaatggtaatctgcaggaaccccaaaaggatattaggttgactcatataaaattatcattttcataggccaaatacaatgaacaccagcaatactatacgcttgaacctaaaataaccaagaagcatcacttctaaaccataaccttaagttctctgtgcagcacaatagaagcactacacaaagacatgactgccaccttacaatcaaaggcaggcaagacaaagacattccttatcatttaagttcagttcaacaaacatttattttgtataaaacactacactgagcaccgaggacataaaaacaaagaggacagcattctgctatcaaggagtctagtctaatgggaaagatatataaaacaggattgctgttgagactcggatttgaggaggtcaaacaaccaaatacatatttaacacaggatgccaatttggaccaaaagaatcccagagaatccaactgacaagaaggtggctgaaaaagatcagactgacctttttttcctttgctttagaacaggtgaactagacccttgggtttccagtgctagcaggtgcagccagtgagagaattcctggtgccggtagtgaatgatgcaagtgttcagaactagggaggctgagaggtcaatggtggtcacctgaaataagaagaccagaactgtgggtttgggttttatttcacaaactcaaaacgaaataatgtagcgggagaatagagaaaggaacaattcttggtaccacaatcatcacacctgcacactagccttgagggagttgaggcagacaatgcgttggcgactctgggacaacaacaacccatctgtaagaggccagaggacagatcagaggagagcactggaagggcaagaggtaaaactgggagagggtcagaagccggcaaagggatcaacagactgtcatcaaaacttgtgagctggggctattttctctcagtatgttccctccttccactccccagttacactgagattagattaaggagaccatatggggcatgagcaaagagagtatctagtcctcccattctcgctcagtaccagtaccccgacccatgaaccttccagcagcagttcagtgctcatctgtgccatatcagagtttgctgtgaagcttcgaaggggcagctgatcctcatcacggtggtacaggaactgcagcagcttcagagtccaagtcaggtgcctggaccgagacagattccagctcaggaagatgtggaatgccattcctacttcttttacttttattttttaaaagtaattattttttggccaggcgcagtggctcactcttgtaatcccagccctttgggaggccgaggcagggggatcacgaggtcaggagatcgagaccatcctggccaacacagtgaaaccctgcctctactaaaatacaaaaaattagccgggcgtggtggcacgtgcctataatcccagctattcgggaggctgaggcaggagaatcgcttgaacctgggaggcagaggttgtggtgagccaagatcgcaccactgaactccagcctgggcaacagagcaagactccgtctcaaaaataataataatttttttaatttttcccacactacatggatgtaaccatttctacttcctttctccccgtagacaagctcagcaaatactaggctggttacagagataccaacatacagctcccactatcactctcccatcttctgtgtcaggagagacctcacctcttttgactattcatggacaataccacgcttgtgttctccatcttaaccttgacctggtctggcagctgctggagaaggaataggccaggcagagttggctcaactaagttttctgtcacctctgaaaatatgaatgaataacgtaagaaccatcaattcttaacactcccagttctcccgaaatgccctggcctctatggtcaaatcctcccacataaagtaggctaagcaaatgcctaagctggatggaccataaggcgaatgccccagagatccaggcacctgcagtacttctttctccagtctctaaaaacctaaagagtacaaggagcaggttggtaaatgaaaagaatgtggaccttagggccaaataatttaaacatcatttttactactgactgcctgtatgacttcagtcaagttacctagctaaccttcctaggcttcagtttccttatttgtgaaatgctgaggatttagttagagaatatacagtcatcctttggtatccttggagctttggttccaggaccccctgcagataccaaagtccgcacatactcaagtccagcagttgtccctgtgggaactcatgtatacaaaaagtcagccctccatattggtgagtttcatatcctgcaaatattggcattttccatccacacttgcttgtggatgcggaacacacagatatggagagccaactgtatttattgaaaaaaatccacataagtggatccgcacagctcaaacctgtgttgttcagtggtcaactgtatataaaacacatagtacaaggccaggcatggtggctcacgcctgtaatcccagcactttgggaggccaaggctggcggatcacgaggtcaggagatcgagaccatcctggctaacacggcgaaatcccgtctctactaaaaatacaaaaattagccaggcatggtggcggatgactgtaatcccagctactcaggaggctgaggcaggagaatcacttgaacccagaaggttaaaggttgcagtgagccgagatcacgccattgcactccagcctgggtgacagagcaagactccatctttttttttaaaaaaaaaggaaaaaaaaaaaacccatagtacaggtctaactcatgataggtgcccactcaatgctggttctgccactcagcacaagcaaatgccctatttcctctaactatccttagggtcaaagtccatggtgactagtgaatcacatctaaataagcagtgagaccactattttttctacttccaaaacaaaccctgagaacaaggcagccaagaagctcaatcactggggctttacctgaacagggaacaggcttagatgctaggcttgggccctggcacagcagttggctctggaagaggccctcatgcagttcagcatggagtgtccacacatccacagtgatagcagtgagatgccgactgctaatgcccacctttagacacaggtccagggccagtgaaagctccactaggcaggtgtcctcctgtggggatgataagcctctaaggtgtatgtaagaaagtttggaagttttaggtcaaaatgtggtgatctggaacactgggtactgacttgagggaaccccctaaggtcaaagaacctaggatgtaagccctaagctccttcacactttacgcccaggaggaaatgaggcatctgaatgatcatggcatacttaccagctgaccactctttagaactttgctgttgatcttacataagctcacctcacagattagcctgggaaaggaaaaaaattaagagcacttggccttgccgggcgcggtggctcacgcctgtaaccccagcactttgggaggccaaggtgggaggatcatgaggtcaggagatcaagaccatcctgactaacacggtgaaacctcatctctactaaaaatacaaaaaattagccaggcgcggtggcggccgcctgtagtcccagctactcgggaggctgaggcaggagaatggtctgaacccaggaggcggagcttgcagtgagccaagaccgcaccactgcactccagcctaggcaacagagcaagactctgtctcaaaaaaaaaatttaaaaaaaagagaacttggtccctttcctcaccacttacctccagtcaagctctggtggctagaagggacaaggcaattggaaatgtctaatcttagcatctcctccaactgcacagaatgagaacttaacaccttgataaggaggccctgaagcaactctgaggcaagaataggacggctagatcctctgctccccagtgcttaccttttcccatcactatccaaaagaaatctgcttctactgatctgaatatgccataaggactcagaggtatccaccttgagaaccatgatgtttatagcatctacatgaatggagaatagctggaaggaagaagcaaggatgaacaataattaatgttaaggaactgcccttcctttccagatgagaaagaggggcagctcttagcattatgccctaaaaacagaaaaatctacccataactccaaagccaaccatgccaaagtacagtccaggatagcaggagaagttgtctcacttggcagaagatcttcaataaggatgggctgaaggacagttccttttgatccaccccagcgctctgggagaatggggcagacaggtcagaaactttctgtaggtccgttctgatacgcacttctccaaagcacaatgccacatagtgtctgcccagaagagaaatctcactgccaccaggtccatccctcccatagcagtctattccccaccctcacattcactttctcatccttcctagaaatatagctcaaatcacagagattagtttcatagcagttatcaatatcttcctcacaacacaatggcacccaggctaacaggaagacttcagcaacaacctcccttcctccttggattgtgatgcctctgcagaagagtgtcactctgcaaacaccaactccaaagtactcttctaggggagaagtgagaatatagggtactcacggaagatcatggctaaggagtttgctggaaatccacaggttatcaatttcctaaaacagtgagggagaaagctctgtgtgctagctgctaaataagccacgagcagcttgacaagccaggaaatgttctggattattagaatttctctttcatagccatgttgccttgaatcccatcttaaattagaacagtaaaatcttcgatttcctgttatctttcttctgtatctttgttatgtgccctggacactctgtgtcctacaaacatttttaactgaacaacttgcagcgttctccaactagctctaagatcatcttggcaaagaaatggcaaggctgggattaactagaaaagccaccaggatttctatttttaaaaaaaggaaattaagagtttaaattcaattggatcaaccctacacacatatccagagtttcccagaactcaccactgtttgctggtgttgctgaaacttaagactgacattctggatccaaaaaaagcggaaggagccaatctttagctccgcctgcagcttccgctgacaccacttggtggccaaccggaccacaagccacctgcagaaaaattcctgttaattcataggacctttttccaatgatggtttccctcaccccttgctggtctttcaaagccttgcaaaaggtcgttcctgaaactggatctgagcaactctcctttcttccaaagcaccactctgtcatatacattcagccacgctgatcaagatcctagctcccgactgacccctccacccagatgaaaccagaaactgcaccctctaagttgaagacaaaaacaaaatccctcaaattgttatgaatcccagaggcagagagagaagaccccagcaagagtcaaagcggaggcggctctgtcacatgtgccatcacactccccagagggtctgtctgtctcctgctcccaccctccagacaggtatccacgagaaggcactttgaggtcagacccggcagctcgaatgctgttctccccagaccgatgctgcaggtgcccatcgcgcttggcgaaagggacatgcaggggtgggtggagggggaaagggaagccactgaaccaggccccttcctcacactcctattcagttcctggcctcagcatttcctcagaccccgcccgcttcctcagtctccccaactcgcagcccatccctgggagctcgggccacgcgcctcctcacgatccctcccctcgccgcgcgccccctccctccaccctacccactctgcctcacgcgcctcagtaaggcgcgcgccccctcctcagtctttcttcctcctctccgccccctccctcccgccgccgccgccgccgccggcgcggccgggaaccctcaccggcctagaaagagggcgctaagcgcaactagcagcaagaccaacagcgcggagaagaacagaggcatttaggtccgggtccggcccggcttggccccggcccccgccatgccgggccccgacgccggatccgcgcagcaccgccgcgggccgaccagctgcgcgcgcagg

SEQ ID NO: 8788 - DNA, 4680 bp, Homo sapiens
acagagtttgagacagaggtgaatggacaggtgtgcttcttagggaagcagtcgagaggtggcaagaagttggcagctgccctcaagagggtcctggcaccatggacaatgacaagcctcttcagcctgagacagaaggtgaaagggcatcccatctctcaccactcaggcccgtccctgctgcctcagtacaacacctagtgatcacaggaccctgaagcccacttctttcctcacctgggaccctctagaagtaggatgatttgttatactgacttgggttcaggccttggcaaacaggaagaattggctgcagtgctatgccacaactacctcatactggctctagccagctttaatttttattgtgtgggccagttgataccacatttatagtttgaaatcagtcacattgggaatatttacaccacatgaattggctaacactataaatcaggatgtttttggtgttgtttgttttttttcctggagaatcaattgttaaaatttaccagcattctactggttgaatggaattctaaattgtttgacaaggaaattaacactcagaaattcatcacttttctaagggcactcagcagtctgacagccaagctgttgtctgtcttctaactaccaggccactgctacctgcactgtgtatcccagacagtctgggagataaatgttggaacctgggtctatggacaaggattaagaaagacctgcatggactcattaggaaccccaccatcctagaatctgggtggtcaaaacttgggacccctgccacaaatgctcagcccacccaatgagtaggttggctaaattctgacaggtcattcagaggcatggcatggcttcttgaaactactgagtcctgtcagtgcctaaggattgagctctggattttatgtgtggcttccagaagcccatggctttcaggagcctatggctgatcccaggtcaatggcccagaggtggtaaaaccacatctagcaagtgcagaggactggtgtgaggggagctctgttcccagcaatgaatatgattaattcattactatgaattaatcatagtaattcatttcgacccaagggagattttcaagcccctccttcttcctaatcacaaatcaatgttagattggaaggaagagaagctaagtcaaattcttaggaatcaagttctctctcttgctctctggaactgctcctggtccattttattttctatttgacctaagttgtcacctcccctgccctgccctgccccttatactccctggcaccatttgtgcctgacaataaggaagcctatgtatcgggacccaccctttcacctgaaagagtaacagcacaccccaaaacccacccaaacacttaagaatgggaaagtgtgagcaaggagccgatctccaaggcacgcctcagacagggaagggggaaggagcagccggtctccagggagcagaagggagttggtttcacaagctcccgtagaccctgcagccggaggcagcgctattggggaagggaggtttgtagagtggacttgccctggcagggcttggcaccttgaggacctgggactcagaggaagggagcagagatggaggggcggcagcggcaggctttattgggaggccagcaagttttattcctggcatcaaggagatgagttttttcttccagatgagattgaaattgagccagtacgacagagcagcgataaaatgctctactgtgaggccgaatccccgccgactgttgaaaaagtgaaaccagcccgggagaattcggaaacagacctggagattgaaggcgagcatgggcatttgggggcagtcagggcagcttctcctcagaaactggagaaatctggtttccaggagctgtcatctcactcctttccagagtctgccctgcggatggcctgtggaggaaatgtggcagaaaggcctgctcgattttgcctggagtcctcctccgggctggcaggggagagcagctgcagcttcccacgcttgtcacctgcctcaggagcagtgccctcacgtcgtcttgttaaaagcggaatcaatacacaaacaaggttttctaatcttctaaatgtttccacgtggggcatcctatgcaatctttgcaatagtcctaggaggtaggcatctttgccagttttcaacagaagaggaactgggccttaaagagattataggcattgcccagggacagcgggagtttgcccagcacgttggctgatcccgtgtttgactcactctgatggttctgccttctgtattccatatcccaggcccctggagtgtttctgtggcctatcttgcatcccagtgactttcccacactcaccttagagctctggtttcccctacttttcttgataaatctaagcatgcctgggtatcgggactggctgagctgaaacaaagactctgttaatgcaaataacacctccaccctctctctcctcccagtttccccaagaagggaagcaccgaaagagaacacttgtgaagcaagagaatgacgctggttccatctgacagggtcagcctcaaacttcccaggccaagcctagcccagtcacccttcctcccctgcatccttgcagctggctggtgggcagtgattcacaggcagcagagatggaggaaggccagttctgccaaattaaactgtgaagttcatctgcatagagtcagtttataaacctccccaccatggtcaacatacaacatacatcttcacccttctacgcagacctcctccccgctgacccccaggcagcttgttgctctttttctggcttcttgtccacttcaagtctgttgttaacgttgcttctaacacccaacttcattcacatggttggagaaggtagcaaaggacaacactggatgtttggccaaagggtcctgtttctatctcattcccccatctcttcccctgactgcagcaagtgctaacactgtcgcaagctgcccataaaatataacaatagggaacacagctagaaagggtcagcatcaaacccagcagaattagtcccagggacaaaacctgggggttaccttccctgcttttgccaacaggaacctctaatggctgaatgtggcaccaaaaactctgtcctgaatggtaactcggggctcagcagccctggctcctggtgctcctgctgtgggtgctgagacactgggaatgggcagggagggcatgggaaatgggccagctgggagcagtgctggctgtgagtctagagaaaagggggagacgagcctggtttgctcacttgccatgagctgtttttctccacaacagtggttctcacctggaagcaattttgcaccaaggggacattgggcaaactaggggaggggggttgctactggcatcttgtgggtccacgccagagatcctactaaacaccctactatgtataggacagccctcagaacagaattatccagcccaaaatacctgcagtgctgaggctgagaagcgctgctgtacaagcgtcccaaagagaagtctaatttgtagttgtgcttgcaaaatcagcttccctgtaaagcacttgtcctttcaccaacaaagctcccattgtcagccttagattgtttggagggggagggggttggccaaaggccctgggatctgaaggaaaaacagatgcagacatagacgccagctggcctcaggaagccctgccataggctggacttgcctaatgaggacacagctgtggggcacccagaatccagggaggcccgatgcccagtgaccatgggccaggctggcctaaagcctaagaaataaaggcccccaggggttagaatggaaaggtgcagtccccacttctgttagctggttttagcattgaccaactgtgtgttatttgaggctaggtttgtcgtcaataaagcaaggatgacagtcctttttataaggaaaatgacatgcaagcttttgaaagaagaaagaccattcacatgcaagcatgcttgtttctcgctgatgtggaggtctttccatattcactggtttgccattttgagaagtccactctgtcctagttgggctttttaaatgttggtgcctctctaagtctttggtgaagcttttttcatgactcacaaccttgtgatagtggcggtgaaactaaaagtgaaatgaagattccatcaaccatcaaaagtcatccgcgtttggcctttcagaattgtccaaaggtgggcaagagggcttgggccttctatgtccttgatgaccagtcactggatgtggccaacctgggcaggtggggtgaagcccactgctcacttctaggaaagcttctggcctaaaaccatgggcctcatctcctacccaaagggaaacattcatctgggactttctggagttagagtctccctctcccaccatggactgacttcccagacaggagcaggcttcttagcacatacccacagggagagatcctctggcagaggacagtctagacatgagtgaatgtcactggggctagaggggagagaaggcaaaggtggaagagaaatcctacttcagcccatctttctctgcagatgatgagaaatttttcaccactggacaaaaggagctgtacctggaggcctgcaagctgatgggtgtagtgcct

SEQ ID NO: 8789 - DNA, 347 bp, Homo sapiens
tgtagtgataggacatatgttcattgcgctgtgcttttgatcttcagctccaaggttaagatgctctcccacggggaaaagaaaaaaggaagaagagctgggcagaagaaaactgacttcacccgtcactgaaatacttcatacctgaagcacagctctcttgcgagaagaacatgatggcagctcttcacagtcacctaattaaggggcttgggttgggtcctgactcagagggaaatacaacaccactgagaggaaccccccacagcacctgagcactcacagccaagcctgggcttggccccagtagacatatgagaacaggtgactgccagaaccacccagag

SEQ ID NO: 8790 - DNA, 202 bp, Homo sapiens
cttctcagctctgaggcaggcagtgggcagcttcgcctccaccctccgtccagcgcccttcccatggggccatccgcctctccctaaggcactaaaaaccagtggaggagtcaggccatgttggcaaaaagggctcgggcagcagccccagacctatagtcctaaatatccatgtacccagccctggggtcgcgagccatct

SEQ ID NO: 8791 - DNA, 202 bp, Homo sapiens; identical to SEQ ID NO: 8790

SEQ ID NO: 8792 - DNA, 168 bp, Homo sapiens
aaaattagccaggggtggtggcacgcacctgtaatcccagctactcgggaggctgaggcaggagaatcgcttgaacccgggaggcagaggttgcagtgagccaagattgtgccattgcactcctgcctgggcaacaagaataaaactccatctcaaaaaaaaaaaaaa

SEQ ID NO: 8793 - DNA, 1004 bp, Homo sapiens
ttgtgggtaataaactttaagcaccagttttaatcaagtttgttttgtattattagatctttgatatttgttttctgtgcctcgtgtcaactgaattcggcagctcggccgcctgttgccacaggctcctttcttccacggcgtcccttgcgggacccgccagagtgtgcttggcttccgcgtgtccgtgtgtctgcgcgtcgccggcgtctgtcccgtgttccctgtgaggctgccacgcccaggcgtgcatgtgcgtctcgagacctgtgggcctgggcggcagaaaggcttcccgtggctgttgcacgctgggtgtccctgggtgctccaagagagccccacggtgggacgcaggcgtgacacgggaaagtttcttggctgagcttcaagacagagacagacagacaagagaacagcagcttcgagggagtgctacaggggcggctcctcttccatgggctcctcatctggtctgtggatcccgcaagagaaggagatgggggcgtggggcaggtgcaccacagagaggagagaacagaacgtgggttaaaggctgtgtgctgccccacccgccagcctagccctggcctggcagccccgggtccatctgttcaggatctaatgctcctcatgcgtctctaaggggctttggcactggaaggagggggccacactggcctgtctctagtctgttgggcagggcatgtgccataaaggttctgaccctgaatagtgtgtcagtgggcacagtggggctgggtgagcctgcaggcgggcggcagggcaggtgctcacctcttttcggcgggcttcacgcccacggacagcgaggccatggcggtgaccgtctcggcttcttcgttctcgcaagtctgagcctcgatcagagaacgccccgctgtggaggttgtgcgctgcaggcagcgccagtacttgcctggggtggtggggtgaggaaagtcgctcagtgactacaacttagcaggatgcactgaggcccg

SEQ ID NO: 8794 - DNA, 867 bp, Homo sapiens
ttttgtgaaaaaattcatacaaaaatcaacagcaaatttatattctttgctataaaaactcattaggtacatatgtgcatgaaggcttggagacgggagcggttctgttagaaaataattaaaatgaaagtacaaacttgtagggtagttgcccagtggcgaatgtgttggcgatctgaaatctagccaatctggagcttgagaaaacatgaatttcaatcaatcaggatccctttccataagcaccttgagagcaaattcacaagccatccatttgcagggaccttcgcaatctgcattcattttatatatatatatatactttttctataaatgcattataaatattttatcaagatttcataagaatcaagtaagtttcttagcttggaatacattggaatatatattatacatatatatatttatttatacctaaaatttaagcaatacttcatgctacttgcttttaataaaaagcattccgatcgtaacactgcaagtgtgcctaccacatgcttcacgaccagatggagatgctcaatcgtatgtgacgtgtgagaacactttggattcgtttaaaatttgttggacttcaaaacctccaacgggatttgccacttttttggaactacctccatttttcttaaacagcaataaagcaaaacagggaccgccgggctgcagcccctggccccggagatgacggctggtgcccgtgcttgaggcgtcaggccagctcgcggtgccagcactgccaggctcggctggccacaggaaactgtcccaccgattcctgctgtttgttttttcttaaggcattgttcctcagacttcagaaaacccagccacaaaaatccaccagag

SEQ ID NO: 8795 - DNA, 217 bp, Homo sapiens
tatttctgttaggttgctagaatggttggtgccatcttgtcaccttgaagggaaagcccacccaagaatgacaccaacacagagggaagtaaacatagccaagaggtcagcagaggtggttcctggtgccattatccagcacccagctacagaccaggtgaagttggccgggcacatagtcacaggcactggagtgatccataggtcacacacgaaa

SEQ ID NO: 8796 - DNA, 446 bp, Homo sapiens
ttcaggttaattagctttgtttatgttttacttttgttttctctgtctcccccgctagactatcatcccataagaatggagacctctgcctgcttcactccctgccgtgcttccatgtctggagcatgcaataggacctcagtgaatgtgtgctggaagagggaacactgatcggaatttgtcctctgaatttgtcccctcacgctgcagtgtcagctccttgaggagagcaacgtcatcagtcctgttgatccctggatcagcacctagaagggtttggcacatggtaggtgatcactgactggctgattacaacaggacacagcagcaggccttgaagctgggagtgaaccccaaatcctaccttcaagcaggaagccctgttcctttgtattatgcctgaaatggggcctgtgaaggaggcggcaggagaggggaagaagtgc

SEQ ID NO: 8797 - DNA, 763 bp, Homo sapiens
aggacgagtgtatgtctcctcgtggttgtgtggccaggcttttgtttcccttgcagcacttaaaatgctgggcatgcgtgtctagatacctcaccagatgtgttcccacccaccctgctggttgctgccacactccactgtgacttttcagagctcttgggctgtttctcttgcccttctcctctactggatgaccacctgctgtgagattatccctgggttctctgattatagcccaaggcacacctaagaagtttctagggaaatcagatagccagtaagtttttcaaacttgaattagatctcttttctgcccaatgtgactattctttggtgcacactgtaggaaaatcaggtccttcctgtgctaaacttaaactcgatagttgttgagtgactccttttactagtgatgattacaaatagagatccagagtcattttaatcatggttctctttgctttatgtgtaatatctacttgaactaaactctcaaattttccacttagtgaacattatattattcaggttttgctttcagtttagattgcaagggaaaacacgcatgtttgtggggtggagctctgcagtacacaggaactgtttgcagagataattgttgggtgtgatttatttattttagattctgaaggccttctcaaaaccaaggaaaagaatcagaagctttacagtcgagcacaacggcaccaagagaaaaaggagaagattcagaggcataatcgcaaacttggtgacctggtag

SEQ ID NO: 8798 - DNA, 142 bp, Homo sapiens
cacctgaggtcaggagtttgagaccaacctggccaacatggcaaaaccctgtctctactaaaaatacaaaaattagccaggcgtggtggcgcgtgcctgtagtcccagctactcaggtggctgaggcaggagaattgcttga

SEQ ID NO: 8799 - DNA, 910 bp, Homo sapiens
ctcgaacggtagctcctcccccagtctctagctccatgaccctcaaactcgaagagtagcaccatttcctttctgggtctccagctccatgaccctcagacttgaacagcagcaccagctcctttctgggtctccagctctcctatcttcagacttgaatggcaacaccagcttctccccacgtctccagctccacgaccctcagacttcgacagcaatccggctcttcccctggtctccagctccatgaccctcaaactagaacagcagcaccggttcctttctgggtctccagctccacgatattcagacttgaatggcagcaccaacttttccctgggtcttcagctccatgaccttcagacttgaacggcagcactggctcctcccctctccagctccatgaccttcagacttgaacggcagcgccggctcctccctgggtctcgaacctgcccagcctgcagattttggacttgctagccttcaggatcacattagccaattccttaaactcaacctctttctctgtatgtaggatatggacacctcctgctggctctttttccggagagcccagtgaacacaccgtgcatcaggctccatcattcaccagagcgtctttccaacagactttgctgtgatatttcttaaataaaggtcactccaaagaccctcacctctggattgtaaccaactcagtggcagacttaatccatttctatctgctgacatttctcacatggaataggctgtttgacagattgaagctgtctccccccactccccaggccagtgcacacttatctcccttgaatgttcattttgtgctcattttagagactgaggcacaaagacaggcaaatacaaggtgaagtcagtgacaaataaacaatgctatttaggcatt

SEQ ID NO: 8800 - DNA, 295 bp, Homo sapiens
cacgttttgtgcaggaaaaaggtagcaatgaaaacaggaaatgctttatcaattcaatatatacccttttctcaaggattcccaattgcttcctacctaaactatgtgacatgggctgatgctttgttagaatgaagctagcagaatacatacttaagtgttttgtcagcagcccatggtgcaggccaaagacttctattagtatccattatctacattcactgcccccttaaatagaacatttcacttcttttctgcataagattgaccttaagtatcatccagttactctata

SEQ ID NO: 8801 - DNA, 224 bp, Homo sapiens
gctccctcccctactggacacacacctcgggttcctggcatctcagtgccttggaaacttttttttttctttttaaatagagacggggtgtcgccgtgttgcccaggcaggtcttgaactcttggcttctggcttcaagtgatcttccagcctcggcctcccaaagtgctgggattacagtcagccactgcaccggaaatgttttcaaccgtgacccataaagg

SEQ ID NO: 8802 - DNA, 2625 bp, Homo sapiens
gcggtgagggccccaggacagaagcagacagacacggctcctgctgtcgattccgatccaggtcagcctactcggggctccgcgcccttgacccggaggcgtaccccgccaggcggcgagcttggggcggctggcggagctcgggcggctggaggaccgcgtcctgcctcgtcgagacttagctctcagtctcgatcctttaggctgcgccgccgcagagctggaacagcggtccattcctgccggaggcgccaccccagggctgcagggctgccctctagcctttgcgcgggtgcctgaggcctcccgcttctgtttcgctccactggctaccccagaagccggacctcgggagacttagtaattggagggtgggtgcagggaaggtgctgagccgcgtccctagcgacccggcagcggcgcgcatgcgcacacagatccggagcgcgcacacagatccggagcgcgcacacagatccggagcgcgcacacagatccggagcgcgcacacagatccggagcgcgcacacagatccggagcgcgcacacagatccggagcgcgcacacagatccggagcgcgacggactctcccactgactggcacttgcgcatgcgctgcctgtgatcttggagtactgattataagctgttttaagcgattcccttaagccgcgcactgttgtaaccactaaaaacaggactaatttagtcctcacacctctggaaagaagtgaagcaagtgcccaaggtctcacagctggacagtggtcgggtcaccatggaatccaggcaatctggtttcactggacaaaatgcctagtgcttcgtactcatccattggaaagctaataatgctgaggagttggctttatctacctgatattgcctttgttatactctacatgccaacttccattgtgcttagttactgatattcaggaaaatcagaaaactcgatcaaaacctaccactttttccttatagtaaatgcttttttttatcgagagtctgaactctattttagatgtgcggaaaagatcattttaatgatctgagcaagaattgttttccaagattctagtacagttctgaagggtcatttaatgaatgtggtggaataagcatttctccttttaaagctgtactcttgggtttctcattaattttacctccctcccctacaaatactgcttagcctttttttttttttcctgagacacagtttcgctcttgttgcccaggctggagtgcaatggcaccgcaacctccgcctcccgggttcaaacgattctcctgcctcagcctcccaagtagctgggattacaggcgtgtgccaccactcccggctaattttgtatttttagtagagacggggtttctctgagttggtcaggctggtctcgaactcccgacctcaggtgatctgcctgccttggcctcccaaagtgctgggattacaggcgtgagccatcgcgcccagcctgcttagcctttttttttttttttaattaagaatatcatgataggaatatatgtttagtgaccataatttaaataattgaaaatgttatttatcaaatgtttcaattatttgaaatcccaatcgttgtctgtcttcaataaagtccttcatttttaaaaataatgaaaaacaggagaggcctagatactaataaaaatgctaataagctaatagatgatattatgactgtttacaaatacaatattgcagaaatcaaaagaggaaaaaaataaatttgcataaaaccacggtttttttaaaaaaaattgttgttttatttagccagaatgcctccaactcaggccgaaagtgttataaggagtattatacgagaaataggacaagaatgtgcagcccatggagagattgtttctgaaactctgattgcttttatggtaagaagaaatatttttgtgattactgttttattaagaggttttttaagatgtggtgtccattttcccctttaaattctgtgaggctttcataaatgtttttcagttgaagcataacgagataattggacaaatttgtgaaaacatttttaaaaagtttatagagcatgtgagttctagatttatagagacatttagaagaccttgatgagttttggaaacatcaataatgttctcctgtgtgggaattttttgacgtgtatttttgtttgccgttgttaaaaattactcattgctgtggtttctctgttcttgcttttggttaacaatacacaataaaaatacaataaaatatgccatagtttcccaattgaaaacctagccattgctttcaacttatttccccatataacttttctagcaccatattcaagtttgatgtttgttgcttccttttttcaacctctaacaagggtactgatgagttcagtaataagaagaatagttggaaaaccaaccccaacgtaatcaagaggtagttgtttaaaaaatggaaacatattaagctaataatatgaaataaaattgcttaatggattctttcctagttaatggactcgttcctacttttttctaggtgaaagctgttgtcctggatccaagtaatggctttaacatggatagaaccctcatgaaaagtgatgtg

SEQ ID NO: 8803 - DNA, 1034 bp, Homo sapiens
gtgaccctcatgtttatgttcacagcaaggctgctggagcttcagccagcatattctcatttcaagtagaaagaaaaggaaaggcaatagacataaaatggaagtgctttccctgacacctcatccagtgattacacttacatctcattggctagaccatgtcacaggccactctcactgagaaagaggttgagagatttttttttttaaaagagaacactgtcattcccaacacagggttaaattagtaacagaaagagaagaaaacattgacattaagtaggaattaacagtatcaaacatacttcagggagtatttgtgccaggatttgcccattagtttaaaactatacttaatatgatggtattattcttaccatcttaaaagatatttaatattctaatatataatatatgctcatggaagacattttggtagctatcttaaagtataaagaagacaaatcagccataagccattacaaagttacaaccactgttaaaattttgctatctcaccgtcctttggttgctttaccttgtatacttacagtatatttgtatatctaaattgggttcattctctacaaatagccagtctcatctcccttgtatttttaaattttgttttatagatcataagacaatatatactcattatggaaaaatctagaaaaaacagaaaagtataaagaaataaaagtaatttacctataattccatccttagatctaattgcttgctgtgattttgaaaaactgacctacactttttgtgcattatatgtatgtcaatatagtttaagtcatattatataaaaatttcgcatttggcttttaacaaatataagacaaacacaaggtttttgttaacataattttaaatacctgcctgatattttacttaaataacgtgtttagatttctaaggctgtgctattataaatcttgttactctgaacatctatttttacacaagcttcttccacattccgggaacattttctagaaggcggaaataaaattgtgttatat

SEQ ID NO: 8804 - DNA, 413 bp, Homo sapiens
ctctgttccaaagtgcttcttgtattgccagcatctcaccttatgggtatgtatgtccaattctaaaagtgtatatttttcaaacaacttggccttaactgcagatcagttcttttatctgttgttcagccaaaatggctacaatctggtccagtggtagaggaaactctagctgtgttaggtttccgtttttttggcatgttgttctccaaaatggtgcctcaagggattttcaccctgcaagctgctgttatagcccaatggccacataagagtcaggaccactcaggagtcagggacttgggctttggtatcagacacatctatccaagagtggcttctaccatgaaaactttgggacagtgggcaagtaacttctctaaagccttgatacttgtgtctataaaatggaa

SEQ ID NO: 8805 - DNA, 413 bp, Homo sapiens
ctctgttccaaagtgcttcttgtattgccagcatctcaccttatgggtatgtatgtccaattctaaaagtgtatatttttcaaacaacttggccttaactgcagatcagttcttttatctgttgttcagccaaaatggctacaatctggtccagtggtagaggaaactctagctgtgttaggtttccgggaaaatggcatgttgttctccaaaatggtgcctcaagggattttcaccctgcaagctgctgttatagcccaatggccacataagagtcaggaccactcaggagtcagggacttgggctttggtatcagacacatctatccaagagtggcttctaccatgaaaactttgggacagtgggcaagtaacttctctaaagccttgatacttgtgtctataaaatggaa

SEQ ID NO: 8806 - DNA, 7444 bp, Homo sapiens
caagagagagttagaagaccactaggtacagaagagttgactgctgtatccctaccatctcggtagctcttggtatagagtaggtattgaataaatgtcaaatctgaaaattctcaatacttcaacccaaattaagaaacccaaaatggtggagagctagagagcttcctgctcatccagttctattcctagcctccagaatgagtgaggatggattgtaaaaacatgagctttttttctcttctttcttaatttgctgtatatctagggctaaaacgtaataagcattttgattggtagctgaactaagagatacgagaaacaccttctccttctgctccccaattttccttaagttatatgtaactaaaagttaacaaataaattatgaccatgttaccaagggggttaaaaaaaaaaccaccaccaaaacagcagtcaaatattttaaataaaacatcttattccaaaacttctgctgataccttaaagacagacacttattttgcaaaataggtaactttccctcttcccaatttagatctctttccatttctcaaaagtgtaaagtaaagccttttgtggagaaaaggcaatgcccagataatgggtttcctacctgacataatgtcttctgctaattccttttctctttcaattttttcctctagagttgaaatgcagaattcatagccagcaacagcaaattcctgtctgtaaagcaaaatcaataatcagccatttaccttttcttcttttttttttcttccttctgttgagatggagtttcgctcttgttgcccaggctggagtgcaatggcgtgacctcggctcagagcaacctccacctccggggttcaagcgattctcctgccttagcctctcgaatagctgggattacaggtgcccgccactatgcccagctaatttttgtatttttggtaaagacagagtttcaccatgttggccaggctggtctggaactcctgaccttaagtgatccacccacctcggcctcccaaagtggtgggattacaggcgtgagccactgcgcccggcccatttaccttttcacaaattctttttatcttcatttttccagctcagtttaaacattatcagtaaaggaagtgtaaaatgggaagagggaactttgcttaaagtctaagtagtgtcaaatctgccatttctcaaagcagtttttttaagtcatccatttaatataacttaggacacaaaaagctaggaatgctgccctaattttaataactgacatagccagcagtattcatcatctcccactaacagatggcctccagtgaatcaacttctccatgtgtgaaagccttacccctgttcaaagtaatactaccctaaacagttcaggccgccctacagtgaggattccaactgttgacctcatacagcttctgaggagctttagtcattttatatttctttcaagctataagtctctgataaaagtttcttttgcagaaatgggactcctagctatggcaatagaagtcatttaacccaactctgtagccctggaccctcaatcaactggagagggttgagtcaacccaagcaggccgactgactgctgctttttacagagatgcagaggaaatgtgacagaaatcccttctccatttaggagctcagctttggttcttttcttcagttttggctctagtttcttacagaagtggcactaaaaagctcacctgttctctagtgctttgccaggggagaacttatgaccctactgttctgctctgttctcagaagaacagaagcatccccttccttccctacgctcaaaacttggcaagagggccctctctagccataacacagggcaagtggacactgcccagaagacgctcccagtcggagcaagaggtctacaaacaattcccctcataacctatatcagcctttcgaagcctcagatctggccatgtcttttctagtctcatgcttctcttaataaaacaaaatgaaaagtacagagtaccatgtaactcagaggctaattgttactagctttcacctctagaagactatgaatttgtcttactcaacaatgtttattaggctctgggcttcttcttaccctagggattcatacccaatcaagaactaggcatgtttgttacaactccaagaaagattgaccaagctgcagtgttccctggcatgggccaagctcaaagctcctcaaaagacttgaagtcaaaggctccaggaagctctagcctatctagtgtccaatcaaaatgcaaggagactatgcaggtcctgatgagaacaaaggagctggtgagtaggacagtagggaacagtgccagggcctggcctcagtgagcaccctttctacagcatcaggctccatgtcactccaaacctctcgcaccaacttctgcaccactaaaacctgaagggaagctagtcttaggtctctccctaaattcatcccaaatacaactctctagaggagttctctgcttacaacctagatgcttcatctttgaactctatttataccagcaaaatggcttcttcagagtattaatatattatccccagcagctttcacactgctctttcctcttctaggaaaagttaaactaaagttctaactctaacttcccttcccacttcaagcagcaacagaaaacttagttagttttgtcacagggcagccagagatgttgtgtgccccactaggcaggctgatggaaacagtaggggcaaactggaaaaagactgacaatttcaaagatgagggatggaacactttgagtgtgacacccaatttctgggagacccagatgaccagtagacaatgaatattatgtaacatcccagagtcaaagtttcctgcccacagtcctactccctggctgctgtacttacctgttctgcgcagcatagatactggccagctttagggaaatttcaattattgcattgtcctcctgtgagagaaagagaatgaagggaactcataacaagtaaattttttcatggcatatttcagatcaacttccagactgacggtggcctcaaagccacagtctttattcttttagagtgatgagccaactgtgaattccttggcaagcatgctgttgcatttagtgaaagaatggcaatttgtatagagatctcagaagggaaactccacctttcctgaccaaagcatgtggtggggctaggaggagttttcaggagacaagactgttttgaaaactgcttcagtgaggggccaatactaggcaatgtccttacctgcttcatgccccctccaaggaggtaactcattgttgctttaaaaagttgttcagcctaaaagcataaggaaaagatttttcttttaattgggccccattttatatatatatatatgaccctggattctaagtgccagtctgatgcaacattccttgtaaaacccatatacccacacacacgcacactcacacacagaaaagtacccttttgaagcgaaaacagatcaaaatatcaggaccctcaacatcctctgtgtaccttaaactactctctgatgagtagaaaacaacctcagagattaagttcttatccaaacccactgtggcagagactacaaactgtctcctaatagtcattctcttctccatctttttgattacagagtcccctcgatttagcctgggaaatatggtgaaatcccgtctctacaataaataaataaataaataaataaataaataagaaaattagccaagtgttgtggcacacgcctggaatcccagctactcaggaggctgaggtgagaggatcaactgagcctggcaggtcgaggttgcagtcagccatgattaagccaccgcactccaacctgggcaacagagcaagaccttatcttaaaaaaaaaattcagtcaattttagcagattggacacccttaagttagatatggtcatatgataaaatttaggccaagggatgcaggcagaaagaacgtgaacttctaatcatgttttataaggaagctgctcacagtccatcttctcccccttcctgcagactggaggtgagtcagctcacctaggcagaggagggcttatcttagaagaaacctggacttctggatcagagagcaaaggtgcctatgtctgtctgccttcagtctttagcctatctctggactaacacaataaagagaaatacacttttatcttgtttgagtcactatattctagggtctctttgttatagcagcttagcctgtactcttactattacagttcccttgaagctactccttcataaattcaagatattacaaagcaatttacttacattttcaagctgaccccgtataaatgctaagttggccatctgaaagcaaattacaaattgtttttcagtttagaatactgtgttcctacttatttcaaaactttaaaattcccttttgctttcaccctcaaaatttaaaaaatagttgaaaatgaaaagcacatcaccaattaatctgcaagaagaagcacaggacagcaatcatgtgagaattaaatacttgcacatactttgttgttaacaaaccaaatctaggtccactcatcattaaaaaaacatgctaatgatactggttttttttggtctggaattgagaggtcttatgtcaccccaagggtaaaaaaactgaagctgtggccgggcgtggtggctcatgcctgaaatctcagcactttgggaggccaaggcaggtggatcacctgagatcaggagttcgagaccagcctggccaatatggtgaaacctcgtctctactacaatacaaaatttagccaggcatagtgatgcatgcctgtaatccagctactcgggagggtgaggcaaaagaatcgtctgaactcatgaggcggaggctgcagtgagccaagattgtgccactgcactgcagcctgggcaacagagtgaggctccatctcaaaaaaacaaaacaaaacaaaaaatgaaactgaagccaaaagaaaactcagtaaaaagaaaaggagttttagaacatcgtgaaagtcaggaatataaatcagaagaactaactacccttccctcccatccaaccttcctcatcagtggttcagactggttataagagttaccaaatcataagtgtaagtgatggccttcttgttatcagtctgataggcgagacgaagagcgtcatgcaaaattaactcagcctcttctggctcatctttcataatgctcaactgaaaagggaagacaaaataatagaaaatgaaacatatagtagatgcatatgctaagagacagaagtgtatgcaactgtacatcccaactgatagaaggaagctaactcattcatcagacatttactgaattcctactatgtacaaagcattgtctacagagatgacagggaggtcagcctcccttgcagctaggtgtggccatctgatgaagttttggccaagagacacaggcagaaggaatgtgatcttacaacatattttataaggaagctgcttgtcctccatcctctttctaatttcttgcaggctggaggtgaccatataggacaagtaagcttaattacaactaatgataagagctataaagatgacagaaaggaatgataaggggtctcctctaaataggacttagggaagccttccaaggaagtgacagctaaactgaggtagtaaggatgagaatgagtcaaccaaataaggacctggggagaacaatgactcaaacagagggtagagaatgagtgaagtccctacaagctgaagagaatggttttgaggaagaaatgcaaagaaatagatgtgaagggaggatggtgagccagaggattactgccaaatgggtgggcaaggtatatgctggtttagatcatgtggggtgttgcaagccaaggcaaggagtttgtattttatcataaatgcagtgggtagccattcagagctttctgacaaggagatgacataatccaatttactctttttttttttggtcgctttggtttctgcatggagaatagattgcaagaggccaggaggccaggaaagactactggagcatagttggtggcaatgatggtttgcactagggtgacagcaagggagatagacaaaaggggaaagatttgagaaatattttgcatttgttggcaacaggacttgttgctggactgtaagtgtattggaaggcaatggtaaggtaccacaagttttaagaatgactatgaggtttttaggctgaaaaactgatggtagtaaagagatggcgaaagcgtatgttgaggaggcattaaagatcgtttagttttgggcatgttaaatctgagaggtaggtatggtcctaaagtgcaaatggcatgtcagtagcacactacagaatggaaatacaaatttggacgttgttggcatcgagtaggtatttagctcaatggaagagatgagataacttgggaaaagaggaggaaaaaaaaatagaaaaggatgtggagaaaaggaagaattcaggaggagaaccgaaccgcataaccaacactaagttgccattttcaggccgctatatacgtgcgaaattatgtcatttcagataggctggttaattgataaaaccactacaaaacgttcccgatatttcgtttgcataaagcgtgatgcctagggcgccatctccatttgcacttgacactgcagaggttttactgcaggccttagagtcggaaaagcctggatggattccaatcccctctcggatgacccacctcattctcggcaattttacccgcggagcctccatccactcttcggcgaggcggagagagtaatgcgcagcaacgccaagaccccgctcacaaaggctaccgcgctcggccgggcgcagggcccggagccgcctcaccttggctcgcttcagcagctggatgatctctgcctcggcctcgtccgccccgtcctcggcagcggccccgtcggctccctgctgctcctcctcctctgccgcagcgggcctcgagaaccaggcgagcgctgcgggaaggggctctgaggtcatcgggcccggcccgcgcccctgtccccgcccggccggccccgcccggcccgcgcccctcacctgccagcagcggcagcaggcctgggccccggccgtgcggcgcgactcgggatggcggcacctgcacctcgggccccggacctcctgccagccccgggagcaggcgcgcggagcagccccggcaccgccgccccgcggcccgcaggaagcctcggcccaggctccagctcaggagccggaacatgctcccgccgcgtcctctgcgcactgcaggccagacgcgctcctggcccccgaccacgcgccgagcgccctccggattggccgggccctgacgactgagcaggac

SEQ ID NO: 8807 - DNA, 21936 bp, Homo sapiens
caggtaggcgcagtcagctggagcgtcgcggcggtccgccggtcgtggagggcgtgtcctgcggcgcgatggccgtagtgttgccggcggttgtggaggagctcctgagcgagatggcggcggcggtgcaggagagcgcgcgaagtacgggaccgaggtcgtgtgtggctgcgccatgggcgcgggcggggcatccgggcaccgccgggccgggaggcaggaggcggggtgtccgggcctggccctgccttttttccatgtggttctctaaacctcttgttcgtaaaaagacaaaaaaacaaaacaacaaaaaagcgaaattggaacaagtaaaagtcaaatcgattcagcaaatatttacggtacagcgcagttgcaggagcccctccgtcggagcgagtaggccagtggggaccgaagtgctgagagctggccgggtcgctgggaggggtccccgcccgggggtggaagggacgggagcctacagtgagtgatagaaacgtggagttcttgattattttacacgaaattttgaattattaaacttctttttctcaaattctgatgttaacattaaagttaatgcttccatacactttaaaaagtaggcccagcgcagtggctcactcccgtaatcccagcactttgggaggccgaggcagttggattacctaaggtcaggagttcgagaccagcctggccaacatggtgaaacttcgtctctactaaaaatacaaaaaattagctgggcgtggtggcgggcgcctgtaattccagctactcaggaggctgaggcaggagaatcgcttgaacccgggaggcggaggttgccgtgagccgagatcgcgccattgcactccagcctgggcaacaagagcgaaattccatctcaaaaaaaaaaaaaaaagcattttaagagccacaaaacctaaatgcatatgcaatcgttggagtaaatctgggtattgtgaaagcaccattttttttctgaccagcagagggtactctttggctatgctcaccaaaatcacttgagaagggttgatctcaagatgtgttcagagtatgctaggataagatcaaatcaaatttgatatactcaaaatgcattgactaatgaactactcttaggatgtaaaaatggccaccttataaataacagccatatcaggcccccaaactgccatcgcttattcaacttggatggcttttgttttaaaagtactgtactgcattttgaaagggtttatcttgagttactgtttttaaggaactgagaaaaataagccaactttgtttcctcatctcagtcaaaattaaggagacttaagtatatgtgcttgaaagattagtgcagccaagtattcaaacatacttgtttccaaaaaggatgggaaaaaagccaactgatgttagcttatacaattgttctgggctctcagatttgatggcctgagggtttggaatgctgtcactttaaacaataatcgccagaactgttctgtgtctgaataggttaatccatacactgacagtagtttgggttggtttgttttttttttttagacagagtcttgctctgtctcccaggctggagtgcaatgggcgatctcagctcagtgcaacctccgcttcccaagttcaagtgattctcctgcctcagcctcccaagtagctgtgactacaggcgcatgccaccacacccggctaatttgtgtatttttagaagagacggggtttcaccatattggccaggctggtctcaaactcctgaccttgtgatacggacacctcagcctcccaaaatgctgggattacaggcgtgagccaccgtgcccagccagttttgggttttttccctccaacaagaaggttcacaagacacattgacagtcctgaagggggcataatcattgcccctgacacccatggttcagacacaggaaccaatgctgttgattcatgtttattttcagaagccctgttttctgtctttttcaaaatcttttttctattaatatatagttatgcacccttcctaacccccattcttcagtggtaatttttttagatcaagattccaagttttatttgtatgatgatatataaactagtcacagtggaaccatgtaggaagctatgattactttttgttttctttgtaacttttggatttccctggagttacaactatcttggttttgtttatgtgcttatttagttttttacatatttattcctactttaacctcacatcctttactagtgttctcaatctcccctcaagatgttcagatgaacgaagtatgttatcagtttcaccttcctgaagacatctctagagccttcggacttgcttaatatggactggctgatctctcggctgtttgctgagatctctcttaaccattattatctgggaattctctgtatctttgttgggtcctatgtttagtatatcctacagttttctttttctcagtttactacctcttttttttttttttgagacagtctgtcacccaggctgatgtgcaatagcatgatcaaagctcactgtagctttgacctcctaggctcagatgatcctcccacctcagcctcccaagtgagtatctgggactgcaggcacacaataccacagctggctagttttttgtattttttgtagagacaaggtctcactatgttgcctaggctggactcgaagtctggagctcaagaggtccacctgccttggcttcccaaagtgccaggattacaggcatgagccaccgcacccggcccatgtaaaattttttttttttttttcgagacaaggtcttgctctgtcacccaggctggagtgcagtggcacaatcataggtcactgctccctcaacctcccaggctcaagagatcctcttgtctcagcctcctgagtaactggtaccacaggtgtgcaccaccatgcccagctagtttttgtattgtttgtagagacggggtttcactgtgttgcccaggcttactaccttatattatggcacacagactctgccagcttcctgaagaagggggcatgagatgtaccttttgaggctttcttttctattttttgagaccgggtctcactctgttccccaggctagagtacagttgcgcaatcacacctcatgcccagctgattattttattttctgtagagacgggtcttcctttgttgcccaggctactctggaactcctgggctcaggcgatccttctgccttggcctcccaaagtgctgggattatagttgtgagcccccacaccggcccctgtttgaggcttatgtctgaaaaagttgtggggtttttttgtttttttgggttttttttgagacggagtttcgctcttgttgcccaggctggagtgcaatggtgcaatctctgctcaccgcaccctctgcctcctgggttcaagggattctcctgcctcagtctctcgagtagctgggattacaggcatgcgccaccatgcccggctaatagtttttctatttttagtagagatactaaatgttagtcaggctgaccatcgcgcccggctgaaaaagttctttttctgcccttacacttaagtgattgtttgtctaggtattgaattatttgttggaaataatatttcttcagacatctgaaaacatttttccactacatcttagcttctagtgttactcctgatttttgtatgtgaccttttttttctctggaagtttgaattatgttttcttcataaccagtgttctgaatcttctgataaagttttttttttttcacttcacagtgtgggcacacagtgggccctttcaagctagaaattcatgtccttcagctgtggggaattttgaattatttgattgatgaattccctccatctgttttctctgttctttccggtatttctgtaattaagttactggatgtcctctgttgtccttctggttgacttactgtggcttctgtgttgcttttatattttctctacttcctgggaactttcttgaactttatcttccagattttctgttgaatttctgctgtcttttttttttttttttttttttaagagacagggtcttgccggccacagtggctcatgcctgtaatcccagcactttgggaggccaaggtgggcagatcatctgaagtcgggagttcgagaccagcctgatcaacatggagaaaccccgtctctactaaaaaaattagctgggcgtggtggtgcatgcctgtaatcccagctactctgtaggctgaggcaggagaattgcttgaacccgggaagtggaggttgcggtaagccgagattgcgtcattgtactccagcctgggcaacaagagcgaaactccgtctcaaaaaaaaaaaaaagagagacggggtcttactgtgttgcccaggctggcctcagactcctggtttcaagcaatcttcctgcctcagcttcccaagtaactgaaactacagagacataccatgtatttttaatttataactttttttcagaagattccctttttcttcttattatgccttctgcctgtttttgtgcctgttttatgattgcattaacttttttctgatgataaaatattagtaatagatgtttaaaattttctcctttctgcagtttttcctctaactttcttctgtttgttttattctatttcctttttcctttgttgtctggtaacccttggctgtctagtcatatttcagagtggaagactaaaaagtatattggaagctctgggtggtagaggggcttacggaatatgaacgtcactatagttgttctcagtaggctatttagttggggaaaccatttcagtgtcattcccacttctcttggggtatacctagggaagacttccagtctcctggctgaagtgtgaaggcctgattgcttgtgttatgggagccatgttagggaagagagcaggagatcctgttttcagtgtgacaccctgactttcactgtacctagtatttttccctagtccaaatagcctgtgtttgaacctctccagaaaataaacctagtctcttgccagaatgagggaaaggcagtcacctaaagctgtggagggaactggggtcccactacttctcaaacgtactcgaaaagagtcttattttcatatccctgtttcacccctaatgaagctatttggtgccaccaattcgttagggtttggggaaggggagaggtggattttggagtgtaactcaggctggtgcttgactctccccattgctggcctaggattcagttttcttaggtcttataaatcattttccactcttctatcagcttccaatgtatcatggctgttgtttctccctgtctttctcatcctttggaattcatacttttaaaaacaaatctggccgggcacggtggctcatgtctataatcccagcactttgggaggccaaggccagtggatcacttgaggtgaggagttcaagaccagcatggccagcatggtgaaaccccatctctactaaacataccaaaaaaaattagctgggcatggtagtgcatgcctgtagtcccagctacctgggaggctgaggcaagagaatggtttaaacccgggaggcggaggttgcagtgagctgagattgcaccattgcactccagcctgggtgacaggacaagactccgtctcaaaaaaagaaaaaggaaatccttttattatggttttagtggggtttggggaaggagtaaaaccagatgcataggttcagttgaccatcacacacggaagtgtttttagttacagtgttttttaagatttttatgtcaatggtcactgcttaatatgattaactttttttttccattctcattttacagttcctgatgaatatctgttatcgtaagtacatatactgttgtatttgatttttttttaaccattaatgttaaaatcctttcaacatcaactcttgatttttaaaaatactcttgaccgggcgcagtggctcacgcctataatcccagcactttgggaggccaaggtgagtggatcatgaagtcaggagatcaagaccatcctggccaacatggtgaaaccccatctctactgaaaatacaaaaaattagctggacgtggtggtgggcacctgtagtcccagctactcaggaggctaaggcaggagaatcacttgaacctgggaggtggaggttgcagtgagccaagatcatgccactgcacttcagcctggggacagagtgagactctgtctcaaaaataaataaataaataaataaataaataaataaaataaaaaataaaaatattcttactaccaggcactgtgactcacacatgtaatctcagcactttgggaggcaaaggcaggaggattgcttgagcccaggagttcgagaccagctctagcaaaatagggagaccccccatctctacgaaaataattttaaaaatagaataaaaggccaggcaccgtggctcacacctgcaatcccagcactttgagagactgaggtgggtggatcacttgaggtcaggagttcaagaccagcctgaccaacatggtgaaaccctgtctctactaaaaatacaaaagtagtgggatgtggtggcacacacctgtaatctcagctacttgggaggctaaggcaggagaattgcttgaacccgggaggttgtggttgcatatctcgctgcgattgtgccattgcactccagcctaagtaacgagcaaaattccatctcaaaaaaaataaaaaataaaaaatactcttagaaactaggaataatattttcttgacatgattcttaaaaatttgtctcaattgaatagccaacaccatatccagtattgtcatatttgccactcttatttaacattgttttaaaaattgtggctgttggccgggcgcaatggctcacgcctgtaatcgcagcattttgggaggccgagacgggcgaatcacctgaggtcaggaatacaagaccagcctgaccaacatggagaaaccctgtcactattaaaaatacaaaattagccaagcatggtggtgcattcctgtaatcccagctattcgggaggctgagtcaggagaattgcttgaacctgggaggcagaggttgctgtgagccaagatcatgccattgcactccagcctgggcaataaaagcgaaactctatctcaaaaaaaaaaaaaaaaagcgtagctgttcaactaacacatgaaaaagaaattacaaatgtacctatctgcaaggaaagacaattatcattatttgcagttgatacaactacttaaatgagaataatatagagtggtcagttattttaaaaatgcagagaccaaaaaagtaaaagctacctaggtataagtaatacttaattactgatacacacttacatttaaaaatcctggccaggtgcggtggctcacgcctgtaatcccaacgctttgggaggctgaggcgggtggatcacctgaggtcaggagttcgagaccagcctgaccaacatggtgaaaccccgtctctactaaaaatacaaaaattagccgggcatggtggcaggcacctgtaatcccagctattcggggggctgaggcaggagaatcgcttgaacccaggagacagaggttgcagtgagctgagatcatgccattgcactccagcctgggtgacagaggcaagactctgtctcaaaaaaaaaacaaaacaaaacaaaacaaacaaaaaaaaacaaaacctgtcccaggaggactgtttgagccctgaagttccaggctgcagtgagctatgattgtgccactacactccagcctgggtgatgtgagaccttgtctctaaaaaaataaaagttctgaagaatatataccaagctctaccagtgttttttctttggggcaaggaaggaggtagaattgagggaacggccttaacctttactgtatttcttaaatttttaataagaattaaatattactggaaaaaaatgtactactttaaaaacaaaagggcaaagaataaaagatgtaaatagccgaatcctttgggaggaaaaagacaaatcttactagtgaccacaaaaatacaaattaacataacataacttttcatctagaaaattagtgaccacagaaaagaagttgacacaaatatggggaaaggggtcatttataacaggaatgtaaattgcagggtaacaggcaataggaactttaaaacatacatattctttgacccagaaattccacataaaagaacatatacccaggaagtaattatagatgtttgtaaagattttacagtgaggatattctcagtgtgatgaatatccagtattgtttatggtagcaataaaacatagaaacaatctaacaattcatggagtttgaggagaataaaaatgattcatctttacagtagaattatttgtaaccattaaaagtgatatggaaaaatttttaatgcattcaagagatgttcacagtaggtattaaagtggacagagcaggttaaaaaaattcttttttttttcagacagtgtctcactctgtcactgaggctggagtacagtggcgcgatctcaactcactgcagcctctgcctcccaggttccagtgattctcctgcctcagcctcctgagtagctgggactacaggtggcacacaccgaggcaggtggatgatgaggtcaggagttccgcctgccttggcctcccaaggtgctgggattacaggcatgagccaccacacctggccttaaaaaaattcttaaaggtaactgttgagattgattggtaaggttcccgacaaattttatttcattgttttttgtattttgttattttatagactaaatcttcatatgtttaatataaaaattcaaagcactcttttctatttcccccaataatttgttgtatatgtggctggtttgttggaaaatgaagtaagaagttgaacattttaattttgaagccttactaggtttgtcttactctgtgttaagtcatataagttctttaaaacattaacttttcagtttgagtttaaccctgccattttattttctagtttataaaaataacccacacttaggccgggtgtggtagctcatgcctgtaatcccagcaccttgggaggtgggatgcgcctgtaatcccagctactcgggaggctaaagcaggagaatcacttgaatctgggaggtggaggttgcagtgagcagaggtcgtgccactgcactccaacctgggcaacacagtgagactccaactcagtaataataataataataataataacccacacttataaaaaacttttattggaaaataaaacctataaaaagcatcaataatcataccacccagtaataatcactcttaaattttggtttattgcttttttttttttttttttgagacagagtttcgctctgtcacccaggctagagtgcagtggcgcgatcccggctcactgcaagctccgcctcccgggttcacaccattctcctgcctcggtctcccaagtagctgggactacaggtgcctgctaccgtgcccagctaattttttgtatttttagtagagacggggtttcaccgtgttagccaggatggtctcgatctgctgacctcgtgagccaccttcctcggcctcccaaagtgctgggattacaggtgtgagccaccgcgcctggccggtttattgccttttcaaaaaattaaattttggccaggcatggtggatcacgcctgtaatatgaggatcgcttggggctgggagtttgagaccagcttaggcagcacagggagaccctgtctccacaaaatcaaaaaattaactggatgtggtggtatatacctgtagtcccggctgctagggaggctgaggtggtgggaggatcacttgagcccagggggttcaggctgcagtgagccatgattgcaccactggaatccagcctgcctgggtgacagagagagactttgtctcaaaaaacaaaaaacaaacaaacaaaaaggccagacacgctggctcacacctgtaaccccagcactttgagaggccaaggcggggggatcacctcaggtcaggagttcaagaccaccctgaccaacatggcaaaagcccatctctactaaaaaatacaaaaattacctgggcatggtggcctgcacctataatcccagctactcaggaggctgggccggagaatctcttgaaccccggaggcagaagttgcagtgagccgagattgtgccactgctctccagcctggacaccagagtgagactccatctcaaaaaaaaaaaaaattaaacttttaattttgacataattgtaggtttcctttaaaaaagttaacatgcttgagagttcctaaaatataattttgtcttcaacctttctcacctaatattataagaattttctcacatatcaaagttttttcctgtatatcatttaacagttggatagccttattactaatccaaaaagtacacatttattatcttcagatgggcaacataaaaaagcctgataatactggtgttagtggggacatggagaaagtagaagttggtttttctgtttgtttgtttcatttattttttttttgagacggagtctccctgttacctgggccagagtgtagtggcgcgatcttggctcaccgcaacctccacctcccggattcaagcgattctcctgcctcagcctcctgagtagctgggactacaggcgtgtgccaccacgcccggctaattttttgtatttttagtagagacggggtttcaccatgttagccaggatggtctcgatctcctgacctctggtgatctgcctgcctcggcctcccaaagtgctaggattacaggtatgagccaccgcgcccggcctgagaaaatagaagtcttatacagtgctggtgggagtgctgttttcacttttttgtgtgttttagtttttttttttcttttttctttagagatggggtgtcactacattgctcaggctggtcttgaactcctggactcaagtgatcctcttgcctcagccttccaaaatgctgggattacaggcatgagccaccactcctgtttccactttggagagctattggcaatatctattaaagttgaaaatgaacatatgctttagttacataaactaaagggggattttcagagatgtatgccaagggacatgtatggggataattgaatattatttataatagtataaaatggaaacaatgtccatacatagagtacttaaataaaattcagtgtatacatataatggaatattattcaaaggtaaagtaaaaataaatgtccgtcaacatgcctcattttcaaaaatgcattgagtaaaaaaatgcaagttgccaaaagaagtctacgatattttatattttcttttatttttcatgagctatttcaggaacagcaaaaagaagcctacaatataccttttatgttttaaaacaatactatatatgtatatgcatacatctatgcacgtgtgtttgttatgtatgtgtgcatacatatgttctatatataatatttaatatgaacacattaacaggaaggaaaccaacaaatgcatgtgcttgcctcagggataaggggaaggtaggaagaaggatgcactacagagaagtataaagagggcttctttatcactaacagtttactccctttattaaaaatataatacaggccaggcgcagtggctcacacctgtaatcccagcactttgggaggccgaggcaggtggatcacctgaggtctggagtttgagagcagcctgaccaacatggagaaaccctgtttctactaaaaatacaaaattagccgggtgtggtggcacatgcctgcaatcccagctacttgggaggctgaggcaggagaatcgcttgaactcgggaggcagaggttacggtgagccaagattgcgccattgcactccagcctgggcagcaaaagaaaaactccatctcaaaaaataataataataataaataaatatatatacacacacacatatatacataatacaagaagatctgaaataagtacacaagatattaacattaattctggggagtgaatgggtccatgggttttgctgtattattttccttttttcaaaattaaaatgaatttttaaaaaatactaagtctagtgatcctttgggcaagttactgaggtgactttgagaatcaggccttctaatctgaagtgtttttatttcacaggctgaagtttctctttggctcatcagccacccaggccttggacctagttgatcgacagtccatcaccttaatctcatcacccagtggaaggcgtgtttaccaggtagaagtctagagatgggggtgatccctacagaaaccccttaggacaaaatgttcttcatctctgtagaagctgttgactagctttaaatatttcctggactgttaaaaggcttttgccccaacttggtaaaattaacgaattgataattttttaaaatttttatttacttttaactgacagaaactgtctatattcatggtatataacatgatgttttgatatatggataccttgtagaataactaaatcaagctaattaacatatctaataccttatatacttctttttttgtggtgagatcacttaaaatccattatcttagcaatcttcaaatatacagtacttcagtctttttcttggtttttatagagacagggtctcactatgttgcccaggctggtctcaaactcctaggttcaagcgatcctcccaccttggcctctcacaatattgggattacaggtatgagcaccatccccgccaatactttgttattaaatatattcaccatgttgtaccatagataccctgaacttatttctcctaactgaaattttgtaccctttgaccaatatctccttatcttcctcttcctcccccaccccaaggcccctggtaaccactatttctttttctatgagttcaacttttttttttgttttaaataaagacagggtcttgctatgttgcccaagctggtcttgaactcctggcctcaagcagtcctcccccttcagcctcccaaagtgctaggattacaggcatgagccattgcacccagcctatgagttcaactttttttagattccacatataagtgagatcatgtggtatttgtcattctgtacctggcttatttcacttagcatagtttcacttaacaaaatcctccagaaatttttgtaactaaaataagatggccaggcgtggtggctcacgcctgtaatcccagcactttgggaggccgaggcaggtggatcacctgaggtcaggagttcaagaccagcctggccaacgtggtgaaaccccgtgtctactaaaaatacaaaaattagctgggtgtggtggcaggtgcctgtaattccagctactcgggaggttgaggcagaagaattgcttgaacccaggagaaggaggttgcagtgagcggagatcgcaccattgcactccagcctgagtgacgagcagaactctgtctcaaaacaaacaaacaaacaaaaacacaaaaaaaaacttggatggtattgtcctactcaaaagagactgccaattattagatgaattttctcatggagaacttaggaataatcaaagtcactgaacttgcagtttgtacctgaggaggtgtgtctgtcctctttcctggtgtttttatttttggtttttaggtagctaaaatacccgaaactagagggaccttcaagtttttcccattgcttttagtttgggatatttggtcttgattccattatgggcacaatacttgacctggcaagtagacttttgtttgaaatagtttaattactgttgactttttgttcctcccattggtcaacagtaacttaagtcactggtttagtttttgtcgttcacatctggtatatattacattgctttattaattataaaatactaacttccaagaattgtggctgtcatcttggactttgaattaaatgaggctgtagaaatcttatacaccctcaaattaaccttaatggttgcattgtatggtaatatagtaagaatttggctgaattcaggagttgtatgagatgataaaagttgagtcacatactgccttagtgcccagctagttatcttttcataggtcattcttcatcccataggtcaactctaatattattgttctccagatgtaatgtgaaataattctaaagtcattgttatgttgctgacacctgagttgttttctataattttttttttttttttttaaggcagagtctcgctctgttgcccaggctggagtgcattggcatgatcttagctcactgcaacctctgcctcctgggttcaagtgattcttctgcctcagcctcctgagtagctgggattacaggtgtgtaccaccacgcctggctagtttttgtatttttagtagagatggggtttcaccatgttgtccaggctggtctcaaactcctgacctcaggtgatccaccacctttgctttccaaagtgctgggattacaggcgtgagcctgcactcctggccactttttatacttttttgattcacttaataaggaggatgtttcagtcaggagaggctaagttatgctgtggtatcaatgaccccaaatctgaaaggcttacaaaaacaaagttttagatctcattcatgctgtgtatccaccaggagccagctgtagctctgttccaaaacagcttcatgcagggatcccagtgggcaaagcagcccatatctggaacactgtgaatctcaaagagaaaaaggaaaacatggtacacaatttttaacatttttcgcttggctactcagattttactaaagcaggtcacatggccagcctgtatttaacaggccaggaatgtataatcctgttttcagagagaagcaccaaacacaaggaacaataacaaagacactgtggagtgtcctaagaggcttggagcggtcataaaataaaactgtacccatgaatggatgaccatgtagatgggtcacctctccttgcgacctaactgaaaccacagtagaaccacagtagaaaccacctccaagtgaggttcctacaagttctgtcagccatggtctgagtatcctctttccagcatgttccttttttaaaaagctctctccttctggggataaacattccagactataagcgggaaaactaggagcaattcctgtaagaggaagttgttttttcactgaagggtgaaggaattgaattatgttatccttaaggtcaatttccagttctaaatgtttctaactcagattttgcctgattgttgggttcattagttgtccactgctagataagcgaaaagcaaattcgaaatttaacctcttttggtgtttattgctttaggcagttgaacattttgagtcttagcccttgaaaggctcaggcaaggaaactctgtagaatttctccccatctcaagtcaccagctgtttattcagcatgatccagggaggattatgatggacggggactcgcaataagaaggaagcagtgaattattctagtcagtacagaatcccagaggcttctgcttgcttaagtttaaatctagagagaagagacgagataactaaagggagaagaaacctaaagttgtattcattggtaatagtttagacacccaagaattataggccgggagtggtggttcatgcttggaatcctagcagtttgggaggctgaggcgggtggatcacctcaggtcaggagttcaagaccagcctggccaacatggcaaaaccccatctctactaaaaatacaaaagttagccaggcatggtggcacatgcctgtaatcccagctaatcaggcggctgaggcaggagaatggcttgaacccaggaggtggaggttgcagtgagccaagattgcatcattgcactccagcctgggcaacaaaatgaaactctgtctcaaaaaaaagaattatacatgtcactgctggatgttgtgggttttttctttaggattaagtagaaaacaatctgctttaatgctcttccttcagtgtaagcttccacacatgctggggaaatctctccattgatactgaatggtctcggtgatatgttcataacacatcagagccttgcagtaggtaatatgcaaggtgtgctttttcaacacctaatttgtaactgggtggaaatcttttttttttttttttttttttttgagacagagtcttgccctgtcacccaggctggagtacagtgatgcagtcttggcccactgccacctctgtctcccgggttcaagtgattctcctgcctcagcctcctgagtagctgggattacaggcacccgccaccacacctggctaatttttgtatttttagtagagatggggtttcaccatattgaccaggctggtcttgaactcctgacctcatgatccacccgcctcagcctcccaaagtgctgggattacagacgtgagccactatgcccggcctgaactgaaatcttgaatgtgttcagtaggcatcttcttacccaatcattggctatttctggtaacctaaaatctcccgaggaattctgactgcgtcaaaaaaccatactgaggctgggtgtggtagctcatgcctgtaatcccagtgctttgggaggccaaggtgggaggatcacttaagcccagcagttaaagaccagcctggacaacatagcaagaccccatctctacaaaaaaaattttaaaattagcatagggtggtggcgcacaccagtactcctacctcctcaggagactgaagtgggaggatcactttagccgagggattcaagactgcaatgagctatgatctgccactgtactccagcctggatgacagaacaacatcctgtctccaaaaaacaaaaattaaaaaaaaatgttaataaaagctgtactgggataactgcattatatgaaccactgaaaatgtgacaaaagcacagcagtggaacctgctgtttgttcttgcagtcaaaccatacctgtagctttattctctgtgggtaagaaagattaaagaatcctaggagtgctaacattgtaattcaaaaaaaatttaaaagtccttgctttttcatttagattgccatctgagagcctaaaagtgctttgaaggctgtgtggcaaattcctaagtggcagttcattataaaatcaccctcaggacatttctgcttccctcagatactaataataatcttacgcctccaggtgggaagttaactctaggaatgaagacctcaacaaaaagtttttggctgcttggtggtagagagacttaaacaaaggatttctccagcaaatttgtgcgatcatactacagatgtgtcttgtttctcctgtacctctcctttttgtccctcttgaccaccaccaagactgttagactgtgcctcttatcaacccactatgtatcagtgtcctccttccatcctgctagatgagtaggcagatctgggcctgcctcttttcctgagacctccatcctgaacagctgagtcattcctttcgcaagggtctttgctttatttattctctctgctctcaaatgcttttcaaaagcctcttcccagtttcttcttttgttcttctgtgacctatctttattttagagatgggatctttgtcacccaggctgcagtgcagtggtgcagtcacagctcactgcagccttgacctcccaggctcaagcagtcctcccttctcagcctcctgagtagctgggactactggcatgtgccaccatacctgactttaaaaaaatttttttttctatagaaacgaggtctcaccatgttgcccatgctggtcttgaactctggggggggtcaagtgatcctcccacctcgacctcccaaagtgctgggattacaggctttgagccaccacacccggcctgagacttatcttactcctgccctgctactgaccctttgcctgtttttactctctctttaggtatgtaggaagctttagaaatttatacacctgctgtgaaataccaaaggttaagaacccccacaataaaatgtagatgagagattccccccccccacttccttcttattacagtcagcccatagagtgggccccatgaatcactaggcgtaggaacagaatggtttatgtggttggttgaactaatctgaaactcttcagttcctttatatgctgtcctaaaggtgagcactgagaggtgaggaagggagagtctgtacactggaggaagagaagttgtttcctcttttatgtaaaacattactgcagttcttctcggtgcaatttgcagagcaactctgagtctacataaataaaaagggaaagaggtggtttttccagcacatctgaggtctgatcccatctatcctttctttgtaggtccttggaagttccagtaaaacatacacatgtttggcttcttgtcattactgttcatgtcctgcatttgcattctcagtgctacggaagagtgacagcatcctggtgaggatggggaagactcttcccactgtagttgaatgtagagagaaattgcccttactttgtggtttaactattctacaaaatgggaatcttattatatgttgaaacaaatggtagttttttgtctttgtcttcagttagtcacctcttaggggtttagcctctcaaaatgcaatgtcatttttagaactgcatcaatttcctgaatttttatgtaaaagatcatgagtgaagctttgagaaggaaaaaaagggaatcccagaagtgggcactggggaattagatggccccataaaaatatgaactaaattcgatgttgacaactttgcatatcctactttcagccatgtggtatatctttgcactacctgtgagacagcctgacaccacacttgaccttcacatggggcatgagtaccttcacctattcctttaagcctttgccaatttcatcagagtccagaccatgaagcagaaacaggacatactcacacacaccttattccaaaggaaaaaacactaccttcctgaaagcaggcagctgttttctaagtcttgcgaaagaagaaaataatgatgtccactccattctttccctttcttttacactgttaacttcttaaacatcttgggacctggctggcaagttgggtatagcattgtccaagaggccacattcgtaactgatgtgccctaagtgtatctcaactgcaagagacaggattgaaccaaaaccccttcaagatctaaagctgtgttctctgacatcagattcaacgcaatcatctccccagaggtgtgtacaggccaatatatgcaagagttttgccactactccccgccccccaaccccagaagtataacacagtagttaagagagtagcctagaccagccgcctcgtccgggaggtgaggggcgcctctgcccggccgcccctactgggaagtgaggagcccctctgcccggccagccgccccgtccgggagggaggtgggggggtcagccccccgcccggccagccgcctcgtccgggagatgaggggcacctctgcccggctgcccctactgggaagtgaggagcccctctgcccggccagccgccccgtccgggagggaggtggggggttcagccccccgtccgggagggaggtgggggggtcagccccccgcccggccagccgccccgtccgggagggaggtgggggggtcagccccccgtccgggagggaggtgggggggtcagccccccgcccggccagccgccccatccgggaggtgaggggcgcctctgcccagccgcccctactgggaagtgaggagcccctctgcccggccagccgccccattcgggagggaggtggggggggtcagtcctccgcccagccagccgccccgtccgggagggaggtgggggggtcagccccccgcctggccagccgcctcgtccgggaggtgaggggcgcctctgcccggccacccctactgggaagtgaggagcccctctgcccggccaccaccccgtctgggaggtgtacccaacagctcattgagagcgggccatgatgacaatggcggttttgtggaatagaaagcagggaaaggtagggaaaagattgagaaattggatggttgctgtgtctgtgtggaaagaagtagacatgggagactttccattttgttctgtactaagaaaaattcttctgccttgggatcctgttgatctgtgaccttacccccaaccctgtgctctctgaaacatgtgctgtgtccactcagggttaaatggattaagggcggtgcaagatgtgctttgataaacagatgcttgaaggcagcatgctcgttaagagtcatcaccactccctaatctcaagtacccagggacacaaacactgcggaaggccgcagggtcctctgcctaggaaaaccagagacctttgttcacttgtttatctgctgaccttccctccactattgtcctatgaccctgccaaatccccctctgtgagaaacacccaagaatgatcaataaaaataaataaataaataaataaaacaaaaattaaaattaaaattaaaaaaaaaaaaaagagagagtagcctagagactctgatgagcatgtggttacaatacctgtcttcctagggagctgtcagatttcagtgagataatctatgagaagcacttcacagcctagtgcctcaaggaatgttaaccattgctgtgacagctttctgaaggcaaggaagaaatataacttaggactaacgtgaggagtgcaggtagtctgggttttcaccatgggttacataccttgtgcctgatggatctaagccatttcccaaagcagcaggcaaagtaagtctgtgtccactctgatttctaaagagaatactcctgtctcatcatctttatctgcagtttttatttatttattttttgagacagtctggctctgtcacccaggctgtagtgcagtggcgtgatctcggctcactgcaacctccacctcctgggttcaagcgattctcatggctcagcctcctgagtagctggaattacaggcatgtaccgccacacccagctaatttttgtatttttagtggagacagggttttgccatatcagccagactggtctcgaactcctgatctcaagtgatccatccgcctcagcctcccaaagtgctgggatgacaggtgtgagccaccatgcccggcccatctgcactttttagacaatcagttagagaccccgtaatctgtatgctctagtcttctcctgccaaataagatggtaatgagaaatcttggttagactggccagccctggccctgcctgtttctaataggtgtgtgtgttttatattccagtgcaagcatctcttggcagtttacctgagtcaggttatgaggacctgtcagcagctaagtgtctctgacaagcagttgactgacatattattgatggagaagaaacaagaagcataaaaggtacagattgagcatcattctttcaaaatagaatcctgtcaagaaatgcattgaaagcgtcatgattcacatggaaaagaggtgaaatggatcttcagacacttcatgttactgtcccttttccctccaggactgcaggaggtgctgtgggttggagccgtgggctgtggagggtttgtgtatgatgagaagccctgtacagtcttgtcaagaaataccctgagccagtctctgagacgcttcggtaaaaaatgtccctggatggaatcaagattttaaattcaaataaagcctaatatcatgttgtgtccacatta

SEQ ID NO: 8808 - DNA, 400 bp, Homo sapiens
gttgtgagcggcaaaactgagacctattttggacatgttaagtatgagatgaccattagacttcaagtcaagatgtcgggtgggcaatcataattataagtctgccatttgggggcaagttggggctgaaggtataaatctaatatttaaaactatggaactaaaagatatctcctaggtgttggggcagagagaaaagagaatagggctgaaaacagccctaaggcgtgccaacattaagaggtagggaagtctattcacctcactagagagaccagtgaggcatcccagaagccaagtgaaagtattttcagtaggagacagtgatcccctaagttaaagctgctgatgagtaagttaaggattgagaagtaaccattggatttggtgactttgataa

SEQ ID NO: 8809 - DNA, 6910 bp, Homo sapiens
gaaactagaaagctttgcaaattcaatttgccgccatctttgttaggggtaccgtgacttccggctagggcggaagagaacctaatgggtttgggggaggtgcctgaatagggtttgagggtctgtttgagttgggtgaagaaggcgggaagttaatcctcttccaatcagctccccatctcgccctctggcggctccggaccacaggccgagttactctgattaccgccatgctccaagacccgcactgacagtccccacgtgagggaccgcggtgggagtcctaaatgggggaggaggggacgggcggcactgtgcatctgctgtgcctcgcggcctccagcggggtccccctattctgcaggagcagtcgcgcggcgcccccgcccgtcagcaggtggggccttggacgcctgtatctaaaccgaagggggttcggtgttttgactctgggtcttcaaggcagtaggggctggggaagtttcagtgttgaatttgtaggaccgaggaggcaatggaccaataagcctggttccccaaagaagcactgccaggtcatatggaaagaggatggggctgggagctggcacacttgggtcctaagggggaaggggatgggggggtgctcttgtctgatgtccctaacccctccttagctcccgttctctgtcatcggttccctcaatggagtccacatgtttgggcagaatctggaggtgcagctgagtctgcgaggaccgagaacacgactgtggtgtggaaaagcttccatgacaggtccccaggagggaacgtgggacagggacagggcctgggtgatagtccctgttgaagatgaccccggaggccttccagctctctaaaagcagctgttaatttggctatgggatctttagcaagccagttaccctctttgatccctgatgttctctataagaaaggcaggttggtctgagagaggatgtatctggtgttctaggatcaatgggcggactccaacataccccttcctgattccccaggccttgactcattcttctcacttccattccacagcatcaccctcattgttctgtcatctgaggtgggcatctctgagctgaggctggagagactactccaaatggtgtttggagccatggtgagactcaccagtcctcttttctccccagaccaggaatctgagatctcagcatccttttccctcagacctaggagtgcagaccaccaacacttccttcctcagaacccaggaatcttttgtttgtttgtttgttttgttttgagacggagtctcgctctgttgcccaggctggagtgcagtggcttgatctcggctcactgcaacctctgcctcccaggttcaagcgattctcgtgcctcagcttcccaagtagctgggattacaggcacgtgccaccatgcccagctaatttttgtattttttgtagagacggggtttcaccatattggccaggctggtctcaaactcctgacctcaagtgatccacccaccttggcctcccaaagtgctggaattacaggcatgagcctccgcgcccggccagaacccaggaatcttgactccccagtccccagacccagaagtgggagtcccagccccctcttccttcagacccaggagttcaagtcccagcccctcgcccatcctctcctatatgattcttctaggtccttcttgtgggacttgaagaactgaccaatatccgcaacgtggagagactgaagaaggacttgagggtgaggttgcaggacatgagggtgggaagttaggatacctgggcactgccatttgggaactacagttcccagcagcccctggggcagcctggtcccacaggttcttggttgtctgaccctgggcccacttgaatcctaggctggtcccttcttcctctcctaggccagttattgcctcatcgacagcttcctgggggactcggagctcatcggggacctgacccagtgtgtggactgcgtgattcctccagaggggtccctcttgcaggtactggggatgctatggaaactcttacacctgttctgctggccctggctcagtcctcatcctctttcttctggaccattgtcccaacctcctcctatcctctcagcttccagtcctatccccacctggtcccagaagaatcttttttcttttttttttttcttttctttctctttcttttcttttttcttttctttctctctttttatttgagacgtagtttcactcttgttgcccaggctggagtacaatggcaccatctcggctcactgcagcctgcgcctcccgggttcaagtaattctcctgcctcagcttcccgagcagctgggattacaggcgcccaccactacgcccggctaattttttgtatttttagtagagacagggtttcaccatgttggccaagctggtctcgaacttcttacctcaggtgatccacctgccttggcctcccacagtgctgggatgacaggcgtgacgactgcgcctgggccatctttctttcttttctgagacagggtcttgctctgtcatccaggctagagcacagtggctcagtcatagctcactgcagccttgaactcctggattcaagtgatcctctcatctcagcctccccagtagctgacactataggcactgtgccaccacattcagctattttttttttttttttttttttgagacagagtcttacactgtcacaggggctggagtgcaatggcacaatcttggctcactgcaacctctgcctcctgggttcaaacgattcccctgcctcaacctcccgagtagctaggattataagcgctggtcaccacgcctggcccagctaattttttgtatttttagtagagacagggtttcactatgttggccaggctggtcttgaacgcctgacctcgtgatccacccgcctcagcctcccaaagtgctgggattacaggcatgagccaccgcgcccggctgacattcagctatttttttttttaagagatggactagggttggggatgggtttccattaagttgcccgggctggtctcgaactcctgggctcaagcagtcctcccgcctcagcctcccatagtgctgggatgacaggtgtgagccatcacacccggccaccagaagaaccctactatatccagagctggctctgcccctttcctgctcacagccctccggcagcctccacctcccccaggacaaggtcccagctcctcagcctggtgtttgaaggcctgtggcacctggcaccccctaacctgttgctaaatccacagtctacttccacccagctacctcacagtcctgagatcccaacaagtttccaacctcagtgcatgttcttcctcctgcctctcagatctctagctacctctacttaaatactgctcttgtggacttgcctggtgtggcggcctcccaggcatgtgactctcagcaggtgacttggcttctctacgttgctaatggtgcctactcggcatgtaacaggcctggatgaacggtagctgctgcggttacattattagcttcagtttgcccgcccaggctagatgtttaatcagatttcacagacttcacagtgtgagttggggatgtgacttcgtatgaaagtgaaggaactcaggctcagagagggtgagacgtaggagcatggccactgcgcgagctcggggctggctgtgggtttctccccattccctgcccatctgggaagtcgctgccaccccctacgcttgtctgctgactcccagtcctcctgcctcccgtacccaggaagccctctccgggttcgctgaggccgcgggcacgaccttcgtcagtctggtggtgtccggccgggtggtggcagcaacagagggttggtggcggctggggacgcccgaggccgtgctgctcccctggctggtggggtccctgccgccgcagaccgctcgcgactacccggtgtacctgccgcacgggagccccacggtgagtgggtggcgggcaccgacggagggatgtgacctgggggccgagtcgcgaggaggcgggatctgcgatggaaaggggccgggccgcgatgagccccagcctgtgccctgcttcaggtcccacaccggctcctgaccctgactctgctgccgagcctggagctgtgtctactctgcgggccgagcccacccctcagccagttgtatccacaggtgaacccgcgccacgtcccgctttcgctcttaggacacccgctaccaggagggcccttccccaccaccctgccctgccagcggcatctttccccagccccgcctcttctggactgcgctccagtcattcacctacccgccaagatcggccgctcccgcctctgcctctattcttccaggcctcgccccttccccagtcccttctgccctccgccctccactcttcttgcaggccccgcccctcccgattgaccacgcccctatccttgtacaccccccgacctcccccgccggccccgccttcccatgacgacctcacaatgaccacgccccctgcagcttctggagcgctggtggcagccactgctggacccgttgcgggcctgtctgccgttgggaccccgggcgctgcccagtggcttcccccttcacacagacatcctcgggtagggctcggatggagggagtgggtcgggggtcatgtcctcttccccagccatgacattcccttccctttcccacaggctgctgctcctccacctggaactgaagcgctgcctcttcaccgtggagcccttgggggataaaggtgactgaggacaggggcaggggcaggggtaggaggggcgtgggccggggaggcgctctgcatcaccgccttttcctcccagcagagccttcaccagaacagcgccggcgcctcctccgaaacttctataccctggtcacctccacgcacttcccaccaggtcagcggaaggcacagtgctcccactgcgcaggcggggacactgagtcccaggtcgcacaaaatgggagtaggaggtggggttggaggatccggaggaacccagtatgcactgggccatagggcagtggttttccttgagatctgagcattgatgcagatgggaagggaggggaagggaggtccccgcctggcttcagaatctcctggatcatagtcaacaatagttaacactgagacctcacctcttcccagtgcctttacacgtaatgaaagaatgaaatcacttcatcctcacaggtgaggactatcccattacctcatcattcccatattacagatgaggaaactgaggctcagctcatgagtggcagagccatatttgaacacaggggatcttgctcccatatccacacagtccagcgctctgcacaactgccaaaagcacaggctttgctgataggctgagggtatggaggaggatttcacaagattctgggttagaacggaaaaattgtcgtagaacccttaagggcccagaaagacaaagaaagggacctgggatggcgctgtgaccccagtgaagcccggatgaatgcagcacagtggtcaagagctccaactcgggggctgcaccccttcttagctgtgcgactccacctcccactggcccctgcctgtttccctccacccgccttgtacagtggggcgggtgggctcctggaaaaggctacaggagctcctgtgttgctgccgtgttcgccatgtgtattgctaagaggatcacctgcagctgcacagtttctccaggaaaatgggggccaaggctgagaaagaggaagagggtgagctgagtgacatcattgtggtcttcaagttgctgacagccagctagagccccgaggccctcccctggcaggaggctcccaaaacctgtgttcagagaccccacgcgttcagaacttgggatcaggatgtggtgtggcttgcaaaggttagcatgctacttgtcatgtcagtgccccctgttctttctccagagccagggccaccagagaagacagaagatgaggtctaccaggcccagctgcccagagcttgctacctggtgttggggactgaggaaccaggcacaggagtgcgtctggtggccttgcagctggggcttcggcggctgctgctgctgctgtctccccagagtcccacccatgggctgcgaagcctggccacccacactctgcatgccctcaccccacttctttgactacctagcagtgggtgatggacacagacatggggctgttagcgtctctctgtttattcgctcacaataatacacagcccctggatggggagggggtaggaggggctacaacagggtggggtgggaggggaggagacatccacttccctggcccctctcccctctgtgcttgggggggaaagggagggagggggactcccctaaccctccagaatgtaaacagcagcagatgaacaaaaataaaaatacaaaaggccggaggaaagtcccaggcatcccccaaaccctggtgtcttctctgtcaccagtggaggtcccccatccaccaaaactgcctcagtccaaggggctgcccagtgccggccacatcccccggggcagagtccagggctcagaactgctgtgccagcagctcacacaggtgacgggagacgggctccttgctggtgcgcagggtcagccggtacatctgggtgggggcattgggggcagaactcagaggagatggggagcccagggaagtcgggacccaagggagatagaaggaaggaaggataaaggggccagaaaggtgatacaagacacaggagagaaaaatgtaagactgaaatcaacagaggcgccagagaggaagaaaattataaaagatgagagaaaggtggaaaggata

SEQ ID NO: 8810 - DNA, 21458 bp, Homo sapiens
gaaactagaaagctttgcaaattcaatttgccgccatctttgttaggggtaccgtgacttccggctagggcggaagagaacctaatgggtttgggggaggtgcctgaatagggtttgagggtctgtttgagttgggtgaagaaggcgggaagttaatcctcttccaatcagctccccatctcgccctctggcggctccggaccacaggccgagttactctgattaccgccatgctccaagacccgcactgacagtccccacgtgagggaccgcggtgggagtcctaaatgggggaggaggggacgggcggcactgtgcatctgctgtgcctcgcggcctccagcggggtccccctattctgcaggagcagtcgcggcggcgcccccgcccgtcagcaggtggggccttggacgcctgtatctaaaccgaagggggttcggtgttttgactctgggtcttcaaggcagtaggggctggggaagtttcagtgttgaatttgtaggaccgaggaggcaatggaccaataagcctggttccccaaagaggcactgccaggtcatatggaaagaggatggggctgggagctggcacacttgggtcctaagggggaaggggatgggggggtgctcttgtctgatgtccctaacccctccttagctcccgttctctgtcatcggttccctcaatggagtccacatgtttgggcagaatctggaggtgcagctgagctctgcgaggaccgagaacacgactgtggtgtggaaaagcttccatgacaggtccccaggagggaacgtgggacagggacagggcctgggtgatagtccctgttgaagatgaccccggaggccttccagctctctaaaagcagctgttaatttggctatgggatctttagcaagccagttaccctctttgatccctgatgttctctataagaaaggcaggttggtctgagagaggatgtatctggtgttctaggatcaatgggcggactccaacataccccttcctgattccccaggccttgactcattcttctcacttccattccacagcatcaccctcattgttctgtcatctgaggtgggcatctctgagctgaggctggagagactactccaaatggtgtttggagccatggtgagactcaccagtcctcttttctccccagaccaggaatctgagatctcagcatccttttccctcagacctaggagtgcagaccaccaacacttccttcctcagaacccaggaatcttttgtttgtttgtttgttttgttttgagacggagtctcgctctgttgcccaggctggagtgcagtggcttgatctcggctcactgcaacctctgcctcccaggttcaagcgattctcgtgcctcagcttcccaagtagctgggattacaggcacgtgccaccatgcccagctaatttttgtattttttgtagagacggggtttcaccatattggccaggctggtctcaaactcctgacctcaagtgatccacccaccttggcctcccaaagtgctggaattacaggcatgagcctccgcgcccggccagaacccaggaatcttgactccccagtccccagacccagaagtgggagtcccagccccctcttccttcagacccaggagttcaagtcccagcccctcgcccatcctctcctatatgattcttctaggtccttcttgtgggacttgaagaactgaccaatatccgcaacgtggagagactgaagaaggacttgagggtgaggttgcaggacatgagggtgggaagttaggatacctgggcactgccatttgggaactacagttcccagcagcccctggggcagcctggtcccacaggttcttggttgtctgaccctgggcccacttgaatcctaggctggtcccttcttcctctcctaggccagttattgcctcatcgacagcttcctgggggactcggagctcatcggggacctgacccagtgtgtggactgcgtgattcctccagaggggtccctcttgcaggtactggggatgctatggaaactcttacacctgttctgctggccctggctcagtcctcatcctctttcttctggaccattgtcccaacctcctcctatcctctcagcttccagtcctatccccacctggtcccagaagaatcttttttcttttttttttttcttttctttctctttcttttcttttttcttttctttctctctttttatttgagacgtagtttcactcttgttgcccaggctggagtacaatggcaccatctcggctcactgcagcctgcgcctcccgggttcaagtaattctcctgcctcagcttcccgagcagctgggattacaggcgcccaccactacgcccggctaattttttgtatttttagtagagacagggtttcaccatgttggccaagctggtctcgaacttcttacctcaggtgatccacctgccttggcctcccacagtgctgggatgacaggcgtgagccactgcgcctgggccatctttctttcttttctgagacagggtcttgctctgtcatccaggctagagcacagtggctcagtcatagctcactgcagccttgaactcctggattcaagtgatcctctcatctcagcctccccagtagctgacactataggcactgtgccaccacattcagctattttttttttttttttttttttgagacagagtcttacactgtcacaggggctggagtgcaatggcgcaatcttggctcactgcaacctctgcctcctgggttcaaacgattcccctgcctcaacctcccgagtagctaggattataagcgctggtcaccacgcctggcccagctaattttttgtatttttagtagagacagggtttcactatgttggccaggctggtcttgaacgcctgacctcgtgatccacccgcctcagcctcccaaagtgctgggattacaggcatgagccaccgcgcccggctgacattcagctatttttttttttaagagatggactagggttggggatgggtttccattaagttgcccgggctggtctcgaactcctgggctcaagcagtcctcccgcctcagcctcccatagtgctgggatgacaggtgtgagccatcacacccggccaccagaagaaccctactatatccagagctggctctgcccctttcctgctcacagccctccggcagcctccacctcccccaggacaaggtcccagctcctcagcctggtgtttgaaggcctgtggcacctggcaccccctaacctgttgctaaatccacagtctacttccacccagctacctcacagtcctgagatcccaacaagtttccaacctcagtgcatgttcttcctcctgcctctcagatctctagctacctctacttaaatactgctcttgtggacttgcctggtgtggcggcctcccaggcatgtgactctcagcaggtgacttggcttctctacgttgctaatggtgcctactcggcatgtaacaggcctggatgaacggtagctgctgcggttacattattagcttcagtttgcccgcccaggctagatgtttaatcagatttcacagacttcacagtgtgagttggggatgtgacttcgtatgaaagtgaaggaactcaggctcagagagggtgagacgtaggagcatggccactgcgcgagctcggggctggctgtgggtttctccccattccctgcccatctgggaagtcgctgccaccccctacgcttgtctgctgactcccagtcctcctgcctcccgtacccaggaagccctctccgggttcgctgaggccgcgggcacgaccttcgtcagtctggtggtgtccggccgggtggtggcagcaacagagggttggtggcggctggggacgcccgaggccgtgctgctcccctggctggtggggtccctgccgccgcagaccgctcgcgactacccggtgtacctgccgcacgggagccccacggtgagtgggtggcgggcaccgacggagggatgtgacctgggggccgagtcgcgaggaggcgggatctgcgatggaaaggggccgggccgcgatgagccccagcctgtgccctgcttcaggtcccacaccggctcctgaccctgactctgctgccgagcctggagctgtgtctactctgcgggccgagcccacccctcagccagttgtatccacaggtgaacccgcgccacgtcccgctttcgctcttaggacacccgctaccaggagggcccttccccaccaccctgccctgccagcggcatctttccccagccccgcctcttctggactgcgctccagtcattcacctacccgccaagatcggccgctcccgcctctgcctctattcttccaggcctcgccccttccccagtcccttctgccctccgccctccactcttcttgcaggccccgcccctcccgattgaccacgcccctatccttgtacaccccccgacctcccccgccggccccgccttcccatgacgacctcacaatgaccacgccccctgcagcttctggagcgctggtggcagccactgctggacccgttgcgggcctgtctgccgttgggaccccgggcgctgcccagtggcttcccccttcacacagacatcctcgggtagggctcggatggagggagtgggtcgggggtcatgtcctcttccccagccatgacattcccttccctttcccacaggctgctgctcctccacctggaactgaagcgctgcctcttcaccgtggagcccttgggggataaaggtgactgaggacaggggcaggggcaggggtaggaggggcgtgggccggggaggcgctctgcatcaccgccttttcctcccagcagagccttcaccagaacagcgccggcgcctcctccgaaacttctataccctggtcacctccacgcacttcccaccaggtcagcggaaggcacagtgctcccactgcgcaggcggggacactgagtcccaggtcgcacaaaatgggagtaggaggtggggttggaggatccggaggaacccagtatgcactgggccatagggcagtggttttccttgagatctgagcattgatgcagatgggaagggaggggaagggaggtccccgcctggcttcagaatctcctggatcatagtcaacaatagttaacactgagacctcacctcttcccagtgcctttacacgtaatgaaagaatgaaatcacttcatcctcacaggtgaggactatcccattacctcatcattcccatattacagatgaggaaactgaggctcagctcatgagtggcagagccatatttgaacacaggggatcttgctcccatatccacacagtccagcgctctgcacaactgccaaaagcacaggctttgctgataggctgagggtatggaggaggatttcacaagattctgggttagaacggaaaaattgtcgtagaacccttaagggcccagaaagacaaagaaagggacctgggatggcgctgtgaccccagtgaagcccggatgaatgcagcacagtggtcaagagctccaactcgggggctgcaccccttcttagctgtgcgactccacctcccactggcccctgcctgtttccctccacccgccttgtacagtggggcgggtgggctcctggaaaaggctacaggagctcctgtgttgctgccgtgttcgccatgtgtattgctaagaggatcacctgcagctgcacagtttctccaggaaaatgggggccaaggctgagaaagaggaagagggtgagctgagtgacatcattgtggtcttcaagttgctgacagccagctagagccccgaggccctcccctggcaggaggctcccaaaacctgtgttcagagaccccacgcgttcagaacttgggatcaggatgtggtgtggcttgcaaaggttagcatgctacttgtcatgtcagtgccccctgttctttctccagagccagggccaccagagaagacagaagatgaggtctaccaggcccagctgcccagagcttgctacctggtgttggggactgaggaaccaggcacaggagtgcgtctggtggccttgcagctggggcttcggcggctgctgctgctgctgtctccccagagtcccacccatgggctgcgaagcctggccacccacactctgcatgccctcaccccacttctttgactacctagcagtgggtgatggacacagacatggggctgttagcgtctctctgtttattcgctcacaataatacacagcccctggatggggagggggtaggaggggctacaacagggtggggtgggaggggaggagacatccacttccctggcccctctcccctctgtgcttgggggggaaagggagggagggggactccccctaaccccccagaatgtaaacagcagcagatgaacaaaaataaaaatacaaaaggccggaggaaagtcccaggcatcccccaaaccctggtgtcttctctgtcaccagtggaggtcccccatccaccaaaactgcctcagtccaaggggctgcccagtgccggccacatcccccggggcagagtccagggctcagaactgctgtgccagcagctcacacaggtgacgggagacgggctccttgctggtgcgcagggtcagccggtacatctgggtgggggcattgggggcagaactcagaggagatggggagcccagggaagtcgggacccaagggagatagaaggaaggaaggataaaggggccagaaaggtgatacaagacacaggagagaaaaatgtaagactgaaatcaacagaggcgccagagaggaagaaaattataaaagatgagagaaaggtggaaaggatatggaaaggtagaaatcagggagggacaggaagaggagaggaacaccagaggttggagacaggagattaaactgatagataaagaggagtaaaagtggacaaagaaatgtgagaggaggagggtcaaagtggggacgtgaattaaagaacagtgaggcaggaagggtggacgcagagatgacaggcggccttcctgccggcctcaggcctcccacagcagcactcacctgggcctgggcattgggctccagccgaagcagacagcccacctgcagggctttagtctggatgatccccgcccccacgaagttctcagggttggggtccacattgtccaggagagcagagccaaaccccagaagctgggaggagggggggcgccgtcagagtgtgccagagctgttagttaccacacagtggcatcccagatcccaaaaaacccttggggatgggaattggccccactttacagatgggaaaacagaggctcagagaagcaaagcagccataggccggcaaacacgcccgcggtctctcaccttggccttagtaacttctgcgtccatggggtggttggctttgaagattttctgcgcctcctgttgagggctggggaccgggaaggttcaagtcagggacctggacggcccgacccgcccacccagaggcgcggctttggctccgccccctccccacccctcacaggctcagctgcttccagcgctggaagaaatcctgggccgccatctcggtgggctggaagaacttgttgatggtcactgggagcttcagggtgagggcctggggggcgccaccgtacctgatgaggtgaaagggaggctccattaggccccgcccctcaccccggaggctccgcccaccggccgcgccgtacctgactcaccggaagcgcacggacagcagcgggggcgtcaggaagtcccgcaggcactcgatattgagcacctgctgcacctgcgcgccgccgtccacctgcgccgccacgcgcttggtctgcacagccagctgtgcccgccaggagtcaaggaagccagacagaggaggtgggcccccgggaggtctgggtcaggaaccccagagctcccggcagctcccgcctgcaggtctttgagggaccccatggtgcaatcctggactcaatcctacaaggttcaactacaaagttcatactatggaaacctctgaggcgccccctaggtgcctcctttggccttccacaatgtcacaccgcactgagacataatagtattagctctggaggctgacttgggtttgaatcccagctcttaaccacctgagtggctgtgggcaaccacttaacctctcttagcctctggacatgtgtaagcctgggcaacatggcaagaccccatctctacaaaaaaattagccaggcatggtgatgtgcacctgtagtcccagctacttgggaggctgaggcaggaggatgccttgagcccagaagttcgaggctgcagtgagcagtgttcatgccactgcattccagcttgggtgagtgaggccctgtctcaacacaaggacatgtgtaaaatgtcctcaggagttgatgaaataatccagccgggtgtggcggctcacgcctgtaatccagcactttgggaggccaaggtggggaggatcactgagcccaggagtttgagaccagcctgggcaacatagcgaggcctcaactctatttaaaaaaagaaaagaaaagaatccatcacaagtacttgtctgtgtgcccggcacatggtaagtacacaaagatggtagcaattagtgttatcatcatctgcatccgtgtcagtagcccactgggaaggcctgggtctcatgttcttttgtcactgcctccactgagctgcctgcacgagcctctggaaattatgaaagaaggaatttttttttttttttttcctgagacggagtctcgctgtcgcccaggctggagtgcagcggcgcaatctcggcttactgcaacttcgcctcctgggttcacgccactctcctgcctcagcctcccgagtagctgggactacaggcgcccaccaccacgcccggctaattttttgtatttttagtagagaaggggtttcaccatgttagccagaatggtctcgatctcctgacctcgtgatccaaccaccttggccactcaaagtgctaggattacaggcgtgagccaccgtgcccgaccgaagaaggaattttttcttttctttttcttttttttgagactgtcgcccagactggagtgtagtggtacaatctcggctcaccacaaccaccacctcccaggctcaagcgattctcctgtctcagcctcctgagtagctgggattacagtcgcgtgccactaccacccagctgatttttgtatttttagtggagatggggtttcaccatgttggccaggctggtcttgaactcctgacctcaaatgatccactggcctcagcctgccagtgctgggattacaggtgtgagcccccatgcccggccagaaggagttttcaggtcgagcttttctaatttcatgaatgtggcaatggaggcccagagaacgggcaggggggactgatacctccagccgcccttccagggttttccagacactctgatcttcacaataaccctatgaggaagaggagggtctacatacacttcacagcggggacaggagagcccagagaggcaaagtgactcagcccagatcaggcctgatcagcgtctggacccgcaggcctggctcctgagtgcaggcggtgctggcatcatgacatggagcccagtggaggacgatggcaggacacggaaggtgccagacagggacaaaatgaggcctggagcaggtggagttctggaagtaaagcctcccacacaccacttcactgtcatcccctgtcctgggggaaggaatcccacccccatcttaacagatgcagacactcaatctcagagaactaattgcgtgcccaagagaggctgaagagaagtgtggacctgggtcagccggcttccccacggtgaggaaggccgacgtggagaggcaggaggctgggccgggcctgagaggatatgagtctggaggtctcccgggtgaaccacagtgggtgagaaattctggaactgcaccgaggtcttgttgccatagaagagatacatgcggcctgcagtaggtgggggaggcagagctccatctgagtccctctgaccccttccccaaggtctccctccgacccattcccacagtcccccgggacacacccaggttctgtcggaactctgacttgactccgatctgcagcagctggttctcgaacaggaccccgttgttcttacacacaaacctgagggggcagggggcgcaagatgacgggggtgcctgtctgcacctggcctgggctccgcacctgtcccgttcccctcccccaccactcccaggactcacttattcagcaactcatcggcttccggaatgggagggccgatgtcctcaggacctgggctggaggcatggagcagagtgagatgggaaggaacttggtggggaggggcaaaggcccagagcgattgagtgcgagaacaagccctaaggacagaaccccagaaccacatatccagacccctcacagagcctcgaggaacctcgcatccatccagcagtggcctccaatgggaatagaaccctggcccgtgcccccgcatcggcagacaccaagtttccctttcctccaagtccctgcctctgctgctcatcaggaacccgttgacgagggctcccagtcccctaactctccctggggacacccgagtccgcccccccgaccgacctcccaccccaggccaccccttactcagcagctggagctgggtcagccagcaaagccatggggctctcgggggcaggcggctccagctcgctgagccatccaatcccagagcagacaagagaagacaggcgtggcaggcagccaattccacataggcagcgagagggcagaagagagacagagagggagggacggaagagggaaggagagaaggagaaaaggaagagcaggctgagaaacggtgacaggaaaggagacaacgaagggtggccagggtcggcggagtccagagtggcagagggagggcgtgagcagggaggctggggcaggggaggcagcagccagggctggcgaaggcatcaggatggagagaggagcgagtcgggggcgggggaggggctcagggaaaacggggacagaggccgagaagggacagccctgggggtggccgcgagaaggggcccgggcccagggggtgctacctgaggaaggcctcctcgggggtgggccccaggctgggctgggcggccgggccatcgaagacgtccaccagaaggttccctgctcctgcagaagccgggggtgctgccgggggaggggctgcccgcagccccaggaggtcggcggagggcgagggcgtcgactgtaggaagcgcaggtcacggtgaggacaggcggcgcccggcaggacccagccccaggcaccctggcagggcccaccccaggggactcaccacagtgctgggggtgggctccatgcccccgttgatgtcgttgctgctggggtccctccggccatcgtccagggcgctgccggcccctggccccttcttgcgtttcagcttggccaggatggacgactcgcgctcggggaagggcggcatctcctccagcaccgtggcctggcgcggtcggggtggggaaggtcagttcgggtcaggaggaggggagggcgggaagggggtgtgcaagaggggtggggtggggggacagggctctgaccaggacgtcggtgctggccactgagctgagggtgaggtactccacggctcgctgctgcagctccacgtcagcattgcgcagctgggagccggcccgcaggacgccctggatggtggccttggtctcggggaagaggttgatgaacttgatgtaggtggacagcagcagcgcccgcgtggccacgctgcacagatggaacttggagtggagcagggagaactgcactggggggctgtgtgcaggagtgggtgtcagcggggccaggttccactgccctctcccagaaaccccctcgagaggtgcccctccctaggatggacccgtcccaggaccccaagctgctggaggggagtggccctccccaggcaccagacaggggccgcagtcacactctgtccacgatcctgggactaagctcctttcttaccctgctaggtggattggggtggaggccgagaggatgggagcccatcactgcctgccctgagacccctggggatcccccaagccctggacccctcagaagcatgtgtgttctcccctgcaggctgaggctccctcacctggagcgggggtccccagcaatcaggttcccaaactccccaaggatgtagccgccaaccttcaccatgttctcgtgacaggcaggggcctggagcgcctgagtggggtggggaagggcgtggagaggacaacaatgagcgccctctccgggatcggtgggtgcagccacctactgactggtggaacactgaaagctctgctgcaggtggggttataggtgggaaactgagtcacagaaaggttgagtgacgggcccaagctcacacaggaagtaaaacagggctgtgggccggaagcagtggctcatgcctgtaatcctggtactttgggaggccgaggcgggcagattgcctgagctcaggagtttcaaaccagcctgggtaacatggtgaaaccccgtctctactaaaaatacaaacaaattagctgggtgtggtggcgcgtgcctgtagtaccagctactggggaggctgaggcaggagaatggcttgacgctgggaggccgaggttgcagtgagccgagatcgcaccacggcactcactccccactccagcctgggcaacagagtgagactccgtctccagaaacaaacaaacaaacaaacaaaaaacaggactgtgtggggcccctttcctggggcagagggaaactaccgagatccgggggccaggactgcacactgggtgccccatgcccatgccctggggactcctcacatcaggcccatgagaccatagccctgggtcccctgggttggcccagagaggcagaggccccattttgaggtcacggcagtgcaggagaaggagggtggctgcgggctggcaggcgccacggccccggccatccttgctctgcctctaggtcctgtcgtggggtcatagggtcagggtcagggatgctgacctcaaagacggtcttggcggcatagccctggacgtcatcacggttggtgacgatctgtagcacacggtaccacacctcctcactcacgtagtcgcccgcaatgcggatgaggttgaggatggtgtccacgtaccagctgtagtccacggcgtacttctcggccaggatggccaccttcaggacctgccgccggggcgtgtgagagagagtgtgccgcaggccatgtcgggctttcactcacctggatctgggctcaccactgcccccatctggagacccaggagtccaggccccagcccctcctcccttagacttaggaatccaggcccccagccacctcctgcctcagacccaagagtccagcccgcaccccacagcactcacgatctcctcgcggatggcgtagtctgccgtctccaggtaccgcagcatctccgacacgatctgcttggcattgctccggtcacacatggcgtagaggaggtcagccgcccgctgccgcacgctgacgtcccgctccgtctgagggcggagagcagagcccaggtgtgttttagactccctgttggcacagggttggccacccaagggcctctgagcctctggtctttctgaggggggtggcaggcccggggtgggctccaagggctcacaccttgagggcattgatgacggtgtcaatgtgcgtcttgacggcttcatgggagaactcggagctggccagcgtgcacatgctctccagggccaggtagcgcaggttggtctcccggtgctgcaggaactggcccagctggttgcaggcccgaaccaggaggttgggctcactgccagcaggggccacaagagagggatggtgagagaaactgacaggagaaggtggaggactcgggccccagctgacccatctcacagcccccaaggatccaggtcttaaccttgccggccttgcatcgcagtactgcacctccagtgacccagacaactgggcctttgagcccagagaaagatacctagcaattctgcccccaggaagggccccagcaccaacctcacaggtgacacttcacagccccatcctcctcctaccctacctaaaagtcaagattccctgccctctgcctaggactcaggagtccgggcctccatgcccctctttcctggccccaggcatcaggccctgataggcccaggcgggcacctgtcatagtggatgatgaggctgatggtctcgaagaggatggcgttcttggcgttggaatgctgcaccttcttggatttggggggctcctgggccttgttgagcacagtctccagacattccaccagccgccccttcacagccgcatcctctggggaaacgaaggggacgcccccggctgagtgtcctgcccacctggcacacctgctggggtggtggccatgccccagctcctgtcttccaaaggaggagctcggggtgcctctgacactcgagaattctgcagctcagggccagggtctctgctccctcaacctcttcccagcccagcagagatggtgagacaaggcacctctggagacacaagatctatccccagacctgggctctcctcctgctctgaccctctcgggcaagaggtggcaccatgtgagcctcagtttcctcatctgcagctctgaggctccttaggtttctcacagagcaaaggaagctccaggaaccttccccagaggtgcccccaaacccaggccttcccaaggactggtgtgagtgctgagcagcccctgacaaaaatgcacaagccacccacccaagtgtccattcagcaagaggccactgcaggcacactcggtgccatcctcctggcctagaggctgggaggccaaaggagacaaggctcaaccaggtgccccctcaccccccagagctctccaccactgacagatgccagccagcagctcacaggagcaccaatcaccacgtttcctagaatgtgacgtgttttcaagtgtatgcaagagctgtcaagcgttccagcaaaaaatggttccgcagatttttctgcagaattttccgcaggaaaattcaccagatagaggaacaagctaaaatacaccacaaggcagcaatgagcccagtcgccaccatgggacacacagcaatggcatctcctggtttctccataaacaggtgtaggggggctagtccagactacgagaaataacaaagacagaatccaatttaaatcctattttttggaaacagggcaactatgttgtccagtctgatctcaaactcctgggctcaagcgatccttctgcctcagcctcccaaagtgctgggatgacagtgttagccactgagcctggcagaatccgattgaatatgtgatcctagattgtactgtgatatatattctgtttttttatttttttatttttttttgagacagagtctcactctgtcacccaagctggagtgcagtggcacaatcttggctcactgcaacctccacctcccgggttcaagcgatcttcccatctcagcctcctgagtagctgggactacaggcatgcaccaccacacctggctaattttttgtattttttgtagagatggggttttgccatgttggccagactggtctcgaattcctgagctcaagtgatccttctacctcggcctcccagattgctgggattacaggcgtgagccactgtgcctggcccagaacaacatatttaaaggcaaaacatcatgatgtctgtaatttacttttaaatatttcagaagaaaataaacaagagcatgcatacatggcaaaatgtgaagtccaagtaatgaaatctctgtacttatctggatgctgggaaacttttcataatgcatatgacaaaaaaatgacttgcaaacaaattggcaatagcccaccaccatttgctgaaaaggaggtgacacagggttggtgtgtcctcaggcccagcctcaggacaaggctgtgtctccagttcctacaccaccgagggttggagtgggtgaggtgcctgcaatgggtgtaccccagaattaccagctgggccttctggggtggtcatgggcttagagcatgacttaagcccttcttgacaggacgaaaaagaggcccagagaaggaagacatgtccccagggccacacaacagaattcatcactggcttcacacacgatgggcctctggtgtcacctccatatcgtatactcagagtgtgtacacacacaccatgtgcagagggacatgcatggacacacgtagatgctggcaagcattgagacacgcacacacaggcatgcacacaggtatctacactcatgtacacatccacttgcatgcacaggtacacatgtagatgcacacactgatatatacacatgtacacacatagagggacacagagataccatgaacactgccacatatagacacagacacgcatacatacagatgcacacacaatgacacatccacacacaggggatgcacgcagacatgcatgcacacgggcaggtatcgacacacacaggcgaacgcatgcacgcatgcaggcatgcacacagacaggcatgcacacccagagatttggtggtgtacatcagccctggcccctggcaggtgctggacatgctggctgaatggagggaactggtgcattagcacctactgtgtgccaagcccctcagcacagggtccgaagaaactgctccatgaggtcagtcagccaaggcgacagaagctcgggggagctcagtggcagagggaggggtttagagcagagagtctgggggccaactgccacttactgcctagaatggtgatgtctcacctccaagcctcagtttccctgtgtgcatatcacactggctgttcctccttgccagctctgttcggcaggtgcaggtgccccctgcccagtgcctggctcactacaggagtttcatacacactggctattgtgactgtgagcagtaggggaaggttcccaacagatgtgaaaacccctgacagggctatggtaattcaggtagcacggcctggaatcacccactgaccgggtgagtgacgctgggccaggagctccctctccaagcctcagattcctcatctataaaacaggcacagttaacagtccctcgcaacagggctggagtgagagcccgggtagcagggacctcagctatgaggctgatccacgatgctgcacagggtaggcgctgggcctcgggctgcctgcttgcctccccgagtgcagccacgtaaggggacagaggaaccgccccagcttcagagaaatcctgacccagaccctccagtcccacctggtgcgccgtggagcaggaggcccccagatgccagcagcaggccaccccgggttggggagtgcacggcgttcattacctggaggcgggtagcactgcagcagccgcaggagcttcaccgagagccagggtgctgggacgaagtagtaggtgtagtcctggaggtcggtggaggcagaggagacgatctggcggggaagagcaagaaataagttgggggctggggtgggaggggcacgtgggtccacatgccagggtggagcaaatggtgccttccaagggcagtgctgtcagtgttaatggttttgttagtgggttttttttgtagagacagggtctcactatgttgcccaggctggtctcgaactcatggcctcaagcaattctcccacctcagtcccgcaatgtcctggggttacaggcatgagccaccatgcccgaccaatgcaatggttttatgaagcaggaatctgaggctctgggaagggagcgaggaagcgtcaggcacactgaatgggggcaaaactaggactaagcccggctggttgatctttccaagtaatgctggtgtgtggtgggcaggaaaggtctctgctggttcccttctgtgtgacagtttcccagggccccctcctcactcggctctgagcctcccatgccccaggcttcctccgtcagagcacacagcgcaccggctcctggaggctgtttcctgtagtccccctacaaggcttgaagccactcaggggcagggattgggtctgacccttttttgggtccctaggcctaatacaaggtcagataggaagaggttcggggaagaggcagggaattagtgaaagattgaaagatcatggccaggtgcagtggctcacgcctgtaatcccagcactttgggaggccaaggtgggtggatcacctgagatcaggagttcaagacaagcctgaccaacatggtgaaaccccatctctactaaaaatacaaaaattagctgggcgtggtggcacatgcctgtgatccatgctacttgggaggctgaggcaggagaattgcttgaacccgggaggcagaggttgcagtgagccaagatcacgccattgcactccagcctgggcaataagagcgaaactccatctcaaaaaaaaagaaagatcatgtgactttttttcctcattgcaaactcctattcaaccttgaaaagcccttctccaggaagctctgtcccacctccgtgctggtctgtgttcctacctcactgtcatcctggcacactgcagtactcagatgtgtgatgaatgaatgaaacaatgactgaggctgagtgcagtggctcacacctgtaatcccagcactttcggaggctgaggcgggaggatcacttgaagccaggagtttgagaccagtgtgggcgacaaagcaagaccgatctctacaaaaaatacaaaaattagccaggcacctgcagtcccagctactcgggaggctgaggcgagagatcgcttgagcctaggagccagaggctgcagtgaaccatggctgcactactgcactccagcctgggcgacagcaagaccctgtctcaaaaaaaaaaaaaacctgagaaagaaacaatgagtgggccaggcgcagtggctcacgccggtaatcccagcactttaggaggccgaggcgggtggatcacgaggtcaggagatcgagatcatcctggctaacacggtgaaaccctgtctctactaaaaatacaaaaaattagccgggcatagtggcaggcgcctgtagtcccagctactcgggaggctaaggctggagaatggcgtgaacctgggagcttgcagtgagccgagatcgcgccactgcactccagcctggggacagaacgagactccgtctcaaaaaaaaaaaaaaaaaaaaaaaaaaagaaacaatgagtggatgcacgagctggtgtgttcttctctttgcctgcgaatccaggcctcttcctgactgcccaggagatgcgcatgtgtattctaagtctcaattctgggatcgccgcccccaggaagccttcgtggactcacaggctgtgttaagtgcctcctatgggtgacctatcctacctccattatagcacgagtcaccccttttctgacaatctgtgactgagtcacctccctgccagaaggacagggagctccttaagagcagagcttggttctgactcatctgtgtccctggtgtcacccgacatggagcctggcatgcacaaggcctcaggggatgttcctgggcaggacaggagcaaaggtgggagagggacgccaggcaggagtgagaggctgcacaggaaagagagaggcgggaggcaaagccagaagagggaaagtgggagacagagagagaagtgggagagggaggaggtcatgagggcggctggctcccggggtgctcggcccgcgaggccctgttctgagcactctatccacagcgctctgtgcctccaggtgggcaccggtattatccccactgaacacagggggcagctgaggccagggaggtgaagccacttgtccagggccacccagccaggaagaggccgagccaggatgaatccagctcagagcctgagtttgtaaaccttgggctgggctgcctctcagggagagtgggggcctgaggggtgtcagagggcatagggatgccagggccacctccagcagccaatatctaggccacacccacccggctcaggcgcgacacagccagagagacgcacgtcttgaagtcatctgggttcttcttgcagagacaggtgatgaggctgacggcggccgtgaccacaccctgcaggggcagaggagagacaagtcaggcccctgggggaggtggtacctgagagcagaggctcaggagcgggacagggtcgggatgtgtgtgcagtcgggaagatggggtttaggggtgtgcacatgtgtcactgtgcgtgctttaggggtggggtgaggaggccacggggcctcgggcgccatggccagcactgacctgggtgtgtggggtgtccctggcaggaccccaggcagctgggtaaggagcagtgaaggggcgagactctagagggttgggactgtgggggtgggacagtcaaggtttctgcgctggtgcgcaggtgatgggcgctgttgggggaatctccaggtattagaaacagagtgggattttctaagggactgggtggttggtgaggggtgtgggggtcactggacaggatccctggccagccaggggagtgtcagagatggggatgggagggtttctggacacttgggcaggtaatgagtaccggggacactggatcatggtttctggtgtctggtgaacgtcagcgccgagggggaagctccaggaatccagggggatcagggctgaggtgggagccccaggcatccagggggcgtgagggctgaggtgggagccctgggtatccgggggcgtgagggctgaggtgggagccctgggtatccgggggcgtgagggctgaggtgggagccctgggcatccagggggcgtgagggctgaggtgggagccctgggtatccgggggcgtgagggctgaggtgggagccccgggcatccagggggtgcgtgggctgaggtgggagccctgggtatccgggggtgtgagggctgaggtgggagccccgggcatccaggggggtcagggctgaggtgggagccctgggtatccgggggtgtgagggctgggggctcaccatgtgctggtcattgagcaggtgtaccacacgcgccgtccactcgcccatgggcaccaggtcaggcgaggccttgtacagtcgaaggaggcacagggccgcactctgcttgacactgtccatgctgtc

SEQ ID NO: 8811 - DNA, 288 bp, Homo sapiens
agatggtgtttttctcgatttcgccccaaggagggtgctcggacttcgacgtgccgccatctttgagcagggcacagctgtttacagccttggaatggatatcaggctgaatggtggttgcttggcaacgccccgccacggtcgccatctttgagtagggcacattgtttactactatatactggaaacctacagggaatgtggttgctaggcaatgctttgggaccatcgcaatctttgatccgggcacagctgttttttccgtttagaatgtaaatcatcaaagcc

SEQ ID NO: 8812 - DNA, 288 bp, Homo sapiens; identical to SEQ ID NO: 8811

SEQ ID NO: 8813 - DNA, 822 bp, Homo sapiens
gccggggcctccggggccgaggtgggcctgctcattggaagatcgcatcgcagccatgagcagtaaggatttcttcgcgtgtggacactctggccattgggctcggggatgccctagaggaggagctggagggcgaagaggtggaggccatggcagaggttctcaatgtggttccaccaccctatcttacacctgttactgctgtggtgagtccggtcgtaatgctaagaactgtgtccttctcggaaacatctgctacaactgtgggagaagcggccacatcgccaaagactgtaaggatcctaaacgagagagacgccaacactgttatacctgcggcagactaggacatctggctcgtgactgtgatcgtcagaaagagcagaaatgctactcttgcggcaaacttgggcacattcagaaagactgcgcccaggtcaagtgttaccgatgcggcgagattggccacgtggccatcaattgcagcaaggcgaggccaggtcaactgctaccgctgcggcaaatcccgacatctagccaaggaatgtcccagtgaggttaccacttaaatcttcccccccaccccccaccttttgctgattgataattgtattattttctccgaaaacttcactcaccgaaaggtcgatagattgaggctactctcaggcaagtgagctttaattaccatgttaaaggaggaaagagctagaaaaaaaaacctcaaaaaagttaatcattggtagatgccccacaattaacgtgttgcttctgccccacgggcaaatctagttattaaatagtcattctgagcaccaatca

SEQ ID NO: 8814 - DNA, 823 bp, Homo sapiens
gccggggcctccggggccgaggtgggcctgctcattggaagatcgcatcgcagccatgagcagtaaggatttcttcgcgtgtggacactctggccattgggctcggggatgccctagaggaggagctggagggcgaagaggtggaggccatggcagaggttctcaatgtggttccaccaccctatcttacacctgttactgctgtggtgagtccggtcgtaatgctaagaactgtgtccttctcggaaacatctgctacaactgtgggagaagcggccacatcgccaaagactgtaaggatcctaaacgagagagacgccaacactgttatacctgcggcagactaggacatctggctcgtgactgtgatcgtcagaaagagcagaaatgctactcttgcggcaaacttgggcacattcagaaagactgcgcccaggtcaagtgttaccgatgcggcgagattggccacgtggccatcaattgcagcaaggcgaggccaggtcaactgctaccgctgcggcaaatcccgacatctagccaaggaatgtcccagtgaggttaccacttaaatcttcccccccaccccccacccttttgctgattgataattgtattattttctccgaaaacttcactcaccgaaaggtcgatagattgaggctactctcaggcaagtgagctttaattaccatgttaaaggaggaaagagctagaaaaaaaaacctcaaaaaagttaatcattggtagatgccccacaattaacgtgttgcttctgccccacgggcaaatctagttattaaatagtcattctgagcaccaatca

SEQ ID NO: 8815 - DNA, 823 bp, Homo sapiens; identical to SEQ ID NO: 8814

SEQ ID NO: 8816 - DNA, 155 bp, Homo sapiens
ttttttttttttttttttttttttgagacagagtctttctctgtcacccaggctggagtgcagtggcgcgatcttggctcactgcaacctccacctcccaggttcaagccattctcctgcctcagtctcttgagtagctgggattacaggcatgc

SEQ ID NO: 8817 - DNA, 142 bp, Homo sapiens
tttttttttttttttttgagacagagtctttctctgtcacccaggctggagtgcagtggcgcgatcttggctcactgcaacctccacctcccaggttcaagccattctcctgcctcagtctcttgagtagctgggattacag

SEQ ID NO: 8818 - DNA, 5850 bp, Homo sapiens
ctaccattataatacccattattcaacagcaacatctactttatcctggcttgttcgaattgtgagtatcttcattgagttagcttgcctttggtaccttaaaattttaacataagtaaattaaataaaaatcaaatcagttgtaatttgattaacaaagattagagacgagtgaagtagaaattaaagatttcaaagtagcaaaatatgaattttttttattgagttgtctcatttgcaaaattggattaggaagatagttatctgttgctaggtattatgagcttaaaccaaaccagttgtccagttataaaggagccaaaattgagtacatacctttttttttttttttttcagtgagagggtctctcactctgccactgaggctagagttgcagtagcactatcatagctcacagcagccttgaacccctgggctcaaaggatcttcctgcctcagcctcccgagtaactagaactacaggcatgtaacaccttgcgcatctattatttttttatttctcttctttttttttttttgagacagagtctcgctctgttgcccaggctggagtgcaatggcatgacctcggcttactgcaatctccgcctcccaggttcaagtgattctcctccctcagcctccagagtagttgggattacagatgcccaccaccacgcccagctaatttttgtatttttagtagagacagcgtttcgccatgttggccaggctggtcttgaactcctgacctcaggtgatccacctgtcttggcctcccaaagtactgggattacaggcgtgagccaccacgcccggcccagctattatttttaaacatgggatctcactttgttccccacgctggtctctcacttttgttctcctgggctcaggtgatcctcctgccttacctccctaagcactgggattacaggtgtgagccaccacacctagccctggagtgcattcttaatacccactgcctcctttctcacaaatgaggcacactggcacttgctctccccccctccctcattctttcttcttgggcagcatgttttaaaaccagtttccaaatgttttgaaaacctctttctgttacttttctctttctcctaggacataaatatatttaagtctcactgaccttaaaaaaaaaaaaaaaaaaaaaaaaagcctcctgccagcctccgcccactctgaagttctttcccatctctctccctgcacagtcagattcctgaaagcacaacctctgctgtcctgcagtgcactgtggtacctgttgcctctactttatcacctcccattcagtctttagcctggttgatttcagttccacatccatcactttactgaactgttttggggaggtcacatattatgcagatagagcatcccattttttacctatcatgtctcttgaagcatttcacgctattgctaatctctccttgaaattttctttcaagttccttttacaataccctctcctggtttgcctcctgtcatcctaactgttctgctcagtctcctgttcagattgtttttccttaatgttcctcttctacaggatttttctttatatttcagctgagctgtgtcattcagttacaagctagtgatttccagcttctctcttctttgcaaacatttctcatgggttcctgacccatatttccaagtgcctactagatatttctacctgaacatctcacagtaccataagcagcatttcaataaatgaactcctcatctccctcatgtacctgctgtggttaaatgccgtgattattcactcagctgcccaatctagaaattgggaagctttttcctagatattttctctgtctttccaacctcttacatccagtcagacatccacagattctaccaactaaatatctctatctccttttctgtatactgtggcactttctttaatttagattcccattctctctcgcctagagtattgccaaagctcttaacaaacctcttttcctttattcttgccttctccattctggtctagataggagcactataagtgactgaggagtattgtagaatgctaaattaaatctcttaatcaataatttttccccttattaagatatacctcagaccactctattgtatggggctgatgtgtccaagaaacacattggtaaagcagagtatatgaaactgcatctcctgtcttcgaaaatattttttcccttcacctaaatgacagctctagtttgtaggtcttccttaggcattctctccattatggggaaaaaattaactttctacagaaatttagtatgaatacattttaagtaacttggaaaccactgataggtgacaaactacaattatttttgttaagaaaaatgttgtcagaattatgattctgtttgagcacagattttatccctttcataattctacaccagcataagaagttaaggaagtctggactaactagtcttttgagaaaacaaacccaaatcttacttttaaaaatgaactctgtaatgataaactaaaggaaaagacataaaactatttttagaccaaagttattaaatcagtctagtttatccaaacattcaccttaattctgtgaacttggattcttttataaaaaatgtttctgagttagaagtttcttgagaaatactttttaaatccggcacttttaaagtatagatgttctcttttttattttctgttaattttgagaatattagatttatgtcattgcctatttatctctataaagcaatcagaacagagcatctttagtttctgggtgataataataattccagaagtaggaaaatacttcacactcacaagaggcaaatgcttttcaaattccagatacatggacacataaagagcttataacttccaacctgcagtttcagccacaagtcaaaactaaacaaagtcacaaaaatttaccagtcaagatctcaaaagagctggctttctttataatagatataaaatatgctcttaattgatttgaactctcaaatagacaagaatacaaaaaaactaattaattggattcgctgatcaccaaatgatcagaccataaaaccaaaactacattctcaatcattactgccgccagtggaaaattacctattagctgtgcggaaaccagaaacaaacaaaaaaatcagtagaaggagtaaattttaaaacctagaaaaaaaaagtcactggagttcaaattctgtttgctgcctagggtccaccctggaagctaagaaaagatgtacctgggcttaagtagcccatgagatatatttcttaagctacacagtcaatttgagttcatcaggttagtccacatggaactctcaaggggcccaccaaaactgttagcaaaggaaatttttggaaaacactgaaactagagattttcaccctgggaggccttttcataccacctcaggtcccgtcaatgacaatcattgccttagtgagccaccaccatggagggagcaggacacctcttgcaggtactttggggatgaggaaaaaggtcaggagtccttcctgagaaaatgttatcaactgggttgtttggagaattaaatgagagtatatatatgatagtattttgaaatacataaagtggtattcactgtttttttacctaatcaagttagtctgaagccagatttacaagacttcttcaagtgtgactccataagaatacttgttatgaacagcctaagttaacctcatctatccctaatcagctaaacactttctcaaatcataactcagaatttattcttaagtagatttattattccagcgaaatggaattcaaacttgaatctatgcaagggtatgccagaatattctgcacatttatcctacacatgcccttgtctatagcagtgctgcacaacagaaatataatgtaaactaccatgtgacttaaaatttctagtagccacatttataagtaaaaaaaagaaacaggtaaaattaattttaataaatatatttgttaatctactatttccaaaatgttatcatttaaacatgtaaccaatataaaaatgtaaaataaggcattttacattttacatttttggagggagggtactgagtctttgaaattcagagtgtattttatatttacagtgcatctcaatttgaactagccacacttcaagtgctcaatagtgacatgtggctagtggctactgttttggacagatctataaaactgcttttttggagactcagcccaaatatcttatgtcacgtggttataaataaaagtatcagtctaatggtttactaagtatttatccttatggtccagggaattgtaatgtcctcactcccattccaaggagtttatgaaatagaaaatgcattaaaatttgggtcactaagaatttgttcacaaaaataaaatacacattaaaataagtgtctgtcctttaccttagaccttttagacctagtcattaaacttgttatttgtttcaatgtacttagtataacaacaataataattgcttaaaaatgctaattaactacatacttcattactttaaattaaaaatattattttaaacaaactaccagtgaaatcacttgtctacaatatgagaccctgaaaagactgttttcctgacagctgccattgggcaaatcatgaataaacttatagcagtgtttggagtttcttcagatattaatattaaaagacacattttacttggaatgtttttactttacaacttaccctagacatataacatgtatacagaagtaattaaatctttttccctggcttgctgaccactcagtaactcgttcaccttccaaattcagtatattcaaccctcctattcaaaactcattcgtcaaacatttcataatttccaaggaagtgatgtttagaatttgacactttctgtgtaaattatggcttgttttgaaagcttaccctaaagcctctttaaaccataatgtgtctttaaaagtatatatgtatagtagaaacatttttgcaagtgttgtaactaaaaccaaaagatagtgctactgaataaaatattgttgtttatcttgaatactgaggcattaaggacaatgcatatttactcagaggaagatgagaaatacttaaccaagagcctagtgcatggtaggtacataggttaattagtgaaaacttttggaagattctaaaagatacttcttggctcttggaagagaaataggagaaaataaacttctggaattagacaaaggccattagaaataatggttcctccatttgttagaatgtgaccttgaattttctcagatataaaaggggaataattacacctactctgaagggcgatagtagggattcagttaacttagataatacagagcctggcacagaaaaatgctttgtagctgttatttcccttccctttgtattttattatgcttccaatcacttcaaatatacatcttttctttgctatagttatgtcccaggcactacctattacccataaacgagatttgttttggcttttaaatggaatgaagagaaggaaaagaagaacagaacagaactacaagaagcgaaggatgtaaaagattattatgagatgactaagcgaaaatcgtgtaagacagaagaatgaagaagttgagtaaagagaagaggcaacagggaaacggcattagatgcccacgatggaattagttgatctgtaatcatccaaaagcaagaaaggctgttagtgtcttcagaggggactaaggggtatgatagaatacagaaggacaggtactttccagtgcaggcaagg

SEQ ID NO: 8819 - DNA, 5838 bp, Homo sapiens
ctaccattataatacccattattcaacagcaacatctactttatcctggcttgttcgaattgtgagtatcttcattgagttagcttgcctttggtaccttaaaattttaacataagtaaattaaataaaaatcaaatcagttgtaatttgattaacaaagattagagacgagtgaagtagaaattaaagatttcaaagtagcaaaatatgaattttttttattgagttgtctcatttgcaaaattggattaggaagatagttatctgttgctaggtattatgagcttaaaccaaaccagttgtccagttataaaggagccaaaattgagtacatacctttttttttttttttttcagtgagagggtctctcactctgccactgaggctagagttgcagtagcactatcatagctcacagcagccttgaacccctgggctcaaaggatcttcctgcctcagcctcccgagtaactagaactacaggcatgtaacaccttgcgcatctattatttttttatttctcttctttttttttttttgagacagagtctcgctctgttgcccaggctggagtgcaatggcatgacctcggcttactgcaatctccgcctcccaggttcaagtgattctcctccctcagcctccagagtagttgggattacagatgcccaccaccacgcccagctaatttttgtatttttagtagagacagcgtttcaccatgttggccaggctggtcttgaactcctgacctcaggtgatccacctgtcttggcctcccaaagtactgggattacaggcgtgagccaccacgcccggcccagctattatttttaaacatgggatctcactttgttccccacgctggtctctcacttttgttctcctgggctcaggtgatcctcctgccttacctccctaagcactgggattacaggtgtgagccaccacacctagccctggagtgcattcttaatacccactgcctcctttctcacaaatgaggcacactggcacttgctctccccccctccctcattctttcttcttgggcagcatgttttaaaaccagtttccaaatgttttgaaaacctctttctgttacttttctctttctcctaggacataaatatatttaagtctcactgaccttaaaaaaaaaaagcctcctgccagcctccgcccactctgaagttctttcccatctctctccctgcacagtcagattcctgaaagcacaacctctgctgtcctgcagtgcactgtggtacctgttgcctctactttatcacctcccattcagtctttagcctggttgatttcagttccacatccatcactttactgaactgttttggggaggtcacatattatgcagatagagcatcccattttttacctatcatgtctcttgaagcatttcacgctattgctaatctctccttgaaattttctttcaagttccttttacaataccctctcctggtttgcctcctgtcatcctaactgttctgctcagtctcctgttcagattgtttttccttaatgttcctcttctacaggatttttctttatatttcagctgagctgtgtcattcagttacaagctagtgatttccagcttctctcttctttgcaaacatttctcatgggttcctgacccatatttccaagtgcctactagatatttctacctgaacatctcacagtaccataagcagcatttcaataaatgaactcctcatctccctcatgtacctgctgtggttaaatgccgtgattattcactcagctgcccaatctagaaattgggaagctttttcctagatattttctctgtctttccaacctcttacatccagtcagacatccacagattctaccaactaaatatctctatctccttttctgtatactgtggcactttctttaatttagattcccattctctctcgcctagagtattgccaaagctcttaacaaacctcttttcctttattcttgccttctccattctggtctagataggagcactataagtgactgaggagtattgtagaatgctaaattaaatctcttaatcaataatttttccccttattaagatatacctcagaccactctattgtatggggctgatgtgtccaagaaacacattggtaaagcagagtatatgaaactgcatctcctgtcttcgaaaatattttttcccttcacctaaatgacagctctagtttgtaggtcttccttaggcattctctccattatggggaaaaaattaactttctacagaaatttagtatgaatacattttaagtaacttggaaaccactgataggtgacaaactacaattatttttgttaagaaaaatgttgtcagaattatgattctgtttgagcacagattttatccctttcataattctacaccagcataagaagttaaggaagtctggactaactagtcttttgagaaaacaaacccaaatcttacttttaaaaatgaactctgtaatgataaactaaaggaaaagacataaaactatttttagaccaaagttattaaatcagtctagtttatccaaacattcaccttaattctgtgaacttggattcttttataaaaaatgtttctgagttagaagtttcttgagaaatactttttaaatccggcacttttaaagtatagatgttctcttttttattttctgttaattttgagaatattagatttatgtcattgcctatttatctctataaagcaatcagaacagagcatctttagtttctgggtgataataataattccagaagtaggaaaatacttcacactcacaagaggcaaatgcttttcaaattccagatacatggacacataaagagcttataacttccaacctgcagtttcagccacaagtcaaaactaaacaaagtcacaaaaatttaccagtcaagatctcaaaagagctggctttctttataatagatataaaatatgctcttaattgatttgaactctcaaatagtcagacaagaatacaaaaaaactaattaattggattcgctgatcaccaaatgatcagaccataaaaccaaaactacattctcaatcattactgccgccagtggaaaattacctattagctgtgcggaaaccagaaacaaacaaaaaaatcagtagaaggagtaaattttaaaacctagaaaaaaaaagtcactggagttcaaattctgtttgctgcctagggtccaccctggaagctaagaaaagatgtacctgggcttaagtagcccatgagatatatttcttaagctacacagtcaatttgagttcatcaggttagtccacatggaactctcaaggggaccaccaaaactgttagcaaaggaaatttttggaaaacactgaaactagagattttcaccctgggaggccttttcataccacctcaggtcccgtcaatgacaatcattgccttagtgagccaccaccatggagggagcaggacacctcttgcaggtacttggggatgaggaaaaaggtcaggagtccttcctgagaaaatgttatcaactgggttgtttggagaattaaatgagagtatatatatgatagtattttgaaatacataaagtggtattcactgtttttttacctaatcaagttagtctgaagccagatttacaagacttcttcaagtgtgactccataagaatacttgttatgaacagcctaagttaacctcatctatccctaatcagctaaacactttctcaaatcataactcagaatttattcttaagtagatttattattccagcgaaatggaattcaaacttgaatctatgcaagggtatgccagaatattctgcacatttatcctacacatgcccttgtctatagcagtgctgcacaacagaaatataatgtaaactaccatgtgacttaaaatttctagtagccacatttataagtaaaaaaagaaacaggtaaaattaattttaataaatatatttgttaatctactatttccaaaatgttatcatttaaacatgtaaccaatataaaaatgtaaaataaggcattttacattttacatttttggagggagggtactgagtctttgaaattcagagtgtattttatatttacagtgcatctcaatttgaactagccacacttcaagtgctcaatagtgacatgtggctagtggctactgttttggacagatctataaaactgcttttttggagactcagcccaaatatcttatgtcacgtggttataaataaaagtatcagtctaatggtttactaagtatttatccttatggtccagggaattgtaatgtcctcactcccattccaaggagtttatgaaatagaaaatgcattaaaatttgggtcactaagaatttgttcacaaaaataaaatacacattaaaataagtgtctgtcctttaccttagaccttttagacctagtcattaaacttgttatttgtttcaatgtacttagtataacaacaataataattgcttaaaaatgctaattaactacatacttcattactttaaattaaaaatattattttaaacaaactaccagtgaaatcacttgtctacaatatgagaccctgaaaagactgttttcctgacagctgccattgggcaaatcatgaataaacttatagcagtgtttggagtttcttcagatattaatattaaaagacacattttacttggaatgtttttactttacaacttaccctagacatataacatgtatacagaagtaattaaatctttttccctggcttgctgaccactcagtaactcgttcaccttccaaattcagtatattcaaccctcctattcaaaactcattcgtcaaacatttcataatttccaaggaagtgatgtttagaatttgacactttctgtgtaaattatggcttgttttgaaagcttaccctaaagcctctttaaaccataatgtgtctttaaaagtatatatgtatagtagaaacatttttgcaagtgttgtaactaaaaccaaaagatagtgctactgaataaaatattgttgtttatcttgaatactgaggcattaaggacaatgcatatttactcagaggaagatgagaaatacttaaccaagagcctagtgcatggtaggtacataggttaattagtgaaaacttttggaagattctaaaagatacttcttggctcttggaagagaaataggagaaaataaacttctggaattagacaaaggccattagaaataatggttcctccatttgttagaatgtgaccttgaattttctcagatataaaaggggaataattacacctactctgaagggcgatagtagggattcagttaacttagataatacagagcctggcacagaaaaatgctttgtagctgttatttcccttccctttgtattttattatgcttccaatcacttcaaatatacatcttttctttgctatagttatgtcccaggcactacctattacccataaacgagatttgttttggcttttaaatggaatgaagagaaggaaaagaagaacagaacagaactacaagaagcgaaggatgtaaaagattattatgagatgactaagcgaaaatcgtgtaagacagaagaatgaagaagttgagtaaagagaagaggcaacagggaaacggcattagatgcccacgatggaattagttgatctgtaatcatccaaaagcaagaaaggctgttagtgtcttcagaggggactaaggggtatgatagaatacagaaggacaggtactttccagtgcaggcaagg

SEQ ID NO: 8820 - DNA, 259 bp, Homo sapiens
cccagcactttgggaggcccaggcgggcgaatcatgaggtcaggagattgagaccatcctggataacacagtgaaaccccatctctactaaaaatacaaaaaattagctgggcatggtggcgggcgcctgtagtcgcagctactcgggaggctgaggcaggagaatggcgtgaacccaggaggcggagcttgcagcgagcccagatcgcgccactgcactccagcctaggcaacagtgcgagactccatctcaaaaaaa

SEQ ID NO: 8821 - DNA, 2136 bp, Homo sapiens
ccagacccacagggcaaaaagtgcgtcgtcgtgtcccaacctcctggtcccggaaacctggccgcatcaagtcagcgcttcccatgctggaagaagcaagcagccccagggtggaatcttaaaaattaatgaagagcatcggcggggtgccattcaggttggtttgtccctttgttttattttgattttgtctcccagtttttaaaagctgctatcttaaaatttcaaccctgtattttgaaattatttctgcactctaggacttacttgcaagcccaggatttacatttggaaagcgagtggtgtttgattcccactgtttaaaaaggcaacacacgttcgctgatggtctacattccagctgcactagcagtaagctcgcaccaagtgccactgtcctgccaagcactctcctgaatcactgcgctggagtctcagagccacctgatgtgttctgtaccattatacccattttgcaattgggggacacaaactaagtgaggttaagtaacccatccagggtcacattgcttgtaagtgacctgagtgtatattattagccaccaccaggtgctgggcatcgagccagacagtacgggagcaagaactaaaaaaggcaaggaggttgcaatggcaagtagataacacaaaataaaggagggtcatcattatcagcaacagcagcgtcaactgccagacaggtgggagaggccacggggaatcttctgcactgtcccgggccaacctccatctcctcacagctagctgcaggagtgagcccagggaaacccgcagtagagcagcccagccaacccgacagtcagggggaaaaattgttttaagccactttcagtttcgcgtagtttgttatgcaactaaggctaactaaagcactagttttacgagctggaacaaactaatgtcactgaatatctgttttctcctaagtacctactttattgggttgttgtgaggactcactgaaaaactatgtgtaaatcacccagcacaaagtatgtgctcagtgactgcagtcattctttgctgtcataccttccatatggaagtacttcctacccacctagctctttaaggagaaaaatctgtttgtgggaaaataatttttttaaggccaaaatcagcccacctttaatatatgcaggacccagggcaaaagtacaaacagagatctgtaggccagatacctaaatatttaaaaattataaacaaagttaacaaatgattaagtacaataagttctaccttcctacctagacaaatataccttgggaattgacatgaaaggccagattgaaactttggatgatctgcacttaaatatgatggtgcagggagaggcgatttccagttcctggtttgcagccacctcctctcttcccacagggctctagtccattggtggaagctcggtcaagcttcccagaagcagctgtcccccagccacctcttgggcacaagagtatgaacaccagagtcagcaatgttcgcccatgggagtacagacattagcagataacactgctgctagtgtgcagacccttgaagcaggctcagagtcatttggggagggaatttggaatttgccttctaaagtgtgggccctggacaagggctccttgggtctaagtataaggacaactactggccaaagaatacctgtgcccacatggaaccacttaaaaactaaactgaattttacagtaaacacaggaggagccatgctgtaagcatatttattcaaaaacagggtgtcccaaaagtcttcctgcagttttagtaacctcaaggctataaatgctgcaacttataagaacaccatttgaaagttaatttaacactatttatctctgtgaatgttgaataacacgttttaactttaatttttgtttcagttcccctgagtgaaatatggcatacattaaccagaagagaaaattacatttattaaaataattaaaacagagtcaaaagaagtaaacgttcaaatgagttttgtaagtttgtagcatttcgacttaagaagttattaaagcttaaaactgcactgacctttttggggtaccctgtattcggatttgtcgtgtgtcaggttctgtgctagacacttgattaaaa

SEQ ID NO: 8822 - DNA, 2136 bp, Homo sapiens
ccagacccacagggcaaaaagtgcgtcgtcgtgtcccaacctcctggtcccagaaacctggccgcatcaagtcagcgcttcccatgctggaagaagcaagcagccccagggtggaatcttaaaaattaatgaagagcatcggcggggtgccattcaggttggtttgtccctttgttttattttgattttgtctcccagtttttaaaagctgctatcttaaaatttcaaccctgtattttgaaattatttctgcactctaggacttacttgcaagcccaggatttacatttggaaagcgagtggtgtttgattcccactgtttaaaaaggcaacacacgttcgctgatggtctacattccagctgcactagcagtaagctcgcaccaagtgccactgtcctgccaagcactctcctgaatcactgcgctggagtctcagagccacctgatgtgttctgtaccattatacccattttgcaattgggggacacaaactaagtgaggttaagtaacccatccagggtcacattgcttgtaagtgacctgagtgtatattattagccaccaccaggtgctgggcatcgagccagacagtacgggagcaagaactaaaaaaggcaaggaggttgcaatggcaagtagataacacaaaataaaggagggtcatcattatcagcaacagcagcgtcaactgccagacaggtgggagaggccacggggaatcttctgcactgtcccgggccaacctccatctcctcacagctagctgcaggagtgagcccagggaaacccgcagtagagcagcccagccaacccgacagtcagggggaaaaattgttttaagccactttcagtttcgcgtagtttgttatgcaactaaggctaactaaagcactagttttacgagctggaacaaactaatgtcactgaatatctgttttctcctaagtacctactttattgggttgttgtgaggactcactgaaaaactatgtgtaaatcacccagcacaaagtatgtgctcagtgactgcagtcattctttgctatcataccttccatatggaagtacttcctacccacctagctctttaaggagaaaaatctgtttgtgggaaaataattcttttaaggccaaaatcagcccacctttaatatatgcaggacccagggcaaaagtacaaacagagatctgtaggccagatacctaaatatttaaaagttataaacaaagttaacaaatgattaagtacaataagttctaccttcctacctagacaaatataccttgggaattgacatgaaaggccagattgaaactttggatgatctgcacttaaatatgatggtgcagggagaggcgatttccagttcctggtttgcagccacctcctctcttcccacagggctctagtccattggtggaagctcggtcaagcttcccagaagcagctgtcccccagccacctcttgggcacaagagtatgaacaccagagtcagcaatgttcgcccatgggagtacagacattagcagataacactgctgctggcgtgcagacccttgaagcaggctcagtgccatttggggagggaatttggaatttgccttctaaagtgtgggccctggacaagggctccttgggtctaagtataaggacaactactggccaaagaatacctgtgcccacgtggaaccacttaaaaactaaactgaattttacagtaaacacaggaggagccatgctgtaagcatatttattcaaaaacagggtgtcccaaaagtcttcctgcagttttagtaacctcaaggctataaatgctgcaacttataagaacaccatttgaaagttaatttaacactatttatctctgtgaatgttgaataacacgttttaactttaatttttgtttcagttcccctgagtgaaatatggcatacattaaccagaagagaaaattacatttattaaaataattaaaacagagtcaaaagaagtaaacgttcaaatgagttttgtaagtttgtagcatttcgacttaagaagttattaaagcttaaaactgcactgacctttttggggtaccctgtattcggatttgtcgtgtgtcaggttctgtgctagacacttgattaaaa

SEQ ID NO: 8823 - DNA, 301 bp, Homo sapiens
gctctgaagcagaaccctgccccgctcacttggtggtcggctgaatccagttccttgggcttacagggctgaggttcccaatcctcgatggccgtgagccccggctgttctgcgctcctggggcctgccgcgtttctgcctgaactctccacactgcccctccagcaacagcaggtcaagccctcctcacgcttcgaatccctccgcctgcagctggagaatgttttctgcttttaagggctcatgggattagactgggccacccagataacccaggatcatcctttcttgtattgtcaag

SEQ ID NO: 8824 - DNA, 301 bp, Homo sapiens; identical to SEQ ID NO: 8823

SEQ ID NO: 8825 - DNA, 301 bp, Homo sapiens; identical to SEQ ID NO: 8823

SEQ ID NO: 8826 - DNA, 425 bp, Homo sapiens
gggcacgggacagcccgcctgagctggctaccccagcgagttagtggaatcccttctttgattgtgtttgttggcttcacctgttcatgggctcctggctgagagaggacacacctaggatattcacaagccccagagcacttctgaacacctgtgagagatgctcaagggatgaatgcttgggcctttagggtaccttgagctggagatggggctgggggcagatgccataatggtcttctgctcccttctaggtacagccaattaatgacaacacttgttcctgcagaacagatccagcttcatgatcttttagaagagagttctaaaatcaaatcctttacctcccagcctgattactcttcagtcaacagaaacttaccaagcaccttttttgtgtgtgccaggcactgttccaggcactg

SEQ ID NO: 8827 - DNA, 425 bp, Homo sapiens; identical to SEQ ID NO: 8826

SEQ ID NO: 8828 - DNA, 283 bp, Homo sapiens
tctgggccttgaatttgatggggcttccttatgaatcaaggtatatttctagtccacagggatggactctccctgccaagtgccttcatgggaaccatgtgacagttaaatttgattcatgcaagatgcttctctgggcaaatttcattgtgagttctacatgccaggaattcctacaatctgtcatctgagaaagcccccagaatgctgagacaggagccaagctctgccctgtatgccagaggggtgatgattctgtttgtgaaaatttagttgctcagaa

SEQ ID NO: 8829 - DNA, 283 bp, Homo sapiens; identical to SEQ ID NO: 8828

SEQ ID NO: 8830 - DNA, 409 bp, Homo sapiens
ttcactcaacaaacatttatttctcttctttgctttcctctcagatgaaaccatagcagtcagagaccatacattggagcccacaatgtgtcagaagcatggcatgctctgtgcagcctttttcatcctgtttgcttccatatacaaagtgtctctgcatatgagtcccaggaggtttggtgactttttaatattccccagagctacctttcaaagcagcgaggttacttgagttccagcctagaggctggattcaatgctgagcagcaactctagagagaagatgcagactgcagctgttgtttagcatctttgagcattaactattctcactctcagaaaatggagtatttagagagcagtcactggaggaggccaaaggttttagcaagagaactgttttacattc

SEQ ID NO: 8831 - DNA, 409 bp, Homo sapiens; identical to SEQ ID NO: 8830

SEQ ID NO: 8832 - DNA, 3330 bp, Homo sapiens
ggggatcctgtcgttcaaaaattcctggcctgggacaaagacctgagggtgtcagacaaggtaaggttgttcactcaactgtgttcctgctttaacacacgtcctggggaagggtgcagcgtctaaacccacagtttctctcctctctccctctaccatctcccacctgctgattccatactcttgggcgcccacattttgatttttattttttcagaaacagggtctcgttctgttgcccaggctggaatgcagtgttgccatcatagctcactgcagcctcagcctcctgggctcaagtgatcctcccgcctcggcctctccaatagctgggactccaggcgtgagtcaccgcccccagctattctaggtcttctcataatttgtcagcatctccctcggggctctggtagcctgttgcatagttgatgggtggcccctgcctctgcacagggtcctttggaatccaggccctgggccagtcttgaaactcctgacccctatcctctcagatctttgggacagtcctttgccccagctcaccaagaccctcctgacattagcagccctagacactctccctccagtgatcccactggagctcatcatcatgggagcatcacagacctccctccctccgacttcccggatttgcagctgactttgaacactctccacccgcaagcccccaatgagcatagtcacccaacactgaggttccttctgtgatagacaaccgcgccccagcccctgttcccttctctccaccatcttcctcttccaggatgtgaccaacctttctctctctctactcccttctctccatcagtatctcctggctatggtcatagcgtattttagccgtgccggcctcttctcgtggcaataccaacgcattcatttcttcctggctctgtgagtagtttgcttcttcccatctgtcaatatccaacaccctgggacagtggacgaagtgggattccaaccttccatctatttttttaccctacttctcctctttactctgtatataaaaacgataagattatactatggtgttcttagtctgttctttctaaaaacaaacacaaatgcagttgacaaatagtagaatcaaacaaaaggaaacataaacccgtcctaaggggaaaggaaagccgtggacacgaccctgctccccaagcaagcagccatttctggttctctcgtctctctccttcccatatcaacaccaaatgcaattttccatcctccttctccaggttcccatgacagaggcagaaattcaggtcgtcctcgcataacacagatccatcatcaaatactccctgctgggcattcctgcgagtcctgccccaagccagggggcttcctagtgctgcctgaatagctttccaaagcacagctcccacccccccttcactgcccacctgaacaacctccttagctgatttgtctctaaacggaggcccgggtccacagggctaattcaaccctctctgcagtccttctaccaccaaacctgcccaccatcttcatctttccttgtttgctttcgccactccttccaaatgccctccactccattttgattttgtgttttctgtctgggtgtcctgcacacatgtggatctgaagggaatgacccattccttaaagtcagttcaaccccacagcctttgcaatgcctcccctgatcttccagcttctgcacgcccacagcactttagtgacatcctaggataatgtgacattttggattcgtttatctgccctccttttccccaaacccatcagagtagacccctgttgaaggcagggtcttgtcaaaatatcaaagttttttgtttttatctttaccggacagagacttgctctgtccctcaggctggagtgcagtagccagatcatagctcaccgcagcctccatctcctaggctctagtgaagctcccacctcagcctcctgagtagctgggactacaggtgcatgccaccacatctagccagtttttatgatttttagtagagatgacgttttgctatgtcacccaggctgttctggaactcctgggttctcacctcagcctctcagagtgctggtattatagacatgagccacccaatcagccaaaatatcaaagtattcctgaaacactcagcacaattcttttcattttgcaagtgctcatgttatattgactctatggaataattcatatggcatttgcctataagataaatctttccttctttccttcattcattcatgtattcatttattcaacaaaaccttatgaagttcatcatatgtgccagggaataggaaggatgggaagggagagttcacagcaatgcttgttgaattaatgcaccaagataaacaaagccctctagtggccttttggtaggtgagagatgatttacagaaacacaccagtcagttcctgtccttgggggcacttatgatgcacgggggaagacaggtgtgtgcatacatgacaaggaaggggggtgtgggaggaacagggatggggactaggatgaggtgacgtcatctgtcttgtataaggatggcaggacacatccttagcataagacttgggttgtttttaaattcagagggggtcttgccatattacccagactggtccctaactcctggcctccagtgatcctcctgcctggactcccaaagtgctgggattccaagcaagagccaccactcccagctaccacttggatcatctccttcctgaaggtttgagaggcacccttagcaggtctctgtccagcggggcctcctgaggaaggcagggctctctgcagggcggctgttggtgctgagctgaggaaggtcccctgccctcctctctgagaggctgccctcaggcaggggtccctcctggtggggcccctgagcagcaacctgatctctctccccagctacctggccagtgacatggaggaggacaaccaggccccgaaacaagacatcttctccttcctctacgggaagaactactcccagcgacccttgttccataagcttcgataccagctcctctgttccatgcgctggaggacgtgggtttccccagaggagatggaggaggtaggtggggccatatgaggaggtgggggtggggagggatggggtggactggaggctggaggagggcagagagggggcttcctggggaatccctggcttctcaagtggtgtgtgtttttccagatccaggcttatgacccagagcactgggtgtgggcccgagatcgcaccctcatttcctagagctccggggacatggaggcctgaggtcatcgg

SEQ ID NO: 8833 - DNA, 4280 bp, Homo sapiens
agcgcgcccctgagcccgaggacacctgggtggtggagacgctgtgtgggctcaagatgaagctgaagcgaaagcgagcatcctccgtgctccctgagcaccacgaggccttcaacaggctccttggtaggaggataccccaaaaagcacctccaaccctgttcttttaaaaaagtggaatctttcaataatcacactttcccaataagaagaatatgccctcctgggggatgagcgctccatgcaggaggaggatgcttaggagatagaggattaggctagtcttaataaaggtctgcacttgaaataagaaagcttggtttctggccaggtgcagtggctcatgcctgagatcttggtgctttgggaggctgaggcgggaggatctcttgaactcaggagtttgaagttgcaatgagctatgattgcaccactgcactccagcctggttgacaaggaaagaccctgtcataaaataaataaaataaaataaaataaaagataaaagaaagcttggtttcagctgtaccctctgaaactctatgtctcttgatgacttttctaaacctaagtgtctccatccgtggagggggataacaaggccatgggcacacccagctgtgactatctcaggaagcaatgatgggaattctattatgacttctgcagtggtcccttcctgtctgatgggaggacatcatggcttattcacagctcttcatcctgtagactctgacaccagaggcctccttcggcctctcctcaggggaatctcagagcgggagcctccctccttgcccagtgaaagtccttctctcctctcccatccacctaagccttggccacaatcctgagacttcccccagagggacacagttctcctctctgctctgctgctcccacggcaaccctgttccacttctcaccctgacacaggctctcttttcacaggggatcctgtcgttcaaaaattcctggcctgggacaaagacctgagggtgtcagacaaggtaaggttgttcactcaactgtgttcctgctttaacacacgtcctggggaagggtgcagcgtctaaacccacagtttctctcctctctccctctaccatctcccacctgctgattccatactcttgggcgcccacattttgatttttattttttcagaaacagggtctcgttctgttgcccaggctggaatgcagtgttgccatcatagctcactgcagcctcagcctcctgggctcaagtgatcctcccgcctcggcctctccaatagctgggactccaggcgtgagtcaccgcccccagctattctaggtcttctcataatttgtcagcatctccctcggggctctggtagcctgttgcatagttgatgggtggcccctgcctctgcacagggtcctttggaatccaggccctgggccagtcttgaaactcctgacccctatcctctcagatctttgggacagtcctttgccccagctcaccaagaccctcctgacattagcagccctagacactctccctccagtgatcccactggagctcatcatcatgggagcatcacagacctccctccctccgacttcccggatttgcagctgactttgaacactctccacccgcaagcccccaatgagcatagtcacccaacactgaggttccttctgtgatagacaaccgcgccccagcccctgttcccttctctccaccatcttcctcttccaggatgtgaccaacctttctctctctctactcccttctctccatcagtatctcctggctatggtcatagcgtattttagccgtgccggcctcttctcgtggcaataccaacgcattcatttcttcctggctctgtgagtagtttgcttcttcccatctgtcaatatccaacaccctgggacagtggacgaagtgggattccaaccttccatctatttttttaccctacttctcctctttactctgtatataaaaacgataagattatactatggtgttcttagtctgttctttctaaaaacaaacacaaatgcagttgacaaatagtagaatcaaacaaaaggaaacataaacccgtcctaaggggaaaggaaagccgtggacacgaccctgctccccaagcaagcagccatttctggttctctcgtctctctccttcccatatcaacaccaaatgcaattttccatcctccttctccaggttcccatgacagaggcagaaattcaggtcgtcctcgcataacacagatccatcatcaaatactccctgctgggcattcctgcgagtcctgccccaagccagggggcttcctagtgctgcctgaatagctttccaaagcacagctcccaccccaccttcactgcccacctgaacaacctccttagctgatttgtctctaaacggagggcccggtccacagggctaattcaaccctctctgcagtccttctaccaccaaacctgcccaccatcttcatctttccttgtttgctttcgccactccttccaaatgccctccactccattttgattttgtgttttctgtctgggtgtcctgcacacatgtggatctgaagggaatgacccattccttaaagtcagttcaaccccacagcctttgcaatgcctcccctgatcttccagcttctgcacgcccacagcactttagtgacatcctaggataatgtgacattttggattcgtttatctgccctccttttccccaaacccatcagagtagacccctgttgaaggcagggtcttgtcaaaatatcaaagttttttgtttttatctttaccggacagagacttgctctgtccctcaggctggagtgcagtagccagatcatagctcaccgcagcctccatttcctaggctctagtgaagctcccacctcagcctcctgagtagctgggactacaggtgcatgccaccacatctagccagtttttatgatttttagtagagatgacgttttgctatgtcacccaggctgttctggaactcctgggttctcacctcagcctctcagagtgctggtattatagacatgagccacccaatcagccaaaatatcaaagtattcctgaaacactcagcacaattcttttcattttgcaagtgctcatgttatattgactctatggaataattcatatggcatttgcctataagataaatctttccttctttccttcattcattcatgtattcatttattcaacaaaaccttatgaagttcatcatatgtgccagggaataggaaggatgggaagggagagttcacagcaatgcttgttgaattaatgcaccaagataaacaaagccctctagtggccttttggtaggtgagagatgatttacagaaacacaccagtcagttcctgtccttgggggcacttatgatgcacgggggaagacaggtgtgtgcatacatgacaaggaaggggggtgtgggaggaacagggatggggactaggatgaggtgacgtcatctgtcttgtataaggatggcaggacacatccttagcataagacttgggttgtttttaaattcagagggggtcttgccatattacccagactggtccctaactcctggcctccagtgatcctcctgcctggactcccaaagtgctgggattccaagcaagagccaccactcccagctaccacttggatcatctccttcctgaaggtttgagaggcacccttagcaggtctctgtccagcggggcctcctgaggaaggcagggctctctgcagggcggctgttggtgctgagctgaggaaggtcccctgccctcctctctgagaggctgccctcaggcaggggtccctcctggtggggcccctgagcagcaacctgatctctctccccagctacctggccagtgacatggaggaggacaaccaggccccgaaacaagacatcttctccttcctctacgggaagaactactcccagcgacccttgttccataagcttcgataccagctcctctgttccatgcgctggaggacgtgggtttccccagaggagatggaggaggtaggtggggccatatgaggaggtgggggtggggagggatggggtggactggaggctggaggagggcagagagggggcttcctggggaatccctggcttctcaagtggtgtgtgtttttccagatccaggcttatgacccagagcactgggtgtgggcccgagatcgcaccctcatttcctagagctccggggacatggaggcctgaggtcatcgg

SEQ ID NO: 8834 - DNA, 4283 bp, Homo sapiens
agcgcgcccctgagcccgaggacacctgggtggtggagacgctgtgtgggctcaagatgaagctgaagcgaaagcgagcatcctccgtgctccctgagcaccacgaggccttcaacaggctccttggtaggaggataccccaaaaagcacctccaaccctgttcttttaaaaaagtggaatctttcaataatcacactttcccaataagaagaatatgccctcctgggggatgagcgctccatgcaggaggaggatgcttaggagatagaggattaggctagtcttaataaaggtctgcacttgaaataagaaagcttggtttctggccaggtgcagtggctcatgcctgagatcttggtgctttgggaggctgaggcgggaggatctcttgaactcaggagtttgaagttgcaatgagctatgattgcaccactgcactccagcctggttgacaaggaaagaccctgtcataaaataaataaaataaaataaaataaaagataaaagaaagcttggtttcagctgtaccctctgaaactctatgtctcttgatgacttttctaaacctaagtgtctccatccgtggagggggataacaaggccatgggcacacccagctgtgactatctcaggaagcaatgatgggaattctattatgacttctgcagtggtcccttcctgtctgatgggaggacatcatggcttattcacagctcttcatcctgtagactctgacaccagaggcctccttcggcctctcctcaggggaatctcagagcgggagcctccctccttgcccagtgaaagtccttctctcctctcccatccacctaagccttggccacaatcctgagacttcccccagagggacacagttctcctctctgctctgctgctcccacggcaaccctgttccacttctcaccctgacacaggctctcttttcacaggggatcctgtcgttcaaaaattcctggcctgggacaaagacctgagggtgtcagacaaggtaaggttgttctccactcaactgtgttcctgctttaacacacgtcctggggaagggtgcagcgtctaaacccacagtttctctcctctctccctctaccatctcccacctgctgattccatactcttgggcgcccacattttgatttttattttttcagaaacagggtctcgttctgttgcccaggctggaatgcagtgttgccatcatagctcactgcagcctcagcctcctgggctcaagtgatcctcccgcctcggcctctccaatagctgggactccaggcgtgagtcaccgcccccagctattctaggtcttctcataatttgtcagcatctccctcggggctctggtagcctgttgcatagttgatgggtggcccctgcctctgcacagggtcctttggaatccaggccctgggccagtcttgaaactcctgacccctatcctctcagatctttgggacagtcctttgccccagctcaccaagaccctcctgacattagcagccctagacactctccctccagtgatcccactggagctcatcatcatgggagcatcacagacctccctccctccgacttcccggatttgcagctgactttgaacactctccacccgcaagcccccaatgagcatagtcacccaacactgaggttccttctgtgatagacaaccgcgccccagcccctgttcccttctctccaccatcttcctcttccaggatgtgaccaacctttctctctctctactcccttctctccatcagtatctcctggctatggtcatagcgtattttagccgtgccggcctcttctcgtggcaataccaacgcattcatttcttcctggctctgtgagtagtttgcttcttcccatctgtcaatatccaacaccctgggacagtggacgaagtgggattccaaccttccatctatttttttaccctacttctcctctttactctgtatataaaaacgataagattatactatggtgttcttagtctgttctttctaaaaacaaacacaaatgcagttgacaaatagtagaatcaaacaaaaggaaacataaacccgtcctaaggggaaaggaaagccgtggacacgaccctgctccccaagcaagcagccatttctggttctctcgtctctctccttcccatatcaacaccaaatgcaattttccatcctccttctccaggttcccatgacagaggcagaaattcaggtcgtcctcgcataacacagatccatcatcaaatactccctgctgggcattcctgcgagtcctgccccaagccagggggcttcctagtgctgcctgaatagctttccaaagcacagctcccacccccccttcactgcccacctgaacaacctccttagctgatttgtctctaaacggaggcccgggtccacagggctaattcaaccctctctgcagtccttctaccaccaaacctgcccaccatcttcatctttccttgtttgctttcgccactccttccaaatgccctccactccattttgattttgtgttttctgtctgggtgtcctgcacacatgtggatctgaagggaatgacccattccttaaagtcagttcaaccccacagcctttgcaatgcctcccctgatcttccagcttctgcacgcccacagcactttagtgacatcctaggataatgtgacattttggattcgtttatctgccctccttttccccaaacccatcagagtagacccctgttgaaggcagggtcttgtcaaaatatcaaagttttttgtttttatctttaccggacagagacttgctctgtccctcaggctggagtgcagtagccagatcatagctcaccgcagcctccatctcctaggctctagtgaagctcccacctcagcctcctgagtagctgggactacaggtgcatgccaccacatctagccagtttttatgatttttagtagagatgacgttttgctatgtcacccaggctgttctggaactcctgggttctcacctcagcctctcagagtgctggtattatagacatgagccacccaatcagccaaaatatcaaagtattcctgaaacactcagcacaattcttttcattttgcaagtgctcatgttatattgactctatggaataattcatatggcatttgcctataagataaatctttccttctttccttcattcattcatgtattcatttattcaacaaaaccttatgaagttcatcatatgtgccagggaataggaaggatgggaagggagagttcacagcaatgcttgttgaattaatgcaccaagataaacaaagccctctagtggccttttggtaggtgagagatgatttacagaaacacaccagtcagttcctgtccttgggggcacttatgatgcacgggggaagacaggtgtgtgcatacatgacaaggaaggggggtgtgggaggaacagggatggggactaggatgaggtgacgtcatctgtcttgtataaggatggcaggacacatccttagcataagacttgggttgtttttaaattcagagggggtcttgccatattacccagactggtccctaactcctggcctccagtgatcctcctgcctggactcccaaagtgctgggattccaagcaagagccaccactcccagctaccacttggatcatctccttcctgaaggtttgagaggcacccttagcaggtctctgtccagcggggcctcctgaggaaggcagggctctctgcagggcggctgttggtgctgagctgaggaaggtcccctgccctcctctctgagaggctgccctcaggcaggggtccctcctggtggggcccctgagcagcaacctgatctctctccccagctacctggccagtgacatggaggaggacaaccaggccccgaaacaagacatcttctccttcctctacgggaagaactactcccagcgacccttgttccataagcttcgataccagctcctctgttccatgcgctggaggacgtgggtttccccagaggagatggaggaggtaggtggggccatatgaggaggtgggggtggggagggatggggtggactggaggctggaggagggcagagagggggcttcctggggaatccctggcttctcaagtggtgtgtgtttttccagatccaggcttatgacccagagcactgggtgtgggcccgagatcgcaccctcatttcctagagctccggggacatggaggcctgaggtcatcgg

SEQ ID NO: 8835 - DNA, 151 bp, Homo sapiens
aattctgttttcatttttaagagaggattctttttatcctaaatgttttatttttaaatctttttatctgttattacatgtgctgctgaagggagcactgttatgacctagagtagttacataatatatctattctatttatagctaggtg

SEQ ID NO: 8836 - DNA, 151 bp, Homo sapiens; identical to SEQ ID NO: 8835

SEQ ID NO: 8837 - DNA, 151 bp, Homo sapiens; identical to SEQ ID NO: 8835

SEQ ID NO: 8838 - DNA, 560 bp, Homo sapiens
acaatttgaaatggacctaaacagtattgtaaactttttttattgctttcttaaaaacacaaaatcatcatcttagcatcctccaaaaagattaagaatagaagttgacttaaaagttagtaatacctgtgaaaatcatgattcagaagaaaagaggtaagtctattgaaatagagatttaatttgcctcttttattgttaatttcaggacattcaacttggaaaatgtccatttctaaagcattacgtatagaaaaacactatttgggccaggcatagtggcttacacctgtaatcccagcactttgggaggccgaggcaggtggatcatttgaggtcaggagttccagaccagcccggccaacatggtgaaaccccgtctctactaaaaatacaaaaattagccgggtgtgctggtgggcaccagctactcaggaggctgaggcaggagaatcacttgagccctgtaggtggaggttgcagtgagcagagatggcgccattgcactccagcctgagcgacagagtgagactcagtctcaaaaaaaaaaaaaaaaaaaa

SEQ ID NO: 8839 - DNA, 560 bp, Homo sapiens; identical to SEQ ID NO: 8838

SEQ ID NO: 8840 - DNA, 263 bp, Homo sapiens
gattttgactccagcatgttgagaacttcttgtcatctaaacagtcaaagaatcaactgaaaggaaacctaagccatgaggtgtccaccacctgccttcattctcttctgagaggaacacatctgaaagtcaatcagtggacttggtctagagtctgacccagtttaatagatcctgttgctagtagtcaccacagacaccaaagagttgaagaacagattgtggggcctgctttcttgtaggtagaatcattaaaagccttt

SEQ ID NO: 8841 - DNA, 4175 bp, Homo sapiens
tactttcagagaaaatctttccaaagaccctcttaagaaagtcctatttctaaaattttcatgtttgattcattcagatatgattaaagcccatcatggtctgtgtaaatgtttctgcattcttagaaactttctccagttttttataactagtccattggatgtaggaatgccaaagagtctaactaaaaagagagggaatcttggctacaatggaatacctaggggtatgggaagtaagtaatagtctttatttccatatgaatattgctggctttacacctgcaataattaggcaagagactcaaagatagttttttcagaaaagttttctttcaaggatctagcaagtctgagctatgcttccaactttactgccctccatcatccggcatctttgactcatccaccaccttctgtccctttcattctcattccccatgtgtcagctccccagaaaggacatatcttgtacaccttgccacagcactcatcacctgcttctggactgcctgagcaagagtgatacttcctgttctaaagacaggagtgaggatgggggatactcagactttgggatgtgccagaactgtggctagtccccaggaagcagaacttggaggactcataaaggagccaatcccacctccatcctaaacaaggccagttcataaaccccatctggcacagcagcagtctcaggaagctaaattggggagtgccctgtatctcactccctaaactggggagtgagagcatcctgatggtcagctcttgggctgtgacagtggtcccctgcaaatgaaaaggggagctgtactgatgtcaggagatgtggctcaccgtcattattagagtcagggcctctcctgcctacttcggtgggtgaggacagagagggggatggagagaatccttaatccttcattggtaacatcctgagatcctcctagagttccagacatcatacttatcatgggatttgtttgccttattttagcctccctgccctctggccagtgagttgaattaaataattgtgccctcagtatcaaggagtagacaatgtagactatttttatgcagccctgaggacccccagtcatgactcttgataaggtgaggcatctgggttgggtgctaaactatgagccttcttcaccctccttccagtaatgcctatttcagccctgcctagcctgcaccatcttgataattaggtaggatgactgcagattgaaatcaagcagctatttcctttggcttttctggcagacactgcccactgcctccagtgcgtgcactgtagatggtgggtggtccctatgggtgggtgctagggggaaaattccacccctgcagtaagcagaagcaggcagaagtctgctggaagctgcaggcctcccgcactgacttgcaatgttccttgtgctccaggtgctgctgtttctttaagaggaaaaggaagaagactgctcagcgccacaagtgaccagtgcctcccaggagtcctcaggccctggggactctgactcaattgtacctgcagctcctgccatttctcattggaagggactcctctttgggggagggtggatatccaaaccaaaaagaagaaaacagatgcccccagaaggggccagtgcgggcagccagggcctagtgggtcattggccatctccgcctgcctaaggctctgagcaggtcccagagctgctgttcctccactgcttgcccatagggctgcctggttgactctccttcccattgtttacagtgaaggtgtcattcacaaaaactcaaggactgctattctccttcttccccttagtttactcctggtttttaccccaccctcaaccctctccagcataaaacctagtgagctaaaggctttgtctgcagaaggagatcaagaggctgggggtaaggccaagaaggtaggaggaaaatggcagacctgggctggagaagaaccttctccgtatcccaggtgtgcctggcagtatggtttcctcttcctctgtgcctgtgcagcattcatcccagctggccttggggttcaggttccttcttccctccctcctgtgaagttacactgtaggacacaagctgtgagcaatctgcagtctactgtccctgtgtgttggcgttcttagcttttttgacaaactcttttctccaggtagtaggacaatgaaaattgttctaagcaaaggaaagaaaactgactttgttgcacttttagtttttttaaaaaaaacaaaaacaaaaacatggcagatgcatattgtgtctggttatattgggggttttacttttacctgttttgagggggatggggccggccaagccattcagagagaacatgggtccagaggacattctcagtggaaagagtttgatctgcagcacccagaagagaagccaaactcggtgtcattctgagtgaacactcaggttggcaagaaaacatacttgaattttcattcatcttctcagcagctgaagaatgtccctaccagagcatcttgacctaatcagcttacagtttgaaaacctagctctccagaacatgagatgagccagccgagccagactgtgaccaggaaacagctcatcccagagaaggagatgcttaacaaaaaaaaattgaaattgtttcccatgctgccagggacttccaactagatagccatgtgacgtcctggtgacttgggggaaaaattagtgatgaaacagccaccaccatattgccattagtggaaaaaaagaggacagtgaacctgccttccacctgccagagggacctcagggtgtggcattatagggccaggaaaagaaaatcggtgtatcctatctgccccaatagctgagctgtagcatttgggctggcctgccttatcagaaaccaagcttatgaagatcttctcccagcaggtccatagcagtaggcttaggatgcagtatatggggccgcatttaaaaggagggaaagattgtttggtgctggaacattccagggaaaaggagactggaatgaaaggtctgaaattatcttctcaattggactccttccagaaaggtggccgtgcctctaagcatgtttttcccagtatgccctaggcctccccccatggtgttttcatatgaggtactactgtgaaggatctggttcctcattcactgtttgacaagtctttcatgtgtggagttactcttctcatgcccaattttcatttgagtttagtggcttaaccaaacaatgactcctcattccagcggtgacagaagagaaagggtcatttacatcaggaaagaggtcttgtatctgggagtagagagctaaccatggagcacagtggctggtgggtgacttagtctgatggtttgtggaccatagaagtcttcacctctggtttgaggtgcagggctgtcttttgtactggagggtgtggggatattttctgatagttgccatttcttgaaaaattcccttgatgtaccttacacagagcagaaataacattaacatggatcagaggtactgggcttcatctgttccattggacccttggctagggaatatcatttcactggcatcaaacctgcttagcttatgaaaagatggtaatatgtcatttctataaatgtttctatatatgaaacataaagtggcagggagatacaatatcacaccccttccccacaaggactgtgaatattgggatttatgtccttgccattacctagtggttacagccctatcactaaaatttacatcgtttctcagttgggatttgggcattgctaacttactgtatagaaagtttaacttttcctcacccctgtatagaaaatgccttgcctctcaagagagggcagagggggggccaggtgcagtggctcacgcctgtaatcccagcagtttgggaggccaaggcaagtggatcatgtgaggtcaagagttcgagaccagcctggccaacatggtgaaaccccgtctctacaaaaaatacaaaaattagctgggcatggtggcatgctcccgtagtcccagctactcgggaggctgaggcaggagaatcacttgagcctgggaggcagaagttgcagtgagccgagatcgcaccactgcactccagcctgggcaacagagtgagactctgtctaaa

SEQ ID NO: 8842 - DNA, 4174 bp, Homo sapiens
tactttcagagaaaatctttccaaagaccctcttaagaaagtcctatttctaaaattttcatgtttgattcattcagatatgattaaagcccatcatggtctgtgtaaatgtttctgcattcttagaaactttctccagttttttataactagtccattggatgtaggaatgccaaagagtctaactaaaaagagagggaatcttggctacaatggaatacctaggggtatgggaagtaagtaatagtctttatttccatatgaatattgctggctttacacctgcaataattaggcaagagactcaaagatagttttttcagaaaagttttctttcaaggatctagcaagtctgagctatgcttccaactttactgccctccatcatccggcatctttgactcatccaccaccttctgtccctttcattctcattccccatgtgtcagctccccagaaaggacatatcttgtacaccttgccacagcactcatcacctgcttctggactgcctgagcaagagtgatacttcctgttctaaagacaggagtgaggatgggggatactcagactttgggatgtgccagaactgtggctagtccccaggaagcagaacttggaggactcataaaggagccaatcccacctccatcctaaacaaggccagttcataaaccccatctggcacagcagcagtctcaggaagctaaattggggagtgccctgtatctcactccctaaactggggagtgagagcatcctgatggtcagctcttgggctgtgacagtggtcccctgcaaatgaaaaggggagctgtactgatgtcaggagatgtggctcaccgtcattattagagtcagggcctctcctgcctacttcggtgggtgaggacagagagggggatggagagaatccttaatccttcattggtaacatcctgagatcctcctagagttccagacatcatacttatcatgggatttgtttgccttattttagcctccctgccctctggccagtgagttgaattaaataattgtgccctcagtatcaaggagtagacaatgtagactatttttatgcagccctgaggacccccagtcatgactcttgataaggtgaggcatctgggttgggtgctaaactatgagccttcttcaccctccttccagtaatgcctatttcagccctgcctagcctgcaccatcttgataattaggtaggatgactgcagattgaaatcaagcagctatttcctttggcttttctggcagacactgcccactgcctccagtgcgtgcactgtagatggtgggtggtccctatgggtgggtgctagggggaaaattccacccctgcagtaagcagaagcaggcagaagtctgctggaagctgcaggcctcccgcactgacttgcaatgttccttgtgctccaggtgctgctgtttctttaagaggaaaaggaagaagactgctcagcgccacaagtgaccagtgcctcccaggagtcctcaggccctggggactctgactcaattgtacctgcagctcctgccatttctcattggaagggactcctctttgggggagggtggatatccaaaccaaaaagaagaaaacagatgcccccagaaggggccagtgcgggcagccagggcctagtgggtcattggccatctccgcctgcctaaggctctgagcaggtcccagagctgctgttcctccactgcttgcccatagggctgcctggttgactctccttcccattgtttacagtgaaggtgtcattcacaaaaactcaaggactgctattctccttcttccccttagtttactcctggtttttaccccaccctcaaccctctccagcataaaacctagtgagctaaaggctttgtctgcagaaggagatcaagaggctgggggtaaggccaagaaggtaggaggaaaatggcagacctgggctggagaagaaccttctccgtatcccaggtgtgcctggcagtatggtttcctcttcctctgtgcctgtgcagcattcatcccagctggccttggggttcaggttccttcttccctccctcctgtgaagttacactgtaggacacaagctgtgagcaatctgcagtctactgtccctgtgtgttggcgttcttagcttttttgacaaactcttttctccaggtagtaggacaatgaaaattgttctaagcaaaggaaagaaaactgactttgttgcacttttagtttttttaaaaaaaacaaaaacaaaaacatggcagatgcatattgtgtctggttatattgggggttttacttttacctgttttgagggggatggggccggccaagccattcagagagaacatgggtccagaggacattctcagtggaaagagtttgatctgcagcacccagaagagaagccaaactcggtgtcattctgagtgaacactcaggttggcaagaaaacatacttgaattttcattcatcttctcagcagctgaagaatgtccctaccagagcatcttgacctaatcagcttacagtttgaaaacctagctctccagaacatgagatgagccagccgagccagactgtgaccaggaaacagctcatcccagagaaggagatgcttaacaaaaaaaaattgaaattgtttcccatgctgccagggacttccaactagatagccatgtgacgtcctggtgacttgggggaaaaattagtgatgaaacagccaccaccatattgccattagtggaaaaaaagaggacagtgaacctgccttccacctgccagagggacctcagggtgtggcattatagggccaggaaaagaaaatcggtgtatcctatctgccccaatagctgagctgtagcatttgggctggcctgccttatcagaaaccaagcttatgaagatcttctcccagcaggtccatagcagtaggcttaggatgcagtatatggggccgcatttaaaaggagggaaagattgtttggtgctggaacattccagggaaaaggagactggaatgaaaggtctgaaattatcttctcaattggactccttccagaaaggtggccgtgcctctaagcatgtttttcccagtatgccctaggcctccccccatggtgttttcatatgaggtactactgtgaaggatctggttcctcattcactgtttgacaagtctttcatgtgtggagttactcttctcatgcccaattttcatttgagtttagtggcttaaccaaacaatgactcctcattccagcggtgacagaagagaaagggtcatttacatcaggaaagaggtcttgtatctgggagtagagagctaaccatggagcacagtggctggtgggtgacttagtctgatggtttgtggaccatagaagtcttcacctctggtttgaggtgcagggctgtcttttgtactggagggtgtggggatattttctgatagttgccatttcttgaaaaattcccttgatgtaccttacacagagcagaaataacattaacatggatcagaggtactgggcttcatctgttccattggaccttggctagggaatatcatttcactggcatcaaacctgcttagcttatgaaaagatggtaatatgtcatttctataaatgtttctatatatgaaacataaagtggcagggagatacaatatcacaccccttccccacaaggactgtgaatattgggatttatgtccttgccattacctagtggttacagccctatcactaaaatttacatcgtttctcagttgggatttgggcattgctaacttactgtatagaaagtttaacttttcctcacccctgtatagaaaatgccttgcctctcaagagagggcagagggggggccaggtgcagtggctcacgcctgtaatcccagcagtttgggaggccaaggcaagtggatcatgtgaggtcaagagttcgagaccagcctggccaacatggtgaaaccccgtctctacaaaaaatacaaaaattagctgggcatggtggcatgctcccgtagtcccagctactcgggaggctgaggcaggagaatcacttgagcctgggaggcagaagttgcagtgagccgagatcgcaccactgcactccagcctgggcaacagagtgagactctgtctaaa

SEQ ID NO: 8843 - DNA, 263 bp, Homo sapiens; identical to SEQ ID NO: 8840

SEQ ID NO: 8844 - DNA, 3433 bp, Homo sapiens
ggcagtggagggggataaggtatctgcagctggagtctggggccattcagacaagggagtagacagagtggcaagaggtcgggaaaacagcaagaagttagcagatgggggtaactcgtttcctggggctgttggaacaaattaccacaaacttggggcttcaaacaacagaaatgtctactctcacagctctggcggctagcagtctgaaatcggtttcactgagcagaaaatgaaattaaggtatgaatagggctgtgctccctccagaggttctaggggagtatccgttccctgtgtctcccagctgctggtggctccaggcattccttggctgatggctccaccacttcattctctgcctcccttgtcccaagactcttactgctgttcaggaaggacacctgtgagtgcatttaggaccccccatgataatccagaatgagctcctcctcctcctctcaagaccataaacttaatcccatcttttgctatattaagtattatcccctggtccagctattagaatgcggacatatcattttgggggctgctaccaggtgtgaggaaggactgagcattgtgccagggtagggacagcttcctctcaaggactcacttgaaacacttgccccagttttcattcccttccccttactctagtaccttgaatcaaaggcagggtcattcacatgtctccacgggggcaggtgtgtgccctgaggtggggggagcactgagttgggtgggagtccccagctctgcctttgacccaccttgtgaccttgtgctggtcatgcctcctctttgagactgtctcaccttctgcaaatgaggatgttgaattgcatgatctctaagggcctttctagcctagagaccagttgatgaactccaatctcattttacactggagaaactgaagtccatggaaattgaacctcaagtctctaagaacatagagcccaattaaggctgttgttcacagtgagttttggtttcagctcacagtctgctcttagcagctctttctaattcagaactgaggtcataattcaatctgtgattgacctcagagccaagcggattttgcttaagccatgccctgacttagtatcatggcacaaacccagatcaatagagaagcagctatagtgcaatgaaattagacagattgggctctgtgtgaccctgggcgagtcactgaacatttcccaatctcaatgttctcatttgaaaagtaaggatattttgaaggctattgatttatgagaattagaaataaataaataaatgcaaaatgctccataggatttttggtatgtgtgtggggctcagccaagggtaactctttaccattggagggcttcctctaaggtgtctcctatttctctcccctcattctctctgttctagccctggccccacctccctgctattcctggaatgtgcccatcctgcttttgtcccaggccctggcgctgggtcccctctgcacagaacgtccttctcccaaatagacacaaagctcaggctcactcctcccttcccttgggcattcacagccaagttaccttcttagagagacttttttggcaccctttcctgctttgtttttcttcctggaaggtatcactatataatttactctatgttttacatactttgtaaattgcctgttcccctttttaaactgtaagcttcgtgaggtcagggattctagcttatttttatcactgctgaattcccacttataacagtgcctggcccacaataggtactcaaaaatatttgttgaatgagtgaatgagtgagagagtgaaggaaaatgtcttcaagctgctctaaaaccagacaggaaagagtgaagagtacgtcaacaaatcccttgaaatgattttgttttttaaaggaatgagacttaattccagtgtagtttgcaaactgggagtggcagcttttggaacacaacagaggggcgttttgggagaacaaagagaggggctgtctcttatagaaaacgttcctgcccaggttcccactctggttcactatgcaaaagaaggatgcaaacttgtttggttctgattggctgacacaggtcacagtccgttgattaggtataggaggcaaaatgggattttccagcacctttgatgcaggcggcatgagcaggaacagacagctatgaaactcccaaagttacttgatgatgtgagttttctgggcatgcagagtacatgcctgacctcctgtcaacaaatggctgctcgtctgtaatttgaatttaggcctggttagctactcaggatccatctggagggattggctcttgtagggtttacaaggaggagttgagctaccagttaggagactgcaaccatcaggcaaaagctgatggtgggggcatggagtggggctgatggcggagggggtgggatgtgggtggacttgagggatcttttgaaggtaaagatactaagatgtgctgatgtgtgagctgtaggaggatgccaaggttgcctggagcctgtggtggttccacgtggtggttctattgactgagctggaggtgactggggaggggagaaccagattcatgatgtccatgtccagtggccttttccatgagggagacatggaggaaaatgaactctgccagcatttacagacgttgcgttctacttcaaccttgaggatgagttcagtttgacttaaagtgatatacttcagctttctgggctggaaattcttcaactttagagcaagagtggggtgaatggagcccacttggggtcttgggcaggcaatgtggccatggaaaaggcttggctttggagtgagacgaattcgtgctgaaatccaacccttgccatcaactcgttagttaatttcattggactcaatttcctcctctctagaatgaggtggtaattcgacctcacaaaaatgcggtgcatttcaagcaatataacatctctgagtgccaaaccctgtgccaggcacatagcagaacaatcaataaatgctcattttctccctctggccccctggcccctgcagtacactaacgtcatgatttcacagttcccagcagcagccacttctaagcagatggagttgcatgacattgtgaagcacctaaccctcttacctgtgcgtgtctcagaaactcactatttcagtgcaaatatgctacatggattattttgaaaaggccatttaataatatctttcaagtgacaacattgaaaggaagacctattgctttgtttggtggtgactgaatttattatacataaagaataaaaattaatctcttctttctctgccattacctttctcttagatttctcacaccaggtgttcaaatcccagagagaaaacttcctcttttcagtctgacattttcaaatgtgttgatacatacccg

SEQ ID NO: 8845 - DNA, 4589 bp, Homo sapiens
agcacaattgccttctgaagctacttgaaacagggcatgggacttaaaggagaaaaaaaaggaaatggaccatctcttctaacacctggaatgtgatccaagcctggagacaaattgatggtaattataactgctaacatttgtttttagctgctaacagattgtgcacagattgtgaagggcaaactccattctccaattactccagtgcaaactgtgctttaacagtactcactaaatcctagttgagtgaaatgagagcagattgtccttatggtgtggttcatttatgttaaactatggaaagctgtcctcccacggtcccagtccaggggccactcacagccagatgcagagagccctccagcacgctgggctctacacatctctgttcttactgccagcaaatctgctctacagagtataacatgtatttcccaagcacagacaaagcaaaaggaaaagggctaggcaggaagtagggacaccagctgctggggaaacaagtcttaagcaacctggcttgtgagccaatcaaggttgctaaggtaggtcctgggcctaaacagggtacatttccacctggttggggagaataaaatgacagataccaaaagttaacaagataatctgtggtcgataacaaattgatacaataaaccatgaattctctaagagttcaaagagggcaacagttctttcctgcttcctcttcagatgagggtgatcaaagaacaagcccagaaagactctgaaaaagtgaaaacttcaccaataggaaactatagttggttgacactgaaaagttgtcagcaagaatgagactacagagctccctccactatgtgttaaagccacagtcctctccatctccttaaagacagtaatgatgtatcatttctggctaaaacagccacagaagatgggggtgcaaaggaaggcgtgcttagaaaagcaatagggagtttccattttgctacctttatctaaaaacacacaaagacttttgtttcccaaaagggtaattatgggaccattatatatagttaactccacatacacatcaccttaagaaatagtaataaagacagaaaagtgccttttggttctgtttccataacatttagccaaatcaatctgtaaattgtctatgggtgagttgaaattgtaatctgagcagtaacctggatgtccggtgtaccacccataagtcgaccacatcaagggcacaatattaaaaagcatgaaagtttgggcttggttttggcaagttctgatggagagatccatccagcctgatgaaggctaagcaaggaggaggtccagagaggaaacaatgctcgggagtaagcaggaaatggcgtcaggttccaagagatcgtccactgccaagggttaaatccagctctctagaaggaaagctatgacaaggtctaggaagcctcaaggcaggaattcagttacatcaggaaaatatagtactaaggaaaaaacaaagctaatgtccaatcctatggattaagatgacacagcagaggctaggagaaatctagaatctggtgggtatgtggtgccagagttactgcaggatattagccactaagataatggtgacatgaataaagctacattccacctacagctggattgaggcttttaacatattttctgcccaggataggattagcataggaactctgcaggtttcaggctagagatcaagctgtatcaaatacagcaatgaatgagctgatgtgggctgaggaagacagaaggtgaacatagcacttccatatgagaggccataatttatttattagcacaagtattcatacttgtgatatgataagtgagattttgaaaagtgaaaaatatattctgttgcaatggtcagtttacctcatttaaattttctgccttatcagttttgttatctgacaaagttaaatgtaaaaaatgaaacaataaatactagaagaaaatatggggaatacttaattatgctttgatgaggaaggcatttctaaatacaataagaaaaaaaatcacaggagtagagactggaccacataaaaatgtaaaatttggtgcaattaaaataacattggcataattaaaaggctgtataaaccaggtaaaatattagcagcaaatgtggcagatttaatattcttgatgcataaaaatgtcttgcaaaccaataaggaaaacttcacgcaaaaaataggtaaaaaatcaaatatatttcacagaagaataaataccacagaccaataagcatgtcaaaaagtgttcaacttcactagaaataataaaggcacacattatagcaacaaaaaaataccaatgctcccttctcaaattgggataaacaacattgtaagagaatgtgataagattggtacaccttcctaggaagcgatttgacaatgtttgacctaatactatgatttctagtaatctattctaaaaaaaaaaaaaaaatctgattctttataataaatattatataatatatgcaatagataatttctcacagaaatatttatcaaagtgttataataattaaaagaggcaagaaactgaatgttacagttacataataaaaaactaattagccatgaatattgtgttttttgtttttcgttttgagacagagtctcgctctgtcacccaggctggagtgcagtggtgggatgttggctcactgcaagctctgcctcctgggttcacgctattctcctgcctcagcctcccgagtaactgggactacaggcgcatgccaccacacctggctaattttttacatttttagtagagacggggtttcaccatgttagccaggattgtctccatctcctgacctcatgatccgcccaccctggcctcccaaagtgctgggattataggcgtgagccaccacgcctggccgaatattatttttaataacatgggaaaatgctcatggcacaatattaagtgaaaaagcagggtataaaacatgactttgtttatattatatgtaacatacacatatagcaaaaagactggagggaatagacatgttaatagtgacggaaggctggacatggtggttcacacctgtaatcccagcactttgggaggccaaggtaggaggatcacttgagcccaggagttcgagatcagtgtgggcaacatagggagactgtatccctcctaaaaaataaaaaatatctgggcatggtggtacatacctgtggtctcagctatttgggaggctgaggcaggaggatcacttgagcccggaaggttggggccacagtgagccatgatcatctcactgcactgcaatctgagcaacagagcaagactgtctcaaaaacaaacaaaataggtagctcctagagcattataggaacaacgataactgaaggaatattttttaaaggaaaaaatcattacttaaagatctcagctttttgagtttaacatcccagaaactactaatttgaaatattctaaagaaccatatttgctttctgtaacagtaatttttcaaaagtcttctaacaagacccactcacgggaaagaaaactcttacatgtcaatgaatgagtgtccacaatccaaagaatactcaagtggcactttcctaagaagtctctatcattaagcaaaagagatcccatgatcctagtctcaaaaaaaacccaaaaacctccaaattatttccagtgattttaagaaagttgatgttaaatgcaagcacactgaatagttctgcacaatacattagatgttaacatattctgagaagaaagatcatgaacaaaatgcaaaacacttttttgtacttttataattaggaataatctagataaccctaggatttgtacttttactactaagagttaatatttactgagtccttactatgtgacaagcacattagtgaagcattttatattcattctgttattcaatgctcaagacaatcttatcaggtaagtactattaatatcttcattttacagacaaggaatctgtggctcccaaatgttaaataacttgtcaaaggccaccaagctgataattggccaagcccaaatttaaaaccagacagtctgtttctagaacttgcattgttaactcatttgctttactgacttggaatctatgaaacaggtaaagttgaagaacgcctttctcttctgtttcctccccatgctctaggagtctcaataaagaataatgaatcctgagcttttaaatctatgcatatatcactatctttattgtgctacttcctttaaagaaagtatggtttaataaattaatgcactgtcttcagtttttcctgcgctggttttatatgtaatttctcttccttgtttaggtttgcagctagaagacagtaaatctagcaatggagcccatatatgaggagtacctagcaaatcatggaacaatagtaaaaccatattactggctaagcttctctctcgattgctctaattgtccttaccatattcgaacaggtgaagaagcaagagtttccctcacagaattttgtcagatttttggattcccttatgggacaacattt

SEQ ID NO: 8846 - DNA, 4590 bp, Homo sapiens
agcacaattgccttctgaagctacttgaaacagggcatgggacttaaaggagaaaaaaaaggaaatggaccatctcttctaacacctggaatgtgatccaagcctggagacaaattgatggtaattataactgctaacatttgtttttagctgctaacagattgtgcacagattgtgaagggcaaactccattctccaattactccagtgcaaactgtgctttaacagtactcactaaatcctagttgagtgaaatgagagcagattgtccttatggtgtggttcatttatgttaaactatggaaagctgtcctcccacggtcccagtccaggggccactcacagccagatgcagagagccctccagcacgctgggctctacacatctctgttcttactgccagcaaatctgctctacagagtataacatgtatttcccaagcacagacaaagcaaaaggaaaagggctaggcaggaagtagggacaccagctgctggggaaacaagtcttaagcaacctggcttgtgagccaatcaaggttgctaaggtaggtcctgggcctaaacagggtacatttccacctggttggggagaataaaatgacagataccaaaagttaacaagataatctgtggtcgataacaaattgatacaataaaccatgaattctctaagagttcaaagagggcaacagttctttcctgcttcctcttcagatgagggtgatcaaagaacaagcccagaaagactctgaaaaagtgaaaacttcaccaataggaaactatagttggttgacactgaaaagttgtcagcaagaatgagactacagagctccctccactatgtgttaaagccacagtcctctccatctccttaaagacagtaatgatgtatcatttctggctaaaacagccacagaagatgggggtgcaaaggaaggcgtgcttagaaaagcaatagggagtttccattttgctacctttatctaaaaacacacaaagacttttgtttcccaaaagggtaattatgggaccattatatatagttaactccacatacacatcaccttaagaaatagtaataaagacagaaaagtgccttttggttctgtttccataacatttagccaaatcaatctgtaaattgtctatgggtgagttgaaattgtaatctgagcagtaacctggatgtccggtgtaccacccataagtcgaccacatcaagggcacaatattaaaaagcatgaaagtttgggcttggttttggcaagttctgatggagagatccatccagcctgatgaaggctaagcaaggaggaggtccagagaggaaacaatgctcgggagtaagcaggaaatggcgtcaggttccaagagatcgtccactgccaagggttaaatccagctctctagaaggaaagctatgacaaggtctaggaagcctcaaggcaggaattcagttacatcaggaaaatatagtactaaggaaaaaacaaagctaatgtccaatcctatggattaagatgacacagcagaggctaggagaaatctagaatctggtgggtatgtggtgccagagttactgcaggatattagccactaagataatggtgacatgaataaagctacattccacctacagctggattgaggcttttaacatattttctgcccaggataggattagcataggaactctgcaggtttcaggctagagatcaagctgtatcaaatacagcaatgaatgagctgatgtgggctgaggaagacagaaggtgaacatagcacttccatatgagaggccataatttatttattagcacaagtattcatacttgtgatatgataagtgagattttgaaaagtgaaaaatatattctgttgcaatggtcagtttacctcatttaaattttctgccttatcagttttgttatctgacaaagttaaatgtaaaaaatgaaaccataaatactagaagaaaatatggggaatacttaattatgctttgatgaggaaggcatttctaaatacaataagaaaaaaaatcacaggagtagagactggaccacataaaaatgtaaaatttggtgcaattaaaataacattggcataattaaaaggctgtataaaccaggtaaaatattagcagcaaatgtggcagatttaatattcttgatgcataaaaatgtcttgcaaaccaataaggaaaacttcacgcaaaaaataggtaaaaaatcaaatatatttcacagaagaataaataccacagaccaataagcatgtcaaaaagtgttcaacttcactagaaataataaaggcacacattatagcaacaaaaaaataccaatgctcccttctcaaattgggataaacaacattgtaagagaatgtgataagattggtacaccttcctaggaagcgatttgacaatgtttgacctaatactatgatttctagtaatctattctaaaaaaaaaaaaaaatctgattctttataataaatattatataatatatgcaatagataatttctcacagaaatatttatcaaagtgttataataattaaaagaggcaagaaactgaatgttacagttacataataaaaaactaattagccatgaatattgtgttttttgtttttcgttttgagacagagtctcgctctgtcacccaggctggagtgcagtggtgggatgttggctcactgcaagctctgcctcctgggttcacgctattctcctgcctcagcctcccgagtaactgggactacaggcgcatgccaccacacctggctaattttttacatttttagtagagacggggtttcaccatgttagccaggattgtctccatctcctgacctcatgatccgcccaccctggcctcccaaagtgctgggattataggcgtgagccaccacgcctggccgaatattatttttaataacatgggaaaatgctcatggcacaatattaagtgaaaaagcagggtataaaacatgactttgtttatattatatgtaacatacacatatagcaaaaagactggagggaatagacatgttaatagtgacggaaggctggacatggtggttcacacctgtaatcccagcactttgggaggccaaggtaggaggatcacttgagcccaggagttcgagatcagtgtgggcaacatagggagactgtatccctcctaaaaaataaaaaaattatctgggcatggtggtacatacctgtggtctcagctatttgggaggctgaggcaggaggatcacttgagcccggaaggttggggccacagtgagccatgatcatctcactgcactgcaatctgagcaacagagcaagactgtctcaaaaacaaacaaaataggtagctcctagagcattataggaacaacgataactgaaggaatattttttaaaggaaaaaatcattacttaaagatctcagctttttgagtttaacatcccagaaactactaatttgaaatattctaaagaaccatatttgctttctgtaacagtaatttttcaaaagtcttctaacaagacccactcacgggaaagaaaactcttacatgtcaatgaatgagtgtccacaatccaaagaatactcaagtggcactttcctaagaagtctctatcattaagcaaaagagatcccatgatcctagtctcaaaaaaaacccaaaaacctccaaattatttccagtgattttaagaaagttgatgttaaatgcaagcacactgaatagttctgcacaatacattagatgttaacatattctgagaagaaagatcatgaacaaaatgcaaaacacttttttgtacttttataattaggaataatctagataaccctaggatttgtacttttactactaagagttaatatttactgagtccttactatgtgacaagcacattagtgaagcattttatattcattctgttattcaatgctcaagacaatcttatcaggtaagtactattaatatcttcattttacagacaaggaatctgtggctcccaaatgttaaataacttgtcaaaggccaccaagctgataattggccaagcccaaatttaaaaccagacagtctgtttctagaacttgcattgttaactcatttgctttactgacttggaatctatgaaacaggtaaagttgaagaacgcctttctcttctgtttcctccccatgctctaggagtctcaataaagaataatgaatcctgagcttttaaatctatgcatatatcactatctttattgtgctacttcctttaaagaaagtatggtttaataaattaatgcactgtcttcagtttttcctgcgctggttttatatgtaatttctcttccttgtttaggtttgcagctagaagacagtaaatctagcaatggagcccatatatgaggagtacctagcaaatcatggaacaatagtaaaaccatattactggctaagcttctctctcgattgctctaattgtccttaccatattcgaacaggtgaagaagcaagagtttccctcacagaattttgtcagatttttggattcccttatgggacaacattt

SEQ ID NO: 8847 - DNA, 886 bp, Homo sapiens
atttcctgattacgtatccaggcatcactcttagtatttatttttctcagctctatcatactgagatggactttcctgcctcagcatggaaccgcgaagctctccggagcctggccagcttatggccgcgggttgttttgagtccaataagtggtgggatctggcattctgttctccacagctttataagtggtgtctcaggatcacatgtttttcagcccattttaactgggagagcactggctgacaggcacaacgcatatgaaatcaatgccataacaggcgtaaaaccttacttcactgatgttcttctccagacaaaaaggaatccaaacacaaaagctcaggaggctttagagagctaccccttaaacaatgcctttcctggacagtcttttcaaatgccgagtggacaactccaacccaacctacctccagacctcagggctcctgttgtttttgtgctagtgcctctcagggacttaccaccaatgcatatgggccaaaacccaaataaacccaggaatatcgtaaggcacttaaatatgcctcaaatgtcattccaggaaaccgaggaccttggaaggcttcccactggaaggtcagtggagatagtggaaatcacagaacagtttgcaagtagcaaggaggcagatgaaaagaagaagaagaaagggaagaaataaaatctacattcctacagcatgaaaccaattaccaagggacttattagataggcaataaaaatctggaaactttctctctcagggctgagccaagatggagataaactgatgcactaaaagcaaactttgaattatttaccatatcaactattataaagttacactattttaaacataatccaaaatgtttccataagcaa

SEQ ID NO: 8848 - DNA, 2889 bp, Homo sapiens
atttcctgattacgtatccaggcatcactcttagtatttatttttctcagctctatcatactgagatggactttcctgcctcagcatggaaccgcgaagctctccggagcctggccagcttatggccgcgggttgttttgagtccaataagtggtgggatctggcattctgttctccacagctttataagtggtgtctcaggatcacatgtttttcagcccattttaactgggagagcactggctgacaggcacaacgcatatgaaatcaatgccataacaggcgtaaaaccttacttcactgatgttcttctccagacaaaaaggaatccaaacacaaaagctcaggaggctttagagagctaccccttaaacaatgcctttcctggacagttttttcaaatgccgagtggacaactccaacccaacctacctccagacctcagggctcctgttgtttttgtgctagtgcctctcagggacttaccaccaatgcatatgggccaaaacccaaataaacccaggaatatcgtaaggcacttaaatatgcctcaaatgtcattccaggaaaccaaggaccttggaaggcttcccactggaaggtcagtggagatagtggaaatcacagaacagtttgcaagtagcaaggaggcagatgaaaagaagaagaagaaagggaagaaataaaatctacattcctacagcatgaaaccaattaccaagggacttattagataggcaataaaaatctggaaactttctctctcagggctgagccaagatggagataaactgatgcactaaaagcaaaccttgaattatttaccatatcaactattataaagttacactattttaaacataatccaaaatgtttccataagcaacttgatctctctcctttattttgaaagtggcagtatcaaaatggaaccattagcagcttgctaatattttgatgcagaaaaggaatctcattattctattttactcacatcatctttccactacaaaagcccatggacaaaatagctacctaaatttgtttcggtaaaaaatttactgtaaaattgaaaaacagcctgaagctactgacattaagtgctgtttgcaggagcaaaccagtgattttctattaattgttaatcatggacagaagattttaggcagctcatttttttctaaagtgattcaaaatagttttgtgtgggaaaaagctcttctgctgattacatatagctataaagattaaaacctagccacctgctcagtttgatcttccccagctcagacctctcccttctgagcagatgatagaggtaagatgatacatgagaacctccaatggctcctgtcatcacatactgtataaaatccaagttcctcttactggctttcaaggatcctcctttaacttcctgttgccttgtctcatcagcaagatcataagtacctacaggtcaagcactgtctctcccttctctttagcttttcccttaggatctagcacattacccagcaaaatgtgagtagcaaggctgaaatgacatctcaataacttcaccaatgattgtaactcagcatcccttctccatcccagctgaaagcctgcttcaccatcctgcaagagatgttttttctttttgttagcatccattcccctttctaatgcagctcccaatgcataatgtgtgttttacttccctctttctgactccatcctcgtcaccagtgaatatttgtaccttctcttaaaatcttcaaaacacacttctaggaagtgctccttgattaatcctctaagcacttaaatgaaagcactttgcttatgcttatttcacatttgctgccacttgcctctttgaaatatgtaaagatacattacaagaaaaatgtacattttctcgtaacttgctattaatttttttctttatatatatatataaagtaatcctaagctaataaaagagtttgccatgacattaaaacatttaatactccataagggaggaggagaaagaaaaacatattttaggaatagcaattagtattgtggttaaaataaacatgaataaaaattttaaaacaaagttttattgttagcatacaaattttaatggaattactggaatatagttttattctgggtatatagtgagtattatttaaagaagtactgttgaggtttatttttatttcatgaaatcctatgtccacaatttgggatactgagttaaaaagatcccaacatgacaaatccagcatctctgatcattattaaaatagatccaatttgttgccagaaaatggcagactacaacatgaaccaggctacagagaatccaattagaaacatggtctgaaatagatgatgaactgaacctggatatcagtggtatataacaaaaggagaagttgtcagaactataggaaagaaagtgcctttggcagttaaacttttgtactggttcgataagactagggctacaaagaagattactcacaggtcgtaagtccaggccaaccttagacaaaagactgttagaagagcataaagatatactgtccaaggcaagtaatctgtttcctcatctgtaaaacaagaaatgtgggctagttcatctttaaggttcctttcagctccgtctgctataagaaggcatatagcaaagcaatagttccacaaagtgagatcctgcagtgcagtgattagctttccttgctcactacgcagtgattcttggtcatatcaggctggccggggattgagagagagaaattgggttgctccacccctcttcagccaactggcaatggtgatatggaagaatatctctgccaccacacatatagaactaatggaaataaagaaaatagaagtaaattaagg

SEQ ID NO: 8849 - DNA, 405 bp, Homo sapiens
gcagaacgttttttcctgtgagaggaacattaagactcctgggagggctggggctaacgcctccgagagccccacctggtcagcctagggttagacgtgtagccagggtgctgggagggggccgctgctgggccccagatagaggggtagaggccgctcaatcacggagccaggccccacctgctgtagaaaccgccaccgagagccggccgggcttgctgcacgctctggattccgcctgcctataggcgaggcacaagggactgcgagaccagtcctgaaggcagagaggtcagcaggctcgggggcctctgctccagcggacaacaagcgcaccgggcgggaacggccgcctccccaggcgctgcagcctagctctcatgtgacccacggaacttagcccct

SEQ ID NO: 8850 - DNA, 1177 bp, Homo sapiens
tgggcattcacgccgggactgccaactcaccaggttatttatagtgacaagagagtgagacagtgggcttgaaagtgttttccagaccaaggctctgtcccacatataggtggattaactgtctggcaaaggcaggtgagtaacgttgatgcctatcagctctcatgtggatactgtttggactgggatgtagttctttgacctggggtgagctgtatagcaaccctggagggatgcctatcacacattacagtatctgaaagacactcacattctgaccctcacaatgtagtcagtccatttccaacaatgctggttttaaaggatgtaaattgcagtgcagggagttgtcagacaccaaggagtaatgatcaaaatatgatggtcattggaccttatcttgggagaaagagctaaaactgtgttctagatagtctcacagacttgaacatgctttggattttaggtttttgcaaatcaggcttgttctaatattttctcccacatgctatggtaggagccccatgatctcttgtttctccctaggaatccattgaagaggccatctccacattcagaaccaaggtatgatgacaattacaaggggctaatttttaaaaagaaaaaggcctacctttttccagtttgataaggtttatcatggttaaagcaacatgtgaaatcatcatcttgttatgatagaaaaattcaatatgaagtagatcatttttccaaagatgaccacaacagtatctccatcatgaagtgggtgtatttttcttccctttgaatctgggctgaccctgtgattgctctgaccaatagaatgtggcagaaagaatgttctaggacttccaagcctcgtcattaagcaaaagcattaagcaaaccccacagcttctgctttgtactctggaaaatgccagccacccatgaggagagaccaccctgctagccacagggagaggctatgtgaaaagaaagagatgcctggccagctctagctcttcagctcatcccagctgagctaccagacacatgagtggaaaagcccttaggaagttccagctccagcagacaccatactgaacagaggagagataagccatccccacggagcactgccaaaatgacggcattgtgaacaaataaatgatcattgttttaaggcactaaa

SEQ ID NO: 8851 - DNA, 364 bp, Homo sapiens
cagcttcagccttcactgggtgcatctggttcacacctgcacacctgacatccatgtagctggcagagttttatgcagagttgttttgttgaccttgctgagggagacgacaaaacgttcaaagactaggggaggatcacgcccgccgaggggcacttgctgacacctagatcagaaagttcttccatgggaccaggaaggggtatgagacctctcagaatatgtccctgatgctcataatgtgtggccactaagtgttctgggaggaactgcaagctaaacccttgacctacttccacagctccgatagcccccacgttccataaaccgaagctgctgaaaccacagagaaaagtcacgctgg

SEQ ID NO: 8852 - DNA, 320 bp, Homo sapiens
ggtttgattcagaaaggcggggcaacaaagcaggggcttccagggtataggtaaatttaaacattttctggttgacaattggttgagtttatctgaagacctgggatcaacagaaaagaaatgtttgggatgagataaaggattgtggagaccaagttttactgcgcaaaggaagctctcagatagcagacttcagagagagcaggttgtaaaatgtttcttattggaattagaacggtccctggctcttagttgattatctcctggaaccagaaaggaaggaaggaaaacaaaggggagaggagattctctacagaata

SEQ ID NO: 8853 - DNA, 539 bp, Homo sapiens
ggatcgatgataataataaattcctgagcccatgccatagacattgtattacttctggtcctttgggggttttgtgcatgcagtggcatagagttctgtttttcaatagatataaattaacaaaatctcagaacacttttaacaagtgacatttcagattttgtttgtcttgcctcttgtgtgctgtgcccatatttttgcttagctgaggttttcagaagtgagaagtgttggtgacattgtcagacaaaggatttgcagctgttatagactcaccatccaccacatggcactcacaggtagcatttattcacaaacagacctcaaggactccaaaatactgaagatttcccatggtatccagagatgatgagggaacaagggtctgtgccagcttgagcaacaggcacccgtcagtatggcttgttactgacacattaatctccatggcaacagaaagctatcctttccttaattgtaaccatcccaacaaatttgagaaatgctaactccctccaataaagagtttgtgaacctaa

SEQ ID NO: 8854 - DNA, 3623 bp, Homo sapiens
gggtgctcaagcctttattatattgaagaagaaggagaagcagcagcagcccctgtccaccctcacaggctagaaatcatatttgttctccatgataattagtgtggtttttatatctctccaggtgacacacagtgaccttcctcaggagagtggaagctctgcagggtgagaatgaaacatgggtggtcaggtgggctctcacatttactggatcacagatgctttccctcctgaaacagctgctggcctcaccattatgtctccaatctaataatacactgatgtcttaatagctgatatttgcccaaactcagccattaggaaatgtcagtttgcatctgatataatttatgtggttggtggtttctcttagcctttattgaaaatgctcatgagtgactcaggtggataaacaaccagtcattgcattttccatgcagagctctgcctgtgatggacaccttggtcacctgccaggggtcagtccacttggctgtgagggcctctcagggacctgcagcgttttggtgaactttagtgaggagtaggatgcccacaacccctgccgcaggaaagccctgatgcctgatcagctgtaaacacacgtctgtgtcacccagcagtcagagctcagggtgcacaccaggaggagcacatccacacgtcctggagctcagacacacaccctcactcacatgcactcaacacagcatgcacaacctcatgggcaacatcatcatgcccttcctgcagtccacggtggggccacatggtgacacctgggtcgttggtggaagttagcaaccatcacatgttgcacatgggagtatgaaggaagggttgcagagaacatctgctttggaattagcctgagctaagatcaatattggatctgtcatgttatgtggcccctttaagtcacactggatttgctatataatttggagtatctaagtacttacattgcctgggctggaaataaagagatgtttatcaaagagcacaaactttcagctataagaggaacaagttctgaggatttaatatacaacatgggtggtgattgtgataatcattacacaatatatatgtacatcaaatcacattgcacaccttgaatatacactatatttgtgaattaaatattttaaaattaaaaattgaggaagagcttagcatactgccttgttcacttttatacgggacataacacatgagtgggtgacaaaattaattaagtgtattgtggcaaacattttcaaaaagtgacagaataaaataaaatatatcagagtacatatatggtctgcaacttatgatgtttcgacttgcaaatttttgattttattatggtgtgaaaccattacaatttggatataatgtagagtattcaataaactacatgagaaataaactttatgttagatgattttgcccaaatgtaggctaatgtaagtgttctcagcacatttaaggtaggctaggctaagctctgatgtttggtaggttaagtatattaaatgcacttttggcttatgatgtgttcaatttatgatgggtttattgggatttaccccatcataagtcaagaagcatctgtgttttgaatataatgaggctaagtatttgtagcgtgctctatttttgaaaatagccgcaataatctcttacagtccatgtgctattctagaatggtacctccctgttctgccatcaagatgtaaggtctatttccctctccttgaatctgggcagacctgtgattactttgagcaatagaatatgccagaagtgatgcaatgattcctgaggctgggttataaaaacaatgcagcatctgccttgtcaacaagagcctgggcttggatccctgaacagccatgttacaagtgagactactctgaggcagtcatgctgtgaggaagcccaggccacaaggagacaccacatattggtgatccagtttggccgaggcattgagccagcccagcccaggcactggacatgtgagtgaagccatccacaaaccttccagattaacccgtccaccagcagattaccattgaatggcctcagttgattccacaaggagcaaaatgattgcttagctaaatgctgcctgaatcctcacctgaagaattcattagtataaaatgctaatagctattgtaagtctacattttggggtagctttttacacaataacaaccaagctggtatcatttatgatgtgacacaagctagtaggatttttatttcagtatgcatattgagttacaaagtaaaattcttttatttatttttttgtagagatggggtcttgctatgttgccagggtagtcttgaactcctggtcttaagtgatactcccactatcacctcccaaagtgctaggattccaggtgtaggccaccatgcctggctgtaaaagtattctttactgtgtgtcttgcacttaaacaaaagtgtacaaactactggtttagcctaaaataaatgctattatatttgtgagtattatacagaaagttacctaacctctctgtacctctattttctcctctgcacagtggggataataggacctacctagctgggctgttatgaaggctaaacgaggaaacacttgtaaagttctcagaactgtgcctcgaacaaggtaagccttcctgaacgtcatgtaaatagagtatgtgaacccccagatggggactttcttcatggcattgataaaggaactgggggtggcaaaaaatgacagacttgcccaggacaagagtcagcagtgggagaaacaggattcgaggctagatcttctgaatgtttagtaggtgttctttgctgcatttagtgggctccctactcaatactgtgatgtcgggattgttgcattttacagctgtccactcacagcctgaggatcgcaggtcagaagcaatgtctcagtgcactggcatctttgctttttgacagactgctctctgggcttgcagacctatacatttgtgttattagtctggctgattcctgcctaataaatcccctggtaatccctgccccacctggctttagagcaggacatggcgtgcccttgggtgaactctctccagagttcgtcagcactctcccctctgggccttgctggctcctgtggcatgctggaggtgcttgctctaatggattccctctgtctcactgaagcaagcacccaaggaaactgtgccaggggacttggtgctggattaagggaagaaatcaagtttctcttaatgacagcaagtacctataacatctcaacccagatcaaggtgattttagcaccatcaagctcagatgctagaagcagtactcacttagggactgtgtctaattttcaagtgagaaactgaaataacctaaaagttacacacccgaggctacatttcataagttcagcagaaatgtcttgtttgtgcctccaggtttggtttcaactatccatttagtccagtctttgaggtttgtacctgagttaatctgccacttatgatttggacacacacaactgggatgaactctaagtctagtatctggagagcaaaccctaaagatccctgcaatattgacaaagaaaccttcta

SEQ ID NO: 8855 - DNA, 8577 bp, Homo sapiens
cggccgcactgtgtcgttttataccttcccgcgcggacgccgcgctgccaacggaagggcgcgtagggcgtgcgtgattaggttggcgaaggtgcgagcgcgcagggggtgggcggcggccgttggagcggagctacgcgcccctccctccccgcaaactccgcccgatcggccagggctggggcgctggggcgctacgggcgcggcgggtgcctgggagctgctgggagtccttgtttcccgtcccgcccaggactgtgcgctcggctcgcggtggggtccggcgggcgcggcttcggcgggcggcagccgctgcagacgagctgcgggttggttttttggtctccacctgcagcccccccaagtctgcactgtcacattttgccagtcatatcctttacaagttttcttgcgggccgggcgcgggcctcacgcctgtaatcccagcactttgggaggccgaggcaagaggttcgcttcagcccaggagtttgagaccagccggggcaacatcgtgagacccccatctctaaaaaaaaaaatgagctgggcatggtggtgcacttctgtactaccagctacttgggaggccgaggtgggaggattgcttgagcccaggaggtcgaggctgcagtgagccgtggtggcaccactgcactccagcctgggcgacagagccagaccctgtctccaaaaaaaaattatttttgcaacttattaatgaaaaccagtgtgccatttcattgattttttttttttttttttgaggcagtctcattctgtcgcccaggctggagtgcagtggggcgatctcggctcactgcaacctctgcctcctgggttcaagcgagtctccagcggcagcctcccgagtagctgggactacaggcacgtgccaccatacctggctaatgtttgtatttttaatagagacagggtttcgccatgttggccagggtggtcttgaactcctgacctcagatgatccgcccgccttggcctcccaaagtgctgggattacaggcatgagccaccacacccagcccatttcatggattttaagttgttttgagatacttgcttttgtttttgttttttgagtcagggtctccctccgtcacccagagtggagtgcagtggtgtgatcttggctcactgcagcctcaaactcctgggctcgagctatcctcccacgtcagcctctcaggcagctggtgcacgccaccacagctggcttttttttttttttttgagacagtcccactatgttgcccaggctggagtgcagtggtgcgatctcggctcactgcaatctctgcctcccaggtccaagtgattcctgtggctcagcttcccgaatagagctgggagctggcgtgatctcagctcgctgcaacctccgcctcccaggttcaagtgattctcttgcctcaccctcccgagtagctgggattacagttgcccaccaccacacccggctaattttttgtatttttagtagagacagggtttcagtatgttggccaggctggtcttgaactcctgaccttgtgatctgcctgcctcagcctcccaaagtgctgggattacaggcgtgagccactacgcctggcctctaatttttgtttttttggtagagatggggtttcaccatgttggccaggttggtctcgaactcctgacctcaagtgatccaccctcctcggcctcccaaagtgctgggattacaagcatgagccaccacctgcggctaatttttttgtattttttgtagagacggagtttcgtcatgttggccaggcccatttgagatctttgaagatatcctcaacgtgaggtaaaaccaaactcctgactgtcctgtgctcccaaatgtgatctccttgtccgtaaggagctgagtcccttcccttggagagaagagtgtgccctttctctagatggctaaagaaacctcacagatagttcttttttttcctttttttttttttttttttttggtagagactcagtctcactgtgttacacaggctggtctcaaactcctgagctcaggcgatcctcccgagttggcctcccagagtgctgggatcacaggtgtgagccacaaagcggattgctgctggggcttgctgttctcccgtagctcccctgcagccctgaccctctgggcccagagccctttacttgttatttgttttaatagaaacggggctcatagcagggcataggggttcacgcctgtaatcccagcactttgggaggccgcagtggcagatcgcttgaggccaggagttcaagaccagcctggcctacatggtgaaacctcgactactaaaaatacaaaaattagtcgggcgtggagtcacgtgcctatagcctcagctactcaggaggccgaagcacaagaaatgagctgagatcatgccactgcactacagcctgggtgacagagtgagactctgtctcaaaaaaaaaaaattaataaaaataaaagtaaaataaaatagaaacagggctcacgatgtttcccaggctgggttcggactcctgggccggtatgatcttcctgccttggccccctgagtagctgggactgcactgtggcaggcttatacctgtgttggtgcctaaacgttctagctctgcagactcaatttagccagtcgtcctgttccctccgccgcaggctctgctgccatgaaggtgaagattaagtgctggaacggcgtggccacttggctctgggtggccaacgatgagaactgtggcatctgcaggatggcatttaacggatgctgccctgactgtgagtgtcccctccatgctgtctgagcggccccgactgtgagtgtcccctctgtgctgtctgctgcctgctggactagcctcagtagctcctgttaaatacctgcacgaaatacccagtttcattttctttttttttttttttttttgagaccgagtttcgatcttgtttcccaggctggagtgcaatggcgcgatctcggcttgccgcaacctctgcctcccgggttcaaacggttctcctgcctcagccttccaagcagctgggattacaggcatgtgccaccatgctgggctaatttttttatttttagtagagacggggttttgccttgttggctaggctggccttgaactcctgacctcaggtgacctgcccgcttcagccttccaaagtgctgggattacaggtgtgagccactttgcctggcccacatttttattttcttttctttctttcttttctttttttttttttttttttttgagatggagtttcactcttgttgcccaggctggagtgcaatggcgcgatctcggctcactgcaacctccgcctcctgggctcaagcgattctcctgcctcagccttccaagtacctgggatcacaggcatgtgccactacacccggctaattttgtattttttagtagagacaggctttctccatgttaggctggtctcgaactgtcaacctcaggtgatccacccgcctcagcctcccaaagggatgggattacaggcgcgaaccaccgtgccccccccaacattttcattttcatctcatgaagaaaagttgatagaaaaaaagccaggtggttggtacccatgtttatataaagatcctgtcacagactccataggatgaaactcagctgtgaaatacgtgggattaaaaagagattagagtctgggcgggcagatcacaaggtcaagagatggaggccggcatggcggcccacgcctgttattccagcactgtgggaggccgaggcgggcggatcacaaggtcaagagatggaggccggcacggtggctcacacctgtcatcctagcactgtgggaggccaaggtaggcagatcacagggtcaagagatcaaggcagggtgtggtggcccacacttgtcatcccagcactgtgggaggctgaagtggatggatctcaaggtcaggagattgagaccatcctggccaacatagtgaaacgccatctctactaaaaatacaaaaattagctgggtgtgtggcgtgtgcctgtaatcccagctactggggaggctgaggcaggagaatctcttgagcctgggagacgggggttgcagtgagccaagagcaagactccatctcaaaaaacaaacaaaaaaaagattagtttaaactttttatttgaaaattctcaaaattgaatggcataggccaggcgcagtggctcacacctgtaatcccaccactttgggaggccaaggcaggcggattgcttcaggccaggtgttcgagaccagcctggccaacatggcaaaaccccgactctactaaaaatccaaaaaaattagccgggcatggtggcaggtgcctgtaatcccagcactttgggaggccgaggtggatggatcacctgaggtcaggagtttgagaccagcctggccaacatggtaaaatcccgtctctactaaaaatacaaaaaagtagccgggcatggtggtgcatgcctgtaatcccagctactcaggaggctgaggcaaaagaatcgcttgaacctgggaggcagatgttgtggtgagccaagatcgcaccattgcactccagcctgggcaacaagagtgaaactccatctcaaaaaaaaagaaaaaaagtggaaatgtttgattatgtttaggttgaaagcagagttttgcatcagcgaaatggtttttcatgagaccgaaatgagcgtaaagcagaagcaagggtcaaggttttgcccagggaggacaagaagaactccccagaggacagtggggaatggagaggacagtggggaatggggaggaccgagaagctactcactaccccaagtaaccaggcgtatttttgtagggccaggtgcatgcccatattgattgacagggtctcactgtgttgcccaagctggacgtgaactcctgggctccagccatcctactgtctcagcctcccaagtagcataccaccacactcatctgcctcctttgcttttttttttttttttttttttttttttttttgagatagagtcttgccctgttgctcagactggagtgcaatggcaccatctcagctcaccgcaacccccacccttctgagttcaaaggattctccggcctcagcctcccaagtagctgggattacaggcatgcaccaccacagccagctaatttgttgtatttttatttttatttatttatttattttcgagacagagtctcactctgtcaccagggctggagtgcagtggcacgatcttggctcactgcaacttccgcctccctagttcaagtgattctcctgcctcagctttccgaatagctgggactacaggcgctcgccgccatgcccagctaatttttgtagttttaacagaaatggggtttcaccatgttggccaggatggtctcgatctcttgacctcgtgatccgcccacctcagcctcccaaagtgctgggattacaggcatgagccactgcgcccagcccttgttgtatttttagcagagacagggtttcaccatgttggccgggctggtcttaaaactcctgacctcaggtgatccgtccacctcggcctcccaaagtaccaggattacaggtgtgagccactgcacccgcccctgtctttgcttcttaaggtgaaattgagatgactgaatcttagtacaattttttttttttgagacagggtcttgctgtcacccaggcggcagtgcagtgtggcaaaatcatagctcactgtagccttcaattcctcagctcaagtgatcctcccacctccacctctcaagtagctgggaccacaggcatgctccacaatgcctggctaattttttatttttttattttttgtagagacagggttttgctatgttgccaaggctagtcttgaactcctgggctcaagggatctgcctgccttggcataccaaagtgctgggattacagacgtgagccaccatgcctgaacaaaactacataaatttttaattttttttgtggaaatggagtctcactatgtttcccaggctggtctcaaactcttggctctgtcctgccacagcctcccaaagtgctgggattataggtgtggcgcctggcccgtacaaatactttttattctaggcttaacttttacattggccctagctaaatagaaatctcatcactcaggaattaatcctcatttaatcaaacgggtagggtgtaatcttaggaaattattgattgactctacctgattggatttgtagttaatagctaattaggttaataactaaattcacaaggcacagttttatttgatctcttttaaattgctcttaaggatgtaacaaagagtgcgtgggatgccctgagggcaggcattcgacttctggagcagcagcttaacttctgaaattcctccgaaccatgtgtccacacctcgtctggctgcatccgtgggccagatgtgggtggtgaatcctgtggattagaggtggtgctaggtagcccccaagtgactgcagtggtgggtccacaggcagcctgcagagcccgccctgcagcatgccagctgggcctgtgatggggcatccagagggtgttgccctgaacactcagcatgtctccgctgacacagtgtgctcaggctttgttaacatggggcctgttggctgcagagactcaggagttgagagtctaatttttggacctgctgatggttaagtcatagtgagtcagtgttaacgcgcaaagcgtttgacgagtccaatgtgcttccatactaagcagcaccaggtttcttttgctaaaattgaactcctgtgaaaaattcagagtgactaagttcattcaacaaagaccgtgggagcccgaggctggtaaacaatgagtccatcccgcatcccaggggactctggtggcagtgcagttttgccgagaggagttttaatttaaaaaaatgcaatcaggagaccagcaggtcctggaatgagtcaccctcagtgcatctgcggactcatcagacaccccaggccggcttcgggtggggaatgcactagaacgaagtgacacctttgactaaacgaggcctcccccgagtactcagagtggcccagacccctctcctcagggggctagcaggcttcagctctcatttgaaagggccgatatcaagcagagttgtgctgaggccagaaacccccacgggcaggtcctcccagggctgggagtgggcatgccgtggggccggcgctgccaggacaggagggtggccacgagctccagctccacaatgccaggccgaccctgccgtggggctggggctgggacttgctgtgctctgttggcagcagctgttcctcaggggtttccaggctcttggagatcagggacactcatttctcttgatcatggctgatacaagcatccctctctgtgtcaggtcctctccatggagaaagcatttctaggtgtttgggctggtgcccgcagcctgtgcctgtcctgggaggcagggcccatccacaggtgcccatcaacacagcttccccaacgcctgggcagcacaccggatccctgatgtctagggaagagtcttctaggtccccagaccccacccctcctgcccttgatcaagagaccagttcactactcagatgcacgtctccttggtgccttgaccattcatgtgacctttttggcatcacagatcaagtgtctgcagatgggcccagggcctgtaggtcagacattgccctttttccccagcctcaagcacaggggacacagggtgggctaggccagagcgccacctcctcagagaggcccctgggctccccactgagcatgatgagcctgggtgaggggaggcgcctgctgcggttgccccgggtggaggccgcatgtccggtgtcccttggtcattgctggtcttcgcctgggggcgggctggtcaggagaccgattgggtaacactcctgatttcggcttctctgaaacatgagaggctgcagtgctggagccactgcccagggtccctacctgcacccctgcctggcttgtcacatgctctgtgtccagcctggtcatgcctgtccttttccccacctcccctccgtaggcaaggtgcccggcgacgactgcccgctggtgtggggccagtgctcccactgcttccacatgcattgcatcctcaagtggctgcacgcacagcaggtgcagcagcactgccccatgtgccgccaggaatggaagttcaaggagtgaggcccgacctggctctcgctggaggggcatcctgagactccttcctcatgctggcgccgatggctgctgggacagcgcccctgagctgcaacaaggtggaaacaagggctggagctgcgtttgttttgccatcactatgttgacacttttatccaataagtgaaaactcattaaactactcaaatcttgctggaggcctctgggtgcctgtgttctcggcatatagatgtggtctcggtgtgttttgatatgaaaactctcatgaataaacatctccgtgaaacgccaa

SEQ ID NO: 8856 - DNA, 816 bp, Homo sapiens
gaagagtatatatgaagagtttattgggagtattgactcacgtgatcacaaggtgaagtcccacaataagccatgtgcaaggtgaggagcaaggaagccagtctgagtcccaaaacaaaagtagagaagccgatagtgcagccttcatcctgtggccaaaggctgcagagcccctgcaagccactggtgtaggtccgagagtccaaaagctgaagaacctggaggccgacgtgcgagggcgggaagcatccagcatgggagaaagatggaggccagattcagccagtctagtctttccacgttcctctgcctgcttgtatcctggctgtgctggcagccgattaggtggtgcccacctggattgagggtgggtctgcctctcccagcccactgactcaaatgggaatctcctctggcaacaccctcacagacacacccagtgacaatactttgcatccttcaatccagtcaagctgacactcagcattcaccatcacacctgggaagcatggaacccagaaacaagtgccagggctccagtgccagtgcctgtcctgggaagatacccaagagaagacatgaccaggaccttgggggagcatgaaatggtgagggcacagtgagcttgaaggctgatgtcacctgccaggagagcggctggcagtcctgcctggtgccccaaggggcagagctggcagagaggggcctccaatcgaaggccaggagtcgtggagctccagtgccttggtgtggctggccttcttgcccccctcccagaggaccccgccagtaacagccctgctggtggaaccttcc

SEQ ID NO: 8857 - DNA, 436 bp, Homo sapiens
gggacatctcagtgggctgagatgggtaggctgggcttggggactccccagtgaccacagatgggtcgcctgggcttggggacacctcagtggccataaatgggtaggctgggcttgggaacacctcagtgcgctgatatgactgggccaggcttggagactccccagtgaccacagatgggtaggctgagcttggggacacctcagtgggctgagatggctgggcaaggctaggggactccccagtggccacacatggatagtctgggcttggggacacctcagtgggctgaaatgggtagcctgggcttggggacacctcagtggccatagataggtagcctgagcttggggacatctcagtaggctgagatgagtagtctgggcttggggacacttcagtggccacagataggtagcctgagcttggggacac

SEQ ID NO: 8858 - DNA, 314 bp, Homo sapiens
gacacaccaatggcttgagatggctgggctgggcttaaggacaccacacaggtcataggttggtgggctagccttgaagacatccctgtggcttgagacggctgggctaggcttggggatacaccacaggccataggttgatgagctggtcttaagggcactgcagtggtggcctgagatagctgggcaaggcttggggacacctcactgggcatagatcgatgaacctggcttggggacaccatacaggtcatagatgcatgagctctgctaggggacatcctgctggttatagatgcgtgagcttggtttgg

SEQ ID NO: 8859 - DNA, 555 bp, Homo sapiens
gcagttagacactgagctgtgttggaaactgggcactttctccgaggctggagtgggccggtaggggaagtgtagggtcatgtacctatagccggtttcagtctcttgcgtatccttaaacctctggagtgtccccatggactccggaggaaaaacagacttcaccgcaaggtccccttctaaactgctttcccgtgactcatctatcttgttgacggcaggcaggctggccacagacatagtggaaaggctgagggaactagaactttgcagagagctttcggaattgttctcctgactgtaggtcacaaagccctgggagaagctcctggccaggtcaccgtctcgatcctgtggcaaaccacctactggctcaccgaggatggatggctggtggtctgttgctagcttctgggggcagagcagggcagacacagaaccctgtgttcgattcctcccctgtccacagacagatgtcttgggacgaacttgagccaatgcactgccgggggaagcttgaaacagaccatgagtcttggatgcctgagttttggt

SEQ ID NO: 8860 - DNA, 412 bp, Homo sapiens
acgaaataattctctttattgagactacttgacaaatactttatgctaaaaattttgtcacctaagtgtttgggaggctttttcttattaaaggttgggattggtcctgtcatgtggttttagagatactaacagagggctagagaaagcatcttctgcagaggaagcacttatgggaacagtctgtgagattgatgtcctgagaagaccaagatatcaggaatgaggaataggggcctgaggagagaggggaagggtacagagaaaccatctacattccatggaatgtttttaataagtaggcaagaaaaatgccactaatcaaagcattaagtgtgtccagtaatgaagaacatcatataaaatctttccctaaatctaagccagtggccatttttgtgggatcttacta

SEQ ID NO: 8861 - DNA, 412 bp, Homo sapiens; identical to SEQ ID NO: 8860

SEQ ID NO: 8862 - DNA, 1674 bp, Homo sapiens
tgtcggtttgttttttcattcatgttgaagtgctttgcaaggcttcaggaaacagagttgtgaggagaaagaagaaaatggctgcccatttcagtaccctttcaaaggtatctctgcctaggaacattcttcagaaatgcaacttcttctatttagaaggtgacctcctgacagcgttcactctcaatatggaggaaaagaccacaacaactgtcctttctcaattacacaaatgctgttaaaatgtgatcaaaccatggcatcactttgctgaaatgtttctgcacagtcctgcctcttagattacagtcagccagaaaaacatacttataaatcatcccttttctgatttttgtagtttggcaattgagagagcaatattgaggttggccggttataaggagtcccacaatagaatacccaacaaagtggctgccaggccttctcagacagccatttgctttgggttttgcttccagacgttgttccatatttttgccccaaatgtttcatggcttataccccattggtttattttatatccatggacctttctttctctgctttcttgacttaaaggttgcagcagtacatctcgtcacctaggaatagattatcaggccttgccaactagtatgcagggatggcactaaaaatggatgtgcatcttctttcacattaactactaacctataagaagttgctctgagcccatttatttaaactctttagttcaccatcagatggacctttctctcacaagctagcttattccaaattatttgtcttattaatcaccagaaaatggtcatatcaaatgttctttcttttttgttctaaaggttgcattttcagttataggggaaaaaatattttctctaagatagaagaagttatttcagtattagctataggtgctacctacctcttggggacatggccctgtttgcgctaaccattacaatgatcttttagaactctgtatccaaagagctacttcgtgacactggccatctgagtcacagatgtgaagtcgatttcactttataactaaccagtcctacatattaagacttctaagtgtccatatgcatcttttttggtataatatataaagtcagcagggactcccctttcccttagggcatactactgtcagtcagaactgcaagatgtgaatgaagctcttaacggcttggagtgtctttctggaagaaattgccttttttttttttttcatgttagcaggtaaaaaatcattcacccaatttgaagcatagaagaaaatagttgctgaggttttttaataaccattcctactatctgtgttcccttagatactcctgtaattcttaatgtgaatagtttgttaatattgctgtaaagtattatattgtatgatttgaagacagactatatgtcattttattatactccatcaatctataatatattagactgatgctttatctaaaatgctttgagtttgtataatatatcttgacaaattttactaccatatgttatgtaataaatgtgtatttttgtacttgcagaaactgctgctaacttttaaagttgtttggttttcaaggcactgataatggatatgtatgaagtccatgctgtctgttaaataaaatgccattctgcagaattaaccatcccaccaga

SEQ ID NO: 8863 - DNA, 461 bp, Homo sapiens
gatttctgaacactctgtgtttacacccactgagacttcctctccaatagattgcacttttcaggctcagagaaaacgggaagacctttctcctgactttagcaatgccagccatgtttccggaatgcccggtccctcatcagggcaggcttgcagccgcccagcctatacaaagaaggacaccatggagtggcattcacaaatgcattctgtaactcttcatcccagcacatggttgagaaatggtgtggccagtttgaaaaactggtccctcaaaaagaaagcaaaggcagccagaccagaggaagagaaaatagcttctccaaaaggacccttagagccacccccacatgcttctggtgttccagaagccaactcactgcaagaggaacaaaaagacttgcccttaagggcagctgaaggactgtcccctgtgcagtcagcccaaaggtgtagttctt

SEQ ID NO: 8864 - DNA, 461 bp, Homo sapiens; identical to SEQ ID NO: 8863

SEQ ID NO: 8865 - DNA, 1674 bp, Homo sapiens
tgtcggtttgttttttcattcatgttgaagtgctttgcaaggcttcaggaaacagagttgtgaggagaaagaagaaaatggctgcccatttcagtaccctttcaaaggtatctctgcctaggaacattcttcagaaatgcaacttcttctatttagaaggtgacctcctgacagcgttcactctcaatatggaggaaaagaccacaacaactgtcctttctcaattacacaaatgctgttaaaatgtgatcaaaccatggcatcactttgctgaaatgtttctgcacagtcctgcctcttagattacagtcagccagaaaaacatacttataaatcatcccttttctgatttttgtagtttggcaattgagagagcaatattgaggttggccggttataaggagtcccacaatagaatacccaacaaagtggctgccaggccttctcagacagccatttgctttgggttttgcttccagacgttgttccatatttttgccccaaatgtttcatggcttataccccattggtttattttatatccatggacctttctttctctgctttcttgacttaaaggttgcagcagtacatctcgtcacctaggaatagattatcaggccttgccaactagtatgcagggatggcactaaaaatggatgtgcatcttctttcacattaactactaacctataagaagttgctctgagcccatttatttaaactctttagttcaccatcagatggacctttctctcacaagctagcttattccaaattatttgtcttagtaatcaccagaaaatggtcatatcaaatgttctttcttttttgttctaaaggttgcattttcagttataggggaaaaaatattttctctaagatagaagaagttatttcagtattagctataggtgctacctacctcttggggacatggccctgtttgcgctaaccattacaatgatcttttagaactctgtatccaaagagctacttcgtgacactggccatctgagtcacagatgtgaagtcgatttcactttataactaaccagtcctacatattaagacttctaagtgtccatatgcatcttttttggtataatatataaagtcagcagggactcccctttcccttagggcatactactgtcagtcagaactgcaagatgtgaatgaagctcttaacggcttggagtgtctttctggaagaaattgccttttttttttttttcatgttagcaggtaaaaaatcattcacccaatttgaagcatagaagaaaatagttgctgaggttttttaataaccattcctactatctgtgttcccttagatactcctgtaattcttaatgtgaatagtttgttaatattgctgtaaagtattatattgtatgatttgaagacagactatatgtcattttattatactccatcaatctataatatattagactgatgctttatctaaaatgctttgagtttgtataatatatcttgacaaattttactaccatatgttatgtaataaatgtgtatttttgtacttgcagaaactgctgctaacttttaaagttgtttggttttcaaggcactgataatggatatgtatgaagtccatgctgtctgttaaataaaatgccattctgcagaattaaccatcccaccaga

SEQ ID NO: 8866 - DNA, 1383 bp, Homo sapiens
ctcagccccccagtttttatgtggacatgttttcatctctcttggatatatacctaggagtggaattgcttggttgtgtggcaattctatgtttagcattcgaagaaattcattgaatggtaagctgaaaagtgacgtggttgaatttctgatttcagaaagatcactgatgtgatgagaatgaataactctctggagtgctaggatgtgggggcagggagctagcttagtatattattgcaaaatcttgccaaagatgagctgatcaaatgagaggaagcatgaactaagaggggagcagcaggagtggaaaagagagatataatgatgctagtacagagtttatatttacagaacttgaaatgcaggctcaggagtgggaggagtcaggtggtgccaagcctacataaatgagcatggtgttgcttttgacaaataggagaggcagagaggggaataacattttgtagtttcttaatttctagtatgtcttgagataggtctctaattatatgcagctcagttaacagatgaaagttattggtttatcatgcattcatctttatgaaaagaaaggattcggccttgcttcttccttgttacgaaagtatggccagggctgggcacggtggctcacacctgtaatcccagcgctttgggaggctgaggagggtgggtcacctgaggtcaggagtttgagaccagcctggccaatatggtgaaaccccatctctactaaaaatataaaaattggctgagtgtggtggcgcatgcctgtaatcccagctactcaggaggctgaggcaggagaatcacttgaacctgggaaggtgaggttgcagtgagccaagatcaggccattgcactccaacctgggcgacagaacaagaaggctctgtctccaaaaaaaaaaagaaagaaaaaaagtaggacagtaaaagacttagaagctgacttgccttagaattaaagttaaccagcagattttgtgtattcattcaataatcaagtctagttaaattgtttgaagccattttaatgtttaaaaaaatactaaaagaggccattgaatagtcatggaaaaagaaagcaaattattgtttttctttaagtatcagttcatctgatagatgtgggttaccacaaagcattggtggctcaccaaaaattgcctgttggtagcctgtgtttgcaaactgatacctctctatttcatggagtgatatcaattaggttatacttaaatacttcaaatgcttttggttgtctattggtttgggttttaaattagtacacgttaattgttgaattgggtagccacattttgtttgttttatgtatatttaaacaatgtgaccaaaaatactttttccatttgcggca

SEQ ID NO: 8867 - DNA, 576 bp, Homo sapiens
gctttcccgtgtggagtctggagacgacgtgcagaaatggcacctggaaaggggaaggaaaagaaggaagaacaggtcatcaacctcggacctcaggtggctgaaggggagaatgtatttggtgtctgccatatctttgcatccttcaatgacacttttgtccatgtcacggatctttctggcaaacaaaccatctgccgtgtgactggtgggatgaaggtgaaggcagaccgagatgaatcctcgccatatgctgctatgttgaccacccaggatgtggcccagaggtgcaaggagctgggtatcattgccctacacatccaactccgggccacaggaggaaataggaccaagacccttggacctggggcccagtcggccctcagagcccttgcctgctcgggtatgaagatcgggaggattgaggacgtcacccccatcccctctgacagcactctcaggaagggggtcaccgtggtcgccgtctgtgaacaagattcctcaaaatattttctgttaataaattgccttcatgtaaaaaataaataaaaaaagtgaaacctgtaagagaaaatc

SEQ ID NO: 8868 - DNA, 949 bp, Homo sapiens
atcgccaccatcctggaccgcgtgcgggacgagtacccccagttccaggaggccctgcacaaggtcagccagatgatcgccaacaagctcgagtcaccagggccctcctagggagcagcctggactccgccttgcaaggcctccaggaagagatccggaattgtgtttgtcatgagggacttggaatcttttgtgttcctaaaaaccacatgtaccctcagaagggcatcgtttaagagaaataagccagccccacccataggaatctttttagccactcagcaatttaataaaccaggtaaaatcctagcgtttcccatggcatcccatcgcaaagacagagcctgtgactgcagacccacacacccacactcccacactgggcttactcgtccaggtaacactttggtttgcagcactcccaaatctgcacgtgcctctcacaacacaacgctgccacaggtccacaagctggtgggctgagcagaggtgggaaagttaaggcagctccagccagcctggcccgggaggctggtccccccagcacttccctctactaggtgcatctgaaaacccacaaaccaccttctttaccagttttcccatccccaccccttagaactctcaggtcccttttcctgcccccatgtccccatttgagttaaattcagatccacagcttgcaggagaaagtcagtggccccagacacacgtaacagggtgagcactgaaataagagcacgctggggcgtccacaccaagggactacgccccagtctgcccacctatcttttctccatcattaacccagcgctctttctccctggacttccaagtaccaatgaccttggggcttctttgcagtttaaagggaaaatgctctacaaaataatttcactttcaaacatttcagcagaagaataaaatcttttttctgaatatctagtaa

SEQ ID NO: 8869 - DNA, 18272 bp, Homo sapiens
cgcctctgcgcgcccccgggcacgaccccggagtctccgcgggcggccagggcgcgcgtgcgcggaggtgagccgggccggggctgcggggcttccctgagcgcgggccgggtcggtggggcggtcggctgcccgcgcggcctctcagttgggaaagctgaggttgtcgccggggccgcgggtggaggtcggggatgaggcagcaggtaggacagtgacctcggtgacgcgaaggaccccggccacctctaggttctcctcgtccgcccgttgttcagcgagggaggctctgcgcgtgccgcagctgacggggaaactgaggcacggagcgggtgagacacctgacgtctgccccgcgctgccggcggtaacatcccagaagcgggtttgaacgtgcctagccgtgcccccagcctcttcccctgagcggagcttgagccccagacctctagtcctcccggtctttatctgagttcagcttagagatgaacggggagccgccctcctgtgctgggcttggggctggaggctgcatcttcccgtttctagggtttcctttccccttttgatcgacgcagtgctcagtcctggccgggacccgagccacctctcctgctcctgcaggacgcacatggctgggtctgaatccctggggtgaggagcaccgtggcctgagagggggcccctgggccagctctgaaatctgaatgtctcaatcacaaagacccccttaggccaggccaggggtgactgtctctggtctttgtccctggttgctggcacatagcacccgaaacccttggaaaccgagtgatgagagagccttttgctcatgaggtgactgatgaccggggacaccaggtggcttcaggatggaagcagatggccagaaagaccaaggcctgatgacgggttgggatggaaaaggggtgaggggctggagattgagtgaatcaccagtggcttagtcaaccatgcctgcacaatggaaccccgtaagaaaccacagggatcagagggcttcccgccgggttgtggaacacaccaaggcactggagggtggtgcgagcagagagcacagcatcactgcccccacctcacaccaggccctacgcatctcttccatacggctgtctgagttttatcctttgtaataaaccagcaactgtaagaaacgcactttcctgagttctgtgaccctgaagagggagtcctgggaacctctgaatttataactagttgatcgaaagtacaagtgacaacctgggatttgccattggcctctgaagtgaaggcagtgttgtgggactgagcccttaacctgtggagtctgtgctgactccaggtagtgtcaagattgaattgaattgtaggacacccagccgtgtccagaaagttgcagaattgatgggtgtgagaaaaaccctacacatttaatgtcagaagtgtgggtaaaatgtttcaccctccagcccagagagccctaatttaccagtggcccacggtggaacaccacgtccggccgggggcagagcgttcccagccaagccttctgtaacatgacatgacaggtcagactccctcgggccctgagttcacttcttcctggtatgtgaccagctcccagtaccagagaaggttgcacagtcctctgctccaaggagcttcactggccaggggctgctttctgaaatccttgcctgcctctgctccaaggcccgttcctcagagacgcagacccctctgatggctgactttggtttgaggacctctctgcatccctcccccatggccttgctcctaggacaccttcttcctcctttccctggggtcagacttgcctaggtgcggtggctctcccagccttccccacgccctccccatggtgtattacacacaccaaagggactcccctattgaaatccatgcatattgaatcgcatgtgggttccggctgctcctgggaggagccaggctaatagaatgtttgccataaaatattaatgtacagagaagcgaaacaaaggtcgttggtacttgttaaccttaccagcagaataatgaaagcgaacccccatatctcatctgcacgcgacatccttgttgtgtctgtacccgaggctccaggtgcagccactgttacagagactgtgtttcttccccatgtacctcgggggccgggaggggttctgatctgcaaagtcgccagaggttaagtcctttctctcttgtggctttgccacccctggagtgtcaccctcagctgcggtgcccaggattccccactgtggtatgtccgtgcaccagtcaataggaaagggagcaaggaaaggtactgggtccccctaaggacatacgagttgccagaatcacttccgctgacacccagtggaccaagccgcacctttatgcagaagtggggctcccagccaggcgtggtcactcctgaaatcccagcacttcggaaggccaaggggggtggatcacttgagctcaggagttcgagaccagcctgggtaacatggcaaaatcccgtctctacaaaaatacagaaaattagctgggtgcggtggtgtgtgcctacagtcccagctactcaggaggctgaagtgggaggattgcttgagtctgggaggtggaggttgcagtgagccaggatctcaccacagcactctggcccaggcgacagctgtttggcctgtttcaagtgtctacctgccttgctggtcttcctggggacattctaagcgtgtttgatttgtaacattttagcagactgtgcaagtgctctgcactcccctgctggagcttttctcgcccttccttctggccctctccccagtctagacagcagggcaacacccaccctggccaccttaccccacctgcctgggtgctgcagtgccagccgcggttgatgtctcagagctgctttgagagccccgtgagtgccgcccctcccgcctccctgctgagcccgctttcttctcccgcaggcctgtaggagctgtccaggccatctccaaccatgggagtgaggcacccgccctgctcccaccggctcctggccgtctgcgccctcgtgtccttggcaaccgctgcactcctggggcacatcctactccatgatttcctgctggttccccgagagctgagtggctcctccccagtcctggaggagactcacccagctcaccagcagggagccagcagaccagggccccgggatgcccaggcacaccccggccgtcccagagcagtgcccacacagtgcgacgtcccccccaacagccgcttcgattgcgcccctgacaaggccatcacccaggaacagtgcgaggcccgcggctgttgctacatccctgcaaagcaggggctgcagggagcccagatggggcagccctggtgcttcttcccacccagctaccccagctacaagctggagaacctgagctcctctgaaatgggctacacggccaccctgacccgtaccacccccaccttcttccccaaggacatcctgaccctgcggctggacgtgatgatggagactgagaaccgcctccacttcacggtgggcagggcaggggcgggggcggcggccagggcagagggtgcgcgtggacatcgacacccacgcacctcacaagggtggggtgcatgttgcaccactgtgtgctgggcccttgctgggagcggaggtgtgagcagacaatggcagcgcccctcggggagcagtggggacaccacggtgacaggtactccagaaggcagggctcggggctcattcatctttatgaaaaggtgggtcaggtagagtagggctgccagaggttgcgaatgaaaacaggatgcccagtaaacccgaattgcagataccccaggcatgactttgtttttttgtgtaaggatgcaaaatttgggatgtatttatactagaaaagctgcttgttgtttatctgaaattcagagttatcaggtgttctgtattttacctccatcctgggggaggcgtcctcctcctggctctgcagatgagggagccgaggctcagagaggctgaatgtgctgcccatggtcccacatccatgtgtggctgcaccaggacctgacctgtccttggcgtgcgggttgttctctggagagtaaggtggctgtggggaacatcaataaacccccatctcttctagatcaaagatccagctaacaggcgctacgaggtgcccttggagaccccgcatgtccacagccgggcaccgtccccactctacagcgtggagttctccgaggagcccttcggggtgatcgtgcgccggcagctggacggccgcgtgctgtgagttctgggctctgtgccagcatgatggggagggcgacgcgcatttctcacacggcagggagggccacacgcgtttgtttctcacacgatgggcagggcgacacatgtttgtttctcacacggcggggagggcgacgggcatttctcacagggcgctccctgggtcttttactcacataggtctaaatcccatgtaaacacgtgttcaggactcaccaagcccctgcttgtcatttaactcaggaaaactctcaggaacgacagcacttggatttgccttaatcttaagagaagttgccttcggaaatgcgtttttctttttttgctcattcatttactcagtgtccacgcactgaccctccgtgccgggtggtttggatcctgctcccggggacagacacacagtgaggggaagccataagcaagtccatgcagacacagcgtcagggagtggtcatgcagagagcacgctagaagccagctgtgcagacacggggcagggaggtcccctctagaagccagctgtgcagacgcaggggacagggatggcctctctggaagccagctgtgcagatgttgggggcaggggtggcctctctggaagccagctgtgcaggagtggggggtggggaggccactctggaaaccagctgtgcagatgcaggggacaggggtggcctctctgagctgacctctgagtagagagacccaagagaagtttctcaaagcatcttatcaagctaggtatggtggttcatgtctgcaattccagcactttgggaggccaaggcgagagggtcacttgagcccaggagttcaagaccatcctgggcaacatagcaagaccccatctcttaaaaaataaaaataaaaaattagctgggaattgtggcacatgcctgtggtcccagctactcaggaggctgaggcaagaggatcccttgagcccaggggttcgaggttgcagtgaaccatgattttgccactgcacttcagccttgctgaagaccccgtctcaaaaaacaaacaacaaacaggcatcttatcagatctcggtcttgaaagcactcagcgtagtcttgcccaggggagggtgggtgcggtgtgagcccgtcctgcgaaattagctgtgctgtgttaacagaggacgcgtcttcctgtggaccgggtttatctgcggctttcatttctcggaggtgctgtttgccttgcacttgacccccagcaaacctcaggggtccttctcaggcatggctgggctgggatctgggaggactttggccacaagctcctaggcctggaaaggttctgttcagcccctgcccagccttgcttggggtcatgggacaggcatgtgtgccagttccggtaccagccagttcctggaggtcagccccttgggggcccctcaggggtggtgtgggcccagccaggcggtgcgcctcttctgatatgccctgagagttgatcacgctggtgccagggtgccaagggctgcagggctcggcacggccgcctgtcccagggtcagtgtgctgcagggctggccaggccactccgccctcccagggcaccagggcccgggggtgctctctgggtgctctcaggctcgtgtggccccttgggtgtgagcaagcctggctggcctctgtcccgcaggctgaacacgacggtggcgcccctgttctttgcggaccagttccttcagctgtccacctcgctgccctcgcagtatatcacaggcctcgccgagcacctcagtcccctgatgctcagcaccagctggaccaggatcaccctgtggaaccgggaccttgcgcccacggtacagcggcgggcggcgggcgggggcactgagctggggagcgcaggtgctgaagcgccgtctcctgcatgtcccagcccggtgcgaacctctacgggtctcaccctttctacctggcgctggaggacggcgggtcggcacacggggtgttcctgctaaacagcaatgccatgggtaagctgcccgccgcccagcgcccgggccggggtctcctccgtgctgcctgccctggagactggaggtccgcatgaggggccctgggcacggtgctgggccttgtgttttctgggaaatgagtcctatgggctgatgcctctcccaactctggccttctgtgctcctaaggagggttctggggccctgcctggaggtgggctggcaccacatatctttccgtcccatgccaggttcctcctgagtcaggcttagcacggcttccccaggccactctgagctcctcgtggggagagagcctcaactctccgcctgtgattggcccatctgtggggtgcagagccctccaagtgaagaatctgtcccccaaccccagagctgcttcccttccagatgtggtcctgcagccgagccctgcccttagctggaggtcgacaggtgggatcctggatgtctacatcttcctgggcccagagcccaagagcgtggtgcagcagtacctggacgttgtgggtagggcctgctccctggccgcggcccccgccccaaggctccctcctccctccctcatgaagtcggcgttggcctgcaggatacccgttcatgccgccatactggggcctgggcttccacctgtgccgctggggctactcctccaccgctatcacccgccaggtggtggagaacatgaccagggcccacttccccctggtgagttggggtggtggcaggggaggcaaggggctggccgggacgcgtctcctcaggccccagcagacggtcccgtgttgtggctgcaggacgtccagtggaacgacctggactacatggactcccggagggacttcacgttcaacaaggatggcttccgggacttcccggccatggtgcaggagctgcaccagggcggccggcgctacatgatgatcgtggtgtgtgcccccacactgtgggtctttgggaagggggccgcccggtgcccagtggctccttctctgtgcagcgtcatcctcgtgcctgtgtggtcgccgaggatgttttctgagggtctttgtgatatcgagggaatatcaagaagtttgcaggcttggccccagctgtccagggaggtcgggtttgagggtccccagaaatggccgggtgctactcagggttctgtcagatgtaggttacttgaactgccttaaagcaaaaggccaggggcatgataaactgatgtcacctggtcctggaaagtggagggcccggtgggcctgggcatgggtatcgctggaactgtggaggctccgtgtgccttctggccgtgcctctccttctggccggctctgaatccctggaaaggacggcgtgagtgagggcagcttccagccctcatgctggcaccacagagcggagacttcttcccatcagctcccatagaaaagtcccaaagcaggactcttgagtcacccagcacaaagaggcccttccctgagccagtcccacagccagaaggatgcagtttgggggctggtccagcccgagtctggtgtccggcacgatggccagaggaggaggtgggaggcagggcgagctgaaaagatccaacagttcctgcccggaagatccacttcagcagaggaagcacagatgagatgtggggctgtgctgatgctgcctgtttccatccctgccttctgcaggcagcaaacagtagtagcccttaagagcaggagtggaaacacagacttttttctttctcacatttttttaattataaaagaaaagtgattactgtagaacacttgggaaactctagaggtttaaagaaaaggtaaaggtaaagcttccattccggcgcgcccctcatcagccagctggtcctgactcgcccggccctggctcctctccaggcaggcgtgtgcaggcatgtgcaggtacacaggcaggcatgctgtacacacgcatgatgtcatccccagcctcatcctctcactgtctcagttttccccgtggctggcgccagggctctgggccaccctcaccttgacaggtttccctcttcccaggatcctgccatcagcagctcgggccctgccgggagctacaggccctacgacgagggtctgcggaggggggttttcatcaccaacgagaccggccagccgctgattgggaaggtagggcgagggtccaggggacgggggttagaaagcagaggcctccagccagggggagccggcagctgctcaggaagacggtgggatttgaggagccatcacgcccagtgggacagctgagaggaatgggccacagtggcccgtgacgatggtggctcctacaaggaatggccccgtgagttcttccatcagcaggcctttgacttcatgggcagctgggcctggcccaggcacaagccctgcagaccctcagtgaggccttagggtcctccttgtcctcccagccccccaggggcctccaggcagggcccccgctgagggagcagctagggagggtctggtgcggatgtgaggctgcctggcagggcttgcacggggccgtctccgctgcccttctccctgacgctctctggttctgcagcccagcccctgggtggacgtgttgggggtgacccctcgttttcccagggttgaggccccttggccccgcatcagtgccttgtggagaaagagctgctcattgacctccagggtgcaggtctctcagatttgcaaatgtgggcgtccactaagagtgaggctgcccctctgctcaggctgaggctcagtggggcttccatgcaggccctgggtggggccgggtctccccactgcagcctctcgttgtccaggtatggcccgggtccactgccttccccgacttcaccaaccccacagccctggcctggtgggaggacatggtggctgagttccatgaccaggtgcccttcgacggcatgtggattgtaagtgtggccccctcctgagcatccccaaggcctctggggactaccccaccctcctcactctgggcagagtcacctaccagcagcgcttctcttgcaggacatgaacgagccttccaacttcatcaggggctctgaggacggctgccccaacaatgagctggagaacccaccctacgtgcctggtcagctcgccccccacctaccctggggacttaatcaaatcagagactcccttgtctggcctgggagacttagcaccctcatctctgagaagcagatgggccagcggggaaaggggcgggggggggatccccaggagaaaggctcaggctgggagactcagccaagcagtgcagacagggtgggtgcagaggcacaggccctgccggaggagacgccgctcacaggtgcttgccagagcacagtgaggccgactcgactcagagccgtctcgataggcgcagggaccatgcagcggagacctacccacccgtggggagaggtcaggcccaactcgaatgcagcacgggcaagtggatttctagccagggagcagggtgggctcagaggcaggaattaccaagaagaagcatgggggtcagggggattctggctgaactgacccagcaggattcttgctgaaggcaggccagggtgaccagacatcgcctgaggggtggtggaggttggggcttctcgccaaactgtcttagcaggaatggcagaaactgggttttacaaggaagtacaaggatgggcctgggagaaggtttgggggcctgaggctatagtttggcccagcaaagaatcagtgagaggatggggttttgggcttaggtaaacaggcaggggagtgcttgaaatgggccaagagacggtggatgtgaagtctgggggtctgcagagcccaggctgcagcacccgcccagccctgtcttagaagcagtggagatgattacccaggttcccgggtaacgccagccccacagaggcgtggggagcggctgcaggtgcacctccagggccagcctgaagaggcagcgacctgcacaggggctcctgggaggtggggggcagggagggcaccttggagcctgccgggaggaagctccctggaaaccagcccccgcctcttccaggggtggttggggggaccctccaggcggccaccatctgtgcctccagccaccagtttctctccacacactacaacctgcacaacctctacggcctgaccgaagccatcgcctcccacaggtgagggccacgtcccgccccactgggctctgccctcacagcctgtcctacaaggttggggcctctgcagggcctcagggaggaggaaaagcggaggcccagaccacccggggcccgctggcggcccgagtgctctccccacccgctgcctgcaccccagcctgaagctggagcgctccttcccacttcatgcctggggcttggagaggaaggaccctggatgctgacaggagtctgcatcagcggggacctcatgactcctgtgaggctggggggggtcctggctcacctacaggcatcaggtggcccagacagaggcaactgtgcccgcagacatgggcagtagcctcgccgtcctcctccccagcctctgcctcatcccagaaagctccttgctcccagctctgccctgctggtgacagggttcccgagtgaccccgctccacacagccctcacggtgtcccccaccaccccagggcgctggtgaaggctcgggggacacgcccatttgtgatctcccgctcgacctttgctggccacggccgatacgccggccactggacgggggacgtgtggagctcctgggagcagctcgcctcctccgtgccaggtgagctcctaccaggaggggctgctcagcagagtagagccgggggcctctatgggaggcttgccggggccccccacccacttagcaggtggggctctgggtcacttggcctgagctggctctgctgcagcagcctgaggaccagcctgactctgccctcccagaaatcctgcagtttaacctgctgggggtgcctctggtcggggccgacgtctgcggcttcctgggcaacacctcagaggagctgtgtgtgcgctggacccagctgggggccttctaccccttcatgcggaaccacaacagcctgctcagtctggtagggtgggggtggcggcatggcaggtgggcgatcccacccacccaagactctcccctgggaatcccacccctgctggagaagcaccccatgctgggtggctgagaagtgcagctctcccgaggcggggactccaggggaccgcggccccagcacccaagtgcttcctttgcccccgcctgccctgcagccccaggagccgtacagcttcagcgagccggcccagcaggccatgaggaaggccctcaccctgcgctacgcactcctcccccacctctacacactgttccaccaggcccacgtcgcgggggagaccgtggcccggcccctcttcctggagtgagtgacctaggcaggggcggtggcccatgtgtgccctgggggaggggcacgtaactcccaggcagccctgtcctgctgtgggctgtgttccccaggacccagcaggttgccgctgagtgagacaacatttgggcctggcttaagggggaagggcagcaagaaaacccagtaatatcccccagacaggccgtagtacacacgaggagttcctaacaacagccctgcacatcagtgtgttgagggaggattcccagagagtgaggtgattagttaactatttgcagaagtcaatttatttttcttgcataccatagaaacataagttccagataaattaaatagttaatgtcaaaaatcaagctgtggaggccaggcacggtggctaacgcctgtaatcccagaactttgggaggctgaggcaggcagatcatttgtgggcaggagttcgaggccagcctggccaacatggtgaaacccatctctactaaaaatacaaaaattagccgtgcatggtggtgggcgcctgtagtccctgctactcaggaggctgaggccagagaatcccttgaacctgggaggaggagattgcagtgagccgagatcgcgccactgtactccagcctgtgtgactccatctcaaaaaaaaaaaaccaagctgtgaaagactccacaggaaaagataagtgaatgtgtatctctggggaaaggtttcatttagagaaaaaaaaaaaaaaaaggtgaactttatttgaccatagcagaaaaaaaaatgtaaatctctgaatataaacacaaaaagattaaaactgctctgaacatggactgtaacagcagagaaggcattgtcaataaaacagcaaatagctactcttcctaataggtagagaactcatacgttggtaagaccaagactaagaaccaaattggaggaacactgtttgcaaaacaggagatacgaatggtatccacacattcttcacccggaaatccaagaaacgcaatttgtgttttaattactattttaatgaccttgttgtttctgtcactacacttttttttttttttttttagtggttgccctagggattacaattaacatcttaattttagcctcgttggaactgatgccaacttgctttcaatagcataaaaaagctttgcttctatgtggtttccattgcctctcgttcctctgtgctgttacacgtctgtatccatgatgagcccatccacgcagatttataatgaccgccttattcaattatcttttaagtcaaataggagggaaaaatgggttacaaacaaaaagtacatacacactgtctgccttttatatttactgatgtagttacctttacccatggttttatttcttcatgtggctttgacttcttgtctaacatctttcatttacagcagaaggactccctttagtatttattgtagggcagttctgctagtgatgaattctctcagtttttgttgacttcagagtctcttaatttctccttcattttttgaaagttctgctcaacgtagggttcttgactggcggtcgtttctctgaacactttgaacttgtcagcccatggcctccgtggtttctgctgagtagcttctgtcttgcctcttcccagattctctgtctttggcctttgaagtcccgatggtgtgtctaggtgtagatctctgagtttatcttactgggagtttgttgagcttcttggacgtatgcattgatgtttttcatcaaacttgggcggtttttcagccattacttcataaaatattttttctgcccctttctgtcttctactctgggacttccgttccacacattggtatgcttgacggtgcccaggggtctttgcagctctgttgactccttcctcgttgtgttttctttctgttcttcagactgcttagtctgactgccctgtcttcaaggtcactgattcttttttccaccagttctcatctgctgttgagcccctctagtgaacttctcattttagttgctctcttttcaactccagaatttctgtttcattcctttacgtttctctcgttaaggatattccctatctggtgagtcatgttctcacactttcctttagttcttcagacacggtttcgctgagctctttgaacacatttaaagtagctgacgtaaactctttgtctagtaagtccaatgtctgggcttctctagggacaatttttattaactactgtccccccatctgtgggccatactttcttgtttctttgcgtgtctcatacatttttgtttcagactggacattttaaacgcagctgctgtggtcatcagattccccatccccctcaggtctcgttgctattgctgattgttttgtgactttcttgagctaattccataaggtctgtgttcttcattgtgtgtggccaccaaagtctctgcttgactagcttagtggacagccaataattggtcagatatccttcacagatggcatccgtgagtctcccagcctttgctggggcgaggtggggagcaccgtcaacacttagctaggccaaggattcttgctgttcttacaaagattcagccattttgttaaatacatgctccccagatggctgcaaacccttggttagtttcaagagtcctaaaaatgtcaactctgaccatttttgccgatgttcctgttttcacagaggagaggatcttgagaggggcttactccaccatcttcactgacatcactccaagaaatgtattttgcaagaaatattttgaagcagaaagacaccatttattttgcccatgaattagaatacattagagaaaataagactatcccttgctggcaagaacacagtgacacagtagggtggaatataaattggcacatttgtggaaagcaacagtacatatcagtcaatgtttttgagattcacattgatgcgttaattttacaaatagaaatagggcctaaagaagtcacctcaaaaggcatgaacgctccatgaatgtatccatgcagggatcatagctgagcactggatgccccctgcacgtccgggggcaggaaacaggacagggcagagctgcgtcacagggcaggacagtctccgttagacggagaatcctccgtagagctgcttgcacatgtacattcatctttttgtcagatgttaattcaagttgcctttggttgtgggactgggaggatcttttctctttgttgatactttttcgtactttccaaatacttgactgatgagcacatgctgccttggttaccggaggataagtgagcgagcaaagtgaggccagtgctgtgtccatcctggtgcctcaagcacaagcccctattcctgccctgagcccagctgccggcatgtccggggagaaggcttctcccagctccggcattgacttctatctgctggaatcatccctgcccgtctgacctgagtcctccaagtcctccggcaccttgagctccagagagcagaattcagcctcttcctgtgcctccccagggtgggcatatgagccagccccatcccattcatcacccgtatgcctgtgtgcccatcccccttgcaggttccccaaggactctagcacctggactgtggaccaccagctcctgtggggggaggccctgctcatcaccccagtgctccaggccgggaaggccgaagtgactggctacttccccttgggcacatggtacgacctgcagacggtgagtctggggaccctaagccctggggagacgggagaccagagcagccctcccacctgccccctccacccagttggtgtgaccaggtggcggaaagaggaacgtatgtgttgagtcccggccatgtgccaggcccccacccggctgctccgcacccatcagcctctccgctcctcacaccatccccatttcccagatgagcagactgaggcctgcttgcagaacctggccaagtcccacggccatcacaggctgtgcctgtgctgagctggcatacccaggcctctcaggcactgtccccactcagtagccaggagggtccctacctacagtgagccctgagtctgcgcctgaagtcacagttcagcccgtctgtgccaggcctcctaggcctccacgtggagccccgggagatggagagcgtggttcctgaggacagcatgggggcctcggcacggcccagaatcctcaaagcaacatctccctccaggtgccagtagaggcccttggcagcctcccacccccacctgcagctccccgtgagccagccatccacagcgaggggcagtgggtgacgctgccggcccccctggacaccatcaacgtccacctccgggctgggtacatcatccccctgcaggtacctgggccaggcggctatggtgggggtgtggacagcacactgcagagctgggggaggcacagggagatggtgggggagaggcccaggtggggcttctgaggggccgccccccgcagtgtaggttatcaaggagccagccaggccagtgaggtggggagggcacagccccacaaaggcgtggagcatggccggcaggagctcagtggtctgcatggtggaggttctgccgggcccggcctcgggcagccgtgggatagcacttgaggtggggaaggtcttgggtcatcaccacggggttccagcccctgcggccgcaggtgttcctgcagatcctagttactggcagcctggtgctgtaccagcctagcattcccgggccctggaggcctccacctccaccagggtggggatgatgacatcacgtgtccttccctttccagggccctggcctcacaaccacagagtcccgccagcagcccatggccctggctgtggccctgaccaagggtggggaggcccgaggggagctgttctgggacgatggagagagcctggaagtgctggagcgaggggcctacacacaggtcatcttcctggccaggaatgtgagtcctggggctgctcaggctggtgggcaggggccggctcggggttgagaaggggtgaggggacctgggcttgggggtcccacgatggctacctgccactaggacactctagcaggtggcctggggtcctagagtgagcagtggggccgtgcactctgccctttcgtgtacacagagggaggtcacctccctgatgccatcatgagtccctgttctcatgggtgttcctgccccagctgtctgctgacacctccacattctctgccttttcatctctctctgctcggcccagaacacgatcgtgaatgagctggtacgtgtgaccagtgagggagctggcctgcagctgcagaaggtgactgtcctgggcgtggccacggcgccccagcaggtcctctccaacggtgtccctgtctccaacttcacctacagccccgacaccaaggcaagagggcccagagtggcacagggatcgcgtcccccagccgtggtgcagggggcagaaggtgctgggcgtcctggtgaccgatgccaggaacagaggatgctgggacctcccaagggggtctttggggaggagtgggaagggtcaggccacacaggctgtgcctttcctcctcctgtgtctacacgtgggtgatggggccacaatgacgacctctgagccgtgttgaagcagcaccgcgtttctggcgtgcgttaaggtgacccgcactgagagccggggtccccctgcgcctgccggggaggaaccgggtgcgaagcatcccagggccagacggagctgccccctgagcgccgggcctcgctgctgctgggatctcggggccagatggagccgccttctgagcgctggggtctcactgctgctgggatctcgggctgctccatttgtgctctctcttttccaggtcctggacatctgtgtctcgctgttgatgggagagcagtttctcgtcagctggtgttagccgggcggagtgtgttagtctctccagagggaggctggttccccagggaagcagagcctgtgtgcgggcagcagctgtgtgcgggcctgggggttgcatgtgtcacctggagctgggcactaaccattccaagccgccgcatcgcttgtttccacctcctgggccggggctctggcccccaacgtgtctaggagagctttctccctagatcgcactgtgggccggggccctggagggctgctctgtgttaataagattgtaaggtttgccctcctcacctgttgccggcatgcgggtagtattagccacccccctccatctgttcccagcaccggagaagggggtgctcaggtggaggtgtggggtatgcacctgagctcctgcttcgcgcctgctgctctgccccaacgcgaccgctgcccggctgcccagagggctggatgcctgccggtccccgagcaagcctgggaactcaggaaaattcacaggactgggagat

SEQ ID NO: 8870 - DNA, 4369 bp, Homo sapiens
caggctcgggcagctgctgaagcagcaggagaagatgatccgtgccatggagttggcggttgcccgcagagagaccgtcaccacccaggccgaggggcagcgcaagatggacaggaaggcgctcacccgcaccgacttccaccacaagcagcttgagctgcgccggaaaatcagggacgttcgcaaggtagggagcagcggaaaggaaacagggcgcctgctcctctctctgggattcaaggaacactccaggaaggcgtcttgctgggtccggggtgaggatgcagaggctgcagtgggggcgtgctcagcactgctaacctgctgctgggtgctgggtctggggtgaggatgcagagagaccatccccagttctgctaacctgctgctgggttcggggtcaggggtgaggatccagaggctgttagaggggcgtgctcagcactgctaacctgctgctgctacggggcctgtctgggagactgcagaatgcccgcaccggacagagctgctgacacccagagacggccgtgtttcagcccctccctgcatatcggaggtggcattgggaaggcatagagttctggggaagaggccagctcatgctggggagcccgagtgggcaccggggaccagctgatgggagcggggtgggcgcctcgagagcctgcatccgcataccccaggccatgtccactgggcctgcactgggagggcccagctggtgctgtccggtgcttaccacctcaacggttgccagccaggggccctgcactcacacttcccaggttggccccacagccccgctgacccgctgtgtgacctcggagtatgtgggccttgccagacctgcagggcctcgtctgctggggggtggaggggcagagttaaatgtgacagcaaccacagccgtgggtggggaggtggccttggggacagctgacagcatggcttggagccacgctggaccattcctgactggggcatacggtctgacctcccagagccttggtttactgacctgtgaaatgggtgcccacctctcagagtcacccagagggttccctggagagtgctgaagtcatccctgtagggaaaggctagccaaaaatggcagacatgcatgggctgctcatttggaagtaactggaagtttctggagagaggcggcagagtggcctcttctcagtccttttccactacattggctactcctgatgtccatccctccctcagcttcctagcccggcccctgaccactccttgctgccctgggcaccccctgagtcccctgccaggaccccatgcccacccctcacctcctgtctgctccaagccacactcaagttctccagccccaggccctgcgccccacacgacgccatcactgatgggtccttgtcctcacccctgccagccccaccccaaagatcttccgtgtccccagccagccctgagagtcactgtgtctcctgcatcaccccctggaccatgtcagctgccaaacactgcctgcccggcttttctttctcttaattgtgctgctttccccgaaggcggaacgaacaccacacagatggccccagcctcgctcctccctcagcagaggcccccaccctcctctctcccaggctccccagcctgcctctcggcccttacagcctcagccctgcccttggcacacggctgctgaactgtgccagtctcctgcctggggacagacccactgcacggggagccccagaaccactcaggcccccatctctctgccacacctgccttaaaggagcagtgtgcagtgtgggctggctgggcctggcatctcccaggcctcgcctctccagccctcccattcctctttgggagcctccctggatggagtgtgtggaaggtgcctggcaggtcctcccagcctgactcttccctggccgccaagtagccgggctgcaggggcccagcatggtcctgtgttttcctagccccccgatgagtgcaccaaacccgtcctggaacggaagaaaacccaaagaaatgtgagcagctccctcctagagaagcaggaaaagctgtcggtgattcagtcagacttcgacacactcgaggccgacctcacccggcttggggccctcaaacgacaggtaaacgtgtcccaggaggtccctggggatgacggccatggaacatgccactcacacagaggtcctgcgtcccctctgtgcgagtcacggcctctcctgatcaggtcacggcctctcctgatcccaggccagtaatagcaccaccggctgctcacatgtttgtggctttgtgatttgttccactgacaaatgttgatggagtatctgttatgggctgggctcatgttcagcgtgcgagggttacaaaatagaacacaaaaaacaaacattcctgtgctcttagaggttacctcctggggcaggaggacagatgatgagcaaaataattttaaaagatacagtgtgttgtagctaggcatggtggtacacacctgtggtgccagctactcaggaggctgaggtgggaggatcgcttgagcctgggaggtcgagactgcagtgagccaaggttgtaccactgcactccagcctgggtgacagagggagatcctgtctcaaaaagaaaagaaaagaaaagaaaagaaaagaaaagaaaagaaaagaaaagaaaaagggaaatggtgtgttaggtggtggtaaatgctttgaaggaagataaaccagagaaagaagcgtcagggtcattggggtgaactgagggattgacattttgagttagggtgatgcgggaaggccctgcggagcagacattggagtccagacctgaaggaggggacagcccacaaaaccaccccaggtggacaggacagcccggcaaggcagaagcctgagactgcgcaagggctactagaggccagtggggcaggctggggaggttagggtatgtaagacccaggcagagaggggcggcccagactgtgtgcggccttagggagagcacaatcatgactttggacttttctcttggggaggtgggcacacagaggagggcgttgggtctgagaggtgacttgggctttagcgggctcccgcgcgctctaagattgcatgtggatgaagcatggatgcggggggcacctggggctatttgcagtgcttcagggcggcccctgtggggctggcgagaagccatcaggctctgcatatgcgttatgccaacatcgcccgatgggattcctgctgggttggctgtggtgtgagcagagacggaggtggagaatggctccaaggttctggcctggccaactgagatgatgaggggaacgtgcctggcactgggcctgacacacggcaggtgtcaagaaggttgcctaagccgggcacggtggctcatgcctgtaatcccagcactttgggaggccgcagcaggtggatcacttgaggtcaggagttcgagaccagcctggccaacatggcgaaaccccatctcaactaaaaatacaaatattagccaggcatggtggcgggcgcctgtaatctcagctacccgggcgtggtggtgggggtgggtgcctgtaattccagctagttgggaggctgaggcaggtgaatcgcttgaagccgggagccagaggttgcagtgtgccaagattgtgccattgcactccagcctaggtaacagagcgagacagcctcaaaaaaaaaaaaaaaaaatgccggcgggtcacagtggctcacacctgtaatcccagcactttgggaagccgaggcaggcggatcacgaggtcaggagatcgagaccatcctggctaacacggtgaaaccctgtctctactaaaaaaaaaaaaaatacaaaaaattagccgggcctggtgacgggcatctgtagtcccagctactcaggaggctgagacaggataatggcgtgaacccgggaggcggagcttgcagtgagccgagatcgcaccgctgcactccagcctgggcgacagagcaagactccatctcaaaaaaaaaaaagaatgcctcctagatggtgatgatgggtgacccataaagcaccgacccagtgcctctcagcctcttccctgagatccaggggcgcaacaccttcacgccgtcccttttcaggcgtaggtctcgcctcctcttcggcatttcctggaatctgagtttgtggggggccagcaggtgtctttcttctggtttgcatagccctatatggagtctcttttcctacccagaacctttcagagatcgtggccctgcagacacgccttaagcacctgcaggctgtgaaggaggggcgctacgtgttcctgttccgctccaagcagtccctagtgctggag

SEQ ID NO: 8871 - DNA, 1823 bp, Homo sapiens
ggggcaaatggagcacagatctagacaatgtgtggacagtgtcagagtagcagtggccacatggaggaggaggcccacccggaactctgcccacactggccactgcagttcagcccacagagccactgcaggcaggcctacggacgtgacacgcacgctggtggtcccggagccagggttgattcaggacaccatcttgggctcttatccaggaaagaaagagtcggcgtgcctgggggcacctgctagtctccagctgcaggccgactctttcctggcctgctcagcacctgcccagatggcctctgcgtctttcctgtgcccagccccaccttttccacctctcttcatgttctcatggagtgcaaagtgcaccagccagggcccctacctgggagagggtcagctgacgcagggctgagggggctgccacagggacgtacgctgtgtgttcttactgcttagaagggacggggtcactcaccactcccctggtctccatctgggctccttggtcttccctgcccctcccctaaccgtgttctacctgccagtggagctgagcactgcctagcctgggccagaggggcactggacaagggcctttgggggacagtaagtctgggcccagcttctagttctaatgtgtgcaagattaactcacaaattcacctcagaaggcctttccaaatgggagctccactcttcccctcctctgcaaatcttcacagccaaggccccttccaccctctccagaggtggatgagatcccttttcccctcccctctgaggtgctgactcactggtaggagccacccaccagaggaaagatctagaacgtctttacagattggagacagccgggcctgctgacccatcatccgaatagctgaagcagagtcttccaccaggggtgccagggcctggctgggtccagcggctctgggatgagcctcccaagcatctttcccacttgggtggccatgcggcgctgacattggacaggtggtggacgagagatggtcccgagaaagggtggtcttgggagggctggtcccaagcctgctgtgctcctgtggcagtgatggggcctggggatggggacggcagctctcatgaggacacacaggctgtgagcccgcagcctcctcaaatgtagcctcccacattttccccaaagtacaggactgtcccagagtaggtagtgaagaggacaaggccctcggcagcgacctccagggcctcctacctgctgaggaagagttaacccactgcctccccacacaacaggctacgaagaacctggtgcctcaggacctcctgggagccaagctggtctggcaagggcgctcaggcctgggagagaagggagcaatggccagtcaccttcaccttctaactaactagcctccggatgaggtggctgccaccaggcccgaatgatccccaggagcccagcttccaaaccccaacatcgaatcaaacatctccatccccaagtgcagtaacacacaaaaaccaaacactctgccctgggaaaggcctggtgcgattctcagtaggactcacacccaccctacctagaagtactgggctggcctgggtactgcatccgtgtgttttgataagggggtgatgtggccacgcccttatctagatttcactttgtatccactgggcacagatattctagagaacttatctttcactcttgtaaaagccacatatccacatctctttcatttttctcagtgtgttatgcagcaatttattaaagtatttattgtctaataaatactgccaagtggaatatatttatataa

SEQ ID NO: 8872 - DNA, 4275 bp, Homo sapiens
taggaaaaaaaaagagaaacctttatttacaaccatgggagtccacaggagtacacaaaacacacaatgtgcacacacacaaaatgaaccttttaagtcaataccatgcgtgctcctggccgcgcgccacccctcagtgccctatccgcaccaccatcacagtgacgttgtcgccgagccccgctgcaccgccttgttggccagcctgttgcaggctgcttcgtagcgggcgtcggctgcggacttcccttcccgggtctggatcttttcatcctaccagatgagaaagggaatgagtgaatggagtgaccccgcaccctgtcactttcctgagacatgactgccaggaagaagagctgctctggtctccatcagggctggcaggacaaactgaccagtgagtcagtaggcagagttcacactgaaaaagggcacaagggctgtcccacaatgggaggaaatggggtctcagaacttctacttctctgaaaactaagacacaattgggacaaccaccacccccgtgtgagatttctcacctcgagacaggacaagatgaagttcacggcttcttctggggtaaagaccttgaagagcccatcacaggccaacaaaatgaacctacaacaccagggagaaatataaacgggttttaggcccaaccaaaaaataaaaaataaaaaaagggcctggagatggagataaaataaatatttgtccaactattcaaaggctaaggttttttttttcttttttcttttttttttttttttgagatggagtttcactcttgttgcccaggctggagtgcaatgacgcaatcttggctcactgcaacctccaccttcccagtttaagctgttctcctgcctcagcctcctgagtagctgggattacaggtgcccggcaccacgcccgggtaattttttgtatttttagtagagacagggtttcaccacgttggccaggctggtctcaaactcctaacctcaggtgattcacctgcctcagcctcccaaagtgctgggattacaggcatgagccacagcgcctggccaggctaagatttgtttaaacccacttaatttctgagacaaaggtttaaactacttacaagtatttgtggataggatgttatacatcaaaactgagactatccttctcttcgccaattaacagaattattaattacctcaaacattaggtgctgtactttcttaggcaaactccagaaaaatcactgaataaaaacatgggtgttatggtaaatatacaagaatttataacaccataggccttacaccacttccagacataaagctgagaatgagcccagcctcggtgaaacatccttgggcacacactgcacagcttggggctgcatccaagaccgaggcccaagaaggggcagctgtgcgtgttcctgtgtttgaaaaccacatgctctccctttcagaatcaaacccccctagaccgtccctggaatctttctgaacaccaatggattcaatgtgacagttctagttttcctggcattgggggtggggaatacgcatccccacagctttgcggtataagccaccctccttttctcactgtaatatctgtggggtttttttgtgtttttttttctttgttttttgttgctgctgctgctgttgttgttgaggcggactttccctcttgttgcccaggctggagagcaatggcatgatctcgctcactgtaacctccgcctcccaggttcaagtgattctcctgcctcagcctcctgagtagctgggattacaggcgcccaccaccacgcctggctaatttttgtatttttggtagagatgaggttttgccatgttggccaggctggcctcaaactcctgaccacaggtgatccacctgcctccgcctcccaaagtgttgggattacaggcgtgagccaccacacccagcctgttttcctcgtttaactaggctttcactcggccgctacttgccgagcctatcgtccatgctgagaacaccgtggggcctagtcctggcaggctcccaccccttccagtgtcctgagactcagaccctcaataaccaatcacacagacccatgactacaacccaggaaggcgagctaggaagcaaagcagaaggtgcatccttcagaacaccagaggcggcggctgctggagagatgatggaggaccccgcggtacgtgagaacatgacaaacacactgaagaagatgtggagaatggggcagtggctcaagacaaggccaagcaggcgagtgccaaagcaaggcacgcgctcttcatccgcagcactggggcgggactcagagcagcactcggaggcccactcgccacagtgccactagtgtctctggcctcccctcatcaactcagtgctgtgaatcctgcttccgggagctttccttgacccctcctgctactgccttagttcagcccttcatcatcaggccagggctgctgcaccgctgctcacaggcctccctagccccataatgccatctttaaccatcacctgttgaggccctgccctcagccagcacggtgccgtacccttaggcatggagaacaggagatgaacaggtgaactgtctctttctcaaccgatcctggctctgtgtaaaaacctatgattctccaccaatgatcaactaaagttcaaactctccagcatggggctgagggccggcccttcaggatctgcccccaaagtaccctgctatcactttcccaccactccctccgtccctcaagcgcctgtctggccatgctttcacactgtcacattttaatgccttactgtgtgttccctctgccaggaagccccttctcctctctctgacagggataaccccttcccctactgccaaagaccccagcacacagcacatgcctaggacacactggactgcagctgcccatccccatgtgtccccccctaccactgtggaccccaccagagcagaaaccacattttgtttatctctgcacccccagggcctagcaccatgcacaccttccctccaacaaaggcttgatagaaactggaagtgaggaagagaaataaacccacatgcacacacacctgtgcctcttatagggccttttacctgtcattgggggtcagctggcagcgtctgatgtcgggcacagaggtgacaccgcagcgcttgtactgcccgtccccaatggagcgtgacacctctagcacgcccaaaacacgcccatccctaaaatgagaggaaaaacatttcagactctacctgacagattatgggtccacagtacttagaatctcaccttaaaagcagagaatggaagtgtgaaagatacagactgtggaattcacattattaaccactactgacatttcttgatctcaaatatgcaggggtgtctaggccattaactgctgccctggggtagggaccctgcccagctgcacatgggtgggaacagcacctccagtggctgccaagcagtgctgcccagcttaaccttcgacaggactcagcagttctcatcacacacctaggtcccaactccagaatcggatttgactgactgggtaagggagcctggcagtgttttgtatcttaaagctccttgagtgtttcccacatgcagccagggttaacaatagctagaacagagggatattttgcatttcaatctaattagatttggaaaatccctgaaagtggctattcctggattgtggagcacatgtcctttgcatcaagtacaggtacggtttaatgttaatgtaaatgacagtatcctgcatagcatcatagtttcacccattctattttaggtgaggggatatggaggagatggggcagtgatctacaaatgggaagagacatctaagggacagtcctattgccaaggaaaaaccatttggggaagcctactgccccaaagaacaattctggtctaggctgcagcactgtcaccttaggcagctgcaagctctctccccttcaggcccttgtttgtaaaggcaaggcagagaaccatactcaacgtgtgagagagcactccgcaaatgccacggctgcgcatgggcgtttaagatcaccacggggctcccaaatcatggaccaagcaagttcaggagatgcggtgcagatggctgcacatggtaggaaatgcttcctgggctgctgtcctaaaggcagaattcagcctggcccttctctgggccccagttaccctctcagtggctcacaggtcagtatccgtaacaaac

SEQ ID NO: 8873 - DNA, 5353 bp, Homo sapiens
cggcaccggccgaggtgcggtcgcctccagaggtgcgtggtcgtggcgcgagggatcctgaggctgctccagcagtgcgccgccgccgtctcctggggcggcttgggttagccgggaggtgggtcagaggctcgccccgtgccctgcgtccgggcgtctccttagggcgcgtcttcgggtccggccagcggtgctgaaaaagggagaaggttgggggtagggaggaaacaagatcccagttcaatagatttctccgcagatcctgtgccttcaaaccctacgagtccatactttaaaacaaaatgaagaaagtaaggcttaacgcatctagagagtcgcctgcagcaagtggatggatttgaaaagcccagctacttctggaacagtatcctaccaggccgcacattgcaggtaggacggctggttcaccacgccccggctttcggcgttagtccagtctactctgtgataaaaatagaacagttatttggatacagagaatgtctagagaaattctgccctaagatcacctgtcgcgttagagaggccttccttgacactgcagctcaaggcacaccctccacagacatacacactatcattttactgtctagttttctgcatatcccttaacactgccagacatctttttaatgtgtttttttctcttctcacattacaatctctgaggacaaggaatttgttagacttgttcatacttgaattcccagtgcccagaagagtcgctggtactatttaggagctcagtaaacatttactaaataaggatcagtttcccattgctactaattgcctacgcaaggattcttgtgctatatactctgccctagaaatgaataccagagttgatagtggaatgatagtttaacaaaatcagagtatgtgctgtgtaaagatgagcatgcatattttaacagattttctgagcattagcattgttgcttcatgccagatattgatactgggagtacaagagagaatacaggacaacatatatttatgttaccgaagtcattgggaggcgcgtgtaggggaaaaaaattttattataattatttgttgagataagggtctcactctgtcacccaggctggagtgcagtggcatgatcacggcaactgcagccttgacctccaggactcaagtgatcctcctacctaagcctcccgagtagctgggactacaggcatgcaccgtcatgcctggctaatattttttattttttgtagagacagcgtcttgctatgttgcccaagatggtctcagactcctgggctgaagcgatcttcccactggggcctcaagaagtgctgagattacaggcatgagccactgaggctggctccttaggaaaattaattttctgagagtacctgcaaggagttttttccagttccaaaatagttgtttctaagttgtcaatgaaagtcaaggagaatacatgtgtatttacacttaactccaagatactgtcatgattccaaccaaaaattcacacaaaactactgtgtctaggttaagaccagttttctcaaataatgacttactagtcttctgactgtaggtttttttagtggaatccagtttaaaaaataataacaatctggccaagtacagtgactcacccctataatcccagcactttgggaggccaaggcaagaggatgacgagcccaggagttcaagatcagcctgggcaatacagtgagaccccagctcttaaaaaaaaaaaattagcctagtgtggtagtatgtgcctatagtcccagctgctgatactaaggcaggagaattgcttgagccctggaatttcaggctgcagtgagctctgatccgccactgcaccccagcctgggtgatagagatagaccctgtctctgaaaaaaaacaacaaaaaacttctggatccgcaggaatcagtggccaacagtccttgctgggttcagatatcttcagggaaatatcggtggtggtggtattcatgtttgaccttcagtgtgtatctaacacccagtagttctattatcaggtctcatttgtagattatgaatatatatgtctgtagatcatgagtatatgtgtctaaaggctacattgtggagcttatggtgcttgtgttctggtgacaaacttgttaaaacaaagttctgtggctaggcacagtggctcatgtctgtaatcccaacactttggaaagccggggcgggaggatcacttgagccctggagttcgagagcagcgtgggcaatatagtgagaacctgtgtttaaaaaaaaaagaaaaaaaaagattctatgtctttgtgatgctaatgcttgtttgatagtggttcctagtcttatagatttcacagataagtaaaatttcaaaacaattttggaaattgatagagttgccaaatttatgttgacaaaaaaggatttttttaaaaactatttactcttaccattctttcttaaaaatatttcagcatcaaagaaagaaccgatatgagtatatggcaatgtttttaacaagctgaggaaaaactaaacgttttgacttttttttattttacctcagagactgggcacagttttgtcattcttggcattgctagcagagactattttttgagaaacactggtgggtattagcttcctttatggtgcctcttactacataccaaatcattaccccttatcttttacaaaaataatctggaatggcatttggggaggactaagtaatgcaacacaagaaattattttagaaagagtcatttgcacaaattagattttagtcaccggcttgcttacttattctttttttttttattttttagcatgtatgctctatacaatccataacacttatgatgacattgaaaataaagtcgttgcagatctaggatgtggttgtggagtacttagcatcggaactgcaatgttaggagcagggtacgtaatgcaatatatgctatttgggtattgggtggctttaataaggagcatcaatgggattaactgaattatatttatgagactccacagaatgagatatagggagcaaaaatctgatactgaatacattttgaatgggcagaagatctaaacaaactacaaaaattaaataaaaatggtgaaagcagcagttccttttatacaaacctgagtttccaacccctgccgggtttggaaattatgctgttacacttgactgggcacagtggctcatgcctgtaatcccaacactttgggaggccaaggtggacagattacttgagcccaggagtttgagaccagcctgggcaacatggtgaaatcccatgtctacaaaaaatacaaaaattagctggatgtggtggtgtgcgcctgtggtcccagctacttgggaggctgaggtgggaggattgcttgagcagtgcaagatggcaccactacactcacctgggtggcacagcaagatcctgtctgaaaaaagaaaaaaaaaaagaagaaaacactcactcttactttgctaattgggttaaaaagatatatggtttaaaaaaaaaacagctaattttggttttgtttttacttgggagctataagtcgccactctttgtatgtgttttgtatttataggttgtgtgttggatttgacatagatgaagacgcattggaaatatttaataggaatgcagaagagtttgagttaacaaatattgacatggttcaatgtgatgtgtgcttattatctaacagaatgtccaagtcattcgatacagtaattatgaatcctccctttgggaccaaaaataataaaggtttgtaacaagaatcgggtatattggtatatttatagaaaagattttaaaaccatttttaaggccaggcgcagtggctcaggcgtgtaatgccagtgctttgcgaggctgatacaggaggatcatttggggccaggaattggtagccatcccgggcaacatagttagaccctgcctctacccacacacacacacacacacacacaaattttaatttcccaagtgtggtggtgcacctatagtcctagctactcagaaggttgaggtgggaggatcacctgagctcaggtattcggggctgcgatgagccatgaatgtgccactgcactccagccttggtaacagcaagaccctgtctagaaaaaattaaacaaaaataaaaaccatttttatcactgtttgggctaagtgattttatcactcttcattaaataaaccaaggctaagtgatgttattactcttcattaagtaaaccaatctcttatttgtatagttcttataatttacatttcaatttgtttaatgcatggctaagaaactgagtttttcaactttcatttttacaaatttgtattaagtaaacaaagatagtcatgtcatttattgtatatctcccatttgctttcaggaataatttgcctaacccttatgaatgaatacgaaacatagaaagaattttatactttcagaatctgttttttaatgtcttaacagacccaagggtttctacatgtgcccatcagtaacagtgactcaccgtggctgttaattttgtgtgtactgtgggcaaggaggttaggaagtcagtgagggtaggaaaagacatgcatagtttggccgggcgtggtggctcacgcctataatcccagcactttggaggctgaggtgggtggattacctgaggtcgggagtttgagaccagcctgaccaacatggagaaaccccgtctctactaaaaatacaaaatgagccaggcatggtggcacatgcctgtaatcccagccactagggaggctgaggcaggagaatcacttgaatccgggaggcggaggttgcggtgagctgagatcatgctattgcactccagcctgggcaacaagagcgaaacaaaaaaaaaaaagacatgcatagtttaaaaagtaccctgcccccaccaagatgattctgaatagtactctatgcatttccttctcccctttttgaagtcattaatgttggaatataatattaaaatttttactttatccttatttaaccaagacagtataattctggttttattctaccagccttaaaataatattttgatagtttatttgtacccttattgctaaaagatttcaaggtggctattttgaagtttggaagaaaatatttctaaatcctactaacttaatcttctgttttgagaagaggtaaataggagctttttttctactcttcacagggacagatatggcttttctaaagactgctttggaaatggcaagaacagcagtatattccttacacaaatcctcaactagagaagtaagttcaaa

SEQ ID NO: 8874 - DNA, 2138 bp, Homo sapiens
ttataggaaatctttaataagggcaattattttctttatttgcatagactacaggaattattcacatcatctttcagatgtactttaggcatctgcattttgtctgagatgtacattcctactgttatcaaagtccagcgggcgacagaatgaaaccccaacttaaggaaaacaaaaactgtaggaaaagcaatccaaagaagaacagaaggccaggcgcggtggctcacgcctgtaatcccagcactttgggaggccgaggcaggcggattacttgaggtgaggagtttgagatcagcctggctgacatggtgaaaccctgtctctactaaaaatacaaaaattagccgggcatggtggcgcacgcctgtaatcccagctactccggaggctgaggcaggagaatcacttgaacccaggaggcgggggttgtagtgagccgagatcgcgccactgcactccagcctgggtgacaaagcgagactccgtctctaaaaacaacaacaacaacaacaacaacaaagaagaacaggagtgtttccaatccataaccttgtgtttgaaatgaatgaaacataattaaaacaggttattcctggtcttctacatgagttaagtatgtcacgatcatcatataacagtgataagttaaatttgctcaataattttacgaatcactaaattataaactaaataaaactttatgtattaactttacatgctaaaactttgtatgttttaactcatttgattctcataacagataactttgaattctgctattcctagaagtagcagcctcagacacttctctacttcgtcatcgtccattcactctttttcttcttcctataataatgcaaagaggtgtccatccacaggcttaaacgcaatcctgcaatccttttacttaaccactggatcctgccttctcaggatcccaactccatccaatatcctcttgcatttttaacccctctctttctattagctcaattcttgtcagaatttgtctcctcctgtcttaaaaataattgaaaaaataataaagcttcccccattactaagcatccaaccattcttttcgtaggccacctttctctttctctttcttttcttctttcttttttttttttttttttttgagacagggtctcactgtcgaccagactggagtgcagtggcgcaatttcagatcactggaagctttgcctcccgggctcaagcgattttcccaccccagccacccgagcagctgggaccacaggctcgcgtcatcagacccagctaatttttgtatttttagtagagacagggtctccttatgttgcccaggctggtctcaaactcccgtctcaagcaatccgcccatctcggcctcccaaaatgttgggatcacaggggtgagccaccgcttccggggccacgtttaattgttcacatttactctttcttcttcctaaatttccattcgctccacaatctgctacaacttaatttctgctcctactttatgaagcccgacctctttccagtatttgacaccactacctattcttttattttcatttccactgtctttttttttttgagacggagtctcgctctgtctcccaggctggagtgcagtagcttgatctcggctcactacaagctccgccttccgggttcacgccattctcctgcctcagcctcccgagtaactgggactacaggcgcccgccaccaagcccggctaatttttttgtaattttagtagggacagggtttcaccgtgttagccaggatggtctcaatctcctgacctcgtgatccacccacctcggcctcccaaagtgctgggattacaggcgtgagccgccgcgccctgcctctccactatctcttctttgggtttctttgacatcaccactcctgtgagaattgcaagtgacacaaatgacctaaaaattgggaaacaaagttacaataaaataaggcatgagaatggagaaggaggtaaaggtgaatggagatcgctactttttgagccgagacttgggaaacaagaagagtcactctgggccatacaacaaagtgactgtgactttctctcccgcatccctttcactctgtctttccccatcctttgagggccc

SEQ ID NO: 8875 - DNA, 315 bp, Homo sapiens
ccagaggagagactataactcaggagtagaaaagtgtgttgtaactaggattactgtatgttttggtttctctgagtaagtcttagttgatcccttttgtcccattgtcccggtgtggcctgatgtacttaagggaggcagtaaggccaggttttcagaacacttgagcctggagctaaacagatctgagttcagaaatcacctattcttacttttgcagcatataacacatggagaggtgtataagttgtagtccaggaaactgggggaaggggcagtacatttttttagtgtcagtataacacaatagttagg

SEQ ID NO: 8876 - DNA, 939 bp, Homo sapiens
cctgttttccctagggtgacctggccggggtaacaaacacttgttctctaattccacggtcagccttgacttaattgaggtacttgatttccaacttcctgtcttgctgccacagataatcactgatgaaaccaaacaggcaacaccttttggtggcctgtggagagcgctgccccgtctgggtcttaggaaggcaattgaatatgaatgttctcccgagtgcttgtggaaaagagatggtgttggccactttttagacgaagagaaatgagtactagtgaacactaatcatagtgactaaacagtaaacggctcccatttgttgtcggctaaagcactgattcttcattttccatcccagcctgtcctgctctggcctgccctgtgctcaggaagctggcggtccccctcagtggatcttcacccacagggacaacctgctgcagaccgggtaggagggaggcaggggcctcttcccctctccttcctggcctggccccacacccaccagtgttggtttcactctgtggctacgattcttcctgggtgccctttccattgcacaactcctctaggctctacgaacagaacttctccccgcccccaagcctcttagggtgagacatgttgtcggtctgccattgttgctggtccctaaatagcagcaccctttgaaggatccttgaaccatgaccacaccgcaacaaagagtccttcatcaaactcgcttccaaatcccctcccaagaacaccttcagtttcctgcaagaaccctgactgctgaagccggattttgactaagcttctaccttgtaaaccgtgactgtgggattggggtcgaggcgcaatcagaggttgtataaggcactagatcaaggctgcctgtctgtcaggagtgtctgctttattcagtagtaaatgtgaattgtttttcattct

SEQ ID NO: 8877 - DNA, 5242 bp, Homo sapiens
cctgttttccctagggtgacctggccggggtaacaaacacttgttctctaattccacggtcagccttgacttaattgaggtacttgatttccaacttcctgtcttgctgccacagataatcactgatgaaaccaaacaggcaacaccttttggtggcctgtggagagcgctgccccgtctgggtcttaggaaggcaattgaatatgaatgttctcccgagtgcttgtggaaaagagatggtgttggccactttttagacgaagagaaatgagtactagtgaacactaatcatagtgactaaacagtaaacggctcccatttgttgtcggctaaagcactgattcttcattttccatcccagcctgtcctgctctggcctgccctgtgctcaggaagctggcggtccccctcagtggatcttcacccacagggacaacctgctgcagaccgggtaggagggaggcaggggcctcttcccctctccttcctggcctggccccacacccaccagtgttggtttcactctgtggctacgattcttcctgggtgccctttccattgcacaactcctctaggctctacgaacagaacttctccccgcccccaagcctcttagggtgagacatgttgtcggtctgccattgttgctggtccctaaatagcagcaccctttgaaggatccttgaaccatgaccacaccgcaacaaagagtccttcatcaaactcgcttccaaatcccctcccaagaacaccttcagtttcctgcaagaaccctgactgctgaagccggattttgactaagcttctaccttgtaaaccgtgactgtgggattggggtcgaggcgcaatcagaggttgtataaggcactagatcaaggctgcctgtctgtcaggagtgtctgctttattcagtagtaaatgtgaattgtttttcattctgttgtgaatactgttggttgacaatgcagcagccatgccctctctatccttgctggttcaggtatccactctgtgtggctaagggtaaactctgtctcttgagaaaatcttggtaactccatttctctttccaacaattggcttcaaacaagctcaagtcaatgagtcccaacaggaagcctgctgggggttgtctggcaaaggttttctcactcctacaggaacataaagaggaaatgctcctttttccctggtggatgttgcattccctgtctggatgcaatgcctggtgctccgcagccctttgcacttataagagaaggtggccggaagagcatcttcaccctggggtggccgcctgggaagatgagaagagcaggagtccttggtggcacaaccaggcaattcaccaaaatcctgctgccctcacctggaatttcctgctatgagagacgtctccgtttaaaccacatgagctggattttctgtttctaacacatgtcagcatcttcacggtaaatctaagaaaaaaaaatcagggctattaaaaaacaaagtccaactcaccctgtgctatggtctgaaggtgtcctcccaaattcacacgtggaaacctaatcccaaatacctgatacctaatcccaaatattaagaggtgggggccttgggaggtggttaggaatgggattagtgccctttaaaactgaggtttttgggagcctgcttgccctttctgccatatgaagatgcttagaagaggccttctatgaagcagagaacttttctcagatgccagatctgctgggaccttgatcttggatttctcagccttcagaactgtgggaagcaaacttctgtgtgtatgaatagccatctaaaggattttgttacagcagcctgagcagactaagacaccctgtgagtcagttatttttggctgtgtcacgagtgaccgcgagtgcaggagctgaaacggcagtgagtgggttaccatttctcaggaccctgcggaattggtgcgatggtgcttctgctccacctgttgttggctgggattgtcctgcagctgcattcttctgggggtcagctggggctggaagcttcctgtggtctagtcacacagctggggtctcagctagggtgatagaacactgggggcaggccggccttgctgtctctctctggcttctcatcattcagtggtctagcctgagttttttacatggcagctcaggagggtcaatgtggacgctatacagcctgtaaggcccgggtttggaagtccaagaatatgacttctaccatgttctactggtgaatataaattccaaggccagcctagattcaagggataagaacgtagatttcactccttgatgggaggatcccatgtacagacagggatccttatgagggattatgagaactcctaatccttatgagggattatcatacagagaatttatgggggattatctttggaaataatctaccatagactgaataaatgataatgtaatgtgttggtgcccctcccagtgcattcaaaagtgaaacgactgccagaactccagggcctgcaagtttcttccttcacatctaagcagaaggagagacttcacagtgacgtgccagctaagtcacgtgcccactcctgcccagtctgtcacgcaagtagcagagtccctgagatgattggcttaggcccgaggtcagtgcacatcaccaaactagtaagtgtccaaggggaatgaaattgtcttcgcctcaaataaccaggacctacccctgacccactgcgagcacagctgcttcacagtgctggagggatgggatgaatgaggaggaggcaacagctaggaggccaaccccaagacttgaaattgtgggtttgcaaatgggtgcttcaggtgacaccctggccacaccctcacctacacacagactcataaacacctatcctgcattcctccctccacctttctttccaaagaaatcttggattcattggcccctaagtgaaaaaaactggggggaaataagggagtgggggcaaaaaaatgaggtcttcctgcaaagacagttcagaagaattgttgcaccgagacctgaaatgacaaacccaaagccagagccaactgctgtagacacagaaccaggaagtgtgaattattaatgagtgtcattttggtgctagaaagagctattacctgagggtggtgactcaagctgggcctccgagggcaaacagccttgctcctccaagttactggcccatgctgtgcacacgtgtcttcagtcgctatccccacaggtccagaattacctaggtgaccatctccccagggattggtcctaaagttcttttttttttttttttttttcctttgagacagggtcttgctccgtctcccaggctggagtgcaatggtgtgatccaggctcatcacaacctctgacccccaggttcaagtgattttactgcctcagcctccccagtagctgggattacaggcacccaccaccacacctggctaatttttgtatttttggtagagatggggtttcgccatgttgcccaggctggtcttgaactcctgacctcaggtgatccacctgccttggcctcccaaagtgctgggattacaagtgtgagccactgcacccagcccctagagttcttcaatggcagaaacgtcactttctgcccctccgcaggccattctctaacctccctggtcccttggtctggaatcttctgccccaccccatgtttggccccctcttagtcattctcagatgccatctctccctacacctgcctgggttccggctcggttatcattaatcactcccccacttagcattcctaatggcaccacttagtaaagcttagttatttttccacagcagtatttctcaaccccggttacagattaaactcacttagggaatttttttttaaccaatagcacttccccaggctgggcgtggtggctcacgcctgtacttccagcactttgagaggccaaggtgagacgattaggcaacatagcaagaccccatctctacaaaaaaacacaaaaaaataaaattagctgggcatggtggcccacacctgtagtcccagctactcaggaagctgaggtaggaggactgcttgagcccgggaggttgaggctgcaatgagttccgatcatgccactgcactgcagcctgggtgacagagtgagactgtctcaaataataatactaataaaatagcacttcccaggcagcctttctccagacattttgactcagttggtttggagtggggtccaagcttttgtaaaagctcccagtgtagcaggtttctgagtcgttcatctcaatgtctgtctcccacctgaacgtgaacctgttggatgatcagttatcatcagttatcgacctttctctcctcaggcatagcgtggtgctcagcagatgctgaaagaattagttaacctgctattttagctgacgagcactaacaaaatgaagagcataaggcgtgagcactcgcagagtgaaaagtgccccgtgcaaggccatctatcccgcatgactcctgtcaccgggaaggagagctatggagagtgaggtcctgctcaaacgccccctgagatcatctgccatgctctgccaggccatttgtcctggaacgtgacgtagaacattgtctcctgttccgggaaagggccacatatgcaacatggccctcaaacgccgaaggagctgagaaaccaaagaataagccagaccaatgaaatctgtcagtaaagggtgttttattgggggaacctacagacagaagcatggtcttgggtggctggaggacaggcaggtctctgcccctgtcaccccagacccagggcttctgtgccgtagggaagaggtgtaagtgctctttgcaagacaactaaaggcagcccttcagaacaggcaagagtggtagatgcgtcatggcccataatttgtgtgatcacatcaaggctgacatgttcatatactagggacaggaaatcacataggaattgggaggcgctcaggggactggcgccggtctgaattcagcatggtggatcagcacccaagaggagtcactactgactggccccacatcttcctgtgcccaggaggagtttgtggggcagggcctctgattatttttgaaaatctagtttaatttggtcattacattggtgtcaaaaatggaataagttaaatttcattgtacttcttaataaaaaaatttgaatggcataagtgccaatctcaa

SEQ ID NO: 8878 - DNA, 939 bp, Homo sapiens
cctgttttccctagggtgacctggccggggtaacaaacacttgttctctaattccacggtcagccttgacttaattgaggtacttgatttccaacttcctgtcttgctgccacagataatcactgatgaaaccaaacaggcaacaccttttggtggcctgtggagagcgctgccccgtctgggtcttaggaaggcaattgaatatgaatgttctcccgagtgcttgtggaaaagagatggtgttggccactttttagacgaagagaaatgagtactagtgaacactaatcatagtgactaaacagtaaacggctcccatttgttgtcggctaaagcactgattcttcattttccatcccagcctgtcctgctctggcctgccctgtgctcaggaagctggcggtccccctcagtggatcttcacccacagggacaacctgctgcagaccgggtaggagggaggcaggggcctcttcccctctccttcctggcctggccccacacccaccagtgttggtttcactctgtggctacgattcttcctgggtgccctttccattgcacaactcctctaggctctacgaacagaacttctccccgcccccaagcctcttagggtgagacatgttgtcggtctgccattgttgctggtccctaaatagcagcaccctttgaaggatccttgaaccatgaccacaccgcaacaaagagtccttcatcaaactcgcttccaaatcccctcccaagaacaccttcaatttcctgcaagaaccctgactgctgaagccggattttgactaagcttctaccttgtaaaccgtgactgtgggattggggtcgaggcgcaatcagaggttgtataaggcactagatcaagcctgcctgtctgtcaggagtgtctgctttattcagtagtaaatgtgaattgtttttcattct

SEQ ID NO: 8879 - DNA, 475 bp, Homo sapiens
gctgggattgtcctgcagctgcattcttctgggggtcagctggggctggaagcttcctgtggtctagtcacacagctggggtctcagctagggtgatagaacactgggggcaggccggccttgctgtctctctctggcttctcatcattcagtggtctagcctgagttttttacatggcagctcaggagggtcaatgtggacgctatacagcctgtaaggcccgggtttggaagtccaagaatatgacttctaccatgttctactggtgaatataaattccaaggccagcctagattcaagggataagaacgtagatttcactccttgatgggaggatcccatgtacagacagggatccttatgagggattatgagaactcctaatccttatgagggattatcatacagagaatttatgggggattatctttggaaataatctaccatagactgaataaatgataatgtaatgtg

SEQ ID NO: 8880 - DNA, 310 bp, Homo sapiens
cttttttttttttgagacggagtcttgctctgtcgcccaggctggggtgcagtggcacaatctcagctcactgcaagctccgtctcccaggttcatgccattctcctgcctcagcctcccgagtagctgggactacaggtgcccgccaccacgcccggctcattttttggatttttagtagagacggggtttcactgtgttagccgggatggtctcgatctcctgacctcgtgatccacctgccttggcctcccaaagtgctaggattacaggcgtgagccactgcgcccggcctagagataacttttta

SEQ ID NO: 8881 - DNA, 198 bp, Homo sapiens
cccggagtttcagccagggtcccagggcttccttcccgggttcctgccggaaaacttttctcctccgcccggaagcctcgatggggcagtgagatcgcggggcgaggtgggagtgtgggagggggccgcgggcagagagcgggagtccggctgggtgggagatctcctgagccgaagctgggtctcgccccagcgtgg

SEQ ID NO: 8882 - DNA, 198 bp, Homo sapiens; identical to SEQ ID NO: 8881

SEQ ID NO: 8883 - DNA, 198 bp, Homo sapiens; identical to SEQ ID NO: 8881

SEQ ID NO: 8884 - DNA, 475 bp, Homo sapiens; identical to SEQ ID NO: 8879

SEQ ID NO: 8885 - DNA, 329 bp, Homo sapiens
ataataataataaaataaactttttgactctctgttgttctgtctacagtttttctgggttggctcaccagccacactttattggttcccatattgtcttctttcttttgttgcttttccttttgctggagaaactcctcaggtgaattttttatataggtctcacggatagtcaaatttctgagttcttgcctgctttgaaatttcttcattttgcccttgtacttgacttgttaataaaaaaataaataaaaacctgccaaaaagaagagatttaaaaccatttcccatggtgaaacctcgtctctactaaaaatacaaaaaaaaaa

SEQ ID NO: 8886 - DNA, 454 bp, Homo sapiens
tgtttttatctctttgagggctttgttctaatatattaaagttctcctttgttcttcgtattatttttcctttcaaagtcaattgttctgtttatttctcttgctttttctcttcaatgctattgatttttcttaagtggtaatccttcgttgcccatttttatttataaatgaatggctgataaatagctagaaaggaatccttccctagctttagtagttctgttttctgacagagcttgcataggagagtctgctatgatccctgtgcagatgggtggggcatgttagagtcatttcctgtggagtgtctaggcagggaggagtgaagctgggaaatcctgctattactagagttagggcaaggcccccttcaagtgtatggtccagggttaattggtttgtttgttgattaaaagaaaaaagccttgctctgtcctcccaagctggagtg

SEQ ID NO: 8887 - DNA, 3424 bp, Homo sapiens
gcaggccccacggtgcacaggtccccaggctcaaggctgcgctgacccacaacccctcgggggaaggctctaggccctgcaggcagcgttgccctttccgggtgcgattcgctgacgagaccctgcaggacacaacgctccgctactgggagcgcagacgctcaggtaagcagacaggatggggagcctcgagactcccgaaagttctagccaggagggcagagaggctgtagctccgggcccctagagtgagggactggctttgcaaaggccaagagatcagtgatcctgcagaggatgtgcctgaactggcctccttggaggatgtcaggttgaccttcgaagaccaagtagagggtccagagtccagtggaggtgttccaacgcaggcagcaccttggactgctcgctgccaaggggttcccatatgctgtatctgcccaccttgagacccgtagccggagcctccagagcccacacttgctcccctccgcagtccccacagcctacaggggctggaggaggtccagatgccattggaagcatcttcctttgacatccatgaaggcagacctcgaagcctgcctgaggaggtgcccagaaaagccgcgaagcggaaactttctctctcctggagacagttggcactgccaggtccagcaaggaagctaagagccaccagaccctggatgtaatggtgtctgttttgcagttcccagtgagttttctttttctttttttttttctgatacggagtctcactctgtcgcccaggctggagtgcagtggcgcgatctcggctcgctgcaagctccacctcccgggttcatgccattctcctgcctcagcctcctgagtacctgggattacaggcatgcgccaccgcccctggctaattttgtatttttagtagagacggggtttctccatgttgaccagggtggtctcgaactcctgacctcagggatccacctgcctctgcctcccaaagtgctgggattacaggcatgagccaccgcgcctggccattcccagtgaattttctgaagtgtgtctcgagaagcaggcgagaagtccctgttcttactctggtataaccttgactaagctccacctttttctgtgtgcccagcctcttctcaggatccagcagcccccagggtccccaacagtcaatgtcctctagctgtttattgagcacccactatgtgcagtttcaggaaatgtctgcctcaaggtctagctgtgggcgatgccctgcaaacctaggaccttcgctgatttgggagggatctgacgcagcctccttagcgtgacaggaagctggagttagaagctgtgatttttgcccaacttctgtttgtttggtggggaaaccaaggccccagaagcaggatgggcttgtgtgggtgacgcagagccacatatagaagccagagtgaccccgggcccctcttgggaatccaaggccaggacaagcccaagagaaacaatttcatgtgaatggcagttggtgcatacaggagatgattccgtgtcagccactggccataaggagctatcatggtgtcccgggcagcagggtgcccaggagacgtgggggccagcctgctgcttcccagccctttccatcctggggcagccattggggaactcagggtccttggaccacctcgcatggctgctgttggacaggaagagcccccatccctgagacagccctccctgaagccctcaacgctctcagcatggtttctgggatttctatgatggggtaagtggtctccccactgcgagaaagggggcacgcttccggctgcagcgtgagtgggggtgcgcaggggcacagcttgggtataacagaaatggtcacgcaaggtggttttaaaacccaaggcttctctggaggcagccagaaggcgctggggagcctggggttgccatggagacagggctctgaccggccctgcctgccagagggaggaaaagagggtgggggcaccagtgccctcctcctgggcagagatctcaccctgccctctttcctgcagtccaacagagcgtcattgtgaaccagaaggccgccctgccagtggcgtccgagcgggtgtttgggagtgtcggaaaacggctggagagtttgcccaaagccctgtaccctggggccaaggaggagaccctggccagctcctcgtgttgggactgcgctggcctgtgaggctccagggaagcggatgggactcgtggacattgccagggccctccaccccccttgcctacagacctccccacccagcagcaggcgggttgccagtgtgggtcctcaagggccctgccagccatgggtgggccggggactcagagtccaggaagctcatggggtcctgtctcccccaggtccacccagaagacacagggctacctttctgaggacacctccatgaacagcagcctgcccttctgttcatggaagaaggccgctgctcagaggccgcgaagcagcctccgagccttcttggacccgcacagaaacctggagcaggtgggcaaatggtcttgctcctggacctagaagctggtgagcccctgctggcagctggctccgggagcagccctgtttggtggagtggctggggctgggagtggaccctccctgagagccaagtcaccgtgggggcttgcagtggccacgccctgtgttcctgcatctccctcaaagggcagctgtcaaggggtggctctaagccaggtgcctgggttccgatcacagttcctttctgcatctcccctcccctcccctctcctctctttgcttttttgagacagagtgttgctctgtcgcccaggctggagtgcagtggtgcaatcttggctcactgcaacctctgcaatggggacacccaccaccacacccagctaatttttgtattttcggtagagacagggtttcactatgctggccaggctggtcttgaactcctgacctcaggtgatctgtccgccttggcctcccaaactgctgggattacaggcgagagccaccgtgcttgaccttgcatttgtttcctcatcttttaaaatggggctgacagcactacctgcccaacagggcttcagcacagaatcccactgggagcccagtcccctgccccgaggtcctggtagcagccagctggtcctctgtctcactctaggagtccctcctgcccaaccgggtgctgcagtcggtcctgaagcaaggctgccctaaggggtaccatctcctcctggcctccgcaacactgcagccagataagaggtgaacactcgcgaacccaaggccaggggcacacatgggccaggcaatgaggagcgtccttccttgccccacaaataaaggcacatcccaggtggctgggacctgccagtaggtgtcacaccacaa

SEQ ID NO: 8888 - DNA, 3425 bp, Homo sapiens
gcaggccccacggtgcacaggtccccaagctcaaggctgcgctgacccacaacccctcgggggaaggctctaggccctgcaggcagcgttgccctttccgggtgcgattcgctgacgagaccctgcaggacacaacgctccgctactgggagcgcagacgctcaggtaagcagacaggatggggagcctcgagactcccaaaagttctagccaggagggcagagaggctgtagctccgggcccctagagtgagggactggctttgcaaaggccaagagatcagtgatcctgcagaggatgtgcctgaactggcctccttggaggatgtcaggttgaccttcgaagaccaagtagagggtccagagtccagtggaggtgttccaacgcaggcagcaccttggactgctcgctgccaaggggttcccatatgctgtatctgcccaccttgagacccgtagccggagcctccagagcccacacttgctcccctccgcagtccccacagcctacaggggctggaggaggtccagatgccattggaagcatcttcctttgacatccatgaaggcagacctcgaagcctgcctgaggaggtgcccagaaaagccgcgaagcggaaactttctctctcctggagacagttggcactgccaggtccagcaaggaagctaagagccaccagaccctggatgtaatggtgtctgttttgcagttcccagtgagttttctttttctttttttttttttctgatacggagtctcactctgtcgcccaggctggagtgcagtggcacgatctcggctcgctgcaagctccacctcccgggttcatgccattctcctgcctcagcctcctgagtacctgggattacaggcatgcgccaccgcccctggctaattttgtatttttagtagagacggggtttctccatgttgaccagggtggtctcgaactcctgacctcagggatccacctgcctctgcctcccaaagtgctgggattacaggcatgagccaccgcgcctggccattcccagtgaattttctgaagtgtgtctcgagaagcaggcgagaagtccctgttcttactctggtataaccttgactaagctccacctttttctgtgtgcccagcctcttctcaggatccagcagcccccatggtccccaacagtcaatgtcctctagctgtttattgagcacccactatgtgcagtttcaggaaatgtctgcctcaaggtctagctgtgggcgatgccctgcaaacctaggaccttcgctgatttgggagggatctgacgcagcctccttagcgtgacaggaagctggagttagaagctgtgatttttgcccaacttctgtttgtttggtggggaaaccaaggccccagaagcaggatgggcttgtgtgggtgacgcagagccacatatagaagccagagtgaccccgggcccctcttgggaatccaaggccaggacaagcccaagagaaacaatttcatgtgaatggcagttggtgcatacaggagatgattccgtgtcagccactggccataaggagctatcatggtgtcccgggcagcagggtgcccaggagacgtgggggccagcctgctgcttcccagccctttccatcctggggcagccattggggaactcagggtccttggaccacctcgcatggctgctgttggacaggaagagcccccatccctgagacagccctccctgaagccctcaacgctctcagcatggtttctgggatttctatgatggggtaagtggtctccccactgcgagaaagggggcacgcttccggctgcagcgtgagtgggggtgcgcaggggcacagcttgggtataacagaaatggtcacgcaaggtggttttaaaacccaaggcttctctggaggcagccagaaggcgctggggagcctggggttgccatggagacagggctctgaccggccctgcctgccagagggaggaaaagagggtgggggcaccagtgcctcctcctgggcagagatctcaccctgccctctttcctgcagtccaacagagcgtcattgtgaaccagaaggccgccctgccagtggcgtccgagcgggtgtttgggagtgtcggaaaacggctggagagtttgcccaaagccctgtaccctggggccaaggaggagaccctggccagctcctcgtgttgggactgcgctggcctgtgaggctccagggaagcggatgggactcgtggacattgccagggccctccaccccccttgcctacagacctccccacccagcagcaggcgggttgccagtgtgggtcctcaagggccctgccagccatgggtgggccggggactcagagtccaggaagctcatggggtcctgtctcccccaggtccacccagaagacacagggctacctttctgaggacacctccatgaacagcagcctgcccttctgttcatggaagaaggccgctgctcagaggccgcgaagcagcctccgagccttcttggacccgcacagaaacctggagcaggtgggcaaatggtcttgctcctggacctagaagctggtgagcccctgctggcagctggctccgggagcagccctgtttggtggagtggctggggctgggagtggaccctccctgagagccaagtcaccgtgggggcttgcagtggccacgccctgtgttcctgcatctccctcaaagggcagctgtcaaggggtggctctaagccaggtgcctgggttccgatcacagttcctttctgcatctcccctcccctcccctctcctctctttgcttttttgagacagagtgttgctctgtcgcccaggctggagtgcagtggtgcaatcttggctcactgcaacctctgcaatggggacacccaccaccacacccagctaatttttgtattttcggtagagacagggtttcactatgctggccaggctggtcttgaactcctgacctcaggtgatctgtccgccttggcctcccaaactgctgggattacaggcgagagccaccgtgcttgaccttgcatttgtttcctcatcttttaaaatggggctgacagcactacctgcccaacagggcttcagcacagaatcccactgggagcccagtcccctgccccgaggtcctggtagcagccagctggtcctctgtctcactctaggagtccctcctgcccaaccgggtgctgcagtcggtcctgaagcaaggctgccctaaggggtaccatctcctcctggcctccgcaacactgcagccagataagaggtgaacactcgcgaacccaaggccaggggcacacatgggccaggcaatgaggagcgtccttccttgccccacaaataaaggcacatcccaggtggctgggacctgccagtaggtgtcacaccacaa

SEQ ID NO: 8889 - DNA, 130 bp, Homo sapiens
aaaaattagccgggcgtggtggcacacgcctgtagtcccagctactcgggaggctgaggcaggagaatggcgtgaacccgggaggcggagcttgcaatgagctgagatggcaccactgcactccagcctg

SEQ ID NO: 8890 - DNA, 465 bp, Homo sapiens
agtccatcaaaagccaggttttatgtctttatgaagtattcaggactgtgctgaatactttgtgcaatttctgtcaatgtgtttcatgtctagttgggggaacaaaatacatgtgtttgaaaagatattagatgtttccagatgagtgtgaagttgagctttcgttttagggtccaaaatcaaggatgatcacataggatgttcccagccttcctggggccactggatttatactggttagtgaagtcaggctaagatttttctatccttcaagcccatagaaaaggggcttttctagtagcaacagaatgtgcaagatctggtaaaaatctcaaatattaaaagacaactatgaaattaaaattattaaatgtttaaattcatgcattcaatataatgtatgcctaggatatgccaggcactggtctaggtctgagagatgtcagtgaataaaataaaggaaaa

SEQ ID NO: 8891 - DNA, 586 bp, Homo sapiens
acaaaacctagtatttctcagttacagatactggcaagtctgtgttgctgcagtaggagcagctggcctgttgcactgattactaattgatcgagttatttttcttaattctcttctaatttccagccgtctcagtccttcagcttctgtctgctagataactgtttctttccatatgtcaaaaaagccagcctgcagatttttaaaattctccttacggtgactgatgttgtgcaaagttcttttaaagagtaccactgactggcccatgtcttttgctcatgttccctgtatggcttcatgtgagtacttctgaagaaagccactattattgatataaagcagttctttattcccaacccctaaccattggcacagtttatataatgtgggtcagaaccatttgtgattttctgttatgagggccagagtttgagattttaaaccattcattcaaagaaacttaagaaagacacagttaaacaccttagaaagatacattttcatctaactagcctaattacgagctcagctaaaaaaggtacaggatcctctagaagaatcgtgctgtatcattctgatctgt

SEQ ID NO: 8892 - DNA, 1198 bp, Homo sapiens
atttcatgtgattatgccattttgaatatgtatattacatgtaattgtataatgttaactcgggtaggcaaaattcttggtattaaatttaggatgttttaaaaattattaagaagatattaatgtctgctttttgatagcatatattttcatgtaatgtttagtgtattaaaatcaaccattcaagatttattttattgggtgacactattgactgtgttccaaaatgcccatagtgttaggaaatgtggtgtgagttttatttgtgggctaaggataaaataatcatatgctaatataccttttattataaatgactaaaaatttggatataaaactgatgttttactacacaaattacagagagagataatataattatataattattaaataattagaaaatgcaaataagcaaaagtcacccatgttcccagttctcatctcctgaagatagttataactaacatattattttgtactcttcctgttaattagtttctagtgtactttctcctgtagctgaaattaagctgagaaaaaaggaagagatagttcctccctcctctttctctctcccactctgtctctctcctgtgctatctgtgtgtatatacaaatatgtatgcatatatatataatgatgtacataatatatataaaatacaaatactaatgtgcatattttcaaacatacacatattttttattatttgaaataagaatgagtcagactacatatttggtagccagatttttttcactcagtgatatatcatgaacatatttccatgctaatataattttctaataattttagatgctgtaactacaatttcattgttaatgggcaatttgttgctttacaaatggtaaattatatgataaataatatgatcattattcttgtagccaatatcattattagaaatgatggaccgcattaaagctataaaattaaataagaatttataaatgtaaggagttattcagacatcttgtatctagtattacaatatcagaaaactcagcaggttatatgacatatacactttgagatagtcactcagaggttttcacatacaggattaaccttgctgcagtgcgtgtgcaagattaaaaaagatgtcacgggtcactttgtaatgtcatatcgttgctgttgataaataaaggaaatgttataaataaaactaga

SEQ ID NO: 8893 - DNA, 531 bp, Homo sapiens
cttaatgaaagaaagtaacgatttatgggataaaaatattccagtggtttgtatttgcttcatacttcaaaagtgttagtccatttattgtttaaagttatattgaaactgatattttcactgctgccaaagcagtacctgacagtagataggtatccacagtcttatgttccttagagttatagaactatgcctctgaaaggggttttaatactttaataaacctggcctaaactgttttatttctaagttgaagaaactgattgtcaagtactttgacttgtccaatctcatacaactaactatggtacatctagagttagatctcagtatcaggggtcccagttgtattctgctcaccattccacaatttcgatattgataaaactttcacactaacttttgaactgtggttattattaatttagttgattcatgtcctcttatttatctccttactcctccactgctgccttcataactgtccaccagatcaaagctatttgggtacctacactttaaagtgagggg

SEQ ID NO: 8894 - DNA, 2717 bp, Homo sapiens
caggtggactacttcccactgacagagcagaagttctcgctgttggtggacagccagttggactcacccaaggccttgtatttagggcgtgtgatgggtaagctgcgggtgcggacgcgttttaggcaaggagctgtggcatatgttcctggatcctcaaggaaagtgaaggccctgggaatggctgagggcagtgggaaggatgagtgggaaacctgtggacagtgagagtggcagggcctttgggtccaagtccctcttctgggccgcctctctctcagagacaggagtcattgaccggaagatccagcgctacaacaccccaggtttctcaggctgcctgtctggtgttcgattcaacaacgtggctcccctcaagacccacttccgaacccctcgacccatgactgctgagctagctgaggcccttcgagttcagggagaactgtccgaatctaattgcggagctatgccacgtcttgtttcagaggtgccacctgagcttgatccctggtatctgcccccaggtacattcccaggacacagaggacagaagggagggatgacacggaagggaatgattcttaacatggaggaggcatctcctaactggtgctttctcctctccagacttcccctactaccatgatgaaggatgggttgccatacttttaggctgtgagtagcactgatcactaagctgacctcccaagactaccctctgactgtcagcatcctttccctgcccctgatccccaaggctgcaggatggcaaaggcactagatgcacaatggcacaaaggatgatgagacaggctatgctgaaggtgccatataactgggcagagatttttagatgtttgaggatgagacaggctatgctgaaggtgacatataactgggcagagatttttagatgtttgaggatgctacagatttttaaataaaatattaaaatgagactatagctaagggatgggaaaatggggatacagtaacacctagagagataagaaattggggtaactaccagggatgtggaaagagaatattagaaacagaaggtggcagggggtaagccaggaattcaaacctgccagacacttgagatgagtttagtgtggtcgaacagctaactgagggtcatacattatgcttttggccaaaagtaaatgtgtgtgtgtgtgtgtgtgtgtgtgtgtgtgtgtgcaggtgaaatcccaaagtgtgtgtatgtatacaggtgaaatctcaaagagtgcgtgtgtgtgtgtgtgtgtgtgtgtgtgtgtgtgtatacaggtgagatcccaaagatctgaattgcccctttttttcttttcagttttgggggcctttctgctgctggggctggtgggaatgttggtgctcttctatctgcaaaatcatcgctataagggctcctaccataccaatgagcccaaggctgcccacgagtaccattctggcagcaaacctcccctacccacttcaggccctgcccaggtccccacccctacagcatctcccaaccaagctccagcctcagccccagccccagccccaactccagccccagcctctggcccccgggatcagaacctaccccatatcctgggggagtccaggtctgaatgagtcagaagggcttttgggaccaattccagctcctgacattcccccagtcctgcctgtcccccattctatcagggacattgggctcctcttagctggctgtgctcatccagaggatattcccccatcccccccccatcaagtttggtgggcagagctacagatgggacccaagggagtggccgagcctcactgcctaaaccaatgcccttctcatccctgtttccccaggctcctggctgtttatctgccccaaaggagaagcctcatggggttgacataggtcctttctgccatctctgttccagctgctgtcagggattaacaacagagtgtaggggagattaactgcctcccttccaatagacactatcagcagggacagatgtgtgggagtgcagggctgcagagggtatggggggaggaggctgctaaaccctatcccccagcctcccccctgccctgaagatcttccatttgcttccactcagctggaggctcaagagggcttgatggctgtcccctgcccccctccttttgttttgtacacagagaccaagaggcctcagtttagcaccttagtacctccgctgcttcacttgctttagccaaagccataaaaaacctgcaacgtagagaaaataatgcagataccctgactagccagccctctactcctccaaccttttccaagatatgcaatggcctttgtgcctgcccaaaggcttcgccccctccagtgcatgaggaaccctctttcctccgctcagagatgctgcttcatttacccaggaggtcatattctttatatatattttttgttgcaaagtgtctctctagagaaactctatatattattcgaatttttaaattatttgtttatatataaaagaaaagctcaattggctgtgctgtcctgtgctgtgctgtgcccacagtctgtagtttgcctttcctgtgttggaagtgtcgtgagtcctgctggtcacccaccagcctggtccggcctccactctgaagcagggttgagcctgctgtgctctcagacgcggagccgttccaataaagcagagtggcagagc

SEQ ID NO: 8895 - DNA, 9620 bp, Homo sapiens
aatggattctaacactttattaagaggtcacaagccacaggactttaaagtgcatgaaatttattggcaatgaagccgcatgtataccaggctcccctagtccccaccaccttgccccatccatcatgacgtggtggggaggggttgagacccatctttaaaagtgggggacagcagggacaaaggatgggaaactggaggaacaggagtattcatgaactgaagctgggacaggagactgaccacagtgattctgctcactgaaggaagggtggggtcagtctagtctctcaaaggctggtgaaaagttttttttcacctattcctcacagcgagcccctggcatttcaaatagacctaactcctcctcttcatctttctctggttttctcctctatgagtaatttggaacccacagtccagcttgagggtatccctgatatgcacaatgaatacaaaccacggcggatgcagatttcaggatcatgctggggcctggcccatttgggtgggaggagctttctgtcaggagttgctgggtgcggggtacgtgtgtgccctccagtgtggtgagtgagagcatgtgagtgtgtgtgcatgtcccataccaaaccgtaagaggcagctgggtcaggaggaaccccacttcttccttcatgggacaacaagtggagtgggaagaagcggggctctgagtcccagaaagaagggagaagcctgctccctactgtaacactcccaggccaatctatacccgcccacaccctttctactcaacatactgctccttgttcccagccagcccggcacacccaccatggacacagggcagctcttgctggccccattcacatgaaattcttctgtgtgaaactcactcgtctgcctctcccaggagatgagacaggactggaggagaatctcccaccctctcttcttccccctccctcaggagtgggatttaggcagggaccctagagaccttaggccaaactctaccccaatctatagaccttttaaaagaaatggttaaagtgctttgctctgcatgaatgccagagagggtggcaccacagcctgggacaggtggtctacctgcttcttctcccacttcagataccctctgccagtgtgccctgcacacggggtgccagcctaaacgcgtgcaatttagcccctcaccaaccttggaacatattctaactcaccctttccaaacagcaggcactacagacaggaaagcagattacaccaatctttctcctctctagtccaagcctgtgcccacctaccctgaagcgataagcaacactggccattgggccttgcctctatggggaatggaaggcctgaaaacacccacaaatccagcgagccaggatgctcacacctgccaggcatacccctaatgcttcttcaatagcagcataatgcttgcctgcagctgctaagccagaactttggaggagctggagcactggtgtctgttcccaggaatctgaaaacacttctccatctatctccagagtacacagagaaggctttctcaaagcctcctgggcccaagcttagcagtttaactactatcatctggctggttctccctctctggctaaggaaggatggcgtagctttccttcccccagccttgaatgcctgtacttagaacccacactctttcagtttgagccctgccacgagggaggaggtagtaaggtgacctgtctacctctgagttcagtctgtgctgcctgccaggctcgcctctaacccagaccacttgtaggctccagggaccacacttcacttagcctgtcctctccaggtcttaggaccacagaggtttgcctgcatcccaataacataaggactcttgatgtggaaagctacaattacaggctagcgcttgttgggaactgcctaagttgattcctgaggccacagcctggggagccgacacgaaatcacgcataagtcatccaccccagcctgtgctcgcttcttctgaggccagagaaacagtctcccatttctgtaactctctgtcctgggagaccaagccctagctgcctctgtctcccctctcattgagacagttttgtgccctctggacatggcagaggcctcactacagagggagtgggttggggggtttctcagtgtgggagacacagtgcaggagactcgagcagcagtggtgtgagcacgaaagccaagacagtgccgctaccataagtgctgccgtggggcctgggagggctaaaggacgtcggtctccctctcgatccccacgtacttgagagcatcagcttggctgtacctgtcccagagcagggaagaggaaccaggttactctcatgacttttgtgattgaaaaggcggagtcccctcccgtttcacttcccctcccactccttaagggctgtttacaatggtcccacttctgaggcaaggcaccagatatcagaacaagggacacagccttattcaccgggagactctctcctccatctccattaccctccctgagcccccaaatctattccaacagccactctttccaattcctgggccacatcccaaggaccattactggcacctcacctgtaatcaaagaagagctcttcgccagcttgaattgccctcttggcaaagatcccaatccgatggtctccattcaccatgaccactgcaagcaggataaacccgaggctaggttcctacccaactccaagtcaataaccagtaggcttctgggttgattttctccaaattcccagtgaaaacatgaatcaaatggaattagaaagtagtcaatatggtagttgcctctatgcttttagatctgttattatggcagaaaaattatctttattattattataagtggggttttttgttttgttttgttttgttttttgagacagagtcttgctctgttgcccaggctggagtgcagtggcatgatcttggctcattgcaacctctgcctccagggttcaagcgattcttgtgcctcagccacctgagtagctgggactacaggtgcacaccaccacgccccccagctgatttttgtatttttagtagagatggggtttcaccatgtttgctaggctggtcttgaactcctggcctcaagtgatccacctgcctcagcctcccaaagtgctgggattacaggcgtaagccaccacacccagcctattattattttgtgagatgggtctcactatgttgctcaggctggttaaatcatgtttgtgggaaagtgtttataatgtattcgctgaaaaaagcagattagaaaactaagattgagaggggcctaaaatgataccagatattaatcatgattatctttggacaaaaaatagctcagctaaggaaaatgttcaacaacgaatggaaatcacagtaaagaggcatccatcccccaccccacctcccaggttactgggactcacctttggcataacagttgggattcactgaatgatttgcaaatcgaattttgtttcctttccgagtagcatccactacaaaatctgtataaagtaaatcaaggaaaaccataagcacagcaggcaattccacagcttctcagcttgaatttaaaatcagttaaatggtaacagaaacactttagtctgatgggaatgttgaagcccagtgtgctaacaggagcagaggaaagcatgcagcctcagaattcagccttgtgtgggagcactccctttgggtccctctttgaattatggatcttctcatctactgggcagggagatttctcaggtaaagacgctcagcactcctattacaaacagaacccagaaatggaggttcttccaaagcaagggcactgtggcctgtgggatccccaagtgtgatcctgcccccttgctctatgcatctgctggaagattcggagctgatctaaacttggactacagcaagggcaatctggtagaaagatcaccttggggccaagtgcggtggcttactcctgtaatcctagcactttgggaggccgaggcgggtggatcacttgaggccaggagttcgataccagcctggccaacatggtgaaacccagtctctactaaaaatacaaaaatattagccgggcatggtggcaggtgcttgtagtcccagctactcgggaggctgaggcaggagaatcacttgaacccgggaggcagagggtagaggctacagtgagccaagatcgcaccattgcaccctagcctgggcaacagagcaagactccgtctcaaaaaaagaaaaaaaaaaaagaccaccttgggatgagacaaagtgacttcataccattattgaggttgaagaggaagctggacatgtatttgtcatagacctttccgcgtcgatcagcctcatcctgagagatgagctagagagatagacaaataacaaataggagtatcaggctgcctgctcagggcatggtaccctgcccccagaaagggctgggtggtatctcacatgggtgcttactgagcatcatgatgagaatcacaagagagcaagttcaagttatgctgttccaattcccacccaggccaaccagttttaaggctgaaaagagcccccctcatctcttgtgtctggagttgccaaagagttgaacagtggtttcagtactgcaaacggttctgtgggatctccccaagaggccacgtgagaacacagctgagttatttagagattaattcaaagaagcctggcccacagaaaatcagagtttctcatcagtctcccccgagtaagaatgtgggccaaaactatagcactcacctcaccacagtattcagaaatgaattcgttcttctgcacagactcctttatgaaggtgccccatccggccacatcagagggggccagcagcaggtgctggggaagagggggccaagtctcagactacagggtgtgcatgagtagggggtgtgtgctggatgtgcacatgtgtggtgggggtggggtggaaagaaccagcaactgttaagaggatctgaaagcagaaaaaggtctaacccattcttttctgcttgggagagaaaagaaaatgggaggtggtgacgaacggaaataggatatctcttcctttatccatggagccctcctgggccttagtctataggaattcactgcaatgtgtgaggtaaacatagacatcaccaaaggtgcatacacctcgcagctcctttttgtctggccagttcaaggaaccacttttctttctctttttggagatggaatctcactctgtcccaggctggagtgcagtggtgcgatctcggcttgctgcaacctccacctcccaggttcaagcgattctcctacctcagccttctgagtagctgggattacaggcatgcaccaccatgcctggctaatttttatatttttagtagagacagggtttcaccatgttgcccaggctggtctcgaactcttgacctcatgatccgctggcctcggcctcccaaactgctgggattacaggcatgagccaccacacctggccaggaaccatttttctaagccctactgggactgaagcctttattaattcagtaaatatgtgtcttttaggatttatcaagcactttcacatataaagcctcaaaagaaccagtggaaagagaatgcttgggaccgttccttccttccccctccattttatgtggtgtggggtcctgaggaaaggcctcaccttcttaagtccacgctggatgctgcagtttttacaggaaaccaccttgcagtcccagtgctctgaggccccacaggtgagacacaggtcagggtcacattctcgcactgccagatagcaaggacattgcttggtattgcactgggtcttacagcgacagccagggaaacgattctgacctgggaagggaagacaggtaagtcttagaagggaaataagctaatactggggcttgtggttgactcaagggacagcaaagaagtaaattttttgtgttcaaggatgtttggcaaaataagaggaagctcccttcccaataatcaaatacacaagttttgtccatagaaaactgagtgcttcccaacattcatgccttcgagtcaaaaaagcaggtgtggtcaagcatggtggctcatgcctgtaatcctagcactttgggaggccaaggcaggagaatcacctgagcccaggagttcaaaaccaggctgggcaacatagggagatcctgtctccacaaaaaaattaaaaaaaaaaatagccatgtgtggtgacacctgcctgtagtcccaggcttgatggatgtagggggatgaatggcttgagccagggaggttgaggctgcagtgagccataattgtgccacttctctccagcctgagcaacagagctgagatcctgtctcaaaaaaatttaaaaaatgaaaaaaaaagcaggtatactaataagaagtgtcccctagagattccccaacaatcctctccctcccactgaggtggagagtaccccagagaatatgaaatcagtgtgtttcactggtaaattgtcaccatcaaaacaagtatcattttgagaacagaatgcatccgttctatgccatccttctccacccactgcccaacccagcgcaaccacttctctgctgcggctaagatcactatctgctatgggttaggaggtatttcctccagcaaaaccgcctgggcaccaagttctgcaagctgtggggactgccatcaaactgctcagctttgagttgggaagggcatggtgggataagaagtaaaagataagtacccggatgtctctgctgacatccaggcccctgtcttctacctgatattaaaactccagctatgaaatgaaaatagacatacacagaatcacaaacaaaaaatatctgaataaaaaattttttaaaacagtattcagaaaagggaaactggggctgtaacttaaaaaaaaaaaaaagagtcccacatttcttttctttttgagacagagtcttgctctgttgcccaggctggagtgcagtggcacaatcttggctcactggcagcctctgccctctgggttcaagcagttcttgtgcctcagcctcccaagtagctgggactacaagcatgtaccaccatgtctggctaatttttgtattcttagtagagacggggttcaccatgttggccaggctggtcttgagtcctgaccttaagtgatctgcccgacttggccttccaagtgctgggattataggcgtgagccaccaccacctggcctaatttttttatttttagtagagatgaggtttcgccaagttggccacgctggtcttgaactcctgacctcaagtgatccgcctacccaaagtgctgggattacaggcgtgagtgactgcgcctgctgccccccacatttcttaattctcccctagaagacaaagttgggaaagtatctgatttctgtgtaattgctgcttttagaatcatgaacctaaacgttttccagaaacgactctcccagatctcatgcacttatttcatttgtagaatccctaaaacacagcaaaggggatatcagaaggccataagcagtaaagggcacaggaatggggcaagcctagggcacactggagccaactgttttggtagactatacagaaaacgtagcacacttacagtctgggttgcactggcagaacttctcacagaaattctgagtcatgatgcaggggcaggtgctgtcacaggggcggtctgggtggtcgcagggttggtagttgtacacttgtgtggaagagttatctaggaaagaaaacagaggaggatgctgctgtgaccatactctccagctgtcttccctcccaagtgtccagctgccctgattcagaggaggctggtcctaacaatctccttggacacacatttagcacctgaagtgagaagacagggatgaccgttgttcataagctgcagtggggtgatctgctttgtggggagggtgtggagatggtctgggacaacagggaagctattctaaacattaaatgaggtctggaacctagcaaatggcacactagaaaagtcacatactggccaggcacagtggctcacgcctgtaatcccagcactttgcgaggccgaggcaggtggatcatttgaggtcaggagttcgagaccagcctggccaacatggtgaaaccccgtctctactaaaaatacaaaaattagccaggcatggtggtacatgcctgtaatcccagctacttgggaagctgaggcaggagaattgcttgaacccgggaggcggaggttgcagtgagccaagattgtgccactgcactccagcctgggtgacagagcgaggctccatctcaaaaaaaagaaaaatcacagaccacaaggcccttaatgttacctcctaagaggtcttctcagttgcagtgagaggctcagctgttctcagttgctgcagagaattctgcaatctgcggaagtggcacagggtcaacaagtgcagctggaggtggggtagggtgatgaccacagagtgaggcctccagctgaactgctgaagaatgccctggtagaacttacctttcttcagctgaatcttcctgcagtgtgcagcccacaatctgaaaaagacaggaaggacaggtctcagtcacggccctagggagctctgcaaatgcaggtaaatgacaacgtgacttgctctgagggactgtgtttgatgactggggagtatcttcccaaacccctcaacaggacgactttggtacacagaagctagagtccatcctaaatccagctggcctgtgctacaagagttaaacttaaacacaacccctcccaaacaagcaaataacataaaagaacacaacacagaaataaaagaaagcccaagcctattggtctattataaagctattgtttctctccaaatctctccctttgtctttgtggaggtggagatatgggggagtttcaagatggggaggtgggaaggcctttcaggaatcttctctgaaagaactgaaagggaggagccacagggatttccttctgtatctagaagtggtgtcagctccttcctctgataggtgatagtcactagggaacagggccagggtgcagaatttttttaaaaacttccaacctaagtaaaggctatcatgtaactcagaaaaacaacacaaaccaaacaaataaataaactctgatcagagttgagaaatgggtaaggtggtaacaaaaccaacaaggagaaatggcttcagggtggagccatgaggccagctcatgtcctattggccagaagcttaaatagaaaaacagacagttatggtccacagcactgggggacaagaagagggctgatctaaggcacagaccctcagggagcactcaggaggctggctctcagtcatgtgatgccaagctgatgggctcacacagcctgtgcggttgctaaagagggaggcagatgggaactccaaggggaggtcagagcacagggaacagcctggctgtaaaacaaaacactttgtccaacccttcttgcctgtgctttcttttcttcttctgtgaggggttcatgagctcatctg

SEQ ID NO: 8896 - DNA, 498 bp, Homo sapiens
cttaaagaccaaggtcctcaaattcctgagtcccgaggggtggggctcagatcctttctgcctgtaattgtaccccccccaacagtgattgcttagcaaaaataccaagtggggagcccacttggggttcctagagaggttcttaggatgaaaatggcatatccttcttggaccatcagggttgaacctagttgactaaaaagaaggaaaccagaagtccagcatgagcatgaatggtttgctctatctttcttggttaagagacctaaccactgaactgctcagagcgacccactgtggtcaaggcagcggcctctgggctttcctatgcgtttgtcactcttgttctgtgtctcttgcccctttcacactgaggggtctcgccccttggaggatggcgtgtgattttgccacgaggtaaaatattcaacaaatgaaatgatcacaaattttgatatgtgctatacaggaaataaagtgttatgattgagaatataa

SEQ ID NO: 8897 - DNA, 1814 bp, Homo sapiens
tcagccttcgcagcagcagcactttaattccacaaaaactcagaaagccaaaactgattagaacactccacaacaggtgagcttcaaaaccagcaacattctacctgaaccctgagagcagtgagacgcctcccacctcaccccctccgccgtgcaacccattcctcctagctgcacgccggttctggctggggaagtggtatggtagagggccagagggcagaagcagaaggctctccatcagcaggggtgcatctttgcctgcggggtgtttggccaaggacggcacaagctcccacagcccctggcacctgagatgtggccactggagtcaggatagccacagtgggggctggggcttcctctgtccctttctcctgattacatgtgggagtcacgtcctcaccttcaagcagacctaaagccccgtgttcccagggctggtgctctagctagggaggagagttgggaagaacagggtagctacagatggccaactgaatacaagcagagcaacatcccttcccaccaggagagccgttagaacttccccacatacaccagcctaaggcccagcgagtgggcacgggccagctgaacgcatctggaagagcctccaacacacaggcctcccctcagtgggcacttcccaccaggactccctgaagagtccttagggtcctgctgggccctgccctggccaggaccggcctctcctgtcctcctggtcacttgcacagggcctccaacacctccagagtacgtcggatatcccggacttggcgcgccagcccctgaaccggctgcagagcccgctccagctcctcgcagcgcgccagcagggtgtacatgcccttgatgctcatgtccacggcttcacctaaggagtccacagcatcgcggtaggtctggatgcaacccacgctcagcgccgtcagctcctgcaccgcgccacccagaccgcgaagcagacggtccacccggcctcccagctcccgactcaaccgctccagatcccgcagcacctcggggtcgattgggggaatggccggtgtgggtgtgggtgcaggcgctgggcagggccgcgcaggggcagaaggcgggggtggaggcgcgccgctcagacggatcttgagttgcaggttgttggcgacaaagtgggtaaggtcgccgtggcggctcactgtgccttcgagctccaggggactggagatggtggcgcggcgtccgccgcccgcgccggactcggcactccctgaggacccggcgccaccgcacgcctcgctcagcccgtccaggctgcggctgtcctgaagacggctggagaacgagcggccggctctgctgcccgcggccgcctcctcgtcgttgtcttcctcctcctgctgctcaacatccatcccgccgcctggtccccctcgacggcagtccctcccggaggagggcttgccctcgggcggcgccgggttcttgtgccgggaggacagggaaggttcgtgctctgcacccggcgcccccctgcggctcccggccccagacagcgtcccttgagggccgggctcgttctccagagcctcccgttccggccggtggacgacgccgcagcttgacgtcttcggggacgtcctggggtggcggttcgcgcccccaacgttctcggtctcttcctccccggacacccggaggcctgcgggcggctcagaggacgttcggcccggcccgccgccaaagactagggcctgatgttccgctacagccagaaggtccgtctcgggcccgggccgcccccgagacgactccatactgcaggtggg

SEQ ID NO: 8898 - DNA, 626 bp, Homo sapiens
tatttttatttatttatttatttatttatttatttatttatttatgtatttagagacagagtcccactccgtcacccaggctggagtgcagtggcgcgatctcggctcactgcaacctccgcctcctgggttcacgcgattctcctaactcagtctcccgggtagctgggattacaagcgcccgccaccacgcccggctaattttgtatttttagtagagatggggtttcaccatgttggccaggctggtcttgaactactggcctcaagtgatccacccgcctcggcctcccaaagtgctagcatgacaggcgtgagccaccgtgcccggccagacatcagtatttaataaaaacagtttgctaactctccttagctgacaaaggatgtggttgttttttccatttggatagagagatgtcttgaggcagtgtcatgccagcattcagaagtgcaactccccagaacttcccagcactactatccccaggtgcctgccggggtcctagccagccaaccctaatgatagtagctcaatctttcaccacgcctgaggagtccacaattgtcagctgtctgtatcttatagtcacctgcagcttgacaaaacctgtcattcctttgct

SEQ ID NO: 8899 - DNA, 1010 bp, Homo sapiens
cccgaggggctctcgcttctggcgccaagcgcccgtccgcgcgccggccgggcgcgatccgctccggggacagtgccaggtggggagtttgactggggcggtacacctgtcaaacggtaacgcaggtgtcctaatgcgagctcaggtaggacaaaaacctcccgtggagcagaagggcaaaagctcgcttgatcttgattttcagtacgaatacagaccgtgaaagcggggcctcacgatccttctgaccttttgggttttaagcaggaggtgtcagaaaagttaccacagggataactggcttgtggcggccaagcgttcatagcgacgtcgctttttgatccttcgatgtcggctcttcctatcattgtgaagcagaattcaccaagcgttggattgttcacccactaatagggaacgtgagctgggtttagaccgtcgtgagacaggttagttttaccctactgatgatgtgttgttgccatggtaatcctgctcagtacgagaggaaccgcaggttcagacatttggtgtatgtgcttggctgaggagccaatggggcgaagctaccatctgtgggattatgactgaacgcctctaagtcagaatcccgcccaggcggaacgatacggcagcgccgcggagcctcggttggcctcggatagccggtcccccgcctgtccccgccggcgggccgcccccccctccacgcgccccgcgcgcgcgggagggcgcgtgccccgccgcgcgccgggaccggggtccggtgcggagtgcccttcgtcctgggaaacggggcgcggccggaaaggcggccgccccctctcccgtcacgcaccgcacgttcgtggggaacctggcgctaaaccattcgtagacgacctgcttctgggtcggggtttcgtacgtagcagagcagctccctcgctgcgatctattgaaagtcagccctctacacaagggtttgtccgcgcgcgcgcgcgcgcgtgcgtgcgtgcggggggcccggc

SEQ ID NO: 8900 - DNA, 663 bp, Homo sapiens
  SITE (426): n equals a,t,g, or c
  SITE (661): n equals a,t,g, or c
aaaagttaccacagggataactggcttgtggcggccaagcgttcatagcgacgtcgctttttgatccttagatgtcggctcttcctatcactgtaaagcagatctcaccaagcgctggattgttcaccccactaataggaaacgtgagctgggtttagaccgtcgtgagacaggttagttttaccctactgatgatgtgttgttgccatggtaatcctgctcagtacaagaggaaccgcaggttcagacatttggtgtatgtgcttggctgaggagccaatggggcgaagctaccatctgtgggattatgactgaacgcctctaagtcagaatcccgcccaggcggaacgatacggcagcgccgcggagcctcggttggcctcggatagccggtcccccgcctgtccccgccggcgggccgccccnccccctccacgcgccccgcgcgcgcgggagggcgcgtgccccgccgcgcgccgggaccggggtccggtgcggagtgcccttcgtcctgggaaacggggcgcggccggaaaggcggccgccccctcgcccgtcacgcaccgcacgttcgtggggaacctggcgctaaaccattcgtagacgacctgcctctgggtcggggtttcgtacgtagcagagcagctccctcgctgcgatnct

SEQ ID NO: 8901 - DNA, 1678 bp, Homo sapiens
ggggggaaatccggttagtcacaccgccctacccccccggccccgtccgccccccgttcccccctcctcctcggcgcgcggcggcggcggcggcggcaggcggcggaggggccgcgggccggtcccccccgccgggtccgcccccggggccgcggttccgcgcggcgcctcgcctcggccggcgcctagcagccgacttagaactggtgcggaccaggggaatccgactgtttaattaaaacaaagcatcgcgaaggcccgcggcgggtgttgacgcgatgtgatttctgcccagtgctctgaatgtcaaagtgaagaaattcaatgaagcgcgggtaaacggcgggagtaactatgactctcttaaggtagccaaatgcctcgtcatctaattagtgacgcgcatgaatggatgaacgagattcccactgtccctacctactatccagcgaaaccacagccaagggaacgggcttggcggaatcagcggggaaagaagaccctgttgagcttgactctagtctggcacggtgaagagacatgagaggtgtagaataagtgggaggcccccggcgcccccccggtgtccccgcgaggggcccggggcggggtccgccggccctgcgggccgccggtgaaataccactactctgatcgttttttcactgacccggtgaggcgggggggcgagccccgaggggctctcgcttctggcgccaagcgcccggccgcgcgccggccgggcgcgacccgctccggggacagtgccaggtggggagtttgactggggcggtacacctgtcaaacggtaacgcaggtgtcctaaggcgagctcagggaggacagaaacctcccgtggagcagaagggcaaaagctcgcttgatcttgattttcagtacgaatacagaccgtgaaagcggggcctcacgatccttctgaccttttgggttttaagcaggaggtgtcagaaaagttaccacagggataactggcttgtggcggccaagcgttcatagcgacgtcgctttttgatccttcgatgtcggctcttcctatcattgtgaagcagaattcaccaagcgttggattgttcacccactaatagggaacgtgagctgggtttagaccgtcgtgagacaggttagttttaccctactgatgatgtgttgttgccatggtaatcctgctcagtacgagaggaaccgcaggttcagacatttggtgtatgtgcttggctgaggagccaatggggcgaagctaccatctgtgggattatgactgaacgcctctaagtcagaatcccgcccaggcggaacgatacggcagcgccgcggagcctcggttggcctcggatagccggtcccccgcctgtccccgccggcgggccgccccccccctccacgcgccccgcgcgcgcgggagggcgcgtgccccgccgcgcgccgggaccggggtccggtgcggagtgcccttcgtcctgggaaacggggcgcggccggaaaggcggccgccccctcgcccgtcacgcaccgcacgttcgtggggaacctggcgctaaaccattcgtagacgacctgcttctgggtcggggtttcgtacgtagcagagcagctccctcgctgcgatctattgaaagtcagccctcgacacaagggtttgtccgcgcgcgcgcgcgcg

SEQ ID NO: 8902 - DNA, 13076 bp, Homo sapiens
  SITE (1259): n equals a,t,g, or c
  SITE (1260): n equals a,t,g, or c
  SITE (1261): n equals a,t,g, or c
  SITE (1262): n equals a,t,g, or c
  SITE (1263): n equals a,t,g, or c
  SITE (1269): n equals a,t,g, or c
  SITE (1270): n equals a,t,g, or c
  SITE (1271): n equals a,t,g, or c
  SITE (1272): n equals a,t,g, or c
  SITE (1274): n equals a,t,g, or c
  SITE (1275): n equals a,t,g, or c
  SITE (1291): n equals a,t,g, or c
  SITE (1299): n equals a,t,g, or c
  SITE (1311): n equals a,t,g, or c
  SITE (1313): n equals a,t,g, or c
  SITE (4089): n equals a,t,g, or c
  SITE (5583): n equals a,t,g, or c
  SITE (5606): n equals a,t,g, or c
  SITE (5953): n equals a,t,g, or c
  SITE (11536): n equals a,t,g, or c
ccatctcggctcaccgcaacctccacctcccgcgttcaagcgattctcctgcctcagcctcctgagtagctgggattacagggaggagccaccacacccagctgattttgtattgttagtagagacggcatttctccatgtgggtcaggctggtctcgaactggcgaccccagtggatctgcccgccccggcctcccaaaatgctggggtgacaggcgtgaaccatcgtgactggccggctacgtttatttatttatttttttaattattttacttttttttagttttccattttaatctatttatttatttacatttatttatttatttatttatttacttatttatttattttcgagacagactctcgctctgctgcccaggctggagtgcagcggcgtgatctcggctcactgcaagctccgcctcccgggttcacgccattctcctgcctcagcctcccaagtagctgggactacaggcgcccgccaccgtgcccggctaactttttgtattttgagtagagatggggtttcactgtggtagccaggatggtctcgatctcctgaccccgtgatccgtccacctcggcctcccaaagtgctgggatgacaggcgtgagccaccgcccccggcctatttatctatttattaactttgagtccaggttatgaaaccagttagtttttgtaattttttttttttttttttttttttgagacgaggtttcaccgtgttgccaaggcttggaccgagggatccaccggccctcggcctcccaaaagtgcggggatgacaggcgcgagcctaccgcgcccggaccccccctttccccttcccccgcttgtcttcccgacagacagtttcacggcagagcgtttggctggcgtgcttaaactcattctaaatagaaatttgggacgtcagcttctggcctcacggactttgagccgaggagtcccctggtctgtctatcacaggaccgtacacgtaaggaggagaaaaatcgtaacgttcaaagtcagtcattttgtgatacagaaatacacggattcacccaaaacacagaaagcagtcttttagaaatggccttagccctggtgtccgtgccagtgattcttttcggtttggaccttgactgagaggattcccagtcggtctctcgtctctggacggaagttccagatgatccgatgggtgggggacttaggctgcgtccccccaggagccctggtcgattagttgtggtgtttttgttnnnnnacaggnnnnannaactgaggaacactcnatggagcnccatgcgcacangncaaagcttccgaatggagagaagcccaaggctacggaaggcatcagctccaactccaggaagggaataaggctctgtgcatacgaatggggctgtgaaaggcgttgccgcggcttgcaaagcgatgcgctgtgcctcgcctcgcctcgccccgcccagagcgagactccgtctgaaataagtacacaaataaatcataagataattcatcaagaaagaaagaaagaaagaaagaaagaaagaaagaaagaaagaaagaaagaaaggatcagtagagcgatggtggtcgtgagtcattccccggagtccaggcgcagtggctcacgcccgtcacgccagcactttgagacgccgggcaggagggttgcaaagaaatgatgagaccccgtctgtgggaaaacatttaaaaatgaaggccgggcgcggtggctcacgcctgtcatcccagcactttccgaggccggggagggcggatcacctgaggtcgggagttcgaaaccagcccgatcgacatggagaagccccgtctccactaaaaatacgaaatcagccagacgtggcagcgcatgcccgcaatcccggctactcaggaggccgatgcaggagaatcgcttgaaaccgggaggcagaggttgcggtgagccaagatcgcgccaccgcactgcagtctaggccacgagagtgaaactctgtctcgggggaaaaaaaaacaattaaaaacggtgtgggcacagtggcgcgtgcccgcggtcccaggctctgtactctggaggctgaggtggaaggatcgctcgagtccaggagcgtccacgctgcagggagtgagttacgacggcaccactgccggggtgacggagcgagatgccgtctctaaatcagtcaatgagatcactggaaggcgctctctgcgtctcactttccaagagggtctctttgggccaagcaggcatggtgcctcccgccagtcatcccagcactttgggaggctgaggcgggaggaaagaaggaagggaggaagggaggaaagaagaaaagaagaaaggcaggaaggcaggaaagaaagaggggaagagagaaaaagaaaaagaaagaaagaaagaaagaaagaaagaaagaaaagagaagcaaaaagaagaaaagagaagggaagaaaagaaaagcaaacggggaaggggcatatctccttgaccggtgactgcccaggatacagtgggtcacggccgaccgaagcctcgacctgtggggcctcaagtgatcttctcctcgtctcagcctcccgagtagccgcgactacaggcggccatcaccgcgcacaactcatcttataataacatcatgattctctcgagacggggtctcgctccgtcatccaggccgcatcgccacggcacgatctcagctcatcgcaacctcggcctccccggttggaacaagtcgcccgccccagtctcccgagcggtcgtgattccaagcccacgccaccaggcccggctaatcgttctatttttcagagagacggggtttcgccacgtcggccagcctggtctcgaactcccggccccaagcgatccacccgcctcggcctcccaaagtgccggagtgacaggcgtgagctagcgtgcccggcccagatcatctttttcatcaattgtagagaaggggtttcgtcagccaacgggtggagggtggggcgggttttactcagcctgcgtactgtgaaaaggggaagtgagtgtgctctgtgaacgcccgctcccaagatccaactacgagctttttaactgcagcaactttaatatacgctattggagctggaattaccgcggctgctggcaccagacttgccctccaatggatcctcgttaaaggatttaaagtggactcattccaattacagggcctcgaaagagtcctgtattgttatttttcgtcactacctccccgggtcgggagtgggtaatttgcgcgcctgctgccttccttggatgtggtagccgtttctcaggctccctctccggaatcgaaccctgattccccgtcacccgtggtcaccatggtaggcacggcgactaccatcgaaagttgatagggcagacgttcgaatgggtcgtcgccgccacggggggcgtgcgatcggcccgaggttatctagagtcaccaaagccgccggcgcccgccccccggccggggccggagaggggctgaccgggttggttttgatctgataaatgcacgcatcccccccgcgaagggggtcagcgcccgtcggcatgtattagctctagaattaccacagttatccaagtaggagaggagcgagcgaccaaaggaaccataactgatttaatgagccattcgcaagttcactgtatcgtccgtgcgtacttagacatgcatggcttaatctttgagacaagcatatgctactggcaggatcaaccaggtaggtaaggtagagcgcgtcgaggccccgacgcggccggacggccggcctgggggcctctcgaggacgggtctggcgctccgcaagcgaggaggacgacggacggacggcggacgggccgcggacgggctgactggagggagcgagctggcgcgggggcggctgacgggaccggtggggcccgtgcagagcgttaagcaaactacgcctaatgaacgggcagggcacacgagaagagggttggggggttgaggagaggaggcgtactggctggctggtgcgccgcctgggtaaagcgggtgggcagaccggggtcaggtgactggaagggacngggcgttaaatggacgaaaggatgggcgagctggacgagggggtttttaatcgggaaggtcggctggaaccgggactacgggaagaaaagggcagggctggggcttgatcgggtaggggaccggctcgggtatgagcgaaaaggaaatttacgactgggtgcagacggggctaggtactctccacaggaagtctaagccctcttcattaactagccatgcgccttaaaagaatgacgtatcttcagcctgttctgtcttgcgatcttagggaaaccacagtcaagcatcgtggcttgtccagatcagggagaaaagcacaccttgtgaggattcactttagtgtggcacggtgaagagacatgagagctttagaataagtgggaggcccccggcgcccccccggtgtccccgcgaggggcccggggcggggtccaccggccctgcgggccgccggtgaaataccactactctgatcgttttttcactgacccggtgaggcgggggggcgagccccgaggggctctcgcttctggcgccaagcgcccgcccgcgcgccggccgggcgcgacccgctccggggacagtgccaggtggggagtttgactggggcggtacacctgtcaaacggtaacgcaggtgtcctaaggcgagctcagggaggacagaaacctcccgtggagcagaagggcaaaagctcgcttgatcttgattttcagtacgaatacagaccgtgaaagcggggcctcacgatccttctgaccttttgggttttaagcaggaggtgtcagaaaagttaccacagggataactggcttgtggcggccaagcgttcatagcgacgtcgctttttgatccttcgatgtcggctcttcctatcattgtgaagcagaattcaccaagcgttggattgttcacccactaatagggaacgtgagctgggtttagaccgtcgtgagacaggttagttttaccctactgatgatgtgttgttgccatggtaatcctgctcagtacgagaggaaccgcaggttcagacatttggtgtatgtgcttggctgaggagccaatggggcgaagctaccatctgtgggattatgactgaacgcctctaagtcagaatcccgcccaggcggaacgatacggcagcgccgcggagcctcggttggcctcggatagccggtcccccgcctgtccccgccggcgggccgcccccccctccacgcgccccgcgcgcgcgggagggcgcgtgccccgccgcgcgccgggaccggggtccggtgcggagtgcccttcgtcttggcaaacggggcgcggccggaaaggcggccgccccttcgcccgtcacgcaccgcacgttcgtggggaacctggcgctaaacccttcgtagacgacctgcttctgggtcggggtttcgtacgtagcagagcagctccctcgctgcgatctattgaaagtcagccctcgacacaagggtggggatcctctagagtgntcctatcgagtgcaatccaaaanttgcccccctttcgcaatctcctccctattttaacccccctctcgccttataggtaggaatggatagtagaagtatctagctagcaatgtgcgctttgtccatgataactgtctagcgttcgtcattggtgcagctgcattcttcttcggtagctgggattacaggcgcacaccatgacggccggctcatattcctattttcagcccatgggtacccggtctatgagcgtccttcctcctcgtccctccgcaggggttgaccagcaccccacgggtggcggccggcggtcggcaaggccccaaatgtgtgtccccgcaaccggccgaccgccgctcgcgacctctcntcggtcgggcctccggggtcgaccgcctgccgcccgcgggcgtgagactcagccggcgtctcgccgtgtcccgggtcgaccggcgggccttctccaccgagcggcgtgtaggagtgcccgtcgggacgaaccgcaaccggagcgtccccgtctcggtcggcacctccggggtcgaccagctgccgcccgcgagctccggacttagccggcgcctgcacgtgtcccgggtcgaccagcaggcggccgccggacgctgcggcgcaccgacgcgagggcgtcgattcccgttcgcgcgcccgcgacctccaccggcctcggcccgcggtggagctgggaccacgcggaactccctctcccacatttttttcagccccaccgcgagtttgcgtccgcgggacttttaagagggagtcactgctgccgtcagccagtaatgcttcctccttttttgctttttggttttgccttgcgttttctttctttctttctttctttctttctttctttctttctttctttctctctctctctctctctctctgtctctctcccctccctccctccttggtgccttctcggctcgctgctgctgctgcctctgcctccacggttcaagcaaacagcaagttttctatttcgagtaaagacgtaatttcaccattttggccgggctggtctcgaactcccgacctagtgatccgcccgcctcggcctcccaaagactgctgggagtacagatgtgagccaccatgcccggccgattccttccttttttcaatcttattttctgaacgtgccgtgtatgaacatacatctacacatacacacacacacacacacacacacacacacacacacacacacaccccgtagtgataaaactatgtaaatgatatttccataattaatacgtttatattatgttacttttaatggatgaatatgtatcgaagccccatttcatttacatagactgcacgcatgagatcaaatccgaaacccacttaaccgactcactaaattaaggtgaaggaacgtgggtagtggggggagccggggggcaacttgaaaattaaactgacccttcccaaagcccaagtagaagagtctaggcgccaaaacacaaagaaaagtaaagcgccgatcaaagaacaatagggcccccgccagggcggaggttccctaggcgaggttccctaggcaacgagggagagagggaggggcctccagaagggagagagagaaacccgttgccccaggctcggtgaagtcggcgagacctccctccgtgtcacgtcgactttcaataacagtggccgctaggtgatgcccgaagacaaccgatgcctgcctgcaaatgtccgtcagcagggaaaagaattaatgaattaattaatttccgtatttatttagagaccgagtctcactcactctacagcctcttgtagatttcgcaggtttttcatactctcctcaatgtacttttacagtcagatcgctaatcagttacattacctagtatatgtcgtagacgttacgggatattttcgtaaatgtggacaccatggacacatgtcgtcaacgagtacacgacacgtaccgacgaatccagtacatacgcatctgatggacaagttgctcaaaatctcaataagatctcacttgtacttcgacgcggcaccctggactgcgcgtcagcttcagattattcattatcacgatatcgtgctctgattctcgatgactactggcacgtgtactcatcttgtcctactacactactactttttccattcagggagggaggtagggagggaggaagaaaatggagaaaagagagacaatttagaaaacgtagatacacaaagtaaacttctgaaacactccattttttaaaagacagacggaaaggaaagaaacacgaaaaagagagaaagaatgaggaaagaaacgaaggaaagaagggaaaaagaaacagagaggaaagaaaaaagaaggaaacacagggaacgaaagagaaataaagcccgaaggaacaaaggtcagaaagacagaaagaaggaaaggaagagaggaagataatcttaaagaaggagagaaaggaagaaaggaaagaagaacaacacgaaggagaggaagaaagaaaacagagataactacgtacgttcgttcatttacacacataaatacgacgcttttcatacgtaaaataaacgtctttatcgacgatcccttctttatagagcgatgtgtatttatttgtatgacacaaacacctacatctatcatacagaagtctatttccatacaaccgatacgtatttaccatacgcaagagtattcaatgcagagatacacgttgtcgtttgcatataagcgtacagaaacgtttacattaatacatataagtaaacgcgtggaaacgaaagaaataaaaaagcgaaatgagtcaacaggccgggcacggtggctcacgcccgtcatcccagcacttcgagaggccgaggtgggcgcatcacaggaggtcgggagttggagaccagcctgagcaacatggagagacacggcgtgccctactaaaaacacaaacatcagccaagccaggcgtgggggtgcctccctgtaatccccgctaatcgggaggctgaggcaggagaagcgctcgaacccgggaggcggaaggtgcggtgagccaagaccgcgccattgcactctagccgtggaaacaagagtgaaactctgtctcaaaaggacgaaacagaaagaaagaaaggaaggaaggaaggaaggaaaaaagaaagaaaagaaagaaggacaccaatgaaagaaaagaaagcaagaaagaaagaaagaaagacaaagcaaagaaagaaagaaaagaaagcaagaaagcacgacagcaagcaagcgggggatttctaaaggtctatcatgacgattgcccatcagacgaaataacatacatctactacatcgactcgtttaagttagaccacgactcggacatgtacaacaagaattagtatactactcgattaacatgaccacgtatacataatgtagaaatcgataacatagtcactaaattaaatggtttactattgagctagtcctcgtccggaaaattacactaaaactcaacacgttgtgtagtaacaacttgaactaccatatacgccacaatacaactactcttgaatactacatgtagacataatggtcaactatagtcgttcacctccacatgctatctggagcaccatcgaatgctactaggggagagttcgacggggcccaaaacgttttttttgttaaaaatagagtgttcaaagcagggccgatccgtcttggacaacgcagttagaaataatgtaatagggccccggttctatctggttggttttcggaactgagaccacgattaagaggcacgccggggggcattcatattgcgccgctagaggtgaaattcttggaccggcgcaagacggaccagagcgaaagcatttgcccaagaatgttttcattaatcaagaacgaaagtcggaggttcgaagacgatcagataccgtcgtagttccgaccataaacgatgccgaccggcgatgcggcggcgttattcccatgacccgccgggcagcttccgggaaaccaaagtctttgggttccggggggagtatggttgcaaagctgaaacttaaaggaattgacggaagggcaccaccaggagtggagcctgcggcttaatttgactcaacacgggaaacctcacccggcccggacacggacaggattgacagattgatagctctttctcgattccgtgggtggtggtgcatggccgttattagttggtggaacgatttgtctggttaattccgataacgaacgagactctggcatgctaactagttacgcgacccccgagcggtcggcgtcccccaacttcttagagggacaagtggcgttcagccacccgagattgaacaataacaggtctgtgatgcccttagatgtccggggctgcacgcgcgctacactgactggctcagcgtgtgcctaccctacgccggcaggcgcgggtaacccgttgaaccccattcgtgatggggatcggggattgcaattattccccatgaacgaggaattcccagtaagtgcgggtcataagcttgcgttgattaagtccctgccctttgtacacaccgcccgtcgctactaccgattggatggtttagtgaggccctcggatcggccccgccggggtcggcccacggccctggcggagcgctgagaagacggtcgaacttgactatctagaggaagtaaaagtcgtaacaaggtttccgtaggtgaccttgcagaagaatcatttacagaaccctgaaggctaaggcctctgaggttgccctcgttgtacgctttccttgaaaaaccatatcgtctatcgtgaagacccccaccatgaccccaaacccgaagaccataaaacaacatctacacaaaccccaccccggccacacaagaacacacccagagacccccccacccgcacatcccctagaaccggtatatcggccttaaaatcctcccgaaacccaacaacgagaccaccgagtaccccaacatgccaagaacccccaaacccgccagcaccccagaacgcgagccttcccgtaccccccaagggcactcacccaccaggacctccctaaaccctcccctgcaccggccaagggagcaacaggaaccgaaaaacgccccctagtagacaaaagacccccccaaccacccaatataaaatcccgacaaaacccagggccccgcccgcccacccccgcacccgccggagcccgccccctccggggaggaggaggaggggcggcgggggaagggagggcgggtggaggggtcgggaggaacggggggcgggaaagatccgccgggccgccgacacggccggacccgccgccgggttgaatcctccgggcggactgcgcggaccccacccgtttacctcttaacggtttcacgccctcttgaactctctcttcaaagttcttttcaactttcccttacggtacttgttgactatcggtctcgtgccggtatttagccttagatggagtttaccacccgctttgggctgcattcccaagcaacccgactccgggaagacccgggcccggcgcgccgggggccgctaccggcctcacaccgccacgggctgggcctcgatcagaaggacttgggccccccacgaaaggagaggaggagggggtcttccgtacgccacatgtcccgcgccccgccgcggggcggggattcggcgctgggctcttccctgttcactcgccgttactgagggaatcctggttagtttcttctcctccgctgaccctccctgctcccttccctccctcctttcctttcgccatctgtctcttttccccactcccctcctcccgtctgtctctgcgtggattccggaagagcctacgcattctgcctctccgtgtgtctgcagcgacccgcgaccgagtccttgtgtgttctttctccctccctccctccttccttccntccatccctgcttccgagaggcatctccaaacacccacacgccgtgggttgtcttctgactctgtcgggatcaaggcatagacgcgttttgggcaccgtttgtgtggggttggggcagagggcctgcgttttcggcctcggaaagagcttctcgactcccggtttcgctttcgcggtccacggcccgccctgccagccggatctgtctcgctgacgtccgcggcggttgtcgggctccatctggcggccgctttgagatcgtgctctcggcttccggagctgcggtggcagctgccgagggaggggaccgtccccgctgtgagctaggcagagctccggaaagcccgcggtcgtcagcccggctggcccggtgggccagagctgtggcgcgtcgcttgtgagtcacagctctggcgtgcaggtttatgtgggggagaggctgtcgctgcgcttctgggcccgcggcgggcgtggggctgcccgggccggtcgaccagcgcgccgtagctcccgaggcccgagccgcgacccgcggggacccgccgcgcgtgagagaaacagaaaggcagggagagagacagagagagacagacagatagacaggcagagaaagagagtaagacagaagataggcacagagagagagacagagagacacagaaagagaaagagagaggcagacagaatccagcgctagcaagcatggtcccgaggatcccagctcccagcagaggcacttttctcgcattccacgcccggtcccacgccagcgagccgggcttcttacccatttaaagtttgagaataggttgagatcgtttcggccccaagacctctaatcattcgctttaccggataaaactgcgtggcgggggtgcgtcgggtctgcgagagcgccagctatcctgagggaaacttcggagggaaccagctactagatggttcgattagtctttcgcccctatacccaggtcggacgaccgatttgcacgtcaggaccgctacggacctccaccagagtttcctctggcttcgccctgcccaggcatagttcaccatctttcgggtcctaacacgtgcgctcgtgctccacctccccggcgcggcgggcgagacgggccggtggtgcgccctggcggactggagaggcctcgggatcccacctcggccggcgagcgcgccggccttcaccttcattgcgccacggcggctttcgtgcgagcccccgactcgcgcacgtgttagactccttggtccgtgtttcaagacgggtcgggtgggtagccgacgtcgccgccgaccccgtgcgctcgctccgccgtccccctcttcgggggacgcgcgcgtggccccgagagaacctcccccgggcccgacggcgcgacccgcccggggcgcactggggacagtccgccccgccccccgacccgcgcgcggcaccccccccgtcgccggggcgggggcgcggggaggaggggtgggagagcggtcgcgccgtgggaggggtggcccggcccccccacgaggagacgccggcgcg

SEQ ID NO: 8903 - DNA, 260 bp, Homo sapiens
cccgtcccgggggttggccgcgcgggccccggtggggcggccacccggggtcccggccctcgcgcgtccttcctcctcgctcctccgcacgggtcgaccagcagaccgcgggtggcgggcggcgggcggcgaggccccacggggcgtccccgcacccggccgacctccgctcgcgacctctcctcggtcgggcctccggggtcgaccgcctgccgcccgcgggcgtgagactcagccggcgtctcgccgtgtcccgggtc

SEQ ID NO: 8904 - DNA, 368 bp, Homo sapiens
ctctctctctctctctctcgctcgctcgcttgcttgcttcctttcgtgctttcttgctttcccgttttctttctttctttctttctttcgtttctttcatgcttgctttcttgcttgcttgcttgctttcgtgctttcttgctttcccgttttcttgctttctttctttcttttgtttctttcttgcttgctttcttgcttgcttgctttcgtgctttcttgttttctcctttctttctttcttttgtttctttcctgcttgctttcttgcttgcttgctttcgtgctttcttgctttcttgttttctttctttcttttgtttctttctttcttgcttccttgttttcttgctttcttgcttgcttgc

SEQ ID NO: 8905 - DNA, 8147 bp, Homo sapiens
atctcatatactgaatagtcactctttaactccattaaataagatacagcaaggggaaggacagtatcacacaaaatggctttcaaattcaagtggggctatttgataattacactgtggcacagaggcagcttatgggcacttcttgttaaaacatctccatgttaccaacttctgacaagactcttagtataggcttgggcatcaacccaagattaaagtcaagaacctcaatcacttctctacaactacaggtgttgagtctttccagaaaaacaaaggtccaaatgaggcaccattcatcacagcttctttctcatttccatctagtgggtaagaggtttctcttcttaaaactacaatttcttaacctttacaagttatttaacattttctatcatattaaattagcaacataaaacattatcctttatctataaacttctagtctggttccctagagtttatatacacgtttttatttctaatctgcaagaaaaaaaattcctatttgttatttggtaacagagcattaaaagatactatacacatgtggtgcatatatatatatatatatacacacacacacacacacacacacaaaatacacttcaaaaagaagccaacacactttagccaaagtcttaagcttgcatagattttaaaaaaaagaagtatgaatacaatttttgttaaaatagaaaatggggaataaaagttatagaatgaagagagatcttttccaaacttttatttgtgcacattcaattgaaaaagataacttttacaggttctttggtgcccatattcagcatacaaaaatgtaaaagactattcacaaataaaacacattagctcaaaatggaaaaaaataacaatgacgacaataaaacaatctaaggtagtgcacactgtgacagctctgcttatggggacatgagaattactgcgaaaataaatagaatgtccttttgtaaaagcagcaatatcatgtcttgtaaacttccttttatattacagcaaggtttggaataaaatccaaagggactggagcttacactgtagccgtgaatgaataaaagagtctatttcctcaattattgttggtccagttttccttttgagtccaatgtgcagcaggtttaaaaggtgctcagttagagattctaaccaattaagtggtgaattataaaatttctttcctgctttcaaacacaaatgggtaaatgtgttccacagcagtagcaacagcctttacattgggccctgtaataaacacaatggaggaaggagtgagaagagttggaaaagggagcactaggaaaaactgattttccagaattaaaaatattcaagtggtatagaatatcaagttaactgttaaaaaaaagaaaactagacatataattatacacatagccataataagtaaaagtaatacagattttgttctgggcaattaaaggacatatgaaacacaaaatgaggttattcactttgttttagggcatacaaactatcatggactaatataaaaagcactgtaatataatatgtacatgaaaggaaggagtaacaaatgggactaaataacagctatcctttaagtcactatcatctggcttctggttaggctacaccagaggctcagggatatggaggaacacagcagagtgaaacaaagctgctaccaaaatgttgggaaaccagaatgctggtttaaaaatccccacagatttaccaccactgggtatccacatatttattaccaatctggtcatttcaccctcagagcgtatacaagtcaatagaaaacaaaaaaagcacaaggctacgaggtgaccatgcattatgctaattcttgaacaactttataaaaatgtaatctttcatttaaatcgctaaaaagaaacataaaaaaggacaatgaaaactattctcataaaattttgaataaaaatggcttcaccaatacacacttaacctcttttgaaagacccaggaaactaacaaatccacccactgtaaactctctgaaagtcctaaccacacatcctatcttggtcaggtccttcctgactcactttacccccaccttgctatgctttgttcatgggaaccaattcagtaacatttcataggctattcctgatctaagtaaataatgcatactgcttaaccaggtgaattgtcttcagtttgttattgttttgtttaatatctagtaactcagtaaatacagagttttacatatgcattgttttattatatacttagtagagattgttcaataggctttgtggcttctcagacatccatgctccaaagtgtagaaacagagagctgaaagaagggaacaaacagactcgtctcctatcatcccatatttaagatgcaggtgggatcttgggaatacgttttgaaagtccccaaggaagatggaaaaacccatgggatgagtcaaaactaaagtttatttgttgagagactaaattattttcctctgtggattgaagaaagaaaaaacaaagctcaaggacattaaagacattttctttaattcttttttgcctaaggttgggcctgactcccaagcaatgcctctgtacaatttataatcatagtaccattaaaatgtcacacagcatgctaatgctactctctgacatgaatgcctagttttctgaaaccaccctttctccaaataaagattaaaagatatagcaagacaaacataacaaacaggtaccaattatatttaatattttgcttatgtaaaacctctgtgaaatttatgagtttctcatgagaattttaaatgtaagatatcatgaatttacaaaaaaaaaatcatactatggatacatataccagaaaatatatgtgtgtatatatatatatatatatatatatatatatatatatatatattttttttttttttttttttttagacagagtctcactctgttgccagtctggagtgcagtggtgcgatctcagctcgctgcaacctccgcctcctgggttcaaatgattctcttgccttagcctcccgaatagctgggactacaggcgttcaccaccacgcccagctaatattttgtatttttagtagagacggggtttcaccatgttggccaggatggtcttgatctcttgaccttgtgataagcccgcctcagccttccaagtgctgggcttacaggcatgaaccaatgcacctggcctaccagaatatttttaaagctccaactggaaactactcaaatgcccaataagaacgaatgatctacatacagctacatagaatataatatagatgaaactcactaagataatgctgagtgaaaaaagacacaaaatagtaagtgtaacatttataaatagtacaaaagtaggcaaaatgcatctagtgttaaaagtcaggagactggttcctctaaagggcagaagtgactgaaaggaacaaatcacacattatttctatcttggtatgagcatcttgtatcattcaatccataattgataagtgtggtttcaatatcatagaatacctgttactgtgatacttcctgttgaaaaaatctgtaatgtagctcttagagattttatccgatagcacacagcaggatgaagttcaggttcgtaactacacaaaataagccacaattaatataaatatttataccctgactagtaatttcaaatttggtaatttctcaagataaattgcttcaaagacttacctggcatgaggtctattgttctttgtgaattctggcaaacggatttcaaatggcatgttacacactgccagaacgttaacaaccttaaaatctgtaaatattacctttaggagagaagtaaaattcaataaatttattttgaaacaaacaaacaaaaaatctgctcataatggcaatccttaaaaacaagagcaaacaagataaaacaaaaacattttaagtgtatgtttagtactgtaagttgtgtagcatggaaagctttaattcagttttttaaaaagctcaaaaactccattaaaaaaattaaaaactgaggtatttgcatgatcaaaacagtatgggtctttctaatcatatgtttaattttttaatactttaagtgaaatatttaaaactactgagaaaggagagagaatagtgagggaaaaaaaatttaagtccaggtcatcctgctagagtaaaaatggaaaagatgtcactttaaagtcagtaaatacagagtgtacactgggctccaaaagtcagatgtttttctcatatgcaataaggcaaaatgacatttctgtgagattagctagatgtttattttctttctggggatagagtgataaatttgtttctaactaattgggatttctctcaacacttctaatgttacactaagaaaagaagttccaaggctgaaaataatgctgttaacattaataactttggccactccaaccaacatcttcgtttcatctcattatcttttcaaacattcctcctaaaaccacaattttgggtgagcgaactatccttcaactcagccttgcacacagcagttgcgcaaagccaggaaaccgcaaagtggcagcactctcaaatcacagtacaactcaagcctctctctactgccacccttctcaagcaccaacccccactccccaccagccgttcagtctcttcctatcaccctctacttcagagagactgagtcatcagagggaaaggtaacttcctatccccacttctacaaacttgtctcaatcccaaacagccttgccctcatcttcagggaccattctcatctttatctttcatttattcatcatttgcaagtgacctagcaagtccataatatgtaatcgttttattcaaaggtatacctctatcaagttatagtgatgaggctgacatgccagtgacagtcacgttacaagtgtgagagcctgccagctggtgtgtccatgtcaacggcctctgccattctctattcaccattctgacctggcattcttgagatgaccaaaaaccattttgtttgtgtacgtcagaggtgaaaacacttaaaaaagagttgaaaaggaaattaacttgtgaggaaacaagtctctttatgggaaaggaattagggaaaaagctaggatcctttacaaatacccacatagccaaattttgctactaattttcacactgaagggcagtattaaaaaacctagaaaaagtttaatcataagaatagtacgcatagtgatttcttgagtctattacaatttttaattctataaaaataagtccttgaatatttgtagtttagatactatttgaaaacgttacctgaaaacctagtttctgcagactacgggctaagcgtctggcaccaaatttagcttcttcttcactacggttttaaggaaagaaaaagattatcagttacacaggaaataaatgttatactgaggaacataacaaactttacatatgattttgctgttaagtctaggaaaatgtcctttccatgagggaaaaagtaaaaaataaaaacaaaaaacccaagtagcatttaccttgttgctccagtgcaaataatttttcctgaggaccaaattgtagctgtaattctaggttttctaagcttcattaatactttctggggggaaaaaaaatctgattacctcataagcattatttttcacataaggttctgttctatatagtcatattaatgtccaaatactactctccaagcttatccaagactgcaataactgctctccaaatctaccattctgaaatcaagtacaataccaaacacaaagaacatattaatccaaaaagacatttgattaattaaaaatacaaggtgtatagaaatctctcactctatatacttgaaatcaatgtactccaagtatataaacaattcaactctcattccaccccagtcatataactggaacttgcatggttcttcacacacaccaaatctgttcatgcttcagaagctttgcagtagctgttgctttcatttggaatattatcccctcaatattctcacttcattcaggtctcttaccagatgtcacctcctgaagagaggccctccctaatcatttccctgaaacacccatcccttcattgctttctaattcctaattctgctttctgctgcttcatggtacccatcactactttatattgcatcctagagttgagatgcttattacatactcaagttcaacatcggcatcttgaataaaggagaaatgttggagctggagatgtaattggaaattcatttaaagctatgggttacaatgaaataactacagagtgtgtataaataggtcaaggactaagctccaagaaaatatgcaaatttaaattttcattccaacttttcattaatggaaatatttgttagatgctcattctatgtaagaaagacataaatgctcactgactaacataaatgaatcagatgtttctgcttaaaatttttgttacattttgtgttcttcattctctgtcatatgccatattatcaaactagaaagctattaaatctgggcagactcaaaattcaccaaagatcaagataaaatttgaactaaaatacattataaaatttcatatacaagtgactgagaaacacttgactgagtttatcctacatttaattgtctctcaccatcaccagcttgtctatcaactcagaattttcaattaacctgccttaaaaaaactacttcctttccatatgtcatgctgaagtaccaaagcagtgttaggcatattcctctctaaacttttgagcagacatatttattacttttctaaaggaaggatgggattgctgacaaacttgaaaatctttgtgagtcactgaaatttttaattgaatttaattcatctttacttagtttctagtactaagaattaatgacggccaggcacggtggctcacgcctataatcccagtactttggaaggctgaggtgggtggatcacaaggtcaagagattgagaccatcctggccaacacggtgaaaccccgtctctactaaaaatacaaaaattagctgagcgtggtggtgtgcacctgtaatcctagctacttgggaggctgagacaggagaattgcttgaacctgggaggcagaggttgcagtgagctgtgatcatgccactgcattgcactccagcctggcggaagagtgagactccgtctcaaaaaaaaaaaaaaaaaaaaaaaattaattaattaatggcaatttacataggtatcctggcatctaatttttaaagctaaatagagccttgagatacattcttaattttcataacaaatgtgtaaaatacatattcctctcgtcaatctttggtttataatgacatccaatgtcttttataatgttaatctcaaaacactaaggttttattattacttattaatattcaggctttaaaatattacaggtttaacaaaaactaaaatttaagatgtccaggttaagatataaatcatattattttcagcagtttgttatgaaagaaaaccatctacctttgttaaagaatatgacaattaaaatattataaaaattataatatatattaaggcatcattcaaatataattcaaatataatcatatttgaataggtacatgtgcgaatataaaggtccctttcttcagttaaaataaattgagagagcaataaaatgtctctgtaaccaatgagttctttgctgattcaggtaccagcactctatgtacaaaagcttgcacctccatgagaggagggattgcttttacagggctcacttctgtatccaggacaaccagcacatggtaaggtgctcataaactatctgtagaatgaatacattttagtattagtcatagaactataaaattaggctatgtagtacaaatacgaaaactcagatacttactccaacatcacgtttataaattacatttgctccttccaaagcaatcttccttaagtttaaatgacatcttgttctaaaaacacagactacatttgtaattagaatgtccaatgcaacatcactgtctgcatccattggggtggttttaaaatttagctttccaccacgaagatcacatc

SEQ ID NO: 8906 - DNA, 8145 bp, Homo sapiens
atctcatatactgaatagtcactctttaactccattaaataagatacagcaaggggaaggacagtatcacacaaaatggctttcaaattcaagtggggctatttgataattacactgtggcacagaggcagcttatgggcacttcttgttaaaacatctccatgttaccaacttctgacaagactcttagtataggcttgggcatcaacccaagattaaagtcaagaacctcaatcacttctctacaactacaggtgttgagtctttccagaaaaacaaaggtccaaatgaggcaccattcatcacagcttctttctcatttccatctagtgggtaagaggtttctcttcttaaaactacaatttcttaacctttacaagttatttaacattttctatcatattaaattagcaacataaaacattatcctttatctataaacttctagtctggttccctagagtttatatacacgtttttatttctaatctgcaagaaaaaaaattcctatttgttatttggtaacagagcattaaaagatactatacacatgtggtgcatatatatatatatatatacacacacacacacacacacacacaaaatacacttcaaaaagaagccaacacactttagccaaagtcttaagcttgcatagattttaaaaaaaagaagtatgaatacaatttttgttaaaatagaaaatggggaataaaagttatagaatgaagagagatcttttccaaacttttatttgtgcacattcaattgaaaaagataacttttacaggttctttggtgcccatattcagcatacaaaaatgtaaaagactattcacaaataaaacacattagctcaaaatggaaaaaaataacaatgacgacaataaaacaatctaaggtagtgcacactgtgacagctctgcttatggggacatgagaattactgcgaaaataaatagaatgtccttttgtaaaagcagcaatatcatgtcttgtaaacttccttttatattacagcaaggtttggaataaaatccaaagggactggagcttacactgtagccgtgaatgaataaaagagtctatttcctcaattattgttggtccagttttccttttgagtccaatgtgcagcaggtttaaaaggtgctcagttagagattctaaccaattaagtggtgaattataaaatttctttcctgctttcaaacacaaatgggtaaatctgttccacagcagtagcaacagcctttacattgggccctgtaataaacacaatggaggaaggagtgagaagagttggaaaagggagcactaggaaaaactgattttccagaattaaaaatattcaagtggtatagaatatcaagttaactgttaaaaaaaagaaaactagacatataattatacacatagccataataagtaaaagtaatacagattttgttctgggcaattaaaggacatatgaaacacaaaatgaggttattcactttgttttagggcatacaaactatcatggactaatataaaaagcactgtaatataatatgtacatgaaaggaaggagtaacaaatgggactaaataacagctatcctttaagtcactatcatctggcttctggttaggctacaacagaggctcagggatatggaggaacacagcagagtgaaacaaagctgctaccaaaatgttgggaaaccagaatgctggtttaaaaatccccacagatttaccaccactgggtatccacatatttattaccaatctggtcatttcaccctcagagcgtatacaagtcaatagaaaacaaaaaaagcacaaggctacgaggtgaccatgcattatgctaattcttgaacaactttataaaaatgtaatctttcatttaaatcgctaaaaagaaacataaaaaaggacaatgaaaactattctcataaaattttgaataaaaatggcttcaccaatacacacttaacctcttttgaaagacccaggaaactaacaaatccacccactgtaaactctctgaaagtcctaaccacacatcctatcttggtcaggtccttcctgactcactttacccccaccttgctatgctttgttcatgggaaccaattcagtaacatttcataggctattcctgatctaagtaaataatgcatactgcttaaccaggtgaattgtcttcagtttgttattgttttgtttaatatctagtaactcagtaaatacagagttttacatatgcattgttttattatatacttagtagagattgttcaataggctttgtggcttctcagacatccatgctccaaagtgtagaaacagagagctgaaagaagggaacaaacagactcgtctcctatcatcccatatttaagatgcaggtgggatcttgggaatacgttttgaaagtccccaaggaagatggaaaaacccatgggatgagtcaaaactaaagtttatttgttgagagactaaattattttcctctgtggattgaagaaagaaaaaacaaagctcaaggacattaaagacattttctttaattcttttttgcctaaggttgggcctgactcccaagcaatgcctctgtacaatttataatcatagtaccattaaaatgtcacacagcatgctaatgctactctctgacatgaatgcctagttttctgaaaccaccctttctccaaataaagattaaaagatatagcaagacaaacataacaaacaggtaccaattatatttaatattttgcttatgtaaaacctctgtgaaatttatgagtttctcatgagaattttaaatgtaagatatcatgaatttacaaaaaaaaaatcatactatggatacatataccagaaaatatatgtgtgtatatatatatatatatatatatatatatatatatatatattttttttttttttttttttttagacagagtctcactctgttgccagtctggagtgcagtggtgcgatctcagctcgctgcaacctccgcctcctgggttcaaatgattctcttgccttagcctcccgaatagctgggactacaggcgttcaccaccacgcccagctaatattttgtatttttagtagagacggggtttcaccatgttggccaggatggtcttgatctcttgaccttgtgataagcccgcctcagccttccaagtgctgggcttacaggcatgaaccaatgcacctggcctaccagaatatttttaaagctccaactggaaactactcaaatgcccaataagaacgaatgatctacatacagctacatagaatataatatagatgaaactcactaagataatgctgagtgaaaaaagacacaaaatagtaagtgtaacatttataaatagtacaaaagtaggcaaaatgcatctagtgttaaaagtcaggagactggttcctctaaagggcagaagtgactgaaaggaacaaatcacacattatttctatcttggtatgagcatcttgtatcattcaatccataattgataagtgtggtttcaatatcatagaatacctgttactgtgatacttcctgttgaaaaaatctgtaatgtagctcttagagattttatccgatagcacacagcaggatgaagttcaggttcgtaactacacaaaataagccacaattaatataaatatttataccctgactagtaatttcaaatttggtaatttctcaagataaattgcttcaaagacttacctggcatgaggtctattgttctttgtgaattctggcaaacggatttcaaatggcatgttacacactgccagaacgttaacaaccttaaaatctgtaaatattacctttaggagagaagtaaaattcaataaatttattttgaaacaaacaaacaaaaaatctgctcataatggcaatccttaaaaacaagagcaaacaagataaaacaaaaacattttaagtgtatgtttagtactgtaagttgtgtagcatggaaagctttaattcagttttttaaaaagctcaaaaactccattaaaaaaattaaaaactgaggtatttgcatgatcaaaacagtatgggtctttctaatcatatgtttaattttttaatactttaagtgaaatatttaaaactactgagaaaggagagagaatagtgagggaaaaaaaatttaagtccaggtcatcctgctagagtaaaaatggaaaagatgtcactttaaagtcagtaaatacagagtgtacactgggctccaaaagtcagatgtttttctcatatgcaataaggcaaaatgacatttctgtgagattagctagatgtttattttctttctggggatagagtgataaatttgtttctaactaattgggatttctctcaacacttctaatgttacactaagaaaagaagttccaaggctgaaaataatgctgttaacattaataactttggccactccaaccaacatcttcgtttcatctcattatcttttcaaacattcctcctaaaaccacaattttgggtgagcgaactatccttcaactcagccttgcacacagcagttgcgcaaagccaggaaaccgcaaagtggcagcactctcaaatcacagtacaactcaagcctctctctactgccacccttctcaagcaccaacccccactccccaccagccgttcagtctcttcctatcaccctctacttcagagagactgagtcatcagagggaaaggtaacttcctatccccacttctacaaacttgtctcaatcccaaacagccttgccctcatcttcagggaccattctcatctttatctttcatttattcatcatttgcaagtgacctagcaagtccataatatgtaatcgttttattcaaaggtatacctctatcaagttatagtgatgaggctgacatgccagtgacagtcacgttacaagtgtgagagcctgccagctggtgtgtccatgtcaacggcctctgccattctctattcaccattctgacctggcattcttgagatgaccaaaaaccattttgtttgtgtacgtcagaggtgaaaacacttaaaaaagagttgaaaaggaaattaacttgtgaggaaacaagtctctttatgggaaaggaattagggaaaaagctaggatcctttacaaatacccacatagccaaattttgctactaattttcacactgaagggcagtattaaaaaacctagaaaaagtttaatcataagaatagtacgcatagtgatttcttgagtctattacaatttttaattctataaaaataagtccttgaatatttgtagtttagatactatttgaaaacgttacctgaaaacctagtttctgcagactacgggctaagcgtctggcaccaaatttagcttcttcttcactacggttttaaggaaagaaaaagattatcagttacacaggaaataaatgttatactgaggaacataacaaactttacatatgattttgctgttaagtctaggaaaatgtcctttccatgagggaaaaagtaaaaaataaaaacaaaaaacccaagtagcatttaccttgttgctccagtgcaaataatttttcctgaggaccaaattgtagctgtaattctaggttttctaagcttcattaatactttctggggggaaaaaaaatctgattacctcataagcattatttttcacataaggttctgttctatatagtcatattaatgtccaaatactactctccaagcttatccaagactgcaataactgctctccaaatctaccattctgaaatcaagtacaataccaaacacaaagaacatattaatccaaaaagacatttgattaattaaaaatacaaggtgtatagaaatctctcactctatatacttgaaatcaatgtactccaagtatataaacaattcaactctcattccaccccagtcatataactggaacttgcatggttcttcacacacaccaaatctgttcatgcttcagaagctttgcagtagctgttgctttcatttggaatattatcccctcaatattctcacttcattcaggtctcttaccagatgtcacctcctgaagagaggccctccctaatcatttccctgaaacacccatcccttcattgctttctaattcctaattctgctttctgctgcttcatggtacccatcactactttatattgcatcctagagttgagatgcttattacatactcaagttcaacatcggcatcttgaataaaggagaaatgttggagctggagatgtaattggaaattcatttaaagctatgggttacaatgaaataactacagagtgtgtataaataggtcaaggactaagctccaagaaaatatgcaaatttaaattttcattccaacttttcattaatggaaatatttgttagatgctcattctatgtaagaaagacataaatgctcactgactaacataaatgaatcagatgtttctgcttaaaatttttgttacattttgtgttcttcattctctgtcatatgccatattatcaaactagaaagctattaaatctgggcagactcaaaattcaccaaagatcaagataaaatttgaactaaaatacattataaaatttcatatacaagtgactgagaaacacttgactgagtttatcctacatttaattgtctctcaccatcaccagcttgtctatcaactcagaattttcaattaacctgccttaaaaaaactacttcctttccatatgtcatgctgaagtaccaaagcagtgttaggcatattcctctctaaacttttgagcagacatatttattacttttctaaaggaaggatgggattgctgacaaacttgaaaatctttgtgagtcactgaaatttttaattgaatttaattcatctttacttagtttctagtactaagaattaatgacggccaggcacggtggctcacgcctataatcccagtactttggaaggctgaggtgggtggatcacaaggtcaagagattgagaccatcctggccaacacggtgaaaccccgtctctactaaaaatacaaaaattagctgagcgtggtggtgtgcacctgtaatcctagctacttgggaggctgagacaggagaattgcttgaacctgggaggcagaggttgcagtgagctgtgatcatgccactgcattgcactccagcctggcggaagagtgagactccgtctcaaaaaaaaaaaaaaaaaaaaaaaattaattaattaatggcaatttacataggtatcctggcatctaatttttaaagctaaatagagccttgagatacattcttaattttcataacaaatgtgtaaaatacatattcctctcgtcaatctttggtttataatgacatccaatgtcttttataatgttaatctcaaaacactaaggttttattattacttattaatattcaggctttaaaatattacaggtttaacaaaaactaaaatttaagatgtccaggttaagatataaatcatattattttcagcagtttgttatgaaagaaaaccatctacctttgttaaagaatatgacaattaaaatattataaaaattataatatatattaaggcatcattcaaatataattcaaatataatcatatttgaataggtacatgtgcgaatataaaggtccctttcttcagttaaaataaattgagagagcaataaaatgtctctgtaaccaatgagttctttgctgattcaggtaccagcactctatgtacaaaagcttgcacctccatgagaggagggattgcttttacagggctcacttctgtatccaggacaaccagcacatggtaaggtgctcataaactatctgtagaatgaatacattttagtattagtcatagaactataaaattaggctatgtagtacaaatacgaaaactcagatacttactccaacatcacgtttataaattacatttgctccttccaaagcaatcttccttaagtttaaatgacatcttgttctaaaaacacagactacatttgtaattagaatgtccaatgcaacatcactgtctgcatccattggggtggttttaaaatttagctttccaccacgaagatcacatc

SEQ ID NO: 8907 - DNA, 2936 bp, Homo sapiens
caggcagctttctccagagacctaatggcctcaacaccttctgaacgtggatagtgccagaacacttaggagggtgtctttggaccaatgcatagttgcgactcctgtgctctcttttcagtgtcatggaactggttttgaagagacactctgaaatgataaagacagcctttaatccccctcctccccagaaggaacctcaaaaggtagatgaggtacaaggtcctaagtgatctctttttctgagcaggatatcaggttaaaaaaaaaaagttactggctggtttaatactttctaccttcttcacagagcagcctttgaatagactatgtcctagtgaagacatcaacctccgccttaagctatgtatgtatggaggccagtcgcagctttattatgcagacacacaagtggtctggacatgagggtacagtttctgcctaccaagacactacttgcactggatcttacgcaaaaaagaaccagaacacacagtgtggacaactgcccatatattctatctagattaggagagggtcctggctaggattttagtggtaattcctagttacattcaacaagtataaagattatagagcttattttatgaactataaactataatttaatgcaaaatatccttttatgaatttcatgttaatattgtgaaatattaaaataattccacaatagttgagaaaaatgagcatttttttccatttttaaaaaatgcatagaaaagacaattttaaaatcctgggaccatatttatttagaagtagctgttagtaaaacattagaaaaggagtcaggccattaggttatttatccaaatctctaagcaattaggttgaagttattaagtcaagcctagaaaagctgcctccttgtaaggctttcatgacaatgtatagtaatccacagtgtccaattcttcacactcctcaggaatatcactacctcaggttacggtacacaggctataattgatgatgatgttcagataactgaagacacaataaatgacattcagacatcaggacaattccctcatgttcttttctatgatggccacctgtaccagcaacgtgggtttcacccacacaacgatgaactgttctcttacttctccagttgattttaaagacttgttaagaggtcttactaataaaatttgggtatgatagaaaatccacaatcaaatcttgaaccaaataacatattaaattactaatatttaagtgatggaagacacacaaaaaacttaaaagcacgaacaacctaacttgaaaaagaattttaaaatatgattaacctgaagaaaagagaatcctaagagccaaagctcctttttatttagcttggaattttcctattggttcctaacaaactgtcccaatgtcatataaggaaacatgatctattacattcctttataacaatgtggagagactataaacctatgtaagtagtaaaactatatcagagactcaggagactgactaaaaggcctggatctgcagtgtattatctgtataaaaattggcagggggaagctaaaaggaaaggagattggagatctcaattctatcatggtgtatttcatacgcaaatcagagcatgcattgttttttgtttttggaaagagaagggaagtgtgttctgccccatgtttccttccgtgtttatagttcaaactctatatatacttcaggtattttttgtttagcccttcattataaatgggcaggaaattgtttatcaacctagccagtttattactagtgaccttgacttcagtatcttgagcattcttttatatttttcttttattatcctgagtctgtaactaaacaattttgtcttcaaatttttatccaatatccattgcaccacaccaaatcaagcttcttgattttcaaaaataaaaagggggaaatacttacaacttgtacatatatattcacagtttttatttataaaaaaaatttacagtacttatggagagccagcagaagacatcagagcactcacttcttcccatctttgttaaggttagcgaattacccatggacactgttaggtgaggctcattcggcagccctgaaaacaaacctggtcacactgtctttaccctctcccttcagataaagcacttcgattatctattgatctgcccagttttcaagtcatgcgaatactaaaaaggttacatcatctggatctgtaccttggctatataagcatgttttccccctattctatgtttctttttttggtgaacattgaaaaacaggaggtgacttattactgttaattaaaactaaatgaaaaatgtcaagtctttaaaacagtgagcttgtaactctttcatgtaattttattctctatgaatttggctatcctactgaatcttaaaataaaggaaataaacacttttttttaaaaaaaaaggaaaaatacaagtctaaaaatctcaatgaaatatttcacaagaaggaaaaatgtaagttagcctttgctttccactttggaataagcaggaggttagggaaggcattgagaagaaaaaagataaaaataatatgtgttgttcagtgcagtgcctaagctaggttttcaagattttataatacagtaaggaaaatgtactatatatggagattaggatgttgcaatttttccacaaaggtttaaaaacattttggaaatacaagtttttgtggaacattgtgttggaatattgtccccattaagtttctcctgagaagctaattggactctccactcagctttatttctaggtataatcactgttggttacactaaactcctaaacctaaatgacagggcacaactacagcttgatcctgtattaccacatcagggctcctgggtgagccagagacactgtttcataaatgcatatttatta

SEQ ID NO: 8908 - DNA, 2936 bp, Homo sapiens
caggcagctttctccagagacctaatggcctcaacaccttctgaacgtggatagtgccagaacacttaggagggtgtctttggaccaatgcatagttgcgactcctgtgctctcttttcagtgtcatggaactggttttgaagagacactctgaaatgataaagacagcctttaatccccctcctccccagaaggaacctcaaaaggtagatgaggtacaaggtcctaagtgatctctttttctgagcaggatatcaggttaaaaaaaaaaagttactggctggtttaatactttctaccttcttcacagagcagcctttgaatagactatgtcctagtgaagacatcaacctccgccttaagctatgtatgtatggaggccagtcgcagctttattatgcagacacacaagtggtctggacatgagggtacagtttctgcctaccaagacactacttgcactggatcttacgcaaaaaagaaccagaacacacagtgtggacaactgcccatatattctatctagattaggagagggtcctggctaggattttagtggtaattcctagttacattcaacaagtataaagattatagagcttattttatgaactataaactataatttaatgcaaaatatccttttatgaatttcatgttaatattgtgaaatattaaaataattccacaatagttgagaaaaatgagcatttttttccatttttaaaaaatgcatagaaaagacaattttaaaatcctgggaccatatttatttagaagtagctgttagtaaaacattagaaaaggagtcaggccattaggttatttatccaaatctctaagcaattaggttgaagttattaagtcaagcctagaaaagctgcctccttgtaaggctttcatgacaatgtatagtaatccacagtgtccaattcttcacactcctcaggaatatcactacctcaggttacggtacacaggctataattgatgatgatgttcagataactgaagacacaataaatgacattcagacatcaggacaattccctcatgttcttttctatgatggccacctgtaccagcaacgtgggtttcacccacacaacgatgaactgttctcttacttctccagttgattttaaagacttgttaagaggtcttactaataaaatttgggtatgatagaaaatccacaatcaaatcttgaaccaaataacatattaaattactaatatttaagtgatggaagacacacaaaaaacttaaaagcacgaacaacctaacttgaaaaagaattttaaaatatgattaacctgaagaaaagagaatcctaagagccaaagctcctttttatttagcttggaattttcctattggttcctaacaaactgtcccaatgtcatataaggaaacatgatctattacattcctttataacaatgtggagagactataaacctatgtaagtagtaaaactatatcagagactcaggagactgactaaaaggcctggatctgcagtgtattatctgtataaaaattggcagggggaagctaaaaggaaaggagattggagatctcaattctatcatggtgtatttcatacgcaaatcagagcatgcattgttttttgtttttggaaagagaagggaagtgtgttctgccccatgtttccttccgtgtttatagttcaaactctatatatacttcaggtattttttgtttagcccttcattataaatgggcaggaaattgtttatcaacctagccagtttattactagtgaccttgacttcagtatcttgagcattcttttatatttttcttttattatcctgagtctgtaactaaacaattttgtcttcaaatttttatccaatatccattgcaccacaccaaatcaagcttcttgattttcaaaaataaaaagggggaaatacttacaacttgtacatatatattcacagtttttatttataaaaaaaatttacagtacttatggagagccagcagaagacatcagagcactcacttcttcccatctttgttaaggttagcgaattacccatggacactgttaggtgaggctcattcggcagccctgaaaacaaacctggtcacactgtctttaccctctcccttcagataaagcacttcgattatctattgatctgcccagttttcaagtcatgcgaatactaaaaaggttacatcatctggatctgtaccttggctatataagcatgttttccccctattctatgtttctttttttggtgaacattgaaaaacaggaggtgacttattactgttaattaaaactaaatgaaaaatgtcaagtctttaaaacagtgagcttgtaactctttcatgtaattttattctctatgaatttggctatcctactgaatcttaaaataaaggaaataaacactttttttttaaaaaaaaggaaaaatacaagtctaaaaatctcaatgaaatatttcacaagaaggaaaaatgtaagttagcctttgctttccactttggaataagcaggaggttagggaaggcattgagaagaaaaaagataaaaataatatgtgttgttcagtgcagtgcctaagctaggttttcaagattttataatacagtaaggaaaatgtactatatatggagattaggatgttgcaatttttccacaaaggtttaaaaacattttggaaatacaagtttttgtggaacattgtgttggaatattgtccccattaagtttctcctgagaagctaattggactctccactcagctttatttctaggtataatcactgttggttacactaaactcctaaacctaaatgacagggcacaactacagcttgatcctgtattaccacatcagggctcctgggtgagccagagacactgtttcataaatgcatatttatta

SEQ ID NO: 8909 - DNA, 20300 bp, Homo sapiens
cttctgaacgtgtgaaattactaacgtaatacacttccaagagtgtgttcttagagaggtctgacaggtatttctgacatttcaccatgttcactgtattatagtttgcttttcagaaatggcatatatttatttaagatataagttatcaagtctgttgttacagtttgtgttactagttattatctttctgtagcaaaatgaccaaaatacatgcattatacatattatttccaagaaatgattttattaaaataatttctaattcaaattttagaccatttatttaaaatgctttctgtttgcatgccttcttaaagattgaaataaagtggcctttattattatttcctctagaaatgaagaggtacctaaatcagaattgtggaaactgaggtgctcatattgtaacccacaaatgtgtaacaatgtcatttccactggactttagggaaaagagtgcaaattcggaaagcacctcaagctgtttcagatacagttcctgagaggaaaaggtcaacccccatgaaccctgcaaatacaattcgaaagacacatagcagcagcaccatctctcagaggccatacagggacagggtgattcacttactggccctgaaggcctacaagaaaccggagctacttgctagactccagaaagatggtgtcaatcaaaaagacaagaactccctgggagcaattctgcaacaggtgaggacagctggagagaggtccttcctgcttaccttcttgttaaaatgttcatttaaaaaagcttgttgtcattattatcattattattgagatagagaaattttaggattattttgatcagtggtatgtgaaatacaactcctgaatattaagttaaatcatctcattttaagcacttaattaaaaactagttgaaatgtgagcattgtctttatttgggaccaacaaattttgttctcaaattccattaaaaagaaagtaagaagtgtttgttatctgtttttagtgttgaatacactaaagtattgccttaatttgtattgattattgtcggtgaaattgtgcaatgtattctattggcctttgattggtataagccagaacattttttgcctactaaatagtttaaaatgtatcttgccccacatactttgtgctgcccttattactctatctttttctgccactaagtgtgccaagatcagtcatttgtctgcataaaagcatatgaaattgtaatgtattagcagtgatcccatactttatcacaagcttacgtgtaagaaagtaggccattgttttttaaagtcagtggtttgttagactataacctcctacatatttttttcttccttccttctgtccatctgtcataaatctttatgagcattcagatcgaccataaatggtggtccatcttttttactttttctaaggaaataacatttccaaagaagttattctgaatctcatcatttaaaaaaaaaaaaaaccctacaggttttgatctgttattcaaagagtaacatttcaagtctatttttttatccattatctcttacattcacaacataatactaaatgttatgaaagggtaagaccattgtctccaattcaggttagccagtccccaaggtatctcaatcaatcttaaggatctttattaagtcctttagcactttttggaaataatttaaatccatatgtcacatagcagttttaagagctcaaaagaaagagaataaatgagaatgagggtgtgtgtgttcagtttgatatctggagaagcagtgagagtcaggttacaaatcacaaagcatttggtaactgcatctccagaaaagttgtgaattagcttctcagtttgataatggagaaggcaaaatgactgcagaggcaattcacacatagactactattgatatatggcagtaattatgtgattgtgtatatacatatagatatctaaatatatatatatatacgtgtgtgtgtgtgtgtgcgcgtatctcaaagtgtagataaactttacccccaagcgaggcatgagagttattagtgttgatcatttgatagaatctagagcatcatctcatcctggtaacatattagaatcccttgggtagcctttaaaacatgccagtgcctgaactccacctgagaccaacaaaagccaagtatctgaaggtggggcctaggcactcatattctatatggccctaatgattctaatatacgagctgaaaccactggcctagtgaaaacacagaaaggctaacaacatcgaccattttttgagcatatactatgtgccaggcacagtgctaggcatttcacgtgcacgatctcatttatcctcccaagaaagatatcaggcatattcataactttgacataaaccaattatacctaaattccctttcctgaacattgctagcagctaacaaaaaaaaataaaatgactttgctctaataaaactgaccaaaagtaggcaccagagaaaagaagagccgcaagatacatacaaatcatcccaaaattggttattctgtcccagacaaactagttgggaaacaagttacctaaaataattaatcaggctttgcctgtgccagtagagataatttgcttatttgttacttacacagtagttttcagaaccctgtggacattattaattcatcaaagtaataggtttttaaaataaactaagatgttggctcccggtaaaatttgtacctaaatttaaaagtgcttaacatccaccaggaaatttgtgtattgctgtttattattaaactggtatgtattaataaaacctttttttcttagaatgaccttttatggaaaaactaaattttaacaatcagaaactagataaagttgaataatgtatccagcttaacatttggatatttggctcaagctcaacattcattcattcaattcaacttattaagtacctacagtgtaccagacactgttttaaatgctggaatcccaaagtaaccccaatagaaaccctgccctcatggagcttattcatgagacaatttcaggaccagtgaggagttgaaaggagctggggaaggaatcctctgctttaagtggagagatcagggaaccttttctcagatggctgcattttagactgcatttagactgcatttaagacttctacggcaagaatggcttggaggggcaggagtagaggagagagactacttaaagagcctaatattttgtgataagacttgctaacggttaggtgtagggagacaatgaggggaagaacggaatctgtgattatagctaggtttttggctgagcaattgaatggatattgagccattgactgagatgcggaaggatggaaaagaagtaggattaagggggagaagaggatcaggaattctgtcttatatagactccatttggaagatgtctattagacatatccaagtggagatagatgtcagtagatagttatatgtaagggtgtggttgtcagaggatagttggggctagagttataaatttaggaattagcagcatatatattgggtattgaaagtcttcaaacttaatgaaatcatcttaggaggaaatgaacagaatgaggaaaacagagcagaaaacaggcactaagtactttagcatttcaacatatagaggattgagaaacagagacttaaaaaacaaaggtcctaggccaggcgccgtggctcacccctgtaatcccagcgctttaggaggccgaggtggggggatcacgaggtcaggaattcgagactagcctggccaacatggtgaaacacatggtgaaactctgtctctactaaaaatacaaaaattagctgggcatggtgacaggcgcctataatcccagctactcaggaggctgaggcaggagaattgcctgtatctgggaggcagaggttgcagtgagctgagatcatgccactgcactccagcctgggcgacagagcaagactctgtctcggaaaaaaaaaaaaaaaaaaaaaaaaaaggtcctaagagaggcggaaaccaggagaatgtcctattacaaaaacctagaaaatggattgctgtgggggtgggggtgtcaatgtgtgtagtgctgggggtaaaagaaaatggaagcattgccagtggggcgtagtggctcacacctataatcccagcactttaggaggccaagggaagattgcttgagcccgggagtttgagaccagtctacacaatatggtgaaaccccatctctacaaaaaatacaaaatacaaaaactagccgggcatagtggtgtccacctgtagtcccagctactcaggaggctgaggtgggagtaccacctgagcccaagaagtcaaggctgcagtgagccatgttcctgccactggactccagcctgggtgacagagtgagaccttgtctcaaaaaatgaaaaagagtaagaagaaagaaaaaagaaaattgatggattgtgtttattccacctcaagaaatctgggtgtatactatattaacttatttgcaaatttgaattttgcaaatttgaattttaagataaacctattttctccttaatagaaacattactgttagaatagtgttcagctaagttgtgagaagcataaactatcatatttgttagtacttttaaaagacacagaaagaatgatctattccagtaggaagtcataagcaagagtaattttctcctagccttaaaaattaattacttttggtttggcacgtgaacctgtatgtttgtgtagttagttaatggctaagccgcgaaactctaggaattgcagttaagggataagaaaagattacacttcggaataaactggctgactaataacagtaatttgggggttctctaggcatatgttttcatttattggtttggggaatttcaaggactttgagtaagtggttcttcaggagaactggcagatataaggagcaagcgtggttatccaaagaaagacagacaaggttatcagaattgatactatttatgaagacagtgtttggttgatgactgaaaggaaagtttgtaacccaacatttgggcactgtttggtttctacttaatacaagtgatcaaggatttttattgtgactcaaaagtaatggactcaattgcccagaagtaaataaggatgttggtaatacagtagtccttatccgtggtttcactttctggggtttcagttacctatggtcaaccatgatccaaaaatattaaaaggaaaatttcagaagtaaacattttgttagttttaagtagcacgctgttctgagaaacgtgatgagacctcacattgtcctgctctgtcccgcccaggatgtgaatcatccctttgtttagctttacattgtagatgctacccactcattagtcacttggtagccatcttgggccattattaagtgcagtaagggttacctggacacatgcactgagataccacagcagtggattggataaccctctgtatgtcccccattagtcactagccatctccgttttcaaatcgactgttgtaatatcatagtacttgtgttcaagtaatccttattttacttagtaatggccccaaagcgcaagagtagtgttgccagcatgttggcataattgctctattttattagtagttattgttaatctcttaccatgcctaatttataaattaaactatcaggtatgtatgtataagaaaaaaacagtatatatagggttcgttaccatcggagtttttaggcatcgactgggggtgtttgagtgtatcctttgaagataaggaggggactactgtacaactgttttggattcctttgactaaaataattgatttttttaaaatcttcacttttttcctaatatgggcttattatctgattagaaatattaaaaatgcaatggccattctgggaaaaaaacatttagctgtgtatataaagctttaattcccaaaatgaagttaatggcatttattgagatctggcatataatacaaaactagcagtccctttggggccaattgatgtaattattttcagtgtaaatcctaaaggttgcctgttttaggttaggagatgatagtaaaaatacctaatgctctgtttttatacctcatactaggtagccaatctgaattctaaggacctctcatataccttaaaggattatgtttttaaagagcttcaaagagactggcctggatacagtgaaatagacagacggtcattggagtcagtgctctctaggtgaattctttttttcttgcttttaaaaaaatgtttctttaaaaattatggaaataagtcattattttagtcattgttattttagtgttaaggtgggaagggaagcaaggcaagctttctatcatgaacatttttaaatcatctccttaacacataacatgtgtgtcctttacagaaaactaaatccgtctcagaatgctgcaggcaccagccgttcagaatctcctgtatgttctagtagagacgctgtatcttctcctcaggtatgtcataaacatagaattatagacctgacatagatattaggggcctctaatcaggtcctctgatgtataagtgaaggaaatgagacccggagaagctggacagcttgcctgcccaaagccatctggttatggctgagcttagcctagaatttaggtcttggcttccagcccagaactttctccactacacagcactgcttgtcagagtacttaatgtctaccttgctttccatttttaaagtttacattttgttgtaagattatctactttccaatttggtcactaactagaagacttacccagtcccaaacaattatcagattatatggaaaattgaagatacttaattttgtctgtcaacatgttccagaagaatattttttggggaaaatggatttacaatcaacaaataaacaaaaatgatggcatgtttccatgttttctttttaattggatccttatcagagtactcccaatcagattcttctccagtttagagttttcccccaagagattcagctcatccaagaaaaaggtgagaaggtcctaggcagtactagagtgaagcctgcctgattctcagctgattggccaaactcagaactctctcggtgttctgggtgcttttgacagacagtgggacgcacctccccaccccagtactgctgacacagtgtcttccctctctctctctggaccttactcccaagaattagtgagaagcccacagatgtgtggagaacactaagcataccctgggcaaacagccattcgcacatcagaaaatattagaaacttattgtgaggaacagagggggaacaaaaaagaaaaaggaaaaaaagcaggtctgtccttgcatatatacaatgtctgtggaagtctcacttttaatgccaactattatgaaactacttctactctgatcaaattatatactaggtgccaaataaatggtgttaaattgaaaacaaaataatgagttgattaaccattattttctttcaagccagaatacaagctacagcattacatttaagcataaatgtgaatttatattttatagttttcaactatctaaatttcctttttaacttaaatactattattgttgttgacagattaggctactattaccatgattttttttaaagtacttccacctaattttaatggaccaattattaagacttatcttccaatctggtaaagagatatgtaacggtaaaaaaaaaaattaaatagcatttcaacagtgatagagataattagagaaactattctgaaagtgctggctgttcccactctaagacaggtggaatgataaatgacagccaaaatactcttaactggagcattttagcccattaaagattaaaataagtgcaggctattgccctttacctagctgtgttagttctcacagagtcaaacggcacaaattgctttctcttctcatttaatataactaggtcaaccacagccagcaatggagggtgactgcctctgtttaatactctcctgagtggtataatccacataaatcagcatagtctctcttggaacttagggtaaagctgtatgattagaaagaattcagtaagcacttcaagaaacatttgccagattctgctttttgacattaaacatgaaaatgtatttcacatttggttttgtgttgttgttgttctggtttagtttttgtttgggttttttgtttgtttgttttttgcttaagcatgaagaaagcgtgtaatattacaaccctggtaatattaatagtaagtaaggttacttagttgtttaaccagccatgcatgtattgaatttatttaattttagtgcaaactggctcacttttctccttttccctcccctagaaacggcttttggattcagagtttattgatcctttaatgaataaaaaagcccgaatatctcacctgacgaacagagtaccaccaacactaaatggtcatttgaatcccaccagtgaaaaatctgctgcaggcctcccgctgccccctgcggctgctgccatccctacccctccaccgctgccttcaacctatctgcccatctcacatcctcctcagattgtaaattctaactccaactcccctagcactccagaaggccgggggactcaagacctacctgttgacagttttagtcaaaacgatagtatctatgaggaccagcaagacaaatatacctctaggacttctctggaaaccttaccccctggttccgttctactaaagtgtccaaagcctatggaagaaaaccattcaatgtctcacaaaaagtccaaaaagaagtctaaaaaacataaggaaaaggaccaaataaaaaagcacgacattgagactattgaggaaaaggaggaagatcttaagagagaagaggaaattgccaagctaaataactccagtccaaattccagtggaggtattttacctttagatgaaccagaagtgcatgctatcatgagtttgaaattacacagtttataattagtaatttctttagcaaatgacgtttcatttaattattaatcttagtgttgtgcttttgagcagtttttttttttttttttcattttacagcagttgttttccatctctttttggccaactattaaacatgatttctatattaataagaatggcatttgaaaatgactgtcatacttgagactcctttttggaaggtggacctttaacattcttttccatatctgttatgatattgtgcagcctcagcatgacctattatatgccattcttgaactgatttaatcagacacaatttgcaataagaatattcatttccttctttctcaatgaaacagggtcacccttgcttcaattaatattagcacaggggaaaggtcaactttttaataaatcaggccaagataaaatttcatttgcagattcataacatcatctttatttagagtgaaaacactttgtcttttgcaagactgttggctagcgttcgcttaatagatcttaaggtttaggggtttttcccccaattttgagagtcctgttttagtgaactaacatcaattgttatttgtaaaattagccatttcaaagctttaggagcttaaatgctaaatatctagagatccaaagaaacttaaagctttacctctaaagaaaagctaattcataaaaagcttgcttgcctaagatgtcctgagtgttaaaaactgacaaaattagatttttcttatttaaaaaatatgtcctctaaaacttaattccttgcatgccaccacatagaagatccaagttcaccatttggcattgctgccagttttaaaaccagaataactaaggcaaaattccataggaaaatatggctttggaaaaattactttaatgagtagagttataaggagtgttgtctttctgtattttgctcatgattctgaaagtctgtaatccttagatttaattgaccatctttgccatatgagagaagctctattttcttttagtgttacttccaaagaagccgctgtagaatatgatatgatatgtgcttttcttgatctagattggatacattgcatgtcaaagcatttctgtttaaatatttcagtcaatataatactatgtaatggcacaaaaggtaggtgtaagctttttccctcaacactcttatagttgaatttgtcaggtcaggaaaagaaatgaagtagaactctatgttcagagttcataagccactgggtaaactccactctccacactttccaccctcaggtggtgcttctgagtcaaaggctagagacaggaaaactggatttcagtatgttgagatctacatcagagttccaagtgttctcagagttggagacctggagaagcagacttagtctctttgaattctttactgaggatatagtaactttcagaaccagttgcgataattacaaagttaggaaagctctagacccacatcccctgcattttttggaatttatctggtgtctatggcagaagggaagccaggtgacctgcacttgatgcctttctctttaagactcagactatcgtaaaagcatgttcttttacccaagcatgaatttataggtgagcagcatgcactcagagtctatgtattaatatttgtttagggtactttgtcctttaaaatattaaaccgagaaattacctaacattcacttttatatgttttgccagtgggcatgattagggtttgagttatcagtttaaccctactttcaatgataaaaaattaccctgataaagaatctaaacatatcctctggacatggtgcatttaagcaaatggcatactgagggatttacatactttcactgtgtagccacaatgtttagcacttcttttgtccttaaaaaaaaaaaaatctgtttagtgttatgagtgctagagattataggaatataaatcgacattcaataataccttattttaaattactttaaaccaatgggaaaactttctaccaaattccactgtctgcatacaaaaaagggaggcaataaaaatacagtgaccaaagcagtcggctacctgactctattgtctcatccgccttgtttgaatcccatgaaaagtagatgttgatgtaaaatttgtatctcccattgtctggctgcatctgccaccacaatctttgaattgctgggcagatgccacaactgttgttgaaagaatagaagactgaccttgggttaagatggaattcctttattgtgcagacactgcagtagccagggtgctttaaatgcctggcgtcggttctgctggcgctggtcatagggcctctattgttcatgttcaattgtattccttgctcactgttgcttattgagatggaagaatagaatttgaggaaaagtgttccagatgtttctaatctattttagaattacaggcatttgataaccttcgtagttgatgaatgctctgattttgttttttttcttcataggagttaaagaggattgcactgcctccatggaaccttcagcaattgaactcccagattatttgatgtaagttcatatgtctgccaatggagagagcggcttaattttagaaagtttgcaaattcttttcccataatttgcaaatcagaaaagtaagaagttccagaaatagagtcctggagccacccttgcaattgaaaggctgccatttagcctgctcatcccaaatctacccttgtctgcatgagcaggttgtgcctccccccgctctgagctgtattcgttggcctttaagtatagagaatcctgtcctttgttctggggccaggctaagcatttgattatgaaagattttagggatctgactcttcaaagctgacagtcttatcaatgcacagtcattcacttgggtcccccaaagggatggtttactgctgacaaagtgcttgaacctctgcacataataatacaaagtgtaaagatagattgatttttatttaagttctgccctcaaattaatttttagaggagataagagtaaaatctgatcatttcaatttagtaatggttataatgttttcttgttgtgacaacaagttgctaaatgctgagctggggacatttttgtaactggttatcacagaaattataacttggacacataattctagcttttttgcagaataaaaggcctctgtaagaagaaaataattaagttgcaagagcctggaaaaatggagagggaaagagcaaacaaatctgactttggatagctttgaaaatgaacaaatgtgcaaaatagctagaatgtaaaagggaaaatggaatctgggctgtctgaacactttttttctattagtagcatctcatggtggacaatgttaaactatgctgtttagcccttttcatttccagagtaaagatcattttagatttaaaatgtgttacttctgcttaacagtagtgtgaaagctatacttattggggaatgatacagtatgaaaccataatgctggttatcatctcttaactaacaggaacttgagaaaccttgctgagtaccctctcatctgaggtagtgtatggttttagagttctctaggagggccttgaaaggcagctatcacctaccacttagttggcccaggaagggtcagttgtctgcagccagtcttccaggacagcctctggctctgctgctgagggggttcacctctttaactgcaaacgacttctccttagaagtctttaaatgtcagcccccttgagtagcaactgccaatgcagtgctcttgttcttttttgaattcttttttataatagtgacatatacttattatatacgacagaatcatgtggggaaactaaaaaacaatgctaaacttttgcccatggattcaaggctgttgtgttttgccaagttcattagttaatcccccctttttttgtttttgagacggaatttcgctcttgttgcccaggctggagtgcgatggtgcgacctcggctcactgcaacctccacctccagggttcaagcggagcctcccaagtagctgggattacaggcgcccactaccacgcctgggtaattttttgtatttttagtagagatggcgtttcgccatattggccaggctagtctcgaactcctgacctcaggtgatccacccacctcaagcctcacaaagtgctgggattacaggtgtgagcctggccttaatttcatatttaaaaggttttttcaggttacttatctaaggatggttcctggatctgccttggtgcatttctgtatgtttgtcatgtttctagtactatgtgattgttcgcttaatttatttaaataaacacaatttatattaactaaaaactagtcttacatagatatagcaaattttctaaaaatagtgaaaaagcgtggattttcagaaaaattaccaaaactacagaacttaagttgcctcataagaaaactaaagggatatactataaaacctaaatgatcgaggccgggcgcggtggctcacgcctgtaatcccagcactgtgggaggccgaggtgggcggatcacgaggtcaggagatcgagaccatcctggctaacatggtgaaaccccgtctctactaaaaatacaaaaaattagtcgagcgtggtggcgggtgcctgtggttcccagctactgaggaggctgaggcaggagaatggtgtgaacccgggaggcggagtttgcagtgagccaagatggtgccactgcactccagcctgggcgacagagcaagacaccatctcaaaaaaataataaaaaacctaaattatcaacctttgaataattcatacttaacgaaaatatttctaatttttatgtaataagaatacttttacttgtagttaagctatcaaaactgtttaaaattttttccatcaccacataaacagccaactgtagaactacaacaatttttcgtaaaagtaggacaacttttttcttaaaaatgccagtgtaaccaaataatctcttctataatagcaacacagttgttgaccacacaactgtggtcattgaataatttccctaaggaaattattaaataaaatactgaaggtatgcttttgagaaagcacgataaatatataacaaattaagtctaagttttaagatcggtttagctgtgttgctaatatatgcttatccccaggaacctctttttaccccggggctccctctggtgtacagtcaatacagcccatgcctaggaaggactgcttcactgcttggctggcagtgtaccttttatagctaagacaccaggagggcagctttacatcagcagactatcactgtctcaattatacttagaaaattaaacctctacactgtctaattcagcatgaataaaaatattaatgaggacactaagtttgctcactgcatcacttttctcacattttctgctaggcgtctgtgatattagtaatttaaacaaactgatgggcttatataagaccatttggagaggactgaactccaagattttatggcagtgaagaatatatgtgtacccccaaggggcatcctgaatctcctgccacctgcctgaaattgctttgaaatctcaatttttatttcaaaaactcaagggaagtttgcattaatgataggaacacagagtgcaaagaaccaggccagttccttatgtgatcccagttcccagatctacaaataagtaatactgtaatatgtaataggccaggcgcagtggctcacgcctataatcctagcactttgggaggccaaggcgggtggatcacttggggccaggggttcgagaccagactgggcaacatgacgaaaccctgtctctactaaaaatacaaaaattagccgggcatggtggcatgtacctgtaatctcagctactcaggaggctgaggcacgagaatcggttgagcccaggaggtagaggttgcagtgagctgagatcgcgccactgccctctggcctgggcgacagagcaagactccgtctcaaaaaaaaaaaaaaagtaatactgtaattctaagtttaataataaaatgctgttttaatttacttattattgaataaactgatgctctaggaaaatggtcttctcttaccagttaagagtaatttacatcccaaagtaaaacagatttatggcattttattaagaaagtaagttggactaatagtacaacactggcttttgttcaacatagtatgacatttaaatgtttgaaaagaactagagaaatatgcctttttttggtctaaccctcattttacagaatggttggtaatttcccttttgtgtttcatgtatttgcttggtcagaaatatgaggaaagggatagaggaagcaagcctgaggcactttgttgaagatgtctgctagcagcatatctgaaaggccaagcaacagactgcctctcataaagcagtaggtccagagagagctttgactttcagcactcacggactgcgtgacattctcctggtttcacattacccattgagtccttctgtctctctgtgacttgtaacagatgggttagcatccaccattagtgtggtagtgaattatcttggatagagaaaggttcaggaaactagatctgtgtaaatactgttttctttttacttagttgcattttagttccattgccaccatgtctttaccacatttactctccttcgttgaagctctcaaactctgtgtaataattttacctggaagatgtttggaggagtgacctggcagccaaccagtggcagagtggcattaaacattagtgacacatgcatggatctaatctctaaatatttggtttaaatctcagacttgtgcaatcatgtttattgggtagctactctccatttatcttttttcttattagaaaatatatcgctatcgtctcctatgagcaacgccagaattataaggatgacttcaatgcagagtatgatgagtacagagctttgcatgccaggatggagactgtagctagaagatttatcaaactagatgcacaaagaaagcgcctttctccaggctcaaaagagtatcaggtaaatggatttgtaactagatgggctgactttcatattttaccttctttctttccctgccctgctcaacctcagccatcacagtggcctttagagtaagtactcttgcagaccagcctcgctgctgctttaggaaactaaatatttgaaatagttcttgaaaataaattaacatagtaaacctgtatttctaccagtggaaaaaaaccttgtgccactataatgtatcacatattgagaaaaataccaaacacaactaaataggaaaaaaagttggatcttgagattcagctaactatttgattaattacactgccaacttagactacagctcataggtctggtgctatcccaaaacagtgctatttcaagtatttttctttaaacctcaatctgagatagaatagggaagatacaaacataggaaataaagagggcttaatacacagagatttggggtttaagtaaagaagtttgctgcttctagctacaaagacggatctttgttaaccagtcttactctgttttcactttcctacttgaagtggtaatattactacagctgacaaagagcaggagatgcctgcctgacctgtctcctgattatttttgtagttcttagcaaagggattgatagaaatgagtatttccctcccgtgtgggctagataactttgtcacacttcacggacacaggtggtatagtggtgcctctgtcccagcccactaccagtgttcaggctggagcctacgtgagacaatggatgagttttcccacaacagtaaacagcctgagagcatttgtgtcctcaagattcattatgtcttctactagagggccttaatctttttcaacaagctggcgagagttataggagactgccagaagaatcggtgttcagaggtgcaagaggttggtgacatggtggtttggggtttatttttttttctatatagtcatttatcaatgtatataattatactgaaactagaatataattccaaggattacttggttaggagtggttaatatttgtgtggccttgggcaagttacttaatgcctctttgccttgaattccccatccataaaatgggataatcattgagttatgaggaataaacataagtaagcacagtaaagtgcctggatccatgcctggtacttggtacatacattaggctattatcccccccaggcacctgactccccccctcaccaatccccacagaaaatcactgttactggtttccagtgtattctttcgaagtgtgtttatgtgtgtgatatgtgcatgtatgtacacatggtataaaatgtatgtacatatctacacaagtaatttcaacatatataccgtatttaattgaatctaaggtttcttcatttgtaagctacaccattgttttatgcccaataacttaaattatgatacattattatttgtactggtttcattgaaatggggagaaatgagcatcttacaagtaatggaattcttagaatactattgtgtttttctcttttaaactaatggtatcaagctgtccatattgttcagcactttgctttcttcactaaacaatataatgcatcttagagaatttttttatattggtacataaaacactttggcatgttttaatggcctcttagtatcctttgtatagattgatggacatttcaattttgtttactgtcttttgctttacaaacagcactacagtgaataatcttgtatatgtgtcattcactggggagcaagtgtgtccataggataagtagaattgctgagtcgattttgcatttactattttgatagctgttgccacattgccttccataaagattgtttcaagttacattcccacagtcaatatttcctatactcttgctgaatgcatgttatctatttgtattgccacacacaaaagaagttgttctcttctgatttctaatatttaattttgtagaatgttcatgaagaagtcttacaagaatatcagaagataaagcaggtaggtatcatcactgttgattttctgacctgtggttgaaaaatgttgtaaattctgcaatctcattcctcttttttttttttttttttcatctgcagtctagtcccaattaccatgaagaaaaatacagatgtgaatatcttcataacaagctggctcacatcaaaaggctaataggtgaatttgaccaacagcaagcagagtcatggtcctagaactctgcttggaccagaagatgtgaataaacttaagcttatttatttaaaattccaaatgagttgctctagattctaaaaaggtgaaactttggctgttgaaagtttcagtattagtaaacttgagttactttttcttttccattttactttgcttccctgcatttcgaagctgctctttctggtcctccccaccaccccacccccaagacttgtgtttgttaatagaaataatttttttaggtattggggatccattgtctatatttcaaatcagttttttttcctcaaaaacttgtgtttgttattagaaatgattttttagatattggggatccagtgtccacacttaaaagttgtatgtgtttaaaaaacaacaacagtaatgtgcaaggtgaaatgcttttggataaacgtaagcctattttctgacgtttcttaatgcaaactctttgccttaaatggtagaatatttagaaatttgcacaaaattaaaaaaataaacattgtcttggagggttaaaaaatagaaaggtgtatgtgtatagattcacatacacatatgtatatacaggctgacttgatctagaacattaaatccgccctgcaagttaaccccccattgcaatggttgccttaaggtgtttgctagttgtgtacatagtgtggttaatcattagctacactgcttcccacttgattagagcaatgggaagcatactgtggcctaccagcatctggaagtgtgtgctcgatctgtatgtgtgcagaggtggtgtggatgtgagcgtgcatgaaggaaaaaaagctgctactcctagtaggccaaacgctcaggttaaacaactgacgagtgttactgtagggtgtttttttgtttttttgttttttttcttctatcaaattgctacttttgttgtggaagacaaaagcatttccatttcaacgagtttgtcagctttattaatgttgggcaaaaattgatatgtcatgaaaatgaaacagatctatagttttgggacaaaattataaaatgaaatgtgtaggtaacctatttatatactgctataaagtattttttgaagagagatatgcaaagaagctattacctacataagaggtatatttaaagattttttttttcatcctggtgccaggaatataaaaaagagtggatatatttaaccataacatactgtgattcatcaaacagcacaaactttcatttcatggagtttatctgttgacatttgattaaactgtcacttgttttatcatgtgggaacataagttatgtggtcaaaaatataaggattttgaattaatgttgattcaagttgtattgtcttattgtattgtcttttcaaagtgctgccagttgaaaagggaagcattatgtttacaaatctgttttgaaatgtttgccaaaattttggtagtgtctttaataaagatgtttgtctccagcatccagaaaaataaatgaataactttgttgtgtatcactgtaaaccagaaaaatgttggttatctagaaaacttgagagagcatgtagattaacttttctctttggagttctaaaacattaactggaaagattagataatatactaaatgtatacagaagtatacagactatacaaagactgaaacaagtcccttttgcactacaactctataacattaccgcagaaattttggttctatgtagcatggacctcctaaggaattctgtttcttttagcattgagatccctggtgctctttttttacctcagaattggtacaatcattattaaacgttaatttatttcaaactttttaattgaaaaaaggaaagggaaacttaattggggataaattcaggcatcatattattatgatagagtctcctgagtggttcgtctataggtaatgaactcattggtgttatttc

SEQ ID NO: 8910 - DNA, 22141 bp, Homo sapiens
cttctgaacgtgtgaaattactaacgtaatgctcagccaagagtgtgttcttagagaggtctgacaggtatttctgacatttcaccatgttcactgtattatagtttgcttttcagaaatggcatatatttatttaagatataagttatcaagtctgttgttacagtttgtgttactagttattatctttctgtagcaaaatgaccaaaatacatgcattatacatattatttccaagaaatgattttattaaaataatttctaattcaaattttagaccatttatttaaaatgctttctgtttgcatgccttcttaaagattgaaataaagtggcctttattattatttcctctagaaatgaagaggtacctaaatcagaattgtggaaactgaggtgctcatattgtaacccacaaatgtgtaacaatgtcatttccactggactttagggaaaagagtgcaaattcggaaagcacctcaagctgtttcagatacagttcctgagaggaaaaggtcaacccccatgaaccctgcaaatacaattcgaaagacacatagcagcagcaccatctctcagaggccatacagggacagggtgattcacttactggccctgaaggcctacaagaaaccggagctacttgctagactccagaaagatggtgtcaatcaaaaagacaagaactccctgggagcaattctgcaacaggtgaggacagctggagagaggtccttcctgcttaccttcttgttaaaatgttcatttaaaaaagcttgttgtcattattatcattattattgagatagagaaattttaggattattttgatcagtggtatgtgaaatacaactcctgaatattaagttaaatcatctcattttaagcacttaattaaaaactagttgaaatgtgagcattgtctttatttgggaccaacaaattttgttctcaaattccattaaaaagaaagtaagaagtgtttgttatctgtttttagtgttgaatacactaaagtattgccttaatttgtattgattattgtcggtgaaattgtgcaatgtattctattggcctttgattggtataagccagaacattttttgcctactaaatagtttaaaatgtatcttgccccacatactttgtgctgcccttattactctatctttttctgccactaagtgtgccaagatcagtcatttgtctgcataaaagcatatgaaattgtaatgtattagcagtgatcccatactttatcacaagcttacgtgtaagaaagtaggccattgttttttaaagtcagtggtttgttagactataacctcctacatatttttttcttccttccttctgtccatctgtcataaatctttatgagcattcagatccaccataaatggtggtccatcttttttactttttctaaggaaataacatttccaaagaagttattctgaatctcatcatttaaaaaaaaaaaaaaccctacaggttttgatctgttattcaaagagtaacatttcaagtctatttttttatccattatctcttacattcacaacataatactaaatgttatgaaagggtaagaccattgtctccaattcaggttagccagtccccaaggtatctcaatcaatcttaaggatctttattaagtcctttagcactttttggaaataatttaaatccatatgtcacatagcagttttaagagctcaaaagaaagagaataaatgagaatgagggtgtgtgtgttcagtttgatatctggagaagcagtgagagtcaggttacaaatcacaaagcatttggtaactgcatctccagaaaagttgtgaattagcttctcagtttgataatggagaaggcaaaatgactgcagaggcaattcacacatagactactattgatatatggcagtaattatgtgattgtgtatatacatatagatatctaaatatatatatatatacgtgtgtgtgtgtgtgtgcgcgtatctcaaagtgtagataaactttacccccaagcgaggcatgagagttattagtgttgatcatttgatagaatctagagcatcatctcatcctggtaacatattagaatcccttgggtagcctttaaaacatgccagtgcctgaactccacctgagaccaacaaaagccaagtatctgaaggtggggcctaggcactcatattctatatggccctaatgattctaatatacgagctgaaaccactggcctagtgaaaacacagaaaggctaacaacatcgaccattttttgagcatatactatgtgccaggcacagtgctaggcatttcacgtgcacgatctcatttatcctcccaagaaagatatcaggcatattcataactttgacataaaccaattatacctaaattccctttcctgaacattgctagcagctaacaaaaaaaaataaaatgactttgctctaataaaactgaccaaaagtaggcaccagagaaaagaagagccgcaagatacatacaaatcatcccaaaattggttattctgtcccagacaaactagttgggaaacaagttacctaaaataattaatcaggctttgcctgtgccagtagagataatttgcttatttgttacttacacagtagttttcagaaccctgtggacattattaattcatcaaagtaataggtttttaaaataaactaagatgttggctcccggtaaaatttgtacctaaatttaaaagtgcttaacatccaccaggaaatttgtgtattgctgtttattattaaactggtatgtattaataaaacctttttttcttagaatgaccttttatggaaaaactaaattttaacaatcagaaactagataaagttgaataatgtatccagcttaacatttggatatttggctcaagctcaacattcattcattcaattcaacttattaagtacctacagtgtaccagacactgttttaaatgctggaatcccaaagtaaccccaatagaaaccctgccctcatggagcttattcatgagacaatttcaggaccagtgaggagttgaaaggagctggggaaggaatcctctgctttaagtggagagatcagggaaccttttctcagatggctgcattttagactgcatttagactgcatttaagacttctacggcaagaatggcttggaggggcaggagtagaggagagagactacttaaagagcctaatattttgtgataagacttgctaacggttaggtgtagggagacaatgaggggaagaacggaatctgtgattatagctaggtttttggctgagcaattgaatggatattgagccattgactgagatgcggaaggatggaaaagaagtaggattaagggggagaagaggatcaggaattctgtcttatatagactccatttggaagatgtctattagacatatccaagtggagatagatgtcagtagatagttatatgtaagggtgtggttgtcagaggatagttggggctagagttataaatttaggaattagcagcatatatattgggtattgaaagtcttcaaacttaatgaaatcatcttaggaggaaatgaacagaatgaggaaaacagagcagaaaacaggcactaagtactttagcatttcaacatatagaggattgagaaacagagacttaaaaaacaaaggtcctaggccaggcgccgtggctcacccctgtaatcccagcgctttaggaggccgaggtggggggatcacgaggtcaggaattcgagactagcctggccaacatggtgaaacacatggtgaaactctgtctctactaaaaatacaaaaattagctgggcatggtgacaggcgcctataatcccagctactcaggaggctgaggcaggagaattgcctgtatctgggaggcagaggttgcagtgagctgagatcatgccactgcactccagcctgggcgacagagcaagactctgtctcggaaaaaaaaaaaaaaaaaaaaaaaaaaggtcctaagagaggcggaaaccaggagaatgtcctattacaaaaacctagaaaatggattgctgtgggggtgggggtgtcaatgtgtgtagtgctgggggtaaaagaaaatggaagcattgccagtggggcgtagtggctcacacctataatcccagcactttaggaggccaagggaagattgcttgagcccgggagtttgagaccagtctacacaatatggtgaaaccccatctctacaaaaaatacaaaatacaaaaactagccgggcatagtggtgtccacctgtagtcccagctactcaggaggctgaggtgggagtaccacctgagcccaagaagtcaaggctgcagtgagccatgttcctgccactggactccagcctgggtgacagagtgagaccttgtctcaaaaaatgaaaaagagtaagaagaaagaaaaaagaaaattgatggattgtgtttattccacctcaagaaatctgggtgtatactatattaacttatttgcaaatttgaattttgcaaatttgaattttaagataaacctattttctccttaatagaaacattactgttagaatagtgttcagctaagttgtgagaagcataaactatcatatttgttagtacttttaaaagacacagaaagaatgatctattccagtaggaagtcataagcaagagtaattttctcctagccttaaaaattaattacttttggtttggcacgtgaacctgtatgtttgtgtagttagttaatggctaagccgcgaaactctaggaattgcagttaagggataagaaaagattacacttcggaataaactggctgactaataacagtaatttgggggttctctaggcatatgttttcatttattggtttggggaatttcaaggactttgagtaagtggttcttcaggagaactggcagatataaggagcaagcgtggttatccaaagaaagacagacaaggttatcagaattgatactatttatgaagacagtgtttggttgatgactgaaaggaaagtttgtaacccaacatttgggcactgtttggtttctacttaatacaagtgatcaaggatttttattgtgactcaaaagtaatggactcaattgcccagaagtaaataaggatgttggtaatacagtagtccttatccgtggtttcactttctggggtttcagttacctatggtcaaccatgatccaaaaatattaaaaggaaaatttcagaagtaaacattttgttagttttaagtagcacgctgttctgagaaacgtgatgagacctcacattgtcctgctctgtcccgcccaggatgtgaatcatccctttgtttagctttacattgtagatgctacccactcattagtcacttggtagccatcttgggccattattaagtgcagtaagggttacctggacacatgcactgagataccacagcagtggattggataaccctctgtatgtcccccattagtcactagccatctccgttttcaaatcgactgttgtaatatcatagtacttgtgttcaagtaatccttattttacttagtaatggccccaaagcgcaagagtagtgttgccagcatgttggcataattgctctattttattagtagttattgttaatctcttaccatgcctaatttataaattaaactatcaggtatgtatgtataagaaaaaaacagtatatatagggttcgttaccatcggagtttttaggcatcgactgggggtgtttgagtgtatcctttgaagataaggaggggactactgtacaactgttttggattcctttgactaaaataattgatttttttaaaatcttcacttttttcctaatatgggcttattatctgattagaaatattaaaaatgcaatggccattctgggaaaaaaacatttagctgtgtatataaagctttaattcccaaaatgaagttaatggcatttattgagatctggcatataatacaaaactagcagtccctttggggccaattgatgtaattattttcagtgtaaatcctaaaggttgcctgttttaggttaggagatgatagtaaaaatacctaatgctctgtttttatacctcatactaggtagccaatctgaattctaaggacctctcatataccttaaaggattatgtttttaaagagcttcaaagagactggcctggatacagtgaaatagacagacggtcattggagtcagtgctctctaggtgaattctttttttcttgcttttaaaaaaatgtttctttaaaaattatggaaataagtcattattttagtcattgttattttagtgttaaggtgggaagggaagcaaggcaagctttctatcatgaacatttttaaatcatctccttaacacataacatgtgtgtcctttacagaaaactaaatccgtctcagaatgctgcaggcaccagccgttcagaatctcctgtatgttctagtagagacgctgtatcttctcctcaggtatgtcataaacatagaattatagacctgacatagatattaggggcctctaatcaggtcctctgatgtataagtgaaggaaatgagacccggagaagctggacagcttgcctgcccaaagccatctggttatggctgagcttagcctagaatttaggtcttggcttccagcccagaactttctccactacacagcactgcttgtcagagtacttaatgtctaccttgctttccatttttaaagtttacattttgttgtaagattatctactttccaatttggtcactaactagaagacttacccagtcccaaacaattatcagattatatggaaaattgaagatacttaattttgtctgtcaacatgttccagaagaatattttttggggaaaatggatttacaatcaacaaataaacaaaaatgatggcatgtttccatgttttctttttaattggatccttatcagagtactcccaatcagattcttctccagtttagagttttcccccaagagattcagctcatccaagaaaaaggtgagaaggtcctaggcagtactagagtgaagcctgcctgattctcagctgattggccaaactcagaactctctcggtgttctgggtgcttttgacagacagtgggacgcacctccccaccccagtactgctgacacagtgtcttccctctctctctctggaccttactcccaagaattagtgagaagcccacagatgtgtggagaacactaagcataccctgggcaaacagccattcgcacatcagaaaatattagaaacttattgtgaggaacagagggggaacaaaaaagaaaaaggaaaaaaagcaggtctgtccttgcatatatacaatgtctgtggaagtctcacttttaatgccaactattatgaaactacttctactctgatcaaattatatactaggtgccaaataaatggtgttaaattgaaaacaaaataatgagttgattaaccattattttctttcaagccagaatacaagctacagcattacatttaagcataaatgtgaatttatattttatagttttcaactatctaaatttcctttttaacttaaatactattattgttgttgacagattaggctactattaccatgattttttttaaagtacttccacctaattttaatggaccaattattaagacttatcttccaatctggtaaagagatatgtaacggtaaaaaaaaaaattaaatagcatttcaacagtgatagagataattagagaaactattctgaaagtgctggctgttcccactctaagacaggtggaatgataaatgacagccaaaatactcttaactggagcattttagcccattaaagattaaaataagtgcaggctattgccctttacctagctgtgttagttctcacagagtcaaacggcacaaattgctttctcttctcatttaatataactaggtcaaccacagccagcaatggagggtgactgcctctgtttaatactctcctgagtggtataatccacataaatcagcatagtctctcttggaacttagggtaaagctgtatgattagaaagaattcagtaagcacttcaagaaacatttgccagattctgctttttgacattaaacatgaaaatgtatttcacatttggttttgtgttgttgttgttctggtttagtttttgtttgggttttttgtttgtttgttttttgcttaagcatgaagaaagcgtgtaatattacaaccctggtaatattaatagtaagtaaggttacttagttgtttaaccagccatgcatgtattgaatttatttaattttagtgcaaactggctcacttttctccttttccctcccctagaaacggcttttggattcagagtttattgatcctttaatgaataaaaaagcccgaatatctcacctgacgaacagagtaccaccaacactaaatggtcatttgaatcccaccagtgaaaaatctgctgcaggcctcccgctgccccctgcggctgctgccatccctacccctccaccgctgccttcaacctatctgcccatctcacatcctcctcagattgtaaattctaactccaactcccctagcactccagaaggccgggggactcaagacctacctgttgacagttttagtcaaaacgatagtatctatgaggaccagcaagacaaatatacctctaggacttctctggaaaccttaccccctggttccgttctactaaagtgtccaaagcctatggaagaaaaccattcaatgtctcacaaaaagtccaaaaagaagtctaaaaaacataaggaaaaggaccaaataaaaaagcacgacattgagactattgaggaaaaggaggaagatcttaagagagaagaggaaattgccaagctaaataactccagtccaaattccagtggaggtattttacctttagatgaaccagaagtgcatgctatcatgagtttgaaattacacagtttataattagtaatttctttagcaaatgacgtttcatttaattattaatcttagtgttgtgcttttgagcagtttttttttttttttttcattttacagcagttgttttccatctctttttggccaactattaaacatgatttctatattaataagaatggcatttgaaaatgactgtcatacttgagactcctttttggaaggtggacctttaacattcttttccatatctgttatgatattgtgcagcctcagcatgacctattatatgccattcttgaactgatttaatcagacacaatttgcaataagaatattcatttccttctttctcaatgaaacagggtcacccttgcttcaattaatattagcacaggggaaaggtcaactttttaataaatcaggccaagataaaatttcatttgcagattcataacatcatctttatttagagtgaaaacactttgtcttttgcaagactgttggctagcgttcgcttaatagatcttaaggtttaggggtttttcccccaattttgagagtcctgttttagtgaactaacatcaattgttatttgtaaaattagccatttcaaagctttaggagcttaaatgctaaatatctagagatccaaagaaacttaaagctttacctctaaagaaaagctaattcataaaaagcttgcttgcctaagatgtcctgagtgttaaaaactgacaaaattagatttttcttatttaaaaaatatgtcctctaaaacttaattccttgcatgccaccacatagaagatccaagttcaccatttggcattgctgccagttttaaaaccagaataactaaggcaaaattccataggaaaatatggctttggaaaaattactttaatgagtagagttataaggagtgttgtctttctgtattttgctcatgattctgaaagtctgtaatccttagatttaattgaccatctttgccatatgagagaagctctattttcttttagtgttacttccaaagaagccgctgtagaatatgatatgatatgtgcttttcttgatctagattggatacattgcatgtcaaagcatttctgtttaaatatttcagtcaatataatactatgtaatggcacaaaaggtaggtgtaagctttttccctcaacactcttatagttgaatttgtcaggtcaggaaaagaaatgaagtagaactctatgttcagagttcataagccactgggtaaactccactctccacactttccaccctcaggtggtgcttctgagtcaaaggctagagacaggaaaactggatttcagtatgttgagatctacatcagagttccaagtgttctcagagttggagacctggagaagcagacttagtctctttgaattctttactgaggatatagtaactttcagaaccagttgcgataattacaaagttaggaaagctctagacccacatcccctgcattttttggaatttatctggtgtctatggcagaagggaagccaggtgacctgcacttgatgcctttctctttaagactcagactatcgtaaaagcatgttcttttacccaagcatgaatttataggtgagcagcatgcactcagagtctatgtattaatatttgtttagggtactttgtcctttaaaatattaaaccgagaaattacctaacattcacttttatatgttttgccagtgggcatgattagggtttgagttatcagtttaaccctactttcaatgataaaaaattaccctgataaagaatctaaacatatcctctggacatggtgcatttaagcaaatggcatactgagggatttacatactttcactgtgtagccacaatgtttagcacttcttttgtccttaaaaaaaaaaaaatctgtttagtgttatgagtgctagagattataggaatataaatcgacattcaataataccttattttaaattactttaaaccaatgggaaaactttctaccaaattccactgtctgcatacaaaaaagggaggcaataaaaatacagtgaccaaagcagtcggctacctgactctattgtctcatccgccttgtttgaatcccatgaaaagtagatgttgatgtaaaatttgtatctcccattgtctggctgcatctgccaccacaatctttgaattgctgggcagatgccacaactgttgttgaaagaatagaagactgaccttgggttaagatggaattcctttattgtgcagacactgcagtagccagggtgctttaaatgcctggcgtcggttctgctggcgctggtcatagggcctctattgttcatgttcaattgtattccttgctcactgttgcttattgagatggaagaatagaatttgaggaaaagtgttccagatgtttctaatctattttagaattacaggcatttgataaccttcgtagttgatgaatgctctgattttgttttttttcttcataggagttaaagaggattgcactgcctccatggaaccttcagcaattgaactcccagattatttgatgtaagttcatatgtctgccaatggagagagcggcttaattttagaaagtttgcaaattcttttcccataatttgcaaatcagaaaagtaagaagttccagaaatagagtcctggagccacccttgcaattgaaaggctgccatttagcctgctcatcccaaatctacccttgtctgcatgagcaggttgtgcctccccccgctctgagctgtattcgttggcctttaagtatagagaatcctgtcctttgttctggggccaggctaagcatttgattatgaaagattttagggatctgactcttcaaagctgacagtcttatcaatgcacagtcattcacttgggtcccccaaagggatggtttactgctgacaaagtgcttgaacctctgcacataataatacaaagtgtaaagatagattgatttttatttaagttctgccctcaaattaatttttagaggagataagagtaaaatctgatcatttcaatttagtaatggttataatgttttcttgttgtgacaacaagttgctaaatgctgagctggggacatttttgtaactggttatcacagaaattataacttggacacataattctagcttttttgcagaataaaaggcctctgtaagaagaaaataattaagttgcaagagcctggaaaaatggagagggaaagagcaaacaaatctgactttggatagctttgaaaatgaacaaatgtgcaaaatagctagaatgtaaaagggaaaatggaatctgggctgtctgaacactttttttctattagtagcatctcatggtggacaatgttaaactatgctgtttagcccttttcatttccagagtaaagatcattttagatttaaaatgtgttacttctgcttaacagtagtgtgaaagctatacttattggggaatgatacagtatgaaaccataatgctggttatcatctcttaactaacaggaacttgagaaaccttgctgagtaccctctcatctgaggtagtgtatggttttagagttctctaggagggccttgaaaggcagctatcacctaccacttagttggcccaggaagggtcagttgtctgcagccagtcttccaggacagcctctggctctgctgctgagggggttcacctctttaactgcaaacgacttctccttagaagtctttaaatgtcagcccccttgagtagcaactgccaatgcagtgctcttgttcttttttgaattcttttttataatagtgacatatacttattatatacgacagaatcatgtggggaaactaaaaaacaatgctaaacttttgcccatggattcaaggctgttgtgttttgccaagttcattagttaatcccccctttttttgtttttgagacggaatttcgctcttgttgcccaggctggagtgcgatggtgcgacctcggctcactgcaacctccacctccagggttcaagcggagcctcccaagtagctgggattacaggcgcccactaccacgcctgggtaattttttgtatttttagtagagatggcgtttcgccatattggccaggctagtctcgaactcctgacctcaggtgatccacccacctcaagcctcacaaagtgctgggattacaggtgtgagcctggccttaatttcatatttaaaaggttttttcaggttacttatctaaggatggttcctggatctgccttggtgcatttctgtatgtttgtcatgtttctagtactatgtgattgttcgcttaatttatttaaataaacacaatttatattaactaaaaactagtcttacatagatatagcaaattttctaaaaatagtgaaaaagcgtggattttcagaaaaattaccaaaactacagaacttaagttgcctcataagaaaactaaagggatatactataaaacctaaatgatcgaggccgggcgcggtggctcacgcctgtaatcccagcactgtgggaggccgaggtgggcggatcacgaggtcaggagatcgagaccatcctggctaacatggtgaaaccccgtctctactaaaaatacaaaaaattagtcgagcgtggtggcgggtgcctgtggttcccagctactgaggaggctgaggcaggagaatggtgtgaacccgggaggcggagtttgcagtgagccaagatggtgccactgcactccagcctgggcgacagagcaagacaccatctcaaaaaaataataaaaaacctaaattatcaacctttgaataattcatacttaacgaaaatatttctaatttttatgtaataagaatacttttacttgtagttaagctatcaaaactgtttaaaattttttccatcaccacataaacagccaactgtagaactacaacaatttttcgtaaaagtaggacaacttttttcttaaaaatgccagtgtaaccaaataatctcttctataatagcaacacagttgttgaccacacaactgtggtcattgaataatttccctaaggaaattattaaataaaatactgaaggtatgcttttgagaaagcacgataaatatataacaaattaagtctaagttttaagatcggtttagctgtgttgctaatatatgcttatccccaggaacctctttttaccccggggctccctctggtgtacagtcaatacagcccatgcctaggaaggactgcttcactgcttggctggcagtgtaccttttatagctaagacaccaggagggcagctttacatcagcagactatcactgtctcaattatacttagaaaattaaacctctacactgtctaattcagcatgaataaaaatattaatgaggacactaagtttgctcactgcatcacttttctcacattttctgctaggcgtctgtgatattagtaatttaaacaaactgatgggcttatataagaccatttggagaggactgaactccaagattttatggcagtgaagaatatatgtgtacccccaaggggcatcctgaatctcctgccacctgcctgaaattgctttgaaatctcaatttttatttcaaaaactcaagggaagtttgcattaatgataggaacacagagtgcaaagaaccaggccagttccttatgtgatcccagttcccagatctacaaataagtaatactgtaatatgtaataggccaggcgcagtggctcacgcctataatcctagcactttgggaggccaaggcgggtggatcacttggggccaggggttcgagaccagactgggcaacatgacgaaaccctgtctctactaaaaatacaaaaattagccgggcatggtggcatgtacctgtaatctcagctactcaggaggctgaggcacgagaatcggttgagcccaggaggtagaggttgcagtgagctgagatcgcgccactgccctctggcctgggcgacagagcaagactccgtctcaaaaaaaaaaaaaaagtaatactgtaattctaagtttaataataaaatgctgttttaatttacttattattgaataaactgatgctctaggaaaatggtcttctcttaccagttaagagtaatttacatcccaaagtaaaacagatttatggcattttattaagaaagtaagttggactaatagtacaacactggcttttgttcaacatagtatgacatttaaatgtttgaaaagaactagagaaatatgcctttttttggtctaaccctcattttacagaatggttggtaatttcccttttgtgtttcatgtatttgcttggtcagaaatatgaggaaagggatagaggaagcaagcctgaggcactttgttgaagatgtctgctagcagcatatctgaaaggccaagcaacagactgcctctcataaagcagtaggtccagagagagctttgactttcagcactcacggactgcgtgacattctcctggtttcacattacccattgagtccttctgtctctctgtgacttgtaacagatgggttagcatccaccattagtgtggtagtgaattatcttggatagagaaaggttcaggaaactagatctgtgtaaatactgttttctttttacttagttgcattttagttccattgccaccatgtctttaccacatttactctccttcgttgaagctctcaaactctgtgtaataattttacctggaagatgtttggaggagtgacctggcagccaaccagtggcagagtggcattaaacattagtgacacatgcatggatctaatctctaaatatttggtttaaatctcagacttgtgcaatcatgtttattgggtagctactctccatttatcttttttcttattagaaaatatatcgctatcgtctcctatgagcaacgccagaattataaggatgacttcaatgcagagtatgatgagtacagagctttgcatgccaggatggagactgtagctagaagatttatcaaactagatgcacaaagaaagcgcctttctccaggctcaaaagagtatcaggtaaatggatttgtaactagatgggctgactttcatattttaccttctttctttccctgccctgctcaacctcagccatcacagtggcctttagagtaagtactcttgcagaccagcctcgctgctgctttaggaaactaaatatttgaaatagttcttgaaaataaattaacatagtaaacctgtatttctaccagtggaaaaaaaccttgtgccactataatgtatcacatattgagaaaaataccaaacacaactaaataggaaaaaaagttggatcttgagattcagctaactatttgattaattacactgccaacttagactacagctcataggtctggtgctatcccaaaacagtgctatttcaagtatttttctttaaacctcaatctgagatagaatagggaagatacaaacataggaaataaagagggcttaatacacagagatttggggtttaagtaaagaagtttgctgcttctagctacaaagacggatctttgttaaccagtcttactctgttttcactttcctacttgaagtggtaatattactacagctgacaaagagcaggagatgcctgcctgacctgtctcctgattatttttgtagttcttagcaaagggattgatagaaatgagtatttccctcccgtgtgggctagataactttgtcacacttcacggacacaggtggtatagtggtgcctctgtcccagcccactaccagtgttcaggctggagcctacgtgagacaatggatgagttttcccacaacagtaaacagcctgagagcatttgtgtcctcaagattcattatgtcttctactagagggccttaatctttttcaacaagctggcgagagttataggagactgccagaagaatcggtgttcagaggtgcaagaggttggtgacatggtggtttggggtttatttttttttctatatagtcatttatcaatgtatataattatactgaaactagaatataattccaaggattacttggttaggagtggttaatatttgtgtggccttgggcaagttacttaatgcctctttgccttgaattccccatccataaaatgggataatcattgagttatgaggaataaacataagtaagcacagtaaagtgcctggatccatgcctggtacttggtacatacattaggctattatcccccccaggcacctgactccccccctcaccaatccccacagaaaatcactgttactggtttccagtgtattctttcgaagtgtgtttatgtgtgtgatatgtgcatgtatgtacacatggtataaaatgtatgtacatatctacacaagtaatttcaacatatataccgtatttaattgaatctaaggtttcttcatttgtaagctacaccattgttttatgcccaataacttaaattatgatacattattatttgtactggtttcattgaaatggggagaaatgagcatcttacaagtaatggaattcttagaatactattgtgtttttctcttttaaactaatggtatcaagctgtccatattgttcagcactttgctttcttcactaaacaatataatgcatcttagagaatttttttatattggtacataaaacactttggcatgttttaatggcctcttagtatcctttgtatagattgatggacatttcaattttgtttactgtcttttgctttacaaacagcactacagtgaataatcttgtatatgtgtcattcactggggagcaagtgtgtccataggataagtagaattgctgagtcgattttgcatttactattttgatagctgttgccacattgccttccataaagattgtttcaagttacattcccacagtcaatatttcctatactcttgctgaatgcatgttatctatttgtattgccacacacaaaagaagttgttctcttctgatttctaatatttaattttgtagaatgttcatgaagaagtcttacaagaatatcagaagataaagcaggtaggtatcatcactgttgattttctgacctgtggttgaaaaatgttgtaaattctgcaatctcattcctcttttttttttttttttttcatctgcagtctagtcccaattaccatgaagaaaaatacagatgtgaatatcttcataacaagctggctcacatcaaaaggctaataggtgaatttgaccaacagcaagcagagtcatggtcctagaactctgcttggaccagaagatgtgaataaacttaagcttatttatttaaaattccaaatgagttgctctagattctaaaaaggtgaaactttggctgttgaaagtttcagtattagtaaacttgagttactttttcttttccattttactttgcttccctgcatttcgaagctgctctttctggtcctccccaccaccccacccccaagacttgtgtttgttaatagaaataatttttttaggtattggggatccattgtctatatttcaaatcagttttttttcctcaaaaacttgtgtttgttattagaaatgattttttagatattggggatccagtgtccacacttaaaagttgtatgtgtttaaaaaacaacaacagtaatgtgcaaggtgaaatgcttttggataaacgtaagcctattttctgacgtttcttaatgcaaactctttgccttaaatggtagaatatttagaaatttgcacaaaattaaaaaaataaacattgtcttggagggttaaaaaatagaaaggtgtatgtgtatagattcacatacacatatgtatatacaggctgacttgatctagaacattaaatccgccctgcaagttaaccccccattgcaatggttgccttaaggtgtttgctagttgtgtacatagtgtggttaatcattagctacactgcttcccacttgattagagcaatgggaagcatactgtggcctaccagcatctggaagtgtgtgctcgatctgtatgtgtgcagaggtggtgtggatgtgagcgtgcatgaaggaaaaaaagctgctactcctagtaggccaaacgctcaggttaaacaactgacgagtgttactgtagggtgtttttttgtttttttgttttttttcttctatcaaattgctacttttgttgtggaagacaaaagcatttccatttcaacgagtttgtcagctttattaatgttgggcaaaaattgatatgtcatgaaaatgaaacagatctatagttttgggacaaaattataaaatgaaatgtgtaggtaacctatttatatactgctataaagtattttttgaagagagatatgcaaagaagctattacctacataagaggtatatttaaagattttttttttcatcctggtgccaggaatataaaaaagagtggatatatttaaccataacatactgtgattcatcaaacagcacaaactttcatttcatggagtttatctgttgacattgatttaaactgtcacttgttttatcatgtgggaacataagttatgtggtcaaaaatataaggattttgaattaatgttgattcaagttgtattgtcttattgtattgtcttttcaaagtgctgccagttgaaaagggaagcattatgtttacaaatctgttttgaaatgtttgccaaaattttggtagtgtctttaataaagatgtttgtctccagcatccagaaaaataaatgaataactttgttgtgtatcactgtaaaccagaaaaatgttggttatctagaaaacttgagagagcatgtagattaacttttctctttggagttctaaaacattaactggaaagattagataatatactaaatgtatacagaagtatacagactatacaaagactgaaacaagtcccttttgcactacaactctataacattaccgcagaaattttggttctatgtagcatggacctcctaaggaattctgtttcttttagcattgagatccctggtgctctttttttacctcagaattggtacaatcattattaaacgttaatttatttcaaactttttaattgaaaaaaggaaagggaaacttaattggggataaattcaggcatcatattattatgatagagtctcctgagtggttcgtctataggtaatgaactcattggtgttatttcttggacatcttggccttttaatcaaagactgtgtgctgctatttgctatgagcaaggtttctcaaaagcaaaaggtgcttggaccatttggatcacctgagttagaatctctaggtatagggcccaagtatctgcattttcacaggtttcttgtaggtgactttctgcaagctaaagtatgagaaccattggcttggatgtagttctaaacttttaggtctgtaaatcttgaaatcttgaactgaaggtcaactattggcttttttttttttttaatgtccatcatgtcagcaggtgcaaatcacttttcccctttgcatgatctgaggcacctcctcagttgtttcactgccaactcttgtttcagaacctgtttacaaacaagccttccagttggtgaatggttagccattggagctcctaccctgtacatcagcacatcttctggtttacaagttgggtaacaatgaaagctggagatgctaaatggaaatccagcattgcatacccttagacctgatcacataccagtaaaagccttaatttagatgttagttgtatgtgttggacagatccttgcaaaagtgtgtctgtctattagttgtaaatttgaaaattataaatctctgaatctgctactatccaagtttcatcccttttgaagatgaggcatgagcctattaaaatatttataatcatttttcgtcccctactgcaagacttttagattcttacaaatgattactacaggaatagtggccacttaatgtcagttactccggtggaagaatttatctagttttttttcttttcttttttggaaggatggtgtgaaaaatagcaagattagagaatgagttgtatagttttttctatcacatttcatctaaaatgatttgaaggacttttgaagatttttaccaacatccttaaatcaactccaggttggatgaacaactgatttaaaacaaactaagagaacattaactagatgtgggctttttaaaatatataggtattgcatttcctaccttgttatttattccactttgaatactttagagggcttaactttcaactctttaaggtagtaatggatagttttatacttgttctcacaaaattgttatggtcagtttatatcattgctccatgcattgattataaaaattcagtattaattttttctgatcttataagctttataggagttttcttttctcttataaagtgtttcaccttatgtaaaacaaatgcctgcttgcatattggaagatgttgaaattagttttagacaaaagtggtccatcaattcagacactctgcttggatgccttacccttttcattagtgcattctttgcttctgaaacttggcagaaactcgttagccagtccactgcctttctgacaatgtgtggagtcacgtatgcttggtatatgcctttactacttttaaagttctacagtttattacttgcccaagtgttactaaatccttttcttatgtgtactggatggagaaaaaattatagccagcactttgagaggaaagttttcagaaacaatattaactggcactactaactgaaggccacaggagatgctatcaatgttatttgtaatctgaagattgaacaaggctgtgaggctcatttcaaactattttgaggtgttaaaatatatatatgctgtttctcagctgttccactcaaaccgtgttaggactctcaaaggtaaaatgtcacaggggcttttcagttgttacagagctcagcagctgtggttgcccctgttctacaccaatttcagttcaataaaaatgttaactttgcaattctg

SEQ ID NO: 8911 - DNA, 19429 bp, Homo sapiens
cttctgaacgtgtgaaattactaacgtaatgctcagccaagagtgtgttcttagagaggtctgacaggtatttctgacatttcaccatgttcactgtattatagtttgcttttcagaaatggcatatatttatttaagatataagttatcaagtctgttgttacagtttgtgttactagttattatctttctgtagcaaaatgaccaaaatacatgcattatacatattatttccaagaaatgattttattaaaataatttctaattcaaattttagaccatttatttaaaatgctttctgtttgcatgccttcttaaagattgaaataaagtggcctttattattatttcctctagaaatgaagaggtacctaaatcagaattgtggaaactgaggtgctcatattgtaacccacaaatgtgtaacaatgtcatttccactggactttagggaaaagagtgcaaattcggaaagcacctcaagctgtttcagatacagttcctgagaggaaaaggtcaacccccatgaaccctgcaaatacaattcgaaagacacatagcagcagcaccatctctcagaggccatacagggacagggtgattcacttactggccctgaaggcctacaagaaaccggagctacttgctagactccagaaagatggtgtcaatcaaaaagacaagaactccctgggagcaattctgcaacaggtgaggacagctggagagaggtccttcctgcttaccttcttgttaaaatgttcatttaaaaaagcttgttgtcattattatcattattattgagatagagaaattttaggattattttgatcagtggtatgtgaaatacaactcctgaatattaagttaaatcatctcattttaagcacttaattaaaaactagttgaaatgtgagcattgtctttatttgggaccaacaaattttgttctcaaattccattaaaaagaaagtaagaagtgtttgttatctgtttttagtgttgaatacactaaagtattgccttaatttgtattgattattgtcggtgaaattgtgcaatgtattctattggcctttgattggtataagccagaacattttttgcctactaaatagtttaaaatgtatcttgccccacatactttgtgctgcccttattactctatctttttctgccactaagtgtgccaagatcagtcatttgtctgcataaaagcatatgaaattgtaatgtattagcagtgatcccatactttatcacaagcttacgtgtaagaaagtaggccattgttttttaaagtcagtggtttgttagactataacctcctacatatttttttcttccttccttctgtccatctgtcataaatctttatgagcattcagatccaccataaatggtggtccatcttttttactttttctaaggaaataacatttccaaagaagttattctgaatctcatcatttaaaaaaaaaaaaaaccctacaggttttgatctgttattcaaagagtaacatttcaagtctatttttttatccattatctcttacattcacaacataatactaaatgttatgaaagggtaagaccattgtctccaattcaggttagccagtccccaaggtatctcaatcaatcttaaggatctttattaagtcctttagcactttttggaaataatttaaatccatatgtcacatagcagttttaagagctcaaaagaaagagaataaatgagaatgagggtgtgtgtgttcagtttgatatctggagaagcagtgagagtcaggttacaaatcacaaagcatttggtaactgcatctccagaaaagttgtgaattagcttctcagtttgataatggagaaggcaaaatgactgcagaggcaattcacacatagactactattgatatatggcagtaattatgtgattgtgtatatacatatagatatctaaatatatatatatatacgtgtgtgtgtgtgtgtgcgcgtatctcaaagtgtagataaactttacccccaagcgaggcatgagagttattagtgttgatcatttgatagaatctagagcatcatctcatcctggtaacatattagaatcccttgggtagcctttaaaacatgccagtgcctgaactccacctgagaccaacaaaagccaagtatctgaaggtggggcctaggcactcatattctatatggccctaatgattctaatatacgagctgaaaccactggcctagtgaaaacacagaaaggctaacaacatcgaccattttttgagcatatactatgtgccaggcacagtgctaggcatttcacgtgcacgatctcatttatcctcccaagaaagatatcaggcatattcataactttgacataaaccaattatacctaaattccctttcctgaacattgctagcagctaacaaaaaaaaataaaatgactttgctctaataaaactgaccaaaagtaggcaccagagaaaagaagagccgcaagatacatacaaatcatcccaaaattggttattctgtcccagacaaactagttgggaaacaagttacctaaaataattaatcaggctttgcctgtgccagtagagataatttgcttatttgttacttacacagtagttttcagaaccctgtggacattattaattcatcaaagtaataggtttttaaaataaactaagatgttggctcccggtaaaatttgtacctaaatttaaaagtgcttaacatccaccaggaaatttgtgtattgctgtttattattaaactggtatgtattaataaaacctttttttcttagaatgaccttttatggaaaaactaaattttaacaatcagaaactagataaagttgaataatgtatccagcttaacatttggatatttggctcaagctcaacattcattcattcaattcaacttattaagtacctacagtgtaccagacactgttttaaatgctggaatcccaaagtaaccccaatagaaaccctgccctcatggagcttattcatgagacaatttcaggaccagtgaggagttgaaaggagctggggaaggaatcctctgctttaagtggagagatcagggaaccttttctcagatggctgcattttagactgcatttagactgcatttaagacttctacggcaagaatggcttggaggggcaggagtagaggagagagactacttaaagagcctaatattttgtgataagacttgctaacggttaggtgtagggagacaatgaggggaagaacggaatctgtgattatagctaggtttttggctgagcaattgaatggatattgagccattgactgagatgcggaaggatggaaaagaagtaggattaagggggagaagaggatcaggaattctgtcttatatagactccatttggaagatgtctattagacatatccaagtggagatagatgtcagtagatagttatatgtaagggtgtggttgtcagaggatagttggggctagagttataaatttaggaattagcagcatatatattgggtattgaaagtcttcaaacttaatgaaatcatcttaggaggaaatgaacagaatgaggaaaacagagcagaaaacaggcactaagtactttagcatttcaacatatagaggattgagaaacagagacttaaaaaacaaaggtcctaggccaggcgccgtggctcacccctgtaatcccagcgctttaggaggccgaggtggggggatcacgaggtcaggaattcgagactagcctggccaacatggtgaaacacatggtgaaactctgtctctactaaaaatacaaaaattagctgggcatggtgacaggcgcctataatcccagctactcaggaggctgaggcaggagaattgcctgtatctgggaggcagaggttgcagtgagctgagatcatgccactgcactccagcctgggcgacagagcaagactctgtctcggaaaaaaaaaaaaaaaaaaaaaaaaaaaggtcctaagagaggcggaaaccaggagaatgtcctattacaaaaacctagaaaatggattgctgtgggggtgggggtgtcaatgtgtgtagtgctgggggtaaaagaaaatggaagcattgccagtggggcgtagtggctcacacctataatcccagcactttaggaggccaagggaagattgcttgagcccgggagtttgagaccagtctacacaatatggtgaaaccccatctctacaaaaaatacaaaatacaaaaactagccgggcatagtggtgtccacctgtagtcccagctactcaggaggctgaggtgggagtaccacctgagcccaagaagtcaaggctgcagtgagccatgttcctgccactggactccagcctgggtgacagagtgagaccttgtctcaaaaaatgaaaaagagtaagaagaaagaaaaaagaaaattgatggattgtgtttattccacctcaagaaatctgggtgtatactatattaacttatttgcaaatttgaattttgcaaatttgaattttaagataaacctattttctccttaatagaaacattactgttagaatagtgttcagctaagttgtgagaagcataaactatcatatttgttagtacttttaaaagacacagaaagaatgatctattccagtaggaagtcataagcaagagtaattttctcctagccttaaaaattaattacttttggtttggcacgtgaacctgtatgtttgtgtagttagttaatggctaagccgcgaaactctaggaattgcagttaagggataagaaaagattacacttcggaataaactggctgactaataacagtaatttgggggttctctaggcatatgttttcatttattggtttggggaatttcaaggactttgagtaagtggttcttcaggagaactggcagatataaggagcaagcgtggttatccaaagaaagacagacaaggttatcagaattgatactatttatgaagacagtgtttggttgatgactgaaaggaaagtttgtaacccaacatttgggcactgtttggtttctacttaatacaagtgatcaaggatttttattgtgactcaaaagtaatggactcaattgcccagaagtaaataaggatgttggtaatacagtagtccttatccgtggtttcactttctggggtttcagttacctatggtcaaccatgatccaaaaatattaaaaggaaaatttcagaagtaaacattttgttagttttaagtagcacgctgttctgagaaacgtgatgagacctcacattgtcctgctctgtcccgcccaggatgtgaatcatccctttgtttagctttacattgtagatgctacccactcattagtcacttggtagccatcttgggccattattaagtgcagtaagggttacctggacacatgcactgagataccacagcagtggattggataaccctctgtatgtcccccattagtcactagccatctccgttttcaaatcgactgttgtaatatcatagtacttgtgttcaagtaatccttattttacttagtaatggccccaaagcgcaagagtagtgttgccagcatgttggcataattgctctattttattagtagttattgttaatctcttaccatgcctaatttataaattaaactatcaggtatgtatgtataagaaaaaaacagtatatatagggttcgttaccatcggagtttttaggcatcgactgggggtgtttgagtgtatcctttgaagataaggaggggactactgtacaactgttttggattcctttgactaaaataattgatttttttaaaatcttcacttttttcctaatatgggcttattatctgattagaaatattaaaaatgcaatggccattctgggaaaaaaacatttagctgtgtatataaagctttaattcccaaaatgaagttaatggcatttattgagatctggcatataatacaaaactagcagtccctttggggccaattgatgtaattattttcagtgtaaatcctaaaggttgcctgttttaggttaggagatgatagtaaaaatacctaatgctctgtttttatacctcatactaggtagccaatctgaattctaaggacctctcatataccttaaaggattatgtttttaaagagcttcaaagagactggcctggatacagtgaaatagacagacggtcattggagtcagtgctctctaggtgaattctttttttcttgcttttaaaaaaatgtttctttaaaaattatggaaataagtcattattttagtcattgttattttagtgttaaggtgggaagggaagcaaggcaagctttctatcatgaacatttttaaatcatctccttaacacataacatgtgtgtcctttacagaaaactaaatccgtctcagaatgctgcaggcaccagccgttcagaatctcctgtatgttctagtagagacgctgtatcttctcctcaggtatgtcataaacatagaattatagacctgacatagatattaggggcctctaatcaggtcctctgatgtataagtgaaggaaatgagacccggagaagctggacagcttgcctgcccaaagccatctggttatggctgagcttagcctagaatttaggtcttggcttccagcccagaactttctccactacacagcactgcttgtcagagtacttaatgtctaccttgctttccatttttaaagtttacattttgttgtaagattatctactttccaatttggtcactaactagaagacttacccagtcccaaacaattatcagattatatggaaaattgaagatacttaattttgtctgtcaacatgttccagaagaatattttttggggaaaatggatttacaatcaacaaataaacaaaaatgatggcatgtttccatgttttctttttaattggatccttatcagagtactcccaatcagattcttctccagtttagagttttcccccaagagattcagctcatccaagaaaaaggtgagaaggtcctaggcagtactagagtgaagcctgcctgattctcagctgattggccaactcagaactctctcggtgttctgggtgctttgacaagacagtgggacgcacctccccaccccagtactgctgacacagtgtcttccctctctctctctggaccttactccctaagaattagtgagaagcccacagatgtgtggagaacactaagcatacctgggcaaacagccattcgcacatcagaaaatattagaaacttattgtgaggaacagagggggaacaaaaaagaaaaaggaaaaaaagcaggtctgtccttgcatatatacaatgtctgtggaagtctcacttttaatgccaactattatgaaactacttctactctgatcaaattatatactaggtgccaaataaatggtgttaaattgaaaacaaaataatgagttgattaaccattattttctttcaagccagaatacaagctacagcattacatttaagcataaatgtgaatttatattttatagttttcaactatctaaatttcctttttaacttaaatactattattgttgttgacagattaggctactattaccatgattttttttaaagtacttccacctaattttaatggaccaattattaagacttatcttccaatctggtaaagagatatgtaacggtaaaaaaaaaaattaaatagcatttcaacagtgatagagataattagagaaactattctgaaagtgctggctgttcccactctaagacaggtggaatgataaatgacagccaaaatactcttaactggagcattttagcccattaaagattaaaataagtgcaggctattgccctttacctagctgtgttagttctcacagagtcaaacggcacaaattgctttctcttctcatttaatataactaggtcaaccacagccagcaatggagggtgactgcctctgtttaatactctcctgagtggtataatccacataaatcagcatagtctctcttggaacttagggtaaagctgtatgattagaaagaattcagtaagcacttcaagaaacatttgccagattctgctttttgacattaaacatgaaaatgtatttcacatttggttttgtgttgttgttgttctggtttagtttttgtttgggttttttgtttgtttgttttttgcttaagcatgaagaaagcgtgtaatattacaaccctggtaatattaatagtaagtaaggttacttagttgtttaaccagccatgcatgtattgaatttatttaattttagtgcaaactggctcacttttctccttttccctcccctagaaacggcttttggattcagagtttattgatcctttaatgaataaaaaagcccgaatatctcacctgacgaacagagtaccaccaacactaaatggtcatttgaatcccaccagtgaaaaatctgctgcaggcctcccgctgccccctgcggctgctgccatccctacccctccaccgctgccttcaacctatctgcccatctcacatcctcctcagattgtaaattctaactccaactcccctagcactccagaaggccgggggactcaagacctacctgttgacagttttagtcaaaacgatagtatctatgaggaccagcaagacaaatatacctctaggacttctctggaaaccttaccccctggttccgttctactaaagtgtccaaagcctatggaagaaaaccattcaatgtctcacaaaaagtccaaaaagaagtctaaaaaacataaggaaaaggaccaaataaaaaagcacgacattgagactattgaggaaaaggaggaagatcttaagagagaagaggaaattgccaagctaaataactccagtccaaattccagtggaggtattttacctttagatgaaccagaagtgcatgctatcatgagtttgaaattacacagtttataattagtaatttctttagcaaatgacgtttcatttaattattaatcttagtgttgtgcttttgagcagtttttttttttttttttcattttacagcagttgttttccatctctttttggccaactattaaacatgatttctatattaataagaatggcatttgaaaatgactgtcatacttgagactcctttttggaaggtggacctttaacattcttttccatatctgttatgatattgtgcagcctcagcatgacctattatatgccattcttgaactgatttaatcagacacaatttgcaataagaatattcatttccttctttctcaatgaaacagggtcacccttgcttcaattaatattagcacaggggaaaggtcaactttttaataaatcaggccaagataaaatttcatttgcagattcataacatcatctttatttagagtgaaaacactttgtcttttgcaagactgttggctagcgttcgcttaatagatcttaaggtttaggggtttttcccccaattttgagagtcctgttttagtgaactaacatcaattgttatttgtaaaattagccatttcaaagctttaggagcttaaatgctaaatatctagagatccaaagaaacttaaagctttacctctaaagaaaagctaattcataaaaagcttgcttgcctaagatgtcctgagtgttaaaaactgacaaaattagatttttcttatttaaaaaatatgtcctctaaaacttaattccttgcatgccaccacatagaagatccaagttcaccatttggcattgctgccagttttaaaaccagaataactaaggcaaaattccataggaaaatatggctttggaaaaattactttaatgagtagagttataaggagtgttgtctttctgtattttgctcatgattctgaaagtctgtaatccttagatttaattgaccatctttgccatatgagagaagctctattttcttttagtgttacttccaaagaagccgctgtagaatatgatatgatatgtgcttttcttgatctagattggatacattgcatgtcaaagcatttctgtttaaatatttcagtcaatataatactatgtaatggcacaaaaggtaggtgtaagctttttccctcaacactcttatagttgaatttgtcaggtcaggaaaagaaatgaagtagaactctatgttcagagttcataagccactgggtaaactccactctccacactttccaccctcaggtggtgcttctgagtcaaaggctagagacaggaaaactggatttcagtatgttgagatctacatcagagttccaagtgttctcagagttggagacctggagaagcagacttagtctctttgaattctttactgaggatatagtaactttcagaaccagttgcgataattacaaagttaggaaagctctagacccacatcccctgcattttttggaatttatctggtgtctatggcagaagggaagccaggtgacctgcacttgatgcctttctctttaagactcagactatcgtaaaagcatgttcttttacccaagcatgaatttataggtgagcagcatgcactcagagtctatgtattaatatttgtttagggtactttgtcctttaaaatattaaaccgagaaattacctaacattcacttttatatgttttgccagtgggcatgattagggtttgagttatcagtttaaccctactttcaatgataaaaaattaccctgataaagaatctaaacatatcctctggacatggtgcatttaagcaaatggcatactgagggatttacatactttcactgtgtagccacaatgtttagcacttcttttgtccttaaaaaaaaaaaaatctgtttagtgttatgagtgctagagattataggaatataatcgacattcaataataccttattttaaattactttaaaccaatgggaaaactttctaccaaattccactgtctgcatacaaaaaagggaggcaataaaaatacagtgaccaaagcagtcggctacctgactctattgtctcatccgccttgtttgaatcccatgaaaagtagatgttgatgtaaaatttgtatctcccattgtctggctgcatctgccaccacaatctttgaattgctgggcagatgccacaactgttgttgaaagaatagaagactgaccttgggttaagatggaattcctttattgtgcagacactgcagtagccagggtgctttaaatgcctggcgtcggttctgctggcgctggtcatagggcctctattgttcatgttcaattgtattccttgctcactgttgcttattgagatggaagaatagaatttgaggaaaagtgttccagatgtttctaatctattttagaattacaggcatttgataaccttcgtagttgatgaatgctctgattttgttttttttcttcataggagttaaagaggattgcactgcctccatggaaccttcagcaattgaactcccagattatttgatgtaagttcatatgtctgccaatggagagagcggcttaattttagaaagtttgcaaattcttttcccataatttgcaaatcagaaaagtaagaagttccagaaatagagtcctggagccacccttgcaattgaaaggctgccatttagcctgctcatcccaaatctacccttgtctgcatgagcaggttgtgcctccccccgctctgagctgtattcgttggcctttaagtatagagaatcctgtcctttgttctggggccaggctaagcatttgattatgaaagattttagggatctgactcttcaaagctgacagtcttatcaatgcacagtcattcacttgggtcccccaaagggatggtttactgctgacaaagtgcttgaacctctgcacataataatacaaagtgtaaagatagattgatttttatttaagttctgccctcaaattaatttttagaggagataagagtaaaatctgatcatttcaatttagtaatggttataatgttttcttgttgtgacaacaagttgctaaatgctgagctggggacatttttgtaactggttatcacagaaattataacttggacacataattctagcttttttgcagaataaaaggcctctgtaagaagaaaataattaagttgcaagagcctggaaaaatggagagggaaagagcaaacaaatctgactttggatagctttgaaaatgaacaaatgtgcaaaatagctagaatgtaaaagggaaaatggaatctgggctgtctgaacactttttttctattagtagcatctcatggtggacaatgttaaactatgctgtttagcccttttcatttccagagtaaagatcattttagatttaaaatgtgttacttctgcttaacagtagtgtgaaagctatacttattggggaatgatacagtatgaaaccataatgctggttatcatctcttaactaacaggaacttgagaaaccttgctgagtaccctctcatctgaggtagtgtatggttttagagttctctaggagggccttgaaaggcagctatcacctaccacttagttggcccaggaagggtcagttgtctgcagccagtcttccaggacagcctctggctctgctgctgagggggttcacctctttaactgcaaacgacttctccttagaagtctttaaatgtcagcccccttgagtagcaactgccaatgcagtgctcttgttcttttttgaattcttttttataatagtgacatatacttattatatacgacagaatcatgtggggaaactaaaaaacaatgctaaacttttgcccatggattcaaggctgttgtgttttgccaagttcattagttaatcccccctttttttgtttttgagacggaatttcgctcttgttgcccaggctggagtgcgatggtgcgacctcggctcactgcaacctccacctccagggttcaagcggagcctcccaagtagctgggattacaggcgcccactaccacgcctgggtaattttttgtatttttagtagagatggcgtttcgccatattggccaggctagtctcgaactcctgacctcaggtgatccacccacctcaagcctcacaaagtgctgggattacaggtgtgagcctggccttaatttcatatttaaaaggttttttcaggttacttatctaaggatggttcctggatctgccttggtgcatttctgtatgtttgtcatgtttctagtactatgtgattgttcgcttaatttatttaaataaacacaatttatattaactaaaaactagtcttacatagatatagcaaattttctaaaaatagtgaaaaagcgtggattttcagaaaaattaccaaaactacagaacttaagttgcctcataagaaaactaaagggatatactataaaacctaaatgatcgaggccgggcgcggtggctcacgcctgtaatcccagcactgtgggaggccgaggtgggcggatcacgaggtcaggagatcgagaccatcctggctaacatggtgaaaccccgtctctactaaaaatacaaaaaattagtcgagcgtggtggcgggtgcctgtggttcccagctactgaggaggctgaggcaggagaatggtgtgaacccgggaggcggagtttgcagtgagccaagatggtgccactgcactccagcctgggcgacagagcaagacaccatctcaaaaaaataataaaaaacctaaattatcaacctttgaataattcatacttaacgaaaatatttctaatttttatgtaataagaatacttttacttgtagttaagctatcaaaactgtttaaaattttttccatcaccacataaacagccaactgtagaactacaacaatttttcgtaaaagtaggacaacttttttcttaaaaatgccagtgtaaccaaataatctcttctataatagcaacacagttgttgaccacacaactgtggtcattgaataatttccctaaggaaattattaaataaaatactgaaggtatgcttttgagaaagcacgataaatatataacaaattaagtctaagttttaagatcggtttagctgtgttgctaatatatgcttatccccaggaacctctttttaccccggggctccctctggtgtacagtcaatacagcccatgcctaggaaggactgcttcactgcttggctggcagtgtaccttttatagctaagacaccaggagggcagctttacatcagcagactatcactgtctcaattatacttagaaaattaaacctctacactgtctaattcagcatgaataaaaatattaatgaggacactaagtttgctcactgcatcacttttctcacattttctgctaggcgtctgtgatattagtaatttaaacaaactgatgggcttatataagaccatttggagaggactgaactccaagattttatggcagtgaagaatatatgtgtacccccaaggggcatcctgaatctcctgccacctgcctgaaattgctttgaaatctcaatttttatttcaaaaactcaagggaagtttgcattaatgataggaacacagagtgcaaagaaccaggccagttccttatgtgatcccagttcccagatctacaaataagtaatactgtaatatgtaataggccaggcgcagtggctcacgcctataatcctagcactttgggaggccaaggcgggtggatcacttggggccaggggttcgagaccagactgggcaacatgacgaaaccctgtctctactaaaaatacaaaaattagccgggcatggtggcatgtacctgtaatctcagctactcaggaggctgaggcacgagaatcggttgagcccaggaggtagaggttgcagtgagctgagatcgcgccactgccctctggcctgggcgacagagcaagactccgtctcaaaaaaaaaaaaaaagtaatactgtaattctaagtttaataataaaatgctgttttaatttacttattattgaataaactgatgctctaggaaaatggtcttctcttaccagttaagagtaatttacatcccaaagtaaaacagatttatggcattttattaagaaagtaagttggactaatagtacaacactggcttttgttcaacatagtatgacatttaaatgtttgaaaagaactagagaaatatgcctttttttggtctaaccctcattttacagaatggttggtaatttcccttttgtgtttcatgtatttgcttggtcagaaatatgaggaaagggatagaggaagcaagcctgaggcactttgttgaagatgtctgctagcagcatatctgaaaggccaagcaacagactgcctctcataaagcagtaggtccagagagagctttgactttcagcactcacggactgcgtgacattctcctggtttcacattacccattgagtccttctgtctctctgtgacttgtaacagatgggttagcatccaccattagtgtggtagtgaattatcttggatagagaaaggttcaggaaactagatctgtgtaaatactgttttctttttacttagttgcattttagttccattgccaccatgtctttaccacatttactctccttcgttgaagctctcaaactctgtgtaataattttacctggaagatgtttggaggagtgacctggcagccaaccagtggcagagtggcattaaacattagtgacacatgcatggatctaatctctaaatatttggtttaaatctcagacttgtgcaatcatgtttattgggtagctactctccatttatcttttttcttattagaaaatatatcgctatcgtctcctatgagcaacgccagaattataaggatgacttcaatgcagagtatgatgagtacagagctttgcatgccaggatggagactgtagctagaagatttatcaaactagatgcacaaagaaagcgcctttctccaggctcaaaagagtatcaggtaaatggatttgtaactagatgggctgactttcatattttaccttctttctttccctgccctgctcaacctcagccatcacagtggcctttagagtaagtactcttgcagaccagcctcgctgctgctttaggaaactaaatatttgaaatagttcttgaaaataaattaacatagtaaacctgtatttctaccagtggaaaaaaaccttgtgccactataatgtatcacatattgagaaaaataccaaacacaactaaataggaaaaaaagttggatcttgagattcagctaactatttgattaattacactgccaacttagactacagctcataggtctggtgctatcccaaaacagtgctatttcaagtatttttctttaaacctcaatctgagatagaatagggaagatacaaacataggaaataaagagggcttaatacacagagatttggggtttaagtaaagaagtttgctgcttctagctacaaagacggatcttgttaaccagtcttactctgttttcactttcctacttgaagtggtaatattactacagctgacaaagagcaggagatgcctgcctgacctgtctcctgattatttttgtagttcttagcaaagggattgatagaaatgagtatttccctcccgtgtgggctagataactttgtcacacttcacggacacaggtggtatagtggtgcctctgtcccagcccactaccagtgttcaggctggagcctacgtgagacaatggatgagttttcccacaacagtaaacagcctgagagcatttgtgtcctcaagattcattatgtcttctactagagggccttaatctttttcaacaagctggcgagagttataggagactgccagaagaatcggtgttcagaggtgcaagaggttggtgacatggtggtttggggtttatttttttttctatatagtcatttatcaatgtatataattatactgaaactagaatataattccaaggattacttggttaggagtggttaatatttgtgtggccttgggcaagttacttaatgcctctttgccttgaattccccatccataaaatgggataatcattgagttatgaggaataaacataagtaagcacagtaaagtgcctggatccatgcctggtacttggtacatacattaggctattatcccccccaggcacctgactccccccctcaccaatccccacagaaaatcactgttactggtttccagtgtattctttcgaagtgtgtttatgtgtgtgatatgtgcatgtatgtacacatggtataaaatgtatgtacatatctacacaagtaatttcaacatatataccgtatttaattgaatctaaggtttcttcatttgtaagctacaccattgttttatgcccaataacttaaattatgatacattattatttgtactggtttcattgaaatggggagaaatgagcatcttacaagtaatggaattcttagaatactattgtgtttttctcttttaaactaatggtatcaagctgtccatattgttcagcactttgctttcttcactaaacaatataatgcatcttagagaatttttttatattggtacataaaacactttggcatgttttaatggcctcttagtatcctttgtatagattgatggacatttcaattttgtttactgtcttttgctttacaaacagcactacagtgaataatcttgtatatgtgtcattcactggggagcaagtgtgtccataggataagtagaattgctgagtcgattttgcatttactattttgatagctgttgccacattgccttccataaagattgtttcaagttacattcccacagtcaatatttcctatactcttgctgaatgcatgttatctatttgtattgccacacacaaaagaagttgttctcttctgatttctaatatttaattttgtagaatgttcatgaagaagtcttacaagaatatcagaagataaagcaggtaggtatcatcactgttgattttctgacctgtggttgaaaaatgttgtaaattctgcaatctcattcctcttttttttttttttttttcatctgcagtctagtcccaattaccatgaagaaaaatacagatgtgaatatcttcataacaagctggctcacatcaaaaggctaataggtgaatttgaccaacagcaagcagagtcatggtcctagaactctgcttggaccagaagatgtgaataaacttaagcttatttatttaaaattccaaatgagttgctctagattctaaaaaggtgaaactttggctgttgaaagtttcagtattagtaaacttgagttactttttcttttccattttactttgcttccctgcatttcgaagctgctctttctggtcctccccaccaccccacccccaagacttgtgtttgttaatagaaataatttttttaggtattggggatccattgtctatatttcaaatcagttttttttcctcaaaaacttgtgtttgttattagaaatgattttttagatattggggatccagtgtccacacttaaaagttgtatgtgtttaaaaaacaacaacagtaatgtgcaaggtgaaatgcttttggataaacgtaagcctattttctgacgtttcttaatgcaaactctttgccttaaatggtagaatatttagaaatttgcacaaaattaaaaaaataaacattgtcttggagggttaaaaaatagaaaggtgtatgtgtatagattcacatacacatatgtatatacaggctgacttgatctagaacattaaatccgccctgcaagttaaccccccattgcaatggttgccttaaggtgtttgctagttgtgtacatagtgtggttaatcattagctacactgcttcccacttgattagagcaatgggaagcatactgtggcctaccagcatctggaagtgtgtgctcgatctgtatgtgtgcagaggtggtgtggatgtgagcgtgcatgaaggaaaaaaagctgctactcctagtaggccaaacgctcaggttaaacaactgacgagtgttactgtagggtgtttttttgttttttgttttttttcttctatcaaattgctactttgttgtggaagacaaaagcatttccatttcaacgagttgtcagctttattaatgttgggcaaaaattgatatgtcatgaaaatgaaacagatctatagttttgggacaaaattataaaatgaaatgtgtaggtaacctatttatatactgctataa

SEQ ID NO: 8912 - DNA, 22140 bp, Homo sapiens
cttctgaacgtgtgaaattactaacgtaatgctcagccaagagtgtgttcttagagaggtctgacaggtatttctgacatttcaccatgttcactgtattatagtttgcttttcagaaatggcatatatttatttaagatataagttatcaagtctgttgttacagtttgtgttactagttattatctttctgtagcaaaatgaccaaaatacatgcattatacatattatttccaagaaatgattttattaaaataatttctaattcaaattttagaccatttatttaaaatgctttctgtttgcatgccttcttaaagattgaaataaagtggcctttattattatttcctctagaaatgaagaggtacctaaatcagaattgtggaaactgaggtgctcatattgtaacccacaaatgtgtaacaatgtcatttccactggactttagggaaaagagtgcaaattcggaaagcacctcaagctgtttcagatacagttcctgagaggaaaaggtcaacccccatgaaccctgcaaatacaattcgaaagacacatagcagcagcaccatctctcagaggccatacagggacagggtgattcacttactggccctgaaggcctacaagaaaccggagctacttgctagactccagaaagatggtgtcaatcaaaaagacaagaactccctgggagcaattctgcaacaggtgaggacagctggagagaggtccttcctgcttaccttcttgttaaaatgttcatttaaaaaagcttgttgtcattattatcattattattgagatagagaaattttaggattattttgatcagtggtatgtgaaatacaactcctgaatattaagttaaatcatctcattttaagcacttaattaaaaactagttgaaatgtgagcattgtctttatttgggaccaacaaattttgttctcaaattccattaaaaagaaagtaagaagtgtttgttatctgtttttagtgttgaatacactaaagtattgccttaatttgtattgattattgtcggtgaaattgtgcaatgtattctattggcctttgattggtataagccagaacattttttgcctactaaatagtttaaaatgtatcttgccccacatactttgtgctgcccttattactctatctttttctgccactaagtgtgccaagatcagtcatttgtctgcataaaagcatatgaaattgtaatgtattagcagtgatcccatactttatcacaagcttacgtgtaagaaagtaggccattgttttttaaagtcagtggtttgttagactataacctcctacatatttttttcttccttccttctgtccatctgtcataaatctttatgagcattcagatccaccataaatggtggtccatcttttttactttttctaaggaaataacatttccaaagaagttattctgaatctcatcatttaaaaaaaaaaaaaaccctacaggttttgatctgttattcaaagagtaacatttcaagtctatttttttatccattatctcttacattcacaacataatactaaatgttatgaaagggtaagaccattgtctccaattcaggttagccagtccccaaggtatctcaatcaatcttaaggatctttattaagtcctttagcactttttggaaataatttaaatccatatgtcacatagcagttttaagagctcaaaagaaagagaataaatgagaatgagggtgtgtgtgttcagtttgatatctggagaagcagtgagagtcaggttacaaatcacaaagcatttggtaactgcatctccagaaaagttgtgaattagcttctcagtttgataatggagaaggcaaaatgactgcagaggcaattcacacatagactactattgatatatggcagtaattatgtgattgtgtatatacatatagatatctaaatatatatatatatacgtgtgtgtgtgtgtgtgcgcgtatctcaaagtgtagataaactttacccccaagcgaggcatgagagttattagtgttgatcatttgatagaatctagagcatcatctcatcctggtaacatattagaatcccttgggtagcctttaaaacatgccagtgcctgaactccacctgagaccaacaaaagccaagtatctgaaggtggggcctaggcactcatattctatatggccctaatgattctaatatacgagctgaaaccactggcctagtgaaaacacagaaaggctaacaacatcgaccattttttgagcatatactatgtgccaggcacagtgctaggcatttcacgtgcacgatctcatttatcctcccaagaaagatatcaggcatattcataactttgacataaaccaattatacctaaattccctttcctgaacattgctagcagctaacaaaaaaaaataaaatgactttgctctaataaaactgaccaaaagtaggcaccagagaaaagaagagccgcaagatacatacaaatcatcccaaaattggttattctgtcccagacaaactagttgggaaacaagttacctaaaataattaatcaggctttgcctgtgccagtagagataatttgcttatttgttacttacacagtagttttcagaaccctgtggacattattaattcatcaaagtaataggtttttaaaataaactaagatgttggctcccggtaaaatttgtacctaaatttaaaagtgcttaacatccaccaggaaatttgtgtattgctgtttattattaaactggtatgtattaataaaacctttttttcttagaatgaccttttatggaaaaactaaattttaacaatcagaaactagataaagttgaataatgtatccagcttaacatttggatatttggctcaagctcaacattcattcattcaattcaacttattaagtacctacagtgtaccagacactgttttaaatgctggaatcccaaagtaaccccaatagaaaccctgccctcatggagcttattcatgagacaatttcaggaccagtgaggagttgaaaggagctggggaaggaatcctctgctttaagtggagagatcagggaaccttttctcagatggctgcattttagactgcatttagactgcatttaagacttctacggcaagaatggcttggaggggcaggagtagaggagagagactacttaaagagcctaatattttgtgataagacttgctaacggttaggtgtagggagacaatgaggggaagaacggaatctgtgattatagctaggtttttggctgagcaattgaatggatattgagccattgactgagatgcggaaggatggaaaagaagtaggattaagggggagaagaggatcaggaattctgtcttatatagactccatttggaagatgtctattagacatatccaagtggagatagatgtcagtagatagttatatgtaagggtgtggttgtcagaggatagttggggctagagttataaatttaggaattagcagcatatatattgggtattgaaagtcttcaaacttaatgaaatcatcttaggaggaaatgaacagaatgaggaaaacagagcagaaaacaggcactaagtactttagcatttcaacatatagaggattgagaaacagagacttaaaaaacaaaggtcctaggccaggcgccgtggctcacccctgtaatcccagcgctttaggaggccgaggtggggggatcacgaggtcaggaattcgagactagcctggccaacatggtgaaacacatggtgaaactctgtctctactaaaaatacaaaaattagctgggcatggtgacaggcgcctatatcccagctactcaggaggctgaggcaggagaattgcctgtatctgggaggcagaggttgcagtgagctgagatcatgccactgcactccagcctgggcgacagagcaagactctgtctcggaaaaaaaaaaaaaaaaaaaaaaaaaaaggtcctaagagaggcggaaaccaggagaatgtcctattacaaaaacctagaaaatggattgctgtgggggtgggggtgtcaatgtgtgtagtgctgggggtaaaagaaaatggaagcattgccagtggggcgtagtggctcacacctataatcccagcactttaggaggccaagggaagattgcttgagcccgggagtttgagaccagtctacacaatatggtgaaaccccatctctacaaaaaatacaaaatacaaaaactagccgggcatagtggtgtccacctgtagtcccagctactcaggaggctgaggtgggagtaccacctgagcccaagaagtcaaggctgcagtgagccatgttcctgccactggactccagcctgggtgacagagtgagaccttgtctcaaaaaatgaaaaagagtaagaagaaagaaaaaagaaaattgatggattgtgtttattccacctcaagaaatctgggtgtatactatattaacttatttgcaaatttgaattttgcaaatttgaattttaagataaacctattttctccttaatagaaacattactgttagaatagtgttcagctaagttgtgagaagcataaactatcatatttgttagtacttttaaaagacacagaaagaatgatctattccagtaggaagtcataagcaagagtaattttctcctagccttaaaaattaattacttttggtttggcacgtgaacctgtatgtttgtgtagttagttaatggctaagccgcgaaactctaggaattgcagttaagggataagaaaagattacacttcggaataaactggctgactaataacagtaatttgggggttctctaggcatatgttttcatttattggtttggggaatttcaaggactttgagtaagtggttcttcaggagaactggcagatataaggagcaagcgtggttatccaaagaaagacagacaaggttatcagaattgatactatttatgaagacagtgtttggttgatgactgaaaggaaagtttgtaacccaacatttgggcactgtttggtttctacttaatacaagtgatcaaggatttttattgtgactcaaaagtaatggactcaattgcccagaagtaaataaggatgttggtaatacagtagtccttatccgtggtttcactttctggggtttcagttacctatggtcaaccatgatccaaaaatattaaaaggaaaatttcagaagtaaacattttgttagttttaagtagcacgctgttctgagaaacgtgatgagacctcacattgtcctgctctgtcccgcccaggatgtgaatcatccctttgtttagctttacattgtagatgctacccactcattagtcacttggtagccatcttgggccattattaagtgcagtaagggttacctggacacatgcactgagataccacagcagtggattggataaccctctgtatgtcccccattagtcactagccatctccgttttcaaatcgactgttgtaatatcatagtacttgtgttcaagtaatccttattttacttagtaatggccccaaagcgcaagagtagtgttgccagcatgttggcataattgctctattttattagtagttattgttaatctcttaccatgcctaatttataaattaaactatcaggtatgtatgtataagaaaaaaacagtatatatagggttcgttaccatcggagtttttaggcatcgactgggggtgtttgagtgtatcctttgaagataaggaggggactactgtacaactgttttggattcctttgactaaaataattgatttttttaaaatcttcacttttttcctaatatgggcttattatctgattagaaatattaaaaatgcaatggccattctgggaaaaaaacatttagctgtgtatataaagctttaattcccaaaatgaagttaatggcatttattgagatctggcatataatacaaaactagcagtccctttggggccaattgatgtaattattttcagtgtaaatcctaaaggttgcctgttttaggttaggagatgatagtaaaaatacctaatgctctgtttttatacctcatactaggtagccaatctgaattctaaggacctctcatataccttaaaggattatgtttttaaagagcttcaaagagactggcctggatacagtgaaatagacagacggtcattggagtcagtgctctctaggtgaattctttttttcttgcttttaaaaaaatgtttctttaaaaattatggaaataagtcattattttagtcattgttattttagtgttaaggtgggaagggaagcaaggcaagctttctatcatgaacatttttaaatcatctccttaacacataacatgtgtgtcctttacagaaaactaaatccgtctcagaatgctgcaggcaccagccgttcagaatctcctgtatgttctagtagagacgctgtatcttctcctcaggtatgtcataaacatagaattatagacctgacatagatattaggggcctctaatcaggtcctctgatgtataagtgaaggaaatgagacccggagaagctggacagcttgcctgcccaaagccatctggttatggctgagcttagcctagaatttaggtcttggcttccagcccagaactttctccactacacagcactgcttgtcagagtacttaatgtctaccttgctttccatttttaaagtttacattttgttgtaagattatctactttccaatttggtcactaactagaagacttacccagtcccaaacaattatcagattatatggaaaattgaagatacttaattttgtctgtcaacatgttccagaagaatattttttggggaaaatggatttacaatcaacaaataaacaaaaatgatggcatgtttccatgttttctttttaattggatccttatcagagtactcccaatcagattcttctccagtttagagttttcccccaagagattcagctcatccaagaaaaaggtgagaaggtcctaggcagtactagagtgaagcctgcctgattctcagctgattggccaaactcagaactctctcggtgttctgggtgcttttgacagacagtgggacgcacctccccaccccagtactgctgacacagtgtcttccctctctctctctggaccttactcccaagaattagtgagaagcccacagatgtgtggagaacactaagcataccctgggcaaacagccattcgcacatcagaaaatattagaaacttattgtgaggaacagagggggaacaaaaaagaaaaaggaaaaaaagcaggtctgtccttgcatatatacaatgtctgtggaagtctcacttttaatgccaactattatgaaactacttctactctgatcaaattatatactaggtgccaaataaatggtgttaaattgaaaacaaaataatgagttgattaaccattattttctttcaagccagaatacaagctacagcattacatttaagcataaatgtgaatttatattttatagttttcaactatctaaatttcctttttaacttaaatactattattgttgttgacagattaggctactattaccatgattttttttaaagtacttccacctaattttaatggaccaattattaagacttatcttccaatctggtaaagagatatgtaacggtaaaaaaaaaaattaaatagcatttcaacagtgatagagataattagagaaactattctgaaagtgctggctgttcccactctaagacaggtggaatgataaatgacagccaaaatactcttaactggagcattttagcccattaaagattaaaataagtgcaggctattgccctttacctagctgtgttagttctcacagagtcaaacggcacaaattgctttctcttctcatttaatataactaggtcaaccacagccagcaatggagggtgactgcctctgtttaatactctcctgagtggtataatccacataaatcagcatagtctctcttggaacttagggtaaagctgtatgattagaaagaattcagtaagcacttcaagaaacatttgccagattctgctttttgacattaaacatgaaaatgtatttcacatttggttttgtgttgttgttgttctggtttagtttttgtttgggttttttgtttgtttgttttttgcttaagcatgaagaaagcgtgtaatattacaaccctggtaatattaatagtaagtaaggttacttagttgtttaaccagccatgcatgtattgaatttatttaattttagtgcaaactggctcacttttctccttttccctcccctagaaacggcttttggattcagagtttattgatcctttaatgaataaaaaagcccgaatatctcacctgacgaacagagtaccaccaacactaaatggtcatttgaatcccaccagtgaaaaatctgctgcaggcctcccgctgccccctgcggctgctgccatccctacccctccaccgctgccttcaacctatctgcccatctcacatcctcctcagattgtaaattctaactccaactcccctagcactccagaaggccgggggactcaagacctacctgttgacagttttagtcaaaacgatagtatctatgaggaccagcaagacaaatatacctctaggacttctctggaaaccttaccccctggttccgttctactaaagtgtccaaagcctatggaagaaaaccattcaatgtctcacaaaaagtccaaaaagaagtctaaaaaacataaggaaaaggaccaaataaaaaagcacgacattgagactattgaggaaaaggaggaagatcttaagagagaagaggaaattgccaagctaaataactccagtccaaattccagtggaggtattttacctttagatgaaccagaagtgcatgctatcatgagtttgaaattacacagtttataattagtaatttctttagcaaatgacgtttcatttaattattaatcttagtgttgtgcttttgagcagtttttttttttttttttcattttacagcagttgttttccatctctttttggccaactattaaacatgatttctatattaataagaatggcatttgaaaatgactgtcatacttgagactcctttttggaaggtggacctttaacattcttttccatatctgttatgatattgtgcagcctcagcatgacctattatatgccattcttgaactgatttaatcagacacaatttgcaataagaatattcatttccttctttctcaatgaaacagggtcacccttgcttcaattaatattagcacaggggaaaggtcaactttttaataaatcaggccaagataaaatttcatttgcagattcataacatcatctttatttagagtgaaaacactttgtcttttgcaagactgttggctagcgttcgcttaatagatcttaaggtttaggggtttttcccccaattttgagagtcctgttttagtgaactaacatcaattgttatttgtaaaattagccatttcaaagctttaggagcttaaatgctaaatatctagagatccaaagaaacttaaagctttacctctaaagaaaagctaattcataaaaagcttgcttgcctaagatgtcctgagtgttaaaaactgacaaaattagatttttcttatttaaaaaatatgtcctctaaaacttaattccttgcatgccaccacatagaagatccaagttcaccatttggcattgctgccagttttaaaaccagaataactaaggcaaaattccataggaaaatatggctttggaaaaattactttaatgagtagagttataaggagtgttgtctttctgtattttgctcatgattctgaaagtctgtaatccttagatttaattgaccatctttgccatatgagagaagctctattttcttttagtgttacttccaaagaagccgctgtagaatatgatatgatatgtgcttttcttgatctagattggatacattgcatgtcaaagcatttctgtttaaatatttcagtcaatataatactatgtaatggcacaaaaggtaggtgtaagctttttccctcaacactcttatagttgaatttgtcaggtcaggaaaagaaatgaagtagaactctatgttcagagttcataagccactgggtaaactccactctccacactttccaccctcaggtggtgcttctgagtcaaaggctagagacaggaaaactggatttcagtatgttgagatctacatcagagttccaagtgttctcagagttggagacctggagaagcagacttagtctctttgaattctttactgaggatatagtaactttcagaaccagttgcgataattacaaagttaggaaagctctagacccacatcccctgcattttttggaatttatctggtgtctatggcagaagggaagccaggtgacctgcacttgatgcctttctctttaagactcagactatcgtaaaagcatgttcttttacccaagcatgaatttataggtgagcagcatgcactcagagtctatgtattaatatttgtttagggtactttgtcctttaaaatattaaaccgagaaattacctaacattcacttttatatgttttgccagtgggcatgattagggtttgagttatcagtttaaccctactttcaatgataaaaaattaccctgataaagaatctaaacatatcctctggacatggtgcatttaagcaaatggcatactgagggatttacatactttcactgtgtagccacaatgtttagcacttcttttgtccttaaaaaaaaaaaaatctgtttagtgttatgagtgctagagattataggaatataaatcgacattcaataataccttattttaaattactttaaaccaatgggaaaactttctaccaaattccactgtctgcatacaaaaaagggaggcaataaaaatacagtgaccaaagcagtcggctacctgactctattgtctcatccgccttgtttgaatcccatgaaaagtagatgttgatgtaaaatttgtatctcccattgtctggctgcatctgccaccacaatctttgaattgctgggcagatgccacaactgttgttgaaagaatagaagactgaccttgggttaagatggaattcctttattgtgcagacactgcagtagccagggtgctttaaatgcctggcgtcggttctgctggcgctggtcatagggcctctattgttcatgttcaattgtattccttgctcactgttgcttattgagatggaagaatagaatttgaggaaaagtgttccagatgtttctaatctattttagaattacaggcatttgataaccttcgtagttgatgaatgctctgattttgttttttttcttcataggagttaaagaggattgcactgcctccatggaaccttcagcaattgaactcccagattatttgatgtaagttcatatgtctgccaatggagagagcggcttaattttagaaagtttgcaaattcttttcccataatttgcaaatcagaaaagtaagaagttccagaaatagagtcctggagccacccttgcaattgaaaggctgccatttagcctgctcatcccaaatctacccttgtctgcatgagcaggttgtgcctccccccgctctgagctgtattcgttggcctttaagtatagagaatcctgtcctttgttctggggccaggctaagcatttgattatgaaagattttagggatctgactcttcaaagctgacagtcttatcaatgcacagtcattcacttgggtcccccaaagggatggtttactgctgacaaagtgcttgaacctctgcacataataatacaaagtgtaaagatagattgatttttatttaagttctgccctcaaattaatttttagaggagataagagtaaaatctgatcatttcaatttagtaatggttataatgttttcttgttgtgacaacaagttgctaaatgctgagctggggacatttttgtaactggttatcacagaaattataacttggacacataattctagcttttttgcagaataaaaggcctctgtaagaagaaaataattaagttgcaagagcctggaaaaatggagagggaaagagcaaacaaatctgactttggatagctttgaaaatgaacaaatgtgcaaaatagctagaatgtaaaagggaaaatggaatctgggctgtctgaacactttttttctattagtagcatctcatggtggacaatgttaaactatgctgtttagcccttttcatttccagagtaaagatcattttagatttaaaatgtgttacttctgcttaacagtagtgtgaaagctatacttattggggaatgatacagtatgaaaccataatgctggttatcatctcttaactaacaggaacttgagaaaccttgctgagtaccctctcatctgaggtagtgtatggttttagagttctctaggagggccttgaaaggcagctatcacctaccacttagttggcccaggaagggtcagttgtctgcagccagtcttccaggacagcctctggctctgctgctgagggggttcacctctttaactgcaaacgacttctccttagaagtctttaaatgtcagcccccttgagtagcaactgccaatgcagtgctcttgttcttttttgaattcttttttataatagtgacatatacttattatatacgacagaatcatgtggggaaactaaaaaacaatgctaaacttttgcccatggattcaaggctgttgtgttttgccaagttcattagttaatcccccctttttttgtttttgagacggaatttcgctcttgttgcccaggctggagtgcgatggtgcgacctcggctcactgcaacctccacctccagggttcaagcggagcctcccaagtagctgggattacaggcgcccactaccacgcctgggtaattttttgtatttttagtagagatggcgtttcgccatattggccaggctagtctcgaactcctgacctcaggtgatccacccacctcaagcctcacaaagtgctgggattacaggtgtgagcctggccttaatttcatatttaaaaggttttttcaggttacttatctaaggatggttcctggatctgccttggtgcatttctgtatgtttgtcatgtttctagtactatgtgattgttcgcttaatttatttaaataaacacaatttatattaactaaaaactagtcttacatagatatagcaaattttctaaaaatagtgaaaaagcgtggattttcagaaaaattaccaaaactacagaacttaagttgcctcataagaaaactaaagggatatactataaaacctaaatgatcgaggccgggcgcggtggctcacgcctgtaatcccagcactgtgggaggccgaggtgggcggatcacgaggtcaggagatcgagaccatcctggctaacatggtgaaaccccgtctctactaaaaatacaaaaaattagtcgagcgtggtggcgggtgcctgtggttcccagctactgaggaggctgaggcaggagaatggtgtgaacccgggaggcggagtttgcagtgagccaagatggtgccactgcactccagcctgggcgacagagcaagacaccatctcaaaaaaataataaaaaacctaaattatcaacctttgaataattcatacttaacgaaaatatttctaatttttatgtaataagaatacttttacttgtagttaagctatcaaaactgtttaaaattttttccatcaccacataaacagccaactgtagaactacaacaatttttcgtaaaagtaggacaacttttttcttaaaaatgccagtgtaaccaaataatctcttctataatagcaacacagttgttgaccacacaactgtggtcattgaataatttccctaaggaaattattaaataaaatactgaaggtatgcttttgagaaagcacgataaatatataacaaattaagtctaagttttaagatcggtttagctgtgttgctaatatatgcttatccccaggaacctctttttaccccggggctccctctggtgtacagtcaatacagcccatgcctaggaaggactgcttcactgcttggctggcagtgtaccttttatagctaagacaccaggagggcagctttacatcagcagactatcactgtctcaattatacttagaaaattaaacctctacactgtctaattcagcatgaataaaaatattaatgaggacactaagtttgctcactgcatcacttttctcacattttctgctaggcgtctgtgatattagtaatttaaacaaactgatgggcttatataagaccatttggagaggactgaactccaagattttatggcagtgaagaatatatgtgtacccccaaggggcatcctgaatctcctgccacctgcctgaaattgctttgaaatctcaatttttatttcaaaaactcaagggaagtttgcattaatgataggaacacagagtgcaaagaaccaggccagttccttatgtgatcccagttcccagatctacaaataagtaatactgtaatatgtaataggccaggcgcagtggctcacgcctataatcctagcactttgggaggccaaggcgggtggatcacttggggccaggggttcgagaccagactgggcaacatgacgaaaccctgtctctactaaaaatacaaaaattagccgggcatggtggcatgtacctgtaatctcagctactcaggaggctgaggcacgagaatcggttgagcccaggaggtagaggttgcagtgagctgagatcgcgccactgccctctggcctgggcgacagagcaagactccgtctcaaaaaaaaaaaaaaagtaatactgtaattctaagtttaataataaaatgctgttttaatttacttattattgaataaactgatgctctaggaaaatggtcttctcttaccagttaagagtaatttacatcccaaagtaaaacagatttatggcattttattaagaaagtaagttggactaatagtacaacactggcttttgttcaacatagtatgacatttaaatgtttgaaaagaactagagaaatatgcctttttttggtctaaccctcattttacagaatggttggtaatttcccttttgtgtttcatgtatttgcttggtcagaaatatgaggaaagggatagaggaagcaagcctgaggcactttgttgaagatgtctgctagcagcatatctgaaaggccaagcaacagactgcctctcataaagcagtaggtccagagagagctttgactttcagcactcacggactgcgtgacattctcctggtttcacattacccattgagtccttctgtctctctgtgacttgtaacagatgggttagcatccaccattagtgtggtagtgaattatcttggatagagaaaggttcaggaaactagatctgtgtaaatactgttttctttttacttagttgcattttagttccattgccaccatgtctttaccacatttactctccttcgttgaagctctcaaactctgtgtaataattttacctggaagatgtttggaggagtgacctggcagccaaccagtggcagagtggcattaaacattagtgacacatgcatggatctaatctctaaatatttggtttaaatctcagacttgtgcaatcatgtttattgggtagctactctccatttatcttttttcttattagaaaatatatcgctatcgtctcctatgagcaacgccagaattataaggatgacttcaatgcagagtatgatgagtacagagctttgcatgccaggatggagactgtagctagaagatttatcaaactagatgcacaaagaaagcgcctttctccaggctcaaaagagtatcaggtaaatggatttgtaactagatgggctgactttcatattttaccttctttctttccctgccctgctcaacctcagccatcacagtggcctttagagtaagtactcttgcagaccagcctcgctgctgctttaggaaactaaatatttgaaatagttcttgaaaataaattaacatagtaaacctgtatttctaccagtggaaaaaaaccttgtgccactataatgtatcacatattgagaaaaataccaaacacaactaaataggaaaaaaagttggatcttgagattcagctaactatttgattaattacactgccaacttagactacagctcataggtctggtgctatcccaaaacagtgctatttcaagtatttttctttaaacctcaatctgagatagaatagggaagatacaaacataggaaataaagagggcttaatacacagagatttggggtttaagtaaagaagtttgctgcttctagctacaaagacggatctttgttaaccagtcttactctgttttcactttcctacttgaagtggtaatattactacagctgacaaagagcaggagatgcctgcctgacctgtctcctgattatttttgtagttcttagcaaagggattgatagaaatgagtatttccctcccgtgtgggctagataactttgtcacacttcacggacacaggtggtatagtggtgcctctgtcccagcccactaccagtgttcaggctggagcctacgtgagacaatggatgagttttcccacaacagtaaacagcctgagagcatttgtgtcctcaagattcattatgtcttctactagagggccttaatctttttcaacaagctggcgagagttataggagactgccagaagaatcggtgttcagaggtgcaagaggttggtgacatggtggtttggggtttatttttttttctatatagtcatttatcaatgtatataattatactgaaactagaatataattccaaggattacttggttaggagtggttaatatttgtgtggccttgggcaagttacttaatgcctctttgccttgaattccccatccataaaatgggataatcattgagttatgaggaataaacataagtaagcacagtaaagtgcctggatccatgcctggtacttggtacatacattaggctattatcccccccaggcacctgactccccccctcaccaatccccacagaaaatcactgttactggtttccagtgtattctttcgaagtgtgtttatgtgtgtgatatgtgcatgtatgtacacatggtataaaatgtatgtacatatctacacaagtaatttcaacatatataccgtatttaattgaatctaaggtttcttcatttgtaagctacaccattgttttatgcccaataacttaaattatgatacattattatttgtactggtttcattgaaatggggagaaatgagcatcttacaagtaatggaattcttagaatactattgtgtttttctcttttaaactaatggtatcaagctgtccatattgttcagcactttgctttcttcactaaacaatataatgcatcttagagaatttttttatattggtacataaaacactttggcatgttttaatggcctcttagtatcctttgtatagattgatggacatttcaattttgtttactgtcttttgctttacaaacagcactacagtgaataatcttgtatatgtgtcattcactggggagcaagtgtgtccataggataagtagaattgctgagtcgattttgcatttactattttgatagctgttgccacattgccttccataaagattgtttcaagttacattcccacagtcaatatttcctatactcttgctgaatgcatgttatctatttgtattgccacacacaaaagaagttgttctcttctgatttctaatatttaattttgtagaatgttcatgaagaagtcttacaagaatatcagaagataaagcaggtaggtatcatcactgttgattttctgacctgtggttgaaaaatgttgtaaattctgcaatctcattcctcttttttttttttttttttcatctgcagtctagtcccaattaccatgaagaaaaatacagatgtgaatatcttcataacaagctggctcacatcaaaaggctaataggtgaatttgaccaacagcaagcagagtcatggtcctagaactctgcttggaccagaagatgtgaataaacttaagcttatttatttaaaattccaaatgagttgctctagattctaaaaaggtgaaactttggctgttgaaagtttcagtattagtaaacttgagttactttttcttttccattttactttgcttccctgcatttcgaagctgctctttctggtcctccccaccaccccacccccaagacttgtgtttgttaatagaaataatttttttaggtattggggatccattgtctatatttcaaatcagttttttttcctcaaaaacttgtgtttgttattagaaatgattttttagatattggggatccagtgtccacacttaaaagttgtatgtgtttaaaaaacaacaacagtaatgtgcaaggtgaaatgcttttggataaacgtaagcctattttctgacgtttcttaatgcaaactctttgccttaaatggtagaatatttagaaatttgcacaaaattaaaaaaataaacattgtcttggagggttaaaaaatagaaaggtgtatgtgtatagattcacatacacatatgtatatacaggctgacttgatctagaacattaaatccgccctgcaagttaaccccccattgcaatggttgccttaaggtgtttgctagttgtgtacatagtgtggttaatcattagctacactgcttcccacttgattagagcaatgggaagcatactgtggcctaccagcatctggaagtgtgtgctcgatctgtatgtgtgcagaggtggtgtggatgtgagcgtgcatgaaggaaaaaaagctgctactcctagtaggccaaacgctcaggttaaacaactgacgagtgttactgtagggtgtttttttgtttttttgttttttttcttctatcaaattgctacttttgttgtggaagacaaaagcatttccatttcaacgagtttgtcagctttattaatgttgggcaaaaattgatatgtcatgaaaatgaaacagatctatagttttgggacaaaattataaaatgaaatgtgtaggtaacctatttatatactgctataaagtattttttgaagagagatatgcaaagaagctattacctacataagaggtatatttaaagattttttttttcatcctggtgccaggaatataaaaaagagtggatatatttaaccataacatactgtgattcatcaaacagcacaaactttcatttcatggagtttatctgttgacattgatttaaactgtcacttgttttatcatgtgggaacataagttatgtggtcaaaaatataaggattttgaattaatgttgattcaagttgtattgtcttattgtattgtcttttcaaagtgctgccagttgaaaagggaagcattatgtttacaaatctgttttgaaatgtttgccaaaattttggtagtgtctttaataaagatgtttgtctccagcatccagaaaaataaatgaataactttgttgtgtatcactgtaaaccagaaaaatgttggtatctagaaaacttgagagagcatgtagattaacttttctctttggagttctaaaacattaactggaaagattagataatatactaaatgtatacagaagtatacagactatacaaagactgaaacaagtcccttttgcactacaactctataacattaccgcagaaattttggttctatgtagcatggacctcctaaggaattctgtttcttttagcattgagatccctggtgctctttttttacctcagaattggtacaatcattattaaacgttaatttatttcaaactttttaattgaaaaaaggaaagggaaacttaattggggataaattcaggcatcatattattatgatagagtctcctgagtggttcgtctataggtaatgaactcattggtgttatttcttggacatcttggccttttaatcaaagactgtgtgctgctatttgctatgagcaaggtttctcaaaagcaaaaggtgcttggaccatttggatcacctgagttagaatctctaggtatagggcccaagtatctgcattttcacaggtttcttgtaggtgactttctgcaagctaaagtatgagaaccattggcttggatgtagttctaaacttttaggtctgtaaatcttgaaatcttgaactgaaggtcaactattggcttttttttttttttaatgtccatcatgtcagcaggtgcaaatcacttttcccctttgcatgatctgaggcacctcctcagttgtttcactgccaactcttgtttcagaacctgtttacaaacaagccttccagttggtgaatggttagccattggagctcctaccctgtacatcagcacatcttctggtttacaagttgggtaacaatgaaagctggagatgctaaatggaaatccagcattgcatacccttagacctgatcacataccagtaaaagccttaatttagatgttagttgtatgtgttggacagatccttgcaaaagtgtgtctgtctattagttgtaaatttgaaaattataaatctctgaatctgctactatccaagtttcatcccttttgaagatgaggcatgagcctattaaaatatttataatcatttttcgtcccctactgcaagacttttagattcttacaaatgattactacaggaatagtggccacttaatgtcagttactccggtggaagaatttatctagttttttttcttttcttttttggaaggatggtgtgaaaaatagcaagattagagaatgagttgtatagttttttctatcacatttcatctaaaatgatttgaaggacttttgaagatttttaccaacatccttaaatcaactccaggttggatgaacaactgatttaaaacaaactaagagaacattaactagatgtgggctttttaaaatatataggtattgcatttcctaccttgttatttattccactttgaatactttagagggcttaactttcaactctttaaggtagtaatggatagttttatacttgttctcacaaaattgttatggtcagtttatatcattgctccatgcattgattataaaaattcagtattaattttttctgatcttataagctttataggagttttcttttctcttataaagtgtttcaccttatgtaaaacaaatgcctgcttgcatattggaagatgttgaaattagttttagacaaaagtggtccatcaattcagacactctgcttggatgccttacccttttcattagtgcattctttgcttctgaaacttggcagaaactcgttagccagtccactgcctttctgacaatgtgtggagtcacgtatgcttggtatatgcctttactacttttaaagttctacagtttattacttgcccaagtgttactaaatccttttcttatgtgtactggatggagaaaaaattatagccagcactttgagaggaaagttttcagaaacaatattaactggcactactaactgaaggccacaggagatgctatcaatgttatttgtaatctgaagattgaacaaggctgtgaggctcatttcaaactattttgaggtgttaaaatatatatatgctgtttctcagctgttccactcaaaccgtgttaggactctcaaaggtaaaatgtcacaggggcttttcagttgttacagagctcagcagctgtggttgcccctgttctacaccaatttcagttcaataaaaatgttaactttgcaattctg

SEQ ID NO: 8913 - DNA, 1496 bp, Homo sapiens
ggaatttatagcattttctaaacttgtgaacttgactctatttttaaaaaatatttcctatttaaaattttaaggaatgctaatgtttgttaacgctgttgcaactgggaaatggtggattaaatggtttccctttgccacattagaaatttcagtgtgtattcacactggcagcctggcaacgtggggaagtatggactgtgttgattcctgctcctctgcttacttgctctctcgctgtcattcatttagtcatcaaatactgatttaaggcatgctagtggacaaagcagccactgccctgccctcatagagcttatagcctaacacaaagcaacagcaaacattaggcatttgttcataaaacctttcccacaaagacttacaggcaggaaaattaggtattaatcaaatcacagaacctcccaaatgctaagtgaggattttaccctttgagcatatcccattaaaagcctcagttttctcatctgtgaaaggggacggtacctgccttttcaggtgaaacctagtgagataatgtgtatgcagctcttagcacagtgtcccccacataattggtgcataagtttccagctgatgtaagaaaaatacagaaaccccaatctaaatctatctctgaaactctaattataacttaagtttttgttatcattaggcagtgtccccttaatgttgagttcctttgttgtgtaatagtttgatatttgcaattggttttgtacagatagtaaagaaacataccagccagtagaggtttcagtttgagagcattcatcttttttcccttactggaggtaggatggaatcaaaacacacaggccttctgaccaggcctggggagcccagcatggacagaattactattcagtaaagctcctgccccagtgagctgttttcaccccagaccacagcttataggagctgcttttacccacccattatttctagttgttagtcttgttcctaatgcacttgtccacatcgtatgtcattacaagttcttccccttctttaaccagagggcatagaattggggcttagtgtgtcctaaacaagctaaaagattccacctgtagaatcataaaatgagagtctcacacagtttcatgctactttttgtctcttcagcaaggaacggttgctgggattgtcagtgaccaggcatgtctggatagcttcacacatacacataatgcccggttcacctcagcccacacatgttctagaagtagccacttgccaagtgtcagtgttcagtctaaacagcaaatgggttaaccacatgaacagcactggcccatgtgagaatggtgtgaaggcctcctttgtaccattttccatttctctaactcacatgtgtagtctcagcactgcagaggacagatttgtttgtgccctctgagactggttggttggttggttggttagttttgttttatgaatcctaaaatttgtcttggcctgtaaaaaaaaaa

SEQ ID NO: 8914 - DNA, 1495 bp, Homo sapiens
ggaatttatagcattttctaaacttgtgaacttgactctatttttaaaaaatatttcctattaaaattttaaggaatgctaatgtttgttaacgctgttgcaactgggaaatggtggattaaatggtttccctttgccacattagaaatttcagtgtgtattcacactggcagcctggcaacgtggggaagtatggactgtgttgattcctgctcctctgcttacttgctctctcgctgtcattcatttagtcatcaaatactgatttaaggcatgctagtggacaaagcagccactgccctgccctcatagagcttatagcctaacacaaagcaacagcaaacattaggcatttgttcataaaacctttcccacaaagacttacaggcaggaaaattaggtattaatcaaatcacagaacctcccaaatgctaagtgaggattttaccctttgagcatatcccattaaaagcctcagttttctcatctgtgaaaggggacggtacctgccttttcaggtgaaacctagtgagataatgtgtatgcagctcttagcacagtgtcccccacataattggtgcataagtttccagctgatgtaagaaaaatacagaaaccccaatctaaatctatctctgaaactctaattataacttaagtttttgttatcattaggcagtgtccccttaatgttgagttcctttgttgtgtaatagtttgatatttgcaattggttttgtacagatagtaaagaaacataccagccagtagaggtttcagtttgagagcattcatcttttttcccttactggaggtaggatggaatcaaaacacacaggccttctgaccaggcctggggagcccagcatggacagaattactattcagtaaagctcctgccccagtgagctgttttcaccccagaccacagcttataggagctgcttttacccacccattatttctagttgttagtcttgttcctaatgcacttgtccacatcgtatgtcattacaagttcttccccttctttaaccagagggcatagaattggggcttagtgtgtcctaaacaagctaaaagattccacctgtagaatcataaaatgagagtctcacacagtttcatgctactttttgtctcttcagcaaggaacggttgctgggattgtcagtgaccaggcatgtctggatagcttcacacatacacataatgcccggttcacctcagcccacacatgttctagaagtagccacttgccaagtgtcagtgttcagtctaaacagcaaatgggttaaccacatgaacagcactggcccatgtgagaatggtgtgaaggcctcctttgtaccattttccatttctctaactcacatgtgtagtctcagcactgcagaggacagatttgtttgtgccctctgagactggttggttggttggttggttagttttgttttatgaatcctaaaatttgtcttggcctgtaaaaaaaaaa

SEQ ID NO: 8915 - DNA, 1495 bp, Homo sapiens; identical to SEQ ID NO: 8914

SEQ ID NO: 8916 - DNA, 1495 bp, Homo sapiens; identical to SEQ ID NO: 8914

SEQ ID NO: 8917 - DNA, 6051 bp, Homo sapiens
agtgcgacctcctatagtcaaacagcttatacttcctggaaattcaggtaaggagaaaatgatatggagctattaaggaatgttttttagcttactgcactgtatcagaaaataacattcatctgcagttcgagttcattttatttatgaaacttttaactggttaaagaaaatatcgttgaggagcaacttagcaccaggtactatattaggcaccaggggtataaacataagccagtgtgctaaatacataaaattttctttagcaagtacctaaaagtttgtaagtctggcttaattaaatgggttacaaatgtgattcttttaatcaatagatccttattgaacagcctacttgggttgtaaaaactacagagttaaaacctctttataggaattttaataaactttgatactgcagctaaataatagtatgaggttagaggtgaatgtaccagcagagtgagggggcagtaaatgatgtgggaaagccagattgctataaaccagggaaagaatgttctgctctgagactgttattgtgtagcttactcttcacgaattcacaattcacccatttatttactcttattgtcgctgaagctgttgttatgactgattattataacttccttaaaaattaaggttaaccacctcaaattttgacctgtgcactccctagtctaatgatcctattctttgtgtagtatataggttgttacttgctacttacttcacctatgatgataccatgttaaaaagtttaagctgcaatatttgtttaaaataggtaatttcgttcaggcattatttgagcctgaccttgtagtacttttcctatcatgtgcactctgctcttttttcattaatagtataaagattaattattttgtactcttcttgctctccttacatgcttttcatgttggagctgactgttatggtgaagaattctggaaaacaagtgtttcagataaatctgtaatagaaatattagtgacagtgttgggatttcattatttagtaaaagttgacgatctgatgaaaatatttcattagaaacaagttagacttttttggatgtgtgtattctttattcctctggcctgttttctgtcttccttttggtttagaatgataaagtactttaaacatggcataatgtaggagaaacaagcctcatggtctttgttcctaaaatctctaaggaatctaattttattcaaattatagttttctcatttagaaaaatgagggaaaagatgatggtgtttgtcaatgactgtgaattcgggagaagaaaacactacatcataaactcatctatttatagagcagtttcattggctatcttgtgcaagttgaaatccttaacatatacttattgaacaccaattacttgccaggcactgtgctgaaagctgaattgttacataagagaatagataagttatacttagatgaaaatatgtttatgccatagcatataaaggagtctcagtagccctcatttttcttaatgaggtcaatttctaatttcagggaattttttaagcagaaaaggcagaacaagaatgaattaaatcaaagggtataatatcaagttagttgcagtaggcatttattcaatagttgctttaccagagtttgaatttttttctttttttttttttaaggtaacttgaaaagctcagacagaaatcctccactcagtcctcagtcctctatagatagtgagttaagtgcttcagaattagatgaagattcaattggatccaattataagctaaatgatgtaactgatgtacagattctagcccggatgcaggaagaaagtaagtattctaattgttaagagttgaggttttttactattgcataattttgttgtatattaaatatgtcttaaagtattgtgggggtagtaatgtagtgaaagtagaaatgttgcagtggacatttcagagacttagtcaacatatgtacatgtttattcatcaacttgttttcagagtccatttttacatagagcagttatgctgtgtgagggacaaagaacagcatttatgctgctctgcttctatgactggtttttataccctgcatgttactctgcactagcacttaactcttgtaattgttagtctattaccctttgtgttttagtgtaaaccagcgtttctcaatttttttcttttcggttgctcccctaaggagccttgttaaaaacttcttttccttttctcccacactccccatgaaatcttaataccacaagatatactctatatatgtttaagtactatgagggccatatacaattatgacatctaggaattttttcacaccccaagaaccagtttttgccctcttgggaatgaatatctcctcacttgagaatacatggtgtaaactgtaaaaaagacctttaggagaacattggaattgtgacattaaattaaatgaagcatgtgatggtgctttgcagagtgaatgatgaaaactttttaggccacagatacctttgagaatccttttatcatcaaagtgtacatatgcacaaaatttttaatactttttaaagggttcatggctacttgccctggtactcatctgaaggtacttattcttgccagtgcatttcattagaagatgccatctgcataactatgaagtaagaaatctctctaaagcaatctcttcaacctttacaatgaaaagaatccttgaaatacatatgttgacaagtcttgacaggtggctgaggttaatggagcattgctacggtttagttcaaaaactttctgttgtctgtgtatgtaataggttctctttaaatatgtagtaggctttatcaagctgtagcatttattaagaaactaaagtgtttcttattctgctgattcacttcccatttccatatagcttcccctaggaagatagaaggacttagtgcttgctttatttagccctgcaacctaatagcagagtactctttttcttctgtaattttaattaactcctcagtgagactgtggtattgtcagctggttagggggtggttattgttgtggatgtgaaaaaataaagaatgctgcctaactctgtactttagaacaagttctctcatttctttgaaccctggctttttagatcctagtattttgttagaagctcaaccagctctttgcttttggttttgtattgtgttttggtaacaatagaaattttagtcttactttaataattttttctaagccatccacatgcatgaatatttattttcctgatgagtaaaaatagtaataaaaatatatgtgatacttcttgaaaactacagctttttttttgtcttagagatgattttcctttttacaacattgtgttttgtaatgattagaaatgtagaactacagatttgggcagtcacctggtcaaggtcattcgtttttaagatgagaaatgcaagctcctatagtgatccaacagtgctcttttcattggtctgttgtcttttgttaggtgactttagtgccatgttggctataactagacactaagtaacttgttggttactattttggttccccgactaactgaagggctaagtggactccaggaatttatagttttaaagataccctagggtgattctcatccactggtttgatgaaccgtgttgatagcactttctgtgtgtgaatacatgactttaggatttgaataccactttataacagatctttttgactggagtgctaatagttagcaggttgtgctcagaatattacctaaattctatacgtttgcattgcagtttgtttcttcattgactatgttacgtatcaacttttttttctgttgttctagaagcatctgtactatttgaagggctcccaaggttgcttgggtgttttcgaaggtatcaagctatataggagaattctttgaaaattcttacttgaagacttagaatttaagcttgaaaacaagcttaaaacaataaaaatggaagtctcttgggtagtgaagcaatcaagatttcgtttgtgcccaagtactgaattcctataagtgggttagaagtttctttggtactttatcatcttcatgagtaagattatttcagtaattaagtatccaagaagttttatttactcacatacgtattctttttccactggttggatggtaattgtttcccctcaatattcctttaatattagtctcaaatttggattactgtctttaggggtagaaatatttttaaatttatgattctaccatgtgagacagatttcagctttaagaagaaatctggaaattgggcagtggtttatgggatttcattcaatttaaaaataaccttcagatgtgatttatgcctccttatatggacatataagcctatataagtctaaaagcagaaagggagttttcttttacactttacaccctctttgaatttttcagtgataatcttttactttaaattttaaaattatttaaatgtttaaaaatattgtttaaataaataacattcattgttgccaggtctccggcaagaatatgcagccaccacgtctcggcgcagttctggttcatcttgcaattctacaagacggggtacttttagtgatcaggaacttgatgcacaaagtttagatgatgaagatgacaatatgcatcatgcagtataccctgctgttaacaggttttcaccatcaccacgcaattcacctcgaccgtcacctaagcagtcacccagaaattcacctcgttcacgatctcctgctcggggaatagaatatagtagagtgtccccacagcctatgattagccgcttacagcaacctcgcctttcacttcaaggccatcccacagatttacagacaagcaatgttaaaaatgaaggtaaaatagcagattttactaataattagacagtttctgctagcctgtgtaacatagcaagaccccgtctctaggaaaaaaattttcaaaattagctgggcatggtggtgcacatctatagtcctagtgacttgagaggctgaggctggaggattggttgagcccaggagttcaaagctacagtgagctgtgatcacaccattacactccagtctgggcaacagagcaggatcctgttttcaaaaaaaaaaaaaaaaaaaaagtttctagattaaaaaaagagaaaaagtgtcctttatatttcactatgaaagtaatacaatttttgctaagtttttgtatttcagataagtaaatcaagagtgtagtcaggtttactattttattaatagtgaatcattacaaaaataaaagagaaagtgaatttcattttacttggttatgttgtttttgctttattgttttatgaagttacctgtatttagattttgctttaaatataaaatttgtggttatctttaagtgttctcttattctacccacttaacagatcctagatcgagttgtttgttttttttaataagacaagtcctttgtattttctcatctaaaataaacagaatgtttgataaacaatttgatttttgaatgctagttaatattttaattttctccatctgaaagaatatgatttttttaaaattaaaattctgttgcagaaaaactaagacgcagtcttccaaacctgtcccgaacatctaatacacaagttgactcagtgaaaagcagcagaagtgactcaaattttcaagtgccaaacggaggaatacctcgtatgcaacctcaggcttcagccagtaagtatccttcttatgctttcatgtatcagttatttaaagagaagtgaaaattttagatatttgttttatgctgaaaaaccgttttttatgctgaaaaaccgttttaaaccatagctatagtaaaatttagtgtttattagttgctggatgataatcaaagttatattacaatttaaaattttctatgtaggatacttgattctgccagtacatctgtctatacaaaactctggtctctccagaattttaaaataagcaaaatgtaactattaaaaaa

SEQ ID NO: 8918 - DNA, 636 bp, Homo sapiens
gctctgagacacaaagggtgcatattcactggggtccttgtagggacacaagggatgcttattcactcagatccttgtaggtacacaatggatgcatattgtctcagatccttgtggcatattactatcagtggttgaagtggtagctgtgttatattctttcattttctcaaggctatgaagaagtgatacaaacgagtttgttgactgttcacttataacttgtttattaagcagttaaaaatttgaagatatttaacccttttttcattttcatctttttttttcttttttttttgattgagtcagggtttcactctgtcaccaggctggagtgcagtggcacaatcatggctcactgcggcctcaccttcctgggctcaagtgatcctcctgcgtagctgggaccacaggcgtgcaccaccatgcccagctaatttaatttcttcacacttttccttggccctgttgtgtttagctgacttcatatacttcatgttaagctgttgttacttagtggctcaaaaatcaacaggctagcaggagtttgagaccagcctgagcaacacaagacctcgtctctaaaaaaatgtttttttttttttaattacccaggcatgatggtcacatgcctat

SEQ ID NO: 8919 - DNA, 109 bp, Homo sapiens
ttttttagtagagacggggtttcaccgtggtctcgagctcctgacctcgtgatccgcccgcctcggcctcccaaagtgctgggattacaagcgtgaccaccgcgcccgg

SEQ ID NO: 8920 - DNA, 347 bp, Homo sapiens
gggagggagaaaatgtcatacaagcgtttttcacaaaatcatgaaaagattcaggttatcaagtttcttgttaaactagacttctctcctctactcctttttagatacactatcagtcaatagccagtcaccagtattcctgctagtctcttcctactctgtgttggtaggtaataagtatcatggagaactcaaaacacgtctcctctagtgggtttgattacctttccatagaatgttccttgtataaagcattttataggataatatcataggttatgtagcagagattcataaaatgacctcatctttattcaaaacagggctaattcttttgctgtttttgg

SEQ ID NO: 8921 - DNA, 1359 bp, Homo sapiens
gggagggagaaaatgtcatacaagcgtttttcacaaaatcatgaaaagattcaggttatcaagtttcttgttaaactagacttctctcctctactcctttttagatacactatcagtcaatagccagtcaccagtattcctgctagtctcttcctactctgtgttggtaggtaataagtatcatggagaactcaaaacacgtctcctctagtgggtttgattacctttccatagaatgttccttgtatattgcattttataggataatatcataggttatgtagcagagattcataaaatgacctcatctttattcaaaacagggctaattcttttgctgtttttggagtagagttctaaatatcttattttcattaactgatttaaaaatatattttatataagaaatgtgcaggcatgaaaatcataggaattggtaaaagtcttaaggaaagtaaaaaaatttgggggaatgattggtttgtacttatatacaaatacaaaaatctttgggttgaatttttagttaaaactttcaataatttactttctctgttgtttttcatcataatagttgttttgtaatcagcattagaagacaaataaatattgatactattcaagtaaaaggccagctaattttagcttcgcaagtcgtgttacctctcttttcatgtagaaattccccttcagaaatttttttctgaaaagattagcaggtacctattagcctctgaactctggtctgcattcttctctcccaaacagtgaccttttaccacatgtccattcatatgggcagtgctgataattggttcatttagtaacagtagcctccggatgagaactagatgagagaagcttattaattgaaatggtttccaaaaaggattatttcacttacaagttgaaacatggtgtgtttcccctactgaatcagtattctagtgaaacatacacaatatattgtatgcatgagaaaaatcattttattggcatctggccaacaattgtctaattcctatgctatacaatttatcataattttgctatcagagaaggagtgcatgtaaaattattttgccttatatccttttttaaaaaattactatagtagcagctccttatgtcactctaaattttatttactccttatctgtcattcgatatttcagtagatctttatgtgatagtaaaagaattgtgagccaggctttgtggtatgcacctgtaatcccagctacatgggaggctgaggtagaaggatcgcttgagtccaggagttcaaggctgcagtgagtcatggttgtggcactgcacagcagtgggcaacagaaggagaccctgctcaaaaaaaaa

SEQ ID NO: 8922 - DNA, 345 bp, Homo sapiens
gggagggagaaaatgtcatacgagcgtttttcaccaaaatcatgaaaaggatcaggtttaccaagtttctggttaaattagacttctctcctctactcctttttagagacactatcagtcaatagccagtcaccagtattcctgctagtctcttcctactctgtgttggtaggtaataagtatcatggagaactcaaaacacgtctcctctagtgggtttgattacctttccatagaatgttccttgtatattgcattttataggataatatcataggttatgtagcagagattcataaaatgacctcatctttattcaaaacagggctaattcttttgctgttt

SEQ ID NO: 8923 - DNA, 2619 bp, Homo sapiens
gtataaatacaaaaaaaaaattagccaggcgtggtggctaattgagaggagatggggaaaagtgatgtggggttccccaatgttgtccaaggggatttcttcttagaaatctctccctacatcactcttgtagtgaaataaaaccatctccatgtaatttattaattttgttttttgaaaaatatccactatttgaatctaaatattatagaaatttctctttaaacattcccttttactttatcccaaaataaatctccctttgcataaattttttctttttctttttttttttttgagacggagtctcgctctgtcacccagactggagtgcagtggtgcgatcttggctcactgcaagctccgcctcccaggttcacgccattctcttgcctcagcctcccgagtagctgggactacaggtgcccgccaccacgcccggctaattttttttgtgtttttagtggagacgggatttcaccatgttagcgaggatggtcctgatctcctgacctcatgatccgcctgcctcagcctcccaaagtgctgggattacaggtgtgagccaccacgcccggccaaatttttcaacaaatacatactcaagccaaaaaatggtgctttaacttatgacttaaaattgttgggactataactctagaaaaaatattgcagttgagtaccgaaagtattgataaatgaaatctgttttcaaagtgcaataattttgtagaggataaaatagaaattgttcacctaggagattaatacataaataatatttacagagcattgtcttgagaaatgcagtttgatgatgtttcagtttgagcaaaagatgaggctctaaagtatggcatttcttttgctgctaatgagagagaatccagactttgctgatgtgctccagggtctcctgtattctttagatttggaggaatcaaccatgaaggagctggctgcagtgtcagaaggggaaggtggaaacttcaacacaaaaaggggctcccctagatccactggcctcagggaccctcggatggagtcaacatgggagaacctggcctggcagctctggaggcctgagtggaggggagagaacagcgctgccctaagacccaagccctcctggggaagggagcagcagggcttggctcttggctgcctggctggtgtggaaaagctccttgtgatggggtgactcccatggcctcttccagggactccagcatagataacgtctctgccagcccttcttgttgcttagagagtctggatctctcttcttttttcttttcttctttaaacctctcttctttgagttcttgaaccagggatgtgatttttattttattttatttttttgcaatggagtcttgctcttgttgcccaggctggagtgtaatggtgcgatctcagctcactgcaatctccacctcccaggttcaagcaattctcctgctccagcctgctgagtagctgggattacaggcgcccgccaccatgcctggctaatttttgtattgttagtagagatgggtttcactgctggccaggctggtcttgaactcctgactcaggtgatctgtccacctcggcctcccaaagtgttgaaattacaggtgtgagcagctgtgccccgctgggatgtgaatttctgcatcagcattgcgttggtgctgttcaccttataagcatctacaaaactggggatgtttaaatactttttcatacaccgacatcctctaaggatccctcaatctctgcagtgtttttttttttttttttgtcatcactgtgcttgcctgtgagttggcatttctcctccatgtgtgaatccagtgtttctgcaagctgcttttcgtatgttacatggagtcgattcctaacaggttgactaaggaaatgaaagccacgaaagttaggatagtagttccctgtgatgggggagaaggtgtaccaaacaactgggcacaccagagctcccaatcttcaatatgttaacctgggtagtgggtacacaggtgtttgtttaatttttatgttagaaactatgtatatatggtttataaactcttctgtatgtgtgacagatttcaaaatataaacaacatcaaaaaagttttgaataaagaattacctagggaacttgttaagaaggcggattcctagttgcatttcatattctgattccagagacctggtcaggaccacagaatccacatttttttttttgagacaagagttttgctcttgttgcccaggctggagtgcaatggtgtgatcccggctcaccacaacctccgcctcctgggttcaagcgattctcctacctcagcctcccgagtagctgggattacacgcatgcgccaccacgtccagctaattttgtatttttagcagagatgggatttctccatgttggtcaggctggtctagaactcccaacctcagatgatccacccaccctgtcctcccaaagtgctgggattacaagcgtgagccgccgtgcctggctttttttttttttttttgagactgagtcttgttctgtcgccaggctggagtgcgggtacactgagctaatttttgtatttttagtagagatggggtttcacc

SEQ ID NO: 8924 - DNA, 304 bp, Homo sapiens
gtataaatacaaaaaaaaaattagccaggcgtggtggctaattgagaggagatggggaaaagtgatgtggggttccccaatgttgtccaaggggatttcttcttagaaatctctccctacatcactcttgtagtgaaataaaaccatctccatgtaatttattaattttgttttttgaaaaatatccactatttgaatctaaatattatagaaatttctctttaaacattcccttttactttatcccaaaataaatctccctttgcataaattttttctttttctttttttttttttgagacgg

SEQ ID NO: 8925 - DNA, 2619 bp, Homo sapiens; identical to SEQ ID NO: 8923

SEQ ID NO: 8926 - DNA, 532 bp, Homo sapiens
gtacatggcacgtggacctgcatagacacgtgtttggtggaggctgtcttatacggattctgcacaactcaagtcccctaatgggaacagacttggggaggtcactcttgaggctttttgtggtattgtggctactgggagacctgaggagggttctggtcactagcagactcatttcattcaccccttggaatctgcccaggacttggacttctgtgtaatagtaacttcacgccccaatgatcctccacgttccttgctgatgctgtgattgctcctccaagttctccacctatgtccatctgagcacttggtatttctactctagtgtcaaaaggtcctgttcccaagtctcctcccaaacatttattccaatttatcatccagatgcccgtcctttgccatccctctctgttccagcaaaggacaccacccctcagggagatgctcacagtggactccttgtcctcatcctgactccccttttctctggcacccgcaggcctcagtgagtctctcggtctctggcagc

SEQ ID NO: 8927 - DNA, 479 bp, Homo sapiens
gaggacttgggtcatggggcggcagccccaccatctcctcatccagcttcccagggttcagtccagggtccacctccacagaggatcgcagcccctccatgacactgcagtcccacacggccaatagtgggactgagatcactgttttaacttggtcaatcaagtcagcttcaactgaaattaaaccattaaagatactctgctacttctctgagaaccttgccctgggaatcttgttaaaatgcagattctgatttcctttctcagggaagaggcctgataacctgcatttctaagaagctccaaggtgctgccacagggctctgcctagtaaccatggattccacagccacaacagacaccagagaacaccccaccattctgcctgtactcaatcagcagtgggcatcctggattggttaattttatgatcacttagagggagaaatttgtaaataaaatctacttgtctcaaaaaa

SEQ ID NO: 8928 - DNA, 532 bp, Homo sapiens; identical to SEQ ID NO: 8926

SEQ ID NO: 8929 - DNA, 532 bp, Homo sapiens; identical to SEQ ID NO: 8926

SEQ ID NO: 8930 - DNA, 482 bp, Homo sapiens
cccaggttcacgccattctcttgcctcagcctcccgagtagctgggactacaggtgcccgccaccacgcccggctaattttttttgtgtttttagtggagacgggatttcaccatgttagcgaggatggtcctgatctcctgacctcatgatccgcctgcctcagcctcccaaagtgctgggattacaggtgtgagccaccacgcccggccaaatttttcaacaaatacatactcaagccaaaaaatggtgctttaacttatgacttaaaattgttgggactataactctagaaaaaatattgcagttgagtaccgaaagtattgataaatgaaatctgttttcaaagtgcaataattttgtagaggataaaatagaaattgttcacctaggagattaatacataaataatatttacagagcattgtcttgagaaatgcagtttgatgatgtttcagtttgagcaaaagatgaggctctaaa

SEQ ID NO: 8931 - DNA, 479 bp, Homo sapiens; identical to SEQ ID NO: 8927

SEQ ID NO: 8932 - DNA, 2003 bp, Homo sapiens
cagagcggccggctgggatcttagataggaggggtggatttgcaaggcctagaatagctggggagtggtttccccgcggaatcggcctccctgccgctcctgctttgtactgtgacgctcagcctgtgatgactggtgtggaatccgctgagccaccttggcctaaggagactttaccactctgagattgtaaatctgtaaaatagagatgtaggattagcccatacggtagttgtggtaaatactgtgagacaataaggggcctgggacacagcattcaaatgggaataatgaaggtcaagactgtgattcctgtatctttgacgctctcggtataagcaccgtcgtgggcacagggcagtggcctttatgcaggagtttaagagggaatgaaggaatgaatgggcaaactctggagttcccaagtattctctccaggagctgtttccattcttttcgtttccagcaggttggtaaattcattaatttattcattgatctaattaaaatatactaagtgcccctcacctgtgctaggccaatgtgatacaatgagcagaacagtcatgggccctccctgggaagccctcactagcccaaggactccttgtagacatttaagtgtccacaggctctggagttccaaccttgagtgcaatttagcagctgtggaccttgggcaagtcattacatctaagcctgttttctcttctgcaaaatggttaaggattcaataagataaaactgtaggcaatgaaaaccgtacctggtaacagtaggtgctgaagaagtgttagctattaatttttgcttaatttttctctctctgctctatgtgatgaaaagattcaagaggcaattgttggaatgtaaaaagagcacgggacttggagtcaaatacttaagtctaccatcaagtagttgttaagaattaaacaacaatttttgtgtacccagttaaatgtgggctgcttaggaatgatgactgtgtcttaatgatctctgtattcttagtgacatgtagaatcattgtgcctgacacatagtatgtactcaggaaagaaatggaaaatgtggttttagcattgaaggccgggagagagggtctaacagactacaagccctgccaggagcagagtaagggaaacagaggagaaaagtgtttttagtctgtgcctgaatgtatttacatctgtttgtagcccaaaagccaaaagcatacatacgcttggcttttctgtagctatgtttatggctttacagcagattttatggagctgcaattactttgatcatgagggactgatgctagtggatttacttcaccaaatggaactcactttgtggcttctgaagaagggacctttgtggactgtcatggagtagttaagagtgcaggctctgatttagtgatcagagtctgcattgtcaggaatgggacaaagtgaagttatgtggcacttgataggatgccctgagaagattgcaacatcacccctgtgatattcctgctgaagatccataacctggatgtaatcatgaggatatatcagacaaacccacgtaaagagacatgctgtatacaaaactgtaatcttagaaagtgccaaggtcatgaaaatcaaagatagaccctggaactgttccaaactggaggggaccaaagaggcatgacaactaaacacaacacatgattctgaactggatctttttgcttgaaaggaagttacagggacagttggaaaagtttaaatggggcctacaatgccgtggtaatgatgtgtccgtgttaatttcctgattttcatggttgcctgttaagttacatcagaggatgttcttgtttgctggaaagtaaatcaatgtatttggcaggggataaggcatcaaatggtcaccttaatttcaaattattacagggaaaatgtttctctctgtacttaataacttttttgcaatttcttaaaatgaaagctctggagtaaaaacttcaaggatccaaa

SEQ ID NO: 8933 - DNA, 8794 bp, Homo sapiens
tcttcagcttcttcctctgagtcaaccacagggaagtcttgcatggactgagtggtgcgctcggatccataagcccccacagcaccttttccctttctctgcttggcttcaattgggttaatgatacctgaggaatttcagcaaaaaaaaaagagagtcttacgatcacagcaattcatgtatgtgaatcagccactcagtgaaatgacagtttcttgctccttccacaaaataacatgctactcaggaaggagagctattctctgccctcagaacactactcttgtcccttgtgatttgaaacttatgagcatttatgctaccacagaacagtctgctgactagtttatttatatcccaaatagatttccatttccacttggattgtttagtggacaggaagaaaacagaacactacatttataactgagaactccagcacactaaattctatgcttcacttctttgggagcctctattagggaaaatgcaataattccaatactatactgattctgactgaagtgaagctgcaatttaatataagactcctcacatattttacttaggagttcctatctcctgtgtttaacttttttataacaagtttaagccctggaaataaacgttgtttttctcataaaagagtttacgaataggaccacaacatttcaatgaagacgttcccctgactccaaattttccatccctgccccccttccatttagttccactgaagtcttaaataagagctatccctgggccagatgtggtggctatgcttgtaatcctagcactttgggaggccaaggtcttgaaccagcctgggcaacatagtaagaccccatctacaaaaaaagaaaaaattagccaggcacagcagagtgtgcctgtggtcccagctacttggcagggttgagcccaggaggttgaggctgcagtgagctatgatcatgccatgccattgcactctaccctaggtaacagagtgagactttgtatcaaaaaaaagcaaaaaaactgtcccctcattctcattcagtgtatctttactcaagttcatgtatttttcatgtacctaatgttttcaacacataacctggatttcactttaataattatttagaggccaggcgcagtggctcacacctataatcccagcactttgggaggccgaggaggatggatcacttgaggtcaggagttcgagaccagcctggccaacacagtaaaaccctgtctctaccaaaaatacaaaaattagctgggcgtggtggcgggtgcctgtaatccctgctactcgggaggctgaggcaggagaatcacttgaacccaggaggtggaagttgcagatgagttgagatcgtgccactgcactccagtctgggtgacaagagtgaaattctgtctcaaaaaataataatgttattattattatttagagactggaatttgaatatgtaggatacatttgattatatctacttggcaatcatgcataggaaatagctcaagaagagggggaaatgttcctgtaggaagaatccaactgtttggtttgagaggctttggtctcaagaaggtaagagtgtgacaggggctgtgtctcaatggggctggccatgagaagacaggaggagactgggctactagaggaagatggaagtaaccaatgcaggatttgctcagccagttttatagccatatggctctagctattacaaaaactatgcacgatgttttactgatattcctgaaggacaaatagggttatttccacaaaattaaaacccttgtgagtagggatggcaaactcaaatgactctgggaccaagaaaagttcctgtgggttggggtggaagacaacagggggtaatggagactgcctccaagagaaggccatgtccatcgtcccaggagcagttctcacttgcctcaactaactactgccaggcaaaatctagaattttaggtgaaattgtctgttttttaaatattagcaactaattcatttttgtttttatttattctatttatttatttatttatttatttatttatttatttattcagggatggagtctcgctctgttgcccaggctggagtgatctcggctcactgcaacccccacttcctgggttcaagcgattctcctgcctcagcctcctgagtagctgggattacaggcacatgcctccacacccaactgatttttgtatttttagtagagacggggtttcaccatgttcatcaggctggtcttgaactcctgacctcaagcgatccaccacccgccttggcctcccaaagtgctgggattacaggtatgagccaccacacccagcctcatttttgtttttagaagcactggtcaggaccagaaaaaaagcctgttttcaacctgtttgcagcctgttttagaccctaaccctttccttgctgttgaaacaattacttatttaacttgagctttgataaagcaaggtagcttaggaacgcaaatgtcttgtgctggcaaaccaggctggagagataaagtgcttttaaaagggaaaagcaaacctcctctcccaacgcccctctccttccctatgcctgccctcctccatcatgcaagacgacaaaggtgcaataccttgtgcattcttcccgaggccccgtccagggacgtagcccatcttctgaagaagcttctgtccaattccttttgtgtgtctttcccagctgccgaagtccatgaaagatttggttcctcctgcaaaacctttctggctgggcttaaaattgccaccctgcaaaaaagaaaaatcaaagcttagttaatggaaaaacaaaatgaagaaaaatctaagaaagcttggccaacaggaaaatggcctaagttatacagcactatgaaaagtgtcatatgaaccaaaaatgtgtgtgataacgtgtcaggaaggaagagactgcactacacacttcacaactcacagaaacctgccaccaaaaggagacactcacgaaattcattccagatgagtttctccctggctagaaaatgcttgggccacaatgacctttgaaggatattcctagggtcacaatcctgcaatagagactaccgtttttagcttccttggtccaaaatccttaggaaagtcgtcctgcttaacaggtttctcttcgtcatcagaatcttccaactctgcctcctccgctgcccctttcttgagccctgcgctgatgaagttgactggcgcagagtagtcacgggccctgtaggcacagaaacaaagccccaccaggtcggtaaagaactcttttctctgcagcgatccttttgcagaaactacgtgcttgaagactccttagagtgaatctcatgggaggttttttaaaaaagtaacacattttttaatgtgtcaaaaaatccaaaggaccccagatttggcttcctgtagtcacatttaacattttacctgacatatccctctacggctgaagagttatcacatcaatgtagggttgattacaaattcaaaatatgatgtgataatacaattttcctacattttaaaaaattaatttatcataaaaagcaattgttttgaaaactatttcaagtacaaaaatccaacaggagcagaaattttgatggaaaatcataaataaaacccattgaaagattatatgaatgtaaagcatgtaacaattatattaatcaaacttagaaaaagctcctagccattaaatttatttgaatgtgaaaatttccagccagggcaacatggtgagacttcgtctctataaaaaaaaaataaataaaaattagccaggcatggttgtgcaagcctgtggtcctaactacatgggaagctgagatgggaggattgcttgagcccaggaagttgaagctgcggtgaactataatcatgtcactgcaccccagcctgggcaaaagagtgagaccttatctccaaaaaaaaaaaaaaaagaaaagaaaattacactaaagtcccctaagaaataagaaattaactctataaaatgaaatatattgatttaaactctgactgcttcaagtacttacattaagccattaacctcaggtcttttttgtataaaataaaattgatatatttgtactgtgtggtttaaaaaagaaaaaattacaataaaaaaccctggagccaggtacagcggctcatgcccataatctcagcactttgggaggcttgaggccaggagttcaagaccagctgggccaacatagcaaaatcctatctctaataaaaatacaaaaaactagctgagtgtggtggcacacgcctgtaatcccacgccactcaggaggctgacgcatgagaaacgcttgaacccaggagacagagggtgcagtgagctaaggtcacgccactgcacactccagcttgggtaatagagactgtgtttcaaagaaaaaaagaaaacctgggaatacagcaaataaagggatgccttgtaaaatgaccaacctagtaattcaacaccctcagggcaacaacagaatttagggagttttttcctaaaattgtaatataacttagtgatttagatcccaaactctagagtcagataggtccaggttccaattctagcttagcctctgcctagttgtatgaccattagcctcagtctcttaatctgtaaaatggggacaataatggtacctttctcataaggaaaattaatccaggtttatgaaatagccaggacaagtaagcagccaagagatgttagctattattattatcttatgattatgcaattcttgttccctgatctatttgtcatccactttcagacttccttgtggatgagaagtttggactaatctctatactctttctcccccagcctcctttgaaaaaggcacattctcagctgggtgtggtggctcacgcctgtaatcccagcactttcggaggccgaggcaggcggatgacaaggtcaagagatcctggccaacatggtgaaaccccgtctctactaaaaatacaaaaattagctgggtgtgatggcacatgcctgtagtcccagctactcgggaggctgaggcaggagaatcacttgaatccaggaggcagaggttgcagtgagccaagattgcaccactgtactccagcctggcgacagagcaagacttcatctcaaaaaaaaaaaaaagaaaaagaaaaaggcacactctcaataggatagagcctagaggccacaggtgaggccatggaggaaaaaacccccaacctggcacaccctggttgagtgaggttcagccagggcacacataaccttgtgctggggagaagacgtgcagcctgaatcctcattgcccaccactatcctagaccagtcctccactacctgtgcagggaccactggcttggcctcctcacagtcttccactgtggctccatgcctattgagcacaccagcaaaagggtcttctcaaaacataacccagccccacatcacaccctctctatcacacacactatgctacccttccccctctctgctccagcccccaagcctttcatatccttgtggataccgtgatgcttcccatcaagggcctttgcatattgggacctcttctaccaccctagttaccttctactgtcagtcatatcagcttaagggtcacttttctccacagaaatcttccttgacctctcagaatagatgaaatgccctaaaatgtgttctccctcatgtcctcatgtccctcatgtcctgcatcacagtcacaagtttgatcgtctgagttgttaatgcctatttccatcttctaatgtctgggctctaggaaggcaagaatgggtctatagcacaggcctaatacatagcaatcgctcaataaacactgataattaaatcagtgaggccaggcgtggtggctcacgcctgtaatcccagcactttgggaggctgaggtgggtggatcacttgaggtcaggagttcaagaccagcctggccaacatggcaaaaccccgtctctactaataatacaaacattagctggaggtggtggcgtttgcttgtaatcccacctactcgggaggctgaggcacgggaatcacttaaacctggaaggtggaggttgcagctagccaagagcacgtcactgcactccaacctgggcaacaaagtgaaaccgtgtctcaaaaaaaataataataaatagaataaatcagtgaaagagcagcactctagcctaaagaggaaaccagacctctcgagatgatgtcacagctaacagtctcaacaaggccaggtgagaagtatacttatcagggtatctcctccactccctgtccatcttccccctcttccctaaagcaaggtgaagcagcccccatgccaggcaataccgtttgcctccaaagctgggcctctcatcatccgagtctcgctctgcccacaccccgtaggtggcttcttccttggtctgccagtggcgctgtcggttggggttgaactcattctggagatcccagtcagtgatctcaaagttctcccgctcgtcatcatcatcatcaatgcggccttccccatcccggtataagtgggacaatgacatggccagtcactaaaggaagagacaaaaagagcacaggccgtaagtcctgggggcagcagtcgaaggattccttgtgagtctctattccttgctgctttcagaactttctccaaattcaaagtccattaaagtcagcattactattcaataaaaaagatattaaaaacctacttttagataacaatcagtactaaaacaggtgaacaaaatactactcctaacagtctatgattctttaaaagtacatatctccttgtcctagtcaatatcataaatatcacacatattcacacatacacaaaccacacaaaaataactaagtaggttattttgtacattattaccttagaaaatgagtaggtatcttcttagatcccagattcttttttctattactgaggaaagaattatatctggatccttggtggtcctaggagagtgattttttttagaatatgctttttgaaatacattacttgatgaaacaaaattttcagttttcctcacaaaacatgaatttcttctgatgaactgaaagactgtagtaattatgaacactattttaatagtcagatgtccagagattgatatagagaatctacctcacagtagctgggtgaccagattcagttgtctttcttaaattgggattaactaccataccaaccttagagaaggcttacaaagcaaattcaatgagttcaaaataagtgctcaagaaacgatagcttctactttagtcccatgattaggttaatcattgtattagtcagggttctctagagcgacataactaatggaatagacatacatatataaaggggagcttattaactattaactcacacgatcaaaaggtcccacaataggctgtctgcaggctgaggagcaaggagagccagtcaagttccaaagctgaagaacttgaagtccaatgttcgagggcaggaagcatccagcacaggagaaagatataggctgggaggctaggccagtctctcttttcacatttttctgcctgcttatattcttgccgtgctggcagctgattagattatgcccacacagattgaattgagggtgggtctgcctttccccacccacagactcaaatgttaatctcctttggcaacacccacatagtcacacccaggatcaatacttcgtatccttcaatccaatcaagttgacactcagtatttaccatcacaatcatcattattattatgggactagggagtaaacttagcaaagtgactgtaaaatcaggcaggctaaaatcgaagcctgagttcaaattcaactctatcagatacccagtgtatgagaattaaatatgcacgtgaagcgccaagcatggtgcactacacaataatacactccataggtgacagcaattgtgattcttgtcttgctgaaagcggccttaaggcacacggagttcactacttccacaggcagtgtcaaactctggtcacctctggcaaaacgttatctctgccttcttctactcactggtgcaccggttgggtgcaacgggtcccaacctcttccaggagtgtttaggacagaaggattttcagaaaagacggggaatctcaaatacataaagttaaataataccactgcctgcgtgggcatagtaaatggtaataagccccgagtagtcacaagttatgaagcctttatcagtagatgctaggtacatgctggtcgcttgagaccgattatcaactgtctgcatcaagacacttctgcaaggtaggtaccgttagttttcatgcttcagataagaaaaaggaggttcagagaagttagtaacttaccctaggttccactgctcatagggctcaaactcaggagtgctagaagtcaggcctcgggcttgtctctctcttgctgtctaggtttggtgaaggaagctcaggttcttaaatgaatccaagccctaaatcccagttgaccccaagcagcaccgcccctctccgtgcctcggcagagctgtctacgaaatggattcccctccccacaccccaacggcttggaccgaagctcgccttccctgagccttcgtccctactctcactggcgctgagtccccttgtggccagccgtgctcacctgtccgagggtccagcgtaccaaattcagcttcaccatccgcgcgagaagacgccgctcctacacc

SEQ ID NO: 8934 - DNA, 693 bp, Homo sapiens
attttgtcccaaaaatatatatggtgtccttaacttggcagaattgagaacccagatcagctgagattagcaatttgatttccctctaaatgtttcttacagatggtttctaccctacttatctttcaagaattcgtgaagactctatccttatatggaaagctggaacatgaggttccttaggctcggggtgtttatctggaaattaaatatccgcaaaacacagtaaggggagaaaccacagccttcatcattcatttattcatttgtcattaacaaataattaatgagtacctacatgttatctattgcagtataacaattacctccaaacgtagcagcttgcaacaccagtaaacattatctcacataatttcttttggtaggaatttgagagtggcttagctgggtggttctgactcagggtctttcatggggttgcagccatctgaaggcttgaccagggctggatgaccaacttccaaggtgcttctctcacatagctggcaaactggtgctggttgttggcaggtttcagtttcttgccatgtgagcctctacacatggttaccaagtgtcgttatgacatagtggctagcttccctcaaaatgagcaaagcaagagagagcaaggcagaagccacaaggtcttttatggcctagtcttggagtcacactgtcatttctgcaata

SEQ ID NO: 8935 - DNA, 315 bp, Homo sapiens
cagggaagggatgaccatggagagggagaaagacaagagaacagctgatcaatggggcagtgagaacttacacatttattgattaagcttaccttcttatatcgcacgttttgtggcaactaccaaacgtctctactaaaaatacaaaaattagccaggcgtggtggcaggtgcttgtatttccagctactcaggaggctgaggcaggagaatcgcttaaaccaggaggcagaggttgcagtgagccgaggtcgcaccactgcactccagcctgggtgacagagtaagactctgtctcaaaaaaaaaaaaaaaaa

SEQ ID NO: 8936 - DNA, 319 bp, Homo sapiens
cagggaagggatgaccatggagagggagaaagacaagagaacagctgatcaatggggcagtgagaacttacacatttattgattaagcttaccttcttatatcgcacgttttgtggcaactaccaaacgtctctactaaaaatacaaaaattagccaggcgtggtggcaggtgcttgtatttccagctactcaggaggctgaggcaggagaatcgcttaaaccaggaggcagaggttgcagtgagccgaggtcgcaccactgcactccagcctgggtgacagagtaagactctgtctcaaaaaaaaaaaaaaaaagttt

SEQ ID NO: 8937 - DNA, 258 bp, Homo sapiens
ccgaggcaggcggataacctgaggtcaggagttcgagaccagcctcaacatggagacaccccgtctctactaaaaatacaaaattagctgggcgtggtagtgcatgcctgtaatcccagctactcgggaggctgaggcaggggaattgcttgaacctgggaagcggaggttatggtgagccgagatcgcgccattgcactccagcctgggcaacaagagtgaaactctgtctcaaaaaaaaaaaaaaaagagagaaaa

SEQ ID NO: 8938 - DNA, 719 bp, Homo sapiens
gtggtctggaactcctgacctcaagcaatccacctgcttcggcctcccaaaatgctggaattacatgcttgagccactgctcccagccattgttgtttttttgaaacaaggtcttgctgtgtggctcaggctggagtgcagtgatgggatcatagctcactgcagccccaaactgctgggcttaagtgatggttggcctcaggctcccaagtagctgggactacaggcacatgcaaccgtgcctgactaatttttttcttttgtagagatggggtttcactatgttgaccaggcaggtctcaaactcctggcctcaagcagtcctcccacctctgcctccccagagtgctgggattacagggcataaggcattgcactcagccaaaatgagtttttaaaatttttggttttgtttatgggtatccagtggtccagcactgtttaaaaaactattctttttctcctgagctgcattttcactttatgaaaaatcagttgaccatttatcatagatgtgtggttctatttctggactctctgatttgtctatcttagttggcattactacatgtcttgattactataactttataataaatgttgaagtcatatgatttaaatctttcaactttgttctttcaaagttatttggctgttatagattatttgtcataaacattttagattcagcttgtccatgccttaaaaaaaaaaaaaaa

SEQ ID NO: 8939 - DNA, 564 bp, Homo sapiens
cccctcccagccacagacaccctccccagacataagtctctgcggtctgcaggaattctctttccgcctttctggaaccactggaatcccacagactggggtggacagctattcttatgaaaagtgtggctccatttctggactaaacaggcgtactggcgctgaagataaggatcccaaactccaagtcaggcctatctgcaagcaaagtctcagcctcgctcacctcttcccttcttccatcagtcattagccctgtgtgagaaagcaggggtgcattgttaccatatgacatggcaaaaagggattacctgctaatgccatttggtttagtgatgccttgttacataaactactctggaggagttcaaatatccctcaggcgaacgcttccatccccaggttggtaacactatagctgagtattgttttatttgccatttttcaaaagagggagaaacatacccaagccattatccagcctaccaataatacatttcaagaaaacaaccgcaactcccaatcctttcttctgagggcaggatgttgtagggctattgttcc

SEQ ID NO: 8940 - DNA, 375 bp, Homo sapiens
catagggttgttttaacgctgggatgcagtgatgtgtgtgcaagctcctggcacagcaacttaataccagtctcctctgtcctgtcttgcatctgctgaggatgaagaaggagagcagttgagtgtggccctgcctggctgggggcccttcctctatagttatcttctttataagccatttatagtcttggtataattttaaggaaaaaaaatcaaggcgctactttgcatttaaaattcatttttgaaacatactggcagcaaacgccacactattgcagttagggaagacaggagagcaaatgtcaggtcttggcaaagtggggtggggaattttttgagtgtgacatttgaataaagaaatctaaactagga

SEQ ID NO: 8941 - DNA, 470 bp, Homo sapiens
cacactcaagggcttagactctgcctctcagagccatatttcagaacccccacactgaccctacagtggtcacttaggaacattgtcctaatggtggtcaagggaggcctgagaacagtaggaaaaatattcccccaaccccttattactcagcttctcctgttggtcaggggctctgatacttgagctaatttaatcccagcctggcaccgtttggggcaaaaccaaagtgatgggacatagagacaaggattgtaacacctagcttaatgctgcctgaagggtttttggttgcgtttaatttttttttttttttttttttttgagacagagtttcactcttgttgcccaggctggagtgcaatggcacaatcttggctcactgcaacctccgcctcccggattcaagcaattctcctgcctcagcctcccgagtagctgggattacaggcgcataccaccatgcccag

SEQ ID NO: 8942 - DNA, 463 bp, Homo sapiens
cacactcaagggcttagactctgcctctcagagccatatttcagaacccccacactgaccctacaatggtcacttaggaacattgtcctaatggtggtcaagggaggcctgagaacagtaggaaaaatattcccccaaccccttattactcagcttctcctgttggtcaggggctctgatacttgagctaatttaatcccagcctggcaccgtttggggcaaaaccaaagtgatgggacatagagacaaggattgtaacacctagcttaatgctgcctgaagggtttttggttgcgtttaattttttttttttttttgagacagagtttcactcttgttgcccaggctggagtgcaatggcacaatcttggctcactgcaacctccgcctcccggattcaagcaattctcctgcctcagcctcccgagtagctgggattacaggcgcataccaccatgcccag

SEQ ID NO: 8943 - DNA, 129 bp, Homo sapiens
tcatctgtgatgcggggacagctgcgctccttgctgcgaggcgtcaggacccaggtgatagtgaagggagggtggcgcccgcggttcccggcggccactgatgcctgtctctctgtcgtgtgtacgtgc

SEQ ID NO: 8944 - DNA, 129 bp, Homo sapiens; identical to SEQ ID NO: 8943

SEQ ID NO: 8945 - DNA, 2009 bp, Homo sapiens
tggcaatagaatagctggatacactaatctctacaaggtgtcaggcaggagattcaccttccccagtcccaggggacaggagagaaatctgtaaagggacagatgcaccatctttatttcaaaagaaaaagctccctcagattgtgttactaggagtctcttttgtgacatttactgacctttctccccaatcttaccttcctattggctactttttaaataaaaataaacattttaggctaatatgacaaaaatgagataaaatcttaaaaacattgtactagtgtacagttactaaaatgtgcttactacaaaacagtaaaatatttcactctgtaaatcatcactaagtagttattctgtcctgttgattatgagcctccaaaaatgtttaatgcttgaaggatggtttgggaggcagggaatccttttcttaaaacaactttaatgaggcatatgttacatatcataaaacacccatttcaagtgtacatttcagtgattttagtaacttccctcagtggtgtagctgtaactattactcagttttagaacatttttatccctcccaataagatccttcatgctcttttacagttaatcctgttcttacccccagcaaccactaatctactttctctataaatttgccctttctggacagttcaaatcaatggaatcatacaatatgtggtcccttgggtctggcttttttacttagctaatgtttttgaggtttgtccatgacagataacgtcttggtagtttgttccttttattgctgagtagaattctgttgatggatgtaccacattttgtcagcagagagccttttaaacttggattccaacttcctgttgtctaaacggaaccctccgaacgtaggacttataggggaagctgctgtgcatgtcaaaaaaactactaatcagaatgagctttgtcatccagagccagaactgctgcagaaatttttataattttgcaacttctttttttacaaggaacttttgtgctactacacatcaggacttttgaagcatccaataaatccatttaataagtatgagcatgtgtctgagtggacaagaaagtgaaaccatccatgctacattggataatttttcctcccccagactggatagggaatctcaactttcaaaatagagtatcctggctccatttacaaagctgcacaggtattaaagatcgtgctgcctttgttaggcagatttggaggggaggcccaacagcaaagatggagaggaaaaagggagtggagcttgtggaacaggaagccccccagggtctgtgcagggctgctcagctcttgaggatgttgtggatggtgaagtggtgatggtgtcctggagcagcccagcacctccactgggcccagaaggtcttgacttcggacacttacccctgtttcacaagtgtttataaagctgtttttgcttttgtttttctcctaaataatccttacttggtagttattaatccttctttgggggagggacagggctttaaaactgaagaaaataattttcataaaaatatcaaaaatggaaaaaagttactttgtaaaaaatttgctatacaaaccaaatggcagctgttgagaatctcaataaaatgttaaatgcatttgctggcagtggtacccttttgcctaaggttgggtcactgtgttataccgtgtgtgtttggggtggggggaggtgtgaaactttttgtctcacacataagttgtctcatgggtcataatcttagttgcagttttcctttcaaatagggttgcaaagtagaaaacatgggcttggaagtgacagacctgagtgaatcccaccttcactactttgtgccattggcctgcactttatttacaaataacctctatttgtaaaggtgcagcacctgtcccctggaactataacgacagatttttaaaatactgcctggcacataataggcacttaatacatggtcgccagtagtggcaattgtta

SEQ ID NO: 8946 - DNA, 3872 bp, Homo sapiens
gcacaattgtcactcacaacacaggctagttagagtttgctaccttcttagcagaaaatgcatgtgtgtcttgttggaccttcactggggaaaggctgggagcctctggctgtcagtgacttttctcacagaagaagaaccagcaagccagactggacacctttaccctttaatggtaagacttgtatttataaggggtaattttgatgttgaatttaagccactactttgtttaaacttttttaaattggcaactagaagtttgagaatttgtatagaaatggaacatgtatttctaacagttgccaatctggctggtcccaatgttagtttattagtgattgatctgtaattattgggattatttattcaactctaaaattccaagatgaaaataatttatctctttcttttcaagggaaaaaacccaaatgaatgcattttcagtttctccaggcctttgaactgcagcagaaaattcaaggatacagcctaggcctgggcaaatgcagccctgggtctttgggccagtttctgacaataatagttgagttttgggaatcacataagggtgaaaccagaaacgatcctaaggaaaggcttgacctttgttaacacctttagtttccaaagtcacagcagctggggtccctcttttttttttttttttctttttttttgagacatagtctcactctgtcacccaggctggagtgcagtggtatgaccatagctcactgcagcatcaaattcctaggctcaagcaatcctcccatcttagcctcccgagtagctgggacaacaggtacgcaccaccacggccagctaattatttttattatttttattttttgtagagactggatcttgctctatttcccaagctactcttgaattgttgtgctcaagtgattctcccatctcagcctcccaaagtgctgggattataggctgggtgtggtgagccaccccagcctggggtctctttaattaaggttataatgctaaccatggcttaaaatactaagcaacattttccaaattgtttattactattgctttgattttggagaagctgggaagtaaggaggtgaggtgaatactctgataattaacacgtgttagagaggaaagttgtgtgaagaggctgccaaagtaaacagcacgaatgaatcttcttgtactagggctgctgcaaaccccaggtagacaaatgacagcccaggctcctgaaccatcaggaacccaggaatctacccaactgtgaggagggggcaggccttcgtcaataagggtcccaccatcacgggctaataatctttctcagtttaggtgatattgaggtattgaaactgttagaaatctgacagatttgaccaagatttggagacgtccacataattgggaaggactgagtgtccctagccactctcctctgggataacgcggacgtcattagtttgcgaagtgggtggggagaacaggaggattgactctaatttggtgtgtagtgggggccttgatgtccttctgcctctgtccacatttccccatgtgactcattgcaccctgcattgctcacagggatcattagttctcccggtagacagagcacctctgcagcctctgctctgctgccttgtgaatttcctacacagacttggttagttacaatttggaaacagtttttttgggtttttttcctttgttttaatcttctcacaatgaagctgctattggtgacagggacaggggagcaggaagccaacccagggaaacatgcgagtttcctgcacaccacttagtcacctgccctcactggccaaccccctactgctgttcccagtcagtctggtttttagaggcatcgtggcaatagaatagctggatacactaatctctacaaggtgtcaggcaggagattcaccttccccagtcccaggggacaggagagaaatctgtaaagggacagatgcaccatctttatttcaaaagaaaaagctccctcagattgtgttactaggagtctcttttgtgacatttactgagctttctccccaatcttaccttcctattggctactttttaaataaaaataaacattttaggctaatatgacaaaaatgagataaaatcttaaaaacattgtactagtgtacagttactaaaatgtgcttactacaaaacagtaaaatatttcactctgtaaatcatcactaagtagttattctgtcctgttgattatgagcctccaaaaatgtttaatgcttgaaggatggtttgggaggcagggaatccttttcttaaaacaactttaatgaggcatatgttacatatcataaaacacccatttcaagtgtacatttcagtgattttagtaacttccctcagtggtgtagctgtaactattactcagttttagaacatttttatccctcccaataagatccttcatgctcttttacagttaatcctgttcttacccccggcaaccactaatctactttctctataaatttgccctttctggacagttcaaatcaatggaatcatacaatatgtggtcccttgggtctggcttttttacttagctaatgtttttgaggtttgtccatgacagataacgtcttggtagtttgttccttttattgctgagtagaattctgttgatggatgtaccacattttgtcagcagagagccttttaaacttggattccaacttcctgttgtctaaacggaaccctccgaacgtaggacttataggggaagctgctgtgcatgtcaaaaaaactactaatcagaatgagctttgtcatccagagccagaactgctgcagaaatttttataattttgcaacttctttttttacaaggaacttttgtgctactacacatcaggacttttgaagcatccaataaatccatttaataagtatgagcatgtgtctgagtggacaagaaagtgaaaccatccatgctacattggataatttttcctcccccagactggacagggaatctcagctttcaaaacagagtaacctggctccacttacaaagctgcacaggcattaaagatcgtgctgcctttgttaggcagatttggaggggaggcccaacagcaaagatggagaggaaaaagggagtggagcttgtggaacaggaagccccccagggtctgtgcagggctgctcagctcttgaggatgttgtggatggtgaagtggtgatggtgtcccggagcagcccagcacctccactgggcccagaaggtcttgacttcggacacttacccctgtttcacaagtgtttataaagctgtttttgctttttttcccctaatcattacttggtagttattaatccttctttgggggagggacagggctttaaaactgaagaaaataattttcataaaaatatcaaaaatggaaaaaagttactttgtaaaaaatttgctatacaaaccaaatggcagctgttgagaatctcaataaaatgttaaatgcatttgctggcagtggtacccttttgcctaaggttgggtcactgtgttataccgtgtgtgtttggggtggggggaggtgtgaaactttttgtctcacacataagttgtctcatgggtcataatcttagttgcagttttcctttcaaatagggttgcaaagtagaaaacatgggcttggaagtgacagacctgagtgaatcccaccttcactactttgtgccattggcctgcactttatttacaaataacctctatttgtaaaggtgcagcacctgtcccctggaactataacgacagatttttaaaatactgcctggcacataataggcacttaatacatggtcgccagtagtggcaattgtta

SEQ ID NO: 8947 - DNA, 101 bp, Homo sapiens
ttttttttttttttttgagacagagtctcactctgttgcccaggctggagtgcagtggcgtggtctcggctcactgcatcctctacctcctgggttcaagc

SEQ ID NO: 8948 - DNA, 3167 bp, Homo sapiens
aggtggaggaggaactgcaggagcaagacttcttggaccgctgcttccaagagatgctggatgaagaagaccaagactggtttattccctcacgagacctgcctcaggccatgggacagttgcaacagcagttaaatggactgtcagtcagtgaaggtcatgattctgaagatattttggtaagagccatatgtagttccccaggttatgtagtgaaaagaatataggatttggaatgacagactttctttccagccctacaaccctcaacaagtctggagccctgtgagctgttgtttctttgctcgttttatgggcattattaataaggggtgcattaaagatgcattgctcctcataaagcactataaaacattactgttgccagcatcacgggctttttacttgccaagattggacgccaccaacctttactttctaatgggctcttcaaagtagaattgggattaaggataacaatttgaacactgaagaagtttcttctcaaatatcatttgttgctattcttctcttttactgtccctcaaatctgtatttaatatacttctaaatgattctgttataaaaattagctgttcattttggaagaaatgtactcctgagaggtcattttctccacttagaattagaaaaccagataaattaatttcctgcctttcatatttatgtaacatcagaagtctgtgagcaggctgggcacggtggctcacgcctgtaatcccagcactttgggaggctgaggcgggtggatcacctgaggtctggagttcaagaccagcctggccaacatggaaaccccatatctactaaaaaaatacaaaaattagccaggcatggtggtgcgcgcctgtagtcccagcttggaaggctaaagcaggagaattgcttgaacctgggaggcagagggaggcggagtttgcagtgagccaagattgcaccactgcactccagcctgggcaacagagcaagactgtctcaaaaaaaaaaaaaaaaaaaaagtctgtgagcaatatagttttcatacaactcatattctgaacaatcttgccctgtggtttgctaaggttttggatattcacaagagagtagagaaccaaagagagtacagaaagatgaagaaaaatagagattgtggtatccagcctggtctgatggagtaccctggttttcaccaagttaaggtactcagtgaattgaaaaattattcttggagttgaacttacaggcctctgatgagattttggaaagcatcaggaaggaaacaagagtccaaagaaggaaggagaagatgagcttgctcagggctatgtcaggtgcagttgagataacctagcaataacagcctgagttacaaggaattttctttctctccctaaagctaaggggaaggtactgataatgatggactgggtaagttttaaaatgcagcttgccttaggatttactatctcttggttcttatttcagagcaaaagtaacctgaacccagatgccaaggagtttattccaggagagaagtactgagccgagaaagctttgaggaagacttgtctgtccccacatctggggatagtaatgcacaaaatggtggagctgaagagggggatggggcgggcgaggggtgcacagcgggaaggggagtggtggtctcacaatactgtgactctgagtaactaatatgctcagtcttattctaagcctctgagtatttctattttgttctgctgacttttgtttggggagtttcctgttttgtttttttaaatagctctttcgagttaaggaaattgcattttccccccttcatcagaagtgttccgcggtgtgtatttaaacaaaataagctgactaagaaaaactggatatttaggaaatgcccctctcaccctgctgtatacttatcagggacagtgagcacctggagagctttttgtggaatctattgagttggatgggaaaagggacaagcagaaagagcaggtggtgcaaactggaatttgaggctcagctgccccacccccggggtctcctgcaatgaactcggataaccaatgtgctgtcaagcccttgcctgtttgtcctgaaccccattcaagaaaacacagacttaaagtacttagtttacagtaacttttgatgattgttgaaagttgtaaatcagaaggtagggctgtgatggtggttgtcacttgagtcatttagttactgttgtcctgttcataagcctgtgttcaccaccaccatcagactcaccatttataagtagaagagcactagggttgatctgccacctcatctttcatgaagtctattccccagcctcctttttaagaaaagatactgctaccaaaggcataggggaggcctgctgtgctggcaattagcatgagcctgcagaagtcatccttgaatctgttgtgtcttaattttatttggacagtttttttttccagcctcatcaacacttggtcttcctggtgtcttaattccctcagacaagtttatgcacttttttaaggaaatatttttcaggacactagtaagaagctcagttcacagtttggatatttcttcccacattacagaattatggaaaggaactcaaaatcagcctaggaaagtgagtcctgcttgacccatgtgactgtgtacctgaccttctgggatcttttcagctattaaaacattttactgttcccacatacccagctttgcaagttttgtagattgacctcttagggtgtgtttctttgtctttcctgcctttaacttgctggggtcttttgttgctacccctaaggaactaaactgggtgccaggagctaccttcgtgtatagagatgtagatggcagtgtggggtacaggagagccatccaggccattctcccagggatgaggaattggagagccctgaagataatagtggcttctttctgattgctactgtgctgtgtgataggcctaatagggaaaagatatgtaacttgaaacaaagttggtataaattcagtatgtggctgtgggacagaggttggaaggaaaggactagggtatggaaagctgaagaaattctccttatgagctctcgttgactttttgaacagtgataagctaatgccagatttaaaatacacattttttccta

SEQ ID NO: 8949 - DNA, 7453 bp, Homo sapiens
  SITE (350): n equals a,t,g, or c
gagggaaatggtttaatacaagcatgcaatcaaattgcattagaagtagatattaggttgatattagataacagattgttactgctatttctgtacaaataaaactattatgaatataagtaaggtgtgtaaattggaggcctacttacactggagtgtatggagctggactggtaaaacatcacagtgtgcaaattacctcaatggctgcatgacaccttttatgaatgggcatctaaagtttccattaatgattaaaggtacagtaaaccaccacacctgtaacttaccaaaggactgaattaatttggtgggaaatgtatgccccttagtaggtagcttggtatatncttttttttttttttttttttttgagacagggtctcactccagttccccaggctggagtacagtggcaggatctcagctcactgcagccttgatcccccaggcttaggtggcttccacctcagcttcctgagtagctggaactacaggcgtgcatcaccacacctggctaattttttgtatttttagtagaaatggggttttgttatgtttgctagcctgatctcgaactcctggactcaagcaatttgcctgcctcggcctcccagagtgctgggattacaggcgtgagccactgcgcttggcttctgctgtattcttagagtggtaacattgtttactctcattggttactaattctactagtagtagagctcttgttctcactttctattagtagacatcctgttttggagaatattattcttaacaaaaattctcatttttcaatttctcttgaagtagagatgtagttaagttcccctaacctcaaaacatctatccctataccccaaagatctctctctgtcctggaccagagtgtctctgggcttttattgaacctctcactgccttactaagccctagtgtgaacatgactaaaaggctgttcaattagcttgggaatgtgggaaatttgacagcattttagttatttggcatcagtcaggagactagctttatctctgcatttttggggaatggggatgggtacaatcaggaagctgtaggaagagaggatattacttgtcttggagagaaggctgaaaagtacataaagtctctgagaccatgatatgctatttcatttctgggactgaaaggcatatcactgtaggaagttttggatatgagaattttctagttaaaaaagagtttcaagatgtaacatctttggaactcttattttatgactgatacatgtgtgtgccagagaccaactgtccctgttcatctgggattgaggagtttctagaggcatgggactttttagtgctaaaactgggacagtctcaggcaaactggaatgatgaatccaccgtagtacctgattctttgctacatacttcatatatattcttatttaatcctcccaacaatccatgatagatattcaggctgacatgatagataatcccaacaatccatgatagatattcatgatggcacacgcctgtaatcccagcactttgggaggctgaggtaggcagatctcttgaggtcaggagttcgagaccagactggccaactagatgaaaccccgtctccactaaaaatacaaaattagctgagtgtggtggtgcatgcctgtaatcccacctactagagaggctgaggcaggagaattgctagaacctgggaggtggaggttacagtgagctgagatcgtgccactgcactctagcctgggtgacagagcgagacttcatctcaaaaaaaaaaaaaaaaaaaaagatattcaaggtaatgtagctaattataacagagccatgaattgaaccagatctgcagagtcagagcagttaatcattaagctacactgactcttcaaaagggtgatgaaagagaaccctttgatatgagaataaattcaaggtgaggagagggttggaatggatttgtaatgaaatctctctgtcttggtaggttcatcctgacaaaaatcatcatccccgggctgaggaggccttcaaggttttgcgagcagcttgggacattgtcagcaatgctgaaaagcgaaaggagtatgagatgtaagttggagatgggaaatcatcagataatggtaaatgaaaaatcctcaatagcagaggcatctggacttgggggtggaggcttgttgagatggagagaactgaagtcacttgtctttctcgctagacaggggcctcaagaggccaactgatatgtcttcctttgtccctccctcaataccttctgacttacaaagcatttcttctattaggaaacgaatggcagagaatgagctgagccggtcagtaaatgagtttctgtccaagctgcaagatgacctcaaggaggcaatgaatactatgatgtgtagccgatgccaaggaaagcataggtatgaaatagaaggagagggatgggacaatcacagctcagggattatgtaaccaaggatctttctagtgagtactggtaattatgagttacatctgtatctcataattagtaaaaagacccttaagtttctacctttgtcatattgtcaatagactgacgattttaattagcactaagaaacattagctttaggatagaacgttgaagggatatgaaatactaagtggggtaattttagatgtttcagccctatttgtgaataatggtaagactactagcagtgccctaggtaggcttgacaaattattaaggaactatccttttgttggttgcaggaggtttgaaatggaccgggaacctaagagtgccagatactgtgctgagtgtaataggctgcatcctgctgaggaaggagacttttgggcagagtcaagcatgttgggcctcaagatcacctactttgcactgatggatggaaaggtgtatgacatcacaggtactctctgtcctctagaaatacaggctcatacttcctgatcttttatgtgctctaaactgcgacgttttggctaattatttctcatgtttatagagtgggctggatgccagcgtgtaggtatctccccagatacccacagagtcccctatcacatctcatttggttctcggattccaggcaccagagggcggcagaggtaggtggtatttctgtcaataatctatccactatttcagttttgaatacggtttcagatgacctgctttttaggacacccaggggccttgttttctaggaagtttgggaactgataagtatatctaacttaggtaaccatatgactctaacatctcttgccttatttcttctgttttacctcagagccaccccagatgcccctcctgctgatcttcaggatttcttgagtcggatctttcaagtacccccagggcagatgcccaatgggaacttctttgcagctcctcagcctgcccctggagccgctgcagcctctaagcccaacagcacagtacccaagggagaagccaaacctaagcggcggaagaaagtgaggaggcccttccaacgttgatgccccttctctttcctcaaatcaatgtcagggagtcaaaagggctgtagcacaggatggagtttgatttatccctcctcccccaacacctaggaactgaatctttttctttttattttttgagatggagtcttgctctgttgcccagctggagtgcagtggtgtgatctcagcttactgcaacctctgtctcccgggttcaagcaattctcccatctcagcctcctgagtagctgggattacaggcacacaccaccacacctggcccagctaattcttttttgtatttttagtagagacggggtttcaccatgttgcccaggctggtctcgaactcctgagctcaggtgatccacccgtcttggcctcccaaagtgctggattacaggcataagccactgtgcccggcctgaatcttgtcttttgacaataccaaagaaatagggggtagctagagtaaagaacctagggcctggacctgggctggacagtgtatccctttaggtgtgggaactgggtatttccctggggtctgtatgcctttgtcttgtcatttgcttttagggcagatgacactttttcccacccttttaaagctacaagtctatcttctttcttgacccatttcaggagggagccctctcctttatcctgatataatatttaaaagagaacaagaaagcatgtagccctaatgataggagattatcgcatagagttcagagactggaaactgaattttccctcgactttcactttgtgggtaaatcacccaattttaggctcttttctgcaaggatggccaaaattaatcatttttaaaaagtagattcatgcccactgcccttgggtgagggggaagaatacgggggttcccagaagcccccatgtgatccaagggtttgtattttttttttaagtttgttcatatttgtatgtacatgactatttaaagccaggggattatctttctataaatgtataactggcaacctgtatcttccctctttgttgcccatatagccggagccctttttctcatttgagaatctcttccctactaagtgttaagcttagagtgaagggcacctcctactggaccaaaggagaggggattggagaattgttttaagttttatacattaggtcagtattccatcttcccacccccagccttatgaggacagctctctacccatcctgattaaactgcagctatagctgaaaaaaattattgtaagaaaaatacacagcaaaacagagctggaaggtggtaagtgtaaaagatatggaaagatgtaatcaccaaagaagctgcccaaatggcttcctgctatggaggagagtgatttggcccttacctcacctgccttcctgattcaaagaaacttgccactagcaggactgggcccaggagccccatttgccaatctcttctcttcttgggagtctgggaaaggttgtatagttctcaggctttaaaggtgtagaagacagtatggagaataagagaaggatgttttatagtcctctgtttcagtgccttccccatgcccatggagctgtcccaaaacccatccctcagtatttgttgatgccaaagacacgaaccccatggaactggggcaacttcggcagcagtacacttagcaatgaggctgtgttgatgaggaagtgcgcagcatcatacttggtatagaagctggccaggagatagctggggagagaaaaaaatagggtgagtgaggttgaccttctctatccatattcttttttttttttaagagacagttctcaccatgtttcccaggttggagtgcagtggctattcataagtgtgatacgtgcagtacaacctcaaactcctgggctcaaacaatccttctgccatagcctcccaagtagctgggactccaggcatgcaccacagtgccctgctctttctcttctattttaaatgaccagttttactgtatatagttctagattatctaaaactattccagctatatcaacagcatttactttggggttcaggagatagcacccttaactggagactgtaagtcagtatctgttaattgttaatgacatggcaaatgacggctcaagctatttcagtctgtatgactgttacagtcctctttgcttccactccctacagtgtttttgaagattaatatcagttctgcctttatttacttcttttggcagtgtaaaatcatttggttttatttggcacttatcttttctcagtcccttcatttccttactaccaaggaggcagcaaggaatgcttgattacagtattgactgtaatctacattttactgctctctgtaggcttagaactagtataccataatatcttcaaagggttttagatgagaagtctgctttttaacagcttccctatgggcctttctacctggctcttggagctctttctaacccagcatatctcatttcccccatagactcacagcacaataggagagatgctgaggaacttgcgggaagaggtaaactggagcccatagtccatttgctcccagtgtgtcagtagccgagcctttccttggtcaggagtctcaaagggtgtccctttcaccgtatgaaggaagacatacgtagcctgggaacagggaaggtggcagtgtgaggggcagaaagtagtttttcagtcaaagaattatgttaagatcccaaaaggaacacataaatccccaaacaattggtgattttattttgcttttggttgggaaaccctggggtgggtacaagggcgtggtttagtgctcaccaggttatggatgacgttggtcagggtccagacaacaggaatgctgaagaaggggatgctgagtagaaccatatgcagcaatcctaccaagatgatgtaggccagccagatgcctcggctattcatcactcgggtgttggggtttacttcgctgtgtgccacccccacattcatcctagccgtaatgggggatcaggcaggagtccagctcagttttttctcaacccctcttgagctatctcccagttgtctctcagatagccccaatcccctgaactctattgggaatgaagaacttacccatcacgcagaaaataaaaactgaagacttggggaaaactttaaaagacaagaagagtcctcactacatttcagagacatagtcattattgctctgatctttacacgtcaactgtaacatgaaggtgtatgtgtaggcttggggcactcacttcagggagcaagggaaataggagtatctgactttgctgaagaagttaataaccatgaagaggtcacgtacacccagaattccaggcgaaagtcatggaatcatcaaagaaccactaagaagggatgacagagtaaagctcactctggtccccactttgttctctggggcttgtccaccctctctctcacctccgtggcatgtaaacagtctgcatccccattacttctctcaagcgtggggcacgacaacaacttgcccacggcttctggactgggttaggaagggacctgagctcaatacctcgaaaggtggagccttggctctgactccaggggcagcagtgattatctgaactcggatctttaaaattgtggtagctctaaagctgatgatgtctggttaggaagcggctcttgcccgccccagccccaccgccagttccttaagcccgccccatgcccctcccagcttcctcctcatgttcatcggttttttcagggctcccttcagcgctcccctctcagtatttaggtcaccactccctcggcgcccctttcgcctcccaccatttttcctcagcaacccttacagtctttgcagctcctacctgccagctcagatccccgtccggctatgggcgcggcgccggctaccacacctgaagtctcc

SEQ ID NO: 8950 - DNA, 300 bp, Homo sapiens
gcggtggcttacgcctgtaatcccagcactttgggagggtgaggtgggcagatcacaaggtcaggagatcgagaccatcctggctaacatggtgaaaccctgtctctactaaaaatacaaaaaaattagccgggtgtggtggcgggcgcctgtagtcccagctactcgggaggctgaggcaggagaatggtgtaaacctgggaggcagagcttgcagtgagccgagatcgcgccactgtactccagcctgggcgacagaacaagacaccgtctcaaaaaaaaaaaaaaaaaaagagggtg

SEQ ID NO: 8951 - DNA, 646 bp, Homo sapiens
ggctgagttggacttttctaggaactgaattctacagggtagcttgcgccttctcctacgtcttctccgtgcagccttttccacttcgtttctcggctcccgccgtagctcttttgtgccacccttccacactacgccttccctaatttcccatttctcctcacggctttactgctatatttatttgttatttctgcttccttcatcattgtatcgtccgtcacccttccccactgggttgtgtaagtgccttctacctgttatactcttcgttgcttttcagggctgcattacgtcagttggtccctcctttttgccccatgtcggagccaggatccgtttttcttccctgggatgatgtttccagtctgtcgtccgaagctgagatttccctgttagcaaatggtggcatttttgtgtatttctgtctaaataggtaccagacactcagaaaatacttccactccccttttctaggtgggattacgccccaagccgaattttgaaacagggagaggcctctcagaagatcggtctcgccttagaagcctggggttgaggaggtcttgagaatagtagaagtacagacacctcagatttaaaagttttcgagttctgtcacgcggctctcggcccgccagccttc

SEQ ID NO: 8952 - DNA, 963 bp, Homo sapiens
tttatatttaatcattctctttggctcacaacagcagtccagtccaaagatttactttttctattttcaaccccatcattatttttgtgtaaaaagtatgttttgagttacagcaattcatggagatcaagcttctactctgtagggagaagagagatgtcatttactacagagtttatacacacaaatgttctgctgcatgctgtgttcccactgaaatccagggggtttatttgcatttatacttaaagaagaatgaccgtatttggctgactctaagccaagatgatacaggcccaaagtttttcatggaggaatgggggagtaagggaaataggaacatttggaagaaatagttgttgtttttccctgttttattcagtgggcattttattcacagatcatttgatgcattgcatttactcgtgttattctggttccttttgtgttttttttttccttttgaaacaacttcacacttacaggaaaatggcaaaaatactaaaataagaactcctataaaccttcactgataaaatcccttcagttttctccagttatcccagtaacgtcctttatagcaaaaggatccggttcaggatcactcatacccagctgtcatatctttccagtctccttcattctagaagcattcttcattcttccttcatctttcatgacactgacacttttaattacaggccagctgatgtgtagaatgtccttccttttcttaggagatgttttctgtccttccttgaaaaccccactagtgttacctgccacgaggagagctaggcgctctgccccctaccccaagctggttgctctctcttacaatgcttcattaatcaagtacccttttttggagcattgatgatattcattcatccttttagccagtaaatattttttgatgtctattacgtgccaaatgggatacatttaagaacaaagcagacc

SEQ ID NO: 8953 - DNA, 963 bp, Homo sapiens; identical to SEQ ID NO: 8952

SEQ ID NO: 8954 - DNA, 738 bp, Homo sapiens
tgcttctgccatgcctatcagggagctggtttccattagctgttggttgacccaggaatctgtacctgtgttgccagatctaaccattttccaggagaggctggaacttcatatttaaaaaatgagaatttgtcaactttaataatttggaagaaaattcaaattaaaccaataccaggcagtgtggtgtaccccacattacagaggaaagtaggggacttgggaggtacatgagtcaatctatagatgctcctgttgtcatgttaaacttgtgcttgctttcagttgctgttaacattttgggtccactgtatctagacatgtccttcaaaagttgcatgtaagttaatttttttttctgtatttaaaaaatggccccacaaacactagtctagatgttgaaaaaaacccttataccttattatggagacttctgatgagtccttttgtacagtgaacaatcacttgctgtatttacgtttgtacttttgtgtttaaaatggggaatggtgttagatattgcatactgcttgagttaaggaggtcgttaaccaggaatgctttggattactcagattattattgcactggtgtttgttgtaatggaatttgacctgtcaggggagctgtagatgtttggatgagtgttcagtccttaatactgttatctaaattctaggcatgttgcctgtaacttccagtttcaaaaaatctatgtcaatctgttcttttataacc

SEQ ID NO: 8955 - DNA, 1024 bp, Homo sapiens
gcttgtgagaatgtcatttagagaaatcttaaagtaatttatccataatattaacttagcatgccttctctctgcaatgtacaatgtatcataggacaatgtatgatacagctcagttttgatatatcagcaagttgagtagtaatttttgtttgtttgttttagttgttttaaaagctggtgttgcagattcctatgcttagaaggaccaggcagaaaataagccattaagggtgctgggaatgcaatagggagtgatggggagtgtggtaaaggggtcagcaatgcttctgccatgcctatcagggagctggtttccattagctgttggttgacccaggaatctgtacctgtgttgccagatctaaccattttccaggagaggctggaacttcatatttaaaaaatgagaatttgtcaactttaataatttggaagaaaattcaaattaaaccaataccaggcagtgtggtgtaccccacattacagaggaaagtaggggacttgggaggtacatgagtcaatctatagatgctcctgttgtcatgttaaacttgtgcttgctttcagttgctgttaacattttgggtccactgtatctagacatgtccttcaaaagttgcatgtaagttaatttttttttctgtatttaaaaaatggccccacaaacactagtctagatgttgaaaaaaacccttataccttattatggagacttctgatgagtccttttgtacagtgaacaatcacttgctgtatttacgtttgtacttttgtgtttaaaatggggaatggtgttagatattgcatactgcttgagttaaggaggtcgttaaccaggaatgctttggattactcagattattattgcactggtgtttgttgtaatggaatttgacctgtcaggggagctgtagatgtttggatgagtgttcagtccttaatactgttatctaaattctaggcatgttgcctgtaacttccagtttcaaaaaatctatgtcaatctgttcttttataacct

SEQ ID NO: 8956 - DNA, 24008 bp, Homo sapiens
ccaggcctgggaccctgttgggaacttttaatgccatggatccagacagccagataaggtgagaagagagggccaagaagggcggttgtttaagtggaaatagccacataaccaagagggctcctgttagaaaaccagctcggccgggcgcggtggctcacgcctgtaatcccagcgctttgggaggccgaggcgggtggatcatgaggtcaagagatcgagaccatcctggctaacaaggtgaaaccccgtctctactaaaaatacaaaaaattagccgggcgcggtggcgggcgcctgtagtcccagctactcgggaggctgaggcaggagaatggcgtgaacccgggaagcggagcttgcagtgagccgagattgcgccactgcagtccgcagtccggcctgggcgacagagcgagactccgtctcaaaaaaaaaaaaaaaaaaagaaaagaaaaccagctccttggacgtgttcacgaggttgcctcagtctccgtgatgaaaatacaagaagccacagtgcatgaccactgacctgagttaaatgtcgtcttctatccataggtttttctgaccccagcagaagaactcacttgttggttttcctttgcatcttccatgtgttccttttgtattctttcctttgtgttagaataatccgttacatttttctgtctccccctctgtaccagaagttataaaccagtacctctcttgcttctgggcaagaaaagtgagggttttttttgtaaattgtggtaaaatatacataaaatttaccattttatccatttgtaagggtacgggtcagtggcattaagtgcattcacatcgttgtgcaccatcacctccctccatctccagaactcttttcatctggcaaaacagaaactctgtctccattaaccactcattcccccttctccagctcctggcctccaccatttgactttttgtctctctgagtttgatgactccaggtcatcaaagcagaatcatacaacatttgtctttaggtgactggcttatttcactttgcataatgtcctcaaagttcatgcacgtttagcatgtatcagaatgtccttccttctgatgctgaatatgcatatgtggtattgacacatttttgtttacccactcatccatcgatgggcacttgggtggcatatggcctgaatctcttgatgttcttgaagaaatggaagaaattggcatttttgggtctatgttccatgagaccatgatcatggggacagaaaggggtcatgagtcatgccccttctctctccaggctgagctcagcagttggccccagaccccattccaccagcttcactcatttctcgtgcttacttggccttggtccacacttcagtgtgagattcctctccttacagcaacacttctcaacttatctgttgggaatggctagattttttaaaaatttacaattcattatggagtgataagtttgcaaaatataatgaaatggaattactagaaaaattttcatgcactaggtggacatgacaatgctgatgactctaagggcttctcaacacttgctcttcatttttgcagttatctcattgtgagcagccaaccaacagctcacagaccccttctggtgcacagtggtgcaccttgagttagcaaggctcttaagaagtagctgtcaaactatagtgtgtatcagtctctgggggaacttgttaaaatgcagattgctgggccccacccctacaatttcttttcttttttttttttcttttttttgagatggagtctctctctttcacccacgctggagtgcagtggcataatcttgactcactgcaacctccacctcccaggttcttgtgattctcctgcctcagcctcctgagtagctgggactacaggcacatgctgccacgtctggctaatttttgtaattttagtagagacggggttttgccatgttggccaggctggtttccaacccacccatagaatttgattgagaggtctggggtcaggactgagatttgcatttctaagaagctcccaagggtgcccatgatgctggctggggatccctttaggcaccaccaacaggagcctttcctaattcattgctgtcttcctgtctcttgaggatggttggctcatacttaggtctcaggaaatgtttggactgtgctgaaatcaagaactaacagtccatcattttagcctcaatatggctttttccaggaggcaggatgagtgtcttttgtgacagggtggaggcatgatctgggttgggggcagctttggtttcctctagttctgcttcatctgcattagctgagggagctgccttttggcctgagataatccacagaggaactctgagtttcttcccctcgtttgtaaacattgcaaaatcacagtgcttctaaggaacttctggaactttccctaagaggtgaagcagtgcacaaaaagcttcaatccctttaaaaactgtgacccacgcaacatgagagagggatccttgctgaccctttgaaaaacatttgcccagaagatgaaggaaaagcataaggagaaactgcccctctccgcacctttctgggacctgcactttttgttgttgttgttgtttgcctgagtccaggaggttcctgctgcggtgccctcaacaggtagctggggtggcaacctggcaaggttgcaaaggatgcaatccaatggctgacagctctcaggaatgctggagggcttggcgtggcccaccccttacagtggtgtcaggttcacataggtgagggggatgtagaagaccactttgaggaatagggttacccaactgtgaactgccagggctctgctgcaaagggaacacaccaggggtaaagtcctaggtttctgttgcaagggcaggttggtttttcacactaagctaacatcatctacaggccactgaagatgggttcctttccaggatgaatcatctccccaaggcagacaaaactatgttcagtccaacaaggagggggacgcttggtcttctggtgaatgtcaattccacagacctaggagagtctttaggctgtcctccctgtgcttccattcctttcgtgaattaaacactctcgtagtttaattgctcttagaatttctcaaattacttgtggtagaaatagtgtttctatgacatattttgtttttttatgcaacttttttatcttttaatgtaagtttttaattttaaaaattgctgtccgttttccttctacaagatatgaactggttcatgacccagcaaattgggtcagcgtcgacaaaaactccggagtggtcatcaccgtggagccaattgaccgagaatcccctcatgtaaataacagtttttatgtaatcatcattcacgctgttgatgatggtgagtgtttacccaaaattggaaaaataaaatgctcattcttgcttcctgcgggaaaataaccctggtgagcgtctttcagcacagcagagaaaaggataaaataaaccttgttatcactctgcatccatgctggtgattatttttggtaataattcttaaaatggtaaacaagggaccaataccatcgaaagagggcagtattcattcagaagagacaattaaaccagcaaggaggctgcaatcaaacccagcatctttttcatctgttcatgagctaactctttagctctttgtcaaagccaatgatgtgtgataaatatttagcacagcttccctgtgcttgggatggcatacgagctcagataaatgggactgtaagggacacatttgtcataaaccagaatgggtggttttataagcctgtttcagcatttttctctacactctcctaaggctgaaactttaaacacaccaaagcagagttgaagaaataaaaatgttcaaataactttaaaattgtatttaagaaagtctgtgaactaaaacccaagctccaagtgatatatcactatacgttccattctgtaattaactagtggaatgttggcggggggcaatggagatatgaaacacgtgttcctaatcagcattaagggaggagaaaaaatggggccagtgtttcagggttccgtcattctgttatggatgattttatgattggtactttttttttcctttattttttgctttttgtatttcaaaagcttttggggtacaagtggtttttggttacgtagatgaattatgcagtggtgaagtctaagattttagtgcactggtcacctgagtagagtaccttgtatccaatgtgagatttcttagcccttggctccctcctcccctgcttctgggtctccagagttcatgatatcactcatgcctttgtgtatccatagcttagctcccacttataagtgagaacatacagtatttgattttctattcctgagttattcacttagaagaatggcctccagctctattcaagtgtctgcaaaaaaacatgatttcattcttttttatggctgagtagtattccatagtatacatatgccacattttctttatccactcattggtcgatgggcatttaggttggctccatatatttgcagttatgaagtgatgattgccacttttttgaattagaaaaagtcgttttagataattgtagattcacttgcagttttaagaaataatctagtggatcctgagtatcctttgccagttttccccaggggcaacaccttgcaggactacagtgtaaccttgtaaccagtacatcaacgcggagacgcagcgcatttgcctccccttggggacccccatggtgcccttctttagtcacacccattttcctccaccccacccatccttgatgcctggcaccattgattgaccttttgtttttttaatgaagccacattctaccttgttctacaagtgatttgaggtggtaagtgctttattagcttacccaaatattctgaatgctcataaaagcaggaaaacagatcacgtgcatgccaggagagcttatgacgttgaaagggaaacagttccagtatttcaggaatattttttttctgagagacggagagtgctcattctccagagctgtgtgtgcacgagataaacaactcctgaaacttcctccccatacaaggcttcccaccgcagactgctacagggaccctaatgctcttcctgtctgacatcaatgacaacgtcccgactctccggccacgttcccgctacatggaggtctgtgagtctgctgtgcatgagcccctccacatcgaggcagaggatccggacctggagccgttctctgacccatttacatttgaattggacaatacctggggaaatgcggaggacacatggaagttggggagaaattggggtgagtttttgtattggttacgggcaaagagtggaaaatgccagatatccaattcaaacagatttaggcaaaaaaggactttattagcttaaaaaaccggagaggtctgcgttctggcagagctggctctaggtgctcaaaggatatccctggatatccttcccacacatggtctgcctttctctaggttccttcttttttaggaaactctcctcatcagggggtaggaggctgctgggagtccctgagacatattcttgcatctggcaagaagggtgtttccagggaagctccaggattgacgtcactgtttggcctgggtcagctgccctgtcaatcactgtgggtgggacttgggagggcggatgtgctgattggctggttcccagcccacacctggaccttgttgggatctgggctcaccctctcctgattcatactgagaattcaggaagtgtgggcttccctaaggaaacactggggcactgttaccagaagatgaacatgctgagcaggttaaaagcaactggcatccactgtcaacactctcttctgtgcctctagccgtggcgtctgtagactgtggcacggtttcagctgaaactgtgtgctcaagtttgtagttctcagacctggagtgtgtggtaaagcacttcgccttgcccaaagagaggtctggtctttgtccttggggtctgggtgatctctattggggtatcatgtctgacaccagtgtctctttacctggggtgtcttgggctgagccggataggggcaatgtgatttacactggggacttctggtcacatagtatcagtctattaccagagaggctggagactgaggccgcccacctgggaggcccaccaggttgcctgaccaagccccaggaggacactggagcctgaggctcaggtgaacgtccctgactgcagcatcccatgtgtgctgtccctcatcgatgctgacctggcttctcgggagtggatgatgagaagctctgctactggtgcttttctggactctgccctaggtgcctctttccttgtgtgatttacgtctgtatcttttccctgtaaaaaacggcaccatcactgtaacaactttcagtgtgttctgtgagtctttctagagaattgttgaacctgagggtggtcttaggaatccgtgaacttgcagttgatgtcagaagtgagggtacccttgaggacccctccctctaactctgcagttggcttactttcatacagagcttggcccgtgcagggcgttcagtaagcgtgtgttgagcagatgagcagatgagtgagtcaatgcatgccatgttctttttccctttgcaggtcaatcagttgaacttttaaccttgagaagcctgccacgtggtaattacttggtgccactcttcattggagacaaacagggactttcccagaagcaaactgtccatgtaaggatctgcccctgtgccagtgggctcacatgtgtggagcttgcagatgcagaagtggggcttcatgtgggggccctgttccctgtctgtgcagcatttgtggctctggcaggtcagtggtctgtaggggtgtcctgggactgtggctcctctccccaggcaataggccaggggtaaggggcttgctggggtaggggacagcggtggcaggattggtggaatggctttgagaatgacttctgggtgtactcaggctcctagatgtagatcagaggttgccatgctggccaggcaagatccctggccagcaaaagcagcttctactcacaatggaatccactggtaaatatagtcaaggagtggccctttgtttgtaataaccatggagacagcaatgtacagatattcaggctcctggacttggcaaggctaataagaaagcagcttttccaagaaacaatacaatattactggccagatagtattattgattaattcaacaaacagttatgtagcatctactggtaccctggaactgtgctgaactttatagctacacagatgactaagacgcaatttggccttgccagttcatgactgagttatacatgaacagaacaagatcctcatgaaacctctgatatgggtgagcttgtctaatctgtttttcccctttgtcttataacagtggctctgctttttctgttgcgatgctattttgtgcttgaacctaagaggcatggatgctctgtatccaatgatgaaggccaccaaacactggtcatgtataatgcggagagcaaaggcacttcagcccaggtagtggaatgtcatgctttgtgtcttatggcaaggaattcactaatacacagacatatagcatgtatttttccccccattgtgccacctcttaattcttcactcttacccgtgtttcagtagcaagtgggaaaaaattcttgcaaatactatctaactcagataaatgaatttattcttttagatcaatggttctcaaccatgagcaattttgccccataggagatattcatcaatgcctggagacagttttgatggtcacagttaggagtgctactggcatctagtgcgttgaggtcagagatgctgctaaacagcctacaacgcacaagacagcctctaccacagagaattatctgccccagtttcctaagtgctgagtttgagaaactgtgcttagggaaatagtgttttttattaagtagacgttccctaaatgggattgtgttaggctcactagttaaatgagtctgagctggcttcttggccatggctttcagtagatcatggcagaacctgctcttctaccattgtccggcaaaggccaaccagaaagctcactgcccttggaggtacaaggcctaggctctgtttctgcttttgcatctcattagcttcatcatttaaccctacatcctcatctgtgaactgggatgataaagtcaaattcttagataggttgtggatcagagaggatgcctatgaaggcacctaacacaaggcagagccatataaagtaattggccaatggccactggtttttcaaactggctgcttctgaaatgggccctacattatcttagtcatccttgcagcaaccctgggctggggttagacagacaaagagatgaaagcattgtgagctctcctgtttgtcttcatctagaattaagtggttgatttagaaaatgaacacaaaagaaatgtcaaaaggaaacacacacagaggattcggtcaccccatcttacacctccaccaatgtttttttcctggaagggagagacttattgaatgaagtcagacatttagggaaaagatattccaatgaacttgatatgatgctcctgtaattagagagtttctcaaaaatatttgattgaagaagctggtgctcgcccaaggctcccagggttctttgaattttgtcttccctgcggcatgaaggagggaagggagcagccacttaggctcctctggcaggtatgtgcctgtgcaccctcctgtgagcccttcctgggtggggaaacaggagcaagatccaaactctccagattgtgaagtcccctggaaggaatctccgcatcccaaatgtgagagcagcagtaaacttgatttgttgtgtaattttaagaagaaaaccatctggacaaacagcagtctttgtgtaacagtagaatttcttgccttggacagttccagtggctcagaggctcaaccatgaagggaaacagaaatggttcccagtcccaggagctgtgcctcagtctcctccttggagggagagagtgaaagctgctgagcttggaggagactggcaggaatgtcacacaacctgagttcaggttgtagctgaggtggaagggacagtggggatgccctggttacccttctttcccagcagctttgtgattgtctcttggaaaagaggaagcagctatggaagcagtgtgggtggaaaggaaccttggcccttgtgatgctaagaccaggagggttggagggggcttaatgacatggtggcactggtcaaagaccagctatgccagtgggacaagagaacctcatgctgggcaaggggctctgttctcttcttgtaccaacaaatctttctcttgtttcccattcacagctaaaggcacatctccattcctgcttcagtatcttagggctctgagaagtggaattcaacagacctgggtgtagattccaaatctgtgattgatcagttacataatctaactgaatctgactttcatatataaagtgagcttgatagtcttctgtctcttaagttttttggactctaatcaaataacacatgtaaaattttcagcactaagagtcatgcaataaagggtggccgccaatattagcattattagcagtaattactgattatatctctgtaaccttggtaaataaggccatctctaggtgcacttatccctctgtccatcttacatgaatataccagcttaccttgcacatccactcaccaggaacattctgtgctcttgggaaaactccatgcaagatatcgtcactagctgcacacatgttgtcacattctactactaaactatagggatgccatctgatggtgatgatctacagaaatgcatagatgccttccctgcatgtggggaagctaatgagcccttggccaacagaaatccagcacccatcaacctgagtccctcagtgaacatatatgttgagtgataaatgaatgggacaatgcacagaataccatgcaatgctggtgaccccaagagccatcaccatgagccctaggaaaagacaagcttttcaattctgagagctcctgaaatgagccttttaccatcagtttacatggaaccctgaaccatgagaagctcaacctcccagcgagcaattacaaaaggcaaacagaaataacattcttttcccacataagtcatccagatttacaggagaggtgtattttttacagtctggacttcttctgtgatggcatagatacaatgtgttttggagaaaatgtcattcctttccttctgtttttatttctgctatctgtgatttcagcccttgtcatatttctttctctgtgttctacagacatggtcagatgttgaaggccagaggccggctctgctcatctgcacagctgcagcaggacccacgcagggagttaaggtaacatgccccttacttgcttctggatttcagagaagtgactttcctggtggtttccctgacaaggaacacctgggatgctcctcccagtgccacatccagggaggttcttcttcaagtcagcaaccccagcccctacttgcaaagccccatggttcccttagcctaaaacacccttgtctttcagtggccaagttctttctactttgctgcggtgtcagatgaccctgtgcttccaaatatcactgtgtccagtgccatatggtgattttttgccatatgcatatggcacttggactagtgtatttcttaagacacttttttcttaaaatgggcttgtgtccacattaagtacatttatttaagtaggaaattttatatttcaactgtaaatgaaaacagttttacttgtataaagagcaggcaagtgtgaagatagccatgaaagaagtagggcacaatgactgggtggacgatggcactgccaaaggcccggggcccctctgcaaggaaggcagagcgtggaagccaggctagcaccagagtgacacttcctcctggatgtcataagggtgtggaaacagaattagaaagggaataattttctcaccgtgcaaatcagtgttatttaaaattgtttcccaagtagctaaatcttccattctataactagtaggtgtcccctactttgaaaacaaagttgacccaggattgccataaatgagcatgtgcctggccagggcagtgaggagggctgggttcgccgtgcattctgaccactagtctgtgctcctgggggaagggctgcccttttctagttcctacaaacttgcctcctgggctggcgagagccttctctttccttcctctgagccagtctgcaaacttctagaggtctaggtgttgccctgaggggcacactatgcactttgcatgcctcatcttattgaattttcaccagaacccataggggcgtgtgtgtggtaggggcaatcttgcttccctattttacaggggagggaaccaaagcctccaccttctaggttttggtgtatctctgggttcccttcagtgtcctgcaaatattgtagtaagtacatctctggtgactgcttaaataaactgccattcacacactttctctaagtgaagccgtcacttatgatttatggggtaacctgatactttaaaatctgctggatagtgtgaaatagcgtcaatgagaccattgtcaaggtccattgcctgctttattttctttgaaatataacttcattattgaagcgtcactattaaaataacagaaacccaaggcagaaaatgcccacaatcccatccctgaatctaaacagtttcacctgtgagtgtcaccttctagatgtcatctgcgtgtctatgcagttttcaggtgtctgtgtcatggaaagaacattagcgtcttcatgttcaaacctcctcctgccatgcggttccattgtgcctgcccttttatccctgcattccctgcctctcttcattttccttttcctcccaccgcgccctccctctcatcgtgttaatttgtgtttgcctatgaatatatgagcaaggggaagtggtgagaggtcacgcatgcccactttgtttccagctggagagaaatccattctcttttgagtaaatcagcattttccctctaggatctcgaggaagtgcctccatctgcagcgagtcagtcagcccaagcacgctgtgctctggggagctgggtgagttccagaaggttgctccctgctacggccatctcactagtgactaacagttggtccccctgagagagggccgttgtagaagattcggtgatactgtcagaaaaaggcacatagtcaatgaaaatctgagaagctgggctttttccacccgactctatttccatctatagaactaggtattattattggtgatggctgctgtttttagagttgtttgataatcctgatcaaatatgacactttttagagcatccacaaatagatacattttctcatgtccttctaagggcaccagagatcatctataaagttaaaagcacagcactttggccctgactaaattccagcccagtgactgcatgcttccagcgaaagggaggcctgacttcccatctgtgttgtgtcttcttgtactctacatacaaattccaggactattgctttgtgaaatgactttttctgaaataattttagactaaatagaagttgcaaaaatagtttggagagttcttgggggtcccccaaatataccatcttatgtaaccctactccatgatcaaatcagaaaatgggctttggcacaacactgtgagtacagttctcagtcacagaccttatttggacctcaccagtttaactagccattatttaaccaaaatgtacttttctgatatagaattaaaagaggtattcagggtctaaagagccatagaatcatatccaatttttatgagggaaagcttctaaaataaattcaagatctctataatttcatatctttgcacaggcagtatctgagcaaagatgaaaacatgatgttcttctttgcacaaagatgatgccacaaatccatcactgaagggctcccgcattgatgaatgttgggttccatgtccttgcagctgatccttctggtcctgttcgggccagctgcatggacatggaacacccaccatggcacagggcctcccactctaaagaacctctgcttggtttaatattctactgtcaccatcttgaaattcttaatttttgaacaaagggcccccaactttcatcttgcactgagccctgagagttgtgccgctaggcctgggtcctaggagtggatgtgtgtcatttgtttgtattcagggcatggccatggcaaaaggaaatcttactgggtgttaatggacccaagatagagcttgcaaatctaatattctcatgttccttcttcacaaagcaactgtgaaacttgttcatgaatttctgctatgaatatctacactctttagaattactatacctttagtacaaaaatgaaaggcaatatgactgcaagaatttctagttatgtatttgcatcctttggtaatttatttgaaatcagtaaatatttcatctttctttaagggttatggcaagccctttgagccaagaagtgtgaaaaacatacactctactcctgtaagtatagatgtaggtgttaccgtgaacaaatttaccttattgttctgcctaaaagctgtgcaaatccctgaaaattggaaatttggaaggaaagaggtgataaaaaaaaatatgcccaacatccaagcaaactgaaggagaagcgaacgtgaagagaggttggaagtagttaaggcacatttatcccgtgactcgagggcataagagcttttcagtccctggcaaatttcttttgctgttgagttgctaagacctcagtcataggctgagttttctgctgtgctttgtcacagacctatagaaattttgagctaagggggtcttagacatcatctagtcaatttttttttctaaatatgttttgcaccagaattcttcttttcaaatgagatcctacaaataactccattgtaaataaaacatctaagtactaattttgtatgcattgacattaatgacatatacctattaccaaaatagccaataaaaataatgattctgatgtaaacagaaggaagttgaatgttgtggatatagtttgcaaaattatgttaacttaacacctaattcattgcctcgcattattataaactggtttttaaagtatcaagaaaattttgatatataccaacaagcagtttcaaatcttaatggtttttgaatagctcagtttacaatgttaggattctctttgattaatgaaacatgggaccaaaagcttcatttgagttgcataaaagctaattaacatggcatcccaaatttacatgttggtgtgggagactaaaaaagatgtaaaccactttctgttatattataaaaataatattcaatattgttattgaaataatttgtaaataatgaaaataaatttcaaatactctagctgaagtatctttgaggagtcgtaggccctggggatagagttaaaccagtggctaagtccacagaagcccagagaggagagatagtgctctctcagccacagtgcagccatacatagtgtggggttaggacctgaagctggcttgaggcaaaatcaccccaagtctacctcgggaaggagccaggctggaaactgacacggcgtcttcctctggtcctggatgagccccatgcttggtcagtgagcatctggtgcaagggtactttgtacatagcccacatcttaagggtcctcctctgagaggcccctggggctaaacagactgagggcacagcatctccagtcaagtgctcccagcactgggaaccaggcagcagggtccctagggctgcttgtagtggtccacaccttgcctctttggcttagtatgtttggttcagcttaccttggtatgatgtggcttcactatgtgtacacacatgtgtatatgtacagtcatgtctggcttaatgatggggatacgttctgagaaatgtgttgttaggtgatttcatcactgtgtaaacttcataaagtgttttacacaaacctaaatggtgtagcctactacacacctagacctcttggtgtagcctgttgcttctaggctacaaacccgtacagcatgtgactgtactgaatactgtaggcaattggaacacaatggtgtttgtgtatctacctacacaggccagggcgccgtggctcacgtctgtaatcccagcactttgggaggccgaggcaggcgtatcacgagatcaggagatagagaccatcctggctaacatggtgaaaccctgtctttactaaaaatacaaaaaattaactggacgtggtggcgggcgcctgtagccccagctacttgggaggctgaggcaggagaatggcatgaacctgggaggcggcgcttgcagtgagccaagatcgcgccactgcactccagcctgggtgacagagcgagactccatctcaaaaaaaaaaaaaaaaaaaagaaaagaaaaaaacacctacacatagaaaaggtacagtaaaaatacagcattacagtcttatgggaccagctttatatatacggcctgtcattgaaatgttatgccgtgcataactgtatgtatgcatgtgtatatagatagatatgtgtattcagttgacccttgaacaataggagtttgaactgtgtgggtgcacttatatgtgggttttcttctgcctctgccacccccgagacagcaagaccaacccttcttctccctcctcctcttcattctactcagagagaagacaatgaagatgaagacctttatgataatccacttctacttaatgaatagtgaatatattttccttaatgacattttctttcttctagcttactttgttataatatagtatataatacatatgacatacaaaatgtgcattaattgactgtttatattattggaaaagcttccagtcaacagtagactgttagttgagttttcggggaatcaaaagttataggcatgttttcaactgtgcagggtcagcacccctaacccccacattgttcaagggtcaactgtatatgtatatgtctatatgtctatatgtatatgtatagaagcatgtacatgtacagaggcatgagtatgcatatatgaacatgtgtatgtttgtctgtatatgtgcatgtgtatatatctgtatgtatgtatgtatgtatgtatgtatgtatgtatgtgtatatatagcctcatggacatacataattgccccaggctttatcatattttacatatgtcttctggaacccaataagtatccctaaacccaggtaagatcagaagtcatctcagccataaaggccaccagtgattaaaaacacaaattgtatgtcactctccaatttaagacttcctgttggcttgccattgcacctgggataaagtctacaaccttatgaccttaaggggatcctccctccagggctgctttgcagaacccagcctaagacagacctatgtctttaatgtcctgtgagaccctctatcacatggcctttgctcacgtatggcttcaacttgctctgagcctccccccacctccctaaccatcccagcaccccacctctttgggctccagccacagaacacgccaagttccctccctgcttagggcctgtgctgtttcttctcattggaattcccttctgttccatggccctacaacttcctcctcctgagaactccctgctctcaactgggtgagatcccctcttaaaccttcccttggtgatcagtcttacatttaccgccactcttgggtgcttgccttgcacctgcgtgagctcgacagtgaggccccaggtgctttgcttgcctccaggccagcctgactcacatgatttagtggtgggatttgtgagcccccagatagccactccttccagtagatgccaagcctgtttcctaccactgtatcctctgcccttagatagcacagagacccagatccacagacatgggccagatgagcaggagactgccagcagcccatcatgggaaacaatgggcaggttcagaggaagagaagccaaaatgagcgaggaggggcagtgtagttgagggggtgcaaggcatgagtgagggtgtcagcaggaacaaccctcctggccgggctcacttgggttccttcctcactgaaagtttgtttcagcccaggcattggaaagtctagccatgagagcttgcagggcctccctctctcccccaacacaaagagaggaaacgtgagcaaactaccctgggcctggctcttcacctccaagagaacggtgctcagtgtgccccatctatgctggggccactgacacacaggggttggggggtaggacaagggctctgctgtggtatgaagctctactggtttgcttgcaggcttacccagatgccacaatgcacagacaactcctggctccggtggaaggaaggatggcagagacattgaatcaggtagggagagctccccttgtgctgtgcactagctatgggttttgcatccccactgtgctccaggcttgatttggggacacttcctcctaaatcactgcattagtcagctaaggctgccataataaaataccatagcctgactggtggcttaaataacagaaatatattgcctcatgtttctgcaggctagaagtccaaggtcagggttccagcatggttgggttctggtgagagctctcttgctagctggcagatggccactttcccgccgtgtcctcacatgggatggagagagagataccaagctccctggtatctcttcttattagggaactaattccatcatgaggactctaccctcatgagctcatctaaacctaattgtctcccaaaggctccgtcttcaaatgccatcacattggggttagggcctgaacatatggatttggagagggaacacaattaagtccatagcaatcactttcatggaaatcctccatccagtgctgctttgcagaacccaactgaagacagaattgacacagcacaggcaagccccaaaactggggattagcccaggagggttttgggaaataattcaaaggtgaggtggaggtgttagacagcagtcttctattcaacattactgctccttgcaaggcagggctaactcataggcagtacactcagagtcagaaatgtatgggctgttggcaactgtatttatacccactaaaacccactttcaattacatgcaaattaagcagcaggttgatgcaaacggaggggctggttatttagaactttctaggacagcagtgataacttctgggtcactgccatggcatttgtaagctgtcctggcactggtgtgagtctcttgcaccagtgagcaatgagggcatccagggttcactttcgtctcatctgctggtttctgctggttttttttttttaacttcatcccatctggaccagatcctgttttggtcagcagggttgtgaccagaaaacaagacctgctggcctcctacctcagaatgaagggtcttttcctgcaaaattgtgaaagatgtagtttgactgcgctgaaggggtctattatgtgagattctgattttgggtacatcctgaaaggtccatcaacacagccactgcgtactcctgggaagattagaaagcagcttgggagctgggcaaacccatgggcaggtttacatggatagggcagagccagtccacatgctcgtgtcatggaggctctgcatgccccctgcttggggaaggaggtaccaagaagctgcccaggccattctgactctaagcagctcctcctgttgcagggcagtgggaactcaggcctatggaatgataagcacaaaggaagacataaatgtagacagtctctgtcaggccagacttatttttttggcaaacacgtgtataatactcactttgttgtagactctgttctgaggacttgaaagatgttaactcttagtctgcacatcagcctattgggggaggtgctgtcatatgcctttttataacatgtggaaacccaggaacaaagaagttgggtaatgtgtccaaggtcacagccacagaaagcagtagatttggggctcaaatacaggcaactgggctccagggtctaggcacttagggggctcattaaaaagcagcaatccccagtaccaactctgtggaccctgctgtagtgggtctggggtgcgcatctgagcctctgacttgaggtcctgggatcctgttttgtgaaacccattggtgagcctggacgtctcctgctgtggttgtcagagtggatgacagacagggctgtgaacactgtggcctgaggaagtgagcccagactgtgtctggatgtagagtcactgtctggggtttccccaatgttgcttcctctggttcctgtcacagtccccaggtgggagctccagctctgtgccccagtgacagccccaaaggtgctgtaggcttggccccttctcactcccactccttagccctgcagaatgggtgctgcctggcacctgcttcaagacaacacagacatcttctccgggcctagaagctttgcctaaaagcaggcaagccaggctcctgcagaagggggctgtgtacccacagactcagggctgcagggcccttccccaggtcctgactgctggtgaggaagatgaaggatgagctgcggggaaatttccatgtgtctctcccgagccgactgtaacctccctgagggccaggctgtgtcattactggtgcatgacacaggggtcactgaagaagcaatgaaagaaccattttcactataacccaatgtggtagatgaatccaaaaatggaggctcagacaagttgctccaatggtaaaggcacgagggacagagccagaaatggggcacagagtggccgactacagacgggcccacctgatcattaagcagggtcagggaagtctcctctctgagccttaatttctcatctacaaaggagagttggggcagctctgctacactctcgggtgaagctctgtgcagaccagatcatgtctctacagaaaacgtagcatgtggtgatcatcacgtagtatccagcttacccattttcacatttgcgcacacacacgtgaacgcatgcacatgcacacataccgctcatgccaagtggactgtgtggacagtatcgcaggtcctgcctggctgagcaggagagggacgtgttccagccgcgggcccccctcctccctctgcggggcagggaggcagctttattcaatggaagctcgaagctctgcttggtggtgtgagaggagggaacaccagattagagggccctgttctttccttgtgagccctctaacttggatggtggtgtatgatgaattattgatctgatgaggcctccaaagttgctgaatcagggtgcagacatccactgctctgctgtcagcctgggggttttgaagttgaatccacccagcacagcccccactgcagattctgttttgctctgcacacaccaggtctgtcgctaattatctattcagcttcactgcaaggacgtgaaccgactcctaacacgtaggccagagcttgtgtatctgctggttttgccgtaaaaactttctttcctccccctgcccccagctcccccatgccatatggtcagacagtgaccacagtccctgagtaagcagacccagtcaatgggccagatgtgcaggtgagcattcccgcgcttctcgtgggcaccaagcctgacatagcagtagactggggcggggagacagcatttcccactaaacaagggcccaggcagggctcctgagaaccagaggaagctggagacagcttgttgcagtcactgggtggggcggggcggggggcatagttaagagcttggaagcccaggggtcccatcagaatggggacacgcatggggtccctggggccccagagctgccctttccaggccctccccacctcccaccttgggcttgagccccaggattctgactgttttcatgccctacatgagctcaccctctcagaattactatcagcagtgacggattagacaggctcccactaaacccattcctgccaaggtctgtagaactggcgctgggttcagatagcaccctctagaggtattagaaggtaaataggctaaagtccctctcccctcccctcccctccactcccctatttattgaatcactcaggccagaaaagtcttcacagagagatgacttgggtcctgaatgctgagctggagtttgctgggttggagattggcagaggagggctgtctaggattctaggcagacaggaatgagcagatatgaagcctaggaaatgtttctggggtttgtgcagagggtggacctaaggcaggagaggttggggagaggaggagatggtgagaagagggctgtttggagggagaaagccatggcaaccccagagcagggtggcttaatgcgcagagcaggcacctctggctcacgtcacacatcagggtgggtgtcgagccggagcctgcccagggtcctcccactctgtggctctgccaccactcagaactggaaatggggctggaggacagagaaagaacagaggctcttggggaggctttcatggccaggtacgtgtccctgacatccctatttcatcagtcacgtagccacatctagcagagaggcaggaaatgtgatcttgccgggtgaccagaagaacaagaaatgagtttagtgaacttgccactctcgccccaatgagtggagatagggacctatcctcaggcattggccatggggctggaggagaggggacagaactagaaatactgccgagcatttgagaggatggggcaggggagagttggtgatgactctaggtttcaaggttgagcagctgggctgtaggggatgtcctgacttaagtcaggctagagtttcatgaactttggtcattctgtcactactgtcacgcttgtgtttaacccactcactatgatgtatttaatgcatttctgtaaatcagctcacatgttaattagcttttggctttacaatcagctagtgtgaaatcatggatttggcgtgcttgttattgtgttttgaaatatacgataaaatggccattcactcaaataaatatgtgttctgataccatcgaaatcatctaatgatgcaggggtcagtgaacttcctataaagggccagatagtaaatcctgtaggatttgaaggccagttcccacagctcagccctgccattgttccgtgaaagcagccacagatgatacacaaataaacggtcttggccgtgctccagtagaacttaatttacaacaacaggtggtgtgctggattatcccctggcttgtagccggctagcccctgtaacagggggtgcgcactgcacttggcgagcattgagggagggacgtgggaggaggagatgtaggttgtgggcaaaaccacagtggtttccaggatgttgagtctgaggtctctgtggatgtccttgtggagctgtctggttggaattctggctctggatgtgactgtagggagtgtcacagagagagatggtgacggggacatcaccattggttagggatggatgaagccatggcctgagcatgaatggggagactggagggcagtggtttgaggagccacatgggtgagaaaggggtggcaggaagtggtggccgccctttcttgcagggaggctgtgaagtatgagcagattgaaggatagacctgagcacatttgtgggtcgggagaaaggagcccacagcaagaggccaggtaaagatgaagagagaggggacagttgtccaaacgagggccggggggtcatggaaggggaggtgtccagggcacaggacagggaagggcgagcctcaaggaatgaatctgcaagagggtgggagcaggtgggaggtcctcctgggggctcctgtcatactcctggggcggccaccactgtgtcacagttccctctcagactgtaaggtgggatgtctcccctcagcatggctgccacttctggaactgtacgaactcctgtgtcagctgaggacacggggcctgagtgctgttactactgcattgatgtgttcctcgaatcaaacctagagaaatgagctgggtatggaagcacatggcatttaccttctctttcccccacttttccccagaaactccatgttgccaatgtgctggaagatgaccccggctacctacctcacgtctacagcgaggaaggggagtgtggaggggccccatccctcagctctctggccagcttggaacaggagttgcaacctgatttgctggactctttgggttcaaaagcgactccgtttgaggaaatatattcagagtcaggtgttccttcctaaaaaaaaaagtctattttggagaattgaaataattcatggaagggaatcactattcagggatttttcccctttgctcttcttttccctccttaaaagaaaaattaccttctagtcctaggatgaggacacactattagtttgaattaaatgctttgatattctcagatcagccatcttgaaccaaagcaaaaccacaagttacactttcttaaaatttgatttgtcatattttctagagaaacttgaatttaattgtgttattcttagcttccactggcagcctagctttgagggtaaatgaaaatataacccatagattacccagccacttgggaacagcaggtaatactgaagaaaaataaaaatagattttgaaaacgtta

SEQ ID NO: 8957 - DNA, 200 bp, Homo sapiens
taggggacatatgccctaaaaatagtcagttttctagtctgagtaatagataagagactgactaagcaaagtttaaaatgctatttggacactttaatgcacatattggatatctaaaagtctacagccatataaaaattttatataattaatgagcaaatgccgtctctcatgccctaaaataaatcagtagaaacatg

SEQ ID NO: 8958 - DNA, 2573 bp, Homo sapiens
agaccgctcctcagtttacactgctaatcagagccagggactgtggagaaccgtcactgtcatccacgaccaccgttcacgtggatgtgcaagaaggcaacaaccacaggcctgcatttacccaggagaacgtgaggctcctgggccgccccaacgtctaagccccaaaacaagtagcccttgggtcctaggctcagtttttctcagagagggtgttaggctgttatcatattgctgtgaagaaatacctcagactgggtaatttataaagaaaagaggtttaattggctcatggttctgcaggctttacaggaagcctggggctggcaccggctcagcttctagggaggcctcaggacgcctatgatcatggcggaaggacggggggagcaggcatgtcactcggtgacaacaagagcatgcaagacacgggaggtgggtggggaagaatgaggaacgagagaggtaagaggggccacacacttttaaatgaccagatctcatgtgaactcagggccagagcttccttatcaccaaggggatggccggagctatttatgagggatctgccccacgatccaaacacttcccaccaggccccacctccaacactggggatcacatttcagcatgagatttgggcggggacagatctccaatctatatcgcgcagtcacccaagatatgtgcaattctccaaagtgacttaagctagaatcaagaagccaaatcatattgacatagaagcagttcataatggtcacatgagcttacatttttgactgctgtatgccagaaactatgctaagaacttttacatgcatttttttcatttttgattattgaaactacaacacgatttctgttttacagatgggaaaactgaggtctaggggaagacagggaattcctgtttacttggagtcaggggttcctatgctcagcccaactgacactgggccagatgattatttggagtgggggctactctgtgtgctgtgggatattcaccagcatccctggcctccgcccagtagatgtcagtagcacccctcagctgtgacaaccaaaagtgtcaccagacattgccaaatgtccctcagggagaagaatcacccttgggtgagaagtctgcacctgaggttttcacaccgtgttcaggattctagagggaaggtgagcaggtaggctttggcctcgccttccataccttaccttatccaagtacagaagtaactgcagtgatcatttaaaaacattgtatgtcagggtccacatgggatttcccaggctgcaagactcccagcctttaagaaagcattgaaaaccgctgtgtaagatggtttgggatgggtgccccacctaaggcatgtgagatggctaagagataaaataagaatcactcaagatctatttccaatattttattttttactattctatatgtatttttaaaaaagtaaatatccaccatatttcctttctcctgactctctttcttgactactgagttaaaaccctccctcttctttcctgggacacactgtagctcctttgtgctttcttctgcttagtagtgttctacttaatcagttttatttattttataaatccccctacacacacacacacacacacacacacacacacacacacacacactcagctctcagctccatcaaggacggaatttttgcctgtcttgttcatggcatctgaaatggaatgtggcacatagaagctgttgttgaataaatgatgcaaacaattatttttaaaaggtgtcgtttaattagaaaaaaaacctgtataaaccaaagtgaaatgtttgcaaaccaaagcacctcaccagaagtatataataactacaaaataatattatgcttgaaccttgtttcaaaatcttttcctggcttggtaaaaagcaatgctctcaaaaatatggctggaaaaaaaatataccctcttattttgaagtgcttgtctagaaacattgcctccaaaagtattgaataacaagctattttgaagatctacatgtgttagaaaaatgatcaccttaatctgaataaccacaagtgtcctattttaggggaagagctaggatttttagagagcataaactaggattgtgtattattatttttaaaattcttagaaaaaatagggcattgagttggatttaagagtactttaagaattatttagcgagtcacaggtaggagggggcagatattccaacggatgcaccttctgctgtaacagacggagttgcaaatcccttagggcaggtttagcagcatgaggaatatccagggtgttgtgatgaggagcaacattctttctccttctctctcttgctctctctctgcttctctccctccttcctctctgctttccttttcaattgtgtttttgtttccatgacatggacatgatgattgcttctttcagtataaggttcagattcctgaaggccgagccagccagggcgtgttgcgtctcctggttcaagatcgagattctccatttacatcagcttggagagcaaaattcaacatattgcatggcaa

SEQ ID NO: 8959 - DNA, 4421 bp, Homo sapiens
attttcttgactaattgatgtgacaagtatatcattttgcttccttttctgccacaagccttgcctcatagatatgtttgaaggataccgtgatagtctacccttaacatagtttgtcaattaaggcagaggagataccctcaaactcttttcattattctcttaattctgcacgtatttattttccacaacaaaattatgagatgctaaagctggaggccttcactatacaaataagaaaaataaactccagagaggtgaagtaacagaaccagtctcataattgcaagagaacctgaagcactgaggtttcctgacacttagtccagaacactttctccctactacacatcagcctctttttgatgatagtggagatgttctctgtacaaaatagtttagaagaaatgttgtacattttccctttgaatatacatgatgagagatgatagtccaatagctgggtggcattgtgagcttctaggacctcccagaagctgaggatctgtatccctgccatgggctgcatctccagctggttttctgcccactcacagcctgcaagtgtgcagatggtaaggatatcatcatttccaccatggggggtgggggagagtagggggagaaaagacactgtttcatttaagtttatttcaaattccttgttgtttgtcatgttaacatgctctcacatttgcagacattaaccaacaactaggaggaaaaaaattcttgtcttaagcgcagacatagagaaatggcatctaagaaaaggtctgtcatttaaggagaaagaaataaaaagcaaagaatgaagacagtcaaggaagaaatgaagaaatagagaaataaattagaaacaggcgagatagaaggaatggaagactcagtgacagggctcaatcctatactgtttttataattaaatagtgccttgcacatcagcccagtgttcactctttgatgtaattgcctgctcatcaacatatgcaaaattacaattgcacagtgtgagtgctcaaaggaagatgttaatattgctgtaatgagcctgtcaatcttgtgaaaatgaacagaaaccaatatgctggcagaagttaatctccagagagacagtttggtggatctgataattgaccagttagttattcagatcaactagacagcattagagtggcattaccttggagtgtatgtgttgtaggttaaaactcacaattttctgaaggaaaattagaaataataaaaaagaaatttttaaaccatttctataagaaaatgatattttcaagagttcaagagactaattctttactgcatttagcttcatgtttttgatattttcaagagttcaagagagtaattctttactgcatttagcttcatgttttctgatgacctgtctgatgcaggatctaaatagcctgaaaaaaaaaaaacaaaaaagcatgatttacaacttaagagcattttgatagaaaaaggatatgttattaattcaatatgccagctctgaaactgagttttgcatgctgtctcacaaggtgtggcattcattttgaccgttaatgtaaggaaattacttaagaccccaatctcatttctatttttaatttatcaatgacttagcagttggaattagcttttattttctttttttatattaattttttgttgacataatgattataaatatttctagagtagagtatgtgtgatgctttgatacatgcataaaatgtgtaatgatcaaatcagggtaattagaatatccgtcatctcaaacaaacatttaccatttctttgtgttgggaatatgcagaagttttcttctagctattttgaaatataaaatcagttattattaactgtagtcaccctgttgtgctatcaaacactggaacttattctttttagctaactgtattcttgtaccataaaccaacgtttgtttctttatcccccactcctgctgtccttcctagcctttttttttttttttttttttttttggagacagacagagtttggctctgttgcacaggctggagtgcaatggcatgatctcggctcactgcaacctccacctcctgggtttaagtgattctcctgcctcagcctcccgagtagctgggattacaagtgcccaccaccatgcctggctactttttgtattttttagtagagatagggtttcaccatgttggtcaggctggcctcgaactcctgacctcaggtgatccgcctgcctcggcctcccaaaatgctgggattacaggcatgagccaccgcgccaggccctttagcctcttttaagtaccattctactgtacctccatgaaatccacttttttatctcccacatatgagtgagaacatataatacttgtctttctgtgccttgcttatttcaaattagcatatgtcctccagttccatccatgttgctgcaaatgacaggattttattttctatggctggacaatattccattgtgtgtgtatatatatacacatatatgtgtgtgtatatatgtgtatatatgtgtatatacacatatatacgtcatatgtacatgtatatatgtatacatatgtgtatatacgcacatgtatgtatatgtaaatatgtatagatgtgtatacatatacgtgtatatatgtatatttgtgtgtatatacatatatatgtatgtatatacatatacatatatacgtgtatatatgtatacacgtatatatgtatatatactatatacatttatacacatatatagtatatacatgtacatatatacatatactgatacatatgtatatacatatatacagatacatatatatgtatatacatatatacagatacatatatgtacatacatatacacacatatgtatatatgtacatacatatacatgtatgtatatatacacatatacatacatataaaatttggctcaaaatatatattattggaatcaaatgtgtatatatacatatatgtatacacatgtatatacatatatatgtatatgtacatatatacacacacatatatatatgtgctaacattcagcttctgattaaattgaaactctccaataaaagaagagctggtttgcatcttattttatcccccttctaagcaagcaacttttatgatgacaggtctggagagaaacatttaaaaatgcactatcttggccgggcgtgattgctcacacctgtgcacctgtcatcccagcactttgggaggccaaggcaggtggatcacttgaggtcaggagtttgagtccctcctggccaacatggtgaaaccctgtctctactaaaggcacaaaaaattagttgggcttggtggcgggcgcctgtcatcccagttacttgggaggctggggcaggagaatcagttgaactcagtaggcagaggttgcagtgagccgagatcatgccactgcactccagcctgggtgacagagcaagactccatctcaatcaatcaatcaaaatacaaatgtactatctaaaaaaaaaaactgcacacatatttgcaaatgcagaaagagctgctttatattttgtcagacttcactggcttatctcaaactctgtaaaagaataaaccgcgaagtccaacatctgaacccagattcacttcagccacctgtaaattctctctatatgaataaattcatacaaccacattatagaaaatttggagatgaaaattaaaagagggaaaataattcatagtttgctcatccatcaacactgattaaccatttattgtttgctcaacaatttagcagatttgtaatcatattgcatatatggttatataaaaacaaacttttttctcactaaactttataatagcattttttggtattatacactctaaacattttggggaactgagactacttgtatctacacggactttattcataatacccgatgtatattgaatgaatgaaaatattgaaggagaaataattgcatttgtatatatggttggattagaccaacttctaaaagaatagagagacgaaagtcatatgaggcttaccgtgcatgtatttacttattaaatggtggcctccatcaggctgagattcagctgttgaccctctctcccagcttccagtcactgcccttgcctgagaagcacaaaacaaacaagttgagcgtctcaatgaaaagatcccctgtaagactaccttgcacagcgtatcaaattgcaagggttaaagtattattaataaaataatcatgagacaatgcacaggccttacaagctttatttacaggtgatttactaagatgtgagccctggtctgccaggtttatctctcagggtcacagatggccctttttggaagaacgactcttccattcttgttatttctccctctctgcct

SEQ ID NO: 8960 - DNA, 4329 bp, Homo sapiens
attttcttgactaattgatgtgacaagtatatcattttgcttccttttctgccacaagccttgcctcatagatatgtttgaaggataccgtgatagtctacccttaacatagtttgtcaattaaggcagaggagataccctcaaactcttttcattattctcttaattctgcacgtatttattttccacaacaaaattatgagatgctaaagctggaggccttcactatacaaataagaaaaataaactccagagaggtgaagtaagagaaccagtctcataattgcaagagaacctgaagcactgaggtttcctgacacttagtccagaacactttctccctactacacatcagcctctttttgatgatagtggagatgttctctgtacaaaatagtttagaagaaatgttgtacattttccctttgaatatacatgatgagagatgatagtccaatagctgggtggcattgtgagcttctaggacctcccagaagctgaggatctgtatccctgccatgggctgcatctccagctggttttctgcccactcacagcctgcaagtgtgcagatggtaaggatatcatcatttccaccatggggggtgggggagagtagggggagaaaagacactgtttcatttaagtttatttcaaattccttgttgtttgtcatgttaacatgctctcacatttgcagacattaaccaacaactaggaggaaaaaaattcttgtcttaagcgcagacatagagaaatggcatctaagaaaaggtctgtcatttatggagagggaatgaaggagaaagaaataaaaagcaaagaatgaagacagtcaaggaagaaatgaagaaatagagaaataaattagaaacaggcgagatagaaggaatggaagactcagtgacagggctcaatcctatactgtttttataattaaatagtgccttgcacatcagcccagtgttcactctttgatgtaattgcctgctcatcaacatatgcaaaattacaattgcacagtgtgagtgctcaaaggaagatgttaatattgctgtaatgagcctgtcaatcttgtgaaaatgaacagaaaccaatatgctggcagaagttaatctccagagagacagtttggtggatctgataattgaccagttagttattcagatcaactagacagcattagagtggcattaccttggagtgtatgtgttgtaggttaaaactcacaattttctgaaggaaaattagaaataataaaaaagaaatttttaaaccatttctataagaaaatgatattttcaagagttcaagagactaattctttactgcatttagcttcatgtttttgatattttcaagagttcaagagagtaattctttactgcatttagcttcatgttttctgatgacctgtctgatgcaggatctaaatagcctgaaaaaaaaacaaaaaaagcatgatttacaacttaagagcattttgatagaaaaaggatatgttattaattcaatatgccagctctgaaactgagttttgcatgctgtctcacaaggtgtggcattcattttgaccgttaatgtaaggaaattacttaagaccccaatctcatttctatttttaatttatcaatgacttagcagttggaattagcttttattttcttttttttattaattttttgttgacataatgattataaatatttctagagtagagtatgtgtgatgttttgatacatgcataaaatgtgtaatgatcaaatcagggtaattagaatatccgtcatctcaaacaaacatttaccatttctttgtgttgggaatatgcagaagttttcttctagctattttgaaatataaaatcagttattattaactgtagtcaccctgttgtgctatcaaacactggaacttattcttttttctttatcccccactcctgctgtccttcctagcctttttttttttttttttttggagacagagtttggctctgttgcacaggctggagtgcaatggcatgatctcggctcactgcaacctccacctcctgggtttaagtgattctcctgcctcagcctcccgagtagctgggattacaagtgcccaccaccatgcctggctactttttgtattttttagtagagatagggttccaccatgttggtcaggctggcctcgaactcctgacctcaggtgatccgcctgcctcggcctcccaaaatgctgggattacaggcatgagccactgcgccaggccctttagcctcttttaagtaccattctactgtacctccatgaaatccacttttttatctcccacatatgagtgagaacatataatacttgtctttctgtgccttgcttatttcaaattagcatatgtcctccagttccatccatgttgctgcaaatgacaggattttattttctatggctggacaatattccattgtgtgtgtatatatatacacatatatgtgtgtgtatatatgtgtatatatgtgtatatacacatatatacgtcatatgtacatgtatatatgtatacatatgtgtatatacgcacatgtatgtatatgtaaatatgtatagatgtgtatacatatatgtgtatatatgtatatttgtgtgtatatacatatatatgtatgtatatacatttatacacatatatagtatatacatgtacatatatacatatactgatacatatgtatatacatatatacagatacatatatatgtatatacatatatacagatacatatatgtatatacatatacacacatatgtatatatgtatatgtacatacatatacatgtatgtacatatacacatatacatatatatatacatgtgtatacatatatgtatatatacacatttgattccaataatatataatttgagccaaattttatatgtatgtatatgtacatatatacacacacacatatatatgtgctaacattcaccttctgattaaattgaaactctccaataaaagaagagctggtttgcatcttattttatcccccttctaagcaagcaacttttatgatgacaggtctggagagaaacatttaaaaatgcactatcttggccgggcgtgattgctcacacctgtgcacctgtcatcccagcactttgggaggccaaggcaggtggatcacttgaggtcaggagtttgagtccctcctggccaacatggtgaaaccctgtctctactaaaggcacaaaaaattagttgggcttggtggcgggcgcctgtcatcccagttacttgggaggctggggcaggagaatcagttgaactcagtaggcagaggttgcagtgagccgagatcatgccactgcactccagcctgggtgacagagcaagactccatctcaatcaatcaatcaaaatacaaatgtactatctaaaaaaaaaaactgcacacatatttgcaaatgcagaaagagctgctttatattttgtcagacttcactggcttatctcaaactctgtaaaagaataaaccgcgaagtccaacatctgaacccagattcacttcagccacctgtaaattctctctatatgaataaattcatacaaccacattatagaaaatttggagatgaaaattaaaagagggaaaataattcatagtttgctcatccatcaacactgattaaccatttattgtttgctcaacaatttagcagatttgtaatcatattgcatatatggttatataaaaacaaacttttttctcactaaactttataatagcattttttggtattatacactctaaacattttggggaactgagactacttgtatctacatggactttattcataatacccgatgtatattgaatgaatgaaaatattgaaggagaaataattgcatttgtatatatggttggattagaccaacttctaaaagaatagagagacgaaagtcatatgaggcttaccgtgcatgtatttacttattaaatggtggcctccatcaggctgagattcagctgttgaccctctctcccagcttccagtcactgcccttgcctgagaagcacaaaacaaacaagttgagcgtctcaatgaaaagatcccctgtaagactaccttgcacagcgtatcaaattgcaagggttaaagtattattaataaaataatcatgagacaatgcacaggccttacaagctttatttacaggtgatttactaagatgtgagccctggtctgccaggtttatctctcagggtcacagatggccctttttggaagaacgactcttccattcttgttatttctccctctctgcct

SEQ ID NO: 8961 - DNA, 618 bp, Homo sapiens
ttgcttaattattgtcagcatcacccacgctggtatattgttgaagggaactgtagtgcctgtcagagcaggcacccgccattctcctttcctcctcactctactcctgtcgttgtgattacagtttaggcattatctatctttgctgcgggaaatgctttattaatcttgcagtcctgtgtccatgtggagatgtggttctgccatccaaccagataggaagacagagcagaaaaagttactggagaatttcatgaaggtcaaatttagaaaaaggacaatttggttcagttaggtgctttgcacactgaggaacatgcagagaaatcacttgctttatgggtttggattgggaaattatctatttatgtaatcacactgctttgaaagggaagggaattaattgctttaattaactccagtaaagactagattgtcacagggggagtgttgataaaatgtgctttgagtgatctgatacgctcttggatatagtggctggaaataatagctatctctgtaatcagtcattttcctttctctgggacctcactgatgatgttccttccataaactaggctgcctagagggtcaaaaaaaggaaaggtcaaaaaaaaa

SEQ ID NO: 8962 - DNA, 525 bp, Homo sapiens
cagaaagtggaaaattatgcaaatgaaagtacagagactaaattttgaaaaatgctgatgtaatgggacacattgctttgtttctatcctttttttaaagtaaaaatacttaaaagttttgcaaccactgttctctttatttcaaaaggttttgaaagtatatacctcaaaaacggataggcatttctagatcaaaaccctatttttttacttgattgatagacatcataacagagactctttaatcagttaatttcagctctgagagatataacatcaaacattttttgttctatttaagatttcgacaaagtagtgcagatcttagcttaatcaatgaacttgatgaacttcaaacgtcattgtgtttgtttcctagaagatattgcagcaggacacaaaggacccagggacagttggcaagctgatcacatctgaaactcagcacgtcatcctgttctcaatgaatgtccctagaaataaaaattattctgcccctggtgatgtggaatcaaattaaaagac

SEQ ID NO: 8963 - DNA, 525 bp, Homo sapiens
cagaaagtggaaaattatgcaaatgaaagtacagagactaaattttgaaaaatgctgatgtaatgggacacattgctttgtttctatcctttttttaaagtaaaaatacttaaaagttttgcaaccactgttctctttatttcaaaaggttttgaaagtatatacctcaaaaacggataggcatttctagatcaaaaccctatttttttacttgattgatagacatcataacagagactctttaatcagttaatttcagctctgagagatataacatcaaacattttttgttctatttaagatttcgacaaagtagtgcagatcttagcttaatcaatgaacttgatgaacttcaaacgtcattgtgtttgtttcctagaagatattgcagcaggacacaaaggacccagggacagttggcaagctgatcacatctgaaactcagcacgtcatcctgttctcaatgaatgtccctagaaataaaacttattctgcccctggtgatgtggaatcaaattaaaagac

SEQ ID NO: 8964 - DNA, 618 bp, Homo sapiens
ttgcttaattattgtcagcatcacccacgctggtatattgttgaagggaactgtagtgcctgtcagagcaggcacccgccattctcctttcctcctcactctactcctgtcattgtgattacagtttaggcattatctatctttgctgcgggaaatgctttattaatcttgcagtcctgtgtccatgtggagatgtggttctgccatccaaccagataggaagacagagcagaaaaagttactggagaatttcatgaaggtcaaatttagaaaaaggacaatttggttcagttaggtgctttgcacactgaggaacatgcagagaaatcacttgctttatgggtttggattgggaaattatctatttatgtaatcacactgctttgaaagggaagggaattaattgctttaattaactccagtaaagactagattgtcacagggggagtgttgataaaatgtgctttgagtgatctgatacgctcttggatatagtggctggaaataatagctatctctgtaatcaatcattttcctttctctgggacctcactgatgatgttcctgccataaactaggctgcctagagggtcaaaaaaaggaaaggtcaaaaaaaaa

SEQ ID NO: 8965 - DNA, 32191 bp, Homo sapiens
ctctgcgggcgaagtggctgcgcaaggagagaacttttcctgcacaaggaacgcctcgtggggagacccaaggcaggagcggtccggagccggctgcggcgtgtgcggccggccttgggacagcgatcgccgcgggtggcaacagagagccccaagcaaaagtgggagcaggagcttggaggtgagcacaggaagccccacttgaggcttttacgcagcctctagtctctgtttcttctggaataggcaagtgtcctttcaactctaagagaccagcagaggccactgtcccttaagactgccggagtcctcaccacttctccaggattccagaggagactgtggcgatggtgaatgaaggtcccaaccaggaagagagcgatgacacccctgtgccggagtccgcactccaagcggaccccagcgtctcggtccatcccagcgtctcggtccatcccagcgtctccatcaaccccagcgtctctgtccaccccagcagttcggcccaccccagtgccttagcccaacccagtggcttggctcaccccagtagctcgggccctgaggacctcagcgtgatcaaggtgagcaggcgccgttgggccgtggtcctggtgtttagctgctactccatgtgcaactcctttcagtggatccagtacggctccatcaataacatcttcatgcacttctacggtgtcagtgcctttgccattgactggctgtccatgtgctacatgctgacttacatccctctgctcctgccagtggcttggctgctggagaagttcggcctgcgcaccattgctctcactggctcggctctcaactgcctgggggcctgggtgaagctgggcagcctgaagccgcatctctttccggtcaccgtggtgggccagctcatctgctctgtggcccaggttttcatcctgggcatgccctcccgcatcgcttccgtctggttcggggctaatgaggtttcaacagcctgctccgtggctgtctttggcaatcaggtaggtagaacagtttgtgaatgttcccaggggcgtgtgttagattgcacctaactattgggtgtggtaggctataatttgctgattgtccaacagtgtttgtgactctgggtgacagtaactgggtgtgacaggcagtgattgtgatgctgtaagagaggcgggaaacaaaagcagggggacctgctctttcatccacagttgctcttgccccagccaaaagcatgcttctagaacatactataccttcgctgtgtcgttctcgaacctgtgtcagtccaccaacttagacctgtaatttcaggaatgctcttctgtctggcagcagcccctgggcatcagactattctggtgtcatcagaacttggcagtgctttcagttggaccaaccagctttcctagagtgcagtatctcctctactgcatagaattgcaaagccatgcctggtggtgtttggcactgcttttaccttgttttacacacagctgaagccaggacagtgggagcagtgctttgtgccaaactccttgcctgggatttagagccaagtccagcaggatggagtagaaatctcactctgagtttccatggcctagaaagggtagttcatgtcttaatctttttctctttctttcttattggaaggagaagctcaaattctttgcatctcaatgtggttatgatccagaaagctgggcaggttgtgaacctgaatgccgtctccaaatactcgaagcaaatatttatgggaatatttaaagcaaacgtcctttagccagaccactgcctcccagtctcgcatctttccaagcacgtacagtcctggctgtgtgtttaacaaaggattggtaatcctgtctcacacgtccatgtgaagagaccaccaaacaggctttgtgtgagcaacaaggctgtttatttcacctgggtgtaagcaggctgagtctgaaaaaggagtcagcaaagggtggtggattatcatcagttcttataggttttgggataggtggtggagttaggagcaatgtttttcagacagggtggatctcaaagtacattctcaagggtggggagaattacaaagagccttcttaagggtgggggaaattacaaagtacattgatcaattagggtggggcgaaacaaatcacaatggtggaatgaaatcagttaaggctattttcactttttttgtggatcttcagttgcttcaggcaatctggattgcctgaagcatgcaggtcacaggggataggatggcttagcttgggctcagaggcctgacattcctgtcttcttatattaataagaaaagcaaaacaaaatagtgaagtgttggagcagcgaaaaattttgggggtggtatggagagataatgggagatgtttctcaggactgcttcgagcgggattaggggcagcgtgggaacctacagtgggagagactcagctgaagaacggttttggggtaaggggtgatactgtggggttgttagaagaaacattggtcgtatagaatgattggtgatggcctggatgcggttttgtatgaattgagaaactaaacggaagacacaaggtctgaaaaagagaaggagaaaaacaggtattaaaggactaagaattgggaggacctaggacatctaattagagagtgtccaaaggggtccaaggggatttagcataattacttgtttgtttggtgagtttttgggctctattcttgacagagtcctcttttttaagtttgaagctgagcttggtgaggtgtgtttttaaaagaccgttagtccattctacctttcttgaagattgaggacggtaaggggtatgaaggttttactgaataccaagagcctgagaaactgcttgggtgattccactagtaaaggctggtccgttattggactgtatagaggtgggaaggccaaactgaggaattatgtctgacagaagggaagaaatgaccgcagtggccttctcagaccctgtgggaaaggcctctacccatccagtgaaagtgtctacccagaccaagaggtattttagtttcctgactcggggcatgtgagtaaagtcaatttgccagtcctgggcgggggcaaatccccaagcttgatatgtagggaagggagggggcctgaacaatccctgaggagtagtagaatagcaaatggaacactgagaagtgatttcctttaggatagatttccatgatggaaaggaaatgagaggttctaagaggcgggaacccacatggaagaggttatgaaatgacaacagaatagaatgggcctgtgaggctgaaaggagatattttccttggtccaagaaccgtttgccttgtgtgggaagagattggtaggttgaagtttcagtgggagagtaggtgggagtgaccgatgagaaggagaaaaactggccgtgagggacagaagttgtaatgctagctgcttctttagctaccatatcagcataagcattgccctgagtgatgagatctgatgccttttgatggcccttgcagtgtatgactccagcttcctttggaagtaaagcagccttgagaagagtttttattaaggaggcattaatgatggaggacccttgcatagtgaggaaacctctttcagcccatataacagcatggtggtgtaggatatggaaggcctatttagagtcagtataaatattgacatgtagtcccttcgcaagagtgagggctcgagttaaggcaatgagtttggcttgctgagaggtagtggaggggggcagaaagtatatgcatcaggtgtgaggaagaaaatagattttggaagttatgagaactgtagagagtgagttgagcatagtttgtgattttgagggcctctaaaagtattagggcagtggcggctgccacacggagacatgatggccagcctaaaacagtaaggtcaagttgtttggacagaaaggctacagggtgtggtcccggctgttgtgtaagaattttgatggcacagccctgtactttggctgtgtgttatgaaaagggttgggatgagttagggagatcttgtgtgggggcagcttctagggctgtttttaaggaacggaaagaggagtggcgaaaggatttaggatctatggggtcagctaggtttgcttttgtgagtttataaaatggtttagtcaggatggtaaaactaggtatccaaaggcggaagtacctaaccatgcctaggaaggaaagaagttgttttgtagaaggtgttggggtttgggagattagctggacacgatcagcagggagagcacattgttttcattaagaattatgccaagataggtaacagatgaagacgaagtttgggcttgactgaagtaatgggcgctgtccttgaagccttgtggcagtacagcccagataagttgctgaggctgatgggcatcagggtcagtccaagtgaaagcgaagagaggctgggatgaagggtgcaaaggaatagtaaagaaagcatgtttgagatccagaacagaataatcggttatggaggggttgtggagggaggcattgaggataggagagtatatggctttggcaccacggactggatagacaagacaatttggttgataaggcgcagatcctgaaccaacctggaaggcttgtccggtttttggacaggtgaaatggcggaattgtagggagagtttataggctttaaaaggccatgctgtaacaagcgagtgataacaggctttaatccttttaaagcatgctgtgggatgggatattggtgttgagtggggtaagagtgattagattttaatgggatagtaatgggctcgtgatcggttgccagggagaaagtagaggtatcccatacttgtgggttaaggtggggggatacgagaggaagacgcgaaggaggctttgaactggggaaaagggcaggaatgaggtgtggctgtagcctaggaatagtcagggaagcatataatttagttaaaatgcctcggacctaataagggaactgggcaggtggggataactaaaaaggagtgcataaaggaatgttgtccaagttggcaccagagctggggagttttaagaggtttagaagcctggccgtcaatacccacaacagttatggaggcaagggaaacaggcccttgaaaagaaggtaatgtggaattggtagcctccatattgattaagaaggggatggacttgccctccactgtaagagttacctgaagctcagtgtctgtgacggtccagggggcttccgaggcgattgggcagcgtcagtcttcagctgctaagccgaggagatctgggaaggagttggccaaggaacattgggtttgggctccaggggctttaggagtggccgcgatgtgagtcggacagtccgacctccactgggggcccgcacagatggcacggcttaggaggaatcccgggctgcgggcattctgaggcccagtggccaggcttctggcattcgaagcaaggtccacaaggatgttttgaaggtgcccctgggagctgtggcttggatgttctgaaggttttgtatgctggagacgtggttgtgggctgtcttacagcagaggcaagtagctgtaactcagaaatgtgttactgtctggctacctcctattattgtacaccttgaaggcgaggttgattaattcctgttgtggggtttgagggccggattccaatttttgaagcttttttctaacatcaggagctgactgggtgataaaatgcatattgagaataaggcgccttccggcccctctgggtctagggcggtaaagcgtctaagggttgctgccaagcgggccatgaactgggctgggttttcgtctttacctcgggtagtttctctaagtttgtcataattaacagcttcgtaagctgcctttttaagcccttcaactaggcaggaaaccatgtaatctcacctatctatacctggggaatctgcctgaaagttccactgggggtcctcttggggaactgctctaatgcttcctggaggtctggctcgtgaagccggcagttatcagcgtgagattgggctagagaaaaaactctttcccgttcatctggggagagggtagaagtcaggatgacatttaagtcactccaggttaaattataggacagagttagatatttgaattcctgtatatatttagtagggtctgacaagaaagagcctaaatgctggctgatttgggaaaggtctgataggcacatgtaccctgactatgcctttagctccagccacctctttaagaggaaattgttgggcaggtgggggagggctagtcgctgaacgaaaactgtaaaccagacagtgtgtgaggaggggaggtgatagaaagattatagggtgggggagcagaggctgaggagaaattggggcctggctcagcctggcgaggagcagcctggggagaaggggagagatcagatgagtctgtagaaaaggagaattcaaaagactcagagcttggggtgagactgaaggaacagacaggagagaaagaagaaagatgtgggatgagtcgcatgggagcagagactagggagggactaatgtgtaaaagaatgcctggatgtcaggcacctcagaccatttgcccatttttcgacaaaaattatctagatcttgtaggatggacagatcgaaagtgccattctctggtcacttgaaactactgtcaagtttgtattggggccaagcgggattgcagaagaaaataaggctaacttttaggtcaggtgtgagttgaagaggttttaagttcttgagaacacaggctaagggagaagaaggaggaatggagggtggaaggttgcccatagtgaaggaggcaagtttaaagagaagggtagagacacagagaagggggtggggagcagccctgggctgtaatgtgggtgagcagccaaagcaggtgtccccgcaattgacttgccaccaagggaatgtgggtgaatgaccaaggcaggcgtccccgcggtggtcagacaccaatggagtgtgggtgaattatcaggcaggcgtccccgcaatgattaaacaccaagggaaggctgccttcccgagtccatgaccggtgccggagttttgggtccacggataaaatgtgcctcctttatctctactagagaggaaaaagaactggaattggaaggacagggagattgatgggtagcaagagaggaagattgaagggtagcaagagaggctggagaagagagtgaaaagaccgcttacccgattgaaattggtgagatgttccttgggctggttggtctgaggacccgaggtcgtaggtggatctcttcacagagtgagggtgaggacaggggactggtctcctaaagaagtccctctgacctgggtcttcggcactaaatgtctcacgcatccacgtgaagagaccaccaaacaggctttgtgtgagcaacaaggctgcttatttcacctgggtgcaggcaggctgaatccgaaaaaggagtcagcaaagggcgggaattatcattaattcttacaggttttgggataggcggtgggttaggagcaatgttttgcagacagtgggtggatctcacaaagtacattctcaagggtggggagaattacaaagaaccttcttaagggtgggggagattacaaagtacattgatcagttagggtggggcagaaacaaatcacaatgatggaatgtcatcagttaaggctattttcacttttgtggatcttcagttgcttcaggcgatctggatgtatacgtgcaagtcagaggggatatgatggcttagcttgggctcagaggcctgacaaatcccagttcttctcattggactattttctcctatctattaatttcatttagaaaatgtaacctttaatttagaaatttttcatttaaaacagaaactttacaaaacttctctaaaggcaaatttcccttctgttcatctttactaccaggaaggtaatcaccttactttgaccctgaccacacagatcaccataacgcttgtactccggtaattctgacctctctgttcaaatgcttcttacatactccacgggagcattaccttctgcttgcattaaaatccaacattcttcctttcgacaagcatttatctagtttttgcaagacagtgtgctagggctgcaaagataatctttgccttcgaagacatactataccaggttttaaaaaattgtgccaggagccaagattcagattgtattaaaaaacaaacaaacacacaacaactgaacagatcatagcatagaggatttgttttcagctagaggatttattttcagttctccatggggtttttagcattttctttacctaattgctatgggaaaggctgaagaaggtaaaggaagctaatatctattaaatacccactattatgcaaggtactttttcatccattatttaacttaatcctttcaacaactctgtgaggttggtgaaattgtccccattgttgcaggagagggaactgtgatccagataaatcttgcaactttatccagagtcctataactactgagtagtaaaagagaaatttaaacccagttctaccttcaaagccactctcagtaggccagtattacttgtgcatcaagcatacatgtaaaaaaaaaagaaaaggcagattctgaggatttaatttttccccccgtctccagggttattggtgatagtttccagcagttttgtttagagtttgagggcctaacacttgtcttcttttttgaagttgctgctagagggctgattctgcctcttctaacctagcatggtcattgtattgtcaagaaggtgagggtggagtctttagcaggaagaaaccagtgaatccagagctgggatgagggagggaagatgagcctggagaatacaactgaggcccttcccttttcttggtatgctctgaccagttgcccccaggtagtaacagcctggaatttttagcaacacttgtagcattgtttcaaggggaaatgagctgtgtggggttttaagagatatgcacacattgttactgtgcaagggtcaaaagaaaaccttgtttccttggtagtactggatgagatagatgcaagatctaaaaaagatattcgaggctggtcctaacccaggtgagagtcctataggatggaggtttgtgaggggacttcgccaggacctttgggtagctcatagcacagtgcaatctagaaatagaataggaaagaatcagtttgcttttagaagtgaatacagtcactttacagaaccagtcttatagaaaccacagctgtctgtctaaaatagcactgtccaatagaaatataatgcagaccacaaatgcaagtcacatgtaactaaattttctagcagccgcattaaagatgtaaattttttttaagtaaaaagaaaaggtgaaattattttagtaaatgccttagtttgttttatgctgctgtcacagaataccacagactgggtaatttgtaatgaacagaaatttatttagcttacagtttgagaggctgggcagtccaaggccaagcgaccagcatctggtgatggccttcttgctgcgtcataacatggtgaatggcatctcatgttcaagaaagagtacaagagagggccaaactgacttttatgacaaacccaccctcattttaatgacattgatccattcatgaaggtagagccctcatgacttaatcacctcttaaaggtctcatgtctcagtagtgttacattgggaattagatttccaacacatgaacttttgttgttgttattgtttttgttttgagatagagtctcattctagccacccaggctggagttcacagacagcatcttggctcactgcaatctccacttcccgattcaagcaattctgcctcagcctccagagtaactgggattacaggcacctgtcaccatgcccagaaaatttttgtatttttaggagagatagggtttcaccatgttggccaggatggtcttgaactcctgacctcaagtgatccccctgcctcggcctcccaaagtgtttggattacaggcgtgagccactgcacctggccccccaacacatgaactttaagggacacattcaaaccatagtattctctccatggaccccagaattttatgtccttctcttggacaaaacacattcattctatcccaatagccctgaaagtcttaacttgttccagcatcaactcaaatgcccaaattctagagtctcacctaaatcacatatgagggagactcaaggcaccgttcatgatgaggcaaattcctctccacctctgaacctatgaaattaacaagaaccagcctggacaacatttttttttttaaaaaaagaagctgtgcatggttgcacatgcctgtagtcccagctacttgggaggctgaggtacaaggatcgcttgagcccaggaggtcaagactgcagtgaaccatgtacatgccactgcactccagccttggtgacagagagagagaccctgtttcaaaaacatccccccaaaactaacaagttatatgcttccaaaatacaatggcgggacagagataggatagacattcacacataccaaaaaggagaaataggcaagaagaaaagggtaactggtcccaattaagtccaaaactcaacggggaaaacaacattaagtcttaaagctggagaataatcttctttgactttatgtcaaagaagggcacactggggaagggactggtcccccaaggcctcaggcagccctgcccttacagctttgctgggctcagtccacccagcagctctcacagttggagtctcatgcctgcagctctctcaggccagtgttgcacactggtaactctacagttctggggtcttggtgatagccacacttccatggctccactaggcattacccttgtgggggctctctgcagtggctctgcccctgaaacaagtctctgcctgagcccccaagctgttcatgacattctctgaaatctagatggaagccaccatggcaccatagctcttgcattatatgcgcctgcagattagcatcatgtggatgccaccaaagtttatagtttgtactttctagagaagcagatcaagccacacctgggaccacttgagccatggctggggtagccaaggaatgccatgccagaatgcaaggagcagagttctgaggcagctctggacagtgaatgctgaggtcccacggtgactatctggaaaccttgctgtcttagtcgattttgtgttgccataataatgcccgagactgagtaactaagaaaagagatttattcagctcatggttctgcaaaatgaaaagttcaagggcatggccctggcttctggcaagggcttctgtgctgtgtcctaacatgcagagaaggttaaaggggaagtggatgcatgtgaagaggcataacctagggacatcctagctttataacaacccactctcttaggaactaatccattcccttgagaacaatccagtttcatgagagtgacaactcactactgtgagatcagcaccaagccgttcatgggggatctgcccacgtgacccaaacacttcctaccaggcactaccgcccaacactgctctattgagaatccaatttcaacatgagttttcataggtatagactcaaatcatatccaaaccatagtattctgctgttagccccccaaaactcatgtcctttcacatacaaaatacagtcattccatctctatagtcctgagagtcttaacttgctgatatggtttgggtctgtgtccccaccaaatctcatgttgaattgcagtccccagtattggaggtggggcctggtgggaggagattgtctcatgggagtaaagttctcatgcatggtttagcactgtctccctgatgctattctcatgacagtcagttcttatgagatatggttgtttaaagagtacaggacatcctccctctctctctttcttgcttctactctgtccaggtgatgtgtgtgcttcccctttgccttctgccatgattgtaagtttcctgaggcctcccagaaccctagcagatgccagcatcatgcttcctatacagcctgcagaactgggagcaaattaaacctcttttctttatcaattacgcagtctccaatattccttcatagcaatgtgagaatggaataatacacttgtttcagcatcaactcaaatgtccaaagtccaaaactgcatctgaaactcaaggcacatactttccaggtatgagcttataaactctaaaacaagttgtttacttccaatatacaacggttgcacaggcattgggtaaaattaccattcaaacatagggtcttgctctttcacccaggctggactgctgtggtgagttcttggctcactgcaatttctgccacctgggcacaagtgatcctcccacctcagcctgccaagtagctggaaccacaggccatgtcaccacacccagtaatttttgtatttttttgtagagacggagtttcgccatgttgcccatagtggtctcgaatgcctgcactctagtgatcctaccaccttggcctctcagagtgcctggattacaggcatgagccacaccaagccctggccagcagactttaaatcttaaacctccagaataatctcctttggatcaatgttttgcatcctgggcacactagtgccaggagggggttcccaatgcctcaggcagccctttccccatggctttgctggacatagcccacatggctgtactcacaggttggaatcacatggctttgctggacatagcccacatggctgtactcacaggttggaatcaaatgcctgaagcttagccaggctgaggtcacatgctgccagtgactttagcattttggggtccttgcggtggccctactcttgtggctccactaggcattgtcctagtgaagactctttgcagaagagtcctctgctgtggcctcacatttctgcttggcattgtcttagcagaggctgtctgtggtggctcccccacatggcaggtttctgcctaggctcccaggctctctttttctcttcattcctttttttttttttttttttttttttgacaaagggtcttactctgtcacccaggctggagtgcagtggtgtgatcacagctcactgtaccttgacctctgaggctcaatcaatcttccagcctcagcctcccaagtagctgggactacaggcatgcaccactgcacctggttaattttgtttcttttttgtttttgtttttgttttgtagagatgaggtcttgccattttgcccaggctgttcttgaactcctgaactcaagtgatccacccacctcatcctcctaaagagttgggatttcaagcatgagccactgtgcctggcctgctcccaggcttgctgatacatcatctgaaatctaggtggaagctgccatgcccaccactcttgcattccacatgcatgaacaatagtaccatgtggacatggatgccaccaagacccacagcttgcactctccagagcagtggcccaagctgtacctggggctattgggccatggctgctctggccagagcagctaggagaagcatcctgaggtggctcagggcagtggtatcccaccattctgtcctcctaggcctctgggtctgtgacaggaggaatggccttagacttttgaaatactttcagggccttttttccattgttctgttagtacctggctcccttctgtcagaactaatctctttagcaaaaggtcccttggctgcacccttagattcctcttctgaaaatgttctttcattctctaccacttggccaggctgcaaattttctaaattttaatgctctgcttcttacacatttcacctttaggtcactcctttgctgtgtttaagctgtcaaagtaaccacactgtgtcttgagcattttgctgcttagaaatttttctgcctaggccgggcatggtggctcatgcctgtaatcacagcactttgggaggccgaggtgggcggatcacctgaggtcaggagttcgagactagcctggccaacatggtgaaaccccacctttaaaaagaaaaaaaaaaagaaatttctcctgccagatgccctaggttatcatttttaagtttggtattttataaagccctaaggcatggacacaatgcagccaagttctttgctgtggcataacatgggtgacctttgttctagtttccaaataaacgctactttccttcatcagaatggcctttactgtccatatttctatcagcattttggtcataaccatctaaccaatctctgagaagttccaaacgttccctcatctttttgtctttttctgagccctcatcaaaattactcttaatgccctgttcacagcaattcaggtgttttctagcctatttcttcaaactcctccaacttctgcccgttacccagttccaaagctgcttctgcatttttaggtatctttatggcacaaccccactccttggtacaaattgtctgtcttagatcattttgtgttgttataacagaatacctgaaactgggtcatttataaagaaaaggtgtatttacctcactgttctgtaggctgggacattcaagggcgtgcctgcagcctgcagggggttgtagctctcatgctacattataacatgacagagaaggttaaagggcaagtggacacgtgcaaagaggcaaacccaagggatctcttggctttaaaacaacccactatcatgggaactcacccatttctgcaggaactaatctagtcttgcgagagtgagaatctgcttccatgagatcagctggtggaggatcctcccccatgatccaaatgcctcccactaagcctcacctcccaacaccaccccattggggataaaatttcaacataagtttaagaggggacaaactcagatcatatccgaaccatagcacttgtcctcaaggccccagcctgcttagacaatctctgaaatgtcttcagggtttttctctcattgtcttgatgaataggcctggttgccttctgtctactaatttttttagcaaatgatttcttggccacgcccttggtttttctcctacggacactttttcagtctacatggccagccttcagatttcccaaatctttctgctctgctttctttttcattactaattccaccttttagtcatttctctcctctcatgttttactatatgtgcttcaaagtagcaatacagctccttcaatattttgcttagaaatttctttcaccagatatcctagttcatcactcttaagttctgtcttccacaaattcctaagacactgacagaattctgccaagttctttgcaagtagataacaagaatggcttttactccagtttccaataccttgttcctcatttccatctgacacctcatcagaatggtctttactgtctataactgtctatatttctaccaacattctgattaggaccacctaagtaatccctgagaagctttaggctcttcttaaagttcttttttcatctgagccctctccagaattccccttaatactccattcatggcagacttttctctcctgatcctccaaattcttccaccttctacccatttccagttcaaaaaccacttccacattttcaggtatttgttatggcatcagactacttcatggtatcaattttctgtcttagtcagttttatgctactatcacagaataccacagactgggtaattcgcattgaacagaaattaatttggcttatggttctggaggctgggaaacccatgattgaggggctgcatctggtgagggccttcttgctgcatcataacatggcaggagccgtcacatgggtgacagaaagaataagagaggacaaactgacttttataacaaacccaccctcataataatgagtccactcctgtaataatgacattatcactttttttttttttttaagagacaaggtctcactctgtcaccagcttggagtacagtagcatgaacacagctcacctcagccccaacctcctgggctcgagtgatcccctgcctcaggctccagagtagctgggaccataggcacacactaccacacctggctaattttttatttttcatagagatggggtcttgctatgttgtgcaggctggtcttgaacttctgggctcaagagttcctcccgcctcagcctcccaaagtgctgggtttacaagcatgagccaccatacctagccacattatcacctcttaaagaccttagctctcaacactgttacactggggattgagtctttaacccatagattctgggggacacattcaaactgtagttatatgtaggattatgttgtatttagcccaatgtatccaaaatattatttcaacaagttgtcaatataataaagttagtaatgtgctattttacattcattactaagtctttggaaactcatgtatattttatacttatagatggccgcataagcaatggcccctaggttaactagttggataaacataaccagctggatagtccaggtctagaacaatgatagtatttcagcagtggaaatcagatcctagcagataacgaaaggctctagaaagtgactcaggccttgaggaggttgtgtttgctggacaggctgatcatatggtatcacccagagaggctgagagtttctgaggttgacttgggattcacagtcataaagtgtgtggtcagcctagtcttgttccaaagtcatggccacttgggtatgttgcagtccagggttgtcattttggatcttgtaatgtcagaggtctttcaaggtctgagggaagtttgcggaggtgaaggcaaactcttttgttcacatctattgattgttattgctattgacagcaaacagagtgcttgctcacatgactgtctactttttgtttgtttgtttttgtgttttcacatgaaagtgtttagtttattaatattcttgtgaaaaatccacaatggccacagattacaccattgcagcacctttactccttcagctttttgccagcaccaacattggcctttgcagtccccctgactttcctcattctgttcttgcgttcctctcattgctttcttgaggtctttttcttctcatacaggccatgtcttgcaagtctatgtttgggttcatttttctttgcataatccaggggatcataaatcatgccaaagccggttgtcttgccaccaccaaaatgagttttgaatgcaaatacaaagatgacatccagtgtggtcttgtacattttggctagtttttcccaaatttctgtcttaggcactgttgccttcccagggtgaaggatatcaatgactgtttgtttcctctgaagtcgtcggttgatcatgaactttctagtgtggatagttactgtgtcgttcatgatggtggtctatcctcagacagccagggaggaaaagcatgactgtctgctttctagcctcctattgtgcattggaggagagtagacaagggctgggagcagaaaacaaggccagtagtgactaaaggtagacggggtaggtctgagaccaccctctgaaatggttatgggggccagccagtccatataaatgctgaagcaggcctagtaaaaatgatattggagtgtggtggggtcccagtgagcttgagagttttcatcctatctaaaggcaccagttgcttcagctcccaccaatcattgatatatacaaagcatgactcggtggtgtcagatctgcatttttttcctttgaagagaaatcagaaatccagatttttatgtgaaatctgtattttgtaatcatgataaaatataaataatatttaccattttaaccattcattaagtgtacagttcagtgacattaaatgcatttgcaatgttgtgtaaccattaccactatttatacccaaaactttttcatcatcgtcaataaaaaatctgtactcattaagcaataactcctcttttgccccccccccccgcccccacatcccctggtaacctttattctactttctgtccctatgaatttgcctattctaggatccttgtaaaagtggaatcatacttgtccttctgtagctggcttatgaaatctgttttttaaatgctggtaactaattcatttcattttttaaaaatgtattttatgtcttaaaactgcatcagattaaattgccagtttgaacatcaggcatggtggcatatgtctgtaatcccagcactttgggaggctgaggcaggaggactgcttgagcccaggagtttgagaccaacctgggcaacatagtgagaccctgtctccacaaaaagtacgaaattagctgagcatggtagagctcacctgtagtcctagctactcaggaggctgaggtgggaggattgcttgagcccaggaggttgaggctgcagtgggccatgattatgccactgcactccaatctgagctatagagcaagacccatctcaaaaaaaaaaaaaagaagaagaagaagaagaagccagtttgagacttctgggaaaggttgcatggaactgaatttcagttctgctttctccttcctcgaaaagctctcaccaaacgtgggcaggtggaaacaatgtcagaggctagtaactcaacttgggggattagcccagaacttccagaagtggttggtgatttgcctaatccatggggatagatgaaaatacagaggtctgcggccccacacagactgtcttaaccaaactgtctaggaaaggggcccagcattttgtattctcttttttttttgagatagagtctcactttgccccccaggttggagtgcagtggggtgatcttggctcactgcaatctccacttcccaagttcaagtcattctcatgcctcagcctcctgagtagctgggattacaggtgcccgccaccacgtctggctaatttttctatttttagtagagatagggtttcaccatgtcggccaggctggtcttgaactcgcgacctcaggtgatccgcccatctcagcctcccaatgtgctgggattgcaggtgtgagccaccatgcccagccagcattatatgttttcaactggcctcccaaataaggctcgtgatcagacactttttgaaaccacgaggaggaaagagcagcatgcatgggaaaagactgcctgcttggagccatattcttgtcagggctgatttttttttttctttttctttttttgtagagatgaggtctcgctttgttgcctaagctggtcttgaactcctggcctcaagttattctcccacctcagccttccacagtgctgggattacaggtgtgagccactgcacccagctggtcagggttgatttatgatacgtttgctgtaaggttcagtgggaagcagtgggagcttgggccactcacccttcagattgagggcagaggctgggctgaggctcatgattttgattcacctgaggtactgaaaacgtcctgaaaaccttagggttggggagttgaggagccctaatgggatatgagcttgaaaccatgcatatgctccacatcttttgggttctttgacattcaatccagtgcactggaagaagctcagattggcctggcctggcttctgccttggctttttatatttttttttctctataacctaatcttggaagtgatttttcttttttccgtttttagagacagagtcttgctctgttgctcaggctggaatgcagtggcacagtctcagcacactgcagtcttgacctcctgggcttaagcgatccttgcctcagcctacagagtagctgggactacaggtatgtgccaccatgcctggctagttattttattttttgtagaatctgggtctcactactttgcccaggctggtcttgaactcctggcctcaagcgatcctgctgcctccgcctcccacagggctgggattacaggcatgagctatcacccagcgcatgccttggctttgttgccttgccaggcattgttatagttgcttgttaatttcacagaattaagtctaagtcttcagtttccaatttccagacctccgctccccaccttttcctatttaacttgtctcttgttacctctcagccttggctctgctctgaccactgaggctccatactatctccttgggttataccctttgggtctaagatttaggcagtggagaggaatgtcagcaagatggtggactagaaagctccaggccctcattttcctacagaaatgttaaataaccaactaggaagtggctaaaataacttcttttgacaagctttggaagtcaaagatctacagcaaccaagcccacccaaccaagaaaaagacacattcaaagccataggaaatttcatggctttttaactcacctttgccccatttcctcccccatgctgtgcctccagtccccagttctctgcaaactgaatagatggaatttgcaacattttaacctgctttaactcaacttcatttttatacactgacaatgtacaacacccccccccaaaaaattaagaaacaattccatttataatagcattaaaaaataaaatacttaggaataaaccaaggatgtaaaagtcaagtatattggaaactacaaaatgttgctgaaagaaattaaataaggtgtaaataaatggaaagacatcctgtgtttacggattggaagacttcatgttaagatgtcaaaactatctaaagcaatatatagatttaatgtaatccctgtcaaaatcccagtaatggttttcatagaaatagaaaaatccttaccctaaaattcatatgggatttcagggaaccatcagtagccacaacaatctcaaaaaagaagaacagcatcggagatctcacactttctgatgtcggaacttactacaaagctacagtaatgaagacaatgttgtatttggcataaagacaggcatatagaccaatgaaatagagaagagagtccagatataaacccttgtgtatgtggtcaaatgattttcatcaagggtgtcaagaccattcaatgaggaaaagacagtcttttcaataaggggtgttgggaaaactggataaccatatgaaattagacccttgtgttgtcagaggcgtttgaacaagagcgactccatcttgaataggggctgggtaaaatgaggctgacacctactgggctgcactcccaggaggttaggcattctaagtcacaggatgagataggaggttggcacaaggtacaggtcgcaaagaccttgctgttaaaaggatgcagtaaagaggccagccaaaacccaccaaagccaaaacagtgatgaaagtgacctctggtcatcctcactgctcattatatgctaattataatgcattagcatgttaaaagacactcccaccaggaccatgacagtttacaaatgccatagcaaatcaggaagttaccctatgtggcctaaaaaggaaagaaacccttagttcctggaattgcccacccctttcccggaaaactcatgaataatccacatcttgtttagcatataatcaagaagtaacaataaatataagcagctgagcagtccatgccactgctctgcctatggagtagccattctttattcctttactttcttaataaacttgctttcactttatggacttcccccaaattctttcttgtataagatccaagaaacctctactgagatctgtatcagaacccctttccagtaacatcgttatactatattcaaaaattaactgaaaaatggatcaaagacttaaacataaaagctaaaaccataagactcttagaaggaaacagagaaaatgctttataatgttagttctggcaaagattacttgggtcagataccaaaagcagaggtactaaaagaaaagaaaaaattaaactacatcaatgtaaaactttaatgcatcaaaggatgctattaacagactaaaaaagtcacccatatttgggagaaaatatttgcaaatcttatatctgataaggaattaatttctagaatgtgtaaagaactctttacaactcaaccgcaaaaaaaaaaacaaacaaacaatccaatttaaaaatgagctaacaaatatacaaatggtcaattgccaagaccagctcagttggggagaccctaacctagccgcgctagaggaattaaagacacacacacagaaatatagaggtgtgaagtgggaaatcaggggtctcacagcattcagagccgagaacccccaacaaagatttacccacgtatttattaacagcaaaccagtcattagcattgtttctatagatgttaaattaactaaaagtatcccatatgggaaatgaagggatgggctgaattaattgcagcaggaacacgcctttaagacacagattgctcatgcttttgtttgtggcttaagaatgcctttaagcggttttccgccttgggcgggccaggtgttccttgccctcattcccgtaaatccacaaccttccagcttgggcattagggccattatggacatatcacagtgctgcagagattttgtttatggccagttttggggccagtttatggccagattttggggggcttgctcccaacagtcaatagcacctaaaaaggtgctcaacattagggaaatacaaatcaaaaccactgtcagataccactccacacctatttaggatggctattattaaaaaaaaaagtgttggtaaggatgtgaagacattggaactcttttgcattgctggtgggaatgtaaaatggtgcagctgctatgaaaacaacatgaagcacctcaaaaaaattaaaaataaaattaccatatgatccagcaattccacttctaggtaaaaaattgaaagcaggaacttgaacagatatttgtatactcgtgtttatagcagcattattcacaataactaaaacttggaagcaacccaagtgtctgtgcttccagatgaatgaataaaatgtagtgtgtgtatgtgtatgtatgtgtgtatatatatgtacagtgaaatatatacatatacgttgttatatacaatgaaatatataaaaaacttctggccaaccagctgtgaattgggggttcccataactcctcttcaggtttgatttgctataacaactcacagaactcaggaaaacattttactcacatttcctagtttattatacactttactcacatttcctagtttattataaaggatacaactcaggaacagccaaatggaagagatgcatagggcaggaaattgggatggggattgtggagcttccaagccctatcctgccaccctctcagcacctggatgtgctcaccaaccagaagctctctgaaactcaactgttcaagagattttatccagcacggtctctagccccctcccctcccctcccctccctggagtgggtagggggatggggttgtacatttccaagttcgaatccatgatctttctggtgaccagcccccttctgaggctacctaggagcgctacctatgttgcctcattagcataaactccctggagggggtagagggatggggttgtacatttccaagttctaatccctggtctttctggtgaccagccccctcctgaggctgtctaggagggctacctatgtcacctcattagcataaactctggtgtcttggaaaggggccccttaggaaatgatgagatattcctatcactcaggaaatcccaaggatttttgtagctctgtaccaagcacagaggacaaagaccaaataatatttttattataccacagttacctgcagtagaaacagaaagtagaatggtgattgtcagaagctgagggaaggagagaatggggagttactgtttaacgggtacagagtttcagattgggaagatgaaaaaagttctagaaatggatggaggtgatggttgcacaatagtatgaatgtacttaacgctgctgaactatacagttaaaaattgcttaaaaatcaacaattgtgtatatttaaccaccaccaagcaaacgaacaaaagatactctgcttttgagatgttcccttctagctggaacccctgttcccctgctgccctcatccacatcagcctttatgctctaaagaatgcatttccaagcctgtgtacctgctgggtctgttccaacactggcctttgttttctggtggttcgtctatttctccttcttccttatcccttctcttgtccacctcccctccatctccacatcttcctactaaatgggaaacttccagagggccagaaccttggctgatgatagggacaggaggcagagaaattctaggcagaaaagggtggggtccctggcgagggccccaccctcaagcctgaaaccgcagcccaaagtgagaactttacatcattttcctgctggaatattgccttttccaaaaccactcctggccaacccccatcctatagccttaaaacccccaggctctactgacagagagcagagaaggggagaagcattagccagacatcagagagaagcaggtttactttagagagacggctggacagcgggacttcagagaagagtcagctggggacagccagacctcaggggtggaataccttcctgctccatctgctttccagctccccttcccactgacagccacttctatcggcaataaaatcctctgcatttaccatctttcaattcgtttgtgctatctgatttttttcctggatgccaggtaagagctcaggatagagaaagctgtctcactggctctctgccctcatgaaaaggcagagggtctattgagctgttaaacacttaagctaaaggagcgcagtgtaacaaacacactctggagcttcaggggtcacagatactccccccttagatgctgccgcagtaccctcatggagtttttctcctgctggtgcccaaaagcgatcactccagctcctgtgcccgcttgcctgtgtgctcccactccctcgaggggttgagaactgagggctaagtgaggcacccctgtcatgaagcccacaaaggggtcaaggaaaatttcctgtttcactgacacatctgtcctgtgtctcagagcaaggccctgggcatagcagctgcttgcagatggatgggcaaattaacaagttttcacttcctgaaagaaattaagatgaccagtcagttaactgagagttcaggtggttggaggagaagattctcatgcctgggttgtcttcttgatgtgacttgttcttattccttatgtggaaaaagctactgaatccttacagtgtgcgttggactgtgccaggccgagggtgttgagaatactgtcgtctacggccataccaccctaaatgcacccgatcttgtttgatctcggaagctaagcagggtcgggcctggttagtacttggatgggagaatactgtcgctagatctgctgtgtaccctttgacaagtctcataactttcataggtttgggcttctttggtaaaatagcattcatactggcaactgcagaagctacaggaagggattcaatgagacaatatgtggacagcatttagatagtagtttctcagataagaagtgctaaatgaggtctgctgtcatggcacatgcctgtaatctcagcactttgagaggccaagagggaggattgcttaagcctaggagttcaagaccagcctgggcaacatagtaagatccctgtctctacctaaaaaaaaaaaagtattaaataaagaacagatgttttcagtaccatcatcaataaaggtaatcgcctctgtcttctgttggttctggatctagaaagagaggccaatactgaaatctctcctaatactaccggacattgccccagtgtgggtgcagtgtggacaagcagggcagcttccttaaggtgaaggttgagctgattcctaatgagtgaagtgaccaggggttggtacataggggaggttgggccattccaggaagtatcccagtagtatcctgatggagacttgtgcctcttgagagctacttaaactaaaagcaatatgggtgcaggaagttggtgtaatattcccagagtgcggtgatgaagactttggagactctggggtgacacagatactcactgggtcaacccctatgcctgtgcacaagactttagtctcacaaacctgagactgaaggaagcgggcaggggtagggggaccgggcggggggcgcccaggcttatcaggtgttcacagctattttccatctccttgttcttgatctttttccaacaatgctgttaacaggatgtccttcccttgacttgaactccccccaagcctcaacatcaaacagccctgtgtggattgcaggatgtaggttggagtgccatcaaggatgattaaaacaacaaccaccaccaccatcaccatcaccatagggttaaggtgatatgtggtgtttcctcttctttctttcttgacctcctgacttctttctacctagcaccattcccaagttaacccagtggaatatctcccctcccttgattctacagagctaagggcctttttctttggtgagtcattcataggtgggagggcaccctgtaagctctggtggcccagccagacacttctgctttctgacttgattacaggcatctttcctttttcatgctgtgcaaaaacttgagctcagcctctcaccccaacacaattcaagacgcagccttgtcccagcatgagcgcagataacagcagcaccatctgtgtttgtagaagcgtgagacaggaggtgaggatagatcttacttccttcccaacttctttgggttcagccgtgtgtccggagccttaggagggaggagtgtttgctttggctcccctccgattgcttctccagagaggagttgaacacaagtatttttcagttccaggaggctgcttttgattgcacagccctgccagctccggaaaagagggacacagaagctggagcaaggttgggagctggttttctcctttttttcttctctcccctggaaactcctgatttctgcatacaatgactgggttgacatggctgggtctcctttggcggctctagaggtagctgtctgtatgcaagtctatttgctgtgttcatctactggaaaacataggaggtgagcaggcataaggcattcgtgggcttttgtttcgttttttgaaacagtgtctcagtctgtcgcccaggctggagtgcggtagcatgatcacggctcactgtagcctcaacctccccgggctcaggtgatcctcccacctcacctcatcctttcgaatagctggaactacaggctcatgctaccacgcctggccaatttttgtatttttttgtagagatggggttttgccacgttgccagggctggtcttgaactcctgggctcaagtgatctgccttcctctgtctcccaaagtgctgggattacagatgtgagccaccaccctggtgaggcatccatgttaaagcagggttcattctcaaggctgtttgtttgggctagtagctgccttttgagcaatctaggcctccttagacctttatcccgggcttcctgttgggtgctggacaggtttgtggagacacccatttgagcacacccaggattcatcccttctctgctgagaagctagacaggaacacacctctctcccaccattcctgcctagggtacataggggaagccagcagctgagaattctcttgatttccttcctcagagtggtggagatcaattgtttctaaagtatgctgcatgagcccctgcaccagaaccacgtgggtgttcattaaaaatgcaaattcagagactcacacctataatcccagccctttgggaggccaaggcaggaggattgcttgagtccaggagttggaaaccagcctgggcaacatggaaaaaccccgtctttacaaaaaattagccaggcatggtggtgcctgcctgtagtactagctacccaggaggctgaggttgggggatcacctgagcctgggaggtggaggttgcagtgcgccaagatcatgccacctcactccagcctgagggacagagtgagaccctgtcttaagaaaaaaaaaaaagcaaattcctgggcaccagagcagacccaaggaattagctcctctaggttgggacccaggaatatgtatttttgattctccttctagggattctgatgcccactgaagtttgaaaactcctggtatagaagccatggaagctggacccagcagccatgtttggggcctccagcaggatacctgtcctctttgggcatcagcttttttttctatagcaagaatgcctgcctcacagggttgccatgaaagctaaatgaggcaatgtctatgtgaaacagctcctggaaccaagtaagccctctgtaaacatttactgagtccatatctatcttttccctctctaccaaactcatgttctacaacatgctagtgttaaaaaaggtaaacggaggtgcaattaaaatttttttaagagtttatttgagcaaacagtgattcatgaattggctggctccaaaccagaagtggttctggatcatcctgagtctcagaccatgtcttctggggatatgatgctgctttgtgcctttttgagactcagcaaggttccatgggaagagagcagggctgggaatggaacctcagaagtctcgatgttgatgattagctctgtgacttcaagttgcttcaactcagttatgaagtagagaagacagtttggccctgacaggtctctgcttcctcgtctggactttgggcatcctgctcttgatctcactgggtggttttgaggctctggtaatatatcggatgtgtaggtgccttgaaaatggtgaaatattttgccagtgttgacttttagtgccctttcttgaactcaaaaaaaaaggggggctcggtgtggtggttcacacctgtaatcctagcacttagggaggttgaggtgggagaatcacttgatgccaggagtttaaggccagtcttcgcaacatagtgagactctatctctacaaaaatagttaaaaagttggttgggtgtggtggcacatgcctgtagttctagctacttgggagctagagaggatcacttgagcccaggagtttgaggttacagtgagcagtaattgcaccactgcactccagcctgggcaacagtgtgagttctcatctaaaaaatcaaaaaatactctggacttgccctttgacagtagaataaaaagggcttctctagacacacatcgtgtcctgcctggattgggggccatgccctccatgtagagggctcagcactcctgcctttacaccggctcatggttcaggataagctccatcatccttaccgtaggagactctctcagagcttctgggtttcaaagccttcctctcatcggcaaagaaaggaagctatacttgctgatttgatcctcttgagctgagctgttcggcggctccaggaatcctgtggagcattctggttctttttcattccaggaaactgaccgcttgctgcagaggggccttttgccaggagtggcacgatgcaacgtttgagtctatatgtgcctaagatggttcctctcttcagtgtaggaaaatggctgtggtggcatagcacagaactgattcatccccaccctcaggacataggcctgggagggagaagttttatcctgagggcatggtggtcctggccctaccaagttttctcgcagcccctcacagttagcaagtggcaatgatcgatggtaacaaatggggatcggtagggcttggacagcccttgtgaagatgttggaacccttaggaagatgttgcagtttccgttcgacaagcttctctctccagaattcttatatctctccttagggaggaaggttcctcattgtcttccctgggtatggctgcccccgtattctcatgctgccccaccaaaagccatgtcctttattagtgtgcccccatcctgggccagacctctgtcccttgcaaataacccacacagtcccctggctatcacatctttgtctctgttctacaacaagttccttgaatcctgcttgtcctgaattgcatcccctccagccagcttccctatgtctttccagttgacagcaggcaatgagagaaatgaaagccactaaagaaggccctcctccccttggcctgtcatgtgttttttttttagacaatgcaccatagcctttattttatttattgaacaaatattattgagcatctactctgtgccaaacaacaaacattttcacagctggggatgcagcaatgaatgggaaagggaaggtccctgttggcaatagccctctgttcttgtagagttcacattgaagggaagagagattacactataagccagtcacaccggagcggctaatggtgcaaatgtcagcccaagtaggagggcgggtgacttcaaagcaggatattaggagatgtttttagctaagcaggtccctgagtaactccctaaataacagggccagatctaatggtgctgcaatctctctctttctctctctcagggcgttatagatgtgagtgactaatagtttttttggtgtaagcttgagatttctttttctttccagctgtctgtctgggatcctgaggcaagcttagttaacttatgaagttggcttcttaggaaaaagctacatgggtcccatcctatctatttcttgaagtgcatgctccagaggaactgggttttgcccatggcagtccatgaagcagcaactcttccagggcctgccagtaagtaattggcagggttttacccctgaaaaaatcagaataggagggctattaccagaaagtccatccagatttagaaggaaacatgggaggattagaaacattggtcgtcacgtgagcatcccttttaggaatgccagaatgttgccttgcagacaaaggagacaattattctcctttgggctgttttatctgtcaaaggtcagggagtggcacctttgagttgggggggatagatggggggttagtgttaagggaatgcagaagaccggagaatccctctgttggctgttgattgctggtgtctgggacagaattggtgggcaatcagtgccaaagcatttgaatggcgctttgcacatcgcctacttcaaatgtgaaaactttggagtaagatttgcatgatgtgatctgatgtgatctcagctggccgggtggtttgaaagacacccactcatttttcctccttcctagccgagtcatggggaagttctgtgaccactggctttcagcacagtcagctagagggacattaatgtattgaggtgacagtgatttgttctctcactgaaagaaaaggcagtggattcttcacttctgcacccaaagtagacctaggctggccctttgtggagttcaccatgaggacaacttcaaggggaacaccaagtccttaaaaggaggagtgtgtgccaggaagctcctgagttcatgatgacagaaagcaagcataaataccgggcttagctaaaaaaataaaacacggcctttgtcagtgttcctttttttttctttaatcagaaaactttccttgtgaaactcattttcttcacctaaacttagcaacttctctgtttacagcctagtgtatctctgctcttcagctaacttgcaccccccacaaagatgaggaggaaacccaacaccaaggctgtaggtcaagatcaaggtatattacattataaaccgggtgagagtgagctccttgtcttgcatctttctcttcccttctgagtagggtgcctagtatgcagcaggtgctcaataaatactgagtgtaggtctaagagtgagaagttgattggtctgcattcgaatcccctccatgcctgatcttggggcaccccaaatgagaggtcttccctg

SEQ ID NO: 8966 - DNA, 323 bp, Homo sapiens
cgggctttggtgcacgcgcgcagggcatgcggacaggcaccggagaggctctattttgggcattacttcgggaaggcggatcttcttgcagggtccgctgatagcgggtggcaaatgaatatgaggggcagtgcaaagggtgggggttaaccgggcggtttccatggcgcccggggcgtgggggaggaatgcatcccgcaagctgtggcgaaacaactgctctgcccggaggaccgggctcgagaaggcaagagacactgggtcgggggtggagtggtggcgggggggttgggggcggaagaagccaggcaggacgggggcgg

SEQ ID NO: 8967 - DNA, 476 bp, Homo sapiens
gtctcatctcagtatcacttttgtaaagcagtagtaggtaactttccctctcttaccatgctattccttgtacatcttaacacctgtcattaaaaaaaaatttttttgcaggtctatttccccattagactgaactctctgagtgtggatttatgtttttcatctttatagttcctcagcagtgtcgggcctcgagtgactattccagtagttactgaattagttaattaattaatgcatgcatgcatatatgtgtcttgccacatgagtcactcctcaaccagtcctccctcatcctgtaattgacttctattttatctgaatgcacaacaacatccctctttcatttcatttgcttggctcttggaaagataaattggaatctttatgctaacatgttggctttctttccccgcatggtgttttctgtatcttatttcaaacctgtaataagattgttggatcgaacaagggca

SEQ ID NO: 8968 - DNA, 529 bp, Homo sapiens
gataattataaaatcacaagtattatacttttctcagagctatgtttagataaaagtttaaggaacacatcatctgtgtatgtatatttagatatttttgaaacaaagtatgtatttgataaatttaataattcatttagccattccagtatttctttgttgagtgcctagtgtttgtcaggcagtggagaagctgtgggtaattggcactctcccactgcagttagttacactctggttctttcagtctacccagcagtgtgtgctgataatgtggaagtaaatgaataaacaggaatggaatacagaaggattcttatgaacttgctcatatatgcatagcaatagaaagagtacttcctaattgcaaacttatagcacatacatctgctagaaactccttgtgctaagtacatgaattcaggcattaattccacacaaaaataaaagctaaaatcccttgtaccatgtatacaaatgagacaagtgagcttgacattcaagcttttcaattcatgcaaaactaaaa

SEQ ID NO: 8969 - DNA, 384 bp, Homo sapiens
atataatttcattttagagcctaaattttagtaatcatcctaatttttacattttcgttatataattctgtattttaggtttgcctaaagatatacataaacatgaaatcatgttagtctcttaattgttacatctacacagtcaccttcaaataaccctgccttttcttctacataactgcagctgaacagtcttcatgagtataaggtgcaactctggtccagatggatttactattttctggatgactcacaaaggccctacagtgaggtcttcgttagttatgagtatttgccccagtcattcagaggatatgcatgataaaactctaagatgttccatttcttctgaatcggcagatacttggtgcttgaggcacaatg

SEQ ID NO: 8970 - DNA, 270 bp, Homo sapiens
ttttttttttttttttgagacggaatctcgctctgttgcccaggctggagggcagtggcgcgatctcagctcactgcaagctccgcctccctggttcatgccattctcctgcctcagcctcccgagtagctgggactacaggcgcccgccaccatgcccgattaattttttgtatttttagtagaaacagggtttcactgtgttagccaggatggtgttgatctcctgacctcgtgatccgcccgtctcggcctcccaaagtgctgggat

SEQ ID NO: 8971 - DNA, 6174 bp, Homo sapiens
tgaattttcaaattacattctaggtttgcagcctctggcgacgtccagcgtcacattattattcactcaggagaaaaaccacacttgtgtgacatctgtggtcgaggtacagctgagtgttttcctattcttcttgaagatttctgattaaaatgttctctgtccttcagcttaacacctgttatggtctctctagggtttagtaacttcagtaatttgaaggagcacaaaaagacacacacggctgataaagtcttcacctgtgatgagtgtggaaagtcttttaatatgcaaaggaagttagtaaagcacagaattcggcacacgggggagcggccttacagctgctctgcctgcggtgagtttgggtttctggctgtcccctagtcatctgtgtgtgggaagggctttgtcccccagccctcattagctgagtgcgtgtctgggatgagccctttgtttcctcctgtttttttattgcctcacatgatctctcattcattcctgcatttgtgtgtcaggcatttgctgcttgtctttgaggtattaggaactgtcctaaacgctccgaatacaaagatgactaagacagagtcccaggtgctgagggctcttggtccagatgggaagagggagggtggctgggaaagtaggggacagcaggacgtgtggctgcacatgaaggagagcagcggtcccgccagagcattaggagcacgtgctgggatcagagggtcggcttctatagatcacaaacttcagagcagactttattctcgtgggcacttgatgcttcgtttgagagcggaaagctggcagccctcggtttcagggcacctgactgctccgatgaggacacggaggctcagggtaaggtagctcatgacctgtgatcacagcgttggagccaggattcctatacacatggcctctaaagagggagagtgtgtacccgtgacaagtaattgagatgcctattgaatcatgggcaaaactatgagtgacagcaacttttatgaactgtttagaccaaataagaaatgcacagagtccagctgtagggagcctggattcagggcaccattcagagaggcacattctaattgtaattggaatctgaaaccagcaggacttctgcatataaccagaggaaactcggtttttgtccctgcatttaaattgtacacggatcttctggatacagatttaggcaactccatgaccattctgatcactcttagaaagtgaagtttcatcactttaaatcactaacgtaggagcctactgtggtggcgttcgcctgtaatcttagctacttgggaggttgaagctggaggatctcttgagcccaggaggccgaggctgcagtgagccgagattgcaccactgcctgggtgacagcgagagcttcatctcaaagcatcagtagtgtagtctcaaatcactaatttaaaatgtcagttccaaataattatcacaactgtgaacttgatttaatggtaaattttgtcctccttccccagctaggacttgctgctgctcagaccctgcagtggaggaagtggggccttccgtcccctctgccccactttgggttctgccctttccctgcctcactaaccctggtttcacactctgatgaggtcagcttctgggggatgggggagcgctgaagagaggaggaatgttatgtgacagggtcagttttttaacagctttgagacaatattcccataccataaaatttaccaatttaaagtgaacaattcattggtttttggtagattcacaaagttgtataattctcaacacaatctaattttagaacattttcatcaccccagaaggaagccttatacccattagcaacccccttcccagccctggcccctggctgccactcatctaggttctgtctctgtggacttgcccgttctagacatttactatgcatggactcatacaacacggggtattttgtagtcgacttcttgcactaagcaaatcagctatgaacatccgtgtaccaaggcttgtgtgggggtgtgtttccattttcttggatatatagacagttctcttttaagagggtttcacatgctgagcttctcggtgtttcaaactgctcgcaggctcgtgtgctctcgctgtcttatgcgtgctgggcttcgtagttctcaagtctgccttccctgtcttcccccagcatttcactgcgctttccgagatgcaggcctgcactgcacagccatgcatttccgttcagctggcgtctttcctggctctctggttttagtggcagcttcctatagggaggcttcgttggggtttcactgctctccgggcagcctcccctgctgattgagagcagctccagcatgcctctgtacagtgggtggcagccctcaggcctgtattcaggggcctgcaggcccacagcagtgtggcgcccacccgcctgtcccctactagacctactgtgcaggaggtgggcgtcattcccctgtgccctcctcgcgatgggacacaggtggagccaagctcctctcgactcgaaagatgaaggacaggcacccatattcctctttcttggtggaaactctgtcatgactaaaaattttacatattaaggatgctaaaagtggttgtcccatcttgttcagtaattcaactattgagaatttatcttgaagaaatgatgtaaagaaagattaaaaacttggccaggtgtggtggctcacgcctgtaatcccaacactttgggaggccgaggcaggtggatcacttgacgtcaggagtttgagaccagcctggccgacatggcgaaaccccgtctctactaaaaataccaaaattagctgggcatggtggtgtgttccagctactcaggaggctgaggcacaagaattaacttgaacccgggagacggaggttgcagtgagccgagatcgtgccactgcattccagcctgggcaacaaagtgagactccatctcaaaaacaaaaacaaaaaaacaaaaaagataaaaactttatgctagagcagcaaacagttggaagcagccaccgtgtgcagcagtgaagcttctaattcacaaaattccgcatgtctgagtaaagtgtgtgttataaggacaacacagaaactaaatatgctttcactctagtgttctgtgaaggagcctgagccttacattgtggacaaaacacagacatgaaagcacaaaggcaaaggtcactgtgatgtgttgttgcagtgttttggtttttgttttttttaatcttttttttttttttttttgagatgggttctttgttgctcatgctgcagtgcagtggtgcgatcacagctcactgcagcctcgacctcctggacacaggcagtcctctcgcctcagtcttccaaatactgggaccacaggcatgcaccaccacacccagctaatttttattttattttttgtagagacagggtctcactatgttgcctaggctggtcttgaactcctgagctcaagcaatcctccctccttagactcccaaagtgctggaactacaggtgtgagccacctcacctggcctacagtattttttatgtggaaaatgtgcccaaagtttaggcatgtaagctcacatccagtttgattattcaaaggctttaaaaaaaaaatagcctagccattgcttgactggagctagatagctgagaattcagatgtaaagtgaaaagttctaaatatttgtccatgtgagttgtgcagctcattcttggctagtctgtggcctttgtaaggttatgtgctgagttccttctcatcttacctattccagtggtggagctagatcccttacctttaccatattcacagagaaagaaaatagaacctggacaggaatgcataacattttgttaaaagctgaatacagggccaggcgccatggctcatgcctgtaaccccagcactttgggaggctgagatgagctgatcacttaaggccaggagttcaagactagctaggccaacatggcaaaaccccatctctacaaaaaatataaaaattagcctggtgtgttggcacaccttgtaaatcccagctactcgggaggctgtgacatgagaatcgcttgaacccaggaggtggaggttgctgtgatccgagattgcacctcactccagcctgggcgcctcactcccagcactttgggaggctgaggtgggcagatcacttgaggtcaggagttcaagaccagcctggccaacatggtgaaatgccatttctactaaaaatattaatacaaaaattagcctggcgtggtgtcaggcatctgtaatcccagccactcaggaggctgaggcaggagaaccacctgaacctcggaggcagaggttgcactgagccgagacaatgccacttcactccagcctgggcgatttttttctttttttcgagacaaacacccgaatacacaaacacctttagaaaagatgtttctaaattatagattggctgtgttagatttatgaacatgtagtgaaactgatgaggagagctgtggtttctcagcatgggcttggcaggtgcctacggcacccatgtgcagggagactcagtgagaatcgaaggactgacactgagatactcaaaacccaaaggctgtctgctggaggggtccgcagctggagaagcacctcccacaggaatggaaagccttccagagtgagcagaagctgtgaggtgaccccctctcctcagatcagggttgttcagtgtcttgggaggggaggggagaatccttccagaatggccactgtaaaagcatctttttccagcctgggcatcatagcaagaccctgtctctacaaaatgtatatgtatattagccaggcgtggtgtcatgcgcctgtcgtcccagctacttgagaggctgaggaagaaggattgtttgaggctaggagttcacgaccagcctgggccacatagtgagaccctgtttaagtaaataaataactgtttttctttttccagggaaatgttttgggggatcaggtgacctccgcaggcatgtccgcactcacactggggagaagccgtacacatgtgagatctgtaacaagtgctttacccgctctgcggtgctccggcggcacaagaagatgcactgcaaagctggtgacgagagcccagatgtgctggaggagctcagccaagccatcgagacctccgacctcgagaaatctcagagctcagactctttctcccaagacacgtctgtgacgctgatgccagtgtcggttaaactccctgtccacccagtggaaaattctgtggcagaatttgatagccactctggcggctcctattgtaagttacggtccatgatccaacctcatggagttagtgaccaggagaagctgagtttggatcctggtaaacttgccaagccccagatgcagcagacacagcctcaggcctatgcttactcggatgtggacaccccagccggtggcgaaccactgcaggccgatggcatggccatgatccgttcctctctggctgctttggacaaccacggcggtgaccccctgggcagtcgagcatcttccaccacttataggaactcagagggtcagtttttctccagcatgactctctgggggctagcgatgaagacgctgcagaatgaaaacgagttagaccagtgatgtaccgcgcttctccacggtagaggcgtgttctcagtttagcaggctggtgttaaggctgtaggaggacccagtttccccatgacagtgccttctaactagccagagaataggtagcttccctcctgatgatggctcataatctgaagcatcttgagctgggggtgtgagggggagggcctgctggctcaccgtgaggcagccgcgggagggagcgctgacgtcacagaagcgaaggcttgatgctgtctcagcagcctcagctgtgggggggaagcgcgtgtgcatcgtgtcaactactgtacatgttggtcatgtgaaaggaattatatatgtatagtattacaagtatttttgcatttttacaagattgaaatttgtagcattttgtattatttacacagaatttatttgtatatgaaactcataccataatttaattcgaataaatgaaacttttctatatatta

SEQ ID NO: 8972 - DNA, 6173 bp, Homo sapiens
tgaattttcaaattacattctaggtttgcagcctctggcgacgtccagcgtcacattattattcactcaggagaaaaaccacacttgtgtgacatctgtggtcgaggtacagctgagtgttttcctattcttcttgaagatttctgattaaaatgttctctgtccttcagcttaacacctgttatggtctctctagggtttagtaacttcagtaatttgaaggagcacaaaaagacacacacggctgataaagtcttcacctgtgatgagtgtggaaagtcttttaatatgcaaaggaagttagtaaagcacagaattcggcacacgggggagcggccttacagctgctctgcctgcggtgagtttgggtttctggctgtcccctagtcatctgtgtgtgggaagggctttgtcccccagccctcattagctgagtgcgtgtctgggatgagccctttgtttcctcctgtttttttattgcctcacatgatctctcattcattcctgcatttgtgtgtcaggcatttgctgcttgtctttgaggtattaggaactgtcctaaacgctccgaatacaaagatgactaagacagagtcccaggtgctgagggctcttggtccagatgggaagagggagggtggctgggaaagtaggggacagcaggacgtgtggctgcacatgaaggagagcagcggtcccgccagagcattaggagcacgtgctgggatcagagggtcggcttctatagatcacaaacttcagagcagactttattctcgtgggcacttgatgcttcgtttgagagcggaaagctggcagccctcggtttcagggcacctgactgctccgatgaggacacggaggctcagggtaaggtagctcatgacctgtgatcacagcgttggagccaggattcctatacacatggcctctaaagagggagagtgtgtacccgtgacaagtaattgagatgcctattgaatcatgggcaaaactatgagtgacagcaacttttatgaactgtttagaccaaataagaaatgcacagagtccagctgtagggagcctggattcagggcaccattcagagaggcacattctaattgtaattggaatctgaaaccagcaggacttctgcatataaccagaggaaactcggtttttgtccctgcatttaaattgtacacggatcttctggatacagatttaggcaactccatgaccattctgatcactcttagaaagtgaagtttcatcactttaaatcactaacgtaggagcctactgtggtggcgttcgcctgtaatcttagctacttgggaggttgaagctggaggatctcttgagcccaggaggccgaggctgcagtgagccgagattgcaccactgcctgggtgacagcgagagcttcatctcaaagcatcagtagtgtagtctcaaatcactaatttaaaatgtcagttccaaataattatcacaactgtgaacttgatttaatggtaaattttgtcctccttccccagctaggacttgctgctgctcagaccctgcagtggaggaagtggggccttccgtcccctctgccccacttagggttctgccctttccctgcctcactaaccctggtttcccactctgatgaggtcagcttctgggggatgggggagcgctgaagagaggaggaatgttatgtgacagggtcagttttttaacagctttgagacaatattcccataccataaaatttaccaatttaaagtgaacaattcattggtttttggtagattcacaaagttgtataattctcaacacaatctaattttagaacattttcatcaccccagaaggaagccttatacccattagcaacccccttcccagccctggcccctggctgccactcatctaggttctgtctctgtggacttgcccgttctagacatttactatgcatggactcatacaacacggggtattttgtagtcgacttcttgcactaagcaaatcagctatgaacatccgtgtaccaaggcttgtgtgggggtgtgtttccattttcttggatatatagacagttctcttttaagagggtttcacatgctgagcttctcggtgtttcaaactgctcgcaggctcgtgtgctctcgctgtcttatgcgtgctgggcttcgtagttctcaagtctgccttccctgtcttcccccagcatttcactgcgctttcccagatgcaggcctgcactgcacagccatgcatttccgttcagctggcgtctttcctggctctctggttttagtggcagcttcctatagggaggcttcgttggggtttcactgctctccgggcagcctcccctgctgattgagagcagctccagcatgcctctgtccagtgggtggcagccctcaggtctgtattcaggggcctgcaggcccacagcagtgtggcgcccacccgcctgtcccctactagacctactgtgcaggaggtgggcgtcattcccctgtgccctcctcgcgatgggacacaggtggagccaagctcctctcgactcgaaagatgaaggacaggcacccatattcctctttcttggtggaaactctgtcatgactaaaaattttacatattaaggatgctaaaagtggttgtcccatcttgttcagtaattcaactattgagaatttatcttgaagaaatgatgtaaagaaagattaaaaacttggccaggtgtggtggctcacgcctgtaatcccaacactttgggaggccgaggcaggtggatcacttgacgtcaggagtttgagaccagcctggccgacatggcgaaaccccgtctctactaaaaataccaaaattagctgggcatggtggtgtgttccagctactcaggaggctgaggcacaagaattaacttgaacccgggagacggaggttgcagtgagccgagatcgtgccactgcattccagcctgggcaacaaagtgagactccatctcaaaaacaaaaacaaaaaaacaaaaaagataaaaactttatgctagagcagcaaacagttggaagcagccaccgtgtgcagcagtgaagcttctaattcacaaaattccgcatgtctgagtaaagtgtgtgttataaggacaacacagaaactaaatatgctttcactctagtgttctgtgaaggagcctgagccttacattgtggacaaaacacagacatgaaagcacaaaggcaaaggtcactgtgatgtgttgttgcagtgttttggtttttgttttttttaatctttttttttttttttttgagacgggttctttgttgctcatgctgcagtgcagtggtgcgatcacagctcactgcagcctcgacctcctggacacaggcagtcctctcgcctcagtcttccaaatactgggaccacaggcatgcaccaccacacccagctaatttttattttattttttgtagagacagggtctcactatgttgcctaggctggtcttgaactcctgagctcaagcaatcctccctccttagactcccaaagtgctggaactacaggtgtgagccacctcacctggcctacagtattttttatgtggaaaatgtgcccaaagtttaggcatgtaagctcacatccagtttgattattcaaaggctttaaaaaaaaaatagcctagccattgcttgactggagctagatagctgagaattcagatgtaaagtgaaaagttctaaatatttgtccatgtgagttgtgcagctcattcttggctagtctgtggcctttgtaaggttatgtgctgagttccttctcatcttacctattccagtggtggagctagatcccttacctttaccatattcacagagaaagaaaatagaacctggacaggaatgcataacattttgttaaaagctgaatacagggccaggcgccatggctcatgcctgtaaccccagcactttgggaggctgagatgagctgatcacttaaggccaggagttcaagactagctaggccaacatggcaaaaccccatctctacaaaaaatataaaaattagcctggtgtgttggcacaccttgtaaatcccagctactcgggaggctgtgacatgagaatcgcttgaacccaggaggtggaggttgctgtgatccgagattgcacctcactccagcctgggcgcctcactcccagcactttgggaggctgaggtgggcagatcacttgaggtcaggagttcaagaccagcctggccaacatggtgaaatgccatttctactaaaaatattaatacaaaaattagcctggcgtggtgtcaggcatctgtaatcccagccactcaggaggctgaggcaggagaaccacctgaacctcggaggcagaggttgcactgagccgagacaatgccacttcactccagcctgggcgatttttttctttttttcgagacaaacacccgaatacacaaacacctttagaaaagatgtttctaaattatagattggctgtgttagatttatgaacatgtagtgaaactgatgaggagagctgtggtttctcagcatgggcttggcaggtgcctacagcacccatgtgcagggagactcagtgagaatcgaaggactgacactgagatactcaaaacccaaaggctgtctgctggaggggtccgcagctggagaagcacctcccacaggaatggaaagccttccagagtgagcagaagctgtgaggtaaccccctctcctcagatcagggttgttcagtgtcttgggaggggaggggagaatccttccagaatggccactgtaaaagcatctttttccagcctgggcatcatagcaagaccctgtctctacaaaatgtatatgtatattagccaggcgtggtgtcatgcgcctgtcgtcccagctacttgagaggctgaggaaggaggattgtttgaggctaggagttcacgaccagcctgggccacatagtgagaccctgtttaagtaaataaataactgtttttctttttccagggaaatgttttgggggatcaggtgacctccgcaggcatgtccgcactcacactggggagaagccgtacacatgtgagatctgtaacaagtgctttacccgctctgcggtgctccggcggcacaagaagatgcactgcaaagctggtgacgagagcccagatgtgctggaggagctcagccaagccatcgagacctccgacctcgagaaatctcagagctcagactctttctcccaagacacgtctgtgacgctgatgccagtgtcggttaaactccctgtccacccagtggaaaattctgtggcagaatttgatagccactctggcggctcctattgtaagttacggtccatgatccaacctcatggagttagtgaccaggagaagctgagtttggatcctggtaaacttgccaagccccagatgcagcagacacagcctcaggcctatgcttactcggatgtggacaccccagccggtggcgaaccactgcaggccgatggcatggccatgatccgttcctctctggctgctttggacaaccacggcggtgaccccctgggcagtcgagcatcttccaccacttataggaactcagagggtcagtttttctccagcatgactctctgggggctagcgatgaagacgctgcagaatgaaaacgagttagaccagtgatgtaccgcgcttctccacggtagaggcgtgttctcagtttagcaggctggtgttaaggctgtaggaggacccagtttccccatgacagtgccttctaactagccagagaataggtagcttccctcctgatgatggctcataatctgaagcatcttgagctgggggtgtgagggggagggcctgctggctcaccgtgaggcagccgcgggagggagcgctgacgtcacagaagcgaaggcttgatgctgtctcagcagcctcagctgtgggggggaagcgcgtgtgcatcgtgtcaactactgtacatgttggtcatgtgaaaggaattatatatgtatagtattacaagtatttttgcatttttacaagattgaaatttgtagcattttgtattatttacacagaatttatttgtatatgaaactcataccataatttaattcgaataaatgaaacttttctatatatta

SEQ ID NO: 8973 - DNA, 1261 bp, Homo sapiens
tatatggtagccactgtgtggagcaagatgagtgagtcatggatcacatttggaaggggcaaccttcagattatggtggtgacactactaggaagacaggaagtggaggttgggttgcctgcttgtgtacctggtgatggtattgtacttcagaaaacaggtgagggaggtaaatggccatgaagggagaatatatctggtagcctagtttggcaggtgacataggcttccaaggaatgaatagacatgagatgcaagcagaagcataggagtagctgagggaagatgacactcagcctggaccttgtgctaattcgccactctgtggccacaccacgatattgagatgacttttgtggggcctggggtgtttcattcagcctggtggatatggaggcaaataaggtcaccttgtgagagtcactaggcccgagattgacggccaatgggtctaggctttgaatggagttaggtggacagaagaaagtcataatttctgaagataacaaatgcagcacagaagtggaatagggccatgaatacctgaaaacactaacgttcttttttcctgtggatttatgcatggagggcttcgtataatgacttggtactaccactgctattaggaaccattggaattctgtgataattttggattgctttttaattcaccaagactactgtggatgatgtcagccacattatggtgtgagccctaaatttaaggtcaatatcatgtgctaccttcatatctggtgatactagtattacctcaaatggtctgagtacaaatcccccttcccactctgctcttttgtataatgtgtcctagcctaactacccttttaatcaagaggactaagcagagttcctgtttattatttatttgtagcaagtttgaatttcatttctacacacagagttaattcaaacaagccagttacagctgggtgtggtgtcgcacacctatggtcccagccactcgggaggctgaggtaggaggatccctgaaacctggaaagttcaggctgcagtgagctgtaattgcaccactacgctccagcaggagtgacagagcgagaccctgtctcaaaaattaaaaacaagccagttgcatcctttcaagggaatcaggggctatcacaccttcttgattcagaaaagcttacataccacagtccctggttgctctctcttatgcatagtgcaacccccatgtggctatctgtggtgagtggtgtcctcttctctcaagttgtga

SEQ ID NO: 8974 - DNA, 1379 bp, Homo sapiens
caggggccatttatggtttcatctatccccatcataacagagcagtgtgacctttgaagacgtggctgtaaacttttccctggaggaatggagtcttcttaatgaggctcagggatgcctgtaccatgatgtgatgctggagaccttgacacttatatcctccctgggtaaggtactcatacttaactgtgacctgagttagtctctgcccctcccctttattcctcttggtaataacgtctttctcacatcaggactgtggcacagcttcattctccaattctctggatcagttctgtggttggtagtactgagatacatgtactgccctctcctttccttgagcagccccagtctgctttgttgcaggctcccagggaaagagttagggtcaggagtcttaaagtcaccctaatgcatcccaccttggttgtcttctgcctttctgggtgactgtgcagatctaagacttctttttttgagacggagtctcgctctgtcgcccaggctggagtgcagtggcgcagtctcggctcactgcaagctctgcctcccgggttcatgccattctcctgcctcagcctcccgagtagctgggactacaggcgcccgccaccacgcccggctaattttttgtatttttagtagagacgggatttcaccgtgttcaccaggatggtctcgatctcctgacctcgtgatccgcccgcctcggcctcccaaagtgctgggattacaggcatgagccgccgcgccccgcccccattgcatttttcagcctgcctgtgtcccttgccagacttatgtgactgccagttatcttgcaaaaagcatttcacctttaccacttggcaggtactcacagtttcatcactcccctacctcattatgatccagacgtaactttttctttcattcaccagggggattttttagtatcctcagtactcattccattctcaattctttgtgtctgatgaggtaggccaaggacctgactaatttttggtgcagagaactcttctggtgatttgaaaagatggactacctttttcagggatctcttggatctcacaggattctttttttttttttttaagatggagtcccgctctgtcacccatactggagtgcagtggcgcaatctcggctcactgcaagctccacctcccgggttcacaccattctcctgcctcagcctcccaagtagctgggactacaggtgcccgccaccacgcccggctaattttttttttttttttttttttgtattttcagtagagatggggtttcactgtgttagccaggatggtctcgatctcctgacctcgtgatccacctgcctcagcctcccaaaatgctgggattataggcgtgag

SEQ ID NO: 8975 - DNA, 1412 bp, Homo sapiens
gcggtggagcttagccccttcttccgaaagtcaggttggaggcggcctttaagcgccgcgcgtctctcggaacttaaatattacccggaatcgtctctgtgaattggaaagcccattgaagcctcagagaagccgcgccattgcggaggcacgtaacgtcaagcagggacttcctgcgtcctcgccgcggtggccattttggcttgtcgggaccatccacctatgctgcgtctgtacctctttgtcaggaccgagagcgcgcgagaggagtggttgtgcccattgcacacaggcggatctgaggcttggcgacgccgctggtcgcgacctgggacaggacgagcacaggaaccgcctggcctgcgtccccgcccgcgcatgaagtcgtggcggcggccgctcaagtgagccctgcgacctccaggcctcacccgccatccccacacagaccctgagacccctgactgtgaggggcgcttcctcgcgtccttgcagctcaggcctctgtcagggacctagaggcgccggcgggtggaatccctgtttccgacaccggttgatgcggtcgggagagcgagactggccgagggaccggcttaggcaaaggcctggaggcacgactgcgccaggaggattcggaacacagggacatcttgtgtccactgagaacaaagtatgagtcggagttatttcctcagtaccaggctgaggattgatctttgtgaggaccgtagaagccatggacagttttgaacaaaggaggaaatctgtgttagagttaaagattccgaaaagatgttcaaaggaagaacggagtgtaaggcggtgatgaggacagtgaggcattgagaggttgaatatttgctcaaggtcacgtagctggtaagaggtgacattgagcactgggccacaagattagagactcagcctgaggtcacctggctacagggccaaaaaaagcttacagagaaacctgagtctatcaaatcccagcagggacacattcctgaaagctccgccttttggcacaccttctcatggctatggaagtatttaaggaacccacagaaggaagtataggatgctctagtccctcactggtcctcatcctcacctatatgtctagatcttaatgtcctgggaatttatttatttagcgacagagtgtcactcttggtacccaggttggagtgcagtgacgcgatcatggctcagcatagtcttgacctccccaggctcaggtgatcctcccatctcagtctcccgagaaactggctaatgtttgtgtttttaatagagacggggttttgccatgttgcctaagatggtcgaaaactcctgggctcaagcaatcctcccgccttggcctcctaaagtgctgggattacaggcgtgagccgctggtctggcca

SEQ ID NO: 8976 - DNA, 10468 bp, Homo sapiens
taacttacaagaaaagggctgggttttgaaaataacacaggctctaaaaaccctaagaagcggtgcaacttttggcaggaatcggggttagcgggacctcaagggctcactgcggctaagtgaacgctgactggtcctccagcgtgagctagaacagacgtctctatggtcaagtaaacagagcgtgtgctgtcttccccatgtggtggggttgcgcatgatcagtagctgcaccactagaaagatggcggagcaagagtgagtgtttggggctttgaatatctggagtggggtcttgagtatccggtgccatccacggtgtttatgccttggtggcggattcctgtgggctctaggaatagaaaaggccacagtttacaaagggtgggggtgaggaggagtagcgctgtggcggaggagggaggggaccgcggtcaagttcgggttatctggagaggcgaggattgacttcaggcagcgggctggagtgccacagttgaattcacccagcccgacaagtgttaactctgcagataggcctgcccccgccccaaccccatagattcgtcgctgctagtgcctatgaagaactgtggccgtgaaaaccctgttaacttatacgaacccagaggctaaaggattcattattttccgaggctttggggatgagtgactattagggatggatttatgaggcctggagtcagaaaccgcaggtttcaggggaatctttcttcagatacttgaaaacagtaatgttccctaaagcccaggatattgaattggtttggaaatccattgaatgttcgttttcttttttgttgttgtttttgttttgagacggagtcttgctctgtcccccaggctggagcgcagtgtcgggatctcggctcggtgcaacctccgcctcccgggttcaagcgattctcctgcctcagtctcccgagtagctgggattacaggcgtgcgccaccacgcccagctgattttttatttttagtagaaacgggggtttcaccatgttggtcaggctggtctcgaactcctgacctcaggtaatccacccacctcggcctcccagagtgctgggattacaggcttgagccaccgagcccggccaagtgttcttttctaaatgttatctctgatctcaattttctgcatcaggcaaagaaaaatccctttggttccagaaaatctcctgaaaaagaggaaggcttatcaagccctcaaagccacccaggcaaagcaggcacttttggcaaagaaggaggtaatggtggggaaccaagagaaagtaattagaatttttatttggtgagttttatcccgcatgtgttggactacatttggtattgacgagctccccccaacggtttgacagaccaggtatagttgtctctcagtgtccttaaggggttggttccaggactcccacagatgcctaaatctcagactgctgaagtcccttatataaaatggttgtagtaggccgggcgcggtggctcacgcctgtaatccctgcactttgggaggccgaggcgggcgtatcacgaggtcaggagatcgagaccatcctggctaacacggtgaaaccccgtctctactaaaaatataaaaaattagccgggcatggtggcaggctcctgtagtcccagctactcgggaggccgaggcaggagaatggcgtgaactcgggaggtggaggttgcagtgagccaagttcgtgccactgtactccagcctgggcgacagagcgagacactctctcaaaaaataaataaataaataaataactggttgtagtatttgcatataatctatactccttccgcctatgtagtttaaatcctctctggattgcttaatagctttatttatttatttatttattttgaggcaagagtctcactcttgcctagagtggagtgcagtggcacaatctcgactcactgcaacctctgcctactgggctcaagcaattctcgtgcctcagccaaccaagtagctaggattacaagcatgcgccaccacacctggctaattttttttttaacttaatttaattttgttttgttttttgagacagagactcactctgtcacccaggctggagtgcagtgatgcgatcttggcttaccacaacctccgccgcctcccgggttcaagcgattctcctgcctcagcctcccaagtagctgggattacaaggatgtgccaccatgccctgctaatttttgtatttttagtagagaccgggtttcaccatgttggccaggctggtgtccaactcatggactcaagtgatctgcccacctcggcctcccaaagtgctgcgattactgatgtcagccaccccacccggccaccggctgatttttgtatttttagtagagatgttttgacatgttggccatgctggtctcaaactcccggcctcaagtgatcacccaccggccttccaaagtgctgggattacaggcctgagccaccctgcctggcctggattactgatagctaatacagtgtacataatgtattttaaaaatttgtattactttttacggttatttttcattttttcccctgaatttttttttttttttttttttaagagtgaggtcagctgggctcacatctgtaatcccaacactttgggaggctgaggcgggcagattacttgaggtcaggagttcaagaccagcctggccaacatggtgaaaccccatctctactaaaaatacaaaaaattagacgggcactgtggcatgcgcctgtaatcctagctaatcagggggctgaggcaggagaattgcttgaacccgagaggcggaggttgcagtgagctgagattgtgccactgcactccagcctgagtgacagagcaaaaccctgtctcaaaaaaaaaaaaaaaaaaataagtggggtctttggccaggtgtggtagctcatgcctgttatcccagcactttgggaggctgaggcaggtggatctcctgaagtcaggagtttgagaccaagctggccaacaaggtgaccctgtctctactaaaaatacaaaaattagccgggtgtggtggcgcatgcctgtaatcccagctacttgggaggctgaggcaggaaaatggcttgaactcaggtggcagaggttgcagtgagccgagatcatatcactgcactccagcctgggcgacagagcgagaccccatctcagaaaaaaaaaagaacaaggagtgaggtcttgtgttacccaggctagagtgcagtggcaggatcatagctcattgcagccttgaattcctgggttcaagagaacctcccgcctcagcctcctaagtagctgggactacagggtgagctactgtatgtgctcctccaaagtattttccatctggggttggttgaatcacagatgcagagcaccaagtgtatatggtttatgtcttcatttagcaaatatttaacacctgcaggcaaatgctggcgtggagtttaaggaaacttgttagtaaacactgattaatatgtaaactaattttttgttcgttatttttcccaataattcccaagtttcctcaactccacctttactttggtttctcatttttcctttatatgaaaatagagaatgttgctttgcttcgcattgtggaacacggggaaataagctatatcagttgtcacttatgaattactgttctaaaagtaaaaatgtatggaggcacaagatgatgatgatggtctgtcttctctgtagcagaagaaaggaaaagggctcaggtttaagcgactggaatcattcctacatgattcctggcggcagaaacgtgacaaggtgcgtctcagacgactagaagtgaaacctcatgccttggaattgccagataaacattccttggcctttgttgtacgcatcgaaaggtaaggaactggtgtctttctaattgcatgaggctggggcaaagtgttgcttaagctttagacccctttctagggagataatatgccccaagccactcaggcaaattgtgctaggatgtcagggttgagcacaatttagtctgcaatatttggaagaccttagacagataggcttgaaaataagtgctatgagggtaaagtgctcactagggagaggggttgaggacaccctctctaaagcaggaacttcaacctgagacctgaaagatgtgaaaggcgttcaccagtgttgggagatttttcaggcatacgtgctgaagtcctgaggtagggaaagcaaggcatcattctaggaactgaaacaaggctgagtggatgaagcatattcagtgaaggggagacatttttcctcatttagtggaactttcccaaccccctgcccaccccatgtacaactctacttcttgctgtttcccctacccaatcacccaaaccagaaacctgtggattttgcatgtttatgagctctgtcctttgtagccctctaccactgctcatatttttcctgaactattgtattaaccttcctcctggatttccttgcctctagtgtcatactgtgatctgtcccatacactgcccttggtgattgtcagaaagaaatctggtctggtctcttctgcttaaaatcttcagtagcttttactgcccatagaagcacatccagcttccttagctggacatgtgtagacctacataccaccactccgcctacccctgaaacacacacaagttcaatttccatagcattccaggcactgctccacattatgaaaaggatctgttttcataaccgcctcccactaaactgagctctttaaggcatagtctctgtgtcttattccagattacccagtgtagtgacctcgcatgttgtgcttgctggactgacataaactggagggagtctgtctgacttctgttgctgttcatttcaggattgacggcgtgagtttactggtgcagagaaccattgcaagacttcgcctaaagaaaatttttagtggtgtctttgtaaaagtcaccccccagaatctaaaaatgctgcgtatagtggaaccttatgtgacctgggggtaagtaaggttttccatgtgaattcacattagatttctatttgagtgtgtcagggtgcaccgggtattgctttccagggctcatgttgctgtagaagggacattttgctgtgaccacagtcaacctgaaatcagtgggtagctgtaataaccatgggacacagggtagggaggggtctgaacaataccatagtagggctggttcagtcataggctaaggctgggtcaaggaaagcttggttcttgaaagtcttaaagcagagctaaaggcagtgcatgtgtaagagtagtattcctggccggacacactggctcatgcctgtaatcccaacactttgggaggccgaggcgggtggatcacacggtcaggagtggatcacagggtcaggagattgagaccatcctggccaacatggtgaaacccctgtctctactaaaatacaaaaaaaattagccaggcatggtgatgtgtgcctgtattcccagctacttgggaggctgaggcaggagaatcgcttgaatccatgaggcagaggttgcagtgagctgagattgtgccactgcaatccactctgtctcaaaaaaaaaaaaaaaggccagacacggtggatcacgaggtcgggagatcgagaccatcctggctaacatggtgaaaccccgtctctactaaaaatacaaaaaaaattagcctggcacctgtagtcccagctacttgggaggctgaggcaggagaatggcatgaacctgggaggcggagcttgcagtgagtcgagatcgtgccactgcactccagcctgggagactgagcaagactccgtctcaaaaaaaaaaaaagagtagtattcctcaaacattgaaacccaacaaaaacttggattttatttccaactcttgcaccatcttgagtagagggtcacctaaggccagagtcgtagcccctaaggtaagctaggacatggtttctgttttgtttttgttggcaatattttccctggtgaacatttacatccataaatttaaatttctaattatgtaagtggggtcacttcagttctttatcaggagtatttccaagcatttcagctggaatgtgattgcagaacacttgctcgttgggagaagtgagtgtgtgggagaacctctccaacctctcagccaggctgcaggactggtatgtagtgtgccaggtgctggtgaaaaccgtgctttattttcctacatagatttccaaatctgaagtctgtccgagaactcattttgaaacgtggacaagccaaggtcaagaataagaccatccctctgacagacaatacagtgattgaggagcacctgggtgagtgctacagcttagggatcagctggggcagaaagccagggtctttgaagctttgatgtgagattcaggttgtattcttcttggggccccaagagtctgccagagtggccagcttagtatatgctggatacatgttaaataaaggaatctgtgcttttgtgtttcttagggaagtttggcgtcatttgcttggaagacctcattcatgaaattgccttcccagggaagcatttccaggagatctcatggttcttgtgccctttccacctctcagtggcccgtcatgctaccaaaaatagagtgggcttcctcaaggagatgggcacacctggctatcggggtgaacgcatcaatcagctcatccgtcagctgaactagacccaggtgaggcagggctgaaaactgcccttgggctgacttttgataggccatgccttgccactttacaagttctttttgcatttactagtatttaagagtaaccttgagattgggaggaatagaggaggctggtacaaatagatggagacctgctgggatcagtgaatgcctgattaggacatggggctatgcatagcctaagagttataggcttaaagatgtcgagtaactaaaaactgtattgctggccgggcgcggtggctcacgcctgtaatcccagcactttgggaggccaaggcgggcagaccatgaggtcaggagattgagaccatcctggccaacatggtgaaaccctgtctctactaaaaatacaaaaatgagctgggtgtggtggcgcgtgcctgtagtcccagctactcgagaggctaaggcaggaaaatcgcttgaacccaggaggcagagattgcagtgagccaagattgcaccagtgcactccagctgggcgacagagcgagactccatctcggaaaaaaaaaaaaaaaaactattgctgcagtcattcagatggaaatgaggaaagaataatattaataactgatttcaaaaaggacttgaagatgtgaatcatctattttgctgaagaaatcttaactctttgaaattactttttattgctgttgtcatactcttaggtgccaaactgcggtaaattttttatcagtgaagtggaagcatgtgttttgttttggaaatttttatcaagtatcttcagagaagattatttcctgctttatcttcagaaactggaaagggtcaaagaaaagacagtagctggccggtcgtggtggctcatgcctgtaatcccaacacttagggaggctgaggtgggcagatcacctgaggttgggagttcgagaccagcctgaccaacatggagaaatgccatctctactaaaaatacaaaaattagccgggcatggtggcacgtgcctgtaatcccagctactcaggaggctgaggcaggagaatcgcttgaacctgggaggtggaagttgcagtgagctgagatcacgccattgcactccagcctgggcaacaagcgaaactctgtctcaaaaaaaaagaaaagacagtagcatatgttcatgtcaagcacctctcatcacagtcgagttccaaggaaaaattccagtgttttctgcattgggtgctgtgtcatctgaaatcggcacattccatggaggaaggagtcctgctttgttgcatgtatcctagggtttaatgttggtaaatgagtcactctagcatttgtagaaggctccctgagactcctgcagcagtcgaccaagcccaaggacataattgaatctggagagtcctggggccttgttttgaaaaagacttgaaatacacataggaagaaaggcataaaaataaatgttcacttgtctctgctgtgagtatgtgttccaacttttcagtgatggctttgagaattctcaaacttgactggctctaagtgtatctggtggcttttgtatcgtaacctgaaactggcttagtactttttcctaaaagctcaggatttgagaatgaggaccccttcgccaggaaaacatgtatacactcaaaattttgcttgcagttctagggtgtttagacccttctcagatacctgtgcatcttatgggttttgtttttctctttgagacagtctcaccctgttgcccaggctggagcgcagtggcatgatctcagctcattgcagcctccacctcctgggttcaagtgattctgcctcagccccttgatcagctgggattacatgcatgtaccaccacacccagctaattcttgtatttttagtagagatggagacagagtttcaccatgtaggccaggctagtctcaaactcctgacctcaagtgatccacaagcctgggcctcccaaagtgctgggattacaggcatgagcaactgcgcccagctcttgtgtaccttatgtgaggaagtcctgctcaatcaggatcggtcacgcaggccctgatcttgctactctggttccatgtcctatggaagaccaaagtttaccaagatagatttttcccttcatagtggcagatagtgttaacccctgcaccatctgtaactcagaaatccccaccatttcttcccctgggcttcagaatagaattgcctggtttctctgatgatcagcatggttccttaaaacccaaatcagcaaggaatgaacaattttgtttggcatggatgaaattagcactgtttggctcgttaggccccaggcaggcaggcaccttaattttttccttgcatattctagtcttcagaagcattgccttttgtcctactggtagtgacatagaccaataacagggcatctggggattttaatcctgaaaacagtgagtctgatactgcttgtgtttttcatcagtgtccaccccaagtgggtcttcctgctattctcttcacttagttgcccctcacttgccatctgagcaattggcaaggatgtgccaggcctaggttaaacttggaaacatgcttgaccattctattccctggtcctttaagatcagtttggctgcaattttggctccttggaccctcaagcatagctggtaaatcaagttagagatgtaactgccttaaaacatgccagcttaggctgggcacggtggctcacacctgtaatctcaacacttcaggaggctgaggcaggcagatcacttgaggtcaggagttcgagaccagcctgaccaacatggagaaattctgtccctactgaaaatacaaaattagccggatgtggtggtgcatgcctgtaatcccagctacttgggaggctgaggcaagagaattgcttgaacccagggaggcagaggttgcagtgagccgagatcacaccattgcactccaccttgggcaacaaaagcaaaactctgtctcaaaaaaaaaaaaaaaaaaagtgccagcgtatgaggtaattagattggttctctccagaggtaacctgccaagaagagatgctatagatgttactcctatactgtaaaacattgtgaaatcagattactttaaaatgatgtattacaaagttatgcaaaaaagcagttgtgactatggaagcccaaggcttatatcccagctctgtcttacactaaatatgggtacagtgtttccactctgtccataaaatgggagctaatattctccaacctgtgtgcctgacatgatggttaaagggattaaacaaaacaatagtttgtaatttattctgtcagagcaaactgctggtaaataaaagggactaagttgacgaaaaataaattttaaaaaacctaataaaacaagtttgtaatttataattgtatacaaataaaagatgttacaaaaattgcgcacttatatgtatgtaccatgacataactaattcgttgaacaagttgtgagacaatcctttctgagaaaaggtagacctgttacatcgtctgtgggttagggtcatgtcagcacgtaccaggtacattctagcttttgtagagaaagtaaaatctagtgttgagtatgtaggcactgagccaggtggcctgcttaacataaaaggactgatttcagggtggctgtgggagcctttctaatgctctaattctctagccccttgcctga

SEQ ID NO: 8977 - DNA, 2422 bp, Homo sapiens
aatccataactttctgtaagaaccacactgtggatcataacatctgagctataaggattaagagtgtaactggggcccgttgggtgggggggcgggacagcattaggaaaaatagctaacgcatgccgggcttaatacctgatgagttgataggtacagcaaaccaccatggccacatgtttacctatgtaacctgcaaatcctgcacatgtaccctggaacttaaaataaaaattataattaaaaaaagaattgagtagctgcaccactagaaagatggcagagcaagacagaagaaaggaaaagggctcaggtttaagcgactggaatcattcctacatgattcctggcggcagaaacgtgacaaggtgcgtctcagacgactagaagtgaaacctcatgccttggaattgccagataaacattccttggcctttgttgtacgcatcgaaaggattgatggcgtgagtttacgggtgcagagaaccactgcaagacttcgcctaaagaaaatttttagtggtatctttgtaaaagttaccccctagaatctaaaaatgctgcatatagtggaaccttatgtgacctggggatttccaaatctgaagtctgtccgagaactcattttgaaacgtggacaagccaaggtcaagaataagaccatccctctgacagacaacacagtgattgaggagcacctggggaagtttggcttcatttgcttggaagacctcattcatgaaattgccttcccagggaagcatttccaggagatctcatggttcttgcgccctttccacctctcagtggcccatcatgctaccaaaaataagagtgggcttcctcaaggagatgggcacacctggctatcggggtgaacgcatcaatcagctcatccgtcagctgaactagacccaggtgaggcagggctgaaaactgcccttgggctgacttttgataggccatgccttgccactttacaagttctttttgcatttactagtatttaagagtaaccttgagattgggaggaaagaggaggctggtacaaatagatggagacctgctgggatcagtgaatgcctgattaggacatggggctatgcatagcctaagagttataggcttaaagatgtcgagtaactaaaaactgtattgctggccgggcgcggtggctcacgcctgtaatcccagcactttgggaggccaaggcgggcagaccatgaggtcaggagattgagaccatcctggccaacatggtgaaaccctgtctctactaaaaatacaaaaatgagctgggtgtggtggcacgtgcctgtagtcccagctactcgagaggctaaggcaggaaaatcgcttgaacccaggaggcagagactgcagtgagccaagattgcgccagtgcactccagctgggcgacagagcgagactccatctcaaaaaacaaacaaacaaacaaacaaacaaacaaaaaactattgctgcagtcattcagatggaaatggggaaagaataatattaataactgatttcaaaaaggacttgaagatgtgaatcatctattttgctgaagaaatcttaactttttgaaattactttttattgctgttgtcatactcttaggtgacaaactgcggtaaattttttatcagtgaagtggaagcatgcgttttgttgttttgggaatttttatcaagtatcttcagagaagattatttcctgctttatcttcaaaaactggaaaggaagggtcaaagaaaagacagtagctggccggtcgtggtggctcatgcctgtaatcccaacactttgggaggctgaggcaggcagatcacctgaggttgggagttcgagaccagcctgaccaacatggagaaatgccatctctactaaaaatacaaaaattagccgggcatggtggcacgtgcctgtaatcccagctactcaggaggctgaggcaggagaatcgcttgaacctgggaggtggaagttgcagtgagctgagatcacgccattgcactccagcctgggcaacaagcgaaactctgtctcaaaaaaaaagaaaagacagtagcttatgttcatgtcaagcacctctcatcacagtctagttccaaggaaaaattccagcgttttctacattgggtgctgtgtcatctgaaatcggcacattccatggaggaaggagtcctgctttgttgcatgtatcctagggtttaatgttggtaaatgagtcactctagcatttgtagaaggctccctgagactcctacagcagtcgaccaagcccaaggacataattgaatctggagagtcctggggccttgttttgataaagacttgaaatacacataggaagaaaggcataaaaataaatgttcacttgtctctgctgtgaaaaaaaaaaaaaagaattaagag

SEQ ID NO: 8978 - DNA, 2422 bp, Homo sapiens
aatccataactttctgtaagaaccacactgtggatcataacatctgagctataaggattaagagtgtaactggggcccgttgggtgggggggcgggacagcattaggaaaaatagctaacgcatgccgggcttaatacctgatgagttgataggtacagcaaaccaccatgaccacatgtttacctatgtaacctgcacatcctgcacatgtaccctggaacttaaaataaaaattataattaaaaaaagaattgagtagctgcaccactagaaagatggcagtagcaagacagaagaaaggaaaagggctcaggtttaagcgactggaatcattcctacatgattcctggcggcagaaacgtgacaaggtgcgtctcagacgactagaagtgaaacctcatgccttggaattgccagataaacattccttggcctttgttgtacgcatcgaaaggattgatggcgtgagtttacgggtgcagagaaccactgcaagacttcgcctaaagaaaatttttagtggtatctttgtaaaagttaccccctagaatctaaaaatgctgcatatagtggaaccttatgtgacctggggatttccaaatctgaagtctgtccgagaactcattttgaaacgtggacaagccaaggtcaagaataagaccatccctctgacagacaacacagtgattgaggagcacctggggaagtttggcttcatttgcttggaagacctcattcatgaaattgccttcccagggaagcatttccaggagatctcatggttcttgcgccctttccacctctcagtggcccatcatgctaccaaaaatagagtgggcttcctcaaggagatgggcacacctggctatcggggtgaacgcatcaatcagctcatccgtcagctgaactagacccaggtgaggcagggctgaaaactgcccttgggctgacttttgataggccatgccttgccactttacaagttctttttgcatttactagtatttaagagtaaccttgagattgggaggaaagaggaggctggtacaaatagatggagacctgctgggatcagtgaatgcctgattaggacatggggctatgcatagcctaagagttataggcttaaagatgtcgagtaactaaaaactgtattgctggccgggcgcggtggctcacgcctgtaatcccagcactttgggaggccaaggcgggcagaccatgaggtcaggagattgagaccatcctggccaacatggtgaaaccctgtctctactaaaaatacaaaaatgagctgggtgtggtggcacgtgcctgtagtcccagctactcgagaggctaaggcaggaaaatcgcttgaacccaggaggcagagactgcagtgagccaagattgcgccagtgcactccagctgggcgacagagcgagactccatctcaaaaaacaaacaaacaaacaaacaaacaaacaaaaaactattgctgcagtcattcagatggaaatggggaaagaataatattaataactgatttcaaaaaggacttgaagatgtgaatcatctattttgctgaagaaatcttaactttttgaaattactttttattgctgttgtcatactcttaggtgacaaactgcggtaaattttttatcagtgaagtggaagcatgcgttttgttgttttgggaatttttatcaagtatcttcagagaagattatttcctgctttatcttcaaaaactggaaaggaagggtcaaagaaaagacagtagctggccggtcgtggtggctcatgcctgtaatcccaacactttgggaggctgaggcaggcagatcacctgaggttgggagttcgagaccagcctgaccaacatggagaaatgccatctctactaaaaatacaaaaattagccgggcatggtggcacgtgcctgtaatcccagctactcaggaggctgaggcaggagaatcgcttgaacctgggaggtggaagttgcagtgagctgagatcacgccattgcactccagcctgggcaacaagcgaaactctgtctcaaaaaaaaagaaaagacagtagcttatgttcatgtcaagcacctctcatcacagtctagttccaaggaaaaattccagcgttttctacattgggtgctgtgtcatctgaaatcggcacattccatggaggaaggagtcctgctttgttgcatgtatcctagggtttaatgttggtaaatgagtcactctagcatttgtagaaggctccctgagactcctacagcagtcgaccaagcccaaggacataattgaatctggagagtcctggggccttgttttgataaagacttgaaatacacataggaagaaaggcataaaaataaatgttcacttgtctctgctgtgaaaaaaaaaaaaaagaattaagag

SEQ ID NO: 8979 - DNA, 10468 bp, Homo sapiens; identical to SEQ ID NO: 8976

SEQ ID NO: 8980 - DNA, 306 bp, Homo sapiens
ttggccaggtgcggtggctcacgcctgtaatcccagcactttgggaggccgaggcgggcggatcacgaggtcaggagatcgagaccatcctggctaacaaggtgaaatctctactaaaaattcaaaaaattagccaggcgtggtggcgggcgcctgtagtcccagctactcgggaggctgaggcaggagaatggcgtgaacccgggaggcggagcttgcagtgagccaagatcgcgccactgcactccagcctgggcgacagagcgagacgccatctcaaaaaaaaaaaaaaaaaaaaagcagaat

SEQ ID NO: 8981 - DNA, 606 bp, Homo sapiens
tgggctttcctttaatgtatcttcaaaatcattctggggccaagttacatcataaaacattttattacatataaggactgaaacaggatttttcttaactgtaacatggtccacaaatgtaaatgcaaaacccccatggtggttgcaggagcaagtctagttgagacaggtcaggacgaaagcataaaagatgagtaactgaatggcatcccgggtcctgtagccacgccctccagatcgccgccgcaaaggacctggaacctcaggggcccactgtatgccatgaagaaggcgcagtcgctgcctcaaccaagccaggctccgccggggccgttcctatcctgagggtcggagggggaagggactcagccaaagccgcggcctcccagggcttgggcctccgcggcagccgggacgctgtgggttcgccgtggatcgccgcgatgtggcgtttctccaggcccgggagttcctggccctgctggaccagctgcaggagctgcgccagggtaaccgaagctgaggcagaggccggggccgagcattggggactgcggggacgctccatgtcgggtcgcgaatcctgaccggcgtgtaatgcagaga

SEQ ID NO: 8982 - DNA, 240 bp, Homo sapiens
ttttaattaccaacataatttttagagttgtcactttcaacaaaatcatccctgaaaaaacttcacaagtaaaaatagttaaatacaacaacaaagaattgcaggggatagaaagaatcgatattgttaaaatcgccatactgcccaaagcaattagcgggttcagtgctattgctctcaaaataccaatgacattcatcacagaattagaaaaaaactattttaaaattcatatagaat

SEQ ID NO: 8983 - DNA, 435 bp, Homo sapiens
ggaggaactctgtccctgtccctgcctcccaaaagggagcaaaagggtataaatagtttataagaagcatccacttgaaagtttaatttttctcacagtgcgaaaaagaataaaataataccagaaaaggttattatgatttctgaaatgtagcataaagccaaaacctgaaaagaagaagaaacactgaattagacaagggtatgcaatagagaacatgaggggttcacaccttcttgacactgcagggagtagctgaaatgactggttgacgctatttgtgggtcttggtttgaataggaggcaatttgattctctccctactagcatcaagaaatcacatcatacacagtacagtggtacatgccgaggcccttccagttgtaggctggccccatttttcattcatgtgggaaaggaaaactgaataaactc

SEQ ID NO: 8984 - DNA, 240 bp, Homo sapiens; identical to SEQ ID NO: 8982

SEQ ID NO: 8985 - DNA, 435 bp, Homo sapiens; identical to SEQ ID NO: 8983

SEQ ID NO: 8986 - DNA, 606 bp, Homo sapiens; identical to SEQ ID NO: 8981

SEQ ID NO: 8987 - DNA, 296 bp, Homo sapiens
gccaggtgcggtggctcacgcctgtaatcccagcactttgggaggccgaggcgggcggatcacgaggtcaggagatcgagaccatcctggctaacaaggtgaaatctctactaaaaattcaaaaaattagccaggcgtggtggcgggcgcctgtagtcccagctactcgggaggctgaggcaggagaatggcgtgaacccgggaggcggagcttgcagtgagccaagatcgcgccactgcactccagcctgggcgacagagcgagacgccatctcaaaaaaaaaaaaaaaaaaaaa

SEQ ID NO: 8988 - DNA, 1525 bp, Homo sapiens
ctgcatatacatgaaaggacacacactggagataagccatatgagtgtaaggtatgtggcaaagccttcacttgttccagttccattcgatatcatgaaaggactcacactggagagaaaccctatgaatgtaagcactgtggtaaggcctttatttccaattacattcgatatcatgaaaggactcacactggagagaaaccctatcaatgcaagcaatgtggcaaagcctttattcgtgccagttcatgtcgagaacatgaaagaactcataccattaatagatgagaaatccttttagtggaagcaacgggagaagctttctgttgtcccacttcctttgaaacacaagaaaagagagtggtgaaagaacctctggataactgctttttgaattgagaagagagacttgcgataggacaataaaatctagaagaacttggatggtttcgtaatacaattcacctatagccaatcttgcatgagatttcaaaggcacagaaaaggaaggcatcagtcacatattagaggccccacacagggagagaggtgtgtggctacccgcttccagcccattttcctgattctttggcttgttaatcgagaatatcccccaaatcacttgtctctgttcctcagagttgtaggtctccagatatgtccccagtgctccacattaaagatacatgcccactttgctgtttcttcagaaatgttaaaatgtttaccagagaactaataaatgttgttatggctggaaatactcactgatgcccaactcttctatagattgagttggtttaagaggtctactttgtattgcaagcattgttgtttctacggattagcgagcctgttcttgattaaaccaactagatgggagcttgttcctctgctgcattgtgcagtgattggtctcaccaagggcttttatgtgagaagagccaccttgctcttatcaggaaatttcaagcatttgctgttattcacaactgaatgtaatgtctcacttcgtttttaactttgtatgagtatacctgactaaaaacactaatgcggtttcttggcaacaaatacttctgttcatgtattttagaaataagcttattaactgtttataacaactgcatactaacaattattattttttaatgaagaagctacattacaacctcccattaacatcatgtattagatcaagttgataatgttaccatgttatccggtggtcactgtgagtcagtgttgccatgtggatgtcaggcatatttttcctcatgtagattttacttttcatgcttatattcttagtttttatctggatcatgaattttcatctattctaaataccaaaggtgatctcatgttcttatgagtgacttctgaccaaagaccaccagtggcataagtgtcgtcaaagagggtgtaataatatactgtggtaatgaatatgaccaaaagccatagatgactgtgagatgtgtgagatattaaaagatagtcacatttcgtgagaagagaaaaa

SEQ ID NO: 8989 - DNA, 5421 bp, Homo sapiens
gatgtttcaggattcagtggcctttgaggatgtggctgtcagcttcacccaggaggagtgggctttgctggatccttcccagaagaatctctacagggatgtgatgcaggaaaccttcaagaacctgacctctgtaggtaagaatgacaatattacttcccagtgaattagagaacaaatgcttctagctcatcaatgctgttcattgatttggaacatggacaaaaaatactttgatgaataaatcaggcatggctaccatgtaccatgaatacagaatctaatgatttttaaataaattcatactaattctggatctgtgttttctccgggtctgtgttttaggaaaaacatggaaagttcagaacattgaagatgagtacaaaaatcccaggagaaatctaaggtaattttctctcgcaagacaaggcaatgcctctagaaaatcttaaaatgtgagaaaataggccgggtacagtggctcacgcctgtaatcccagcactttgggaggtcgaggtgggtgaatcccaaggtcaggagttcgagaccagcccggccaatatggtgaaaccctgtctctactaaaaatacaaaaaaattagctgggcgtggtggcacatgcctgtagtcccagctacttgggaggctgaggcaggagaattgcttgaatctgggaggcagagcttgcagtgagccgagatcgcaccactgcactccagcctgggtgacagagcgagactccgtctcaaaaaaaaaaaaaaaagtgagaaaatgttaaaaagaagcaaaagaaataagcccagtatcaaatttatgtattcatagaaagttttcctaaaaacatatgtttaaatgtaacatacgctgggctgggcactgttgcgcatacccccaaatgccagtcctttggggctttcagaccaaaggattgctggaggccaggagtttgaggctgcagtgagccatgttggtaccactacactccaatttggacaacagggtgagttgagaccccaactcaaaaaaaaagacgcacatgtttagtatttgtaaaatagtttacttgaaaataggattacaaagccccatagaaatactaattttaaaaaaatatatatacccagaccatcttgtagagcatatagtccattaatattcaaatgattcagacagagcagaaagctgacactttgccgggcagtgttaacaatgcaagtgcaatagttgttaatgatataaatcatgtttttttcttcttttttgagacaagagtctcgctgtgtcacccaggcgggagtggagtggtgtggttttagctcactgcaactgccactgcttgggttcgaggtattctcgtgccttagcatcccaagtagttgggattacaagcgcacgccgtcacacctagccaatttttgtatttttagtagagacagggtttcgccatgttggccaggctgatctcaaactcctggcctcaagccatctgcccgcctcaacctcccatggtgctgggattacaggcgtgacccaccatacccagccaatatagatcacttttttatttttttatttttttttgagacagagtttcgcccttgtcacccaggctagagcacaatggcgcaatctcagctcactgcaacctctgcctctggggttcaggcgattctcccaactcaggctcccgagtagctgggattacaggcacctgccaccacgcccagctaatttttgcatttttagtagagacggggtttcaccatgttggccaggatggtctcaaactcctgacctcaggtgatctgcccacctcagcctcccaaagtgctgggattacaggagtgagccactgtgcccggccctataagtcacttttaatcaaaccgttaataatgtgcttctcatttttcactgaagtcttatgagagagaaactctgtgaaagtaaagaaagtcatcactgtggagaaagcttcaaccagattgcagatgacatgctgaacaggaaaactcttcctggaataacaccatgtgaaagcagtgtgtgtggagaagttggcacgggtcattcatctcttaatacgcatatcagagctgacactggacacaagtcatctgagtatcaggaatatggagagaatccatatagaaataaggaatgtaagaaagccttcagttatcttgactcctttcaatcacatgataaagcttgcactaaagagaaaccctatgatggtaaagaatgtacagaaaccttcatttcccattcatgcattcaaagacacagggtaatgcacagtggagatggaccttataaatgtaagttttgtgggaaagccttctattttctcaatttatgtcttatccatgaacgaattcacactggtgtgaaaccatataagtgtaaacaatgtggtaaggcctttactcgttccactacccttccagtacatgaaagaactcacacaggagtgaatgccgatgaatgtaaagaatgtgggaatgcattcagttttcctagtgaaattcgtagacataaaaggtctcacactggagaaaaaccctatgagtgtaagcaatgtgggaaagtcttcatttctttcagttccattcagtatcataagatgactcacactggagagaaaccctatgaatgtaagcagtgtgggaaagcctttagatgtggctcacaccttcaaaagcatggaaggactcacactggagagaaaccctatgaatgtaggcaatgtggtaaagccttcagatgtacctcggaccttcaaaggcatgaaaagacacacactgaggataaaccctatggatgtaagcagtgtgggaaaggctttagatgtgcttcacaacttcaaattcatgaaaggacgcacagtggagagaaaccccatgaatgtaaggaatgtggaaaagtattcaagtatttttcttccttgcgtatacatgaaaggacgcacactggagagaagccccatgaatgtaagcaatgtggaaaagcattcaggtatttctcttccttgcatatacatgaaaggacacacactggagataagccatatgagtgtaaggtatgtggcaaagccttcacttgttccagttccattcgatatcatgaaaggactcacactggagagaaaccctatgaatgtaagcactgtggtaaggcctttatttccaattacattcgatatcatgaaaggactcacactggagagaaaccctatcaatgcaagcaatgtggcaaagcctttattcgtgccagttcatgtcgagaacatgaaagaactcataccattaatagatgagaaatccttttagtggaagcaacgggagaagctttctgttgtcccacttcctttgaaacacaagaaaagagagtggtgaaagaacctctggataactgctttttgaattgagaagagagacttgcgataggacaataaaatctagaagaacttggatggtttcgtaatacaattcacctatagccaatcttgcatgagatttcaaaggcacagaaaaggaaggcatcagtcacatattagaggccccacacagggagagaggtgtgtggctacccgcttccagcccattttcctgattctttggcttgttaatcgagaatatcccccaaatcacttgtctctgttcctcagagttgtaggtctccagatatgtccccagtgctccacattaaagatacatgcccactttgctgtttcttcagaaatgttaaaatgtttaccagagaactaataaatgttgttatggctggaaatactcactgatgcccaactcttctatagattgagttggtttaagaggtctactttgtattgcaagcattgttgtttctacggattagcgagcctgttcttgattaaaccaactagatgggagcttgttcctctgctgcattgtgcagtgattggtctcaccaagggcttttatgtgagaagagccaccttgctcttatcaggaaatttcaagcatttgctgttattcacaactgaatgtaatgtctcacttcgtttttaactttgtatgagtatacctgactaaaaacactaatgcagtttcttggcaacaaatacttctgttcatgtattttagaaataagcttattaactgtttataacaactgcatactaacaattattattttttaatgaagaagctacattacaacctcccattaacatcatgtattagatcaagttgataatgttaccatgttatccggtggtcactgtgagtcagtgttgccatgtggatgtcaggcatatttttcctcatgtagattttacttttcatgcttatattcttagtttttatctggatcatgaattttcatctattctaaataccaaaggtgatctcatgttcttatgagtgacttctgaccaaagaccaccagtggcataagtgtcgtcaaagagggtgtaataatatactgtggtaatgaatatgaccaaaagccatagatgactgtgagatgtgtgagatattaaaagatagtcacatttcgtgagaagagaaaaatttggggtatgtttgcaatttaaagtgttttcttctgtcacatttcaagacatggttaaagaatgaggtttttttttattttaatttttttttttttgagacggagtcttgctctgtcgcccaggctggagtgcagtgactcgatctcggctcattgcaagctccgcttcctggttcacgccattctcctgcctcaacctcccaagtaactgggactacaggtgcccgccaccgcgcctggctaattttttgtatttttagtagagacagggtttcaccatggtctcgatctcctgacttcgtgatccacccgcctcggcctcccaaagtgctgggattacaggcatgagccactgtgccctgccaagaattagttatttttgtattgatccatcatggtcactgaagagcatcatctcacattgcaggtgtatgacatgtgcctgttcaggggcaaaagactcggccttctggcgaggggaggccagccatcagacttctggaccagtttttaccatactattctctaaaccctgatatattccctacaatttatggacattgttaaccataacatacctcagttaaaatctataaattcacttcttatcaaggtatatactatgattttatttatttattttttgtagagatggagtctccctgtttcccaggctggtcattgactgctggatcatgtgattcttctgtctccatctccccaagttctgggattacagacatgagccaccacaattggctactacttttttaaaaaatcaccttgagtcctatggggccaatatgtttttgaaaactgaatttcctgcccagtaaagaacaaagtcagcatcactattccaa

SEQ ID NO: 8990 - DNA, 316 bp, Homo sapiens
tgctgggattataggcatgagccactgcgcctggcctatttattttattattatttttttgagatggagtattgctttgtcgcccaggccggagtgcagtgacgcgatctcggcccactgtaacctctacctcctgggttcaagtaattctcctacctcagcctcccgagtagctgggactacaggcacccaccaccacgcctggctgatttttatatttttagtagggacgggtttctccatgttggccaggctggtctcaaactcctgacctcaagtgatctgcctgcctcagcctcccaaagtgctgggatta

SEQ ID NO: 8991 - DNA, 851 bp, Homo sapiens
ccacagggtttctctttgccttctctcattctatatttgtgtttccttcaactacagtgagcattctggctcctagcaacattcatatatttcctcatttgcatggtcccacaatatatacaaaatactttcagaattgatacacgcatgcaatgaaagaaaataacctacaaagtagttaaattttttttgcattgtttgtttgtaaacagaagttatttagtcaaagtactgtgttcaagagttattctgacccccttcagagcagttatattatttatttgaaatcagttttgcctacttttgagtttcatattattattcttaaagatttacttatgttgtgaatatcaatatttccccccactgctgtaaagcagcagtccccaacctttttggcactaggggccggtttcctggaagaggtggggatgggatggtttcgggatgaaactgttccacctcagatcaccaggcattagttagagtctcataaggattgcgcagcctagatccctcccacgcggagttcacaatagggtttgtgctcatatgagaatctaatgccaccgctgatctgacaggaggcggagctcagatggtaatgtgagcgatgggaagcagccgtaaatacagatgaagcttcgctcccttgcctgctgcttacctcctgctgtgtggcctggttcctaacaggccgtggaattttaccagtctgcagcctaggggttggggacccctgctgtaaagtattctgaatgaactacactgtatccattatactgatgatgaatatttgtgttatttcatatttttattatgaataaaactgctatgaacatgcttgtaca

SEQ ID NO: 8992 - DNA, 851 bp, Homo sapiens; identical to SEQ ID NO: 8991

SEQ ID NO: 8993 - DNA, 1834 bp, Homo sapiens
ttgctgggttagagggtttatttaggaaaggagtggtaaaatgtgtgttaaacagtaatgagactttgataactgtgacaactttaattaaaaaaaaaatcagatcatgcccatgcatgtacggtgggtcatgcctgttatcccagaactttgagaggccgagggaggagggtcgcttgaagccaggagttcaagcagtctggacaacatgatgagatcctgttcctacaagaagtaaaaaaaaaaattggccaggcatagtggtgtgtacctgtagtcctcgctactcaggaagctaaggcagaagggtcgcttgagcccaggaattcgaggttatagtgagctaggttcacaccactgcactccagcctgggcaatagagcaagaccctgtctctaaaaacaaaaacagatcagatcatgatattatggtgagaagaaagcttaaagtcattggttgctaagactccaggctgaggcgaaaaggactaaactaagatgatagcagctggaaataagtcagacttgagaaccattgagaaggcaggattaacaggatctggagacagcctaaatataagggtgggagagagataaggaaaagagttagaactgtcacttgagagtttgagcctttgtgacagggacactctgtatcaaaagaggagagtatcagaggaggaggaggcagtatgtgtagtgagttagcttacaggctttggaccaaagcagacctgggaccagtgacttaactgctctgagcgggtttgctggcctgctatgtagggagacagattcccacttctcagagtggctgtgaagatgggaggtattgcaggtaaagtgaaattctataatgtcacatgcttgacatccaggcacttaaccaaactttagctctcttcttctcaccccaacttctctggaagatagcagaacctagttcaagatcatttttttcacaggcatacatacaatgtgcttttttttaaaatgtatatataacatatacacatatatatgaaataaaatacaaattcaagcccacagagagagttaaagatatcttagtaaggctaggttcttccagaagcaaacagccgtgctgcctctctggtgtcgccatggccttccccagttgggaccatttctgagcttagaggtggaactctggtggctcactggattgcagtgtgcctgtaaaacgtgcccagcttccaagcactgcgtttctaatagtttggaaattctggttgtcaccccagagatacacggatggaaaccgggtttgggcagagctctagcaaaggcggcaccgagacgcccattccctcgccctgttaacccaggcggcgcaggctgcccagccagctggggctgccattctggagctgcttctggtacgcttctcccaccctggcggctgtgcccgccaagggctcgcagtgcggcacagagcataacccagtaccgtaccaacctaaaccccgttactccccttccaccctggccatcatgtgtttccgcacgtacgcctcgttgccatagcacctgaaggcgcccgggctcattggcacccggcgagaaccaatcagcaggcctcgctgtccatctggcaccctgggtggcctttgggctgcggctggctacccctctctggtagaggaaagcggcccctggctggtggcgtggggctggcctcgcctcacttcctctccttggcgtacctgaccctgagttctggtccgcaacccggtgttcgtttcccaccccactcttccgcgccccgatttccccgtttagaatgttcaacaatctggcggcgttctgtcgcc

SEQ ID NO: 8994 - DNA, 1810 bp, Homo sapiens
ttgctgggttagagggtttatttaggaaaggagtggtaaaatgtgtgttaaacagtaatgagactttgataactgtgacaactttaattaaaaaaaaaatcagatcatgcccatgcatgtacggtgggtcatgcctgttatcccagaactttgagaggccgagggaggagggtcgcttgaagccaggagttcaagcagtctggacaacatgatgagatcctgttcctacaagaagtaaaaaaaaaaattggccaggcatagtggtgtgtacctgtagtcctcgctactcaggaagctaaggcagaagggtcgcttgagcccaggaattcgaggttatagtgagctaggttcacaccactgcactccagcctgggcaatagagcaagaccctgtctctaaaaacaaaaacagatcagatcatgatattatggtgagaagaaagcttaaagtcattggttgctaagactccaggctgaggcgaaaaggactaaactaagatgatagcagctggaaataagtcagacttgagaaccattgagaaggcaggattaacaggatctggagacagcctaaatataagggtgggagagagataaggaaaagagttagaactgtcacttgagagtttgagcctttgtgacagggacactctgtatcaaaagaggagagtatcagaggaggaggaggcagtatgtgtagtgagttagcttacaggctttggaccaaagcagacctgggaccagtgacttaactgctctgagcgggtttgctggcctgctatgtagggagacagattcccacttctcagagtggctgtgaagatgggaggtattgcaggtaaagtgaaattctataatgtcacatgcttgacatccaggcacttaaccaaactttagctctcttcttctcaccccaacttctctggaagatagcagaacctagttcaagctcatttttttcacaggcatacatacaatgtgctttttttaaaaatgtatatataacatatacacatatatatgaaataaaatacaaattcaagcccacagagagagttaaagatatcttagtaaggctaggttcttccagaagcaaacagccgtgctgcctctctggtgtcgccatggccttccccagttgggaccatttctgagcttagaggtggaactctggtggctcactggattgcagtgtgcctgtaaaacgtgcccagcttccaagcactgcgtttctaatagtttggaaattctggttgtcaccccagagatacacggatggaaaccgggtttgggcagagctctagcaaaggcggcaccgagacgcccattccctcgccctgttaacccaggcggcgcaggctgcccagccagctggggctgccattctggagctgcttctggtacgcttctcccaccctggcggctgtgcccgccaagggctcgcagtgcggcacagagcataacccagtaccgtaccaacctaaaccccgttactccccttccaccctggccatcatgtgtttccgcacgtacgcctcgttgccatagcacctgaaggcgcccgggctcattggcacccggcgagaaccaatcagcaggcctcgctgtccatctggcaccctgggtggcctttgggctgcggctggctacccctctctggtagaggaaagcggcccctggctggtggcgtggggctggcctcgcctcacttcctctccttggcgtacctgaccctgagttctggtccgcaacccggtgttcgtttcccaccccactcttccgcgccccgatttccccgtttagaatgttca

SEQ ID NO: 8995 - DNA, 10812 bp, Homo sapiens
aggttttccctatgagaaggtggtgcagaggatcctctacctccaagtcctggactatgaccgcttcagccgcaacgaccccattggggaggtgtccatcccccttaacaaggtggacctgacccagatgcagaccttctggaaggatctgaagccatgcagcgatgggagtgtaaggccccatgggtgggtcttagctggacaggcagcagggcagggctgggagatctggtcccagacccttgtcaaccttaggaaggccaggagggctgtgggagagggtgcagatgggtggacccgatggagctcagccctcgctagcagtcagaacattggtgcttggcacttggggggactcacccgatctgtaagaaggaacctagggctatgttcagggaacagggaggcgatggtgaccctgggaggggcagtacacacacctgccagatggggggagacagagtgagacagaggtgacagacaggggcatgggtaagcaccaaggtcagggtagaggggacctgggggcagctaggccaatcagagagctctgctagcctagttccccacacccctcctgtcgtgcctcccaggggagccgaggggagctgctcttgtctctctgctacaacccctctgccaactccatcatcgtgaacatcatcaaagcccggaacctcaaagccatggacatcgggggcacatcaggtacggggcttctccagcagaggatgggcgggccggggaggtgctggtgacacaaggtttacaccggatgtggagagcagggtctgcagtggtcctcaccccaacccgccacaccccgacctccagtcctcactccttaccctagagaccctggggcccccctttggagcaccctcatctcggactctgttcaagaatcaagatgtcagcatcatcctggattatgttcttccaagaatcagaaagagggaacattgtgggaagacctgggttctatccccagctctgatgctacttgtctgagattttgggcaagacctggcctctctggggctcagtttcctcattggtagtaataggagggccccaggtgatcgctaaggtccatctgctgattctcccaggtccctcttgttcttgcctgggtctttccttgcctctggggaaagcacacggccctcctgcctcagcttccattcctggaaggggaaaaggatcctaggaagtccctcccccacggtccctctaacccttccccactccctcccctagacccctacgtgaaggtatggctgatgtacaaggacaagcgggtggagaagaagaagacggtgacgatgaagaggaacctgaaccccatcttcaatgagtccttcgccttcgatatccccacggagaagctgagggagacgaccatcatcatcactgtcatggacaaggacaagctcagccgcaatgacgtcatcggcaaggtaggggcgaggcaggtggtgtggtgcacctgctggcaccagtgaggctccgttccttaaaagaagcagcgggggtagtggacgggcacaggctggacaccaggagagattgggatcagtctcctctcctctcaggcctctgtttcttcatccaaaaataaggggatgagatgaccccctccctagggttcctctctgagtgtcctcctatgggtaagtcagctcaggacagactgccagctgagcagggagaaaaggagtgcaagagaggaatggcctggatctcaaaagaaaggtttactggacaggatgatgacgttggagcagtattgcccggggtcccatctgcacagggtgagctgcgtggggcagtgttgggagctgcagtcagactccaaagacctcgtttcagttcccactccatctgccgataaacaaccatatcaccttgggcaagtggctcggcctctccaagctttagtgttctcatctgtaaaatggagcaactaatactgtccctgtagaactttacagggtggcgtaagaattgcttgaggtatgtggatgttcttcttgtagaaagttggccgggcacagtggctcatgcctgtaatcccagcactttgggaggccaagacgggtggatcatctgcggtcgggagtttgagaccagcctggccaacatggtgaaaccccgtctctactaaaaatagaaaaattagccgggcatggtggcgggtgcctgtaatcccagctactcaggaggctgtgacaggagaatcccttgtacccaggaggcagaggttgtagtgagccaagattgcaagactgcactccagcctgcgcaacagagaaaactctgcctgaaaaaaaaaaaaaaaaaaaaagtgatctcttcatatcacgtaaccaaaaaattcatacctgaccttgagttttcccaggacgggattctgtgacataaacccttccatgcttctaccttaaaatgtctactcctgtgtttatttatggtttagtgttgagagcatgggctcgggagtcagattgcctgggtccaaatcctagcgttactttttaacgctgtaacctctctgagcctcattttctcctctcaaaatgagagtgggatggtcctacccttacaatgtgctgagaggattaagtaagatcacacaggtgagctgtttagcataggacttggaacatatgttagctagtatgataataaaggggcatgtatatccattcaggcaggacagtttgaccaggagtatgtgaggaaccagtgctcagggcagtcatggaggaaggggagatgccaggagtgagtgaggggcacatacctgggcattatcctgtgtgggggaaagggaaagggggactggatacccacagggaagggagctgagttggaggcaaccctcagacagatgggaatggagaactcacctgctggggtgagggaagcagcctggcctaaaagaggagagcttcccctgcttgccatcaggtatggcacggggagtatgactggccaatctgtggtcacaggtgagacaactccccaggacattgccactcatactccagaaaaagtatgtggccctccctggccagggctcgggtcttgccaagcaccccgtttgaccagctcagcccaaaggccaagtgaccatatctcctttgatgttcttttgaagcttcgcctcttggtgtcggatattccttagataccaattagagctccttctgaaacaggcctaccttctgttggctgaaccaaagcaaatgtggatttgttctcactttggcctggtaacttacggagcccaaggatctctgaatccttctgactcccagctcctgctcagcccctggaagccaagagtctgccccttgtctgcctggcatcatccaaggctatcagtatcatgctgggctgaggttgccatgggggcaatcccagagcagggcaggcccacagtggccctagagctccgtgacctccgaatagttaaccagctccagcaggatggagccgctggctgagagaactcaccacacagaggcaggccactgttcccagctgagcacatgacatgcaccatcccagctatctgtgaggcaggtacagtcatcagcccgctttacagaggaaggtctggggctaaaagaagttccaccatgtgttacagagctggagcttgctccccatccttttcgttttgtttcgttttgttttgttttttgagatagagtctcactctgtcacccgggctggagtacagtggcacaatcttggctcactgcaacctctgcctcctgggttcaagcgattctcctgcctcagcctcccaagtagctgggattacaggcatctgccaccatgctgggataatttttgtatttttagtagagatggggtttcaccatgttggccaggctggttgaactcctgacctcaagcaatccgcccgccttggcctcctaaaatgctgggattataggcaggagccaccgtgcctgacctccctatcttttttttttttagacagagtctcactgtagtccaggctggagtgcagtggcacaatcatggctgactgcagcctcgacctccccaggctcatgtgatcctcccacctcagtccccaagtggctgggactccaggcacgtaccaccatgcccagctaatttttttgtattttttgtaaagatgaggtttcaccatattacccaatctggtctcaaactcctgggctcaagtgattctcccactttggcctcctacagtgctgggattacgggcgtcagccactgtactcctccactgaggccacaaccatcctttttaaaaaaaaaaaaaaatacactgtttattggctgggcgtggtggctcacacctttaatcccagcactttgggaggccaaggcgggcagatcacgaggtcaggagtgtgagaccagtttgcccagatcacgaggtcaggagtgtgagaccagtttgcccagatcacgaggtcaggagtgtgagaccagtttgcccaacatagtgaaacccatctctactaaaaatacaaaaattagccgggcgtggtggcgggcgcctgtaatcccagctactcgggaggctgaggcaggaaaatcacatgaacctgggaggcggaggttgcagtgagtcgagatcgtgccattacactctagcctgggcgacaagagtgagactcggtctcaaaaacaaacaaacaaacaaacaaaaacactatttttgaataattttagatttacagaaaagtggcaaagatagtagagagagttcccatctaccccttacgcagcctccccagttgttagcgtctcacatttgatgggacattcgtcacagcttgaggaaccaacatgggcactgcgttgctgtgaactagactccggccgttatttgtatttcaccagtctttccgttaatgtcctccttctgtcccagcatccaatccaggacaccacattgcatttaataggcatgtctcccctgtcccctctggcccttgacagtttctcagtctttcccattctctatgatcttaacggtcttaaggaatactggccgggtgtcctatagaaggccccatgtacctgttttttctccaatgctcatactcttaatcacccccaagtcccaaagctgaggtcagctgggccaatcctgggggttccggagggattcatgcatgcagccgggtgaggctgcgaagcaggattaggccggtagcatagagctccaaagacctggatttcaatccctctgcaccacttataaaccctgtgactgtgggtaagtctcttaactcttcgtaccttagtttccccatctgaaaaatggagataatcatataatcctacctcacagttgtaggatttgatgatctatgtgtatgaagtccctagctcagtactcacatgtagcaagtgcccaggagttgggaatgattataattcaggggggctggacatcacccaacagatagggcagggaaggccatggagacaagctgcctccaaccccaccttccagaccccactgcaaaataggttggcagtctaattccgagaggcctggcgtgcccaggcttgggggtgtgggggtagacaaccaggaaaatagatcaggctgactgggggagggaggagagcgcctctgtggggtaggttgtcacagcatgtggaggctggggggccacaggctagggtatcatggtggagttggggtgtcaccctgtgggggaaagggccagtgccctggagcctgtgccgatgccatcgtctcccctttctccccagatctacctgtcctggaagagcgggccaggggaggtgaagcactggaaggacatgattgcccgtccccggcagcccgtggcccagtggcaccagctgaaggcctgagtggggccaagggaggcccaggggccgagggcccaggtccccatcatgccctcaccactttatgcacaacgcccggcctgagccccctgccatagggaggggaggaccctgagggctcagccagggaggggtcccaggactcaactgggccccgtttctaggaagtaccagccccatcccccacagtccagctccggggaaggggctctgggaggcattttcctgctttgccccttttcttcctgacttactaatactaaagaagttgggggagctcgagagccagacggccagacaggcagacccctccagaggcccgccaggtgggcatggtcccccattttctttaaggcagcacctggagtggagagaggccactccctctccagcccccgatgtggacccggggaggggaggctgaggcgtttggccccggcctggccaggagaggcccatccccagggcagtttcaggtgccggctgggccctgaatgtcgaggatagtatatagcccgctcctgggtcctggagctgtggccctttgtactcgtgttgtgtccattgtgtgtgtgcgtggggacagaggcctggaaatgcggaggactatacagagaaggcaggttttgtgaaggccaggcagggttggaggccgggggtgtgagaggagaggcccatagggctgagtggggtcgggtgaggcagaggtcagaaacagaagagctgcagttgctggagctgggctgagaactgggctgcctcctgccatccccccgtctcctccccttctccccttggtgcccccctctgctcagaatctgaagtagttccctcctcagcaatttcatctcttgaacactgactcacaccttttaggcacctactgtgtgcatagcattccaccaggactcatctcccttccttctcagggggtcccgagccccgactagctttgccctaactccttcatcaaaagaccccccgccagcttcccacacctcatacgcagccacatctgccctattctccatgctttccagcttgcctgcccttcctcatctctccctgcctgtgcagacctccacccttctttcctccacccctccatcccccaatgcttgtagaccttccattcattccgtctcatcgtgcgtggtctctgatcgtccatcacctgaccttctccaggactgtcttctcacccttccccactccctggtccccgggagcagctccttctgcccgactcactcacagtgcagggaaaggaggcagggaaaagaccaggattctgtgagttctgaggttgccacacacaaagaagctgtggtttctctgcctcggccactgatgagactaaaactggcttccccttggagacggcagatttcaggctgatccctgcttaagccctctcatccccacgctggtcctggtattgatacaagacccagctggtgacaaagcctccaatcctgggggtccacgagcctgggcctgacattcccagaactaccgccagtggcgccaggcccccacagtctgtggccgtggtcttagcccccagttccactctggatgggcctgtgacaccccaaagagaagaaggggactctggatagggtccccacatccagggcgtggggagaccattggcatttgggaaccattttccttcgaacggcttccccttgagctgagcattctgcttgctgcagtagacgggtcgccttttgcccataccgaaattttctgaaattaaatcgcacacccccaccatttcctctccctgggatctggaggaacatcatacatagtaggtgaatcgttttgtagagtgaagaatgctaatgtaaagcaaatagtcacccacgttccttgtaaatccaaatgtttctatattgtagctttgcttaaaatggggtcggccccaactgcatcctcctctttggcgggctggggagcggcccccagccgggacgggagggcagcgaccccgaggcctcgtggacgtgggagagagtgtggtgggaagtcttgagcggaggaggggatctgcccttctccactcctctcttggatccgcctcggtttcctgtccccccaccacccgcctgccccgcggaagaccgcccagtgagccagcccccaccttccaggcgccttcgccctggggatccaaccaacttgtatcgagtgggcggggcaacggctccccatttttcccgagccccgcccacagagctcttagccaatcctatgcagagagcatctcctggcaggggtctcttcccaaccagaccccacccaggcacattagcgaccaggcttgggcttccccagcgccccaccaccaccacgtgcaggtggagctctgggatgctatgttggggcggcaagcggtgggccgagggccgggtaggctagcacgggaggtaagggtggtatgggatggggcgggggcggtctagggcaataggagagcagagaatgggggaacttgagggtggggggagggcaccggagccttgccaccatcccaggactttgggcaagtcacccgcactccctgggcctcggtttccccatctgtaaaatgatggtaataatacttcacctacctcataggggaggttgtgaggccaccatcacctgacctgggggtcaaggcaggaggactccgaaggtgctacccgtgagcaaagtgtaattaccgaatcctgactgcaaggcccacctgcccctcccccacagagcctccagagctagctgaggccaacgcaggcccatccgtctcttcactctgtcgcaggccctttcatgggcttcgtctgccatctttgtgggtgccctagacttagtccttatcttgtcctggtttcctttcttgtgaccatctccccatgaaagtgctgtacaaattccacccgccccaggacccccgcacctgccctctggcaccagatgccagggaagggacagaggaaaacagccacaaacaagccaggggggctccccggagcagagggtggggattggtggccactgtttgtatgttcttgagtgcaagtgttttataaaaaataaaacaaaaacccaccatcacaaaaaaaaaaattttgcagcgaagagaaatgaagaaaaactgaagaaaaaaaaaaaacaggaaaaaaagaaccatacaaaatttttccaccacacataccctctaagccagcaagatttcctctttgcaaaatcatatttttgtgggaatgggccctgctttttgtggcaaggcctgttctgattaataaaggatcgtgaaaaagtagggccttggctgtttcctccgtgggtcccagccctccctcacctccctgggggcagaggcagtggggtgaaggggatgggggcccggggctgagcctcccctcagtgtgtcacctttgggatttgacttcactggtgaccaggcccttcccgagtgtccagccatcctcagatctctatagaatatgatcccactggcttcccagaaagcagagaggcagctacatctcccagatcaggcctgacacaaggctttttgggagtagagtcctctctaggcctcaggggtgccctccagggtcacccagcctgacgtcccctccctcagttcccagaggacacttgccaccctccaaggcagctcagacaaaccaaagggggacgctccagctttcccaccaccatccatggggccactgtagtttcaggccagcgcctccttcctggtccctgaggtgggaaaaggaaagacaatgagctctgtgtctgttggctggacctgcggcttctctcagccctcttctagtttcattctttaggattagaaaagtctcttccactcaatagaacaggttccagcctgaggtgtgggaagctgggttgtaatcccttctgcagcctctgtggccctgggcaagctctttccttccacctgtttcttctggccacaacaaagcaataaccatccccatcccctgccctttcttccccacccagcccaggggaagctgagcccccgcagctctcagggtacttcagaaggaaggtgctacatctggttcagacacaggcacaaaaggaacgagcacatccccattgtcatgtgtccacctgctggcccctgcccccaccaggagtgaagcgggccatcccatccgccctctgctcccagcacttggggccagcagctgcctcccggagctgcactaagtaccccatccaaagctgtctgtccctcatttcccacaacctggtttagatatcacttctgatctctgttccagagatcagaggaagccccggggtcaggtaagtagcctcaggggctcccttggccagagcttctgttcaggcgctctccatgaaagcagccctggaaaactgagcctgaagtcagagacagctcaggcccagcacagggggcagtcccttgccactggctcgggcccttccctggactttttgccttcctccatttttgcttctctgggtctgtcttcgtccatgcctgctctgagatgctcccccacccctccctgtacctgggaccaccgccctctggtgttttctttctcctgtgagtccccccctggatactgctgctttctggaaggctgtcctgggttacgtcctgcgctcctctccctcccacgcaaagacaaccagaaggacaagccttgagcacgccgatgccccagctcgtggctccccagaccatctgtttcccgtgaagacgccccgctccccgtgtctgtgtcctgcgtgtatgtgtcgtgtcttgtgtagattgtgagcccctgggcagggatccctgtctgcatacatgttccatgtggcacgcccaggtgtgctaataaacgttcatcttcagaacaa

SEQ ID NO: 8996 - DNA, 440 bp, Homo sapiens
atcagatctaaataaacccaattccttgggccaggtgcagtggctcacgcctgtaattccggcactttgggaggccgagacaggcagatcacctgaggtcaggagttcgagaccagcctggccaacatggtgaaaccccgtctctactaaaaatacaaaaaaatcagccgggcgtggtggtgcacacctgtaatcccagctactcaggagactgagacaggagaactgcttgaacctgggaaactgaggttgcagtgagccaagatcatgctgctgcattccagcctgggcaacagagagagactccatcttggaaaataaaataaaagtaaagtaaataaataaataaacccaactcttcgtgtacagacgaagaagctaaggcccaggggggtcgtgacttgctcaagatcacttggtcaatagcagaaccaggcctg

SEQ ID NO: 8997 - DNA, 377 bp, Homo sapiens
aaacatcctgaactctaagttgtaggcagtaactgggcaaaactttaagttgtttacagagggaagagaagtgaatttttcatatataaagaagtgtgcaaattgtatttcatgagtagtcttttgtcttctggaatggtgatatatacaaagtaatctgggaagatacaatttggtaatagtagatccttcgttaacttgaattattttttgcaggaaagatgcgtctttagccaaaattacttatggtaaactgttatgtaagcaagaaatcaccttctacttggtttaagctattcagtgtactctctagatagatatgacacaaagctagcattatgatacagtaaaccaagtgttaatgtaactttatgttg

SEQ ID NO: 8998 - DNA, 348 bp, Homo sapiens
aaacatcctgaactctaagttgtaggcagtaactgggcaaaactttaagttgtttacagagggaagagaagtgaatttttcatatataaagaagtgtgcaaattgtatttcatgagtagtcttttgtcttctggaatggtgatatatacaaagtaatctgggaagatacaatttggtaatagtagatccttcgttaacttgaattattttttgcaggaaagatgcgtctttagccaaaattacttatggtaaactgttatgtaagcaagaaatcaccttctacttggtttaagctattcagtgtactctctagatagatatgacacaaagctagcattatgatacagt

SEQ ID NO: 8999 - DNA, 377 bp, Homo sapiens; identical to SEQ ID NO: 8997

SEQ ID NO: 9000 - DNA, 348 bp, Homo sapiens
aaacatcctgaactctaagttgtaggcagtaactgggcaaaactttaagttgtttacagagtgaagagaagtgaatttttcacatataaagaagtgtgcaaattgtatttcatgagtagtcttttgtcttctggaatggtgatatatacaaagtaatctgggaagatacaatttgataatagtagatccttcattaacttgaattatgttttgcaggaaagatgcttctttagccaaaattacttatggtaaactgatatgtaagcaagaaatcaccttctacttggtttaagccattcagtgtactctctagatagatatgacacaaagctagcattataatacagt

SEQ ID NO: 9001 - DNA, 350 bp, Homo sapiens
aaacatcctgaactcttaagttgtaggcagtaactgggcaaaactttaagttgtttacacagtgaagagaagtgaatttttcatatataaagaagtgtgcaaattgtatttcatgagtagtcttttgtcttctggaatggtgatatatacaaagtaatctgggaagatacaatttggtaatagtagatccttcattaacttgaattattttttgcaggaaagatgcgtctttagccaaaattacttaacggtaaactgatatgtaagcaagaaatcaccttctacttggtttaagctattcagtgtactctctagatagatatgacacaaagctagcattataatacagt

SEQ ID NO: 9002 - DNA, 627 bp, Homo sapiens
cattttatgcctgatattcctgcattctgtgggaggttattctttgcattgtaggatattaatagtatctttaggctataccaccacataccagtagcatcaccacctaatcattataattcaaaatgtctccagacactgacaagtgttctatggaaacaaagtcattccttgttggaaaccacttgtaaacaaaaagtctagtaatggtggaattatacagtgacagaaaagctcaggtttttctgattaggttgaaaaagctgctcagaaattaaatcctactgtgttcataaaaaacaaggaacccagccctgaagcaaagaactcatcagggaagttgttttctctttcaagtctatgatttcaaatgaccttaaagtggtcatctttacagtcagagaagcatatgtgtgttggggaggagaaaaaagaaggaaatgaggcagactttagaattatacctaggaaagaactgtatgtttggttataaactagatccaataaataaataaatggtttccacataactacttggcaaaggtacaataagcctattgtgagaaaaaaaaattaaggcttaaaatatcctcaagcatcccaaattgcactaatcagtgcaattga

SEQ ID NO: 9003 - DNA, 573 bp, Homo sapiens
cattttatgcctgatattcctgcattctgtgggaggttattctttgcattgtaggatattaatagtatctttaggctataccaccacataccagtagcatcaccacctaatcattataattcaaaatgtctccagacactgacaagtgttctatggaaacaaagtcattccttgttggaaaccacttgtaaacaaaaagtctagtaatggtggaattatacagtgacagaaaagctcaggtttttctgattaggttgaaaaagctgctcagaaattaaatcctactgtgttcataaaaaacaaggaacccagccctgaagcaaagaactcatcagggaagttgttttctctttcaagtctatgatttcaaatgaccttaaagtggtcatctttacagtcagagaagcatatgtgtgttggggaggagaaaaaagaaggaaatgaggcagactttagaattatacctaggaaagaactgtatgtttggttataaactagatccaataaataaataaatggtttccacataactacttggcaaaggtacaataagcctattgtgagaaaaaaaaa

SEQ ID NO: 9004 - DNA, 572 bp, Homo sapiens
cattttatgcctgatattcctgcattctgtgggaggttattctttgcattgtaggatattaatagtatctctaggctataccaccacataccagtagcatcaccacctattcattataattcaaaatgtctccagacagtgacaagtgttctatggaaacaaaatcattccttgttggaaaccacttgtaaacaaaaggtctagtaatggtggaattatacagtgacagaaaagctcaggtttttctgattaggttgaaaaagctgctcagaaattaaatcctactgtgttcataaaaaacaaggaacccagccctgaagcaaagaactaatcagggaagttgttttctctttcacgtccatgatctcaaatgaccttaaagtggtcatctttacagtcagagaagcatatgtgtgttggggaggagaaaaaacaaggaaatgaggcagactttagaattatacctaggaaagaactgtatgtttggttatcaactagatccaataaataaataaatgttttccacgtaactacttggtaaaggtataataagcctattgtgagaaaaaaaa

SEQ ID NO: 9005 - DNA, 572 bp, Homo sapiens
cattttatgcctgatattcctgcattctgtgggaggttattctttgcattgtaggatattaatagtatctctaggctataccaccacataccagtagcatcaccacctaatcattataattcaaaatgtctccagacactgacaagtgttctgtggaaacaaaatcattccttgttggaaaccacttgtgaacaaaaagtctagtaatggtggaattatccagtgacagaaaagctcaggtttttctgattaggttgaaaaagctgctcagaaattaaatcctactgtgttcataaaaaacaaggaacccagccctgaagcaaagaactaatcagggaagttgttttctctttcaagtctatgatttcaaatgaccttaaagtggtcatctttacagtcagagaagcatatgtgtgttggggaggagaaaaaagaaggaaatgaggcagactttagaattatacctaggaaagaactgtatgtttggttataaactagatgcaataaataaataaatgttttccacataactactgggcaaaggtataataagcctattgtgagaaaaaaaa

SEQ ID NO: 9006 - DNA, 1299 bp, Homo sapiens
agaagatggaaccaagtgaggaaagtcctccgatgctagctccctgatgttaggccttcagatgctaggccctttcatgctgagcctccagatgctatgccctcccatgccatgccccaaagttattcattaggctgtgggaactatggaaagttgccagttccccatctctggtgataagagtcgcccctctttctggtactgtgtgggcgccttctcaatgggaaatttatgccctccttttaggcagataggcagataaggggagggcagagaactcttcctgcatctgttggttctctgttgccctcatctcaaaataatctttatgccaacgtggcataatttaggggtgacatattctgatccccttcactggggctggggaatatggaggatcaaattggcatctgctctccatctggtcatgaacagaattttaaaaggcatttctgcttcatcccttcctcatttccttccttccttcttcctttttctttctttctttttaaatgtttcatgctatagattggccctgcagatacttcagtttgccaccactattctacatttaagcttctgaacctcctataagtacagaatacatttttctcttggcatattttgactaataaaactgtgagatgttcaatgggcattgaattttgaagtcagtccaggagatgtacaaataatatccaaagtctgaaggcttaagctgtcatcacagagttactagaggacacttatctttgacatgatctgatatcagaaacgagtgtagacttgtagtcatttagaactcaaaagagatcttagagtcttctagatcagtggctcctaaaagctactcaagaatagggctcatgtttttaatggggaactttaagtggttgtttagacccccaccccaagatataaactgtggtggggcatgggcctgagaagcagagaatccttttcttttaagctgcccaggtgatgttaattcaaatccagtgataacagtgataagtaacacttagccaagtgtttcccatggctcttagcttcagagtgtgacccctatctaagtcaagtatcaaagatttttcttcatgccattactacagaaacagggtagaatactcatattccttcggctcaagagcagcagagagtttctgacaagtatttttgcatttggtaaaatggtagtctaagttggaactcagtaaactatttttgttttcaatgaggggaagtgtagaactgtagtactctcaaattattttttctcaaattggcctttgtgcaaaa

SEQ ID NO: 9007 - DNA, 370 bp, Homo sapiens
atgtaaaaaaaaatggtaacttattcagggttagtctcataaacgtagaagtcaacccaataggctagactttcaagtctagcttttaatgtttagaataggaatatacgtttttatatgaaccatgactgcagatagttatatgatattgaacaatattatgaaacgtcttttcacactctggaactttttgttattcactgatagggagagtgccaacaatttcacagaatcagtttttcctgcttttgtgtcttctgtatcttcacaaagattttttttccatgcaacagcaagttgatgtagaatgtacagaagaaagtttaataaatttcagggcatttgcagtactctttgaacaaatagtatt

SEQ ID NO: 9008 - DNA, 604 bp, Homo sapiens
gtaccatgatcgctaggctgaagtaatagtaagccaagctctcttcagcccttagcagtgtgggcccagaaacagggtggtcttatggaagggagcataggatgtgggtcctgaagagaaggtgttcactcctggccccatcactagttgcatcacttcatcttgcttggatttcatctgtaaaatgggataatgcctactccacaaagttgatgtgctttgaaatctttaatacaaacatttgttattggaaactaaatacaaacgaaccaaatggaaaactagatttttttcataaaaatgtttcgggatatatatcataggcctttgaacgtaaatatcttgaactttaaacaatcattagccattaaaattttaatgtgtattaaatggatattattagactgtcaaagtgattagcaataggtggtttcattgtagaataacctattttaaagtattttagggccaggtgcgtgggattacatgcctgtaatctcagcactttgggagtctgaggtgggaggattgtgtgagactagaagttgaagaccagcttgggcagcatagtgagactccatctctacaaaaaaaaaaaaaaaaa

SEQ ID NO: 9009 - DNA, 435 bp, Homo sapiens
gaccaatttttgctcctttgggggtgatatcaccctctttgtgaaggcatactgtaagttatttatctcatactagaattgttgggtcgtagaaaatatgcctcttctggaccatggacttaaatgtaaaacccaaaactattaaaaccctggaagacatccagacatcctggcccttacttctggacataggaacaggcaaaaatttcatgatgatgccaaaaacaattgcaacaaaagcaaaaattgacaaatgggatctaattaaactaaagagcttctgcacagcaaaagaaactatcagtaaatagataatctacagaatgggagaaaattttctcaaactatgcatctgacaaaggtctaatatccagcactacaaggaatttagacaaatttacaaggaaaaaaccccattaaaaagtgggcaaagga

SEQ ID NO: 9010 - DNA, 609 bp, Homo sapiens
attgtaaaaaacgccaatatgtacaaagcacaataaagcaaagcacaatagaacaggattgcctgtattagacatgctacaaacttcataactggaaacatctcaaagaccccatgaagctcatttgaatgggacttaacaattagacagttattttagaaattgagtgcagacctaaatacatagttttccaaaaagaaaattattgtctctgatatcttaaaacataaaaacccaaaattttatatagaagaaattgactctgtaaaacgcaatgaaatagtcctctttttaaacagtttaaaggaagcattttcaccgtttgtaaaaattatttttaaatatttagggcaaaatttttgttagataataatggaaaagcttgtgtgagtttagtggttaaaatatcttgtaattcatcattatttaagtgacttcttgggagccgtctttgtacctaaaatggagtttttttttaagcctccacagagatagtcacccaaagtatttccagtcagtaaaagtagaattcatagaaaaaactgaggcaaattaaaacaattccattaatcaaaatggctttaaacaaattaagtattagcataaaaa

SEQ ID NO: 9011 - DNA, 616 bp, Homo sapiens
ccttcaatttgtaaaaaacgccaatatgtacaaagcacaataaagcaaagcacaatagaacaggattgcctgtattagacatgctacaaacttcataactggaaacatctcaaagaccccatgaagctcatttgaatgggacttaacaattagacagttattttagaaattgagtgcagacctaaatacatagttttccaaaaagaaaattattgtctctgatatcttaaaacataaaaacccaaaattttatatagaagaaattgactctgtaaaacgcaatgaaatagtcctctttttaaacagtttaaaggaagcattttcaccgtttgtaaaaattatttttaaatatttagggcaaaatttttgttagataataatggaaaagcttgtgtgagtttagtggttaaaatatcttgtaattcatcattatttaagtgacttcttgggagccgtctttgtacctaaaatggagtttttttttaagcctccacagagatagtcacccaaagtatttccagtcagtaaaagtagaattcatagaaaaaactgaggcaaattaaaacaattccattaatcaaaatggctttaaacaaattaagtattagcataaaaa

SEQ ID NO: 9012 - DNA, 324 bp, Homo sapiens
ggccaggcgcagtggctcgcgcctgtaatcccagcactttgggaggccaaggcgggcggatcacgaggtcaggagatcgagaccatcctggctaacacggtgaaaccccgtctctactaaacaaaatgcaaaaaatcagccgggtgtggccgcgggcgcctgtagttccagctactcgggaggctgaggcaggagaatggcgtgagcctgggaggcggagcttgcagtgagccgagatcgtgccactgcactccagcctgggcgacagagcgagactccgtctcaaaaaaaaaaaaaagaaaaaaaaagaaattgggccatttt

SEQ ID NO: 9013 - DNA, 8195 bp, Homo sapiens
agagctgcaagaacattggcaaatcaaacactgccatttagtgcttgtactgttttgctggatgccgaagtatacaatgtaccattggactctcaggtaaaatgtttgttgatacatttagaagtaatggtctgaaaaaatgcaacttggctatttttagaatctatttccatagaaagaacttgaactcaacaatcattaaaggtcaaagaagaaaaaaaactctttcaagccagagtacttccagatcaactggtcctccattttctaaagcactgtaaacattaggtttctattataaaagcagatgatcacaaaacacctgtacatttaggatagtgcccttacaggtacacataatttgtttctaaagtgaatgtttatacctttagttctgaccttcaggcagctagaaagctattgtacactgaaaaatagtgcagctagatggcacctctaggttgtgacagtcctaaaaacagagcgagtcttctggtttgactttgaatgttggtggaatacatgaactgtggaagactggagaaatatcttcaataaagtttactgccacatataaattacatgaactcagaaccagtcatactagttttcagaatttgtttatggcttataaaccagaaaagaaagaatttaaagattaaaatttttataataaacagtgaaggattatcacctgaaaacagactaggaaatgctgttctaaaggaaataagctagtagtacaaaggataatagggtatatcacagaaaaatatttttagactcttctgagctttatttttctcatctataaaaaaatcaagattgaactagataggtaggtttcaaacttaaggcactgaatgggtgtggtggctcatgcctgtaatcccagcactttgggaggccaaagtgggcaatcacttgagctcaggagttcaagaccagcttgggaaacatggtgaaaccccgtctttacaaaaaatataaaaattaactgggtgtggtggggcacacatgtagtcccagctaccagggaggctgaggtaggaggatctgttgagcctggcaggccaaggctgcagtgagctggattgtaccactgcactcgagcctgggcaacagagtgggaccctgtctcaaaaaaaaacaaaaaaaaaactttaagtctccaacttttatttcaaatgaaagtgttcagagatatctgaggatgctattaacatgaataattgtgtctcttcagaaagaactgtgtgactaaagaaataggcactggagaggccactgagggactttctagaactttcatatttaaagatgtttaaagggaagaatggatggtttttaataactgcaattaacagtttaaccatgttcttataggctggactaaacagtggtatcttgagatctttttaagttttgagcaatcagagagaaatgagttttagagcaatataaattgaggtttataatcgagctacaatgaaaagtctcttgatttctagctcagaatggttgagtaaatatatacatacctgttgattccttctttctcccaaaactcattgaaatgacaaaagacataaaaatttcaaagcctggcatggtggcacatgcctgtagccccagctaccccaggtggctaaggtgggaggatcgattaagccaaggagttcgagcctgcagtgaggtatgattgcgcccgctgcactccagcctggatgacagagtgacaccctgtttctttttttttttttttttttttttttaagcagagtctggctctgtcgcccaggctggagtgcagtggcacgatctcggctcactgcaagctctgcctccctggttcatgccattctcctgcctcagcctcccgagtagctgggactacaggcgcccgccaccacacccggctaattttttgtatttttagtagagacggggtttcaccatgttagccaggatggtctcgatctcctgacctcgtgatccacccgcctcggcctcccaaagtgctaggattacaggcgtgagccaccgcgcccggccgacaccctgtttcttaaaagtaaagtaattaattaaattcattaaaaataaaaacaaattcatagcagagctggaaattgaggtgggaaactgttagacaaaaacattaagaaatttctgataagatttaaaatagatgaaaacatattggtaatcaaatacagcagagttgaggaatgcccagtatcatacaggttaaaaagagaatttaaaaaataaatgcgttttcctagaacagtataaattttcagttataaagggattttgataacttgagtaattcattttccctgccccagattttcttaatgatccagaccacctgactttagattaaattaagcttgctgagatccttttgtggatcataagcctgatgattgggttttcacactgtgtgagacaggcctctctcaaaccttgttgcattgtgcacacattacctgtctgacatgggggaagaaattcagcttgatgagataccaaaatgtgaggtgtattctcttgacagagagaaacttatgctaaaaacatttctgcatttttggtgacttatttaaatatggaactgttatccacccttttacagctggctttagagtagaaggtctcaagtagcatgcgttatttcctatgggagtagccttggaaggaactaaagggaaaaaagtctacttttctttgggtagaggctcagatcatccattagtctactctcttatcacttcttccttttcaaaataaacttgtttgagcacctgaaatgtggtaaagaaaaataaataaataaacttgtaatacttaagagtcaacaataacattttaaatagtcaaaacatctaacttggggcaccaatgaagaaattataactgctaaaaatgtgagtagtggccaggcacggtggcttacgcctgtattcccagcactttggaaggcagaggtgggcagatcacgaggtcaggagttcgagaccagcctggccaatatggtgaaaccacatctctagtaaaaatacaaaaattagccaggtgtggtggcgggtgcctgtaatcccagctacctgggaggctgaggcgggagaatcgcctgaacctgggaggtggagattgcagagagtcaagattccagcctgggtaacagagagagactccatctcaaaaaaaaaaaagaaaatgtgagtgtgggagctacctgctgcctggatgtcagtttgacagcactggtagtggtagtaatggagtgagtgctgcattgagtgcttcctgtgtacctaagcattatgatgagggctttatagacacttttcattctcaaaacaagctgaagagaggttaccacattttacagagtataagactgaaactgtataattagttcaagatcacgtagtaagatacagagctggaatttgaatatagtctgttaattccaaaactggtattcttaagtgttgataaagaatttcttcatgagaaagaatttcttcatgagcaccgcagatattggtcctggaagaaattttggcctcaaaggcagctctctcccacctggatactttttgtccctacagatagtaaactgtaacattaaaattaaatctgtaattggttatacagtaataatgtcacgggcacagtacttaatgtaacatgcctttttgagaaatgtctttgacttagagcaataggaatctattttaattaataattaaacctaccatcccaagaattctaataaccaatctgtctacacaatgtggaaataaaagttttaccaacttcagcagtattcaatttatatatttctcaaaatatattttcatcgttactaagaaagcagcatataccataaaaatactataatggcatatagattttaaagtgatttattgtattttataatactcacttttctcttttagtctgatgacagtaaaacttctgtgagggatcgctttaatgcaagacaattcatgtcttggttacaagatgtggatgataaatttgacaaattaaaggtatgtatgtttggaagtcagtttaaatgaatgcttcccccttcttaaaaaaaaaaaaaactctacagctgtattagggagaaataattaggaggggaaatactggttagtcatgaatcctcacactgggccacaattggaaagataaagaccacaagtccattttaaggactagttgtagtatgaaagaggaaactgccacagaaaatgcagtttctagtgtgggtcttcatgcttactatccaatgtacctgtctggttatagcttgaacataacgaaagaataggagaatggtaagaaaaggaatatagttttcaaatctataaattatttgatttgagattttgaatcatttcagaagtctttcccccctagattttcatgtttcttttgataatttgaaatctcataatttgaaataatattttcaaattaaaatctataacagcagtcccaacctttttggcaccagggaccagtttcgtggaagacaatttttccatgggttggggtgggaggatggtttggggatgaaactttcacctcagatcatcagacattagattctcataaggagcatgcaacctagaaccctcgcatgtgcagttcacaatagggtttgagctgctatgagaatctaatgccgttgctgatctaacaggaggctgagctcaggtggtaatgcttgcttgccgccactcacctcctgcggtgtggcccagttctgaacaggccatggatcggtaccagtccgtgacccgggggttggggacccgtgctgtataaggtgaaaatgaagttgcagacccacaaatagttggtatgtgtgtacaaacaggataaaacagaaatggacttgtaggccgggtgtggcagttcacacgtgtaatcccagaactttggaaggcctacgtgagcagatcacctgaggtcaggagttcaaaaccagcccggccgacatggtgaaaccccatctctaagaaaaatacaaaaattagctgggcgtggtggcacatgcctgtagtctcagctacttgggaggctgaagcaggagactcgcttgaacccaggaggcggaggttgcagtgagcccagagctcgccactgcactccagcctgggagacagagcaagactctgtctcaaaaaaaaaagaaagaaatggacttgtaattcaaatgctttttatgctcctgatgtgtccattttagttcctaaagaaactggatgagattaatttttaaacaaagcaaagttaacagaataatcaagtaactcttctcttcttttaaatagacctgtcttttaatgaggcaacaacatgaagctgcggctttaaatgctgtccagaggttagaatggcagctcaaactccaggaacttgatcctgccacctataaatctatcagcatttacgaaatccaggagttttatgttccccttgttgatgttaacgacgactttgaattgactcctatatagcagtcagtacttcctgatggtattgtcctaaactggtgatgctcaagcattatactgtggaatactgccttttgacaaaaatactcatgcctttacaattgttagtaaagttcgattatagttggttatgtagtaaacactgtcattttataaaaaatgagaattattttggatcttagatccaaacacagtttctaatagaaaactattatttatattgggaaaggtaactattgcattagagcatgttggcagactggtaggtatttaaaaagttgagaatctgctaacagcgctggaagttgttagcgctctaagtaataagataaccactagtattcaaatctctttcaggttttattaaaaaatatatatcaataaactaaaaggttcaattcctaccaaatagtttctaatgtgggagaaaaacttggcacaaaatttcttcagtttattatctgtaaattgtacagttttctttttgaaagttttaatattgtcttcctttttaataacttattttatacatattgtgcagatgtaaatcttgtaattaatggtcaaactgtataaagggattggtagtcaaaacatgtacaaagaaatacctgtaaaactgttttgtctcatgttttattggaccaaagttgtggtttgtatggagtgtagtagtagtgtgtacaggtagaaaacttttaaatacagcatgcaggtgtttcagttagcttgttttcatcaccataactgcaaagatgtggcttagttgtattgcatgcttcctataatttaactctccataattgatgcctgcagtagtgtaaggcatttcatactagtctcctctagtagacctgtgacttactgtgttggacatattatttagacttagtcatacaaagaaacttagctcttttttcatctcacagtaaagcctatttccccaggaaaaaaataaatgcctttgaatgaaaattctgaaattgtaaatgtctattttaatattcacctatgaaagaatctgtgaatatatgtaaatacgtttaataaattttattggtcatgttaaatcattgtaaaacttttttacattgcttaatgttttaagcttaatagcctttgcacttttaaaataaaaaccaagtatgcaaatcaaagatatttggtagtcaaaataagtaaaagaaatataggaatattccagtcaatctctgaaatgtttatgaaaaacaggttaatatgttgtatttttttccttgtatcaagatgcaaaacataatttgcaaaattttataattgaaataaaacttggtatgctgttttataataaattagcaatatactttaaaaaaaatccagtttctcctataacatgatgtaaattaaatattcaggaatatttcaggtctgaaatctgctgctgaacttgttagacatttttgaaaggaaaattaggttagcgtacaatttatcataaatatatgaggtaaaatttgcaaaactttccacagtactttcttgaattataatactgaatgttttctgttccgatagagaaaagtgaagcaaatatgtgaggaatgaagtgatctagtgcaagttggtaattccagctaatgggagagaatgtaaatgtgcaaaggtacatattaagcttagggatttttgaatttttacgtcagtttatattttaattcttactgtacttggcatgcgcaataaagcagcacatgtaaaaaaaaaatacacagtgcaaggactttattataaaggttggatgtagttttccttagaaatttaggtgagagattttggccttttttattggataaattgggccagaaaggcagggtagatttcgaagcactggttctgttgaagttaagtttattaagcctgggaacattaaaagctaatttataaaagcaatactttttaatatgaaaacttactgcaaagtttgtttatacttttgcctaaaaaggaaattggatgggatactgtggcaaatcataaaaaaccagataattgaactttgaagttatagaaaatcagagaggggtaagtttatagggcattttgttctgatggttcaaccagaggtctgggaaatagcactgttggcccaaacagaacaggcttttagaagataaaagcgacaagaaggaatctggtgaattttagtcatcccagctttttagtcttaaccacagttctcactctcttaaatggtacctcaaaaagctggagcctctctgccatgattatgcttctacaaatttcttttataaagagactcaaagctaatgatagcttaaaagaaaagttaatgccttctcattggaaatgtataatcaaataagtagttaagggcttttggtattaaagatattctgaagctctgaaatgctagaaaaaaatttggaatggagtatatgcctgaaaaggttttggattcagaaagaaaaaggatggttagtttaatcagtgattctttttaaactcttcaaatatcatgaacaagatactaaattgtacctaaggatttgtatttctttacaatttgttctaaatatctgtttaatgactagttgatatttgtgcatgttatttaataaagagttatatttttatagaaaaaaa

SEQ ID NO: 9014 - DNA, 314 bp, Homo sapiens
ggccaggcgcagtggctcgcgcctgtaatcccagcactttgggaggccaaggcgggcggatcacgaggtcaggagatcgagaccatcctggctaacacggtgaaaccccgtctctactaaacaaaatgcaaaaaatcagccgggtgtggccgcgggcgcctgtagttccagctactcgggaggctgaggcaggagaatggcgtgagcctgggaggcggagcttgcagtgagccgagatcgtgccactgcactccagcctgggcgacagagcgagactccgtctcaaaaaaaaaaaaaaagaaagaaaagaaaat

SEQ ID NO: 9015 - DNA, 2540 bp, Homo sapiens
aagggggtcactttccctctcaccgagttaaatctggctctgttatattttttccaggaacacagtatgtctcttcccaatgttttattcggtttctggtttccccacttttgaccggaagtatgtgggaagaatactggctgttattattatgattattgagtgtccaatactctcctccaatatttccaccaagaattattatcgctgctctcctcattcatgttagtgttgctttgtgtgctttagatgacaatcgtcctctttactctccaagtttggagggtgagggttttttgttgtggtggtggtggttgggttcttctttgtttttgtttttttgtttttcctgttcggggtaatgaaatgagaactggaagagaggatatcatttcgaggcccagctgagaaggatcccaatgcgaaaaatttacacacttcaaagagcagaaaggtggaagcgagtggtgcttggacacaaggatgccactgttcttatctcctccaatttgggaagtgcccagcctagaaaggtgagggtcccatctgggagaccatggagtacccccagggtcacactgagcctaagaacttcaaccatcctgcaggtcaaaacccactgataggtctcccaaaatgtttggggtagggggaagaaacatagggcattccaggtctgtaaccctgcaagagagagactcaaactaatatgtctaggtctggggtgaaggtggggggcctgtctggatacctcctccctcaattgaagggctcgttggaaacataggaacccactgctctctgggactctggaaagacaaattttctttggcaaacggaacagtgtcgcgctgtcgacagagcagactatttttcttgttccctcacaaggtgggggtggggggaaagaaaaggaagcaagaaagaaagggaaattaaatccacacgtgttaagctcgctcaaagggccagagtcaaaaccagagatgaaacttcgactccagttctggctgcccgcgggcctctttccaaccagccaggcctcacagagcaaggcatccccactggagagaattcgatctgatgtttcataaagcgctttatttaaggagaaggggcatgggtctgtctccaagtctgtgctgcagaaatccagaatttgtagcggcaaagaaaacaaaggagataacaattgtaatcataatgaccctctttatgaaaactcatcttgatgtcctccaaatcaaaacaacaattcaggcaatattcaagcaatggccaaaatcatccaggccattaaatcatccaggccattgttttacaaaattcctaaggtctgatcaggctttcggacttgggcctagctgggtcaagagaacctgaaatgctgttgtcaagagactctgaaatcaccagtttaatcaggacagctaatctctacatccttgaggcctctcttttggggagagactttcttgagagaggacactacaggactcagctacagagctctgctatacatgggtgggagtggaggccgccaccccacctggaactgtgagtgaaaactctagtaatgatcttgaggaggtgaagggaggtaggtgggggtgtgggtgatgagggaggccaaaccccaatctggaaggatctgtcactgaaacaattgcttggtcgagacctctaatttttcttcctctccagccagtctcctgtggctccctggtgctgggtttctggcctttggtgacatcctaacagaagggtccggaagcagggaccccagacaccttgctccctctcccaaatcacacccaaaacatactggggtgaaacaactgacagagggtctctgtggtgagcaactgactgaagtttccagtggaaaagttcctgacgattgtttccgcagggaccttgaatttcctggtcaccatggcgacctggaagtcccaccgaatgctctcaacaatggggtaccccgaggacattcgtgcaattggctgcgcagtctgaggcctgaaaagcgtttctgccaatcgttcttgactttctggagcctccttagtgggttcaacggagcagggatttttaaaactgcccccttttttaaacaggggagaaaattgagatttagtaccaggtgggttcaggtcctgagcaaaagccccatctttgaattcagaatgctgaccccagggccgatcgtgtagagcctatggtgtatcttaatcgaaacccgtggcccaaacatctcagccaggaacctgggactttaggtgtcacttaatctcttcacacctgttaactacacctatctgcataggaggctccccacatcagtccaggcaacttttttctttgcctggggccatttcttctaaatggaaggagaaaagtctgagcattagaaattgtggcattaatgtctgcaagggctaatggagtgaaaagaatacattattctccttttcttcttagaaaaaaatttcaattgtggatgtaatagaaataccattaaaataatatttctgattgca

SEQ ID NO: 9016 - DNA, 2540 bp, Homo sapiens
aagggggtcactttccctctcaccgagttaaatctggctctgttatattttttccaggaacacagtatgtctcttcccaatgttttattcggtttctggtttccccacttttgaccggaagtatgtgggaagaatactggctgttattattatgattattgagtgtccaatactctcctccaatatttccaccaagaattattatcgctgctctcctcattcatgttagtgttgctttgtgtgctttagatgacaatcgtcctctttactctccaagtttggagggtgagggttttttgttgtggtggtggtggttgggttcttctttgtttttgtttttttgtttttcctgttcggggtaatgaaatgagaactggaagagaggatatcatttcgaggcccagctgagaaggatcccaatgcgaaaaatttacacacttcaaagagcagaaaggtggaagcgagtggtgcttggacacaaggatgccactgttcttatctcctccaatttgggaagtgcccagcctagaaaggtgagggtcccatctgggagaccatggagtacccccagggtcacactgagcctaagaacttcaaccatcctgcaggtcaaaacccactgataggtctcccaaaatgtttggggtagggggaagaaacatagggcattccaggtctgtaaccctgcaagagagagactcaaactaatatgtctaggtctggggtgaaggtggggggcctgtctggatacctcctccctcaattgaagggctcgttggaaacataggaacccactgctctctgggactctggaaagacaaattttctttggcaaacggaacagtgtcgcgctgtcgacagagcagactatttttcttgttccctcacaaggtgggggtggggggaaagaaaaggaagcaagaaagaaagggaaattaaatccacacgtgttaagctcgctcaaagggccagagtcaaaaccagagatgaaacttcgactccagttctggctgcccgcgggcctctttccaaccagccaggcctcacagagcaaggcatccccactggagagaattcgatctgatgtttcataaagcactttatttaaggagaaggggcatgggtctgtctccaagtctgtgctgcagaaatccagaatttgtagcggcaaagaaaacaaaggagataacaattgtaatcataatgaccctctttatgaaaactcatcttgatgtcctccaaatcaaaacaacaattcaggcaatattcaagcaatggccaaaatcatccaggccattaaatcatccaggccattgttttacaaaattcctaaggtctgatcaggctttcggacttgggcctagctgggtcaagagaacctgaaatgctgttgtcaagagactctgaaatcaccagtttaatcaggacagctaatctctacatccttgaggcctctcttttggggagagactttcttgagagaggacactacaggactcagctacagagctctgctatacatgggtgggagtggaggccgccaccccacctggaactgtgagtgaaaactctagtaatgatcttgaggaggtgaagggaggtaggtgggggtgtgggtgatgagggaggccaaaccccaatctggaaggatctgtcactgaaacaattgcttggtcgagacctctaatttttcttcctctccagccagtctcctgtggctccctggtgctgggtttctggcctttggtgacatcctaacagaagggtctggaagcagggaccccagacaccttgctccctctcccaaatcacacccaaaacatactggggtgaaacaactgacagagggtctctgtggtgagcaactgactgaagtttccagtggaaaagttcctgacgattgtttccgcagggaccttgaatttcctggtcaccatggcgacctggaagtcccaccgaatgctctcaacaatggggtaccccgaggacattcgtgtaattggctgcgcagtctgaggcctgaaaagcgtttctgccaatcgttcttgactttctggagcctccttagtgggttcaacggagcagggatttttaaaactgcccccttttttaaacaggggagaaaattgagatttagtaccaggtgggttcaggtcctgagcaaaagccccatctttgaattcagaatgctgaccccagggccgatcgtgtagagcctatggtgtatcttaatcgaaacccgtggcccaaacatctcagccaggaacctgggactttaggtgtcacttaatctcttcacacctgttaactacacctatctgcataggaggctccccacatcagtccaggcaacttttttctttgcctggggccatttcttctaaatggaaggagaaaagtctgagcattagaaattgtggcattaatgtctgcaagggctaatggagtgaaaagaatacattattctccttttcttcttagaaaaaaatttcaattgtggatgtaatagaaataccattaaaataatatttctgattgca

SEQ ID NO: 9017 - DNA, 2009 bp, Homo sapiens
gttccggacgtcttggccccgggaataaataaagacataaaccaacccggctttctccggaggaatgagggtgatgaacataagacacaaatagagccaagatcgactttcttaggaagggggagaggagggaactcttcacgaagggaggtgggagtccacctcagacctctattggaaggaaatcgagttgttccgggggactgaggtctcttgcataaggcatgggatccttattattattattattatttttaaatcccccgcggaggagctctgggcaaatgaataccgaggcgccgctctagctggttaggcttgggatgcgataactcagtgccctcttgcagacttgcatagaaataattactgggttgtcgtggaggggacacgagacagagggagttctccgtaatgtgccttgcggagagaaaggtccaagaatgcaattcgtcccagagtggcccggcaggggcggggtgcgagtgggtggtggagtaggggtgggagtggagagaggtggtttctgtagagaataattattgtaccagggcccgccgaggcacgaggcactctattttgttttgtaatcacgacgactattatttttagtctgatcaatgggcacaatttctaagcagcgcagtggtggatgctcgcaaacttttgcgcaccgctggaaacccactaggttgagttgcaaaacgtaccgcgtagacgcccctggtggcgccgagagaagagctaggcctgcccagcacagagccggagagcgtcgggccttccggaagggtaagttctccgccaaggggtcccgagggagctggacgtctgaatctggacttgcccccagcttcggggttcgattctgggttttgcgcgtccccaacccccagggctttccgaagcatggcctggctccaggcccggtcctgtaaggactggaacggcagcaaaatgtgcagggaggcagtcggccggcagagctgcggcgggagccaaggtcaggcccgcggggagagcgggcagcttccagcgccggccacaagctcccaggccagctgggccgcagacccctttgcttccagagagcacaacccgcgtcctttctctcagccaggctgcagtggctgccccgagcttcgctttcgtttcccaagctgttaataacgatatgtccccaaatccgaggctcgtgtttgctcccagatgccaagaacgcaacccgaaatccttctcccaaaccctaggtcgacgagatgagttcctacttgacctctgagccgaggtgggccggaaaccgaggcctaggccccgccggggctgcaaggaaaaggggaaactccgagcgtagcgtcttttccttgtggttcctttctccggcatcccggactgcgggccctgcagccacctggaccggcattcaaaggattctgcaagtccagcttcacagactggctttcccagacgctccgaagcccgcaccacgaacagaataaaggagagacgagagatcgcaactagatttgagaatcctcgttcttttccccaatcgttcgggcagtaaactccggagccggctacagcgcgcatcctcccttcctcctttcggagaactgtcgctttcccgaagctgctcccagctgggttttctcccgaagtttatttttctcattttgcaaaattcctgccctgattttaatactgcaacaggacagcagaggttcctctttaaaaagtcaaaacccaaaccaaaggggcccattgctgttgataatttttttcttcaccttctccttccgtttttaagaaagacacttccaaaactacccattgttttcctctcaaaagagaactcgctttaaaatgcatccctttctatttctctccggatatgtccccacctgacccggtggcaacttgtggggcgtgggggtagtgaaaaatagaagtgtggacggggctgggaaaatgaataagaattataacaatagaaatgatgacaaaac

SEQ ID NO: 9018 - DNA, 277 bp, Homo sapiens
tgcagggtttggcagcgatgcaggcagcaaggagagaaagggtgacagagagaaggcgtccaggcctcaggtgccgacagaggtctttggcggtgggacgggagctactcctcctctgggtcctctctcagctttgttccattctgctgccaaccccatctttctcctgactgctcaggaaagacaaaatttaacttctctccccctgtttccaacaggacatctaatgtccctcaaagctgctggctggctctgtagtgcctccacccattccttt

SEQ ID NO: 9019 - DNA, 277 bp, Homo sapiens; identical to SEQ ID NO: 9018

SEQ ID NO: 9020 - DNA, 2009 bp, Homo sapiens; identical to SEQ ID NO: 9017

SEQ ID NO: 9021 - DNA, 799 bp, Homo sapiens
aaaaaaaaaaaaaaaaaagcccagcatggtttgactggatagacacgcataatttattatgaatataaatttccatgtttgtttctgttcctaaaccagagtacggggtccctgggaatttaagtagctacgcattatctattattagactgcaagttcctgcaataactgcttagttcacagccccgtttcaccagtggagttctgggcagttattgctgtcctaaggcattactgtcgtttgcttactctatacttgtgtggtcacagtcttcttgtaattaccatctacaccagcatttcaggtatagctctttataactctggagacatgtaaaacatgtttaacacccacgagttttgaaagttgcattccttattagagtaggaactctctagcccaactccattctatgttctcagctccctccaccccccaaaatacatcagactagcaaggcagtcctatgtttacaaaacgagtttagattgtcatttcattccataactcttaataatactcaagttttatacattcacgtattttaaatgctcggtctgtagaagacactaggagaattgcattccaattactggatggttgctgctctggctttttagaacttgaaattaatttttatttagagcaaaggaggaaatcttttaagaggctaaaatcatgctgctattattgctgtgaaattgtataaagattaggattcatgccagtttttattttaaaaaataatgtgcattttaagggtttatatttagaaaaaaataaaatgtttcaagaaca

SEQ ID NO: 9022 - DNA, 5338 bp, Homo sapiens
aatataggattaaataattcccacaaggtaagaaggggaagatatcagtgagatgaaatatactattaccaaaggtatgtcacttttcagcagggtgtgttgttatctttgagtcagacacaacaattacttttaagccctgtggctggtttccatgagatagttcccatttgaggttggagtctgccattaccttgatgctggcttttccccaggaaaggagtagctcctagatgactatagcttaactgtacctgctcccttttcttcctaaagtgtctcggtagtttattccagtaacacaaagagatcaggatcaaatgagacaaagtgggctttacggttgtgggttgctttttcttatttttttccaactccatcactgactcattgtgactttgggcaagtcatttacctaccctctgccaattattcacagttacacaatgaaaatacttcattctcaaaacattcgtaagactgtctgccttgcagactttttggaagtataagagattatagtgccttgggattttttgttactttcctagcattcaccagcagtttgtcccatagtcaggtgcctgtttcaatgagagaatgtagtatgcagaatgctaaggtttcttcctgaatttcctcatattttaagaaagtgccacaggttgtttttcttctatatggtcaccttgaactattaataggacttaagattttagaccttagtggaggatgctgtgtttactgcttctcaaggatagcatgttttcagtatgaggattatctttggccagactaaggtggaatcaaaggtaggagagaggcagtagcttctgatttgaatattgcctttccctatgtttgaagccctaaaactgctaactgtgtacaactgtgaatttcaaaagtctccccagatgatagaattaactcttaatttaacaagatgtcctttgtgttgagactgagctagactaatagaccgggtatgtatttttaagctctacagcattacttgactaaacctctcttttggtttgtatattaaaattatgccataggcaacctcatctcgcatttaaaacctctcataaattagaaaactttgaatggttctccaaagataatactgggtgttgtacaaaatagcagcacaagccttcttttcctagaaatgggtacagattcattgcaaccacatggcttgggaaagttcaagctgctacccaaccagccttaatttgtgagttacaaatttaatagtacttgattcatagagggaacaaaaaatagacccatagtattatcatctttcaataggttcaaggagtagttccagttccagagaggccacctgaacctcgagccatggatgaccctgcgtctgccttcatcagtgacagtggtgctgctgctgctcagtgtcccatggctacagctgtccagccaggcctgcctgagaaagtgcgggacggtgcccgggtcccgctgctgcacctgcgcgccgagtctgtccctgcgcatccctgtggctttcctgcaccactgccccccaccaggatgatggagagtaagatgattgctgccatacactccagcagtgcagatgccaccagcagttcaaattatcattcctttgtcactgcttcatccacctctgtggacgatgcattgcctttaccacttcctgtcccacaacctaagcatgcttctcagaaaacagtttactcctcctttgctaggcccgatgtcaccactgaaccctttggtccagataactgtttgcatttcaatatgactccaaactgccagtaccgtccccagagtgtacctccccatcacaataaattggagcagcaccaagtgtatggtgccaggtcagagccaccagcctccatgggtcttcgttataacacatatgtggccccaggaagaaacgcatctggacaccactccaagccatgcagccgggtcgagtatgtgtcttctttgagctcctctgtcaggaatacctgttaccccgaagacattccaccgtaccctaccatccggagagtgcagtctctccatgctccgccgtcttccatgattcgctctgttcccatttcacggacagaagttcccccagatgatgagccagcctactgcccaagacctctgtaccaatataagccatatcagtcctcccaggcccgctcagattatcatgtcactcagcttcagccttactttgagaatggccgggtccactacaggtatagcccatattccagttcttctagttcctattacagtccagatggggccctgtgtgatgtggatgcctatggcacagtccagttgagaccccttcaccgccttcccaatcgagactttgctttctacaatcctaggctgcaaggaaagagcttgtacagttatgctggtttggctccacgtccccgggccaacgtgactggctatttctctcccaacgaccataatgtagtcagcatgcctccggctgctgatgtgaagcacacctacacctcatgggatcttgaggacatggaaaaataccgcatgcagtccatccggagagagagccgtgctcggcagaaggtgaaagggcctgtcatgtcccaatatgataacatgaccccggcggtgcaggacgacttgggtgggatctatgtcatccatctgcgtagtaaatcagatcctgggaaaactggacttctctcagtggcagaaggaaaggagagccgccatgcagccaaggccatcagtcccgagggagaggaccgcttctataggaggcatcccgaggcagagatggacagagcccaccatcacggaggccatggtagcacgcagccggagaagccatccctgcctcagaagcagagcagcctgaggagcaggaagcttcctgacatgggctgcagtcttcctgagcacagggcacaccaagaagcaagccataggcagttctgtgagtcaaagaatgggcccccttatccccagggagctggccagttagattatgggtccaaagggattccagacacttctgagccagtcagctaccacaactctggagtaaaatatgctgcatccgggcaagaatctttaagactgaaccacaaagaggtaaggctctccaaagagatggagcgaccctgggttaggcagccttctgccccagagaaacactccagagactgctacaaggaggaagaacacctcactcagtcaatcgtcccaccccctaaaccagagaggagtcatagcctcaaactccatcatacccagaacgtggagagggaccccagtgtgctgtaccagtaccaaccacacggcaagcgccagagcagtgtgactgttgtgtcccagtatgataacctggaagattaccactccctgcctcagcaccagcgaggagtctttggagggggcggcatggggacgtatgtgccccctggctttccccatccacagagcaggacctatgctacagcgttgggtcaaggggccttcctgcccgcagagttgtccttgcagcatcctgaaacacagatccatgcagaatgagccctgcgagcaatagagttgaagcagcctctgctggacagtggactgttctatttttttcaataaccaaaaagattaaacaaaaaatactataaaacccctgaccacatttaaaaaatgataataaaagtaaacaaatcagcatctttttccccttccctgcttcattaccccctcttccatctatagactttgtcatttttgtctttagaaaagatctgaaggatggtaaagccccgtgctgaaacccagtagagaaacctgtctcaggacacacttgccatctagggctagcttgaaagagcctgaggactgcctttaactgaatttgaattcagcattgtcctttcttcttagtatttgctgcataattgagagcagttcacatcgatttcctggtaggcgtctgcattccctgttgtgttcctgcttctccttcagtagctgcacaacttgcgcagatcgacacactgttgtcacttcattctccccgtctgagaaggatcttgtgttcagttagagtcgtggaaaaatccctgatccttcaaggtcagtcagacagttggcaacattataattaaaaataagaaattaagactttaaattaaacatttggtagagtcatcataaaacaccagaccacttagactcaggctgaaccatactctttctattcttatttttcatccttgttcctcacggttcagtgaacaggctcatatcatgacagaatggacttttaaaagttagtacttaaggaaacttctttaggtggaagaaagtaaagttcttattgtcagtgaactttattagcaccagaaatctctattgatgcttttaatgcattgcctgccttcaggttttcttcttaccccacccctcaataagatttggtgaattgtaattctagtaaaacatgtcataccattggttttcctaaattatcaactttctttcattaaaaaaaaaaaaaaaaaaaaaggcccactggggttgggggggttaaacacgcataatttattatgaatataaatttcccatgtttgtttctgtgtcctaaaccagagtacgaggtccctgggaatttaagtagctacgcattatctattattagactgcaagttcctgcaataactgcttagttcacagccccgtttcaccagtggagttctgggcagttattgctgtcctaaggcattactgtcgtttgcttactctatacttgtgtggtcacagtcttcttgtaattaccatctacaccagcatttcaggtatagctctttataactctggagacatgtaaaacatgtttaacacccacgagttttgaaagttgcattccttattagagtaggaactctctagcccaactccattctatgttctcagctccctccaccccccaaaatacatcagactagcaaggcagtcctatgtttacaaaacgagtttagattgtcatttcattccataactcttaataatactcaagttttatacattcacgtattttaaatgctcggtctgtagaagacactaggagaattgcattccaattactggatggttgctgctctggctttttagaacttgaaattaatttttatttagagcaaaggaggaaatcttttaagaggctaaaatcatgctgctattattgctgtgaaattgtataaagattaggattcatgccagtttttattttaaaaaataatgtgcattttaagggtttatatttagaaaaaaataaaatgtttcaagaaca

SEQ ID NO: 9023 - DNA, 1848 bp, Homo sapiens
gagtatgacctttggtgaatatgtggcactaattttttttaccttaatcatattcttgtcaagtaggcaacccattgccccttggagaccacaccagccctgtaagttctcaccagcagcatggagattaggaagaggggctgctgtgaccaggagatacacacggctttaagtaactgagagcctaaagaaagtaacccagggagtccggtccagttttaatatttgtggatttgttgtcacacacattgtttagtcctgaaactaaaacctattttataaatagtagggttaattcctcgaaacaatttctttattaataaatgtcctgtgggtttagaaatatcaggtaaatatttgaatacagaatgatgattgcaattactgttacaagcgtgaaacacaaacttcagatcaaatctagagttgcttcatttaatgcatgctagcaacagccttaactttggattcagttatttgaaacacttttccggcatctttccctttctaatgttgtggggtggaaaccggatggcaaatcactgtgagccggatacctcagcacagtccaccttgtgtgtgacttcacaaatgggggacttcacaaatggggtaactgaatgttattactttcaaattttgacatggagcattatgatcaaggaaatggagctgccttatacattaaacccgtgatttaatcctattgacattttcatagccatgcctccagattttatctttttggcaaaattctgattccacagtttggtctgattgaaataaatattccctggacgtctggctaaaaattttgctaacaatcccagaggtgccattttcttattaataaatttcattggagccttatttcttactatattcaatttcgtttcaaacctgcaagtcctgggatggtcccacgactagggcctgcacatttcttacaatggcaaagcattttttaaaatttagggtcaggttgaaaaattctaggactaattctgtagagaggagggactgttaactaacgtgagtggggacagaggagtaggttaccacatttggagcagtaatagatgcaaacgatgtaaatttgaaatttgcccctttagttaaagaaggagcctgcaaagtccatttctctgttttcagccctgtcagtcacccatttaggatgttggcaaagtactgcttgagcagaatgtgtaagaaagtaataatgaaagcaaaagtatgtcagacagttacttcttccacatggttagaggcatgtgattttcagcactgtgtgttacagaaatgtcaggaatggtgtattataacgtgtgcaagataatgtcagtgtgcacagagggtcttttttccttatctgattagtactgttaatgttcaaagaataaaaatggttttacagtttagattctgagatagcaaaacctgatttttcaaccatgacctgcatgagagaagcatcctaggaagtcttagatcatacttttgagtttttaattttaatttatatagtgtttttttatgtcttaatatttttgtgaactggtgtaaattgttaatgcatataagcttgtgtatttttgtaaatagttttgtgatttatttcttgccccatatgtaaatatttagagtctcatttcttgcaaacttatttgaagctgagttgtgggtttgggttttgtttgtttctttggttgcagggtggggtggggggtggcagcggagggaaggaagggatccttgtacctggagatggagatatcttgtggtttaagcaaatgtcccactgaaagtgattcaaatatcaacagaattatttcaggttaaaacaga

SEQ ID NO: 9024 - DNA, 384 bp, Homo sapiens
tttatctggggacccagaaaaggccagaattacttcagttcccttagactcagagaagtctgatgatcatgtaagtttccctgaagaccagtctgggaagaacagtatgccaactgtctccttcttggatcaggaccagtctccaccccgtttctacagtggagatcagcctccttcttatcttggtgcaagtgtggataaactccatcaccctttagaatttgcagacaaatctcccacacctcctaatttacctagcgataaaatctaccctccttctgggtcccccgaagagaataccagcacagccaccatgacttacatgacaactactccagcaacagcccaaatgagcaccaaggaagccagctgggatgtggctga

SEQ ID NO: 9025 - DNA, 1849 bp, Homo sapiens
gagtatgacctttggtgaatatgtggcactaattttttttaccttaatcatattcttgtcaagtaggcaacccattgccccttggagaccacaccagccctgtaagttctcaccagcagcatggagattaggaagaggggctgctgtgaccaggagatacacacggctttaagtaactgagagcctaaagaaagtaacccagggagtccggtccagttttaatatttgtggatttgttgtcacacacattgtttagtcctgaaactaaaacctattttataaatagtagggttaattcctcgaaacaatttctttattaataaatgtcctgtgggtttagaaatatcaggtaaatatttgaatacagaatgatgattgcaattactgttacaagcgtgaaacacaaacttcagatcaaatctagagttgcttcatttaatgcatgctagcaacagccttaactttggattcagttatttgaaacacttttccggcatctttccctttctaatgttgtggggtggaaaccggatggcaaatcactgtgagccggatacctcagcacagtccaccttgtgtgtgacttcacaaatgggggacttcacaaatggggtaactgaatgttattactttcaaattttgacatggagcattatgatcaaggaaatggagctgccttatacattaaacccgtgatttaatcctattgacattttcatagccatgcctccagattttatctttttggcaaaattctgattccacagtttggtctgattgaaataaatattccctggacgtctggctaaaaattttgctaacaatcccagaggtgccattttcttattaataaatttcattggagccttatttcttactatattcaatttcgtttcaaacctgcaagtccctgggatggtcccacgactagggcctgcacatttcttacaatggcaaagcattttttaaaatttagggtcaggttgaaaaattctaggactaattctgtagagaggagggactgttaactaacgtgagtggggacggaggagtaggttaccacatttggagcagtaatagatgcaaacgatgtaaatttgaaatttgcccctttagttaaagaaggagcctgcaaagtccatttctctgttttcagccctgtcagtcacccatttaggatgttggcaaagtactgcttgagcagaatgtgtaagaaagtaataatgaaagcaaaagtatgtcagacagttacttcttccacatggttagaggcatgtgattttcagcactgtgtgttacagaaatgtcaggaatggtgtattataacgtgtgcaagataatgtcagtgtgcacagagggtcttttttccttatctgattagtactgttaatgttcaaagaataaaaatggttttacagtttagattctgagatagcaaaacctgatttttcaaccatgacctgcatgagagaagcatcctaggaagtcttagatcatacttttgagtttttaattttaatttatatagtgtttttttatgtcttaatatttttgtgaactggtgtaaattgttaatgcatataagcttgtgtatttttgtaaatagttttgtgatttatttcttgccccatatgtaaatatttagagtctcatttcttgcaaacttatttgaagctgagttgtgggtttgggttttgtttgtttctttggttgcagggtggggtggggggtggcaggggagggaggaagggatttttgtacctggagatggagatatcttgtggtttaaagcaaatgtcccactgaaagtgattcaaatatcaacagaattatttcaggttaaaacaga

SEQ ID NO: 9026 - DNA, 1328 bp, Homo sapiens
gcctcccaagtagctgggattacaggcacatgccaccatgcccaactgatgtttttgtatttttagtagagatggggtttcaccatgttggccagactggtctcgaactcctgacctcaggtgatccactgcctcagcctcccaaagtgctgggattacaggcgtgatcctaagtacagttttataggacaaccatgctcattcatttccgtatcgtccacggctgctctacagcagcagagtttagtggtcaggacagaaccggcacaacctgcacaacctgcacaactttcaaaggctgaatatttactctccggctctttagagaaagtttgcaactcctactttagactgatgcttctccaatgctaacgcgccagtcaccaaatcaccggcatctggtcccagcctccaaccataaaccacagctgaatggaaacttggtagcgcttgccttcaatagcagatgctgtaagaggaaagcaaggtgaccaagaaaacattgcaaaactctgggcagaatctggggcctgaagactctgagtcagaggcctctttttttgctctaaacacatattagcaagagtccaagaggcatcaaagatgagttagcagcaaaatgaggctttgtccttcatgtagaaaggattaaatgatagttgaaaatgcaataactttcaccctgtgggattcagtgatgttcagtgctgtgattatgtccaacttcaaatcttgctgtcccaactgggacagcccaaacatagggagccactgcactaagatgttatgatttattaagataataaagctagcgggatgacaaatgtttcatttttcccccatgtgtttcccccaaaggaccgtctgcttttgcatgtgatttgactatgcgctgaggacctagcgtggtatatcagcaaagtggaaaagtgactgaagtgactgtttatcatcttgtaccaagttacaccactttaagctttaactccacagctcttgcattattttaaaaccgtctggcagatctctaaaactaatggtacaaaccactctgtgatacattaaaatacatcccactctgtcatactgcaaacaagtagctgctccccagtctttgaaaaagtactttcaagataaaatatgtactcatgggttctgcaggtttttaaaaagtcttgaatcttcacagatttactgggggggaaggggcgtttcatgtaaaatgtgtttttccttgacatttagaggtcttgcaaagtggtttattatagatcttgtggacatctcgctatttaattaaatttcagaaatatattctctgcactcat

SEQ ID NO: 9027 - DNA, 1328 bp, Homo sapiens; identical to SEQ ID NO: 9026

SEQ ID NO: 9028 - DNA, 414 bp, Homo sapiens
cttcctttacgtcatcttccttctgagatgctctgtgtccaaattttattctttgtaaaaggatgccagtcattggatcagagaccaccttaatccaggatgacttcatcttaactaaattacatctgcaaagattctatttctaaataaacccacattctgaggttctgggtgggcatgctatttggcaggacaaagtcaacacaggacactcattttcaggattgatcgcatggtttgaggaagctgatggtgacatctcttcttaaatctgttttcaggaaaatcatactggtagccttcaagtggccatggtgggagcattgacccagggaaatccacatttcccaacacatgctggatacctgaggactccagagctactatctgctcatatctgctcaacattaaaaa

SEQ ID NO: 9029 - DNA, 533 bp, Homo sapiens
aggatacttcttggcctctcttctggcttctggtggctgcagcaatccttggggttccttggcttatggatgcatcactccgtactctgcttccgtcctcacttgaccttctcacctaccttcctttacgtcatcttccttctgagatgctctgtgtccaaattttattctttgtaaaaggatgccagtcattggatcagagaccaccttaatccaggatgacttcatcttaactaaattacatctgcaaagattctatttctaaataaacccacattctgaggttctgggtgggcatgctatttggcaggacaaagtcaacacaggacactcattttcaggattgatcgcatggtttgaggaagctgatggtgacatctcttcttaaatctgttttcaggaaaatcatactggtagccttcaagtggccatggtgggagcattgacccagggaaatccacatttcccaacacatgctggatacctgaggactccagagctactatctgctcatatctgctcaacattaaaaa

SEQ ID NO: 9030 - DNA, 462 bp, Homo sapiens
tcatcccagcagccagcgcagtctgttggagcaggtctgtctcctcttggtcagtggctctggcatatctgatctcagttctgacttgtacagcttgggtctggtgagcagctatatggataatgtgatgtcagaggttctgggacagaagccgcagggacctagaaataacacctggcccaaccgtgaccaaagtgatggagtctttggaatgctgggagagattctgccttttgatcctgcagtgtatgtgaggcctcccatccctcgcccagtgtcaacagcaaatgcaactgccgaggtcttcccagggcctgtctgctgcagccttacttgtgaaggtgaaatcatttaatccccctttacgaccctttctcactgtggaggcaagtatggggcagatctaccaagatgggaaacagtggtgagaaaggggctgagaacatgagtggactatttttc

SEQ ID NO: 9031 - DNA, 1961 bp, Homo sapiens
tctagccatgctttcccctcctgtgccaccattagaggatttcactgaatcacactcctcaggccagaatcctagcagaacttccagtcctgcgttagacactgtagatttcatactctccaaacccctgggtgttcatttatatataaaataagtgaacccgataccaacctgagaggtttttcttgctctcaacgccattcttaaatacaaagaggtccattttattattttatatatttgtcttttttttttttaaacaaatttctgtttaaatagggagcaagctttaccctgcatacagatccagctgcaaagggagatctgtgattttggcaaccaggctgacctgccttctggaaatggaaacaaatcttcaggtggcctgcagaagacattctccaaactgacatcccggttcaccaagaaagcttcatgtaccagctccagcagcagcacaaattattccatccaaaataccccttccaaaaacatcttcatagctggatgttccgaagagaaggccaaaatgcctggcaatattgatacaaggttacaaagcattttgaacattggtaatttccccaggactacagacccttcacagtcagctcagaattccagtaatacagtggccaatggctttctcatggagaggcgtgagaacttcctgcatggagatgacggcaaggatgagaagggtatgaacttaccaactgatcaggaaatgcaagaggtgatagattttctctcgggctttaacatgggccagtcacatcagggctctccgttggtgacaaggcataattctgctgccacagccatggtgactgagcagaaggcaggagccatgcaaccacagcagccgtcactgcctgtgccccctccaccacgggcaccccaggctggggcacacacacctctgacaccccagccgggactggcacctcagcagcagtccccaaagcagcaacaacctcaagtccaatactaccaacacctactccagcccattggaccgcagcagcccccgccccagcctcgggcacctgggaaatgggtacatggctcatcccagcagccagcgcaggctgttggagcaggtctgtctcctcttggtcagtggcctggcatatctgatctcagttctgacttgtacagcttgggtctggtgagcagctatatggataatgtgatgtcagaggttctgggacagaagccgcagggacctagaaataacacctggcccaaccgtgaccaaagtgatggagtctttggaatgctgggagagattctgccttttgatcctgcaggtatgtgaggcctcccatccctcgcccagtgtcaacagcaaatgcaactgccgaggtcttcccagggcctgtctgctgcagccttacttgtgaaggtgaaatcatttaatccccctttacgaccctttctcactgtggaggcaagtatggggcagatctaccaagatgggaaacagtggtgagaaaggggctgagaacatgagtggactatttttcttactttatagagaacagaactgaggctaagagaggttacttgaacagctcaaagtcccatagttcaagtaggctccagtctaggcctgcctactcccggcagccaaggtcagcagccctttgtggggtgcttttttcctgattatataacctgttctttgcgatgctttttttttttgcctaaactctaggacctatgacaggtgacagacaccctcctgccttcatagaatacagcttctcctgggctagacaatgaaaataccaccagagtcatcttaaaaaattagagaaggaatttacaaacaagaacaaactaggaggaggaattaagggggaaaagccaaaaataagtaaattagaaagaaaaatagagtagaaattgcaaataactctaaaggatctttggaagaccaataaaatgtataagcc

SEQ ID NO: 9032 - DNA, 1961 bp, Homo sapiens; identical to SEQ ID NO: 9031

SEQ ID NO: 9033 - DNA, 448 bp, Homo sapiens
tctctacaaaaaataaaaaattagctgggtgtggtggcacatgcctgtagtcccagctccttgggaggctgaggtgggaagatcgcttgagctcaggaggttgaggctgcagtgagccatgatcacaccacagcagcccagcctgggcaacaaagtaagactctgtctctaaaaaataagtaaatacataaaaaataaaaaagactatctactaaaagctaatagcaaatagtgccttatataatgaaacaaaaatcatttcagttaatatcaggaatcagacaagggcgactgttatcacctgtagcatgtaactttgtcttggacttcacagcaaatgcagcaagacaaaaagcaataaaataagtggtctaagctttggaaaatgataaattaagcagcacatctttttgctgataatagaattgaaccccccccacaaaaaaaa

SEQ ID NO: 9034 - DNA, 448 bp, Homo sapiens; identical to SEQ ID NO: 9033

SEQ ID NO: 9035 - DNA, 821 bp, Homo sapiens
tattaatataatggatggtccaaagaaaggtgaatgaaagagtcataaaagatgttgaggtagttctctattgatgccagaatagccctatggtgcacttttgagtaacagaagccaatttgttaaaaacaacaacaacaacaacaaaaaaaaacagagagagagagatgaatgtgcatccagatgcttagagaagagtctgaatgtctgtatactaaatatcaacactagttactctgcgctgtgggattttggatgattttaatttgatccagtgttttctggaaaataaaatttcactacattgacacatcatttgataatcagataaaagaacaatggtgggaaagcaaggactcaagtgacccttgcttttgggtctagagcatcatgtaggaagccagcacagcccatccctttcctaggcgccaccttctggctcctggtgggacttgtaagtcccgtggtcagttacctgattgctcttacggacctgacgctggaaatcctctctctccaaggtccctgcaggagatgggacctgccacagagaatgccgcaagggatgtttctgttgggagctgtgagtggggtggatgtcctctgcctctcttaaatagatgagctagatttgaacctggggctggccaaagggagtctcctctcagaaaccaggatgcaatgggccgtctgtgtcccagccccaaagcagccagggtccagtggattagcacagagccgaccaggcctggagggtggtggtctgggattgggtgagcagccaccagcaggaatagcaattggagggaaggagaagcatt

SEQ ID NO: 9036 - DNA, 115 bp, Homo sapiens
cacgcctgtaatcccagcattttgggaggccaagggtggcggatcatgaggtcaggagatcgagaccatcctggctaacacggtgaaaccccatctctactaaaaatacaaaaaa

SEQ ID NO: 9037 - DNA, 512 bp, Homo sapiens
ctttccccaactccccatctccgaggctggctcctgtgcccaaagtcttcctcgctgtctctgggtatgttcacagggtatgatcacatttcccctgcatgccctgcgtgggatgtgctccatgtgctgatgcctctggggatttccagatgatgtccctggacttggcagagcagtgtggggaatctgggacttgcacttcctatcctcatggagtctggtctctcaccttcacaggccactaagaggaaaggcaactggtgtgacgtctggggagggaagtatgttcctgtgcatcgaaagcctcaaacatgtgcatacactttaactagcaatcttacttctagaaatttagtcctaagaaataactaggtaatggagtccattgctacattgtttatccccaaattaatctaaatgtctattgcaaatagactgcttagattatggtgcgttcatacagtgaagatctgcacttcctcttctctaaccgctaaggtgtcatcagtgct

SEQ ID NO: 9038 - DNA, 1410 bp, Homo sapiens
tttttttttttttttttttttgagacggagtcttgctctgtcacccaggctggagtgcagtggcacgatctcagcttactgcaagctctgcctcctgggttcacgccattctcctgcctcagcctccttgtaatttttaactctgttcaaaatactttctaattttcctttttatttccttatgcccaaatttaaaaaattacttttgtatgttttgtatagatttttaggctagagggtaaaccctgttttattactctattatgtccagaacctgacgtcactgctaatcttatgatgaagtactggtcctagccctcagctttctctgtcctctggtttcaggaaatgaaaacctcttcatagtgctcccagtccagtcctctggtttcacacttcctctctcagcctttcctgatcagttgtgtttagcagcagcctttatacaatacaatataattgtcctttaagttacagtttctctcacatttctctaacacctgacatgttacacttactagtacattcccttccacttgtatcctatctctgttcaacaccagtgcaagtctttacaattgcataactgccttgggccaggcactatctatgttctgcctaccaggaataacagtgtccttgccactgtgacaacatgtagtctgactccaaaatcctatcttagctagcatctgctttcatgcaccacttctggtatcaactcttccagtttaggctcctcaggaagccgatatctaggtgggaattagcatgcaggaggtttattagggagcattgttggggtgggtaggaaagaaatcaaaattgagcagagggggaagttgggctgtgatatgtctaacaaaggccttaggaaaccaaccaggagatctaaacttggaatgaaccttctgacttgcccaagttggggtgaagaactgggcctttatagcccctacatcaaccagtcattgaatgtggactttcccaggaaaggaaaggccatgaccttggctgaacaatctcttcgctgagacagctcatgaagaaggtgggcagcagagggctgtctgtcaacagagcccccagcagctagaggaattaatccttcagttttgaagagggacctgagaagtgcatcatgtcatccacgatggcctaaggtgccctttcctggtttatctaacaaacatctactcacatttcaagattcagctcagggccgggcgcggtggctcaagcctgtaattccagccctttgggaggctgaggggggtggaacatgaggtcaagagatcgagaccatcctggctaacacggtgaaaccccgtctctattaaaaatacaaaaaaaaaattagccaggcgtggtggcaggtgcctgtagtcccagctactggggagtctgagg

SEQ ID NO: 9039 - DNA, 819 bp, Homo sapiens
cttccacttgtatcctatctctgttcaacaccagtgcaagtctttacaattgcataactgccttgggccaggcactatctatgttctgcctaccaggaataacagtgtccttgccactgtgacaacatgtagtctgactccaaaatcctatcttagctagcatctgctttcatgcaccacttctggtatcaactcttccagtttaggctcctcaggaagccgatatctaggtgggaattagcatgcaggaggtttattagggagcattgttggggtgggtaggaaagaaatcaaaattgagcagagggggaagttgggctgtgatatgtctaacaaaggccttaggaaaccaaccaggagatctaaacttggaatgaaccttctgacttgcccaagttggggtgaagaactgggcctttatagcccctacatcaaccagtcattgaatgtggactttcccaggaaaggaaaggccatgaccttggctgaacaatctcttcgctgagacagctcatgaagaaggtgggcagcagagggctgtctgtcaacagagcccccagcagctagaggaattaatccttcagttttgaagagggacctgagaagtgcatcatgtcatccacgatggcctaaggtgccctttcctggtttatctaacaaacatctactcacatttcaagattcagctcagggccgggcgcggtggctcaagcctgtaattccagccctttgggaggctgaggggggtggaacatgaggtcaagagatcgagaccatcctggctaacacggtgaaaccccgtctctattaaaaatacaa

SEQ ID NO: 9040 - DNA, 1419 bp, Homo sapiens
tgtaatttttttttttttttttttttttttgagacggagtcttgctctgtcacccaggctggagtgcagtggcacgatctcagcttactgcaagctctgcctcctgggttcacgccattctcctgcctcagcctccttgtaatttttaactctgttcaaaatactttctaattttcctttttatttccttatgcccaaatttaaaaaattacttttgtatgttttgtatagatttttaggctagagggtaaaccctgttttattactctattatgtccagaacctgacgtcactgctaatcttatgatgaagtactggtcctagccctcagctttctctgtcctctggtttcaggaaatgaaaacctcttcatagtgctcccagtccagtcctctggtttcacacttcctctctcagcctttcctgatcagttgtgtttagcagcagcctttatacaatacaatataattgtcctttaagttacagtttctctcacatttctctaacacctgacatgttacacttactagtacattcccttccacttgtatcctatctctgttcaacaccagtgcaagtctttacaattgcataactgccttgggccaggcactatctatgttctgcctaccaggaataacagtgtccttgccactgtgacaacatgtagtctgactccaaaatcctatcttagctagcatctgctttcatgcaccacttctggtatcaactcttccagtttaggctcctcaggaagccgatatctaggtgggaattagcatgcaggaggtttattagggagcattgttggggtgggtaggaaagaaatcaaaattgagcagagggggaagttgggctgtgatatgtctaacaaaggccttaggaaaccaaccaggagatctaaacttggaatgaaccttctgacttgcccaagttggggtgaagaactgggcctttatagcccctacatcaaccagtcattgaatgtggactttcccaggaaaggaaaggccatgaccttggctgaacaatctcttcgctgagacagctcatgaagaaggtgggcagcagagggctgtctgtcaacagagcccccagcagctagaggaattaatccttcagttttgaagagggacctgagaagtgcatcatgtcatccacgatggcctaaggtgccctttcctggtttatctaacaaacatctactcacatttcaagattcagcccggggccgggcgcggtggctcaagcctgtaattccagccctttgggaggctgaggggggtggaacatgaggtcaagagatcgagaccatcctggctaacacggtgaaaccccgtctctattaaaaatacaaaaaaaaaattagccaggcgtggtggcaggtgcctgtagtcccagctactggggagtctgagg

SEQ ID NO: 9041 - DNA, 89 bp, Homo sapiens
tgagacggagtcttgctctgtcacccaggctggagtgcagtggcacgatctcagcttactgcaagctctgcctcctgggttcacgccat

SEQ ID NO: 9042 - DNA, 518 bp, Homo sapiens
tgattaaacatttatggagttggtgtctactctgcttttaacattgctctttgacaaaccatatgaagtgttgccatcccatgttttgggataagaaagctaaggctctgagagattaagtaattggtctgaggttttacagctggtggataggagcttaaaattctccagtggcatatgaggttcatgtgatccgggccctgctggtttctctgacctcatctgccaagaatcacagcctcattcattatgctccagctgcctgggctttcgttaggtgtctccaacttgccaaacttgttcctgcctcagggcctttgtgcaagccattctgtatgcccggaaagccctacactcagacattatcagcctcatccttgccattcatttagatctcaattcagatgtcaccccagagagacctttgacctccaagtttaaagtagccctatattcccaacccttttattttccaaatagtacttcttacctcctgacgttgccttgtatgcttattg

SEQ ID NO: 9043 - DNA, 4171 bp, Homo sapiens
ctctgtgagccttcaacttgggaaactcgaactgcacattgagggccacactgcctaccccaccctttaagctgccaccgagttgtttgcataccatcgaatgtagccagctcgccaactgaccgccgactgtggctaccaccctgggaaacaaaatgaagcatgtcatagttttccgatgaaagacaatcaaagatgcaaaaggatcacaattgcaacagtgtgagaagcagccagcaaataaccattcactatggagtgggtgaccttttcattgaaagcaacagctatgactaaacagcctcttacaagagggtgttgcaactgaaattctctaggcctgactcatggcttttcaaccttggtccaggctcctctccacctggtgggagagcaggttgtctctcacaacaaactctgggaaagccccgccccaggcctgcctcagaacacaggaacatgctgccagtgttttcctttatcatttaaagtttgtttgtgtgctgggcaaggagacgcttgcaagcaggttcttgaactgggtgtaatgaaagctgtagggatcgcatggcgccctagacccactgccaaggccaaggggagggacaaaggcttaatggaagaaagtggctgcagctgctctccaaagctgtcattactttcttgctggaaactttgaaatattatttgtttcctgtttcaaacttctggagatataccatcccagtaccatgattaagggcaatagtgtcacagggaggtgggctggcctctgcgtttttcatgtgggcttttccatctttaatactatattgctttataaatgtctttttgtctgtagatatcttctgatccctgcccccgccactcccaactcctggcttctgatgtgaaatgagagacttaaagttgatcaagttcatgccgatgtttaattcagactcaatgtttttctgaagtctaaaatcctttgaatccgatgggagagaagaaggaagtgaaactggatagtgtaaataatttgtagttagagctgagatttatgaggggaattgccgcacagagctgcttggtgttgaatgtctctttgggccctgggagacaaattctccacttgactgcacgtaggtctcccacccttctgctggcaccaggaggcggaggggtctctacccttccagggtgtgggaacatgtatgagggccccaagagcctggaccctggagagctagaggaggatggggtgttgctgtataaagtaattggcatgtggctcttcacgatgaaaaaaagagattttgtggcaggaagaaagcaaaagaggagggaggagagaaggaaccatagattctgagaaacacaccaggatgactaggcctggaggagtccagggtgggcctcagaccctcacttcttgtctggcacctcccattgccaaaaatgcagacttcagagtaggaccatttttggagccatgtataagaaacagatttctatataggtcaggccttgctaaaattcattttgagaagttcagagatggaatggagcaagacaaaattgaaattctagcatccttttcctcatacaattcaccccttgttttatgaagatgtgggacaaactgaatgaatgtaacttgcttaaaagagcacctgacacacatggatgctatggaagcaccattcgattccatgctttaactataaatgattattgttattattactattattgtatcttgactctgctttcaaagagctgatttgaacataacaagtaggtaaggaaattgcaacccatcttcttgcttttcacagttattgcacataaatagccaaaacaataagctaaatgagactgtgttgctgagattagacctttcagggaagtaggaggcccactgaaaacaaggacaaaccttgttgggtgcttgcgggtgagagttgctgtttgcctagactccctgccacacacactgtaggggtctgaaccccagatctgaactctgcacccatgaattatctagctgtagaaattactgaggacctctgagccaccatttccccttttacaaatggatatgattaaaccaccacctcccaggaaagaggagaagactgagtgaccagctaactcccacctctcacaggatcgtatgaggttctagcaacccgagtttataatggaacaaaaaagaataggaaaggcaaaatacacaccaaggaatgacatacaaccaatttactcacagttaacttcagcataaatgtatacacataatcagttacaattaatatccacatcgaactagggagtacatgattctggtgttctttccaattccttctcagtgagggatctcaggagagcttggtctatgtgtgcctaatcctacaggaacacctctgccctggcccttttaaaaccctctttcttctacattcatcacatggttctctgtggcctctggtcctccctatatcccccactagtatctggctcatgatgggccacttgggaccatctaggaccagttttctactgcagccaattcttaatgcttgaagttcagagtttaagaatcatcaccattttctctcaccattgctggccccaaatccgttttctctcagtacaatgagaatagtctcatagggttgttaaaaaataatatttaatccagttagcacaatgcctgccacctatatagtaagcattttttatgtcagcgatcatcatcctcctcttccttattcagctacttgttaaggtggttcccaaagatgcccttcaaaacaacctccagcaatttctcttcacattaagagaagatggttttatgaatcaccctgaatttggcaggaaaaagacaactttcaagtggagagttacaaacaaagcaaaaaatcaattccctgatgatgcaaaagtcatctactttttgtctactttttcagtcccactttaaacccatccaagtgtagttttgttgtttgattacttaatgccacacaagcaggtgcttctgaggagttaatttaccttcaaagggccagcctagcatctttatcctaaatttgtaagggaacgaacataatctcattttaacacattaacattctgctcatcagagctacttaaatgctaagtttagggagcacatggtggcccagattcagttcacactttgaagtggaaaccagaagaaaacgacaggttttctatggatgtggcatcctcagagttggtttgtaaaccagctactgctgggatcatgatgtttgggatcacaccccagaccagagcacagcaacattaagaagggggcagcatattcagttgtgctgtaactgacttgacatgaggtggtggggatgactcctgcaaaggagaactaaacaccatgcatgaattaagaccctgtatttagcagacaagagtacttcatccaccaggaagaaaagtattaagcacagggatgatttctcagattctatctgtttggtcagcatctcccctgagattttgcaattcgctttgttttgattctgtgatcactgagcaagcttctgactgttacttcagtcaccccaggcaccttaatactcaaaaggggtatcttgggtcatagaaataaatatctcagttactgggacggtagtgcctctcattttataggaataaatttgttttgttgcatatacatcaattttctgtgagtttagcatgattcagtccctcatggtctagtaagctccaagttcacttcaacaatagagggtttctattagaaagttgagaaccaaactttaaatcagcatttcatttaactctattgtgcctcggtttccttacctataaaagcatagaaaaacaacagcacccactttaaatggttgttgtgaggattcacgatttaatagatacacattattcatgtgtatgtatgtatatgaaatgatttaacatatggaaagtactttggatggcgcctgtttttcatagtgacccacaggtgctacccacttacaaagaatgtcctgctaaaagcagccagctgtcatctctccttcctaaactttcttgcacaaccctcaaagaacttacctcttttagccactccactgtgaaaactagaggcttcaaataaaagctatgctgagaatgg

SEQ ID NO: 9044 - DNA, 161 bp, Homo sapiens
tcttggctcactgcaagctctgcctccctggttcatgccattctcctgcctcagcctcccgagtagctggaactacaggcgcccaccaccacgcccggctaattttttatatttttagtagagactgggtttcactgtgttagccaggatggtctcgatct

SEQ ID NO: 9045 - DNA, 811 bp, Homo sapiens
acaggcaattaagactgacatgaaagatcagtcacattgataggatatactcttgatatgatataatgagaatggcagtttaccgctgtggttttcttttcccaaaacccataaccacagcctaaccatgagaaagacatcaaacaaatcccaatttgggacattctgtagaatacctaacccagtattccttaaaaacaatgaaagtcagagatactgtcacagccaagaggagcctagggagacatgacaactaagtgtaatgtggtatcctggatagaattctagaacagaaaaaaattaaaaactaaagaaatcatgtatgagcttcagttaataaggtatcaatattgtttcattaattttgtcaaatttaccatactaatgtaagatgtcactattataggggaaactggctgtggtgcacatgagaactcgttgtactatcttcacaatttttctgtaaacctaaaactgttctaaccctaaacctagccagtaatggtgccttggtaattaaaacaccatgctgatgagtatatgatttctagctagctttatgaaccccatgatagaatttggatatgtcagtccaaatttatcactcttagtggaaaatcagggtaggttcacttcattgttaagaatacaacagtaacattattcgcctttgtaacttaaaacacatcccagcgtcacataccatttgtacccccacctcccctctcaaacccattgcttccccactggccgccccctaccccccaccaaaaaaaaaaaaaaaggaaaaggaaagaaaaaaggagaaggt

SEQ ID NO: 9046 - DNA, 1719 bp, Homo sapiens
ggcacgagaatcgattaaacccccgaggaggctgacgctgcagtgagccaaaatcatgctactgtactccagcctggacaacagagtgagactctgtttcagtaaaattttttctcccattttatagtccattgcctcattccccacaaaatgattttgtctcttttattatggtagaattgtctgtcttgcagaccatatgatctgaccagcctttctctcacatactagtatttaagattaaataaattaaaataatttcttagttttgttttgtttaaatactgttgtggtaaaggctgttttttgtcttttatcaaaaatgtaagaggttgaacaacaagaaattagtgtaatggttgaatatggcaatttcatatgcttctgacaaatatttcttaagcctcatttgtttttgtttgtttgtttgtttgtttgttttgttttgtttttgagatggagtcttgctgtcacccaggctggagtccagtggctcgatcttggctcactgcaagtgccgcctcctgggttcatgccattctcctgcctcacctaaggagtagctgggactacaggcgcctgccaccatgcctggctaatttttgtatttttagtagagacggggtttcaccgtgttagccaggatggtctcgatctcctgacctcgtgatccgcctgcctcggcctcccaaagtgctgggattacaggcgtgagccaccgcgcccagtctagcctcatttgttaaatacgctttcattaaggtagcctaggaactcagccaccctatagattgttgcttcagtacagaaatgagtcccacatttaaaagaacattttatcactgtttgtggtgttttaatatccagacttttgtggtcttcatgttggaatcaataatatatgtcaatatattttggtatatattaatatgtaattatattttaatatatggaagcatacatcatatattaaaatatatgcataactgaattaaatatatacatttaatgtatatattttaaaaattagtaatgcttctaaatgtcagtgagtgccctcagcttctgacaatgcttaatctaccggtgtctaaacagcattgcagtgttcctgctgcttaaatcatataggattcattttagctaagcctcaattaggggaataactgaagatatatcggaaatggaaaccccaaagagtaatagctatgaattctgtaaatgggaagacagaccagcctttactgtagcagtcaatatatagagataaggtcttacactggtgtttttgtttgtttgtttgtttttttaaactactgatgcctcagtcctacccctggaaatatgagtaaaatggggccaggacaacagaaagttgagagcttctttttgtactggctttaaaagcaaggatctaggccgggtgtggtggcttacgcctgtaatcccagcactttgggaggccagggtgggcagatcacgaggtcaggagtttgagacgagcctggccaacgcagtgaaaccccgtctctactgaaaatacttagctgggtgtggtggcacacacctgtagtcccagctacttgagaggctgagacaggagaattgcttgaacctgggaggtggagtttgcagtgagctgagaccacgccagtgcattccagcctgggtgacagagtgagactcagtctcaataaataaataaataaataaaattaa

SEQ ID NO: 9047 - DNA, 293 bp, Homo sapiens
gttaagtgaagcagattttcaatttaaatgtaacttcatctgcttgattaaaaatgtaacagaacattatctgctgcaaataaatttcagtggaagagatgatttttgcctgtttaaaaataacatctgtttatgttggctggaagcagacgattaatacctctctaatttcgaggtttaccagtccagctcacctgtctctttgcatggatagttgaaattgatggctgtcgagtataaacatttacctgttgatgttgagttgatggatttcttttttaaggataatacag

SEQ ID NO: 9048 - DNA, 466 bp, Homo sapiens
tatgccctaataatgcctatgccaagaaaaatggcatactgaaactaggtaagagaaactgcatatttcataacatttagtgattctaaccaaatgaatttaaacccagtataatttttttcaaaattaaaagtgaataatgtagtagactagctagttatctctaatgtaaagatgaaaaactattgctttaatcatactttttttattgtttccccttggaagtgcttgagtacatttgttaagaacacgctttaatcctggttattagtgtgccggggcttattcacccctgtggctctcccatagtcagtcccagttatcgtagtctactatgcccatgctactggaattttctcttcttgttttgttgctactttagatgcttggagaaattctcaggaaggccatatgccccatttgtcagaaaatgatagtgtcataatgaaaaagttcggtatgctta

SEQ ID NO: 9049 - DNA, 465 bp, Homo sapiens
tatgccctaataatgcctatgccaagaaaaatggcatactgaaactaggtaagagaaactgcatatttcataacatttagtgattctaaccaaatgaatttaaacccagtatatttttttcaaaattaaaagtgaataatgtagtagactagctagttatctctaatgtaaagatgaaaaactattgctttaatcatactttttttattgtttccccttggaagtgcttgagtacatttgttaagaacacgctttaatcctggttattagtgtgccggggcttattcacccctgtggctctcccatagtcagtcccagttatcgtagtctactatgcccatgctactggaattttctcttcttgttttgttgctactttagatgcttggagaaattctcaggaaggccatatgccccatttgtcagaaaatgatagtgtcataatgaaaaagttcgttatgctta

SEQ ID NO: 9050 - DNA, 466 bp, Homo sapiens
tatgccctaataatgcctatgccaagaaaaatggcatactgaaactaggtaagagaaactgcatatttcataacatttagtgattctaaccaaatgaatttaaacccagtataatttttttcaaaattaaaagtgaataatgtagtagactagctagttatctctaatgtaaagatgaaaaactattgctttaatcatactttttttattgtttccccttggaagtgcttgagtacatttgttaagaacacgctttaatcctggttattagtgtgccggggcttattcacccctgtggctctcccatagtcagtcccagttatcgtagtctactatgcccatgctactggaattttctcttcttgttttgttgctactttagatgcttggagaaattctcaggaaggccatatgccccatttgtcagaaaatgatagtgtcataatgaaaaagttcgttatgctta

SEQ ID NO: 9051 - DNA, 986 bp, Homo sapiens
cacacacacacacacacacacactcaagtaatccaaagcaaaacttctttctcttcttcctccaggtgcttagctttagatattattattacatcagcatcacgtggtaggcagggttattcccatgacacagagggcttataatatttacaatggagtgagctataaggggaagggtgtgctgatagctatttttccttgttgttattggcttggttactagtttaatggcctagttgccaattaatggcttaatgtatttaatgttctatataagcaatgtacaactctttagtttctaagtcaaatacacgtgaaaatcaccctagtggatatgagaatcttccatacaaatagtaagcctgtgattatacattatcagtaaagatcaagaactatataaatgccatgttacattaagcccaaatgataatttaatgatattgagtcaaaaaagagatactgcagctactaaaaagttagaaattatgccctaatacacgccgggaccagcaggctcctcagccaaccctgtccctcggcctggccctgccagagagggaccccagcccatcttgggcatcggcaggactcagccgctcccacctccccacagaaacccaggagtgtgtggacgtctgagcccagcttcctgcatccccacccggcccacctggcccctcacccccggcagcgggccagctgcgccccccactccccctcctaccccagcaggggcttctggggccttttcacctagagaaacattcccactgccctttggcgtccctgtactctgagctgtgaatatttttaaccctgtgaatacggcccgctcttgtgacacagagactattttatcaactgtcagccccattcctttatgataggattctccacagtggcttccgactcaggctccaatggaccaaataaaagcgttttgttttgtaaaaaaaaaaaaaaaaaaaaaaaaaaggaaaaaa

SEQ ID NO: 9052 - DNA, 998 bp, Homo sapiens
gaaatttccaaatggagaatcccctaggcatttaaaaaaagaactctctaccattatatacagtaaagttgataatgaactcagcttaaaaatgaacttctgtgctatgcatggtggtcacgcctgtaatcccagcacttttggattgcttgaggccaggagttcaagaccatcttggccaacatagtaaaacctcacctctactaaaaatacaaaaattagttcagtgtggtgggacatgcctgtaatcccagctactcaagaggctgacgcatgagagtcccttgaacccgggaggtggaggttgcagtgagctgatatcacgctactgaactccagcctggacgacagagtgagactgtgtctcaaaaaatcaaaagaaggctgggcacaggggctcacgcctgtaatcccagaactttgggaggctgaggtcggcggatcacttgaggtccggaattcaagaccagcctggccaacatggtgaaaccccgtctctactaaaaaatacaaaaattagctgggcatggtgggcaggtctgtaatcctagcttctcgggagggttaggcaggagaattgcttgaacccgggaggcggaggttgcagtgagctgagatcatggccctgccctccagcctggggggcaaagtggggctccctctccaaaaacaaaaaattgactaacccggcccagtgggtcatgtctgtaataccagcactttggaagactaaggcgggagaactgcttggggcccaagagttcaagaccagcctgggcaacatagtgagacctcacctccacaaaaaattgaaaaaaaaaaaaaaaaaaaaaaaaactgggtgtggtggcacatacctctcgtcctaactacccaggaggctgacccaggaggattgtttgagcccaggaggtcaaggattcagtgagctgtgattgtgccactgcactccagcctgagtgacagagcaagaacctgtctcaaaaaaaaaaaaaaaa

SEQ ID NO: 9053 - DNA, 219 bp, Homo sapiens
caaaaactagccaggcacgatggtactcacgtgtagtcccagctactcagaaggctgagtcatgagagtcacatgaacccgggaggcagaggttgcagtgagccgagattgtgccactgcacttccagccttggtaacagagcaagaatctgtctcaaaaaaaaaaaaagtagcatttttataaaatgattgttttctttatatcttgcaaactaatgc

SEQ ID NO: 9054 - DNA, 670 bp, Homo sapiens
gggcaacatggcaaaatcccatctctacaaaacaatacgaaaattagccaggcatagtggcacatacccatagccccagctattcgggagactgaggcaggaggatcacttgaacccaggagtcgaaggttgcagtgagccaggatgaccccactgcactgcagcctcagtgacagagcaaacaccctgtctcaaaaacaaaaaacaaaactgaagagccttgggctgggcacagtggctcatgcctgtaatcccagcactttgggaggccaaggcaggaggaacacttaagcccaggagttcgacaccagcctgggcaacataataagatccctgtctctacaaaaaaaataaaaaatagatttttaaaaaactgaagagtcttgagtgtttctgtccatgtgatctcattaggtcttccttggtactcccatgcatatcacaactattttggagcatgcccactaccagttaggacatgttgtgtctttgtacccagtgtccatttgtctgtgctgataagaaagtaaatagagcctaccaaaagcaaaacggtgaaataattcatttgtattgaccttctctagcctccacttctgctgcttcttgttgcttcaactgtgggaaattgtctatctctttttgcattcaggctttctctccctatcca

SEQ ID NO: 9055 - DNA, 940 bp, Homo sapiens
agagtaacctcatctgggccgtttggggctggtggttccaaatttttgcctctggcctgggcccgtcatccaacgccaggcctccctggggctcccactgtgggtacctcgctaactaataatcttcatttcccatgtaaacacaggcacctgcgtatgccccatttcgggagaggtaaccagcccctagttgccctggccagaactctgggagaagctatgttcagtattagaccctgtgaattctttttattattattattattattattattatttactgttgtgttgggctctcgctctgctgcccaggctggagtgcatttgtgtgatcatagctcactgcagcctcaaattcccgggctcaagtgatcctcccgcctcaacctctcgagtagctgggactatgggcacatgccaccactccctgctaagaccctgtgaattctatttccctaacctcgctggaatcagctccctccttcccagcagttggctttctccctctctttcctggtctggtctgtctaccaccagttgccatcctgtcctgagtgatcgcttcatttcccaccctgattgacatcctcagggattccccttcagcataagctgcccccaccccgggcgtggtcccttgcacctccctccacaggctggcccctgcctgcctcctcacctcacgtatccccagtcacctcctctgctccaaggcacggcaggtccctgcccttctctgagcaggccactttgtttgaacacgtctctgtgtctttgaatagccctcctctccccactgaagccttctgcctcccaccacgaataaagatgatctttgtcttctttaaaacttgccctaagtttgcaaaacacaggatgtagagcagcatctaatagactatcatttgtgtttgaaaaaaaaaaaaatagggccgggcgc

SEQ ID NO: 9056 - DNA, 940 bp, Homo sapiens
agagtaacctcatctgggccgtttggggctggtggttccaaatttttgcctctggcctgggcccgtcatccaacgccaggcctccctggggctcccactgtgggtacctcgctaactaataatcttcatttcccatgtaaacacaggcacctccgtatgccccatttcaggagaggtaaccagcccctagttgccctggccagaactctgggagaagctatgttcagtattagaccctgtgaattctttttattattattattattattattattatttactgttgtgttgggctctcgctctgctgcccaggctggagtgcatttgtgtgatcatagctcactgcagcctcaaattcccgggctcaagtgatcctcccgcctcaacctctcgagtagctgggactatgggcacatgccaccactccctgctaagaccctgtgaattctatttccctaacctcgctggaatcagctccctccttcccagcagttggctttctccctctctttcctggtctggtctgtctaccaccagttgccatcctgtcctgagtgattgcttcatttcccaccctgattgacatcctcagggattccccttcagcataagctgcccccaccccgggcgtggtcccttgcacctccctccacaggctggcccctgcctgcctcctcacctcacgtatccccagtcacctcctctgctccaaggcacggcaggtccctgcccttctctgagcaggccactttgtttgaacacgtctctgtgtctttgaatagccctcctctccccactgaagccttctgcctcccaccacgaataaagatgatctttgtcttctttaaaacttgccctaagtttgcaaaacacaggatgtagagcagcatctaatagactatcatttgtgtttgaaaaaaaaaaaaatagggccgggcgc

SEQ ID NO: 9057 - DNA, 770 bp, Homo sapiens
catcatcattctgagttaccaacaggaggggtagcagacagtccaaggggcaaggcagggactcccagctccaggctccagcctctcctcccctccaccctctcctggtcctgtcctgaaatctttggctcccttgaaacttgttatgcccgggcaaatgccaccctcgtgccactgtattcccaccacctccaatgagtgtcccccacctgatggggtcacacacttgtccagccacctgcacagaaaagcctcatggacacagccctgtgaggtcagaaatagaccgaacagggtcactcggttggaaggcgtggtagtgttagaacccaggtgtttgaactcggtctaatattcattccactctttcacacacacgtaagggcacatgaccactattaatcaaattttcaaaaaaaaatcagctgggcacaatggctcatgcctgtaatcccagcaatttgggaggccaaggcgggtggattacctgaggtcaggagtttgagaccagcctggccagcatggtgaaaccccgtctctactaaaaatacaaaaattagctatgcatggtggcacacgcctgtcatcccagctactcgagaggctgaggcaggggaatcacttgaacctgggaggcagaggttgccatgaactgagattgcgccactgcactccagcctgggcaacagagcgagactccatctcaaaaataaataaataaagggaatttgacataaaatcgttaatgttgactgtttcagcctgggtga

SEQ ID NO: 9058 - DNA, 88 bp, Homo sapiens
ggaggcagaggttgcagtgagccaagatcgtgcctctgcactccagcctgggtgacagagcgagactctgtctcaaaaaaaaaaaaaa

SEQ ID NO: 9059 - DNA, 770 bp, Homo sapiens; identical to SEQ ID NO: 9057

SEQ ID NO: 9060 - DNA, 853 bp, Homo sapiens
cacatgactagcctgggggggggtgataccgtaagggtgatggagagcctcgtgtgccaccaaacccggtgcgggcgtagactggggatgtatcttgggcgcctactggagtcgtttcgccgctctccgtggcgttcggtgcggctgcttccaggtccctgaggcgcccgtccggaacccgccaggacccaagctgccgcctgggccgggacctcggactcctcaaaggcgcgccactttctcctccgttggagggaagaggtggcgctcgcagagcaacctgcgggggaccacttctgttggtgctaagctttggggagagtctcctccctcctgtgtccctcgtcctccttaccactcgctgttagaagttggggccgtcacagctttctcatcgaagtgccagatcccaggacactacaaacgcttgataaatactaaattagcactgtggctttctagcctggggactgacaaatggaagcgctggagtcgtgggaaaagcttgccctgacgatggaggcagcgaccagaaatccattcgtggctctacccctcactaactcaccaattttaagcaaccttaacctctctaaaacagtcatcatttataaggtggagagaacccaatcttagagttgttgtaatgattaaagaaaataaggtgcatgaaacacctagcaagagtttctagcttagaggttctcattaagtaaaattcttaaggaatcaggtcacacttgatacaagaggctacttgagcagtttagcaccagaaggaatgtaaagtcataaattaggacagctgaacaaaacctccaagaaataaattaggtgtttgtttaacaagaaa

SEQ ID NO: 9061 - DNA, 2275 bp, Homo sapiens
gggaggctgaggcagaagaattgcttgaacccaggaggcggaggttgcagtgagccaagattgtgcctacattccaacctgggcgacagagcaagactctgtctcaaaaaaaaatagtaagttgtgtaaagaaaaatattaattatataatatggcagttcctatgagagtgtggcaaaaatcaagagggcttggaagttttttctttgctcttgcaactggctggatgcagttcatatatttttcaaccagtaggtggcaccccaacctaattttttgcagttgtaacctggtggcagaaggggcaggactgatggcttgggcaagactgttatgccaagttttatttgcatgtatttggactttctttttttggagacaaagtctctctctgtcgcccaggctggagtccagtggcacaatctcggctcactgcaacctccgcctcccaggttcaagcaattctctgcctcagcctcccgagtagctgggattacaggcgcctaccacatgcccggctaatttttgtatttttagtaaagacggggtttcaccatgttgttcaggctggtcttgaactactgacctcatgatttacccgccttggcctcccaaagtgctgggattacaggcgtgagccactgcacccggccacatttggacttattaacacatatgaagtgcttggtattttagagtgcttccacacacacaatcctcattagagatagacaggatggggagaattaataagccattgcccgtgttacagtgaggaagcagaaagatgagaagtttgaactttggtcagcctggctttctcataacccattttgctgactaaattgcgagtatccctcctttggtatatttattggtgagaagtcacagcccttgtcccacaggttttgcagccaatcaggagaaagaaattaggcacctgtaaagtattactgaatcatagatagttcaccagtggtttgggcagttggcaaattaatttagggacatctgttctgaaacagcattgaaataggactgactgctttgctttctggttgtggcagccagagccaaaggcagatgaatgaggggctatgaggaggctactgtggctggaacagtatgaaagcaacctcagctcccacgcctggctgtaaaggggataataactgggtgctgcttcccagcctctttcatctgagaagttcaaagcacctcacccctattaacaccccacagagtaggtaggaagtaccaatagagcaagccaggaaaactgaggccaggaggcacagcctggggctagctgtgaatcacctgtggggcctagagcccaggaatcctgacgcccaggctactggacaaatcctttatcagggcattagggtgggtgctatgcttttgaaagcagtaccaacggctgtggtcgtgggttttgatgcttgccactcacagaggccccagctctcaccataacaaaccaaatgggggctggaaggcatcctttacaactttatggtctcgtatgcaagcaccctcagcattctctgcacccatggagtggagatgggtgggagtaatccaaggcctttattttcaggccatggtttgacagcaagggtattttcttccccaataaacgtagcttctgtctaccttccactggcagcaaaatgattttctgttctctgcatatactgaggggatctgcacagtgcagaaaggaagatgtccgagatccaagtgaggcctgttcagtgtgaaatgtctagggtagaagaaagaccatcctccattatggctggcatgtggcagtcatccttaagattatttttaaatttcctaataaatataggaaagtaaaaaacttagaaaatgaaagagaaggccgagcacggtggctcacgcctgtaatcccagcactttgggaggccaaggcgggctgatcacctgaggtcaggagtgtaagacaagcctgaccaacatggtgaaaacctgtctctgctaaaaatacaaaaaaatgagcagggcatggtggcatgcgcctgtaattccagctacttaggagactgaggcaggagaatcgcttgaacctgggaggcggaagtttcagtgagcggagatcgcgccattgcactccagcctgggtaacaagatggaaagtacatctcaaaaaaaaaaaaaacgaaaatgagtcacccagaatcccataacggaaactttctatggggtcatctgtttaagagaaaaataaattctatattcaaatgta

SEQ ID NO: 9062 - DNA, 2275 bp, Homo sapiens; identical to SEQ ID NO: 9061

SEQ ID NO: 9063 - DNA, 11557 bp, Homo sapiens
gaaattccgagagcgattttcccgcaaagaccccacattcgacccactacccgcgagagaaatgcggctgcgccgcccgcccctcggcgtctagcttcgtccccgccgtgagggcgggacttcctctcgttggctcgccgtttccgacgctgtccggaagtcgagttagtctagttagtatcggcctgttatctccttttgcgcgacacggtctcagctgttccgcctgaggcgagtgacgctggccgccaacgaggtatacgtactgggaccctcgccctcagtctcgtctccggcgcggctacctgccccgttttccctgtgagttgacctgctccgggccgcgggccgccaatggcaggggccgctccgaccacggccttcgggcaggcggtgatcggcccgccgggctcagggaagaccacgtactgcctgggcatgagtgagttcctgcgcgcgctgggccggcgcgtggcggtggtgaacctggacccggccaacgaggggctgccgtacgagtgtgccgtggacgtgggcgagctggtggggctgggcgacgtgatggacgcgctgcgcctggggcccaacggcggcctgctctactgcatggagtacctggaagccaacctggactggctgcgtgccaagctcgaccccctccgcggccactacttcctcttcgactgcccaggccaggtggagctctgcacgcatcacggcgccttgcgcagcatcttctcccaaatggcgcagtgggacctcagggtgcgtctcagggcggggaggcccattttgcggatggagtaactgagacagggaggacagacgccacgcccccatgtcacacagggaggtaggggctgggtcgctttggagtaaaacaggcatgagttcagaatctggctctgctactgactggctgtgtggtgttgataagtcagttcatcactctgaacctcagtttcctcacgtgtaaaatgtgttagtagccaacttggcgattttggaagtatggaaggggttaatgtcgaaagtggcatggagattgttgtaaattggtgggcaaaagtaaatgaaagagtggagtcagatgccatgggatttaaaccccttgcccactgggaggctcagtgcaagacctcttgtaagaaaaaaaagatgactcctatttcctgggagaaggaaaccagggtggttattagaaagaaacagaggcaggagactaatggggaaagcttcccctctgtcctcaagccctcattctcatgagggaatgctgatccctgtttctccaggccactctcaccctgtctattccctcccagctgactgccgtccacctcgtggattctcactactgcacagaccctgccaagttcatttcagtactgtgtacctccctggccaccatgctgcacgtggaactgccccacatcaacctcctttccaagatggacctcattgagcattatgggaagctgggtaagagcttctgttccaggcgaagagcagggcagcagctgggctagaatgaagcagacatctcagctgaaggtagctgcctctggtgccttgcgtggtctggtgatagtagccacaggcaggttctaactcctgcccatttattttgtgccactctgtgctagttaccgttgtagattttggagacaagagagctacagatggtgttaggtgttacaaaggaattaaagtgatacgacagtgaatatttgggagtgaagtgagtgagctttggagtaaaacaggcatgagtttaaattctggatctgccactgaatcatcgtgtggtctgggtaagtcagttcatctctctggacctcagtttctcacttctgctctgaagcagtggcatctgagctgagacatgaatggtgagaaggagccagccaagggaggactgttctatgcagaggcactagtaggaataaaggccttgtcttagtcagtttgtgctgccatcacaaaaataccatagaccagatggcttagccaataaatatttatttctcacagttctggaggctggtaagtccaagatcaagacacaagccgatctggtgtctggtgagagtctgcttcctggctcctagacagcctccttctgtcctcacagaaggaggctatattctcacctggcacagagacagagaaggggtgggaggccagggacaaaatagggaagattgaggtagaagcaggctggtatgaggcaggggagttggctagagtcccagtggccagcttttttttcttgataaattagtactctcggctgggcgtggtggctcacgcctgtaatcccagcactttgggaggccgaggtgggcagatcacctgaggtcaggagttcgagaccagcttgaccaacatggagaaaccacatctctactaaaaatacaaaaaagtagccaggcatggtggtgcatgcctgtaatcccagctactcgggaggctgaggcaggagaatcgcttgaacctggaaggcggaggttgtagtgagccgagatctcgccattgcactccagcctgggcaataagagtgaaactccgtctcaaaaaaaaaaaattaggccaggcgcagtggctcacgcctgtaatcccagcactttgggaggccgaggcaggtggatcacgaggtcaggagcttgagaacatcctggctaacactgtgaaactccgtctctactaaaaatacaaaaaattagctgggcatggtggcgggcacctgtagtcccagctactcaggaggctgaggcaggagaatggcgtgaacccaggagagggagtttgcagtgagccgagatcatgccagtgcactccagcctgggcgacagagcaagactctgtctcaaaaaaaaaaaaaaattagtactctcctgaactggggacattgttccctaaatagcatctctagcaacaaaggaacctagagaagacagataaaatgaccagcacatgagcaatagggaggttgttgggaaagggaggtgtcgggaccttgtccagggaggccagttagcttctagtctggacatggagtgatgtagagtcctcagcttactttaggatagagctgccagggagcccagatacttaagttttctgggcagaaacaggccactagggggaagtccaacttacttcttttagtgagaaatgatttataaaactgaatcagggacctcagcatcatctagtccttattttacattaagaaataactggctcagaaaaggaaagtgatttacccaggaggctaccctgctagaatgtagcatttattcagtttaaccatttacagagtctttgcagtgtatgtgccaggtcctgagggtatgacctgactatgagctctgtgaggtgaggacgaccatgcacagttcttggtacatacttgttatcattatttgcaacttttttttttttttttttttttgagacagagtttcgctcttgttgcccaagctggagtgcaatggtgtaatctcggctcactgcatcctccgcctcctggattcaagcgattctcctgcctcagcctcccgtgtagctgggattacaggcatgtgccaccacgtccggctaattttgtatttttttttctttttttttgagacggagtcttgctgtgtcgcccaggctggagtgcagtggcgcgatctcggctcactgcaagctccccctcctgggttcacgccattctcctgcctcagcctcctgagtagctgggactacaggcacccgccaccacgcccagctaattttttgtatttttagtagaaacagggtttcatcgtgttagccaggatggtctcgatctcctgaccttgtgatccgtccatctcccaaagtgctgggattacaggcttgagccaccgcacctggcctaattttgtatttttaggagaaatggagtttcaccatgttggctggtcttgaactcctgacctcaggtaatcacccacctcggcttcccaaagtgctgggattacaggcatgagccaccgtgcccagcctgtttgcagttattgatcaagcacttctctgtaccagacactggggtttatagcatttaatcttcataacagtcctatgaagtagatacctgcctatatagctagtaaatagcagagccagcaggtaaaaccaaatgctttttttcttagtaacttcattttactgtgtcaagaaatatttgagtgcatgagtgcacaaaggaaaaaaggaaaaaggaacctcgtcctcaggtctttagcctgatactggttgctcctgaacactggtttctctctttagccttcaacctggactactacacagaggttctggacctctcctacctgcttgaccacctggcttctgaccctttcttccgccactaccgccagctcaatgagaagctagtgcagctcatcgaagactatagccttgtctcctttatccctctcaacatccaggtactaggggctaagacgggactcttgacagtgcatgggattcaccaagccaaaagcacaggaagctttgagggcttaaagaatggtctttgccggctgggcgcggttgctcaagcctctaatcctagcactttgggaggccgaggtgggcagatcatgaggtcaggagatcgagaccatcctggctaacccagtgaaaccccgtctctactaaaaatacaaaaaattagctgggcgtggtagcaggtgcctgtagtcccagctactcaggaggctgaggcaggagaatggcgtgaacccgtgaggcagagcttgcagtgagccgagaccacgccattgctctccagcctgggcgacagagtgagactccatctcaaaaaaaaaaaaaaaaaaagagtggtctttgccctgggttgagtatcactgagagtaaccttagtttcaggaccaggggctgctgtaggggcagaattccagtaaagagagtggaccaaacttttgccctgtctattttgtgttgctggatcctctcttcacatgttctgtcctctgtgaaaatgggtgagttcagaaagtcatcagcaagaaagttcaccaggaccagggacaagtctcttaagccctttcaactgggcaactgtctgttgactttgcaaagtggtacccaacccctgtgcctctcacctttaccctgcagagataacctgggagacgcaggtgcatgttagattcctttctgcagtgggtggacttgagctaacttgtctcctcccttctaatgccacactcttctgatatgaggagatgaactctataatatcaatcacaacaattacctcttatttatggctttctgtgctgggcactgtgctaaggactacacatacataattttgctttgtccttcccaccatgtgatatatggactgttcttatcactgtatgtggatgaggaaacagttatagtttttttttgttttgttttgttttttgtgacggagtctcactctgtcacccaggctggagtgcagtgcgttatcttggctcactgcaacctctgcctcctgggttcaaccgattctcctgcctcagcttcccaagtaactgggattacaggcatccatcaccatgcccaactaatttttgtattttcagtagagacagggtttcaccatgttggccaggctgctcttgaactcctgaccttaagtgatctacctgccttggcctcccaaagtgctgggctttacaggtgtgaaccaccgtgcctggcccagttatagatttaaaacatgcatattcattggatgtctacttaagagaagtactgtgccaggcactgggaatactgcgacagatgacctggccctaaggggtgtttagttgagtaggggaggcaggtgagttaataggcgtttattacatggcagggataccatgtacaataggtgtaaacccaggggactgtggatatgcataggggagcttatctgttctaatctgagtgagttggtggtcaggaaacatgagatttatccagcctttggggacatgtagaactactccaggccaagaaagctacaggtacagaggcaagatggaggaaggtgtatttagagattgcaagcagttttacatacttctgtttcactcacagaactgtttctctcctccctgctcaggacaaggagagcatccagcgagtcctgcaggctgtggataaagccaatggatactgtttcagagcccaagagcagcgaagcttggaagccatgatgtctgccgcaatgggagccgacttccatttctcttcgtatccttgccagcttcctggccatagcagagagggtgagacatgggactcaagaatggccacaggaggtgcagtcatcaaccttgtggatgaccaatttctttttttttttttttttttgagatggagtcttgctctgtcgcccaggctggagtgcagtggcacgatctcagctcactgcaagctctgcctcccgggttcacgccactctcctgccccagcctcctgagtagctgggactacagccacccaccaccacgcccagctaattttttgtatttttagtagagacggggtttcactgtgttggccaggatggtcttgatctcctgaccttgtgatccacccaatttcttttttcttttttttttttgaaagggagtttcgctcttgttgcccaggctggatcgcacaatggcgcaatcttggctctgtgtaacctctgcctcccatattcaagcaattctcctgcctcagcctcccaagtagctggtattagtgtgcgccactgtgcccagttagtttttatatttttagtagagacggggtttcaccatgttggccaggctggtctggaactcttgacctcaggtgatccacctgcctcagcctcccaaagtgctgggattacaggcatgagccactgcgcccggccgtggatgactgatttcatattgatcagttgggcttcctgatgactgtctctcatgtgcaaaggtggtcccttggcttcagagttggttgtactgaggacaagagaggatattgatcaataggagtaacaaatacagaggcccagaaatgagagggcattagtcattcgggagagatgcaggagtccagttcctggtgtgttgcatgtgaagaggaaagggcgttgcaggggtacaggcagggctgccgagggaggggcctgagtgccctactaaggaatgtggacttcagttcatgggtgggcagtgggagcaagtattcaagcagtactgttgaacagggtgtgacacaatcagatgtacattttagaaaagcccctgcaattgtggaaaatgcatttaagggacgtgattgggggcaaaagagttttacagtcttgctaggtgagaagggttgaaagatttgtagtgagaatagaaagaaaggtgtagaatggaaaaatactaaggagatagactgtaagagtcagtgactgaatgggatagatggagctggagtagaacttagcttcccagatctctggcttagacggtgggtggttgtactaatcactgaggcaggaaaaggaggagggagcaggtttgtcacatggatgaaagggacaagagctggcagatgtgctgtgttcaggggtccatgggacatccagagctgtccaagaggcagccagacttttggagcttggttagtgactaatgaggctggagccaaggtcatgggtaggtgtccatcaggtcacagaggccatgcgtgaagcaggacagaaaagtccaggccctctaggctgatgctctcacagattcagcatctatgcagcatgctggagacaagggggactcaggagtcttagggtatagaggaaaataattccagccaacacttactgatgtttctcgagccatatgtgggaaacaaagctcatggggtcggggttggaggaatgacttataaatgatggcagtagagtgtgcagtccctgatgaaggtactaaggagctgcgtcacacctgcagttaatgtaggccaattggactgcatgtgctcagcaaaagaggggaggagcaattttttttttaaatttaagatggactttcttttgctgttgttgcccaggctggaatgcaatctccaactccagggttcaagtgattctcctccctcagcctcctaagtagctgggattacaggcatgctccaccacacctggcccttttttttttttttttttgagacggaccgtcaatcttgttgccccagttggagtgcaatggtgcaatctcagctcactgcaacctccatctcccacgttcaagcaattctcctgcctcagcctcccgagtaagtgggataataggcgcccgccaccacgctcagctaattttttgtatttttagtagagacagcgttttaccatgttggccaggctggtttcgaactcctgaactcaggtgatccacctgccttggcctcccaaagtgctgggattataggcgtgagccaccatgcccggcctgcaacttttatatttatttcttagaggcagggtcttgctcctttgcccaggctggagtgcagtgatgcaatcatagctcactgcgaccttgaactcctgggctcgttaccctcccacctcagcctcccaaagtgctgggatcacaggcatgagccatcgtccccagctgggaagggcagtttatgtttgtttattttgtgaggcagagtctcactctgttgcccaggctggagtgcagtggcgtgatctcagctcactgcagccttgacctccctgggctcaagtgatcctcccacttcagcctcctgaatagctaggactatgggcgtgtgccactgtggccagctaatttttgtagagatggggtttcaccatacagcctaggctgggagaagcaatttaaataatgtagtattttgtacaccgtacagatggttcccaacttatgatggctcaactttatgatggtgtgaaagctatatgcattcagtagaaatcatactttgggtacctatcaatcattctttcactttcagtacagtattcaataaattacatgagatattcaatactttattgtaaaataggctttgtgttagataattttgcccaaatgcagctaacgtaagtgttctaagaatatttaaggtaggcgaaactaagctatgatgtgtggtaggttatgtgtattaaatgcattttcgacttaagatatttttgatttaggatgggtttatcaggatgtaaccccatcataagtcaaggagcatctgtacgttactttatgtattcgtatatataaaggattctattcacaaaaccatgtatgctgcatttaacaaataatttgaggaattttaaagagtatttttaaccatatacatttgtgctgattttagattctgccctgaccctaacccccttaagattcagcagctctctgtaagagagtagggactgatacaaataagggagtggtcagctttgctgaagggtaggtgggtaaggaaagctttatggaggcatgacacgtgagttgtgtcatttcaaggtgagggttagccagtctaatgaagaagaaaagggaattcaagttaagagaacatgcaaaggcataggggttcaaagttgagacaggtttcaagggttgcaaataagatggcatgggccaagtgtaatggcttcatgcctgtaattccaacactttgggagttaaaggtgggaggattgctcaaggccaggagtttgagaccagactgggtaacatagtgagaccccatctctctctcttttttttttttaaagtataaaaatttatttttggccaggcgtggtggcttacgcctgtaatcccagcactttgggaggccaaggcgggcggatcacgaggtcaggagatcgagaccatttctgtcaacatggtgaaaccctgtctctactaaaaatagaaaaattagctgggtgtgctggcatgtacctgtagtcccagctactctggaggctgaggcaggagaattgcttgaaccagggagttggaggttgcggtgagccgagatcgcgccactgcactccagcttggtgacagagtgagactctgtctcaaaaaaaagaaaaagaaaggtctgtaactcgaacatcatttggtgggctaagtgctttacttgcagggtcatttaatcctcatttcaaccccttttataattgaggcgacaggcccaaggtccctctcccgggatgttttggaagaacagttcaaaccttggttttggtgggtgtagaatctgtttcttactttggagccatctggtagtacaacagccatggtgtcctaacatagccaacctagccatggctaacctccatgtcctcgtcagaccccagacccagacatcatcaggttttgaactcccttagtctggctccagagcatgtgccataacgcaaaattgcaaggttagtactgtccagtcctttgatccgcagcagtgtgtggaagaggcagatagaggagcatttgagtctgggtgtttttggaggcttctcatacctgattggtccctataattatgaggaagagagggatggacatggttggagtgtaggcatcagcggaagtcagatcctgcccagaccagctccccatcctctgcctatgctatcagccttgacgcacccttcctcagcacactgggcatccaggagaagtacctggcaccctcgaaccagtcagtggagcaggaagccatgcagctgtagcaacaaggtggaccctggagagcaggatgcataatccagcactggggaaagtggaggctcctgatgcaggctgcagacccaagagcaagtcctcccagccagagctggcgggctggcaaggggatattcagctctgcaaaggacttctggccaaaaagccagacatggtgccaagcagaacaccccccatactgtcagtggtgtccgtgagctctgggccctgccaccagaaagtcgagcactggtcctagtcaggctgtgatgaaatgtgctacaatacaagagtttattttctactttttgtgacttccaaacttttcttcagtcttccgggcccaggggtttggggaagaatgagggagtgtcacctagccttggaataatcagtatttccccaaagcatataattcacattcagtcacataggatttacattcagtctccagtcatgtgtttttattaatcttcagtttttggttctgaggtttgttttttaaaagatggggtcttgctatatggcccaggctggactcaaactcctgggctcatgtgatcttcccgcctcagacgcctgagtaactgggactacaggtgtgagccaccatgtcccacaattttcagttttaacagagcctcaagcttcagctttcacaggcaacacttcctaactagaactttgttaatgttttatattcactgtatttgttttatggttttattctattgttgacaagtgttaactagttttccatttacagtagtggttaaaagtttacttcaagg

SEQ ID NO: 9064 - DNA, 11557 bp, Homo sapiens; identical to SEQ ID NO: 9063

SEQ ID NO: 9065 - DNA, 5170 bp, Homo sapiens
agggccaatgctgagattgctcaggttcgaggcaaggcccagcaggagcaagccgcccaccaggccagcctgcggaaggagcagctgcgagtggacgccctggaaaggacgctggagcagaaggtaataggggaggggtgtggcctccaggtgggccgggctgctgctctctgtgctgctggccagtccagctagacaggctgggcttccctggccactgctgctcctgaagacgaattcatgcttcatgagcatacccttggttccttctagaagttccaatttcatgccagccctaagaccagcttcctttccaccgttcctggaactgcagcctgcatgtgtgtttactgccattttcattccttttcaacattcgtttatttgttggatatttattaagtgcctacaatgtgttaggcgtagcccttgaacctctgcatccggcatgcttactgggtgagtggatggggtgcccaccaggccctggcagtggtggccagctgatgcagaacatgagcagtgtcagggctggaagggcgcccaggtggcctctaattccagggacaggggtgatcttcccgaggacactgagcttgtgcgcaggtttcctccttttggatctggcacccctccatccactgtgagcactgtctccctgggtgtccagataagaagctccctcagcccaggagggccctctgagcgttgggctgttgagactgcgtgtgtgtgagtgagggccagcctccctccttggatgtgtttctcaaggagaggatttccagatgtgcagcctccttccagtcaatttcctgagccttggggttcccctgcgtagtcatccacgagcccagcagcctgggttggcagcacaatttttgcattttgggccttgataggcagtgatggggcatcctttgttggcatcagaaatccatgtgcctcccgagtggcctctactaccgcaggagcacccagccagccccaggggattggctgtcctcctttgcccactgtggttggtggtggtctctaggggcatttgggccaagcagtggtgatctctgccctgggcaggtgccagtcctcactccacctaagtaatgttggggaaggagccctggggagcaagaaatggggctcctgtccccactgcaccatctgtcatggccctgggcaagcctcgcaccccacctcagtgtctaggttccatctagccctgaaaattagaagcctgtatcgttgggcagatggatttccctgaggtccatatctgatactcacccagtctccactaggccctgtgccctattggatgttcctggttatccagaatttattcatattacagatcattattttcattcttttttttttttttttttttttttttgaggcagggtcttattctgttgcccaggctggagtgcagtggtgcagtcatggctcactgcagcctcaaccacctgggctcaagtgatcctcctgcctcagcctcctgagtagctgagaccacaggcatgtgccccctaccaggctaatttttttaatttttgttttcgtagagatggggtctcactttgttgcccaggctggtcttaaacttctgggctcaagcagtcctcctgtctcagcctcccaaagtgctgggattataggtgtgacattaatttaattttttacctttcttcttaggatgaaaaagacagatggctactagacagttttaatatcaaaattgcattagaaaatagtttggaatatgcatatgttcaactacctgttttgtaggctctgatgattgttcttagcagtatcctcagaacgacatatgcggtcacaactgtcaagtgcaagtttttgctcactcacccagtatttattgagcatcattatggttttagtgttgagtgtgcattttctattccttgtctcttgataatctatgtatggcatatttggtgacttgaaaaatggaatgtttcattaaaataaagatcatactagaagccaggcatgttggcatgcgactgtggtcccagctattcgggaggctaaggtgggaggactgctggagcccagaagttcgaggctgtagtgcactgtgattgtgcctgtaagtagccagctgcattgcagcctgggcaacacagcaagaccccgtctctaaaataaagaaataaaaaccatacttcacagtcattttggctattgtagcagttgaacatacaatgtttcttggtgagaaatgtagcaatgtgtgtgtttgagatggttcccccatttccatcagggtttgatggtgtttaaattgcattatcttaaactgaacttccagaggaatgaacaaatcacacaggttcttccctgaaagacctgagtgatatctaggggatagtcccatcttaaagagattcagaaacatgattcacccagacaattcttgaatggaggcgctgggcatttcgcccaatcagcgctctgtaaaggcttttgctccatgagctgagctttatgatgaggcagtttgcttagtggtggctgatgacgccaagagagagcttggaaaacctccgggaatcactttctaacgggtctgctgatgcctcttagccatcagtcactgtacataacgttgtttaacagttataatggcaaagccatataggagctggggcaacctgaatttgtgttccaggcttgccacatctgactggctgtgtgaccttatacacaacccttaacttctctgagcctccatttcctcactgaaaaatgaggataatactggcttccttgaaggcactattgagggaaccaggggaggccagagtgcctgggatgtcttcagcatggtgagcagctcacggtgggcactccaataagatggaagatcaccgttagcagccccagcaggggccatagtggcaatgagagttttttttttctttcttttttttttttgagatgaagtctgtctctgttgcccaggctggagtgcagtggcgcaatctcggctcattgcaacctccgcctcccaggttcaagcgattctcctgcctcagcttccctagtagctgggattacaggtgtgtgccaccacgcccagctaatttttttgtatttttagtagtgacagggtttcaccgtgttggccaggctggtcttgaactcctgacctctggtgatccacccgcctcggcctcccaaagtgctgggattgcaggcgtgagccaccacgcccggccaataatagtaattttaagattagtggtcagtgctgtatcccattcagagccccatcgtccagctggcatttcagtgcctctctcgagttgttgacctcagatgcaaatttgagccaggaggtgggccagggttctgtttgaggcaggcttctcccacagtggggactgctgctgggaaggactggaacttcccctccactgaggagagccacttcctcccagcactgacacaatgatgaatgacaccaggagttctaacctagaaacagagggcacgtggctctgggctggaacatgtctcaggagttctgaggttttcagggaagggctctgcacagcctcaggacaggcttttggtgaagactgatcttccatgggaatctcaaggaaaagctggctgcaaaacatccccagtatgctggagggatccagcccccttggagaaagccattgaagatcggtcgtgctgttgaacttgatcagcatcagagccagcatgtaacctatctgaaagcaaagccacacgtccatgatggagggatcgtcccgttggatcccctcactttctgagaagatggacagtgtaggatcatctgtgctagacaaacctgtggttggttccccttgattagacaggcaaggtgtggtgggagaatcaccttaaagccagctcgcatctgccccccaccccccatgaccctgtagccacagcatcacctatttggcatccctctgagcaatgccagtgatcccattcacgtagaactgcgtaaccctccttatgctacatctcaaaaaagccaccgaggggtttaccccagacgctcctcacctcagatcacatccttcccgggcaaataaagggaaaggaaccagactagttagtccttcactctgtgctggtcactgccaggaaactacatttatcacctcatttacttctcagaaagaaacatgttatcacctatgttctagagataaggacaccaaggctcagagaggttgtgtaacttgtggaagatcacacagctacagctgggatatatactcagattgtttggctccaagtcatttgtctcactgctttagtggggaccaaggggcctggtggtcccccatctccccaaaaagccccatgagcattctgactggccagatttcaaacatcagcaacttcttccttgtcttcacttgcagaataaagaaatagaagaactcaccaagatttgtgacgaactgattgccaaaatggggaaaagctaactctgaaccgaatgttttggacttaactgttgcgtgcaatatgaccgtcggcacactgctgttcctccagttccatggacaggttctgttttcactttttcgtatgcactactgtatttcctttctaaataaaattgatttgattgtatgcagtactaaggagactatcagaatttcttgctattggtttgcattttcctagtataattcatagcaagttgacctcagagttcctgtatcagggagattgtctgattctctaataaaagacacattgctgaccttggccttgccctttgtacacaagttcccagggtgagcagcttttggatttaatatgaacatgtacagcgtgcatagggactcttgccttaaggagtgtaaacttgatctgcatttgctgatttgtttttaaaaaaacaagaaatgcatgtttcaaataaaattctctattgtaaataaaattttttctttggatcttggcaataagtgtgcctcgaatttattttctgggaagggttgagtcttttctcacctttgtcaaataccagatttggcttcgtgctcttctctgtctgggctcatttctttgtccatagacttaaataatatttcctttgttatcgtggctgcatttgtaggatgaagctaatgag

SEQ ID NO: 9066 - DNA, 142 bp, Homo sapiens
gggcactttggagattaaactagcagtgtgcctggcctgagatcgcttcattgctgccgacttgctcagggttcccaggttgaagggtgggtggatgaggggagtcgggggtggaaaggtgtgatcatttcctagggctgcc

SEQ ID NO: 9067 - DNA, 3335 bp, Homo sapiens
aacagggcatagtgccatggacgttgcaaaggcatatgctgattatagaataattgatctgattaaagaaaagctagataacttgccgaaaccagcagaaaatcaaaaactaaaaggcaagacacctcctatactgaagactgaaggccctgaaattaagaaagaagaggtaagaaaaatggttgactacccattagtaactggaactctttaaaaatctgtttgggggaaggcagaagcactatttacatattgttatacaacatgggtaagataatatgcagtgcatactttcaatagcattattatatagtacttttaaagaaatatctaataaaattcttatcactgaagagcctaaaaagtactcactgcaaagagaatccatacaaaaaccaaatgggttcagccaaatacaattagaatgttgaaaaagaaaaccaaaactggtgttggatttgtatatatttggtcctgaattatacagatttgatgagatggtccaaatagggaaggagattaacccttatgaggagtgaagtaaagcatgatttttcttcattttggtctcattaccaccatatcccctttcattgcccaccacttccccttcctcccacctgccgcctccaccaaggaattttaatgaataccactgaattctgggatacggagccattgtctctagaatatcctgcaaaatggttgtaggttttcaacgtttctggtaatccggagtgatttggaacttctaaactgcagtggaaggttgaagttgttgcccatgggagttactgagacatcaagactttatcattagcaggaaacccctaagtgtgtctctagattggaagcttttcttaagggagcagaatatctactggagactcttggctgacacaggacaagagatgaaagtcaagaaggaaaagttttagtgtcatcaaattggaaagcattggggaaatgtaggtggtagggagtagataggatgaagggattgtagacagacagcagacttataaacatggaggatgttagaatggcaaaaggtgaaggaggatcagtcaactaaagttcttccattgtcattttagtaggccacagatcaaggatgggtatctcaaagacttacgtgatcttctaccaatacttctaattaaagttaaacaaggcaaactatctctccccatccccaaagttataataatatactattttatctcaaattataacttgtacagtagcatttttaggtttctttctggcttcagagtaagatgtgaaacagcaaataatattagaaaatcagtatagatttttacaatttataatttttttgttcttgtttccaggaactgctgtcatcaatttatggtgtaccaaccacatcagagggaaagaaagtacagaagggtaatgtggttcatctgaattcattgattaccagtggttatactaagaaagtggatatcacatttattccacggagggtaagtgcttcgaaaagatcttcatagcatggtagaagctcataatgtcattttttcaaaagctttttatgtagaatatccaaacaaatctgcacagtttgtctttcatagttactacttgtgaatgttcttttgccaggttctggtactttcaactcagtatgcccaagtgatagctcccggcatctagttctctttctattactatttctgtattgagatttacattttcctagaaaggttgaagtctttctgaatcaatggcatgatctgcagctgtttaatcactaactcctaaggatacttttttttggtacttctcagacccaacccttctttgtacttaactactaccagctcatgcaggagtttcatataaatcaagactggatttattcagtagcttccgaaaacctccacaactaaagaggtggagacatcttttggagaaaagagttgtctttccattggccatccaaccaggctgaacaagcagctcccctcgccttctattataaaaataattttgacttctacataagacatataggtagtaaacctagatgatcttctaattcctttgcttccctgttttggcatcctaaaaaacgcacagcagctggtctgagcataactggccagagaagtaactgaataatatttccgacattatttgtctagacagtcatcatcaaaaacagtgatgctcgtgcaaccactagtgtcatatgagagggggggaagaagttaaaacacatctaaaagtaaatttaatagttttaagttaaaactataaacaaatttttaagttaaaactgtgtattgaaaattgtctggatattagcatatttactggctgtcatactcatacctgctggggtatggctatttttctttttaagatttggagtcctgaagccacaacagcagagctgatcaggaagagggaactacggcgagagaggtttacacatgaggtggacttcgacgattttatgatgccttttcagaagaacatcacagagaaagctcgagcactggaagctgccttgaagacctaagtcatagcagttatttcttggggtaaatgctttgaggcccagggaccaatctttggagaaagtagatatttccatcaaagccaaagcaatccatacaccaagaacttgttaccaagaatttctttttgctttaacaactataaatattcttagctgtctagagaaaagatgtatgttattttgaaatgaatggtatgtcattctggataaatccccaagcccctttatgaatgtagtgaaatacatggcatgtgggttataaacgttgctgtcaaaagatttaccaggtctacaccattatgcttattatttttttaattatcctttttatttattaaatagagacagagtctcactatattgccccagctggtctcgaactcttgagctcaggcagtcctcccaacttggccgtcgaaagtgctgggattataggcatgagctactgtgcccagcctgcttattgaagatacatttctagtggaaattgatgaaacaatttaggttttggaaaaagaagtaatatttaatcttttaaggaaggagtttatttctcacatgccattataaactatgtgtattagataccttgggttgaatacacttttaacagccctagatcgatagccctagccctagatagatagccctagccctagatagatagctattaggttggtgcaaaagtaattgtggtttttgccataacctttaattgcagcaaaaaccgcaattacttttgctccaacctgacagctaggtatctagctagctagaaagg

SEQ ID NO: 9068 - DNA, 317 bp, Homo sapiens
gacagatatatagatgatagatagatagatgatagatagatagatagatgatagatagatagatagatagatagatagatagatagatagagatttattgcaaataattggtttacataattttgggccccagatggttaagtgctaaatttgtagggtaggctatcaggaagtgcaggctggaaacatgcaggagctgtccctgaagtccacaagtggaatttcttcttcatcatggaaacctcagttttgttcatacacctaaatacttcagtatgtctttcctaaaataaaaggcatccatttacctaaccaga

SEQ ID NO: 9069 - DNA, 1496 bp, Homo sapiens
agtctcaagttttcttccagtttgtttagatttaaatgatacatttgtaactttttaaaaactaaattttggttggatttttcatgaaaacctcttttttctttatcccctaaaaaatggtttgaaatgtcattgttatttaaaaacccgatgtgttggaacttctttaatctgctgtttcctctttttccccccctttgaaagtttcgcatagtgtaaacattcactatgtcttttaccttccctgctcctcccatctgggaggcgctgatgctattacccagtgctgaaaaatggcactctaaaggtatgggaaggaaggagcccaaggcaaccacctgctgtcctttcagccttcctttggagactgctccatcagtgccgaggtgtgtgggaacaggcttcactgcaccgccatcttactgagttgcttcacgtgaggaaaagggggctttggccctgtgactcagttccacattttggattgcatactggaaaagaagccaatcttcttgctagtaaaccagcaacccggctgtatacagtggtgacccaagcaatggatataaacctaaaaatctgagggaggggagaggtggaatacagtagttcttggaatctgaagtctcctatttgatcaggttatttcctgggacttggcaaaaatctgattggtggggatctcctaggacctagtggacatctggtattaatttaatctcaggaaaaacaagaaattaacccagagagagtctgggttttggaattcagcgtagctacctccagaccgtggtgtctggcctccatttttgtctgtcattcagctctgacttacagctgcagtcacctttgctataaggcacctgggtagaagggtggatgggcttcacatcaatttttttcttcctttagggtgggggattggtttggctttcttttgttgtggttttttgttttatttttgtcaagattgatttttagatgcaaggacttgaaaagacccagaaggatgccaccagtttttccttgaggcctaggattttttattctgtcccgagcagaggtaattcctcacaacttagtgcaccagtagcaccagccattttgagcagagtacctctttggggagcttttcgttttgttttgtttttaattctctttccttagcagcaaggtcttttttcctagagaatctactccgttgcagaatcattgcaacctcaggagccctcactgattgagtgctgtcagcctgatatactactttggactctggaaacagatatgggttctattctctatttctactgtgtgtcgttaaacaaccgtcggagaccagatgacctgttagatggctagtcctgtataactcgactctgtatgtttcaatgtatgttactgcaatgcttcacctgctgtacagtgtttgtgagatgctctttgaagatggtacttttatattttttcattttcaataaaagtacattccttcccac

SEQ ID NO: 9070 - DNA, 474 bp, Homo sapiens
ggttttggtgacgccggtggggactgccgctatatgtgcagggtgcccgggggtcatagtaatgttaatggagtaccagaatctctaacagtgtggtcctgtgtagccacattgctacacttacagagatgctttggggcctttttggattaagacagttctaaaagaccaggcctcacctatgatctgtgtataaagaattagcatcgcactgtagatctgcaagagaaggccgcctcctgcagtgctctctcttggtgaatgctaactctgctcgagggccttttggggaaaggacagtgtaaaacccttagagaggtaagtttcccacccttccaacctctctccacctgcagcttgcttggtgctgtcaggatctggatttggggggagtctctctgtagtggaaccagtgacagaagctgttctttagaattttcaggatggctgtattctgcggtcagaatgagagag

SEQ ID NO: 9071 - DNA, 492 bp, Homo sapiens
gtaccacaaaggcaaatgaggaaatgactccccccacctcacacacatggaatatttaaacaaaaatgccctgctaatctttagagatgccagtgttttcaacacatgaaaggtacccagtaaatatttaaagaaaatacacaccgtaggttctctaatgaatttctttttcttctaaataccatccgggcaagatggccagacatcgtggcggtccgtttcatcttaacgtttccattcaggtttcacctccttttccataaggccttggtgtgagctgagattgaatgtttaattgaagaggacataattttcacacatacagcaaagatttgatgaggctttgaggtttattgtagccattaaagtgtcgtagctgctggcaaaatcccagaaaatgtctaaagctaaaccagatgtgattagcaaatttcaagaagtatcaggccctagatctccaggcaggcagagtcttttaaaaaaaaaaaaaaa

SEQ ID NO: 9072 - DNA, 490 bp, Homo sapiens
gtaccacaaaggcaaatgaggaaatgactccccccacctcacacacatggaatatttaaacaaaaatgccctgctaatctttagagatgccagtgttttcaacacatgaaaggtacccagtaaatatttaaagaaaatacacaccgtaggttctctaatgaatttctttttcttctaaataccatctggcaagatggccagaatcgtggcggtccgtttcatcttaacgtttccattcaggtttcacctccttttccataaggccttggtgtgagctgagattgaatgtttaattgaagaggacataattttcacacatacagcaaagatttgatgaggctttgaggtttattgtagccattaaagtgtcgtagctgctggcaaaatcccagaaaatgtctaaagctaaaccagatgtgattagcaaatttcaagaagtatcaggccctagatctccaggcaggcagagtcttttaaaaaaaaaaaaaaa

SEQ ID NO: 9073 - DNA, 355 bp, Homo sapiens
gcaggggagcttgtttgctccacggctgttcctgaatgcccattccctcttgtctcttggccccttgtgaaacccttggcctgacctctcctatagtctttgagccgaaacctgatccctgtttgatcttttcccttctccttccaggggctgcctcactttgacgtccctgtacgtttgatgataaatagcaagaggataagaggagtgaactgggaggcgagcagagagacaagggttcccccatagcgcctcactttggtacaccttcttttgtctagggaggctctgaattgtcgttccggatctctcagtactcaactgacactttcctcagccgattttaggaaaatac

SEQ ID NO: 9074 - DNA, 355 bp, Homo sapiens; identical to SEQ ID NO: 9073

SEQ ID NO: 9075 - DNA, 393 bp, Homo sapiens
gagtggctcaagctggagaagtcttggaaacctgatcccaactaccaggtgtttaaagggtacctgtggggaagtgggtttagattcttctctgattgcagagagcagatccggaaataataggtggaaatgttaggagggcagattgggtttaaattttaaaaaatctttttttaatgaaatttttgatttgtaatttttgtgggtacatagtaggtatatataagaaccttattttctgttgtttcccttgctattataaatttattactgccagtcatggtggctcatgcctgtaatcctaacactttgggaagctgaggagagtggattgcttgaggccagaagtttgagaccagcctggataacatagtgagaccccatctctacaca

SEQ ID NO: 9076 - DNA, 393 bp, Homo sapiens; identical to SEQ ID NO: 9075

SEQ ID NO: 9077 - DNA, 393 bp, Homo sapiens; identical to SEQ ID NO: 9075

SEQ ID NO: 9078 - DNA, 393 bp, Homo sapiens; identical to SEQ ID NO: 9075

SEQ ID NO: 9079 - DNA, 195 bp, Homo sapiens
gaggccagaagaccaatagataaaaaatatctcccacccgtattccaacctattaccaagttctacatttctagctctgcaggagcctcctcccaggtctccctgggtcccatctgcccttctgccaccagtctccacccagtcaccagagagagagcttcttaaaatggaaactggatcagatcatgtcacccc

SEQ ID NO: 9080 - DNA, 195 bp, Homo sapiens; identical to SEQ ID NO: 9079

SEQ ID NO: 9081 - DNA, 195 bp, Homo sapiens; identical to SEQ ID NO: 9079

SEQ ID NO: 9082 - DNA, 1214 bp, Homo sapiens
gcccaggtcccatgcttggaggagggagttgcttctcaagatgaggctgctctcctcccatcctggggccatccatgtcacttgctgagctgtccagcccctgtcttggggactgcaccctttcaccattcttcccttggggcctggtacagggtagacatccgtcaatccagatgaagacctagggtggtcttggccttgcagctggtcctcactggcagtatgtccctttgcaggtggagcatgactttatcctgcaggccgagcgggaaacgttcatcgagcagatgaaggatgtcatggacaaggcagaggacatgctcagcgaggacacagacgccgaccgtggctccgacccagggaccagcccgccacacctcagcacctgcggcctgggcaccggggaggtgaggttgtgaaatccggggtgggaggtggtgagagtgcagtggctgggcaggtgggcgctgcagctcagtgggctcatttctgaccctccacctcattcaggagagccgacaatcccaagccaacgcccccgtgtatcagcagaacggtgagtctgcaacttccctccctgcttttaagcaggcgtttgatgaaagtccccactcagcatattaccaggggtttggccattgcttggggggattatggaagcatgtggtgaccaggggccccagtctggggacagctgccctgtccgaggagctgtcacctgcaaccggcatcacggccttcatggatggtgccttgggcatcccaggaaccaagcctacgcgaggggtcctctcgggagcttcgggggctgccagtgaggcaccccaggttctgctgtgcaccccttgccctctggtgtgagggaagagcaggcagaagcccatcaccagggcctctttaccaaggagcctggggaaccacctgcttcgtggagggaagcgttggggattaatgactgggaacagtgttctctgcccacacccttcctggagaaaatcccataggtgtaaaggagttcacagacccactgtggcaagtctggtgcaggtgatgggggtcacactggcctggaaaggcgctcactcactcagcgtgctgtttctgttctgcccttcagtcctgcacaccgggaagaggtggttcatcatctgtccggtggctgagcaccccgcccccgaggcccctgaatcttcgcccccacttcctctaagctc

SEQ ID NO: 9083 - DNA, 870 bp, Homo sapiens
cgccagaagccagccaaggtatgagcagcaggcgcccacacaagcccctccctgtttcatgtacaggcctccttctgtgcatgacccagccggtatgtgccccgtgcccaggtccatgcagggggctcaccctgccctgtctcccatggcgcagagcagcctgtggggctgtgttcctatccttgttttctgctgaatcagctcagtcaaagcagcctccaggtttgagtctgccctgttaccccaccaagtaggtggctcgcatggccatataggtgtgtgttgaagagctccgctgtccttccttcacagtgttaacctggcaactccttgctcctgtccctttcctctgtgccgcacacctgcagcagacacgcctctgctggttctgcttgctttggggggtggggtgggaaagtccctgttggtgctgagactctgattttaaagtgttcacacagacatttatcactgtgcattgatctgcacctgcacctgcctgtacagatgccaacaagcccgtgctttgggctgtcagttaaatcttgttggtcctttgggaggctgaaaatagtcacttgaacaaatttaaggtttaattccttaccagttggcaggggaaagttactgattctataacttgacataaccttatggcacattcatgaaaaatatctgtaaatcatttttaattttatgtcatgtgcttccagtgactcccattatcttttggagattcgttcccatgggggacaggtcagcctaataacgaaatccaaacaaagcaacgagctgaaacaaggtgatctcaggtaaagggcttggcctcagcctgggctgagaaatcagagagaagcagccttgcctaca

SEQ ID NO: 9084 - DNA, 372 bp, Homo sapiens
tacagtggtcgggaagactttattcaggactgtggcaataagcgagagagaatgagtttaactccaaatgcagcagagaccacaggggattggtagcagaggagcagtgtggtgatgggtggctggaaaatagctaagaggagacatcaaggtcagggattctggagaaaccctcgtaacaggatccttgctgggggtgggtgagaggctttgttcaacctcaaaggtgggagatgaggaatatggtcagatacaaaggctgggaattctttctacaactggcttaggctgaagacatgatggggcctagtcaagcctagttggagggtcagaggcgtgagctgcgctttggtcagggaggagtctttgtca

SEQ ID NO: 9085 - DNA, 604 bp, Homo sapiens
cctaaattaaccaagccaccttgttgaccaacttcaaaaacagtacaatgggccaccttgacccataaactcttttcctttatttccattggactcttcttcagagtaaatgtctaagaatgcgggcaaaaataagaataaccacattctagaagtcaaggggatcacaagagggcttttggctctgtgccttttttactatcgaggatagaagtatattttaaaatatctagtagaggagaattcagtgaacaaagtaccttaatatgtcagtatttcttcaagttcttcaaagacatgaaaaaataataataccttataataaatacacttcaactctccgacacaaatgaccacttaatcattctcccatcagctcccacacctccaccctcccagctctcaaaggcccccatgtattcttaacagaaaacaaaacaagacagtggtgatacccgtgtagctcatgtagttggtgaacggagcccctgggaagcgagtgaagccacaggtgtcactagtgggctctggttcccggcacagctcactcttgggagtgggggcggtgtcggcacagaggtctcccgtttccatggatggcact

SEQ ID NO: 9086 - DNA, 218 bp, Homo sapiens
tccttgtttacaccccaaaattgtcagggccaggcccagtcttatctctgaaagacaagacagagaatgtcaacatccctggatcaaccctctggggtccaaggtcacccctggctgtgctgcccagctggccctgcccttctttcacaggtctgatcccagttcccaggacttgcttcacttcttgcacctgagccctccctatatcaatagtcttc

SEQ ID NO: 9087 - DNA, 1924 bp, Homo sapiens
ggccacagaacctgccaataaactgggtgaaatgaacactgttgagttttctgtacatcaaaataacacaaattctccttcaataaaaaagggggcattctctctctctctctctctctctctctctctctcacacacacacacacacacacactactgacaaaaatataaactagaaaacctctttggtgagcaatttggcaaactttaaaatgcacatacacttttaaaaacagcaattccacatctaggaacctacccaaaagaaaactcacatatatacaaagatagaactttaagaatttttactgcaatccagcttattattaaatatagaaacagtctaaggttgccatcaactggggactgattcagtaagaaatggcacaggcatatgacataataccacgtggccactacaatgaagaagagtttttaaaattgatatataactatgtacatgagaaatttgttttagaaaaaagtaactcacagcagtatgtcacatgtattttcaataaagggaaggaaaaggaagagaatatccaagagcctgtgcaaacagagtaagtccatgaaaggaagcgaactctgaactgcagctccccgcgcggagcggggcagaggcagcagcagcatctaaggctctgactcttacagtgctgttcgcattgtgtctgtgattgtacctttgggtatgtcgtcatgaacaaatggtggagaatgagatgatgagcacccaccaacacactgcaccgcaagaaataaactgcaccaacacgagcgaggcgccacggcacccctcccgggagaggccccccagcctggtgcttgctcgtcctcccgctcgcccctggcttgtcctcccaccgaggggcacgcgccaccctggacagcagactgcgctgctcacgggcttgaggcttctgtattttgccttttttatgagcgcgattttcagatgtacttcaggtgatgcaggtaccactatctcactcagatgtagctctcgggtactccagtacacccataaggtatttctccattctctgttaatggtcttatctcagtaagcaacagttgagaaggaactcactcctgcaaatccaaccttctgcgggcagcagtcctcaagtgctgtggtctcaggactcctgggagtacctacaaacgactgagcacctcagcgagtctttatttttgtgggtttcagctactgatgtttctcataccagaaattaaactgaggaatttaaaaatatgtattcattcatttcaaaattacaccaatcaatcctttacatatcacaaataacatattttcatttttaaaatttccaaaatccattgtatggaaattttaagaatttgggtgctgctacttaaccaggtattttaattaattaatttaattaattaatataactttgagtcagtttgcagagacacagaattaaacacgcttgccttaaatgaaacacaaggcaatcatttttgatgacagaagcatttcgagatcctgggttctctttcacatcagccccttttgttagtcacaggcctgaatgcttatctccatgagaaccagcttgtgctggctacagacattaggcagagacaaagagcaaactacacaaaagggaaagcagtccacttccaaacatcatctcacccacttcaagaatttcagaccctcagcgagtctacaagtaactcagctccccttccttgctcctccccagaggagggagaagctgacaaggatgagctggcacaaggtcaccacgtggctcggtgtgcagggggttagagctttccatctcaccaaggagacgtagaaatgccgagcaacaaggggtctggctcgctggtccccaggctttcacaggagcaagtggccactgagggcggaaacccgggctga

SEQ ID NO: 9088 - DNA, 1924 bp, Homo sapiens; identical to SEQ ID NO: 9087

SEQ ID NO: 9089 - DNA, 131 bp, Homo sapiens
agacaataagagaaatatttatggtctattaagatacaaaattgctcaatttaagaaattaaataacactatttctttcctctcatattggcaaataaataaaacactgataaaactccagagctacatgg

SEQ ID NO: 9090 - DNA, 131 bp, Homo sapiens; identical to SEQ ID NO: 9089

SEQ ID NO: 9091 - DNA, 439 bp, Homo sapiens
tgtgccagacaccaaggcatttcttctcagcgccaaacccaccctgccgtgcccagcttctgatcctggcactgggccttgaagaccacatggctcctgcccaggggctcaatgttcagcaatgggcacaggcactgcctcccagatggagtggggtggactggcatgtgagggtcccacatcgtttttcctggggactggggacagccaccaatcctcacctggagctgcttcactctctcacagctgcgatggactcacagtcctgtcagataaggcccctactctgggtatctaagcctcccacgcccacttttctagactcagcccctttccacactgatgaccttagcctttcttttctctttcagcagctaaccttcttttcctttgttaacgattctgtatactgaatttttcctgttcaaattactgctgc

SEQ ID NO: 9092 - DNA, 439 bp, Homo sapiens; identical to SEQ ID NO: 9091

SEQ ID NO: 9093 - DNA, 5443 bp, Homo sapiens
caggtcctgcaaccctggttccagtctggcaagcattgtagacctggctgctgaagactgacggggcccagggtccgctgcccccaccgccatcaccacctcggaacccagggtaacgctgtcagtctttggtaagcccatgctcttccttttagatctggggactagttactcagttttatcagaatattcttgaccctcctcagttcttctatctctattgtgagagtcaatggaatcccctctaggcacatactggtcccctattatgcaacctattcaatacccccttcatccactccttcttagttatcccttagtgtcctacccctatcttggggtggaatatactgagtaaattccaggcccccatatgactagcctcctgcaattctaccccttttattttactctgctgtccagatgcttccctctcctccccctcatctttgctatccactctgttaccttctgtcaatccagaagtgtggaacgtttctaaacccacaatagccacacatcacatcccagtcaaaataaccttccaagactcctccattttccttcatcagcctcaatattcccttagcccagccagcctcaggggcctcaaacctattatctgtgagtttttacaagctcagattctcaaacctgttaactctccccacaacacccttgtcctggctgtcaaaaaaacagacagattttaccacttggtccagatctccatgtcatttaccaagtggaggtaccaacctatccagtggcccccaacccctatactctactctcccatattcccccatctagcacacacttctctgtattggatctaagggactttttttttttttttttttttttttttttttttttttactattcccttggatctggcttcccaaagtctttttgctttcacctggtcagacccagatactcacacatctacctaactaacagactgtactcccacaggggttccgggatagccccctcctatttgggcaggctctcaccaaggaactaatcgagcttccccttgctcctagcagcctccttcaatacatcaatgacctccttatgtgtagtccctcctttgatctatccatcaacacatcacccaacttctaaatttcctctatggccagggatatcaggttttacctacaaaggctcaagtagcccaaacccaagtcactaaccttggactcaccctaacccctaattcttgagccatgccagcccgatggaaggagctaatacaggatgtgccccttccccacaccaagaaggacccttcctttttgggccttgttgggtacttccagctgtggatcattaactttggcctgttgaccaaaccactctgcacggcatcacgtgggtccatcctagaacatttggacccagcttgcccattaactcccacttctaaaaactgaaagatgcccttttaatgtcccagcactaggactacccaattccattaaaccctttaccctgtatgttcattgtaatcaaggccttgcccttggatttctctgccaaacccgtggcaacactccagaagccattgcatacttctgaaaactggactctatcatccaaggctggcctccatgcttgaaagttctggatgcagctacattgctggcctcagaggcacaaaaactcaccctctaccagcacattactattgcatcttcccataacttatgggaccccatgagccattgatctcttcttttcctcctgccatccagcttacagcaaccctctaacaccttccagagatgtaaaattctaaatccaaccaccctcctccctataagtacttccaattctgaatcccccactcttgcctagacctcttagcctccctctcctcccctttccaacacatttcagaagcccctttgcggaaggaacccacatggttcattgatggaagctcttttaaggaaccatatctggcagctggctatgccatcattgccgaaaacaaactcctataatccaatgctctctcatcacatatcacctcacaacaagcggaactatttgccctaaccaagaccctcactctagcaaagggaaagagggtcaacatttacaccaattccaaatatgcataccatgtcctacagtctcacactgtaatctggcaggaaaggggtttttctaactacaaaaagaaccgccataataaatggcaaactcatacacaagccgctggaggcagctaaactaccactagaggccgtcattatccattgcaagggacaccaaaaggctacagatgccataaccaagggaaacttcttagcagattcggcagcctggcaggcagcccttagaacactattgttattgcccattttccctagcatacacccaagaagaaaaaggtgccttgctggctccagggctgttcataacgaaagctgaatttacttagactacaaactcatcctacccaagacccaaaaactttctgttctcacccacatccataaccaattccatgcgggttatctcccgttgctccaatttctaaaaacctgtatacattcccttaccatggccatcagcttggaccgcctcactaaaggttgctctgcctgcagtcagacttcccctcaggggcccttagaccacctccttttccctcccttcaggcccaaaggccagttgccgggacaggattggcaaattgacttcactcatacgttcccccataaagaaagtctgatatctcctcacgatggtagataccttttcaggtggatagaagcctttcttactaccactgaaaaggcacacaccattgcctctaccttcctcacacacatcatcctttgattcagcctcccctcatctatacaactggacaattgaccagcatttatctcccaagtcactcaacaggtttctaagtctttaaacatcatatgggtttttcacattctctatcacccccaatcctcgggtaaatttgaacaggcgaatgccctcttaaaacaacagttaaccaaactttccctagagatcaaaatgaaaactgaatatcacttcttcccttggcccttatgtgcctcagggccctcccccgaaaacctctaaatctaagtccttttgaacttttgtatggacgttctttcgtcctacagaactttgctccatcccctcccttacaggacacctggccagcactgcacctcactcaacacttagtccgacagtacactgacactcacctccccaaacctgaggattcttcccaattcactttcttacccttacagccaggagactgggtctgggtagcacacccctcctcccctttccaacaaaatggaagggtccctatcaggttatattcaccatccccgctgctgcaaagttaacatcctttccctattgtatacaccattccaaatttaaaaaggcacccggcccacaccccgaagtctcctcaccccggaaatattcttcctttcccacaggaccaacctcgctgtgcctaacaagaattccagaagtcacccatccgaaaggcactggcccatgacactctccacttccaatcttaaatcttttacttcataccttgtctcagatctctcctggtaccccttccccacgcccttagataatccatctcaattcctcatgctaattgaggagctatggctgcaaggcaccttccaggatttcacacctacacaaatctcctttttctccttttgccttctctgcttatgggatattctgagtccccacccccaatcactgacagctgggcccccttcatcagcctcacacaccacgtattaagtcagtcacaatctcccctctcctctaactgctggatttgtctttctacacacacccaatgattcacggctcttccggctgacctacttacatggacacagtccaacgtgagcttacacatttcttacttggctataccattcttggctgattcattcctgaaaccggttcataacctggaaactcagctaaacacctttccttcaaactcagctctctcagcatggtttcaggtagggctgttgccctccttcacctaatagcttctggactaacatccatacaaaccaacacagcatcatctaaaccaccaatatgggggtaccatttctactcaaacttccttcatatccccaccccccttatgtctcagccgaacctaccctaatccagcccacgccacaatggtgggacaggttccccagtccctatgtggtcttatttttacccttgcactccctgtagaccatcaattctacaccctaattacaaaatcatatccacctctgcctggcagaaggtgttatgcttttctggctcgcctaccatccacacatccctacacctcaccaccggatcctcttttctttccttccatccaattcctggcttccccgctgccaactctgctctctatgtctccagtttaaaggtgccccctggaaaaaatgtaacaattccctcacctgtgactggtacctgacagccaccacaccggggcagcaatggctaacggttgacaaagacaatttctttctctctccaaaaccaaacagcttcatcaactccctagccaagactccctatcaggcccttacaggtgccgctctggctggcagttacccaatttgggaaaacgaaaataccctatcatggctacctaccttcacctacaacttctgcctgtccacccccagtctcttctttttgtgtgatacaaactgatatctttgcctaccagccaactggtcaggaacttgcaccctggtctttcaggctccaaccatcaacatcctaccccctaaccaaactattctaatttctgtagaagcctctatctcctcttcacccataagaaataaatgggctctacatctcatcaccctgctaacaggattaggcatcactgctgcacttggcactggaatagcaggcataaccacctcaatcacctcataccaaacactattcacaaccctttctaacaccgtagaagatatgcacacttccattaccagtctccaacgacaattagacttcctcgtgggagtcatccttcaaaactggagagtcctggacctcctaaccactgagaaagggggtacctgcatatacctccaggaagaatgctgtttctgtgttaatgaatctggcattgttcatatcgcagttcgtaggcttcatgacagggctgcagagctttgacatcaagtcgctgactcctggtggcaaggatcatcccttctaagatggataccctgggttgcccccttcctaggacccctgatcttcctcttcctgttactaatgattgggccatgcatatttaaccttgtatcccgcttcatttcccaaaggctgaattgttttatccaggcaa

SEQ ID NO: 9094 - DNA, 886 bp, Homo sapiens
agaatcttcaaattaggctcagaatccatttgggtcaatgaatttactgttattaagatcttagttgtgttcaaccatgatttgacataccttagagtgagaagatattcttcctggcctcagactagttgaaggtagagagagagacaggcccttgggtgtggggagacctctcctgggataatacacacaaaaaaccaagagctgctcactgtggtgcaggagacagcagggcctgaagccagaggctctgtgtccttgaatacaatgttttactcctctgacccctgttactgtgatttggagaggcagacaatataggatgggctttgcaggcagggaggtccagttataatcccagctcttactaagttgggtaagactcactctgagacttagtttcttctgtcatctctcaatagaatcataaaggtactttcctcttagtgttgttttaaaattcagtaaaataatgcaggcttagcacagggtctgatgtaaattttcaatgaattatcgttgtcaatattgttctggaaaacaagagggcatattagaagatcaaaagtactgccaagcattgaagtgccaattctagatccagtctcagccctctgagaatggatatcattgttttcaagccattcagaaaccaatgtgaattgaacacctagtatgagctctctgagggaagagccaagtcatgcattttttatcttaaggggtcttcaatacctctagcccaaaacagtatctccatcaggattcttctctgatagtgttcatttcttttttctcaatggatgccttaaaaaaaaaatcctacaaggaaacctgtactcctcaaatacaccactcaggtgaccattaaatcatttacattgtt

SEQ ID NO: 9095 - DNA, 886 bp, Homo sapiens
agaatcttcaaattaggctcagaatccatttgggtcaatgaatttactgttattaagatcttagttgtgttcaaccatgatttgacataccttagagtgagaagatattcttcctggcctcagactagttgaaggtagagagagagacaggcccttgggtgtggggagacctctcctgggataatacacacaaaaaaccaagagctgctcactgtggtgcaggagacagcagggcctgaagccagaggctctgtgtccttgaatacaatgttttactcctctgacccctgttactgtgatttggagaggcagacaatataggatgggctttgcaggcagggaggtccagttataatcccagctcttactaagttgggtaagactcactctgagacttagtttcttctgtcatctctcaatagaatcataaaggtactttcctcttagtgttgttttaaaattcagtaaaataatgcaggcttagcacagggtctgatgtaaattttcaatgaattatcgttgtcaatattgctctggaaaacaagagggcatattagaagatcaaaagtactgccaagcattgaagtgccaattctagatccagtctcagccctctgagaatggatatcattgttttcaagccattcagaaaccaatgtgaattgaacacctagtatgagctctctgagggaagagccaagtcatgcattttttatcttaaggggtcttcaatacctctagcccaaaacagtatctccatcaggattcttctctgatagtgttcatttcttttttctcaatggatgccttaaaaaaaaaatcctacaaggaaacctgtactcctcaaatacaccactcaggtgaccattaaatcatttacattgtt

SEQ ID NO: 9096 - DNA, 211 bp, Homo sapiens
catgcctgtaatcccagcactttgggaggccaaggcgggcggatcacgaggtcaagagatcaagaccatcctggccaacatggtgaaaccccgtctctatcaaaactacaaaaattagctgggcgtggtggggcacatctgtagtcccagctactcaggaggctgaggcaggagaatcgcttgaacccaggaggcggaggttgcaatgagc

SEQ ID NO: 9097 - DNA, 925 bp, Homo sapiens
taacttctggtgaatttgtttgaaaaggacccattcatttattcttccaacacatctgtattataaaactactatccataaggcactgtgttaggtgctgtgttcctgaccctacagatcccattccaccatagcaaaaggtaaaagtgactctacagtgagcttggtagacatagacccatgcttatatactcagggacacctggaagagatataaaaacagaaacatctcacataggaagttttcaatgcatcgtgatcaggactcaaataatccccttctctttttcttcagtgtactaaagggagcacattgttgagaaggaccggttgcaaatttccaaaaaggagagtaaaataattaatgagtcaaggtctcaggagagacagaaggtaaggggagtccttcagtaagtggggaaattgatttgttttgtgtcctcatctctccagggccatgagcatgtcctttgctggccataagtcaatgctgatgacctcagttatagtgtaatcttcaaggctaatttacgcaaaacttcagaaatggtaaacatcctcatgaagactaatgatgacatattttaggagtgcataatagtaggtatagagaaaaaactgcagggtaaaatgttattgctgttcttattgctaaagggcatactccttaagaaccaaagttaattatcagtcctttgacctaagaggaaaacaaatttcagggactcccctaaagattcctatgtagtacaaataaaatgccaaaatattttggaacacattttggagcactggataggtcaataaaataatgtgtaaattgccaaatgtgatctaggaactccctgcaaacatcagattaggctctattctctatctgaatactgactttgctttgctttgtaactcctatcttcactaataa

SEQ ID NO: 9098 - DNA, 925 bp, Homo sapiens
taacttctggtgaatttgtttgaaaaggacccattcatttattcttccaacacatctgtattataaaactactatccataaggcactgtgttaggtgctgtgttcctgaccctacagatcccattccaccatagcaaaaggtaaaagtgactctacagtgagcttggtagacatagacccatgcttatatactcagggacacctggaagagatataaaaacagaaacatctcacataggaagttttcaatgcatcgtgatcaggactcaaataattcccttctctttttcttcagtgtactaaagggagcacattgttgagaaggaccggttgcaaatttccaaaaaggagagtaaaataattaatgagtcaaggtctcaggagagacagaaggtaaggggagtccttcagtaagtggggaaattgatttgttttgtgtcctcatctctccagggccatgagcatgtcctttgctggccataagtcaatgctgatgacctcagttatagtgtaatcttcaaggctaatttacgcaaaacttcagaaatggtaaacatcctcatgaagactaatgatgacatattttaggagtgcataatagtaggtatagagaaaaaactgcagggtaaaatgttattgctgttcttattgctaaagggcatactccttaagaaccaaagttaattatcagtcctttgacctaagaggaaaacaaatttcagggactcccctaaagattcctatatagtacaaataaaatgccaaaatattttggaacacattttggagcactggataggtcaataaaataatgtgtaaattgccaaatgtgatctaggaactccctgcaaacatcagattaggctctattctctatctgaatactgactttgctttgctttgtaactcctatcttcactaataa

SEQ ID NO: 9099 - DNA, 523 bp, Homo sapiens
aaatttgactcattcaaatcttggcaattagcatgtatagtatgttatgagagagagagagagaaaattagcagaaatggaggaaaacatattacatcctaaataccaccaaattgccaaaatacacatttgggtagtaatctccagagaactctctggaggcacagcatctatcatgctgatttccctgaacaatattacagaatagccctgtgtactttctcttggggggggaggtgtaaagaattatcatatggaacctcacaagtctctaaaacctttctgcaattatccctcataggattaccacactgatgagtttgttcaacaggcgctgttgtgacttcctaatttaactcctatagagatgatttgtgtggaagataaaacactatatttgaactcaattcccaccttatccctgagcttatgctaccaagcaattcttacaatgtttggagttctattagactacagagaagaatctagggtttcagctaaaccctttaatccacaggcctag

SEQ ID NO: 9100 - DNA, 300 bp, Homo sapiens
tttctaaggagttctcaaatgatgccactgctggtggtctggggaccctactttgggaaccaccacaacacaccataattcatacatcttttgttcttttcatcatggactacacagtgtgtgacctacaaacactttcaaagaaatgggaaccggtgatgaaaaccaaagaaaattacatatctagcagcaagaaggtacggtgactgaccaacagtcctggtttgtgtgggactctcctagttttaaaatggaaagtcctgtagttctgggcacaagaggatggttggtcactctaga

SEQ ID NO: 9101 - DNA, 300 bp, Homo sapiens
tttctaaggagttctcaaatgatgccactgctggtggtctggggaccctactttgggaaccaccacaacacaccataattcatacatcttttgttcttttcatcatggactacacagtgtgtgacctacaaacactttcaaagaaatgggaaccggtgatgaaaaccaaagaaaattacatatctagcagcaagaaggtacggtgactgaccaacagtcctggtttgtgtgggactctcctacttttaaaatggaaagtcctgtagttctgggcacaagaggatggttggtcactctaga

SEQ ID NO: 9102 - DNA, 2385 bp, Homo sapiens
aaatttgactcattcaaatcttggcaattagcatgtatagtatgttatgagagagagagagagaaaattagcagaaatggaggaaaacatattacatcctaaataccaccaaattgccaaaatacacatttgggtagtaatctccagagaactctctggaggcacagcatctatcatgctgatttccctgaacaatattacagaatagccctgtgtactttctcttgggggggggaggtgtaaagaatatcatatggaacctcacaagtctctaaaacctttctgcaattatccctcataggattaccacactgatgagtttgttcaacaggcgctgttgtgacttcctaatttaactcctatagagatgatttgtgtggaagataaaacactatatttgaactcaattcccaccttatccctgagcttatgctaccaagcaattcttacaatgtttggagttctattagactacagagaagaatctagggtttcagctaaaccctttaatccacaggcctaggtaaaggactgtctcaaggtagtcgctagcccatgggttctcaaagtatggtctgaagacccctggaggagtccctgagacccttttcgtgggtctgcagattaaaaattattttgtataataacaccaagatgagttacattcaattaggcatttttcttttgaaattaagcagacttttggaaactaagatgtgcatagccctgtagtaggctaagtggaagttacaaaggcagtagtagctttttttccccctctcgttatctcatgaggatacagaggacttttccagaggctacatgacatatggttatgtcatctctctcatagctgagggatgtgtgcttctgtgttcttcttgagctttaaatatttctcagtcttaatacctaaaataattagtatcaatagatagaacccacacccaagaactccttggggccttcaataacttttaagagtgttaaggtgtcctaagaccaaacattttgcaaattgttgctttatcaggatttttgttatttctagaatgcatttctttctaactgatctacttgggaaaaaaatcgttacctcatggcaattattgctttcctatcaatatggagattatatttctgaaggagactgaccaaaattatattaaaaggtttaaataaaacaagtggatccatgttataacatgaggaagagagctgccccactagatgtctgacattagataactcagagtcccgcctctccaacaagtctcccttactagagaaacggacagattctgttttgtgggatgggataaggagacaatctgaagtagagtttgacacaatattattctgcccatatgaaattctggtagccagggtgccaggtgtattcataatccagatgctgtcaattttaagcctgaagccccaagaggcgagcagtgtttaatacatcatctcttgttaaatagcagccacacagttggcggtagccagtgaagcattccctgccatgtaggacacgccagttgtctataaataggacctgtgaatgggccaaaaaaaaaaaaaaacagagagaaaacactgtcagaagaaggacagaccaaaggaaccctaagtcagaagagatcatttaaaagataacctttaggttgttttctggttgcattaaatgagatatttttcttttgaaattaaacaaacttttggaaactaagatgtgtatagccctgtagtaggctaaatggaagttacagaggcaacagtaggtaatgggccctgcactggaggagcttctgtttctcaagtaattgttctcttatcaaagtaaatcagataattggtttgtttctttttctttttctttaattcttattctaccctttctcaaagggttaaattatctcatgacattttatgctaagctgaaggtatttttcatccagaggaaataccaaaaataaaaactatggaatcatgaagctggaaggacccttgggggtcatctagttaaaccccttcatcatacaaatagagtcactgatgccttagagatgggatgaggcttgcttccagagcattcagtgagtgggcggcaggaccataaacaaaaccaaggactcttttctctttttcctttgcaacatcgtgactcacatattaagtaagtacccgttcttcactgcttcagtattacaagcttgcttgacatctttagagattaggacccaccctgccaggctttagtttgacccaaaactcattctcaggtctcctcaactctatcgttagagtccggtgtgctgtataccagcgatggacgacatcataaggaacggtattgatgacagcccggtcatagttgttgtacct

SEQ ID NO: 9103 - DNA, 31718 bp, Homo sapiens
agaagggaggtagtcgccctccgtcgtggcctggcgtggattccgagcgttggtgtctggcggtttccgaccgttggtgtctggcacgcgccaccccgatgtaccaggtaaagccctatcacggggtcggcgcccctctccgtgtggagcccacctgcatgtactggctccccaacatgcacggcaggagcggcggcccagcactcggcactggccacttgcaggtaggagcgcggggcccccccgcccactgcgcacgcgcggcggcccgttgctggcccaggtgcccctaggccggatagagtgcgtcccaaccgattcgcggccccaccccggcatctgtgccggccggccagggggtcacccagatttttatgttttaaaagatttattcaggccgggcgccgtggctcacgcctgtaatcccggcactttgggaggccgaggcgggcggatcacctgagatcaagagttcgagaccagtctggccaacatggtgaaacctcgtctctactaaaaatgcaaaaattagccgggcatgtgtcgggcgcctgtaatcccagctactcgggaggctgaggcaggagaatggtttgaaccctggaggcggagcttgcagtgagctgagatcgagccattgcactcgagcctgggcagcaagagtgaaactccgtctcaaaaaaaaaattattatatatatatatatttttatatatgttaaatatacctttattatgcgtattatacatattgtatattatgtgtaatatataacatgatatattataaaatatatattatatatatatatatctttcctggtcgagcgcggtggttcacgcctggaatctcagcgctttgggagaccgaagcgggaggattgcttgagcccggagagtttgagaccaccctgagcaacatagcaagacccttgtctctatgtttttttttttttttgagttggagtcttgctctgtcgcccaggctggaatgcagtggcctgatctcggctcactgcaagctccacctcccgggttcacgccattctcctgcctcagcctccccagtagatgggactacaggcgcccgccaccatgcctggctaacttttttttgtatttttagtagagacatggtttcaccgtgttagccaggatggtctcgatctcctgacctcgtgattcgcctgcctcggcctcccaaattgctgggattacaggcgtgagccaccacgcccagctgccttgtctctattttttaaatgttttaattaaaataaaaatctatccatattttttctttttttttgcgtatggctgcttaaacattttagttcagaattctatcctctgaaaagtgagtagcacataaatgctcattttgaggaattacaaagcgaaccccagggtcaccacctcccaggttgacacacattgtgaccgctccattctttccacttaaaccttccccaccaacatcccagggcccgatttttatggtaattatgtcctgcttgtctctattattttgtcagctaagtatccctaaacaatatggtctggttttttgtttgtttttgtttgtttgtttttttcagacggagtttcactctgtcacccaggctggagtgcagtggcatgatctcggctcactgccaccttggcctcctgggttcaaggaattctcaggcctcagcctcatgagtagctgagattacaggcgctgtccactgcacctggctaatttttgtatttttagtagagacggggttttgccatgttgaccaggctggtcttgaactcctgacctcaggcgatccgcccgccttgaactcccaaagtgctgggattacaggtgtgagccaccgtgcccggcacctaaacaacatagttttgatataggtaagcatacagcatatattttgatgtatttcaggtaatttagtctaagaacaggaaaggacagaaaatgaacacaatttgtagttctttgttgttaacaaactaagaatactttgcttaaataagtagcaatgagaatgtaactcagtaattcatacaaatagacaagaagacaagaaaatgatttgaggacagcttcaatcgcggtgtgaagaagaaagcaacaaaacgaccactgaaaacaatgccggtgagtcagccagttttgtttttgaatcttgtcagggaagcagcccagctattcgggaggctgagacaggagaatggcacgaaccccgggggcagagctggcagtgagccgagatcacgccactgcacgccagcctgggcgacagagcgagactcagtctcaaaaaaaagagaaaacctaagaggttcaggtgatatggttcaaaaaaggacaagatttacaaagtattaagggacggaaataggaagaagagaaatttcgaagagaaaagaaaagaaaaggatgtttggttatagagatacaggaaggggactcaaggaatttttttttaaagggaaaaaagttaataaacttcataatataaaaatcaattattttaggactgagtctaactcagactctgctgtggaattggcagcgtaagcctacttgtgtgataatgatgaaaccaagtgttaatgtcactgttacctttttttcatatttctgatctttttatgtgtatcaggtggcaaaacatccaaagaaagggtcccaagtggtacatcgtcatagctggaaacagtcagagccaccagccaatgatcttttcaatgctgcgaaagctgccaaaagtgacatgcaggtaaagcagtgtcttacctctgttgataccatctcactttttgtaaggtggtaaggacaagtgtctacaaacttgatttgatgtgaacattttagtgagtgtaacatatcaagaaagataagattatggggtgaatccttggagtgatagaagggtaaccttgaataagagagcatgttcttttttttttttttttgagacagagtctctttctgttgcccaggctggagtgcagtggcacagtctcagctcactgcagcctctgcctcctgggttcaagcgattcttatgcctcagcctcccaagtagctgggcttacaggcatgtgccaccatgcctagctaatttctgtatttttagtagagatggggtttcgccatgtcggccaggctggtctccaactcctgacctcaggtgatccgcctgcctcggcctcccaaagtgctgggattacaggtgtgagccaccgcacccggcttcgagagagcgtttcttttcttaaagcgtgttcttttcttaaaggtatcacaggagtgattatgcctttgttgattgatggagcagatggggagaggcattgcatgacatgggaaggaagcttagatgtgggtggcaccttgttcacccatgttattttttagctccatcttgacaattatacttaattatttttccctctctctgtttctttttttataattttattgaagttctaatatctgaaagtgtacaaagcgtatatgtagtttaaaaaataaaaatgagatatcacccagatctctagccccagctcaagaaatgaaacattaatagtgctgtagagatcctttgtgtaccttctttctaccctacctcacagtccccttattacccataggtaaacactagggtgaattttgtgttaatctttgtcatttcattatagtgttaccactatgaatgtgttctttaattatgtaaatgaatccattattcaggcttctgtgatttaattatttcagttaacattgtttgagatttatccacattaatgtgtaattttatagtttctgggaaaatatttaaaattttcaaacatacagaattttgctagttatattttcgttatttgatttctaactttattgtgttgtagtcagggaatgtggtgtttgaaatttatgtaggggctgggcgcagtggctcacagctgtgatcccagcacttggggaggctgaggcaggcagatcacttgaggccaggagttcgagaccagcctggccaacatggcgaaaccccatctctactaaaaatacaaaaattagctgcatgtggtggcatttgtctgtaatcccagccacttgggaggctgaggcatgagaattgcttgaacccaggaggtggaggttgcagtgagctgagattgtgccatggcactccagcctgggtaacagagtgatactctgtctcaaaaaaaaaaaaaaaaaaagacatttatggagacttagccttatggcctagtattgagttggtacattcgttttatcttttctgtttctttttccccctttgcttactttcctctggatttcttatcttctacaaggacctgagcacattttaattccagttgtcttttccaccttacatgcagttgtacagtgtgttagttttttatttgaaacggagtcttgctctgtcaccaggctggagtgcagtgacgcgatcttggctcactgcacctccgcctcccgggttcaggcgattctcctgcctcagcctgccaagtagctgggactacaggcacccgccaccatgcttggctaatttttggccaccatgcccagcctgaatgaactttcaaaattggtttttaaaagaggtatggaggccgggtgcagtggctcacacctgtaactccagcactttgggaggccaagacgggcagatcacttgaggtcaggagttcgagaccagcctggccaacatggcgaaaccccatctctactaaaaatacgaaaaggtagctgggcgtggtggtgcacctgtgtattcctttcatctttctcattataggatttctgacaggactctgggcccctccccagctccactccctacctcaagaatgtgaccatttggaaaaggcaaagagaaaaggagcaaaatgaagcattcccccaggcttcagccctgggctctgaggggaaagagtggggcattgtttttctaacctaacctttccctctggtgatgttggggtagagaagccgagagaccctgtcctccctaatgcactgtggcccagtccccttgcctttttcctgttctgtttggagtggagaagggcagcacctctgtgtttaatggaagtagcccatagtctcctggatttttggaacatctttttcagcctattttgtgtcctaatgattcactcaataaacatgtttgaatccacacgttcccaaggtgtggcttgagatcgttaaactgatggaggtcaggttcttggtccgccttgtcccatggcccagtgtataggtgtccccacaccccgcaggtgctttgtctacaggctctccaggaagtattgcttagtaactgagaggcggggtgaggcagtagagatggggagagtttgactgcctgtgagtagtttatctagtggcctcagcctctgcagtagtaaaagttgtgctgacaggtggcagagtggagcaggaccttgtgaaactacctgtctcacccacgtgagccaggccagaccctgtgtcctggcagccttcatccatgggttctttccaaaggaaattttatcctctcatccgaaagatacctgtcataatttggaatttgatcaaatcacagtatctgagagttaaaaggaaactaaggagttactctaaatgtccaaccctaaaatccaagtgacaatgtcaccttcactcttgccttctccagctagttcttcaccaaattctgtcaagacttggtgaagaaaattctctggcctatgtcctccacacattgtcaccatcgtctctcacctagactgccacagtgcagcctcagggccagcctcttgaaactcagacagacttgtttgctcttgttttgccttgtggagcagcacagcacctctcttctctcttgtccctctgacaagcagtatttgaagacagatgttgtcattttgtactttcactgttttcttttgtggtttaaggaatgcttcagcctttctctttagatataatttctagttcttcccatcatgggcacctgctttagtgacaggttctcactgtggtctcctaggccagacacagccatccagctagtgatctgtgcagaaggagccgtgacttcctgcgatcaggtcactcagccaagaccgcctcgccccttccattctccctcccctcccccacctgcccctcccagatgaaagctagaagaaattgagttgtgagtctccttttggaaaggtagccctgggggagtccgagctggggtgtgggggaaggctaactcattcggcgatctttagcctgtattcaggtagaatagttctggggaaaggagcctgttttgtgggatgagggaacagagtgggagaactgaggagaagatgcggaggtctttaagaatccaggaggggaacgattcctgagttatttaaataccaaccaagctaagggtgcttcacaagaggataagagcagcttgggggctttgcatcaatatggacacctgtgtacagccaggcagcccagtgcactgggttgagtcacagccttagaatctgggagcttgacaccatgctctctaaagcctttgacactgtttattgagaggctgggtctaggttgtctcctcttgaatatgggcttcgtgatgcttgactaatagaagatggtggaaatgatgccatgctagttagtgggcccagattttaaggaaactggcagtttccgtttcctgtctcttcctgtacctgggttcacactgggaacccggtcaccattctgtgagcaaggccagcagtcaaaggaaaaggccgtgtgtaggtgttcttgccagcagtcctcaccgaggtcccagccaacatccatgttggctgccagactcagtcaagacgggagtcagatgattccaacctcccctgtttttcagttttcccagctgaggtccagacatcagggagcagagacagcccatcttttctgtgcactttgcaaattcctgactgtggagtccatgagcataataagatggtggttgacagcactcagtctggaggggtttgttacgtagccaaagcaactggaactgggccttagagtcataagactcccaatgttaggacatttatatcaaggtttttttaaaaattgtaagttatataaacatatactaattcttctatattatacacattaaaaatgtaacacatgagttgaaataagtgttttaaaatatttcattggttagcactgcaaaatacctttttgctcttttttttttttttttttttttttttttttgagacggagtctcggtctgtcacccaggctggaattgcagtggcacgatctcagctcactgcaagctccacctcctgggttcacgccattctcctgccttagcctccagagtagctgggactacgggcgcccgccaccatgcccagctaccttttgtatttttagtagagacggggtttcactgtgttagtcaggatggtctttaactcctgacctcatgatccgcccgcctcggcctcccaaagtggttggattataggcgtgagccaccgcgcccggccaccctttactttcaaaaaagggtttagtgagaacaaagtgagaaacatttttttaaatcatggttcaacattttctgaagttcagttgaaagttcagtttagtgctgggtgcggtggctcaggcctgtaatcccagcactttgggaggccagggtgggcagatcaggaggtcaagagattgagaccatcctggccaacatggtgaaaccctgtctctactaaaaatacaacaaaattggtggcatgcgcctgtagtcccagctactcaggaggctcagacaggagaatcgcttgaacccgggagacggaggttgcagtgaaccgagattgcaccactgcactccagcctggcaactggacgagactctgtttcaaaaaaaaaaaaaaaaagttcaatttattctgatacttaattttaatgaccttcataactgccaggagtacctctcaaaaacaggcaaatccaagtggattaggtgcctctttgcagttaccactttttaaatagatccaaacctgctgaaaatcttcatctagaagacttgtgaacaggtcagaggatgatttcccggcgcagacaacagtgctctcatgaggacaggcattgtctgggagcacaaaacctgaagtgtgtgagctgcagtgtgtggtgatgggctgggggtttgcctctcttccctcaggatactgatcattttccaggggaatcatgacttatcatgtttttatctacacttgatcttggccaaaaggccaagaagcgatactgtctttttgtcttaaaaggttagaatgtttctttatttctactgcacaacatctgtggatacttttttgtgcacgccctcaccctgacaggctcagctgtgaagggttcatgccagcaagccccctgctggccgtccaggacagcccagggctctggcttctcagcagcacctcccactggccaggcccaggccaggctggacaagctgaggccagcttaggtagcaggcatggaggcctttgcccagcctggtaagtgatgcagagcagtgcttttcaggggctggcactgtagggtccagccctactgggtctgtgggtttttctcctcgtgtgcggagatgagagatggtagaaatgaagacacaagacaaagagatagaagaaaagacagctgggccagggggaccactaccacctagacgcggagaccagtagtggccctgaatgcctgacagcgctgctatttattgtatacaaggcaaagggggcagggtaaggagtgtgagtcatctccattgatagataaggtcacatgagtcacgtgtccaccagacagggggcctttcccttttaggtagctgaggcggagagagagaggacagtgtacgtcattatttcttctatgctcttctcagaaagatcaaagactttaatactttcactaattctgctactgccatctagaaggtggagccaggtgtacagagcggaacatgaaagtgaaacaggagggtgactgctgaagcacagcatcacagggagacggttaggcctccggatggctgtgggcgggcctgactgatgtcaggccttccacaagaggtggtggagcagcgtcttctctaactcccccagggaaagggagtctccctttcccggtctgctaagtaacagttatcttcccaggcactggcaccactgctagaccaaggtctgctaagtaacgggtgccttcccaggcactggcattaccactagaccagggagccctctagtggccctgtccgggcgtgacagagggttcacactcctgccttctggtcacttctcaccatgtcccttcagctcctatctctgtatggcctggtttttcctaggttataattgtagaacaaagattattataatattggaataaagagtaatgctataaactaatgattagtaatattaatatataatcatatctataatctatttctagtatcactattcttattctatgtattttctttattatactggaacagcttgtgccctcggtctcttgccttggcagctgggtggcttgcctcccacatggcactgctgggcattgtctgttaatattgaataattgttttaagattattttcaatgattttcaataaggctttaccttttttaacttgcagtgtggccatgaggtctgccggaagtgacttgttggtgttatctcctgagttaaaatgtgaagggatttttttttttcagattactgagagtcttcagttactaggtaagtcgccccatccttattactccaggtgacactgactggggtttatgggatgaaagaggagtgtgtgcttggatgatggggtgtgatagtgaaggggtgaaaggtttcttctcacacatagacatcgtgaggtcttccttgagctctttagagccttccctcgggataggatgaaatactgagatcctagaaaggattcacaagacgagtcactcatcagtgcagattcaccgattcacccctagatgtgtgtgggatttggatggcagagagaaacaggcactgaagatttttggtcaggacagggcagagaaataaggagaagagttgaaaattcaccaaaggatagataaacccggggcgtttagagaaaacctgtagtgtgcaaaggagcccagaatcctggggaaacttggagggaaatatacttaatttgattcactaagttaggcccagtgaagggattgggtggcataggtagaagccgaaaaataaagcatcttgtattgctggaatagcctctgtttctgaggtcacatccaaacttagcgaggcagcttaacctggtgagagacacgggttcaactcctggcttctgcactgccagggcaaaggactgccgtttgctgacacagtcttgtaattcaatttaattttttaaccaaggtgtgggagaaggcagctccgcataatgctgaatattatgggttctgaagcgaaaatttttgtcagggtttaaattttggcttcattgtgtaagtagcccttccaccccgggcaagttatttcccacataaagcaattgctaagtatggagctgatgtacgtgcatcactgagaatgggtttagcacatagtatccactgaagacgctatcttgcattagctgtattactgtgataaaggataagctataattaaagttacagaggaacaaaagcagcccttttcacaacatttaaaacatgcatgtaaaaataaatgcagcagtgacaagtcttatgctacaaactcagaagagcagaaacaactttatttttcctctatgatttcaagctctttttctgcccagctgctgagaaaatttaactcctgagtcttcttggcttccttccttttccctaaggttgtgtcaagtgccaaagcatttaggggagggaggaggcctctagtcctctgtcaaaaatattttggatttttatagtcatttccctttctctgtggtgagactaggccctccaggaccctgtgttttggccccaggaattgaggccatctgaatcagctgcctgggttcctgtctgcagtgggccccatgggcctacagaagaacagaggctgctcagggctgggctgtttgctgcccagaaccaaggctaggatgaggagctcagactcttccagtggaagcagtgctaggacggaagacagccgcccctgaagaggggacattgacatacagttgatctgcctgggaaggtgtaatagagatgaacttgtgtcatcgcatctttcacacaagccacaaagaaagctaatcctgattcctggtgagaagaaaccaaactcgaggaatgttttatatcacaggacggtcacagcctgtactggggcacgagccagggctgagtagagtgctgcccctgcactcactgacttgatcctctcatttactctgtggagcagtccctgttgggatcctgctgctttgggaaattgctctgttaagcttgcagagctatgaaattgtggccctatttcaaacccatgagggcctgattctacagactgaccactgggctcttttacttcagcaggacttgggctggggctgcagggatttcaccaaggaatgtcaggcaggaggtggccattgtgaaacctgtcccatcttgcctgtacctcctggctgaaagtgggatgcaggacttagattgccaagcttaggaattatttgtggctctgctgttcacaattttggagaatgttaaggaatactcaagaagttgtgagagtaagggccctcacatatatcagaacatgaaagcattccagttaggaccttgtgatattgaaactagaataagcaacccagtggatagactgtgaaagagaatccacatatagacctatgtgtaagaatttatgatcaaggtggcattttgaaacagtagggaaggagcccagcagcaaatggtctggggaatcctggccctccacctgagacgttacacggctctttttttgagacggagttttgctcttgtgcccaggctggagtgcaatggtgggatctcggctcaccacaacctccgcccctgggtttaagcggttctcctgcctcagcctcccaagtaggtggcattacaggcatgcgccaccacacccagctaattttgtatatttagtagagatgggatttctccatgttggtcaggttggtctcgaactcctgacctcaagtgatccacctgcctcggcctcccaaagtgctgggattacaggcatgagccactgcacccagctacacagcctttttttttttctttttttgagacagagtctcgctctgtcacccaggctggagtgcagtggcgcgatctctgctcaccgcaagctccgcctcccgggttcacgccattctcctgcctcagcctcctgagtagctgggactacaggcgcccgccaccacacccagctaatttttttcgtatttttagtagagacagggtttcatcgtgttagccaggacagtctcgatctcctaacctcatgatctgcctgcctcggcctcccaaagtgttgggattacaggcatgagccaccatgcccggcctacacagcctttttaacaccacctccaaagtaaagttcttcatggactaggaagaaactctttatagagttatgcataaaaacaaagccataaaaatattttcataatcttagccttcctaaggaatacacaaacagaaatgataatgttaaagatcaagcctcatgagaattcaaacagggaggggaacagaaggagctggccaaaggagaactttgtgttctatgttgtttgaatcttacacaatgagaatttaggggataatgtgacttaaaaaattgaaaaaaaaaatgaaaatggtgggtagtcaactttgcaccatggcttttaaatccctcaataaattctgggctccccatattggggtgaataaaagacacacttcctccagggctcagcatccacctgtgaaaatgcccccaggactgtcgagaacccagctgggaggccacttggatgattatccaagaagtaagggcgcagtactttggggcagcttcctgaaggtggtgggatttgatctccttcttacaaagtgggatttcagcaggtggtgtagggaagtttaaattttttccctgaaggtttgataatctgagtctatgaaacaaacataaaacattaacaggaaaaaaaaccgacttaaaaatgttactacgtgcacacatgtgcacaagtcatacaaaatatataaaaaaataaatggccagatggttgacacttttatacccatcttgaaattacagaaataacgggaggcctggagcgcagcaagacagattaggggaaggggagaggagagacttggctagcaaaggtcttgttctgcaggtgacatctcacagctggtactctgcggagcctgtggtaggcaagtccttcagacccttaaaggggtccgcctctcagtttgtctttcctagatccagacacggggactgcagagaaaggctgtgtgcatccgctgtctactccactgtctcctctgcagaggcggatttccctgactgaagaccatgttgcaggcccacagctgcctacagaaccgtcccaaaatatggcaaagaaacctattctgaggttaaatattttggtttctttcagtgggaggcaagggtcttccggactagggaggtagatgtgcagcagcctcaggtgctctaggtgctttgtagctacgctggccaggccacctgaggtaggtcccctttgcaccagtctcacaccctgctgggggatggtagtggagacagcagtaaaagcaggtctgaggcaggtgtggagattagtacaggtggcctgggcgaagggcaaagggtgaagagaatgttgggagccatgggtgactggctgcgggcataggcaccatgaaggctactatgggctgcagggtgtggatgaggggacagagtttgccccagagaccaagttggtttgtgtcaaacaccacaggatttttattttgtatttttttttaatttttaatttttaaatttttttttgagatagggtctcacttttacccatgctggagtgtagtggcgtgatcttgggtcactgcagcctccacctcccaggctcaagtgatccttccgcctcaacctcccgagtaactgggactacaggcgaaagccaccacacccggctaatgtttattttttgtaaaggcagggtctcactatgttgcccaggctggtctcaaactcctgggctcaagtgatccacccacctcagcctccggaagtactgggattatagtcatgagccaccacatccagccagcaccacaggattaagcagacatgatgagtctttgacacaggggcaaaccaggacccagagaggtgacttgggacagggctgtctcttcagtccttaccacaccgtggacgagatcaaccttaagacagcaccctgggctctcactggaccctggattctggctcacagcacacaaagcaaactgatccctggaaagggtcacttgttgctgcctagcagcattctggtaggttggcatcctcaaagtgacataagcagtgaagcaattcagagcaacatttatttatcaagacagggtctcactctgtcacccagactggagtgcagtggtgtaatcacagttcactgcaacttctgcctcctgggcttaagcgatccttcaacctcagcctcccaaatagttgaaactacaggtgcccaccaccactcctggctaattctttctttcttgcttgcttgcttgcttgcttgcttgcttgcttgcttgcttgcttgctttctttctttctttctttctttctttctttctttctttctctttctttttctttctttctttcttcttctttctttctctctctttttctctgtctctctctctctccctccctccctctctctctctttttctttctttctttcttttttttttttttttgtagcgatagggtctcaccatgttgcccaggctggtcttgaactcctggactcatcctaaagtgctggcctctcattccctgtctgtgcacacctcacggcaagggccagcctgtttcctcccggtcacctccaaatcttgctgcttttaattcaactcagaggtatgcacttgaggtaggagggcaggggaagtggggatggcaggacatggatggcccttgaggcattggctctgggtgtcatgggctgtgagagtcaagaagggcagtggcctgcctgacttgggttcgaaagggtcactctggccactgcggtgagaactgaaactagccaggccaattctccattgttcctgctcttccaggtaggagaatattagattaggtctggagtcagaaggtagcaggggctgggggttgcagggggatgttgagaagaagtggtcctttggtcagggtgggaagccaacaggatttcctggtgcattggaggtgaaagggaagaggcgctggtggttgtgctttgggcctgagcagccagaagccgttgccatcacctatgacaagggagacagcgcctggggcagagcccagtatggggtgcattcagggtagatcaggaggtatgagtgggcagtgggcgagccaggctgggggttgtgggggaggcctgggttgcaggtttaagcgtgggacccacgtcagattggtggtgggtcatgcatgctggggtggctctcaggtcctccctgctggcttcccactcccaggggctttctcctcccagattccttagctgggtgaggggcaggacagagccctttcctagggaagcccggcaccccctgctgtccagggaaggggagtccttctagcccctgacagcttctctgcccctcccctggcctccccaggcctagccagggttgagttctcacccacctgtgccgccctgccttgttacctggaagcacagccttggggactgagcaggccctcactgtcactttaagaagggaatcagccactttgtgctcaccacctctggggaaggtgtgagaggagagaaggaagtggctgtttggctgctgacaacatgaagacttcctgcgatgagaacagaggcacaggtgccggccctgcagcccccagaacccggactggagggggccatggggcgccggaccctggccctgccctgggtgctgctgaccctgcgtgtcactgcaggtgagtgccggcaccagagaggggcaggggctgcagggagggtgatgtaggacgacagcccacccaccttgctgctgttccacagggaccccggaggtgtgagtacaagttcggatggaggccaccgagctctcgtccttcaccatccgttgtgggttcctggagtctggctccatctccctggtgactgtgagcagggggggccccgatggtgctggggggaccacgctggctgtgttgcacccggaacttggcatccagcaatgggcccctgctcgccaggcccgctgggaaacccagagcagcatctctctcatcctggaaggctctggggccagcagcccctgcgccaacaccaccttctgctgcaagtttgcgtccttccctgagggctcctgggaggcctgtgggagcctcccgcccagctcagacccaggtggggccggggtgaggggtccaggagggcagggaggggctcgggaactggccatccatctgattcttgcctctgtgcccagggctctctgtcccgccgactcctgcccccattctgcgggcagacctggccgggatcttgggggtctcaggagtccttctctttgactgtggctacctccttcatctgctgtgccgacagaagcaccggtgagacctgggccctgtccacgtccccctgacactgggctggccacatgccgtgcagagctctgaccatccttgctctctcccagccctgcccctaggctccagccatcccacaccagctcctaggcactgagagcacgagcatgggtgaggaggggggctgctttggggatgaggtggcaggggtagggggggccagggctgggcccaagctgtacagactcacttgatcctccttcccccgcgcaggcacccagccaggcctcccaggctgctctccacgtcccttatgccactatcaacaccagctgctgcccagctactttggacacagctcacccccgacagggggccgtcctggtgggcatcactccccacccacaccgcacactggccccagggccctgctgcctgggcctccacatccatccctgcacatggcagctttgtctctgttgagaatggactctacgcttaggctgggcagaggcctccctgcactggtcctggcctcactcttttccctgacccttggggcccagggccatggagggacccttaggagttcaatgagagagaccatgaggccactgggctttccccttcccaggcctcctgggtgccacccccttacgttattcttgggcctctaataagtgtcccacaggtgcctggccaggcccacctgctgcagatgtggtctgtgtgtgtgcatgtgtgggtgtgtgtgggcacaggtgtgagtgtgtgagcaacagtaccccattccagtcgtttcctgctgtgactaagtcagcaacacagttcctctgacatgggccttggctgtgcttctttgggggtgaagagattggggaggaagtctccacccctgggaggcagaagccaggtgagaaccagagtgggttggggcctccttgcagggctgggtttggcccagggagagggcagtgtcccagtcttagagatctgtcctggcttcttggggtggcggggggttgggggagcttcctgagggacacctgtggcttcctagacagaattgggggatcccagcgggatggtccctgctgcaatcccaccatgtcctaggacagcagcaagggttcctggggcttcagcctgagaaaagtccctgtgatttgacctggcgtccctctgccgggctccctgctgtggcctgggctagagtcctgatgccctccttccacagctggcatcaggcagggctggaaagtaggaggacttgcctgaaatctggctggatttcagagccttgctctgtcacccaggctggagtgcattggcacgatcttggcttacttcaacctccacctcccgggttctagtgattctcctgcgtcagcctcccgagtagctgggactacggatgtgcaccatcgtgtccgctaatttttgtattttttttttttttttcagtagagacgggtttcaccatgtttggctgggctggtctcgaactcctgacctcaggtgatccacccaccttggcctcccaaagtgctgagattacagacttgagccacggtgccccgcctgaataggagcttcttaatcaaaatttcagcatggctctgggtcaaaattgaccagctgatttaataagttgatgtaaaaattttacagtcagctacccctgggagggggagtctctccctagtcagtgaggcaccagatgccagagcattggcaatgtacaaggggctcagccctgtggctcatatgtgtaatcccagcacactgagaggatgccttgagcctgggagattgaggccagcctgggtaacagtgacaccacgtctctgcaaaaaagaaaattaggggagaactgtggtgcgtgcctatagtcccacctacaggcagagcgagaccatgtcccccactaaaaagaggccaagaatgcaggaaatatagataatatgggccctgtgatgggtggaggccaaatagatcaatacagaattgaagaagacacagagcacttgtatttcccttcaggcatagcgcgctggctaggactccagtaccgtgaagggaggcagtgagagcagacatctgtgcctcattcctgatctcaaggggaaagcaagaacaaggtgggtgccaaggaggggcaaggggctggggcaggcatagacgtggctggtgaggaaaggaggatagttgttgggggaaggtggggacatacaagcagcagttctcaaaatgggcagggtcctggccccctccctgcctctgctgaacactgcatcccatgcctctcccatggccacctgctgggctaacgggctggatttagactctgcccatgttggaatcatgccctcctccagggccggtgcctcccaaaacccccctctgagagagagccacagccccaggcttagccccaggccctgtcactgctgttgggggagggaggatgaaccatccgggaggcctcacaccattccagagcagaaatcctgacacaaaaggaatctcccatgggggttcagctgggtccagagcccggaaagtgacataaacacgcaccttgcatctaaggagaatgcacgtggcggtaccgggcctgaggcccctggggagtatgtaccctccagagctacccagaggctgttggctaaaagttctatgtggccccctccttgggcagcctggtaagcaggtgaccttctagctgggtcccatgggccacgggcaaggcaggaatggaacgaagagtcagtcctcagtggctgggtgttgtatcccatgcctataatcccagcactttgggaggctgaggtgggcagatcacttgaggccaggagtttgagaccagcctggccaacatggtgaaaccctgtctctactaaaaatataaaaattagctgggtgtggtggcacacacctgtaattcccagctacttggaaggctgaggcaggagaattacttgaacccaggaagcagaggttaccgtgagccaagatcacaccattgcactccagcctgggcaacacagcgagaatccatctcaaaaaaaaaaaacaaaaagtcctcaggcagggtgggccaccctcttgaggccttgcccaaacagccagggggtcccttgtcctcttttcggcccacctttgcaggtgggaccagttcagtccaaagccccggtgcctcagtttccctgtgggttgaacaaggagaatgaggtgtatagggcctggctcagacggaggggtttcctgagcatggggagcctgtttcctcagacctgtgaagggaaggagggtggatcggcctgactggccctgggaagcacagaggagcctactgggaccagggaagagactgacaagagaagggaggcctgtccctgcctgcttctgtctcaagaagattgttatcacttcctctggtgaaatcctgccttcctgtccccacggcccctcagctgatgccaccttactctggagaggatgggcagagcctcctatggagggagccctgtgggtcaccaaagctccagtgaccacccccgggcaaagacctgcagatcccctgttagagacgggcccaggactttgtgcggggtgcccactgttgctctgagccttcacttcctcagggaggcttcctcaggatctcgaacctgcggaaggaggaccagtctgtgtacttctgccaagtccagctggacatacagatcagggaggctgtcgtggcagtccatcaaggggacccacctcaccatcacccagggtgagtccagctgccctggcaccaaggaaccttcctggttcagccataggctcaggtgtgtggagggaatgacctgaggggctgtatgagggaacaacctcctggggctcccctatgcctgagttcctgcaactcagaagttgaggcccagagatccaggtagagggggctccagtcctgggactgccctgcaagtcatgtggcctgggacagggcttctccaagctctgtcccctcctgtgtagggcagggaggtcagaggggaccctgcagatccagtctcatgtctgggggtcaaggggtggcctcgagagggaccagtctctgtgtaggggaccgtcagccccctcaccccttgagcaagactgtggtccctgcaccaagggagcaggcctggggtgggaagaggccagctgggctgtggtggtgcctggggactgcatgggagcccctgccagggagggagagggacagaggacaagctgggggctctggtgcttgggctgggggctgagcgcctgtgacctccactggcttcctccttctcctctctgaggactgaatctggggtgcagcagagcacagactcaggcccgcctttcctctccctgaaagagcctgcgctggccttggacagagaaagggatgagaagtgaggctgagtgcggtggggtctgcagggatccaggtgggaggggcccagccagccaaggtgaggcccagcccctcagcaggaagatgggcactggggcccttgggcagggctgacttgacacttttgtgtgacttgagccactgtgcccagcctgaacaccctttcctggtaaaacactccacaaaccaggaagagaaggaatgtactgcaacaaaataaaggccagtcatgcaaggcccatggctgaaagtctttcagtcattttagatgaaagactgaaatctttgcctccaagatcaggaacaagagaaggatgcccgctctcactacttctattcaacacaggatttgaagtcaggccgggcacagtggctcacgcctgtaatcccagcacttttggaggctgaggcgggcagattacttgagcctatgagtgtgagaccaccctggccaacatggcaaaaccccatctctactaaaaaaaaaaaaaaaaaaaggatttgaagtcctggccggagcaattaggcaagggataaaaaggcacctaaggcccttttgcaataagaagccagatggataaaggaagtgctggtcaccctggaggtgtactggtttggggaaggtccccggcccccacagccctctggggagcctcaccctggctctccccactcacctcagccctcaggcagcccctccacagggcccctctcctgcctggacagctctgctggtctccccgtcccctggagaagaacaaggccatgggtcggcccctgctgctgcccctgctgctcctgctgcagccgccagcatttctgcagcctggtgagtacccaggaccgcccaggtatggtctctgcccaaaccacaggaggggccaacccaagacaaaggcagaacatctggggcaggggccaggctcccacctccagcaaacaagggcgggtcccataggggtgggtgccgccatctcttccccctccaccctcccccatgcctgaagagtgggagacccaggccagaggtcagtccagccacctgtcacacgactgcctgtgggtgaaggtgtgggagggtctggggtcaccctctttgtgtcctgaggtggtttcaaggtctctcccccactcactccctccttcctctaggtggctccacaggatctggtccaagctacctttatggggtcactcaaccaaaacacctctcagcctccatgggtggctctgtggaaatccccttctccttctattacccctgggagttagccatagttcccaacgtgagaatatcctggagacggggccacttccacgggcagtccttctacagcacaaggccgccttccattcacaaggattatgtgaaccggctctttctgaactggacagagggtcaggagagcggcttcctcaggatctcaaacctgcggaaggaggaccagtctgtgtatttctgccgagtcgagctggacacccggagatcagggaggcagcagttgcagtccatcaaggggaccaaactcaccatcacccagggtgagtccagctgccctgacacctgccttgcccaccgcagtgagggttttggtgaccactgatgtcttcacatttaaacccagtggtctggattgagagctgttagcatttcaccttgctaccccttccatgtctgggcttctgagagcagcttgctcatcctgaatgtccccaatctagaaagcagcacaccatgcctttcatccagacgccccacacccccagaagagggtctgctcattcctcatctcttccagctgtcacaaccaccaccacctggaggcccagcagcacaaccaccatagccggcctcagggtcacagaaagcaaagggcactcagaatcatggcacctaagtctggacactgccatcagggttgcattggctgtcgctgtgctcaaaactgtcattttgggactgctgtgcctcctcctcctgtggtggaggagaaggaaaggtaagtgcccagaacgcactgtctcctcaagcttcccagctgggggtttctctgagcccacctgcagctaagggacttcagaaatatgcagaccctgctggctcccctcaagcccaccaaggccgactctggcctgtgctggggcgtctgcatctcgggggcctcctgcagtggggtggtgcagggtcacatgtgagaacccccagcctgggcgcggtggctcatgcctgtaatcccagcactttgggagcccaaggcaggtggatcacaaggccaagagatcaagaccatcctggccaacatggtaaaactccatctctactaaaaatacaaaaattagctgggcatggtggcacacgcttatagtcccagctactcaggaggctgaggcaggagaatcgcttgaacccgggaggcagaggttgcagtgagtcaaggtcgtgccactgcactccagcctggtgacagaacaagactctgtctcaaacaaacaaacaaacaaacaaaaaaagcccccagccctctccacacagctggatccccccaacttctctctcagtcatcaatcatccacgctcccctgaaggttcctggggaggggagggcctgccctgggaaaagaacagagagaggagaagggaccagaattgggctgagctcagcaggcactggctgactgccctcctgccacggcctggcttgaaactggagaagcaaagtatataaagcataggctctgctctcagggaactgggggtgtggagttgtcagttgcctcaaggactaattgcttcattgagaaagaactatggtattgctaaacaagggtgggaggagagagaggtaatcagggaggacttcccacaggaggtggcatctgcagatgtctcaaaaaagaaaagaattagcctggcaagaggtgaggattgtgtagaggtcactcactttccttgtgggtggaggaaaccattccaggagctgtaggaagcttggtgctggtgaaggaggcaggagaggagagaagaggagatgaccttagaaatcacatccaagagcctctgatcccagaggcagcgtgaggcagcaaagggtgacctcagttccccatgagagacctcagtctatggaggaatggccagaggtgggccaggctgggtcagtgcagtgcaggagtgaggtggagagagggaaagggccagatcctagaaaagattaagtaataaaaaccaatgagattgttagattgatgtaggggcaagggagcaggaagaagcacccgtttccacttgggtgcatggggctatgatgaaaccaccaactacagtagacaatagaggaggagactatgtttggaggggagcgatgcctcgtttagttcggaatttgtttttttgttttgttttgttttttgtttttgagacagagttttgttctgtcgcccaggctggagtgcagtggcacaatctcggctcactgcaagctccccctcctgggttcaagccattctcctgcctcagcctcctgagtagctgggactacaggcgcccgccaccacacctggctaattttttgtagttttagtagagacggggtttcactctgttagccaggatggtctcgatctcctgacctcgtgatccgcctgcctcggccttccaaagtgctgggattacaggcttgagccaccgcacccggccagtttggaatctgttatacgggagatccatgtgtggcatctcagcagagttgtccattggaaacttggatgtacacatttccagttcaaaagagaggacaaggctccaggcagcaatgagttctacctcaatatcctccaaacctgacagtaagttaccatcaagaaagtcttcaggccaggcacggtggctaatgcctataatcccagcaccttgggaggccaaggcggctggatcacctgaggtcaggcgttcaagaccagcctggccaaaatggtgaaaccccatctcaattaaaaacacaaaaaattagccaggcatggtggccgacacctgtagtccaagctactcaggaagctgaggcaggagaattgcttgaacccaggaggtggaggctgcagtgagccgagatggtgacactgcactccagcctggctgatagagcgagactccatctataaaaagtaaaaaagaaagtcttcagtgaaaggagattcgccctatcagctatgaaagcacagaggggaggaacatggagtaggggctgcctgcagtcagatcctgccctcacaaccttgccagggaaacaggctcgtgggtacaaaggttgtgtgcctcaacttcctcatggaagcacgtgagattattttataaccatagagtggagacagtcagtatgaccaccaaacccaggagccatatattaaaatactgataaatttaactatataaaaaaatttttgccgggtgcggtggctcacacctgtgattctagcagaaaatcagatcaggagatcacagaaggtcaaggaactactgagagagcaggaatggagagcaggggggtcagcaggaagcttggagaatctgcaaaatagtagattacaaaggatcaaaagtcagtgaggttcaacaagaggtagggtgggataatgaccaaagacagagggaacacttccaggttcattctgtgaggtcagcaacaccatgacctaaaagccagataaagaccctgcaagaaaaacaatacacaaaatacagatgaaaaggctggtgaatattgatgggaaaatcttcaacaaaattctagcaaaccaactttcacagcatgttaaaaggactgtacgccatgaccaagttggagatagccctggaatgcatgtatcacccaaaacaggaaaattaatgtagtgcaccccattagcagaatgaaggacaaaacccacatgatcatctcaactgatacagaaaaaacattggacaagattgaacacctttccttttttttttttgagatggagcctcgctctgttgcccagcctggagtgcagtggtgccatcttggctcactgcaacttctgcctcccgggttcaagcgattcttccacctcatcctttcgaggagctaggattacaggtgtgcaccactatgcccggctaatttttgtatttttggaagaaacgtggttttactatattggccaggctggtctcgaactcccgacctcaagtgatccgcccaccttggcctcccaaagtgctggcattgcaggctgagccacggtgcccagcctgaacaccctttcctggtaaaacactccaaaaccaggaaaagaaggaatgtacagcaacaaaataaaggccagtcatgcaaggcccatggctgaaagtctttcagtcattttaggtgaaagactgaaatctttgcctccaagatcaggaataagagaaggatgcccgatctcactacttctattcaacacaggatttgaagtcaggctggtcacagtggctcacacctgtaatcccagcacttttggaagtcgaggcaggtggattacatgaggctatgagtttgagaccaccctggccaacatggcaaaaccccatctctacttaaaaaaaaaaaaaaaaaaaaaagatttgaagtcctagccagagcaattaggcaattaggcaagggataaaaaggcatctaatttgaaaaggaacaagcaaaatgatctctgtttgcaggtgacaagatctcatatgtagaaaatcctaagtattgcacaaaattacctgttgaatgaatgaattcagcaaagttccaggaaaccaatttaacatgcaagcaaaaatgtattacatttctgtgcactaaacataaacaatctgaaaagaaaattaagaaaacaattccatttacaataatgtcaaaaaataaagtaagatctttaggaataaacctaaccagggaggtgaaagacttgtacactgaaactacaaaacattgctgaacaaatgaaagaagacacaaataggtggatgacattcttgttcgtggagtggaaagattaatattgtcaaggtgtccatgccaccaacaacaatctccagatccaatgcaaatcctatgaaaaccccaatggcattgtttttgctcaaacaaaaaattcatcctgaaattcaaatggaatctgaaagcactaccacaaaccaaaataatctttagaaacgtgaacagagaggacacgcattccctgatttcaaaatgtattaaaaactatggtaatcaaaacgatgtggtactgaaataaagacataaataggccaggtgcagtggctcagcctgtaatcccagcactttgggaggctgagctgggtggatcacctgagattaggagttcgagaccagcctgaccaacatggagaaaccccatctctactaaaaatacaaaattagccaggcgtggtggcgcatgtctgtaatcccagctaatcgggaggctgaggcaggagaatcacttgaacccgggaggcagaggttgcagtcagccaagatcacgccattgcattccagcctgggcaacaagagtgaaactccatctcaaaaaaaaaaaaaaagacataaatagagcagtggaatagaatacagagcccacaaataaaccctcacatagatagtcaaatgatcctcaacaagggtgccaagatgaccactcgacgaagaatagtttcttcaacaaatggtgttgagaaagctgggtactcacatgcaaaacataaaggtgcatctctgccaaaaaattaactcaaaatggattaaagacttcaatgtaagacccaaaactgtccagtgtctagaagaaaatacaggagaaaacatagggtgatgagacaagatggtgggtccttgcaccatcatccccagacccatggtttttattccacaggggaaggatggtttgtattctacaggtgaagtatgatcacatcaaggttgtttgactccagggcaggatttatgatacgtacctgctcttacacaagaacgatagatcaactggaaatcttagaggccttcccagaactggggttaatcagaagctgccatggcagattagcttccaagatggagttgccttagcctccacaatattaaaagtagaactaccatatgatccaacaatctcacttctgggcatctatccaaccaattgaaagcagggtcaggaagaggtgtttgcacaccgatgtttgtagtagcattactcaaaataccccaaacgtagaatcaactgaaatgtccatcaaacaaaatacggtgtctgtagtccaagctactcgggaagctgaggttaggagaatgacctgagcccaggaggttgagggtgtagtgaactatgattgtgccactgcactccatcctgggtgacagtataagatcctgtctattaaaaaaaaaaagttctgaaaaaaataatattattgaatcttttttatttagttatttattttgagacaaagtcctgctttgtcacccaggctggagtgcagcagtgcaatctcagttcactgcaacctccgcctcctgggttcaagggattctcttggctcagcctcccgagtagctgggatcacaggtgtgtgccaccacacccagctacttcttgcatttttagtagagacggggtttcaccatgttggccaggctggtctcgaactcctgacctcaggggatccacccacctcggccttccaaagtgctaggattataggcgtgagccactatgcttggcctcaacctttaaagggaaggaaattcttacacatgctgtagtataaatgagccttgaggacattatgctaagtgaaataagctagtcacaaaaagataaatactgtctgattccacttacatggtatctagagtagccagattcctagaaacaggaagcagaaaggtggttgtcaggggcacagaggagatgagaatggagagttaatatttaaagaacatagaatttcagttttactggcccagtgtggtggctcacgcctgtgaggaacatgccttggaaggctgaggtaggtggatcacttgaggcctggagttcgagcccagcctggccaacatggcgaaaccctgtctctactaaaaatacaaaaaataagctggtgtggcgggggcacctgtaatcccatctgctcgggaacctaaggcaggagaatcactggaacccaggagatggaggttgcagtgagctgagatcacgtcactgtatagcagcctgggtgacacagcaagactctgtctcaaaaaaagaacttttgggtttcagtttcgcaagatgaaaatgttctggagatctgtctcacaaccatgtgaatacacttaacactgccaaactgtacactaagcaatggttaggatggtaaattctaggtggtttttttttttttttttttttttagacagagtctcgctttgtcacccaggctggagtgcagtggtgcgatcttggctcactacaacctccacctcccagggtcaagcaattcttctgcatcagcctcctgagtagctgggagtacaggcacatgccaccacgcccggctaatttttgtaattttagtagagacaggttttcaccatattgttcaggctgatctcgaactcctgacctcaggtgatctgcccaccttggcctcccaatcctgggattatcaccgcgtgagccaccgcacccaccttaggtgttaggctggaaggagtgaaagttgcaatatgaaaatgatactagcagttaatatttcagagttcccagtcccaacattaaaaaacaaaaaacctgtagaagtggaaggggaggtccctggagttgaggggtgccgtgaggcctgggttcagagggtgtctctgtggacgtggagccctcccaggagggggctggatggtggaggggatgtctgtggaccaggagcccagtgcttgggaaacactgcaaggatgccagggggacaagaggggcagggcacagtgggagaggcagcagaggattcagggtgagaccagccagaggggaggggaggcctagaggtggcaacagaacttgaacagccacaaacatgagtcccaagcatgaggctcccaaggctggagggcagacacagccgccacccagaaggaaaccacaggcgcggtctccctgaggacctggagggagaggtgggggtgcctatgtcaagggaaggggagggaaggaagagatgggtgggcgagggctcagcgatagagggagccaggttggggctgagcagagagctcaagagcgaaggaagccaacagagggtagcaaggttttgcgggggcggtttcaggagatgacgtggtggacaacagggagaacaggtcgggggggagcctcagggtgccagctgagtcccaggcccttcctgatgggtttgggcagagctgatctgctgctctggtccctctaaggagggcctcagcctagggcgcagcagagaaggtgggatggagactgctatcacctggatgccaccctgactcactgttggtccccctacacgtcagcagcggactaaagccacaaccccagccagctgagtgctgggcctccccaagggagtggggagtacaggtgcgggcaggggacgggtttggaaatcagggactgtgctgctaagaaccccacaagcccagcctgccacaaattctcctgagtttttgccacctcccacttaaatctgatctctgaagcaactgcctcgcctgcctcactaataatcctggccctgcatctaaaaacacttcccctcctgcaggtagcagggcgccaagcagtgacttctgaccaacagagtgtggggagaagggatgtgtattagccccggaggacgtgatgtgagacccgcttgtgagtcctccacactcgttccccattggcaagatacatggagagcaccctgaggacctttaaaaggcaaagccgcaaggcagaaggaggctgggtccctgaatcaccgactggaggagagttacctacaagagccttcatccaggagcatccacactgcaatgatataggaatgaggtctgaactccactgaattaaaccactggcatttgggggctgtttattatagcagtgcaaagagttcctttatcctccccaaggatggaaaaatacaatttattttgcttaccatacaccccttttctcctcgtccacattttccaatctgtatggtggctgtcttctatggcagaaggttttggggaataaatagcgtgaaatgctgctgaca

SEQ ID NO: 9104 - DNA, 31718 bp, Homo sapiens
agaagggaggtagtcgccctccgtcgtggcctggcgtggattccgagcgttggtgtctggcggtttccgaccgttggtgtctggcacgcgccaccccgatgtaccaggtaaagccctatcacggggtcggcgcccctctccgtgtggagcccacctgcatgtactggctccccaacatgcacggcaggagcggcggcccagcactcggcactggccacttgcaggtaggagcgcggggcccccccgcccactgcgcacgcgcggcggcccgttgctggcccaggtgcccctaggccggatagagtgcgtcccaaccgattcgcggccccaccccggcatctgtgccggccggccagggggtcacccagatttttatgttttaaaagatttattcaggccgggcgccgtggctcacgcctgtaatcccggcactttgggaggccgaggcgggcggatcacctgagatcaagagttcgagaccagtctggccaacatggtgaaacctcgtctctactaaaaatgcaaaaattagccgggcatgtgtcgggcgcctgtaatcccagctactcgggaggctgaggcaggagaatggtttgaaccctggaggcggagcttgcagtgagctgagatcgagccattgcactcgagcctgggcagcaagagtgaaactccgtctcaaaaaaaaaattattatatatatatatatttttatatatgttaaatatacctttattatgcgtattatacatattgtatattatgtgtaatatataacatgatatattataaaatatatattatatatatatatatctttcctggtcgagcgcggtggttcacgcctggaatctcagcgctttgggagaccgaagcgggaggattgcttgagcccggagagtttgagaccaccctgagcaacatagcaagacccttgtctctatgtttttttttttttttgagttggagtcttgctctgtcgcccaggctggaatgcagtggcctgatctcggctcactgcaagctccacctcccgggttcacgccattctcctgcctcagcctccccagtagatgggactacaggcgcccgccaccatgcctggctaacttttttttgtatttttagtagagacatggtttcaccgtgttagccaggatggtctcgatctcctgacctcgtgattcgcctgcctcggcctcccaaattgctgggattacaggcgtgagccaccacgcccagctgccttgtctctattttttaaatgttttaattaaaataaaaatctatccatattttttctttttttttgcgtatggctgcttaaacattttagttcagaattctatcctctgaaaagtgagtagcacataaatgctcattttgaggaattacaaagcgaaccccagggtcaccacctcccaggttgacacacattgtgaccgctccattctttccacttaaaccttccccaccaacatcccagggcccgatttttatggtaattatgtcctgcttgtctctattattttgtcagctaagtatccctaaacaatatggtctggttttttgtttgtttttgtttgtttgtttttttcagacggagtttcactctgtcacccaggctggagtgcagtggcatgatctcggctcactgccaccttggcctcctgggttcaaggaattctcaggcctcagcctcatgagtagctgagattacaggcgctgtccactgcacctggctaatttttgtatttttagtagagacggggttttgccatgttgaccaggctggtcttgaactcctgacctcaggcgatccgcccgccttgaactcccaaagtgctgggattacaggtgtgagccaccgtgcccggcacctaaacaacatagttttgatataggtaagcatacagcatatattttgatgtatttcaggtaatttagtctaagaacaggaaaggacagaaaatgaacacaatttgtagttctttgttgttaacaaactaagaatactttgcttaaataagtagcaatgagaatgtaactcagtaattcatacaaatagacaagaagacaagaaaatgatttgaggacagcttcaatcgcggtgtgaagaagaaagcaacaaaacgaccactgaaaacaatgccggtgagtcagccagttttgtttttgaatcttgtcagggaagcagcccagctattcgggaggctgagacaggagaatggcacgaaccccgggggcagagctggcagtgagccgagatcacgccactgcacgccagcctgggcgacagagcgagactcagtctcaaaaaaaagagaaaacctaagaggttcaggtgatatggttcaaaaaaggacaagatttacaaagtattaagggacggaaataggaagaagagaaatttcgaagagaaaagaaaagaaaaggatgtttggttatagagatacaggaaggggactcaaggaatttttttttaaagggaaaaaagttaataaacttcataatataaaaatcaattattttaggactgagtctaactcagactctgctgtggaattggcagcgtaagcctacttgtgtgataatgatgaaaccaagtgttaatgtcactgttacctttttttcatatttctgatctttttatgtgtatcaggtggcaaaacatccaaagaaagggtcccaagtggtacatcgtcatagctggaaacagtcagagccaccagccaatgatcttttcaatgctgcgaaagctgccaaaagtgacatgcaggtaaagcagtgtcttacctctgttgataccatctcactttttgtaaggtggtaaggacaagtgtctacaaacttgatttgatgtgaacattttagtgagtgtaacatatcaagaaagataagattatggggtgaatccttggagtgatagaagggtaaccttgaataagagagcatgttcttttttttttttttttgagacagagtctctttctgttgcccaggctggagtgcagtggcacagtctcagctcactgcagcctctgcctcctgggttcaagcgattcttatgcctcagcctcccaagtagctgggcttacaggcatgtgccaccatgcctagctaatttctgtatttttagtagagatggggtttcgccatgtcggccaggctggtctccaactcctgacctcaggtgatccgcctgcctcggcctcccaaagtgctgggattacaggtgtgagccaccgcacccggcttcgagagagcgtttcttttcttaaagcgtgttcttttcttaaaggtatcacaggagtgattatgcctttgttgattgatggagcagatggggagaggcattgcatgacatgggaaggaagcttagatgtgggtggcaccttgttcacccatgttattttttagctccatcttgacaattatacttaattatttttccctctctctgtttctttttttataattttattgaagttctaatatctgaaagtgtacaaagcgtatatgtagtttaaaaaataaaaatgagatatcacccagatctctagccccagctcaagaaatgaaacattaatagtgctgtagagatcctttgtgtaccttctttctaccctacctcacagtccccttattacccataggtaaacactagggtgaattttgtgttaatctttgtcatttcattatagtgttaccactatgaatgtgttctttaattatgtaaatgaatccattattcaggcttctgtgatttaattatttcagttaacattgtttgagatttatccacattaatgtgtaattttatagtttctgggaaaatatttaaaattttcaaacatacagaattttgctagttatattttcgttatttgatttctaactttattgtgttgtagtcagggaatgtggtgtttgaaatttatgtaggggctgggcgcagtggctcacagctgtgatcccagcacttggggaggctgaggcaggcagatcacttgaggccaggagttcgagaccagcctggccaacatggcgaaaccccatctctactaaaaatacaaaaattagctgcatgtggtggcatttgtctgtaatcccagccacttgggaggctgaggcatgagaattgcttgaacccaggaggtggaggttgcagtgagctgagattgtgccatggcactccagcctgggtaacagagtgatactctgtctcaaaaaaaaaaaaaaaaaaagacatttatggagacttagccttatggcctagtattgagttggtacattcgttttatcttttctgtttctttttccccctttgcttactttcctctggatttcttatcttctacaaggacctgagcacattttaattccagttgtcttttccaccttacatgcagttgtacagtgtgttagttttttatttgaaacggagtcttgctctgtcaccaggctggagtgcagtgacgcgatcttggctcactgcacctccgcctcccgggttcaggcgattctcctgcctcagcctgccaagtagctgggactacaggcacccgccaccatgcttggctaatttttggccaccatgcccagcctgaatgaactttcaaaattggtttttaaaagaggtatggaggccgggtgcagtggctcacacctgtaactccagcactttgggaggccaagacgggcagatcacttgaggtcaggagttcgagaccagcctggccaacatggcgaaaccccatctctactaaaaatacgaaaaggtagctgggcgtggtggtgcacctgtgtattcctttcatctttctcattataggatttctgacaggactctgggcccctccccagctccactccctacctcaagaatgtgaccatttggaaaaggcaaagagaaaaggagcaaaatgaagcattcccccaggcttcagccctgggctctgaggggaaagagtggggcattgtttttctaacctaacctttccctctggtgatgttggggtagagaagccgagagaccctgtcctccctaatgcactgtggcccagtccccttgcctttttcctgttctgtttggagtggagaagggcagcacctctgtgtttaatggaagtagcccatagtctcctggatttttggaacatctttttcagcctattttgtgtcctaatgattcactcaataaacatgtttgaatccacacgttcccaaggtgtggcttgagatcgttaaactgatggaggtcaggttcttggtccgccttgtcccatggcccagtgtataggtgtccccacaccccgcaggtgctttgtctacaggctctccaggaagtattgcttagtaactgagaggcggggtgaggcagtagagatggggagagtttgactgcctgtgagtagtttatctagtggcctcagcctctgcagtagtaaaagttgtgctgacaggtggcagagtggagcaggaccttgtgaaactacctgtctcacccacgtgagccaggccagaccctgtgtcctggcagccttcatccatgggttctttccaaaggaaattttatcctctcatccgaaagatacctgtcataatttggaatttgatcaaatcacagtatctgagagttaaaaggaaactaaggagttactctaaatgtccaaccctaaaatccaagtgacaatgtcaccttcactcttgccttctccagctagttcttcaccaaattctgtcaagacttggtgaagaaaattctctggcctatgtcctccacacattgtcaccatcgtctctcacctagactgccacagtgcagcctcagggccagcctcttgaaactcagacagacttgtttgctcttgttttgccttgtggagcagcacagcacctctcttctctcttgtccctctgacaagcagtatttgaagacagatgttgtcattttgtactttcactgttttcttttgtggtttaaggaatgcttcagcctttctctttagatataatttctagttcttcccatcatgggcacctgctttagtgacaggttctcactgtggtctcctaggccagacacagccatccagctagtgatctgtgcagaaggagccgtgacttcctgcgatcaggtcactcagccaagaccgcctcgccccttccattctccctcccctcccccacctgcccctcccagatgaaagctagaagaaattgagttgtgagtctccttttggaaaggtagccctgggggagtccgagctggggtgtgggggaaggctaactcattcggcgatctttagcctgtattcaggtagaatagttctggggaaaggagcctgttttgtgggatgagggaacagagtgggagaactgaggagaagatgcggaggtctttaagaatccaggaggggaacgattcctgagttatttaaataccaaccaagctaagggtgcttcacaagaggataagagcagcttgggggctttgcatcaatatggacacctgtgtacagccaggcagcccagtgcactgggttgagtcacagccttagaatctgggagcttgacaccatgctctctaaagcctttgacactgtttattgagaggctgggtctaggttgtctcctcttgaatatgggcttcgtgatgcttgactaatagaagatggtggaaatgatgccatgctagttagtgggcccagattttaaggaaactggcagtttccgtttcctgtctcttcctgtacctgggttcacactgggaacccggtcaccattctgtgagcaaggccagcagtcaaaggaaaaggccgtgtgtaggtgttcttgccagcagtcctcaccgaggtcccagccaacatccatgttggctgccagactcagtcaagacgggagtcagatgattccaacctcccctgtttttcagttttcccagctgaggtccagacatcagggagcagagacagcccatcttttctgtgcactttgcaaattcctgactgtggagtccatgagcataataagatggtggttgacagcactcagtctggaggggtttgttacgtagccaaagcaactggaactgggccttagagtcataagactcccaatgttaggacatttatatcaaggtttttttaaaaattgtaagttatataaacatatactaattcttctatattatacacattaaaaatgtaacacatgagttgaaataagtgttttaaaatatttcattggttagcactgcaaaatacctttttgctcttttttttttttttttttttttttttttttgagacggagtctcggtctgtcacccaggctggaattgcagtggcacgatctcagctcactgcaagctccacctcctgggttcacgccattctcctgccttagcctcccgagtagctgggactacgggcgcccgccaccatgcccagctaccttttgtatttttagtagagacgaggtttcactgtgttagtcaggatggtctcgatttcctgacctcatgatccgcccgcctcggcctcccaaagtgctgagattataggcgtgagccaccgcgcccggccaccctttactttcaaaaaagggtttagtgagaacaaagtgagaaacatttttttaaatcatggttcaacattttctgaagttcagttgaaagttcagtttagtgctgggtgcggtggctcaggcctgtaatcccagcactttgggaggccagggtgggcagatcaggaggtcaagagattgagaccatcctggccaacatggtgaaaccctgtctctactaaaaatacaacaaaattggtggcatgcgcctgtagtcccagctactcaggaggctcagacaggagaatcgcttgaacccgggagacggaggttgcagtgaaccgagattgcaccactgcactccagcctggcaactggacgagactctgtttcaaaaaaaaaaaaaaaaagttcaatttattctgatacttaattttaatgaccttcataactgccaggagtacctctcaaaaacaggcaaatccaagtggattaggtgcctctttgcagttaccactttttaaatagatccaaacctgctgaaaatcttcatctagaagacttgtgaacaggtcagaggatgatttcccggcgcagacaacagtgctctcatgaggacaggcattgtctgggagcacaaaacctgaagtgtgtgagctgcagtgtgtggtgatgggctgggggtttgcctctcttccctcaggatactgatcattttccaggggaatcatgacttatcatgtttttatctacacttgatcttggccaaaaggccaagaagcgatactgtctttttgtcttaaaaggttagaatgtttctttatttctactgcacaacatctgtggatacttttttgtgcacgccctcaccctgacaggctcagctgtgaagggttcatgccagcaagccccctgctggccgtccaggacagcccagggctctggcttctcagcagcacctcccactggccaggcccaggccaggctggacaagctgaggccagcttaggtagcaggcatggaggcctttgcccagcctggtaagtgatgcagagcagtgcttttcaggggctggcactgtagggtccagccctactgggtctgtgggtttttctcctcgtgtgcggagatgagagatggtagaaatgaagacacaagacaaagagatagaagaaaagacagctgggccagggggaccactaccacctagacgcggagaccagtagtggccctgaatgcctgacagcgctgctatttattgtatacaaggcaaagggggcagggtaaggagtgtgagtcatctccattgatagataaggtcacatgagtcacgtgtccaccagacagggggcctttcccttttaggtagctgaggcggagagagagaggacagtgtacgtcattatttcttctatgctcttctcagaaagatcaaagactttaatactttcactaattctgctactgccatctagaaggtggagccaggtgtacagagcggaacatgaaagtgaaacaggagggtgactgctgaagcacagcatcacagggagacggttaggcctccggatggctgtgggcgggcctgactgatgtcaggccttccacaagaggtggtggagcagcgtcttctctaactcccccagggaaagggagtctccctttcccggtctgctaagtaacagttatcttcccaggcactggcaccactgctagaccaaggtctgctaagtaacgggtgccttcccaggcactggcattaccactagaccagggagccctctagtggccctgtccgggcgtgacagagggttcacactcctgccttctggtcacttctcaccatgtcccttcagctcctatctctgtatggcctggtttttcctaggttataattgtagaacaaagattattataatattggaataaagagtaatgctataaactaatgattagtaatattaatatataatcatatctataatctatttctagtatcactattcttattctatgtattttctttattatactggaacagcttgtgccctcggtctcttgccttggcagctgggtggcttgcctcccacatggcactgctgggcattgtctgttaatattgaataattgttttaagattattttcaatgattttcaataaggctttaccttttttaacttgcagtgtggccatgaggtctgccggaagtgacttgttggtgttatctcctgagttaaaatgtgaagggatttttttttttcagattactgagagtcttcagttactaggtaagtcgccccatccttattactccaggtgacactgactggggtttatgggatgaaagaggagtgtgtgcttggatgatggggtgtgatagtgaaggggtgaaaggtttcttctcacacatagacatcgtgaggtcttccttgagctctttagagccttccctcgggataggatgaaatactgagatcctagaaaggattcacaagacgagtcactcatcagtgcagattcaccgattcacccctagatgtgtgtgggatttggatggcagagagaaacaggcactgaagatttttggtcaggacagggcagagaaataaggagaagagttgaaaattcaccaaaggatagataaacccggggcgtttagagaaaacctgtagtgtgcaaaggagcccagaatcctggggaaacttggagggaaatatacttaatttgattcactaagttaggcccagtgaagggattgggtggcataggtagaagccgaaaaataaagcatcttgtattgctggaatagcctctgtttctgaggtcacatccaaacttagcgaggcagcttaacctggtgagagacacgggttcaactcctggcttctgcactgccagggcaaaggactgccgtttgctgacacagtcttgtaattcaatttaattttttaaccaaggtgtgggagaaggcagctccgcataatgctgaatattatgggttctgaagcgaaaatttttgtcagggtttaaattttggcttcattgtgtaagtagcccttccaccccgggcaagttatttcccacataaagcaattgctaagtatggagctgatgtacgtgcatcactgagaatgggtttagcacatagtatccactgaagacgctatcttgcattagctgtattactgtgataaaggataagctataattaaagttacagaggaacaaaagcagcccttttcacaacatttaaaacatgcatgtaaaaataaatgcagcagtgacaagtcttatgctacaaactcagaagagcagaaacaactttatttttcctctatgatttcaagctctttttctgcccagctgctgagaaaatttaactcctgagtcttcttggcttccttccttttccctaaggttgtgtcaagtgccaaagcatttaggggagggaggaggcctctagtcctctgtcaaaaatattttggatttttatagtcatttccctttctctgtggtgagactaggccctccaggaccctgtgttttggccccaggaattgaggccatctgaatcagctgcctgggttcctgtctgcagtgggccccatgggcctacagaagaacagaggctgctcagggctgggctgtttgctgcccagaaccaaggctaggatgaggagctcagactcttccagtggaagcagtgctaggacggaagacagccgcccctgaagaggggacattgacatacagttgatctgcctgggaaggtgtaatagagatgaacttgtgtcatcgcatctttcacacaagccacaaagaaagctaatcctgattcctggtgagaagaaaccaaactcgaggaatgttttatatcacaggacggtcacagcctgtactggggcacgagccagggctgagtagagtgctgcccctgcactcactgacttgatcctctcatttactctgtggagcagtccctgttgggatcctgctgctttgggaaattgctctgttaagcttgcagagctatgaaattgtggccctatttcaaacccatgagggcctgattctacagactgaccactgggctcttttacttcagcaggacttgggctggggctgcagggatttcaccaaggaatgtcaggcaggaggtggccattgtgaaacctgtcccatcttgcctgtacctcctggctgaaagtgggatgcaggacttagattgccaagcttaggaattatttgtggctctgctgttcacaattttggagaatgttaaggaatactcaagaagttgtgagagtaagggccctcacatatatcagaacatgaaagcattccagttaggaccttgtgatattgaaactagaataagcaacccagtggatagactgtgaaagagaatccacatatagacctatgtgtaagaatttatgatcaaggtggcattttgaaacagtagggaaggagcccagcagcaaatggtctggggaatcctggccctccacctgagacgttacacggctctttttttgagacggagttttgctcttgtgcccaggctggagtgcaatggtgggatctcggctcaccacaacctccgcccctgggtttaagcggttctcctgcctcagcctcccaagtaggtggcattacaggcatgcgccaccacacccagctaattttgtatatttagtagagatgggatttctccatgttggtcaggttggtctcgaactcctgacctcaagtgatccacctgcctcggcctcccaaagtgctgggattacaggcatgagccactgcacccagctacacagcctttttttttttctttttttgagacagagtctcgctctgtcacccaggctggagtgcagtggcgcgatctctgctcaccgcaagctccgcctcccgggttcacgccattctcctgcctcagcctcctgagtagctgggactacaggcgcccgccaccacacccagctaatttttttcgtatttttagtagagacagggtttcatcgtgttagccaggacagtctcgatctcctaacctcatgatctgcctgcctcggcctcccaaagtgttgggattacaggcatgagccaccatgcccggcctacacagcctttttaacaccacctccaaagtaaagttcttcatggactaggaagaaactctttatagagttatgcataaaaacaaagccataaaaatattttcataatcttagccttcctaaggaatacacaaacagaaatgataatgttaaagatcaagcctcatgagaattcaaacagggaggggaacagaaggagctggccaaaggagaactttgtgttctatgttgtttgaatcttacacaatgagaatttaggggataatgtgacttaaaaaattgaaaaaaaaaatgaaaatggtgggtagtcaactttgcaccatggcttttaaatccctcaataaattctgggctccccatattggggtgaataaaagacacacttcctccagggctcagcatccacctgtgaaaatgcccccaggactgtcgagaacccagctgggaggccacttggatgattatccaagaagtaagggcgcagtactttggggcagcttcctgaaggtggtgggatttgatctccttcttacaaagtgggatttcagcaggtggtgtagggaagtttaaattttttccctgaaggtttgataatctgagtctatgaaacaaacataaaacattaacaggaaaaaaaaccgacttaaaaatgttactacgtgcacacatgtgcacaagtcatacaaaatatataaaaaaataaatggccagatggttgacacttttatacccatcttgaaattacagaaataacgggaggcctggagcgcagcaagacagattaggggaaggggagaggagagacttggctagcaaaggtcttgttctgcaggtgacatctcacagctggtactctgcggagcctgtggtaggcaagtccttcagacccttaaaggggtccgcctctcagtttgtctttcctagatccagacacggggactgcagagaaaggctgtgtgcatccgctgtctactccactgtctcctctgcagaggcggatttccctgactgaagaccatgttgcaggcccacagctgcctacagaaccgtcccaaaatatggcaaagaaacctattctgaggttaaatattttggtttctttcagtgggaggcaagggtcttccggactagggaggtagatgtgcagcagcctcaggtgctctaggtgctttgtagctacgctggccaggccacctgaggtaggtcccctttgcaccagtctcacaccctgctgggggatggtagtggagacagcagtaaaagcaggtctgaggcaggtgtggagattagtacaggtggcctgggcgaagggcaaagggtgaagagaatgttgggagccatgggtgactggctgcgggcataggcaccatgaaggctactatgggctgcagggtgtggatgaggggacagagtttgccccagagaccaagttggtttgtgtcaaacaccacaggatttttattttgtatttttttttaatttttaatttttaaatttttttttgagatagggtctcacttttacccatgctggagtgtagtggcgtgatcttgggtcactgcagcctccacctcccaggctcaagtgatccttccgcctcaacctcccgagtaactgggactacaggcgaaagccaccacacccggctaatgtttattttttgtaaaggcagggtctcactatgttgcccaggctggtctcaaactcctgggctcaagtgatccacccacctcagcctccggaagtactgggattatagtcatgagccaccacatccagccagcaccacaggattaagcagacatgatgagtctttgacacaggggcaaaccaggacccagagaggtgacttgggacagggctgtctcttcagtccttaccacaccgtggacgagatcaaccttaagacagcaccctgggctctcactggaccctggattctggctcacagcacacaaagcaaactgatccctggaaagggtcacttgttgctgcctagcagcattctggtaggttggcatcctcaaagtgacataagcagtgaagcaattcagagcaacatttatttatcaagacagggtctcactctgtcacccagactggagtgcagtggtgtaatcacagttcactgcaacttctgcctcctgggcttaagcgatccttcaacctcagcctcccaaatagttgaaactacaggtgcccaccaccactcctggctaattctttctttcttgcttgcttgcttgcttgcttgcttgcttgcttgcttgcttgcttgctttctttctttctttctttctttctttctttctttctttctctttctttttctttctttctttcttcttctttctttctctctctttttctctgtctctctctctctccctccctccctctctctctctttttctttctttctttcttttttttttttttttgtagcgatagggtctcaccatgttgcccaggctggtcttgaactcctggactcatcctaaagtgctggcctctcattccctgtctgtgcacacctcacggcaagggccagcctgtttcctcccggtcacctccaaatcttgctgcttttaattcaactcagaggtatgcacttgaggtaggagggcaggggaagtggggatggcaggacatggatggcccttgaggcattggctctgggtgtcatgggctgtgagagtcaagaagggcagtggcctgcctgacttgggttcgaaagggtcactctggccactgcggtgagaactgaaactagccaggccaattctccattgttcctgctcttccaggtaggagaatattagattaggtctggagtcagaaggtagcaggggctgggggttgcagggggatgttgagaagaagtggtcctttggtcagggtgggaagccaacaggatttcctggtgcattggaggtgaaagggaagaggcgctggtggttgtgctttgggcctgagcagccagaagccgttgccatcacctatgacaagggagacagcgcctggggcagagcccagtatggggtgcattcagggtagatcaggaggtatgagtgggcagtgggcgagccaggctgggggttgtgggggaggcctgggttgcaggtttaagcgtgggacccacgtcagattggtggtgggtcatgcatgctggggtggctctcaggtcctccctgctggcttcccactcccaggggctttctcctcccagattccttagctgggtgaggggcaggacagagccctttcctagggaagcccggcaccccctgctgtccagggaaggggagtccttctagcccctgacagcttctctgcccctcccctggcctccccaggcctagccagggttgagttctcacccacctgtgccgccctgccttgttacctggaagcacagccttggggactgagcaggccctcactgtcactttaagaagggaatcagccactttgtgctcaccacctctggggaaggtgtgagaggagagaaggaagtggctgtttggctgctgacaacatgaagacttcctgcgatgagaacagaggcacaggtgccggccctgcagcccccagaacccggactggagggggccatggggcgccggaccctggccctgccctgggtgctgctgaccctgcgtgtcactgcaggtgagtgccggcaccagagaggggcaggggctgcagggagggtgatgtaggacgacagcccacccaccttgctgctgttccacagggaccccggaggtgtgagtacaagttcggatggaggccaccgagctctcgtccttcaccatccgttgtgggttcctggagtctggctccatctccctggtgactgtgagcagggggggccccgatggtgctggggggaccacgctggctgtgttgcacccggaacttggcatccagcaatgggcccctgctcgccaggcccgctgggaaacccagagcagcatctctctcatcctggaaggctctggggccagcagcccctgcgccaacaccaccttctgctgcaagtttgcgtccttccctgagggctcctgggaggcctgtgggagcctcccgcccagctcagacccaggtggggccggggtgaggggtccaggagggcagggaggggctcgggaactggccatccatctgattcttgcctctgtgcccagggctctctgtcccgccgactcctgcccccattctgcgggcagacctggccgggatcttgggggtctcaggagtccttctctttgactgtggctacctccttcatctgctgtgccgacagaagcaccggtgagacctgggccctgtccacgtccccctgacactgggctggccacatgccgtgcagagctctgaccatccttgctctctcccagccctgcccctaggctccagccatcccacaccagctcctaggcactgagagcacgagcatgggtgaggaggggggctgctttggggatgaggtggcaggggtagggggggccagggctgggcccaagctgtacagactcacttgatcctccttcccccgcgcaggcacccagccaggcctcccaggctgctctccacgtcccttatgccactatcaacaccagctgctgcccagctactttggacacagctcacccccgacagggggccgtcctggtgggcatcactccccacccacaccgcacactggccccagggccctgctgcctgggcctccacatccatccctgcacatggcagctttgtctctgttgagaatggactctacgcttaggctgggcagaggcctccctgcactggtcctggcctcactcttttccctgacccttggggcccagggccatggagggacccttaggagttcaatgagagagaccatgaggccactgggctttccccttcccaggcctcctgggtgccacccccttacgttattcttgggcctctaataagtgtcccacaggtgcctggccaggcccacctgctgcagatgtggtctgtgtgtgtgcatgtgtgggtgtgtgtgggcacaggtgtgagtgtgtgagcaacagtaccccattccagtcgtttcctgctgtgactaagtcagcaacacagttcctctgacatgggccttggctgtgcttctttgggggtgaagagattggggaggaagtctccacccctgggaggcagaagccaggtgagaaccagagtgggttggggcctccttgcagggctgggtttggcccagggagagggcagtgtcccagtcttagagatctgtcctggcttcttggggtggcggggggttgggggagcttcctgagggacacctgtggcttcctagacagaattgggggatcccagcgggatggtccctgctgcaatcccaccatgtcctaggacagcagcaagggttcctggggcttcagcctgagaaaagtccctgtgatttgacctggcgtccctctgccgggctccctgctgtggcctgggctagagtcctgatgccctccttccacagctggcatcaggcagggctggaaagtaggaggacttgcctgaaatctggctggatttcagagccttgctctgtcacccaggctggagtgcattggcacgatcttggcttacttcaacctccacctcccgggttctagtgattctcctgcgtcagcctcccgagtagctgggactacggatgtgcaccatcgtgtccgctaatttttgtattttttttttttttttcagtagagacgggtttcaccatgtttggctgggctggtctcgaactcctgacctcaggtgatccacccaccttggcctcccaaagtgctgagattacagacttgagccacggtgccccgcctgaataggagcttcttaatcaaaatttcagcatggctctgggtcaaaattgaccagctgatttaataagttgatgtaaaaattttacagtcagctacccctgggagggggagtctctccctagtcagtgaggcaccagatgccagagcattggcaatgtacaaggggctcagccctgtggctcatatgtgtaatcccagcacactgagaggatgccttgagcctgggagattgaggccagcctgggtaacagtgacaccacgtctctgcaaaaaagaaaattaggggagaactgtggtgcgtgcctatagtcccacctacaggcagagcgagaccatgtcccccactaaaaagaggccaagaatgcaggaaatatagataatatgggccctgtgatgggtggaggccaaatagatcaatacagaattgaagaagacacagagcacttgtatttcccttcaggcatagcgcgctggctaggactccagtaccgtgaagggaggcagtgagagcagacatctgtgcctcattcctgatctcaaggggaaagcaagaacaaggtgggtgccaaggaggggcaaggggctggggcaggcatagacgtggctggtgaggaaaggaggatagttgttgggggaaggtggggacatacaagcagcagttctcaaaatgggcagggtcctggccccctccctgcctctgctgaacactgcatcccatgcctctcccatggccacctgctgggctaacgggctggatttagactctgcccatgttggaatcatgccctcctccagggccggtgcctcccaaaacccccctctgagagagagccacagccccaggcttagccccaggccctgtcactgctgttgggggagggaggatgaaccatccgggaggcctcacaccattccagagcagaaatcctgacacaaaaggaatctcccatgggggttcagctgggtccagagcccggaaagtgacataaacacgcaccttgcatctaaggagaatgcacgtggcggtaccgggcctgaggcccctggggagtatgtaccctccagagctacccagaggctgttggctaaaagttctatgtggccccctccttgggcagcctggtaagcaggtgaccttctagctgggtcccatgggccacgggcaaggcaggaatggaacgaagagtcagtcctcagtggctgggtgttgtatcccatgcctataatcccagcactttgggaggctgaggtgggcagatcacttgaggccaggagtttgagaccagcctggccaacatggtgaaaccctgtctctactaaaaatataaaaattagctgggtgtggtggcacacacctgtaattcccagctacttggaaggctgaggcaggagaattacttgaacccaggaagcagaggttaccgtgagccaagatcacaccattgcactccagcctgggcaacacagcgagaatccatctcaaaaaaaaaaaacaaaaagtcctcaggcagggtgggccaccctcttgaggccttgcccaaacagccagggggtcccttgtcctcttttcggcccacctttgcaggtgggaccagttcagtccaaagccccggtgcctcagtttccctgtgggttgaacaaggagaatgaggtgtatagggcctggctcagacggaggggtttcctgagcatggggagcctgtttcctcagacctgtgaagggaaggagggtggatcggcctgactggccctgggaagcacagaggagcctactgggaccagggaagagactgacaagagaagggaggcctgtccctgcctgcttctgtctcaagaagattgttatcacttcctctggtgaaatcctgccttcctgtccccacggcccctcagctgatgccaccttactctggagaggatgggcagagcctcctatggagggagccctgtgggtcaccaaagctccagtgaccacccccgggcaaagacctgcagatcccctgttagagacgggcccaggactttgtgcggggtgcccactgttgctctgagccttcacttcctcagggaggcttcctcaggatctcgaacctgcggaaggaggaccagtctgtgtacttctgccaagtccagctggacatacagatcagggaggctgtcgtggcagtccatcaaggggacccacctcaccatcacccagggtgagtccagctgccctggcaccaaggaaccttcctggttcagccataggctcaggtgtgtggagggaatgacctgaggggctgtatgagggaacaacctcctggggctcccctatgcctgagttcctgcaactcagaagttgaggcccagagatccaggtagagggggctccagtcctgggactgccctgcaagtcatgtggcctgggacagggcttctccaagctctgtcccctcctgtgtagggcagggaggtcagaggggaccctgcagatccagtctcatgtctgggggtcaaggggtggcctcgagagggaccagtctctgtgtaggggaccgtcagccccctcaccccttgagcaagactgtggtccctgcaccaagggagcaggcctggggtgggaagaggccagctgggctgtggtggtgcctggggactgcatgggagcccctgccagggagggagagggacagaggacaagctgggggctctggtgcttgggctgggggctgagcgcctgtgacctccactggcttcctccttctcctctctgaggactgaatctggggtgcagcagagcacagactcaggcccgcctttcctctccctgaaagagcctgcgctggccttggacagagaaagggatgagaagtgaggctgagtgcggtggggtctgcagggatccaggtgggaggggcccagccagccaaggtgaggcccagcccctcagcaggaagatgggcactggggcccttgggcagggctgacttgacacttttgtgtgacttgagccactgtgcccagcctgaacaccctttcctggtaaaacactccacaaaccaggaagagaaggaatgtactgcaacaaaataaaggccagtcatgcaaggcccatggctgaaagtctttcagtcattttagatgaaagactgaaatctttgcctccaagatcaggaacaagagaaggatgcccgctctcactacttctattcaacacaggatttgaagtcaggccgggcacagtggctcacgcctgtaatcccagcacttttggaggctgaggcgggcagattacttgagcctatgagtgtgagaccaccctggccaacatggcaaaaccccatctctactaaaaaaaaaaaaaaaaaaaggatttgaagtcctggccggagcaattaggcaagggataaaaaggcacctaaggcccttttgcaataagaagccagatggataaaggaagtgctggtcaccctggaggtgtactggtttggggaaggtccccggcccccacagccctctggggagcctcaccctggctctccccactcacctcagccctcaggcagcccctccacagggcccctctcctgcctggacagctctgctggtctccccgtcccctggagaagaacaaggccatgggtcggcccctgctgctgcccctgctgctcctgctgcagccgccagcatttctgcagcctggtgagtacccaggaccgcccaggtatggtctctgcccaaaccacaggaggggccaacccaagacaaaggcagaacatctggggcaggggccaggctcccacctccagcaaacaagggcgggtcccataggggtgggtgccgccatctcttccccctccaccctcccccatgcctgaagagtgggagacccaggccagaggtcagtccagccacctgtcacacgactgcctgtgggtgaaggtgtgggagggtctggggtcaccctctttgtgtcctgaggtggtttcaaggtctctcccccactcactccctccttcctctaggtggctccacaggatctggtccaagctacctttatggggtcactcaaccaaaacacctctcagcctccatgggtggctctgtggaaatccccttctccttctattacccctgggagttagccatagttcccaacgtgagaatatcctggagacggggccacttccacgggcagtccttctacagcacaaggccgccttccattcacaaggattatgtgaaccggctctttctgaactggacagagggtcaggagagcggcttcctcaggatctcaaacctgcggaaggaggaccagtctgtgtatttctgccgagtcgagctggacacccggagatcagggaggcagcagttgcagtccatcaaggggaccaaactcaccatcacccagggtgagtccagctgccctgacacctgccttgcccaccgcagtgagggttttggtgaccactgatgtcttcacatttaaacccagtggtctggattgagagctgttagcatttcaccttgctaccccttccatgtctgggcttctgagagcagcttgctcatcctgaatgtccccaatctagaaagcagcacaccatgcctttcatccagacgccccacacccccagaagagggtctgctcattcctcatctcttccagctgtcacaaccaccaccacctggaggcccagcagcacaaccaccatagccggcctcagggtcacagaaagcaaagggcactcagaatcatggcacctaagtctggacactgccatcagggttgcattggctgtcgctgtgctcaaaactgtcattttgggactgctgtgcctcctcctcctgtggtggaggagaaggaaaggtaagtgcccagaacgcactgtctcctcaagcttcccagctgggggtttctctgagcccacctgcagctaagggacttcagaaatatgcagaccctgctggctcccctcaagcccaccaaggccgactctggcctgtgctggggcgtctgcatctcgggggcctcctgcagtggggtggtgcagggtcacatgtgagaacccccagcctgggcgcggtggctcatgcctgtaatcccagcactttgggagcccaaggcaggtggatcacaaggccaagagatcaagaccatcctggccaacatggtgacaccccatgtctactaaaaatacaaaaattagctgggcatggtggcacacgcttatagtcccagctactcaggaggctgaggcaggagaatcgcttgaacccgggaggcagaggttgcagtgagtcaaggtcgtgccactgcactccagcctggtgacagaacaagactctgtctcaaacaaacaaacaaacaaacaaaaaaagcccccagccctctccacacagctggatccccccaacttctctctcagtcatcaatcatccacgctcccctgaaggttcctggggaggggagggcctgccctgggaaaagaacagagagaggagaagggaccagaattgggctgagctcagcaggcactggctgactgccctcctgccacggcctggcttgaaactggagaagcaaagtatataaagcataggctctgctctcagggaactgggggtgtggagttgtcagttgcctcaaggactaattgcttcattgagaaagaactatggtattgctaaacaagggtgggaggagagagaggtaatcagggaggacttcccacaggaggtggcatctgcagatgtctcaaaaaagaaaagaattagcctggcaagaggtgaggattgtgtagaggtcactcactttccttgtgggtggaggaaaccattccaggagctgtaggaagcttggtgctggtgaaggaggcaggagaggagagaagaggagatgaccttagaaatcacatccaagagcctctgatcccagaggcagcgtgaggcagcaaagggtgacctcagttccccatgagagacctcagtctatggaggaatggccagaggtgggccaggctgggtcagtgcagtgcaggagtgaggtggagagagggaaagggccagatcctagaaaagattaagtaataaaaaccaatgagattgttagattgatgtaggggcaagggagcaggaagaagcacccgtttccacttgggtgcatggggctatgatgaaaccaccaactacagtagacaatagaggaggagactatgtttggaggggagcgatgcctcgtttagttcggaatttgtttttttgttttgttttgttttttgtttttgagacagagttttgttctgtcgcccaggctggagtgcagtggcacaatctcggctcactgcaagctccccctcctgggttcaagccattctcctgcctcagcctcctgagtagctgggactacaggcgcccgccaccacacctggctaattttttgtagttttagtagagacggggtttcactctgttagccaggatggtctcgatctcctgacctcgtgatccgcctgcctcggccttccaaagtgctgggattacaggcttgagccaccgcacccggccagtttggaatctgttatacgggagatccatgtgtggcatctcagcagagttgtccattggaaacttggatgtacacatttccagttcaaaagagaggacaaggctccaggcagcaatgagttctacctcaatatcctccaaacctgacagtaagttaccatcaagaaagtcttcaggccaggcacggtggctaatgcctataatcccagcaccttgggaggccaaggcggctggatcacctgaggtcaggcgttcaagaccagcctggccaaaatggtgaaaccccatctcaattaaaaacacaaaaaattagccaggcatggtggccgacacctgtagtccaagctactcaggaagctgaggcaggagaattgcttgaacccaggaggtggaggctgcagtgagccgagatggtgacactgcactccagcctggctgatagagcgagactccatctataaaaagtaaaaaagaaagtcttcagtgaaaggagattcgccctatcagctatgaaagcacagaggggaggaacatggagtaggggctgcctgcagtcagatcctgccctcacaaccttgccagggaaacaggctcgtgggtacaaaggttgtgtgcctcaacttcctcatggaagcacgtgagattattttataaccatagagtggagacagtcagtatgaccaccaaacccaggagccatatattaaaatactgataaatttaactatataaaaaaatttttgccgggtgcggtggctcacacctgtgattctagcagaaaatcagatcaggagatcacagaaggtcaaggaactactgagagagcaggaatggagagcaggggggtcagcaggaagcttggagaatctgcaaaatagtagattacaaaggatcaaaagtcagtgaggttcaacaagaggtagggtgggataatgaccaaagacagagggaacacttccaggttcattctgtgaggtcagcaacaccatgacctaaaagccagataaagaccctgcaagaaaaacaatacacaaaatacagatgaaaaggctggtgaatattgatgggaaaatcttcaacaaaattctagcaaaccaactttcacagcatgttaaaaggactgtacgccatgaccaagttggagatagccctggaatgcatgtatcacccaaaacaggaaaattaatgtagtgcaccccattagcagaatgaaggacaaaacccacatgatcatctcaactgatacagaaaaaacattggacaagattgaacacctttccttttttttttttgagatggagcctcgctctgttgcccagcctggagtgcagtggtgccatcttggctcactgcaacttctgcctcccgggttcaagcgattcttccacctcatcctttcgaggagctaggattacaggtgtgcaccactatgcccggctaatttttgtatttttggaagaaacgtggttttactatattggccaggctggtctcgaactcccgacctcaagtgatccgcccaccttggcctcccaaagtgctggcattgcaggctgagccacggtgcccagcctgaacaccctttcctggtaaaacactccaaaaccaggaaaagaaggaatgtacagcaacaaaataaaggccagtcatgcaaggcccatggctgaaagtctttcagtcattttaggtgaaagactgaaatctttgcctccaagatcaggaataagagaaggatgcccgatctcactacttctattcaacacaggatttgaagtcaggctggtcacagtggctcacacctgtaatcccagcacttttggaagtcgaggcaggtggattacatgaggctatgagtttgagaccaccctggccaacatggcaaaaccccatctctacttaaaaaaaaaaaaaaaaaaaaaagatttgaagtcctagccagagcaattaggcaattaggcaagggataaaaaggcatctaatttgaaaaggaacaagcaaaatgatctctgtttgcaggtgacaagatctcatatgtagaaaatcctaagtattgcacaaaattacctgttgaatgaatgaattcagcaaagttccaggaaaccaatttaacatgcaagcaaaaatgtattacatttctgtgcactaaacataaacaatctgaaaagaaaattaagaaaacaattccatttacaataatgtcaaaaaataaagtaagatctttaggaataaacctaaccagggaggtgaaagacttgtacactgaaactacaaaacattgctgaacaaatgaaagaagacacaaataggtggatgacattcttgttcgtggagtggaaagattaatattgtcaaggtgtccatgccaccaacaacaatctccagatccaatgcaaatcctatgaaaaccccaatggcattgtttttgctcaaacaaaaaattcatcctgaaattcaaatggaatctgaaagcactaccacaaaccaaaataatctttagaaacgtgaacagagaggacacgcattccctgatttcaaaatgtattaaaaactatggtaatcaaaacgatgtggtactgaaataaagacataaataggccaggtgcagtggctcagcctgtaatcccagcactttgggaggctgagctgggtggatcacctgagattaggagttcgagaccagcctgaccaacatggagaaaccccatctctactaaaaatacaaaattagccaggcgtggtggcgcatgtctgtaatcccagctaatcgggaggctgaggcaggagaatcacttgaacccgggaggcagaggttgcagtcagccaagatcacgccattgcattccagcctgggcaacaagagtgaaactccatctcaaaaaaaaaaaaaaagacataaatagagcagtggaatagaatacagagcccacaaataaaccctcacatagatagtcaaatgatcctcaacaagggtgccaagatgaccactcgacgaagaatagtttcttcaacaaatggtgttgagaaagctgggtactcacatgcaaaacataaaggtgcatctctgccaaaaaattaactcaaaatggattaaagacttcaatgtaagacccaaaactgtccagtgtctagaagaaaatacaggagaaaacatagggtgatgagacaagatggtgggtccttgcaccatcatccccagacccatggtttttattccacaggggaaggatggtttgtattctacaggtgaagtatgatcacatcaaggttgtttgactccagggcaggatttatgatacgtacctgctcttacacaagaacgatagatcaactggaaatcttagaggccttcccagaactggggttaatcagaagctgccatggcagattagcttccaagatggagttgccttagcctccacaatattaaaagtagaactaccatatgatccaacaatctcacttctgggcatctatccaaccaattgaaagcagggtcaggaagaggtgtttgcacaccgatgtttgtagtagcattactcaaaataccccaaacgtagaatcaactgaaatgtccatcaaacaaaatacggtgtctgtagtccaagctactcgggaagctgaggttaggagaatgacctgagcccaggaggttgagggtgtagtgaactatgattgtgccactgcactccatcctgggtgacagtataagatcctgtctattaaaaaaaaaaagttctgaaaaaaataatattattgaatcttttttatttagttatttattttgagacaaagtcctgctttgtcacccaggctggagtgcagcagtgcaatctcagttcactgcaacctccgcctcctgggttcaagggattctcttggctcagcctcccgagtagctgggatcacaggtgtgtgccaccacacccagctacttcttgcatttttagtagagacggggtttcaccatgttggccaggctggtctcgaactcctgacctcaggggatccacccacctcggccttccaaagtgctaggattataggcgtgagccactatgcttggcctcaacctttaaagggaaggaaattcttacacatgctgtagtataaatgagccttgaggacattatgctaagtgaaataagctagtcacaaaaagataaatactgtctgattccacttacatggtatctagagtagccagattcctagaaacaggaagcagaaaggtggttgtcaggggcacagaggagatgagaatggagagttaatatttaaagaacatagaatttcagttttactggcccagtgtggtggctcacgcctgtgaggaacatgccttggaaggctgaggtaggtggatcacttgaggcctggagttcgagcccagcctggccaacatggcgaaaccctgtctctactaaaaatacaaaaaataagctggtgtggcgggggcacctgtaatcccatctgctcgggaacctaaggcaggagaatcactggaacccaggagatggaggttgcagtgagctgagatcacgtcactgtatagcagcctgggtgacacagcaagactctgtctcaaaaaaagaacttttgggtttcagtttcgcaagatgaaaatgttctggagatctgtctcacaaccatgtgaatacacttaacactgccaaactgtacactaagcaatggttaggatggtaaattctaggtggtttttttttttttttttttttttagacagagtctcgctttgtcacccaggctggagtgcagtggtgcgatcttggctcactacaacctccacctcccagggtcaagcaattcttctgcatcagcctcctgagtagctgggagtacaggcacatgccaccacgcccggctaatttttgtaattttagtagagacaggttttcaccatattgttcaggctgatctcgaactcctgacctcaggtgatctgcccaccttggcctcccaatcctgggattatcaccgcgtgagccaccgcacccaccttaggtgttaggctggaaggagtgaaagttgcaatatgaaaatgatactagcagttaatatttcagagttcccagtcccaacattaaaaaacaaaaaacctgtagaagtggaaggggaggtccctggagttgaggggtgccgtgaggcctgggttcagagggtgtctctgtggacgtggagccctcccaggagggggctggatggtggaggggatgtctgtggaccaggagcccagtgcttgggaaacactgcaaggatgccagggggacaagaggggcagggcacagtgggagaggcagcagaggattcagggtgagaccagccagaggggaggggaggcctagaggtggcaacagaacttgaacagccacaaacatgagtcccaagcatgaggctcccaaggctggagggcagacacagccgccacccagaaggaaaccacaggcgcggtctccctgaggacctggagggagaggtgggggtgcctatgtcaagggaaggggagggaaggaagagatgggtgggcgagggctcagcgatagagggagccaggttggggctgagcagagagctcaagagcgaaggaagccaacagagggtagcaaggttttgcgggggcggtttcaggagatgacgtggtggacaacagggagaacaggtcgggggggagcctcagggtgccagctgagtcccaggcccttcctgatgggtttgggcagagctgatctgctgctctggtccctctaaggagggcctcagcctagggcgcagcagagaaggtgggatggagactgctatcacctggatgccaccctgactcactgttggtccccctacacgtcagcagcggactaaagccacaaccccagccagctgagtgctgggcctccccaagggagtggggagtacaggtgcgggcaggggacgggtttggaaatcagggactgtgctgctaagaaccccacaagcccagcctgccacaaattctcctgagtttttgccacctcccacttaaatctgatctctgaagcaactgcctcgcctgcctcactaataatcctggccctgcatctaaaaacacttcccctcctgcaggtagcagggcgccaagcagtgacttctgaccaacagagtgtggggagaagggatgtgtattagccccggaggacgtgatgtgagacccgcttgtgagtcctccacactcgttccccattggcaagatacatggagagcaccctgaggacctttaaaaggcaaagccgcaaggcagaaggaggctgggtccctgaatcaccgactggaggagagttacctacaagagccttcatccaggagcatccacactgcaatgatataggaatgaggtctgaactccactgaattaaaccactggcatttgggggctgtttattatagcagtgcaaagagttcctttatcctccccaaggatggaaaaatacaatttattttgcttaccatacaccccttttctcctcgtccacattttccaatctgtatggtggctgtcttctatggcagaaggttttggggaataaatagcgtgaaatgctgctgaca

SEQ ID NO: 9105 - DNA, 853 bp, Homo sapiens
ctcaagcaatcctccagcctcagtctcccaaatagctgcaattacaggcgtgagccaccatgcctggctgagagggaatcgttaagaaggagtgggcaggggcaagaacactgtcagagacagtgtgttggccacggctactacagcaaattggctgcttcctgtgatcgcacgggttgagggctcagttccacaaggctgccccagcatcagatgccagtcgcaagctcacgtggtgcctgtgcttctgacacagggctataaaaattgaggttcccatgatcccctccttgggttcaattaattttctagaatggtacctagaactcagggaagccctttacttacatgtgtccccttataaaggatattatagggcctggcgccatggctcatgcctgtaatctctgtgcttcaggaggttgaggggggaggttcacttgagcacaggagtttgagaccaacctgggcaacatagcgagaccccgtctcaaaataaagatataggatattacaaaggatagttatgaacagccagatataagagatacacagagggaggcctgggggaaggggtgcaaagcttccgtgtcttctctaggcactgcaccctctaggaagctccatgagttcagttatccagaagccctctgcatcccttttgggtttttatgggcttcattataaaggcatgattgggccaggcacagtggctcatgactgtaatcccagcacattttgaggctgaggtgggagaatcaattgagccctcaggtggcaactgaggctgcagtgagttgtgattgcaccactgtactccagcctgggtgacagagagagagcctgtctcaaa

SEQ ID NO: 9106 - DNA, 21676 bp, Homo sapiens
agattctgtctcgaaacaaaaaaaaaaagagggcctcagagagccagggaccagggaacgatatgacgcagtgttctgaggacagagagagggaagaatggggaggggaaggagtggcacatggggttgagcagaggagaaagtcagaaaggtggcttggagaagccagcagtctgagaggctggggaggatggagagtggtttggggtttggggtcggggtctaacgtgatcagttgcagaagcattacacggtggcctggtttctttactcagcccctggggtagatcccagccccccgcgtaggtcccttggctgcaaaaggaagagggagtgtttggatgaatctgatgatgagccagagaaggagctcgcccctgagcctgaggagacctgggtggcggagacgctgtgtggcctcaagatgaaggcgaagcgacggcgagtgtcgctcgtgctccctgagtactacgaggccttcaacaggctgcttggtaggaggacaccccagagagcacctccaatcctgttctttctaaaaagaggaaacttccaataaccacacttttccaatgggaaaaatatgccccagtgggtgagctctccatgcgggaggactctgaagtgatcactcatgagggaacttaggagtcaacagaggattaggtagacttgataaaggtcggtgcttgggataagaaagcttggttttgggccaggcgctgtggctcccgcctgagatcccagcacgttgggaggctgaggcaagagaattgcttgaactcaggactttgaggctgcagtgagctatgactgcaccactgcactccagcctgggtgacagagcaaaactctgcgtcaaaagaaaaaccaaggctgggcacagtagctcatgcctgtagttccagctactcgggaggctgagacaggagaattgcttaaacccaggaggcagaggttgcagtgagccaagatcaggccaatgcattccagcctggcccacagagcaagactctgtctcaaaataaattaataaataaataaaaataaaaatcaaacaaagaaaaacaaaatcaaaaatcaaaaaagtggtttcagctgtgccctctgaaacttaatgtttcttactgacttttctaaacctaagtgtctccatccatagtgggggataccaaggccatggtcacaccctgatgtgtgactgtctcatgaggaaatgatgggaattcctttatgactctgcagtggtccctccgtgtctgctggagggggtcccggctgattcccagctctacatcctgtagattctcacacccagggcctccttcggcctcttctcaggggagtctcagagcaggagcctctctcccttgcccagtgaaagtcattctcccctctcccatccacctcacccgcggccacaatcctgagactttcccccgggaggcacacttctcctcactgccctgctgctcccatggaaaccctgtcctgcttctcacgctgacatctgctctctaatcacagaggatcctgtcattaaaagattcctggcctgggacaaagatctgagggtgtcagacaaggtaaggttgttctctatgtaactgtgttcctgttctaacgcacggccagggggagggcgcagcttccaaacccacagttctccctccaccacctcccaccagatgctcctacagttttttttgtttttgtttttgtttttttttgtgagacacagtcttgctctgttgcccaggctggagggcagtgtctcgatcttgactcactgcagctgatgcctcctgggttcaagcgattctcctgcctcagcctccaagcagctgggattacaaacgtgaaccaccacgcctggctaatttttgtgtttttagtagagacggggttttgccatgttggccagattggtcccgaacacctgacctcaggtgatccacccgccttggcctcccaaagtgctgagattacagacgtcagcactgtgtccgaccagctcccatggtcttgagtcttggcacccacacatttttttttctgagacagagtccagctctgctccccaggatggagtacagtggcatgatcatagctcactctaattcctgggctcaagcaatcctctttccttagcctcctgaggagctgggactaggcacatgccaccatgctcaacgaatttttgaaatcttcgtagaaacagggtctcgctgtgttgcccaggttgttctccaactgttgggctcatgtgatcctcctgtctccacctctcaaaaagtactgggatcacaggcttgagccgccactcccggctattctttgtctttttatgatttgtcagcatctccctcaggactctgctggtctcttgcagagtgaatgagtggcccctgcctctcccatgggtcctttgggatctgagccctaggccaccgtctggctgcagtcctgaagctcctgggccctctactctcagctccttgggacagttctctgcctggcacacaaaagaccctcctgacaccagccgacctagacacaccccctccaaagatcccatcggagcccaccatcctgggagcatcacctaaaacccttcctccggcttctcggatttgcatccgaccttcgaatacccctccaccccgcaatttccacatgagcacagtcaccccaatgctgaggtcccttctctgatgggcaacccctccccagacccccattccactatctccacaatcttcctctcccaagatgtgacctctccctctctgtgttcctttctctccatcagtatctcctggctatggtcatagcgtatttcagccgggccggcctcccctcctggcaataccaacgcattcatttcttcctggctctgtgagtggtttgctgcctcctatccatcaatatccaacgccctgggacagcgggggaagtgggattccagcctttcatttattctttcacctatttgtcctctttactctgtgtacaaaaaagacaggattatagtatcttagactgttgtctctaaaaagaaactcaggctgggcatggtggctcaggcctgtaatcccagcactttgggaggccgaggcaagcggatcacctgaggtcaggagtttgagaccagcctggccaacatggcaaaccccgtctctactaaaaatagaaaaatcagtcgggcatgttggtgtgcacctgttatccaagctacttgggaggctgaggcatgagaaccccttgaacccaggaggtggaggttgcagtaagctaaggttgagccactgcactccagcctgggcaacagagtgagactttttctaaaaacaaaagagccaaaaaaaaaaaaacaggcaaaaaaaccaaactccaatgccagtgtacaaataaaagagtaaaacaggccaggtgcggtggctcacgcctgtaatctcaacagtttgggaggccgaggtgggcagatcacaaggtcaggagagcaaaaccatcctggctaacatggtgaaaccctgtctccacttaaaaaaaaaaaaaaatacaaaaaattagccaggtgtggtggcgggcacctgtagtcccagctactcgggaggctgagggaggagaatggcgtgaacctgggaggcggagcttgcagtgagccgagattgcaccactgcactccagcctgggcgacagaatgagactccgtctcaaaaaaaaaaaaaaaaaaaaagaacaaaaaacaaaaggaaccatgaaccgctcctaaggggagaacaaaaggagcggaggagcggacatgacacttcccccagcaagcagacgtttccggttcttctctctctctccttcccacatcaaccgcaaaagccaccaacctcctctgggttcccgtgacagaggtcacagtccaggtcccccttgcatcacttgaatccactgtcaaatgctccctgctggggtctcctggagtctctccccaagccaaggggcttcctagtgcagcctgaacatctttccaaagcacgacaacctcactgcccacctgaacaacttccttagctgatgtctttctctatcgaggccagggtccacagtgccaattccaccctctctacaatctctacaaccacactggctcgccatcttggtgtttcctggcttggcttcactgctccttccaaatgccctccacttgactttgcattcgtgttttctgtctgggtgtcccacacacatgtggttctgaagggaagcacccattccttgaagtcggttcaccccacagcctctgtgatgccttccctcatcttccaacttctgcatgcccgtagctctccagttacatcctcttataatgtgacattgggattaggtcatctcccctgattactcccagtcccattagactagatgcctgtagaaggcagggtcctggcaaaatatcaatgtattcaattgctttttttttttttttgagacagacttgccctgtcccctaagctggagtgcagtggtgagatcatagctcaccgcagcctccatatcctgggctcaagcgatcctcccacctcagcctcttgattagctccgactacagggctgtgccaccacacctggacagttatttatttatttatttatttatttatttatttatttatcaagacaagagtgttgctgtgtctctcaggctggaatggaggggcccaatcttggctcactgcaacctccgcctcctgggttcacacaattcttatgcttcagcctcttgagtagctaggactaatgggtgtgccaccgcaccaggctgatttttgtatttttagcataaatggggtttctctgtgttggccaggctggtctcaaactcctggtctcaagcaatccacctgcttcagccttccaaagtgctgggattacaggcatgagccaccacgtctggcgtattttttatatttttaatagagacaagggtcttgctatgttgcccaggcctgtctcaaactcctggcctcaagtgatcctcctgcttcggcctcccagtgtgctgggattccaggcctaagccaccactcttggtcaccagttgggtttttgtctccatcctgaaggagtgggagatgcccttgatcaggtctctgtccagcagagccctcctgaggaaggcgtggctctctgcagggtgggtgccagtcctgagctagggacggtcccttaccttcctctctgggaagctgacctcagccggaggtctctcctggtggtgcccctgagcagcaacctgatttctgtcctcagctatctggccaatgacatggaggaggacgacgaggcccccaaacaaaagatcttctacttcctgtacgggaagacccactctcacatacccttgcgccctaagcattggttccagttatgccgtcccatgaacccgagggccaggaagaactgctctcagatagccttgttccagaagcgtcggttccagttcttctgttccatgcgctgcagggcttgggtttccccggaggagttggaggaggtgggtggggcctggggaggtggaggatgtggggaggaatcgggtgggctggaggctggacgaggggagagaggggtatcctggggagtccccgtcttctcaaagcgcatttgtttttccagatccaggcttatgacccagagcactgggtgtgggcgcgagatcgcgcccacctttcctagagctccagggaccgtggaggcctgaggtcatcggcctgagagaaggtacatctgcatcctccggggtaaaggcagaatattggggtctatttcggaaatccaaggaacccaattgcttgatctggcttcaagcctcggcaacgtggcgagatatcccctctccacaaaaatacaaaaattagccaggcgatgtgggaggcatctctactcccaactactcaagaggctgaggcaggaggatcgctggagcctgggaggtcggggctgcagggagccctgatcctgccactgcactccagccggggcgacagagtgagaccctgcctcaaaaataatcataaatactgagttcggggaggttctttatgattgatgcacttgagttaccgatttgggtcgagggttcagtgaagctttggtttacatcttgtgcagctaaccatgttgagcacagagcatgagacttcgtcatgaggaggtaggattatggattaggcttctggactcgtggtttgtgatgttgtcacattagaaacagatctagcacagttacaagtttagatctgaagtgacacaaaagaccctagctgtgatgaagtccaaagccacattctctgagggtgccctactccctgggaagacccacccaaagtcctcgctatgaagcagatcactggggctgaccttgggtgtattaagttttggagtcagggtcaccaaagcgtgagtttcacagttgaacacgatggttcagaagcagggtatagaatgaaaggcaggagataaaatcgcacttctcaattgctctgaactctagctagacttgacatgggacgtgaataaccttcctgtctagagagctgtctccttgaggtgtgacattgtctctctcacttccagaacaccggacccaggggagatgtggattttcagcaggaactttattccagtgctaatggcagacatcaggaaggaggagaggagccatttgtgcagatcatctagaagaacctggaccattcttgacagagctgaatacagtgatcacgttgtcctccaaggagcaggggtggggtggggtacttctaggagtccttggagaaaagtaagaaaccaggagtgtttccagttccaccctttcctgcggcaccacctccctttttatattgctgaatgccaacctccctggggcggaacctggaggtcctgtttcttacggacttggttgccacagtccaggagcatttgaaggcacagtgcaggggctcagattggcacagaattctttgtgaaatatgagtgccacagactgtaacagatagcttcatgcacactatgcattttattggtttgtttggaaaatgttggccattgaatcattaataggtttatttcaaatagtttggaaattgttgtacttttgaaaacatgctgttcctgtagagttttttgatgagagttatagttgttatatatacataaagataattttcttttcatttttaagtgagaattctttttatcctaaatcttttattatctttaaatttttctctgtattattatatgtgctcctgaagcgagcactctttttatctatgatacttccataataatctcttctatttatagctattggtagttcccccaaattctggtcatagaaatttttatttgctgtttaggtttgtgactgaattgtgagaattcagttgtgatttttaacatgtcttagatatatatactaacatgtctaatatatactatctattttattgatttatttcgaaaaagatgggcaaagaattatttaaatattattttatttatttaaatatttattaaatatatttatttatttaaatatttattaaatatatttatttatttaaatgttattactttaaatattattttaaatattttggaaatactggtatttttgaatagatgctgtttctataaagctgtgtgatgggtattataactgttatatacacataaatataattttgttttcctttttaagagaggattctttttatcctaaatcttttacctttcaatctttgtatctattactacatatgctgctgaagggagcagactttttatctatgatacttagttaatgtatatattacatttatagctatgtggtagttcccctaaattcttgtaaaaataaatttttatttgatatttagtgtatgtttgaaatgtgagaattcagatggaattttttatcttgttttggcatgtttgtatgttactttaaagaggatgtgtgttctaaaggaggacatgagctgtgtgttttcaagagaacagtgcagtgcatctcttggggaaacataataaagatgaacttttctcaccttcacagtgagtgtgatcatattgtggtctggattgattatttgctgtcaagtgacatttttccttaatggggttgtggttatttgaacatatttattagctctggaagataatcctgtgttgttttttatgtagaaaaaaacataaggctgggtgcagtgctcacacctacaatcccagcagttttggaggtcatggcgggaggatcacttgaagcctatttttaatttttattttttaaagaaaaacaatagaagagaaggctgatcccaagctacagggtttttttgtttgtttgtttgtttttttcagacggagtttcactctgtcacccaggctggagtgcagtggcatgatctcggctcactgccacctctgcctcctgggttcaaggaattctcctgcctcagcctcccaagtagctgggactacaggcacccgcctgtacgtctgactaacttttgtaaaaatagtagagacaaggtttcaccatgttggccaggctggtctcaaactcctgacctcaagtgatccacccgcctcagtctcccaaagtgctgggattataggcatgagctactgcgcccagaccccaggctagagttttaaagcaggaaatgagagaaagatattgagagaggaaaaccaggtggtaagaaaactctaaaggtggctgggcgtggtggctcacgcctgtgatcccagcaggagttcgagaccaggcaggagaatcaccagcagagaatatgtctccccaacccctctcaaaaaaaaaaaaaaaaaaaagggccaggcgcggtggctcaggactgtaatcccagcactttgggaggctgaggcgggcggatcacaaggtcaggagatcaagaccatcctggctaatatggtgaaaccccatctctgctaaaaatacaaaaaattagctgggcgcggtggcaggcgcctatagtcccagctactccggaggctgaggcaggagaatggtgtgaacccaggaggtggagcctgcagtgagctgagatcgcgccactgcactccagcctgggtgacagagcgagactccatcacaaaaaaaaaaagaaaaaaaagaaaaaaagaaagttcctgcaacagttcaagctgtgaaagacaggcgctctgccatgcaattctttgtgatttttcttttttatttttggagtcggggtcttgtgctgtcacccagactggggtgcagtggtgcggtcacagctcactgcgggctcagactgaagctcaagcgatcttcttatcttgcctttctaattgctgggattataagcatgagccactgcacctggcctgtgtgacgtaattctgatgtcaactccctgatgttacatcaaatgctacaggttaaggccaccagcccccgctaggctgccctcgcttcagatgcagctgcaagcttgggtgtccacagactgcatgtacttctcaccaactggctgcaaatttggaggttcccaccacgtcctcaggtttgataattcactataacaacccacagaactctgaaaagcatgatactttctctttctttatttgagacagagtcttgctctgtcgcccaggctggagtgcagcggccaccatgcttggctaattttagtatttgtattagagacagggtttcgccatgttggccaggctggtcttgaactcctgacctcaggtgatccgcccaccttggcctcccaaagtgctgggattacaggcatagccaccgtgcctggctgacttctagagtttcaataacagagatgtggttcaagaagaaaagggagacatgttttgtagacagcaggagcttcatgaaaagaagccaatgaagggcaggatgtgtagctgtctacctacaggaaaccagccaggagcctccccgcagggagttcagcacagacggccgggaaaatctgcattaacctgagctctggacctaagagaggacaaggccttgactgtttctacagactcacaagacgcaatctctgcggtccatgcccgtggtgtgatctgggaaacagggggccttctaaatgccaacaacaaggaaatcaaatgcgcaacagacagaaataccggcattgacgcgggccatggagaggcctaaacagatgactgcagtccactgccaaggtcatcaaaggggtgactctgaaataagaaatttcagacgccacggcccaaatagctgcacgaggtggggaagtcctccacatgcctctgcttccttcagtacctcttcatgaaataagcggaggtacttccctggggaatttcctttctctttctttctttcgagacagagtcttgctctgtcgcccaggctagagtgcagtggcgcgatctcggctcactgcaacctctccctcccgggttttggcaattcttctgtctcagacttctgagtagctgagattacaggtgtgtgccaccatgcccagctaatatttgtatttttactcgagacagggtttcaccatctaggccaggctggtcttgaactcctgacctcatgatccacccgtcttggcctcccaaagtcctgggattacaggcacgagccaccgcacccagacttctttattttttgagatgaagtttcgctcttgttgcccaggctggagtgcaatggcgagatctcagctcactgccacctccacctcccaggttcaagtgattatcctgcctcagcctcccgagtagctgggattacaggcacccaacaccaaacccagctaactttttgtatttttagtagagatggaatgtcaccatgttggccaggatggtcttgaacccctgacctctaatgatctacccgaattggtctcccaaaatgctgggattacaggcgtgagccactgtgcccagcccctcccatacctcttttggccaaggcagtacaattcagagaatcttgccagggaagactggtaaatggacgtcaacatgatgcctatggctcctggtggatttagatacctcctggtgcttactgatacctttaccagttacatgggggcttttccatgccagactgaaaatgcaggagatcactgatcaaccttcaactatttactagcagaacactgaggggactctgcagtcaccaatatctcctattgcacttggataaacacctcccgggaaatagagatgaatagaaaggaaatagtcaaacaagcagaatggctacattccttcaaccagaagggtccattagtctgttttcacactgctataaagaactactggaaactggggaatttatgaagaaaacaggtttaattgactcacagttctgcaggctgtacaggaagcatggctggggaggcctcaggaaactgacaatcacggcagaaggcgaaggggaagcaggcacgtttctggccatggtggagcaggagagacagagagagtgaagcgggaggtggtgcatgcttctaaacaaccagatcccatgagcgctcactcactatcatgagaacagcaagggggacgtcagccgccatgagccaatcacctcctaccaggtccctccctcaacactgggaattgcaatttgacatgagatttgggtggggatacggagctgaaccatatcaagggtagtacaaccactgagattgattgactgagatggagtcccgctctgttacctaggctggagtgcagtggcacaatctcggctcactgcaacctccgcctcccaggttcaagcaattctcctgcctcagcctccctagtagctgggactacagcacacgccaccacacctggctaatttttgtattttcagtagagacggggtttcaccatgtttgccaggctggtcttgaactcctgacctcgtgatcaccctgcctcggctcttcttttgctggaattacaggcgtgagccaccgcacctggccaaccactgagatttagaaggcagtcgagtccactataccacacctcacctggtttcttcctctgttggggcgcctcgtggccactgttctgttactttttggtcctatttatttaaatggatggtgagctgtttgtcctccaggatccaacacttccaccttcagcttgtattacaacaataccagcctttcaagctactccaggtgaccccagaactcatttgaactcagaagcccaagagtttcattcctctcactttaggggactaagtgcccctagtcagcatgaagtcgatacagaagcatgacctccatccctaatccctcaagaatgaggagtggaaggtgtcggcaggagggtgggacgcggtttgtaaatctgtaactgcatcagaccaaatctagttcaactttttttttttttttttttgatggagtttcgctcttgtcacccaggctggagtgcaatggcacgatctcagctcactgcaacctccacgtcctaggttcaagcattctgctgcctcagcctctggggtagctgggattacaagggtgcgccaccacgcctggctaatatttatatttttagtagagacggggtttcaccattttggccaggctggtcttgaactcctcgacctcaggtgatccacctgccttggcctcccaaagtgctgggattacaggcgtgagtcaccgcacccgaatcagttcaacttttatgtaatgaagttgtcagttgtttttcaattgccatcgacccgcaggttgaaggtcatgtaccctgtgcatgcccaggttaaccaagcgtgccaccgtggagtggaacctaagagctcagcctgaagagctcggaccgatttaagaaccagacaccccaaggcaggagccaggatccaatcagattgagttttggcgtcaccccatggcaggatccagtcagatcacatctcccagcattactttattgcaagatccaatcaaatcacacctcattaccctacgcttataaaacctgacatagccccgagctgtgtaagggagatttgagtacttcctcctgtgttcttgctggctgacttacaaaaaagctttaaaaaaaaagccgggcgtggtggctcacgcctgtaatcccagcactttgggaggctgaggtgggcagatcacttgaggtcaggggtgcaagaccagcctggccaacatggtgaaaccccatctctactaaaaatacaaaaattagctgggtgtggtgacacacacctataatcccagctactcgggaggctgaggtaggagaatcacttgaacccaggaggcggaggttgcagtgagccaagatcacaccactgcactccagcctgggcgacagagtgagaagactccgtctaaaaaaaaaaagttaaaattagcaccgaatgctttacaagtaaaaaaagtttttagctgcatatgtttaagtaactttttagattataagaaatatgcatgcaaaatggaaaggcacaaagaagagagcaaaaagtgcatgagatctcacatccaaggataaccgctgagaacatggaagtgctgactcttccagtctttatactatacacatttaggcctgttgttttgttttcataaaactgtaatcatataatatagacagttttataatctgctttttaaacacaacaattatataacatttagctgtttcatttgcattcaaattcataagggttccagtaactcatttatcagaaaaccaagagaaatattctcataaaaatataagtacataaggtcaggcatggtggctcacacctgtaatcccagcactttgagaggccgaggtgggcggatcacctgagggcaggaattcaagaccagcctggccagcctggacaacatggtggaaccccgtctccactgaaaatacaaaaattagctgggcgtggtggcgcgtgcctgtaatggtagctactcagaaggctgaagcaggagaatcgcttgaacttggcaggtggaggttgcagtgaactgagatcgcgccactgcactgcaaccagggcaccaaagtgagactccatctcaaaaaaagataaaaataaaaaataaaaaaaatgtatatatatgtatatatatttttccagacagggtcttactctgtctcacagtctgaagtgcagtgacgcaatcatagctcactgcagtctcaagttcccgggctcaagtgatcctcccacttcagcctcccaagtagctggaactacaggtgcatgccaccatgcccagtcaattttttttttaatttttcatagagacagagtctcactatgtttcccagtcctaataaacactatgtgataaaaagaaaaaagtaaatcattctgaagttaagtctttaatgagaaatgcaaataaagcatttctcaataaattaggggaagggaatcaactgaagaataaacatctttagtaaatcttttgctcatgtgcattaaccaatattcttgaaaaccaggattaatttactgtaccttcttaatattcctttgaaattctttatggtgcacaggtagcgtagaaaataactgcttcacactgactgtcatccctctggggtgggggtagggggttttctggatgattttcccatagtgatcaaacaccagtcgagtcccaaccttcgccgatacatggcaggtagaaatggtgacatcactgtgagagaataccaggcatggtgtgttcagtgagagatccgtgatgttgggcactgactactcttttcttcacttgcttttctctcaaaattttcttaaaaagctgatgatccctctgagataaccgagatctaaacggttgaggagtcatcataaaatctaaggtctggcatctaaaagacagtgagacagagagcactaaacatgctttgttttgataaaagctttgacttcatttttcaggttgaattgcaaaaccataaatgatctcaagatttattgattctcaaatagagatttgttttgttattactcttcaaacaaaattttttaaaagaatttttttaaagaatttttaaaaatttaaaaaaatttttttaaagaatccaaaagatattataattaaaatgtatatgtagggcagggtgtggtggctcgtgcctgtaattccagcactttgggaggccaaggagggcagatcacttgaggcctggagttccaggccagcctgggcaacatggcaaaaccccatctctactaaaaatacaaaaattagccaggagtggtggtgcacgctatagtcccagctcttcaggaggctgaggcatgaaagtcacttgaacctgggaggcagagactgcagtgagctgagactgtgccactgcactccagcctgggtgacagagtgtgactctgtctaaaaaaaaaaaaaaaaaaaaaaaaatatatatatatatatatatatatatatatatatatatgtatatatatgtgtgtgtgtgtgtgtgcatataattatttataaaaatttagtatctgtgctataattaaatagtgctttggtgaaatgtttccctaaaaattgataatgaaaaccaatggtaactatcatttattatctatatgttatgttcaaattgagaagttactgttttaataagggtaaccaatttttttaacaatactatttgcttcatttcattcatttattgctcacatttcagaagtactaggacttagattggcagtgagacaaaacagaattcagaagctggaagctgagatattgagacagaaaactgtaaataataatgattccaattaattttcagagaggtttttctaaggggtcaagtgaatggataaaaatattttatcacctcagtgcacaaagtgagctcagagcttccccccgaaagccaaaagtttcaacctgaggtaggtcggcaaactcttgaatcttagatgtgtgatgtttcagagctgaaagagagtataaagtaaggactaagatatcttaagtgctataacaacaaatatacatgatatctagtaactggctttaaaaaactgtttttgtgtttcccaagacagtgttactcaaaattctaagacatgtggcccaattattttataataggattagaaaaagttaacttacttaagccttcgaagttttcttcttctaccccacatccattgcctgaaacttcaatgagatccactccatagtccttaagctttagatctagaaagtttaaaatatttatatatttattaaaaatggacccatgctatcagtttttatattgatattatttataacgtgcaaatttaagtgtcgtaactagacctttagttaaacatactagtgtcattttgtatatttcatttttataaagttctttctggctatttactagcccagattaaatagtttagcattttctttctttcctctttttttttttttccttatgctagtcaagtgaagcagttggagtggagaaggaacaaaaaaatctgtaactggttgtgatcaattagttgtaaagaccgttgcactttgaccagccttttcctttgaaagaaataattttaacatacccagtaaggagaacgggggccaggcgcggtggttcatgcctgtaatcccagcactttgggagaccaaagcgagcggatcacctgaggtcagtagttcgagaccagcctgaccaacatggagaaactctatctctactaaaaatacaaaattagccaggtgtggtggtgcatgcctgtaatcccagctactggtgaggctgaggcaggagaatcgcttgaacctgggaggcggaggttgcagtgagttgagatcgtgccattgcaccgcagcctcggcaacaagagcaaaactccatctcaaaaaaaaaaaaaagaaaaaaaacagaactggttctggaatcagacttcctagattctattttattagctttataatctccaaaaaaggtaatttactgtcccttaatttcctcaactgtaaaatggaggtaataagttctatctcataaagttatttggcagattaataattttttgtctttttattttgtcattttcttttttttctttcctttttttttttttttaattttttgagattgacttttgctcttgtcacccaggctggaatgcagtggcacaatcgatcttggctcactgcaacctccacctcccaggtttaagcaattctcctccctcagccttctgaggagctgagattacagccatgcaccatcacatctggctaatttttctatttttagtagagacagggttttaccacgttggttaggctggtcttgaactcctgacctcaaagcatcagcccccctcagcctcccaaagtgctgggattacagatgtgagccactactccaggatttattttattttattttattttattttattgttttgagacggagtcttgctctgtccccaggctgccgtgcagtggcacaatctcggttcactgcaacctccacctcccaggtttaaacaattctcattcctgagcctccccagtagctgggattacaggcttctgccaccaggtctggctaatttttgtatttttagtagagacagagtttcaccattttggacaggctggtctcgaattcctgacctcaggtatccacccgccttggcctcccaaagtgctgggattacaggcatgagccaccacacccggcctactttattttttaatagagacgaggtctcaccatgttggccaggttggtcttgaactcttggcttcaagcaatccccccacctcagcctctcaaagggctaggattacaggcgtgaaacaccacgcccagctattctgcaaattaaatgagatatttctgtgcaactcttagcataacacctgcctggcgcaccataagaacacaataaaagctgttgttattattattactacctagctaagtactaggcacataataggtgctaactttaacttaaaaataataatttattactacatcaacacttgatagtcttatttcaataacaaatgtttcttgactacaacaacattcactgatcatttcttgtggcttaaaactctcccaaacttaccaatattagtggcaccagcatccagactgttttctactaactccttcaccgcagtgcttagactcggtaccaccggcccagagcaaatctgatggactgacttccgatcaataggtttgatggccttagcaggttctgtactaaagaaatcagttacaagaaacaaagcaagtattcagctatatattttcatcctgattttaactgtgggaaatgactcaacactgcaaatagtttacgggtctaatctattcatttattatattaacaaatacatttattatatccagaaatggaaacattgttttacaatccttaaacaagtacccaaaatacttctggatagacacttcaaattcaacagatccttactacctagtatccacatggagaaaacatacattgtatctctcaaattaccaaaatctttggcaataatggtgtcttctttcttgaaaactgaaagcatggccggtgcggtggctcatgcctgtaatcccagcaatttgggacacagaggcaggcggatcacttgagatcaggagtttgagaccagcctggccaacatcgtgaaaccctgtctctaccaaaaatataaaaaattagccaggcatggtggtgggcgcctgtaatgccagctacttgggaggctggggcaggagaatcgcttaaacctgggaggcggaggttgcagtgagctgagattgcagcattgcaccccaggctgggcaatgagcaaaaaaaaaagtaaaagcaacataatttcccacataattagaaaaaccaacagtatgctgggaaatacacaatgttttcagtcaaaatcatctcagaaattggataccagttatataactattccttatacacagttgcctttgataccctactccagattgaagctgccagctgctgtcttagcaaagaccctcaaagttcttgctgtacttgctttaagagtttttttttgttgttttttgtttttttttttttgagacggagtcttgctctgtcgccctgtcgcccaggctggagtgtagtggcacgatcttggctcactgcaagctctgcctcccgggttcacgccattctcctgcctcagcctcctgagtggctgggactacaggcgcccaccaccatgcccagctaattttttgtatttttagtagagacagggtttcaccgttttagccaggatggtctcgatctcctgacttcgtgatccgcctgcctcagcctcccaaagtgctgggattacaggcgttagccaccacgcccggcccgctttaagagttttataacggtttcatttccccttattccctgctccaacccatcctccactctatcaccagagctatttttgaaatcacgaatctggtcaaataatttttctgcttgaaaaattactagtgccccacttcctactatatgaaacttaaaatctagtcatcactgggccccaaactaccttcttttcagaatctctctaatcctttcccttcatcaagtcccctacattattattactattattattatttgagacagagtctcaccctctcacctgggctagagtgcaatggcatgatctcggctcactgcaacctccacctcccaagttcaagtgattctcctgtctcagcctcccaagttgctgggattataggcacccaccattacactcagctaatttttgtgtttttaatagagatggggtttcaccatgttggccaggctggtttctaactcctgacctcaggtgatctgcccgccttggccttccaaagcactaggattacaggtgtgagccaccgcaactggccgtcccctatattgcagcacagtgaacaactgtttcctgaacatcacaagctcttttaaacactacagtgtataagcaggtctctgtctaaactgctctcctcttgctcctctgcccaaccaatgtctgctcatccaaagaatgtatcccgtgtgttcactaacttagcaagttccagtaaacagtttaattgatcactcgttaagagaaggcaggaaacctccatgaaaagagaaatcagtgggtatttcctacagcatttaacacattgtaggccttaaataaacccttgtgaaataaacaaacctctttactcttcattctatgttgctaagaatctcaccaaagtctgtctaccatgtgaaactgcagatgacctcacagaaaatggaaagaagtatctctaaaaataagtttatttggcaacacactacaggctacaggtccagttctgattttttttcttttttttttttgagatggagtcttgctgtgtcacccaggctagactgcagtggtgcaatctcagctcactgcaacctctgtctcctgggttccagcgattctcctgcctcagcctcccaagtagctaggattacaggcgcctgccaccacgcccagctaatttttgtatttttagtagaaatgggatttcaccatgttggccaggctggtcgtgaactcctgacctcatgatccacttgccttggcctcccaaagtgatgggattataggtgtgagccaccgcacctggtccacttcagatatttagatacagacggcaaatttatttaaatgtctcaatacatttaaatgtagttacctaaatatatctaatatatttaaatgcagagagcaaatttgcgtttacaaatctgacatggaattcaactgtgctagccaagattcggtgtagcttactagccagaaatcacataccctaacaggtaaaaatgcattgcattttttaaaactgcgcagctatgcaaattaggatgtgtctggacgctctactgtccccaaaataacctcaatttttttttaaaggccaggcacagtgcattacgcctgtaattccagcgctttggggggccaaggcgggcggactgcttgagctccggagttccagaccagcttgggcaacatagctaaatccccgtctctacaaaaaaataaagtaaaaattaaaaataaaataatataaaaataaaaataaaaggggagagagaacaggtaggaaggaaatgcattcagtctatagggatttcacgttccggcttcaagtccacggccctgtgatgggatgtgggcagggcctgagacaggccgaacccaactcttcacagggccgaattctttgcccgcagcccagcaccccgaaggagcttgcctcggcttcaaggcgcacctaatgggcaccggatcgctggggcgctgaggatgccgctccggggcctccacgaggcggcctcgccacgcgcctcggccatgttccccccatttccagggaggttggacgccgtggttcttaaagagggcgcgcgagaggggcgaccgcgagcccagctcacctcgagctctcagctcgctccaaggatgcaacaccggatccgcctcggggactgggaaagttccctccacggctcccacaggcgccccgcctcctg

SEQ ID NO: 9107 - DNA, 21358 bp, Homo sapiens
aaaaggaagagggagtgtttggatgaatctgatgatgagccagagaaggagctcgcccctgagcctgaggagacctgggtggcggagacgctgtgtggcctcaagatgaaggcgaagcgacggcgagtgtcgctcgtgctccctgagtactacgaggccttcaacaggctgcttggtaggaggacaccccagagagcacctccaatcctgttctttctaaaaagaggaaacttccaataaccacacttttccaatgggaaaaatatgccccagtgggtgagctctccatgcgggaggactctgaagtgatcactcatgagggacacttaggagtcaacagaggattaggtagacttgataaaggtcggtgcttgggataagaaagcttggttttgggccaggcgctgtggctcccgcctgagatcccagcacgttgggaggctgaggcaagagaattgcttgaactcaggactttgaggctgcagtgagctatgactgcaccactgcactccagcctgggtgacagagcaaaactctgcgtcaaaagaaaaaccaaggctgggcacagtagctcatgcctgtagttccagctactcgggaggctgagacaggagaattgcttaaacccaggaggcagaggttgcagtgagccaagatcaggccaatgcattccagcctggcccacagagcaagactctgtctcaaaataaattaataaataaataaaaataaaaatcaaacaaagaaaaacaaaatcaaaaatcaaaaaagtggtttcagctgtgccctctgaaacttaatgtttcttactgacttttctaaacctaagtgtctccatccatagtgggggataccaaggccatggtcacaccctgatgtgtgactgtctcatgaggaaatgatgggaattcctttatgactctgcagtggtccctccgtgtctgctggagggggtcccggctgattcccagctctacatcctgtagattctcacacccagggcctccttcggcctcttctcaggggagtctcagagcaggagcctctctcccttgcccagtgaaagtcattctcccctctcccatccacctcacccgcggccacaatcctgagactttcccccgggaggcacacttctcctcactgccctgctgctcccatggaaaccctgtcctgcttctcacgctgacatctgctctctaatcacagaggatcctgtcattaaaagattcctggcctgggacaaagatctgagggtgtcagacaaggtaaggttgttctctatgtaactgtgttcctgttctaacgcacggccagggggagggcgcagcttccaaacccacagttctccctccaccacctcccaccagatgctcctacagttttttttgtttttgtttttgtttttttttgtgagacacagtcttgctctgttgcccaggctggagggcagtgtctcgatcttgactcactgcagctgatgcctcctgggttcaagcgattctcctgcctcagcctccaagcagctgggattacaaacgtgaaccaccacgcctggctaatttttgtgtttttagtagagacggggttttgccatgttggccagattggtcccgaacacctgacctcaggtgatccacccgccttggcctcccaaagtgctgagattacagacgtcagcactgtgtccgaccagctcccatggtcttgagtcttggcacccacacatttttttttctgagacagagtccagctctgctccccaggatggagtacagtggcatgatcatagctcactctaattcctgggctcaagcaatcctctttccttagcctcctgaggagctgggactaggcacatgccaccatgctcaacgaatttttgaaatcttcgtagaaacagggtctcgctgtgttgcccaggttgttctccaactgttgggctcatgtgatcctcctgtctccacctctcaaaaagtactgggatcacaggcttgagccgccactcccggctattctttgtctttttatgatttgtcagcatctccctcaggactctgctggtctcttgcagagtgaatgagtggcccctgcctctcccatgggtcctttgggatctgagccctaggccaccgtctggctgcagtcctgaagctcctgggccctctactctcagctccttgggacagttctctgcctggcacacaaaagaccctcctgacaccagccgacctagacacaccccctccaaagatcccatcggagcccaccatcctgggagcatcacctaaaacccttcctccggcttctcggatttgcatccgaccttcgaatacccctccaccccgcaatttccacatgagcacagtcaccccaatgctgaggtcccttctctgatgggcaacccctccccagacccccattccactatctccacaatcttcctctcccaagatgtgacctctccctctctgtgttcctttctctccatcagtatctcctggctatggtcatagcgtatttcagccgggccggcctcccctcctggcaataccaacgcattcatttcttcctggctctgtgagtggtttgctgcctcctatccatcaatatccaacgccctgggacagcgggggaagtgggattccagcctttcatttattctttcacctatttgtcctctttactctgtgtacaaaaaagacaggattatagtatcttagactgttgtctctaaaaagaaactcaggctgggcatggtggctcaggcctgtaatcccagcactttgggaggccgaggcaagcggatcacctgaggtcaggagtttgagaccagcctggccaacatggcaaaccccgtctctactaaaaatagaaaaatcagtcgggcatgttggtgtgcacctgttatccaagctacttgggaggctgaggcatgagaaccccttgaacccaggaggtggaggttgcagtaagctaaggttgagccactgcactccagcctgggcaacagagtgagactttttctaaaaacaaaagagccaaaaaaaaaaaaacaggcaaaaaaaccaaactccaatgccagtgtacaaataaaagagtaaaacaggccaggtgcggtggctcacgcctgtaatctcaacagtttgggaggccgaggtgggcagatcacaaggtcaggagagcaaaaccatcctggctaacatggtgaaaccctgtctccacttaaaaaaaaaaaaaaatacaaaaaattagccaggtgtggtggcgggcacctgtagtcccagctactcgggaggctgagggaggagaatggcgtgaacctgggaggcggagcttgcagtgagccgagattgcaccactgcactccagcctgggcgacagaatgagactccgtctcaaaaaaaaaaaaaaaaaaaaagaacaaaaaacaaaaggaaccatgaaccgctcctaaggggagaacaaaaggagcggaggagcggacatgacacttcccccagcaagcagacgtttccggttcttctctctctctccttcccacatcaaccgcaaaagccaccaacctcctctgggttcccgtgacagaggtcacagtccaggtcccccttgcatcacttgaatccactgtcaaatgctccctgctggggtctcctggagtctctccccaagccaaggggcttcctagtgcagcctgaacatctttccaaagcacgacaacctcactgcccacctgaacaacttccttagctgatgtctttctctatcgaggccagggtccacagtgccaattccaccctctctacaatctctacaaccacactggctcgccatcttggtgtttcctggcttggcttcactgctccttccaaatgccctccacttgactttgcattcgtgttttctgtctgggtgtcccacacacatgtggttctgaagggaagcacccattccttgaagtcggttcaccccacagcctctgtgatgccttccctcatcttccaacttctgcatgcccgtagctctccagttacatcctcttataatgtgacattgggattaggtcatctcccctgattactcccagtcccattagactagatgcctgtagaaggcagggtcctggcaaaatatcaatgtattcaattgctttttttttttttttgagacagacttgccctgtcccctaagctggagtgcagtggtgagatcatagctcaccgcagcctccatatcctgggctcaagcgatcctcccacctcagcctcttgattagctccgactacagggctgtgccaccacacctggacagttatttatttatttatttatttatttatttatttatttatcaagacaagagtgttgctgtgtctctcaggctggaatggaggggcccaatcttggctcactgcaacctccgcctcctgggttcacacaattcttatgcttcagcctcttgagtagctaggactaatgggtgtgccaccgcaccaggctgatttttgtatttttagcataaatggggtttctctgtgttggccaggctggtctcaaactcctggtctcaagcaatccacctgcttcagccttccaaagtgctgggattacaggcatgagccaccacgtctggcgtattttttatatttttaatagagacaagggtcttgctatgttgcccaggcctgtctcaaactcctggcctcaagtgatcctcctgcttcggcctcccagtgtgctgggattccaggcctaagccaccactcttggtcaccagttgggtttttgtctccatcctgaaggagtgggagatgcccttgatcaggtctctgtccagcagagccctcctgaggaaggcgtggctctctgcagggtgggtgccagtcctgagctagggacggtcccttaccttcctctctgggaagctgacctcagccggaggtctctcctggtggtgcccctgagcagcaacctgatttctgtcctcagctatctggccaatgacatggaggaggacgacgaggcccccaaacaaaagatcttctacttcctgtacgggaagacccactctcacatacccttgcgccctaagcattggttccagttatgccgtcccatgaacccgagggccaggaagaactgctctcagatagccttgttccagaagcgtcggttccagttcttctgttccatgcgctgcagggcttgggtttccccggaggagttggaggaggtgggtggggcctggggaggtggaggatgtggggaggaatcgggtgggctggaggctggacgaggggagagaggggtatcctggggagtccccgtcttctcaaagcgcatttgtttttccagatccaggcttatgacccagagcactgggtgtgggcgcgagatcgcgcccacctttcctagagctccagggaccgtggaggcctgaggtcatcggcctgagagaaggtacatctgcatcctccggggtaaaggcagaatattggggtctatttcggaaatccaaggaacccaattgcttgatctggcttcaagcctcggcaacgtggcgagatatcccctctccacaaaaatacaaaaattagccaggcgatgtgggaggcatctctactcccaactactcaagaggctgaggcaggaggatcgctggagcctgggaggtcggggctgcagggagccctgatcctgccactgcactccagccggggcgacagagtgagaccctgcctcaaaaataatcataaatactgagttcggggaggttctttatgattgatgcacttgagttaccgatttgggtcgagggttcagtgaagctttggtttacatcttgtgcagctaaccatgttgagcacagagcatgagacttcgtcatgaggaggtaggattatggattaggcttctggactcgtggtttgtgatgttgtcacattagaaacagatctagcacagttacaagtttagatctgaagtgacacaaaagaccctagctgtgatgaagtccaaagccacattctctgagggtgccctactccctgggaagacccacccaaagtcctcgctatgaagcagatcactggggctgaccttgggtgtattaagttttggagtcagggtcaccaaagcgtgagtttcacagttgaacacgatggttcagaagcagggtatagaatgaaaggcaggagataaaatcgcacttctcaattgctctgaactctagctagacttgacatgggacgtgaataaccttcctgtctagagagctgtctccttgaggtgtgacattgtctctctcacttccagaacaccggacccaggggagatgtggattttcagcaggaactttattccagtgctaatggcagacatcaggaaggaggagaggagccatttgtgcagatcatctagaagaacctggaccattcttgacagagctgaatacagtgatcacgttgtcctccaaggagcaggggtggggtggggtacttctaggagtccttggagaaaagtaagaaaccaggagtgtttccagttccaccctttcctgcggcaccacctccctttttatattgctgaatgccaacctccctggggcggaacctggaggtcctgtttcttacggacttggttgccacagtccaggagcatttgaaggcacagtgcaggggctcagattggcacagaattctttgtgaaatatgagtgccacagactgtaacagatagcttcatgcacactatgcattttattggtttgtttggaaaatgttggccattgaatcattaataggtttatttcaaatagtttggaaattgttgtacttttgaaaacatgctgttcctgtagagttttttgatgagagttatagttgttatatatacataaagataattttcttttcatttttaagtgagaattctttttatcctaaatcttttattatctttaaatttttctctgtattattatatgtgctcctgaagcgagcactctttttatctatgatacttccataataatctcttctatttatagctattggtagttcccccaaattctggtcatagaaatttttatttgctgtttaggtttgtgactgaattgtgagaattcagttgtgatttttaacatgtcttagatatatatactaacatgtctaatatatactatctattttattgatttatttcgaaaaagatgggcaaagaattatttaaatattattttatttatttaaatatttattaaatatatttatttatttaaatatttattaaatatatttatttatttaaatgttattactttaaatattattttaaatattttggaaatactggtatttttgaatagatgctgtttctataaagctgtgtgatgggtattataactgttatatacacataaatataattttgttttcctttttaagagaggattctttttatcctaaatcttttacctttcaatctttgtatctattactacatatgctgctgaagggagcagactttttatctatgatacttagttaatgtatatattacatttatagctatgtggtagttcccctaaattcttgtaaaaataaatttttatttgatatttagtgtatgtttgaaatgtgagaattcagatggaattttttatcttgttttggcatgtttgtatgttactttaaagaggatgtgtgttctaaaggaggacatgagctgtgtgttttcaagagaacagtgcagtgcatctcttggggaaacataataaagatgaacttttctcaccttcacagtgagtgtgatcatattgtggtctggattgattatttgctgtcaagtgacatttttccttaatggggttgtggttatttgaacatatttattagctctggaagataatcctgtgttgttttttatgtagaaaaaaacataaggctgggtgcagtgctcacacctacaatcccagcagttttggaggtcatggcgggaggatcacttgaagcctatttttaatttttattttttaaagaaaaacaatagaagagaaggctgatcccaagctacagggtttttttgtttgtttgtttgtttgttttggagacagtctcgctctgtctcccaggctggagtgcagtggcacaacctcggctccctgcaactttcacctccgcgttcaagcaaattctcctgcctcagcctcccaagtagctgggactacaggcacccgcctgtacgtctgactaacttttgtaaaaatagtagagacaaggtttcaccatgttggccaggctggtctcaaactcctgacctcaagtgatccacccgcctcagtctcccaaagtgctgggattataggcatgagctactgcgcccagaccccaggctagagttttaaagcaggaaatgagagaaagatattgagagaggaaaaccaggtggtaagaaaactctaaaggtggctgggcgtggtggctcacgcctgtgatcccagcaggagttcgagaccaggcaggagaatcaccagcagagaatatgtctccccaacccctctcaaaaaaaaaaaaaaaaaaaagggccaggcgcggtggctcaggactgtaatcccagcactttgggaggctgaggcgggcggatcacaaggtcaggagatcaagaccatcctggctaatatggtgaaaccccatctctgctaaaaatacaaaaaattagctgggcgcggtggcaggcgcctatagtcccagctactccggaggctgaggcaggagaatggtgtgaacccaggaggtggagcctgcagtgagctgagatcgcgccactgcactccagcctgggtgacagagcgagactccatcacaaaaaaaaaaagaaaaaaaagaaaaaaagaaagttcctgcaacagttcaagctgtgaaagacaggcgctctgccatgcaattctttgtgatttttcttttttatttttggagtcggggtcttgtgctgtcacccagactggggtgcagtggtgcggtcacagctcactgcgggctcagactgaagctcaagcgatcttcttatcttgcctttctaattgctgggattataagcatgagccactgcacctggcctgtgtgacgtaattctgatgtcaactccctgatgttacatcaaatgctacaggttaaggccaccagcccccgctaggctgccctcgcttcagatgcagctgcaagcttgggtgtccacagactgcatgtacttctcaccaactggctgcaaatttggaggttcccaccacgtcctcaggtttgataattcactataacaacccacagaactctgaaaagcatgatactttctctttctttatttgagacagagtcttgctctgtcgcccaggctggagtgcagcggccaccatgcttggctaattttagtatttgtattagagacagggtttcgccatgttggccaggctggtcttgaactcctgacctcaggtgatccgcccaccttggcctcccaaagtgctgggattacaggcatagccaccgtgcctggctgacttctagagtttcaataacagagatgtggttcaagaagaaaagggagacatgttttgtagacagcaggagcttcatgaaaagaagccaatgaagggcaggatgtgtagctgtctacctacaggaaaccagccaggagcctccccgcagggagttcagcacagacggccgggaaaatctgcattaacctgagctctggacctaagagaggacaaggccttgactgtttctacagactcacaagacgcaatctctgcggtccatgcccgtggtgtgatctgggaaacagggggccttctaaatgccaacaacaaggaaatcaaatgcgcaacagacagaaataccggcattgacgcgggccatggagaggcctaaacagatgactgcagtccactgccaaggtcatcaaaggggtgactctgaaataagaaatttcagacgccacggcccaaatagctgcacgaggtggggaagtcctccacatgcctctgcttccttcagtacctcttcatgaaataagcggaggtacttccctggggaatttcctttctctttctttctttcgagacagagtcttgctctgtcgcccaggctagagtgcagtggcgcgatctcggctcactgcaacctctccctcccgggttttggcaattcttctgtctcagacttctgagtagctgagattacaggtgtgtgccaccatgcccagctaatatttgtatttttactcgagacagggtttcaccatctaggccaggctggtcttgaactcctgacctcatgatccacccgtcttggcctcccaaagtcctgggattacaggcacgagccaccgcacccagacttctttattttttgagatgaagtttcgctcttgttgcccaggctggagtgcaatggcgagatctcagctcactgccacctccacctcccaggttcaagtgattatcctgcctcagcctcccgagtagctgggattacaggcacccaacaccaaacccagctaactttttgtatttttagtagagatggaatgtcaccatgttggccaggatggtcttgaacccctgacctctaatgatctacccgaattggtctcccaaaatgctgggattacaggcgtgagccactgtgcccagcccctcccatacctcttttggccaaggcagtacaattcagagaatcttgccagggaagactggtaaatggacgtcaacatgatgcctatggctcctggtggatttagatacctcctggtgcttactgatacctttaccagttacatgggggcttttccatgccagactgaaaatgcaggagatcactgatcaaccttcaactatttactagcagaacactgaggggactctgcagtcaccaatatctcctattgcacttggataaacacctcccgggaaatagagatgaatagaaaggaaatagtcaaacaagcagaatggctacattccttcaaccagaagggtccattagtctgttttcacactgctataaagaactactggaaactggggaatttatgaagaaaacaggtttaattgactcacagttctgcaggctgtacaggaagcatggctggggaggcctcaggaaactgacaatcacggcagaaggcgaaggggaagcaggcacgtttctggccatggtggagcaggagagacagagagagtgaagcgggaggtggtgcatgcttctaaacaaccagatcccatgagcgctcactcactatcatgagaacagcaagggggacgtcagccgccatgagccaatcacctcctaccaggtccctccctcaacactgggaattgcaatttgacatgagatttgggtggggatacggagctgaaccatatcaagggtagtacaaccactgagattgattgactgagatggagtcccgctctgttacctaggctggagtgcagtggcacaatctcggctcactgcaacctccgcctcccaggttcaagcaattctcctgcctcagcctccctagtagctgggactacagcacacgccaccacacctggctaatttttgtattttcagtagagacggggtttcaccatgtttgccaggctggtcttgaactcctgacctcgtgatcaccctgcctcggctcttcttttgctggaattacaggcgtgagccaccgcacctggccaaccactgagatttagaaggcagtcgagtccactataccacacctcacctggtttcttcctctgttggggcgcctcgtggccactgttctgttactttttggtcctatttatttaaatggatggtgagctgtttgtcctccaggatccaacacttccaccttcagcttgtattacaacaataccagcctttcaagctactccaggtgaccccagaactcatttgaactcagaagcccaagagtttcattcctctcactttaggggactaagtgcccctagtcagcatgaagtcgatacagaagcatgacctccatccctaatccctcaagaatgaggagtggaaggtgtcggcaggagggtgggacgcggtttgtaaatctgtaactgcatcagaccaaatctagttcaactttttttttttttttttttgatggagtttcgctcttgtcacccaggctggagtgcaatggcacgatctcagctcactgcaacctccacgtcctaggttcaagcattctgctgcctcagcctctggggtagctgggattacaagggtgcgccaccacgcctggctaatatttatatttttagtagagacggggtttcaccattttggccaggctggtcttgaactcctcgacctcaggtgatccacctgccttggcctcccaaagtgctgggattacaggcgtgagtcaccgcacccgaatcagttcaacttttatgtaatgaagttgtcagttgtttttcaattgccatcgacccgcaggttgaaggtcatgtaccctgtgcatgcccaggttaaccaagcgtgccaccgtggagtggaacctaagagctcagcctgaagagctcggaccgatttaagaaccagacaccccaaggcaggagccaggatccaatcagattgagttttggcgtcaccccatggcaggatccagtcagatcacatctcccagcattactttattgcaagatccaatcaaatcacacctcattaccctacgcttataaaacctgacatagccccgagctgtgtaagggagatttgagtacttcctcctgtgttcttgctggctgacttacaaaaaagctttaaaaaaaaagccgggcgtggtggctcacgcctgtaatcccagcactttgggaggctgaggtgggcagatcacttgaggtcaggggtgcaagaccagcctggccaacatggtgaaaccccatctctactaaaaatacaaaaattagctgggtgtggtgacacacacctataatcccagctactcgggaggctgaggtaggagaatcacttgaacccaggaggcggaggttgcagtgagccaagatcacaccactgcactccagcctgggcgacagagtgagaagactccgtctaaaaaaaaaaagttaaaattagcaccgaatgctttacaagtaaaaaaagtttttagctgcatatgtttaagtaactttttagattataagaaatatgcatgcaaaatggaaaggcacaaagaagagagcaaaaagtgcatgagatctcacatccaaggataaccgctgagaacatggaagtgctgactcttccagtctttatactatacacatttaggcctgttgttttgttttcataaaactgtaatcatataatatagacagttttataatctgctttttaaacacaacaattatataacatttagctgtttcatttgcattcaaattcataagggttccagtaactcatttatcagaaaaccaagagaaatattctcataaaaatataagtacataaggtcaggcatggtggctcacacctgtaatcccagcactttgagaggccgaggtgggcggatcacctgagggcaggaattcaagaccagcctggccagcctggacaacatggtggaaccccgtctccactgaaaatacaaaaattagctgggcgtggtggcgcgtgcctgtaatggtagctactcagaaggctgaagcaggagaatcgcttgaacttggcaggtggaggttgcagtgaactgagatcgcgccactgcactgcaaccagggcaccaaagtgagactccatctcaaaaaaagataaaaataaaaaataaaaaaaatgtatatatatgtatatatatttttccagacagggtcttactctgtctcacagtctgaagtgcagtgacgcaatcatagctcactgcagtctcaagttcccgggctcaagtgatcctcccacttcagcctcccaagtagctggaactacaggtgcatgccaccatgcccagtcaattttttttttaatttttcatagagacagagtctcactatgtttcccagtcctaataaacactatgtgataaaaagaaaaaagtaaatcattctgaagttaagtctttaatgagaaatgcaaataaagcatttctcaataaattaggggaagggaatcaactgaagaataaacatctttagtaaatcttttgctcatgtgcattaaccaatattcttgaaaaccaggattaatttactgtaccttcttaatattcctttgaaattctttatggtgcacaggtagcgtagaaaataactgcttcacactgactgtcatccctctggggtgggggtagggggttttctggatgattttcccatagtgatcaaacaccagtcgagtcccaaccttcgccgatacatggcaggtagaaatggtgacatcactgtgagagaataccaggcatggtgtgttcagtgagagatccgtgatgttgggcactgactactcttttcttcacttgcttttctctcaaaattttcttaaaaagctgatgatccctctgagataaccgagatctaaacggttgaggagtcatcataaaatctaaggtctggcatctaaaagacagtgagacagagagcactaaacatgctttgttttgataaaagctttgacttcatttttcaggttgaattgcaaaaccataaatgatctcaagatttattgattctcaaatagagatttgttttgttattactcttcaaacaaaattttttaaaagaatttttttaaagaatttttaaaaatttaaaaaaatttttttaaagaatccaaaagatattataattaaaatgtatatgtagggcagggtgtggtggctcgtgcctgtaattccagcactttgggaggccaaggagggcagatcacttgaggcctggagttccaggccagcctgggcaacatggcaaaaccccatctctactaaaaatacaaaaattagccaggagtggtggtgcacgctatagtcccagctcttcaggaggctgaggcatgaaagtcacttgaacctgggaggcagagactgcagtgagctgagactgtgccactgcactccagcctgggtgacagagtgtgactctgtctaaaaaaaaaaaaaaaaaaaaaaaaatatatatatatatatatatatatatatatatatatatgtatatatatgtgtgtgtgtgtgtgtgcatataattatttataaaaatttagtatctgtgctataattaaatagtgctttggtgaaatgtttccctaaaaattgataatgaaaaccaatggtaactatcatttattatctatatgttatgttcaaattgagaagttactgttttaataagggtaaccaatttttttaacaatactatttgcttcatttcattcatttattgctcacatttcagaagtactaggacttagattggcagtgagacaaaacagaattcagaagctggaagctgagatattgagacagaaaactgtaaataataatgattccaattaattttcagagaggtttttctaaggggtcaagtgaatggataaaaatattttatcacctcagtgcacaaagtgagctcagagcttccccccgaaagccaaaagtttcaacctgaggtaggtcggcaaactcttgaatcttagatgtgtgatgtttcagagctgaaagagagtataaagtaaggactaagatatcttaagtgctataacaacaaatatacatgatatctagtaactggctttaaaaaactgtttttgtgtttcccaagacagtgttactcaaaattctaagacatgtggcccaattattttataataggattagaaaaagttaacttacttaagccttcgaagttttcttcttctaccccacatccattgcctgaaacttcaatgagatccactccatagtccttaagctttagatctagaaagtttaaaatatttatatatttattaaaaatggacccatgctatcagtttttatattgatattatttataacgtgcaaatttaagtgtcgtaactagacctttagttaaacatactagtgtcattttgtatatttcatttttataaagttctttctggctatttactagcccagattaaatagtttagcattttctttctttcctctttttttttttttccttatgctagtcaagtgaagcagttggagtggagaaggaacaaaaaaatctgtaactggttgtgatcaattagttgtaaagaccgttgcactttgaccagccttttcctttgaaagaaataattttaacatacccagtaaggagaacgggggccaggcgcggtggttcatgcctgtaatcccagcactttgggagaccaaagcgagcggatcacctgaggtcagtagttcgagaccagcctgaccaacatggagaaactctatctctactaaaaatacaaaattagccaggtgtggtggtgcatgcctgtaatcccagctactggtgaggctgaggcaggagaatcgcttgaacctgggaggcggaggttgcagtgagttgagatcgtgccattgcaccgcagcctcggcaacaagagcaaaactccatctcaaaaaaaaaaaaaagaaaaaaaacagaactggttctggaatcagacttcctagattctattttattagctttataatctccaaaaaaggtaatttactgtcccttaatttcctcaactgtaaaatggaggtaataagttctatctcataaagttatttggcagattaataattttttgtctttttattttgtcattttcttttttttctttcctttttttttttttttaattttttgagattgacttttgctcttgtcacccaggctggaatgcagtggcacaatcgatcttggctcactgcaacctccacctcccaggtttaagcaattctcctccctcagccttctgaggagctgagattacagccatgcaccatcacatctggctaatttttctatttttagtagagacagggttttaccacgttggttaggctggtcttgaactcctgacctcaaagcatcagcccccctcagcctcccaaagtgctgggattacagatgtgagccactactccaggatttattttattttattttattttattttattgttttgagacggagtcttgctctgtccccaggctgccgtgcagtggcacaatctcggttcactgcaacctccacctcccaggtttaaacaattctcattcctgagcctccccagtagctgggattacaggcttctgccaccaggtctggctaatttttgtatttttagtagagacagagtttcaccattttggacaggctggtctcgaattcctgacctcaggtatccacccgccttggcctcccaaagtgctgggattacaggcatgagccaccacacccggcctactttattttttaatagagacgaggtctcaccatgttggccaggttggtcttgaactcttggcttcaagcaatccccccacctcagcctctcaaagggctaggattacaggcgtgaaacaccacgcccagctattctgcaaattaaatgagatatttctgtgcaactcttagcataacacctgcctggcgcaccataagaacacaataaaagctgttgttattattattactacctagctaagtactaggcacataataggtgctaactttaacttaaaaataataatttattactacatcaacacttgatagtcttatttcaataacaaatgtttcttgactacaacaacattcactgatcatttcttgtggcttaaaactctcccaaacttaccaatattagtggcaccagcatccagactgttttctactaactccttcaccgcagtgcttagactcggtaccaccggcccagagcaaatctgatggactgacttccgatcaataggtttgatggccttagcaggttctgtactaaagaaatcagttacaagaaacaaagcaagtattcagctatatattttcatcctgattttaactgtgggaaatgactcaacactgcaaatagtttacgggtctaatctattcatttattatattaacaaatacatttattatatccagaaatggaaacattgttttacaatccttaaacaagtacccaaaatacttctggatagacacttcaaattcaacagatccttactacctagtatccacatggagaaaacatacattgtatctctcaaattaccaaaatctttggcaataatggtgtcttctttcttgaaaactgaaagcatggccggtgcggtggctcatgcctgtaatcccagcaatttgggacacagaggcaggcggatcacttgagatcaggagtttgagaccagcctggccaacatcgtgaaaccctgtctctaccaaaaatataaaaaattagccaggcatggtggtgggcgcctgtaatgccagctacttgggaggctggggcaggagaatcgcttaaacctgggaggcggaggttgcagtgagctgagattgcagcattgcaccccaggctgggcaatgagcaaaaaaaaaagtaaaagcaacataatttcccacataattagaaaaaccaacagtatgctgggaaatacacaatgttttcagtcaaaatcatctcagaaattggataccagttatataactattccttatacacagttgcctttgataccctactccagattgaagctgccagctgctgtcttagcaaagaccctcaaagttcttgctgtacttgctttaagagtttttttttgttgttttttgtttttttttttttgagacggagtcttgctctgtcgccctgtcgcccaggctggagtgtagtggcacgatcttggctcactgcaagctctgcctcccgggttcacgccattctcctgcctcagcctcctgagtggctgggactacaggcgcccaccaccatgcccagctaattttttgtatttttagtagagacagggtttcaccgttttagccaggatggtctcgatctcctgacttcgtgatccgcctgcctcagcctcccaaagtgctgggattacaggcgttagccaccacgcccggcccgctttaagagttttataacggtttcatttccccttattccctgctccaacccatcctccactctatcaccagagctatttttgaaatcacgaatctggtcaaataatttttctgcttgaaaaattactagtgccccacttcctactatatgaaacttaaaatctagtcatcactgggccccaaactaccttcttttcagaatctctctaatcctttcccttcatcaagtcccctacattattattactattattattatttgagacagagtctcaccctctcacctgggctagagtgcaatggcatgatctcggctcactgcaacctccacctcccaagttcaagtgattctcctgtctcagcctcccaagttgctgggattataggcacccaccattacactcagctaatttttgtgtttttaatagagatggggtttcaccatgttggccaggctggtttctaactcctgacctcaggtgatctgcccgccttggccttccaaagcactaggattacaggtgtgagccaccgcaactggccgtcccctatattgcagcacagtgaacaactgtttcctgaacatcacaagctcttttaaacactacagtgtataagcaggtctctgtctaaactgctctcctcttgctcctctgcccaaccaatgtctgctcatccaaagaatgtatcccgtgtgttcactaacttagcaagttccagtaaacagtttaattgatcactcgttaagagaaggcaggaaacctccatgaaaagagaaatcagtgggtatttcctacagcatttaacacattgtaggccttaaataaacccttgtgaaataaacaaacctctttactcttcattctatgttgctaagaatctcaccaaagtctgtctaccatgtgaaactgcagatgacctcacagaaaatggaaagaagtatctctaaaaataagtttatttggcaacacactacaggctacaggtccagttctgattttttttcttttttttttttgagatggagtcttgctgtgtcacccaggctagactgcagtggtgcaatctcagctcactgcaacctctgtctcctgggttccagcgattctcctgcctcagcctcccaagtagctaggattacaggcgcctgccaccacgcccagctaatttttgtatttttagtagaaatgggatttcaccatgttggccaggctggtcgtgaactcctgacctcatgatccacttgccttggcctcccaaagtgatgggattataggtgtgagccaccgcacctggtccacttcagatatttagatacagacggcaaatttatttaaatgtctcaatacatttaaatgtagttacctaaatatatctaatatatttaaatgcagagagcaaatttgcgtttacaaatctgacatggaattcaactgtgctagccaagattcggtgtagcttactagccagaaatcacataccctaacaggtaaaaatgcattgcattttttaaaactgcgcagctatgcaaattaggatgtgtctggacgctctactgtccccaaaataacctcaatttttttttaaaggccaggcacagtgcattacgcctgtaattccagcgctttggggggccaaggcgggcggactgcttgagctccggagttccagaccagcttgggcaacatagctaaatccccgtctctacaaaaaaataaagtaaaaattaaaaataaaataatataaaaataaaaataaaaggggagagagaacaggtaggaaggaaatgcattcagtctatagggatttcacgttccggcttcaagtccacggccctgtgatgggatgtgggcagggcctgagacaggccgaacccaactcttcacagggccgaattctttgcccgcagcccagcaccccgaaggagcttgcctcggcttcaaggcgcacctaatgggcaccggatcgctggggcgctgaggatgccgctccggggcctccacgaggcggcctcgccacgcgcctcggccatgttccccccatttccagggaggttggacgccgtggttcttaaagagggcgcgcgagaggggcgaccgcgagcccagctcacctcgagctctcagctcgctccaaggatgcaacaccggatccgcctcggggactgggaaagttccctccacggctcccacaggcgccccgcctcctg

SEQ ID NO: 9108 - DNA, 1300 bp, Homo sapiens
ctcaagcaatcctccagcctcagtctcccaaatagctgcaattacaggcgtgagccaccatgcctggctgagagggaatcgttaagaaggagtgggcaggggcaagaacactgtcagagacagtgtgttggccacggctactacagcaaattggctgcttcctgtgatcgcacgggttgagggctcagttccacaaggctgccccagcatcagatgccagtcgcaagctcacgtggtgcctgtgcttctgacacagggctataaaaattgaggttcccatgatcccctccttgggttcaattaattttctagaatggtacctagaactcagggaagccctttacttacatgtgtccccttataaaggatattatagggcctggcgccatggctcatgcctgtaatctctgtgcttcaggaggttgaggggggaggttcacttgagcacaggagtttgagaccaacctgggcaacatagcgagaccccgtctcaaaataaagatataggatattacaaaggatagttatgaacagccagatataagagatacacagagggaggcctgggggaaggggtgcaaagcttccgtgtcttctctaggcactgcaccctctaggaagctccatgagttcagttatccagaagccctctgcatcccttttgggtttttatgggcttcattataaaggcatgattgggccaggcacagtggctcatgactgtaatcccagcacattttgaggctgaggtgggagaatcaattgagccctcaggtggcaactgaggctgcagtgagttgtgattgcaccactgtactccagcctgggtgacagagagagagcctgtctcaaaaaaaaaagacaaaacaaaaaacctggccaatacggtgaaaccccatctctactgaaaatgatcgtcacctgatccccaccccttgaagatgcctccaccctctccatacgcatttggtcagcactaactgccctgggtgacaggcacactgcactgggtgacaaggacccaaagctacaccagccagtgccccagccctcaagcacctccctgtgcagaaggaagacaacacagaaaagggaagcatggttgtcacagaggcccagaggactgctggctgatgtcactgaatggggaagtggttggccgcacaggccccaagctcagacctgatgccacagtggacgttcctgggccatgtgacctcaggctaggctcagaaccaccctcagggcctccgtttctttctgtataaattgaggaccatacagagatgctgcctacctc

SEQ ID NO: 9109 - DNA, 1261 bp, Homo sapiens
tcacaacttgagagaagaggacaccactcaccacagatagccacatgggggttgcactatgcataagagagagcaaccagggactgtggtatgtaagcttttctgaatcaagaaggtgtgatagcccctgattcccttgaaaggatgcaactggcttgtttttaatttttgagacagggtctcgctctgtcactcctgctggagcgtagtggtgcaattacagctcactgcagcctgaactttccaggtttcagggatcctcctacctcagcctcccgagtggctgggaccataggtgtgcgacaccacacccagctgtaactggcttgtttgaattaactctgtgtgtagaaatgaaattcaaacttgctacaaataaataataaacaggaactctgcttagtcctcttgattaaaagggtagttaggctaggacacattatacaaaagagcagagtgggaagggggatttgtactcagaccatttgaggtaatactagtatcaccagatatgaaggtagcacatgatattgaccttaaatttagggctcacaccataatgtggctgacatcatccacagtagtcttggtgaattaaaaagcaatccaaaattatcacagaattccaatggttcctaatagcagtggtagtaccaagtcattatacgaagccctccatgcataaatccacaggaaaaaagaacgttagtgttttcaggtattcatggccctattccacttctgtgctgcatttgttatcttcagaaattatgactttcttctgtccacctaactccattcaaagcctagacccattggccgtcaatctcgggcctagtgactctcacaaggtgaccttatttgcctccatatccaccaggctgaatgaaacaccccaggccccacaaaagtcatctcaatatcgtggtgtggccacagagtggcgaattagcacaaggtccaggctgagtgtcatcttccctcagctactcctatgcttctgcttgcatctcatgtctattcattccttggaagcctatgtcacctgccaaactaggctaccagatatattctcccttcatggccatttacctccctcacctgttttctgaagtacaataccatcaccaggtacacaagcaggcaacccaacctccacttcctgtcttcctagtagtgtcaccaccataatctgaaggttgccccttccaaatgtgatccatgactcactcatcttgctccacacagtggctaccatata

SEQ ID NO: 9110 - DNA, 1379 bp, Homo sapiens
ctcacgcctataatcccagcattttgggaggctgaggcaggtggatcacgaggtcaggagatcgagaccatcctggctaacacagtgaaaccccatctctactgaaaatacaaaaaaaaaaaaaaaaaaaaaattagccgggcgtggtggcgggcacctgtagtcccagctacttgggaggctgaggcaggagaatggtgtgaacccgggaggtggagcttgcagtgagccgagattgcgccactgcactccagtatgggtgacagagcgggactccatcttaaaaaaaaaaaaaaagaatcctgtgagatccaagagatccctgaaaaaggtagtccatcttttcaaatcaccagaagagttctctgcaccaaaaattagtcaggtccttggcctacctcatcagacacaaagaattgagaatggaatgagtactgaggatactaaaaaatccccctggtgaatgaaagaaaaagttacgtctggatcataatgaggtaggggagtgatgaaactgtgagtacctgccaagtggtaaaggtgaaatgctttttgcaagataactggcagtcacataagtctggcaagggacacaggcaggctgaaaaatgcaatgggggcggggcgcggcggctcatgcctgtaatcccagcactttgggaggccgaggcgggcggatcacgaggtcaggagatcgagaccatcctggtgaacacggtgaaatcccgtctctactaaaaatacaaaaaattagccgggcgtggtggcgggcgcctgtagtcccagctactcgggaggctgaggcaggagaatggcatgaacccgggaggcagagcttgcagtgagccgagactgcgccactgcactccagcctgggcgacagagcgagactccgtctcaaaaaaagaagtcttagatctgcacagtcacccagaaaggcagaagacaaccaaggtgggatgcattagggtgactttaagactcctgaccctaactctttccctgggagcctgcaacaaagcagactggggctgctcaaggaaaggagagggcagtacatgtatctcagtactaccaaccacagaactgatccagagaattggagaatgaagctgtgccacagtcctgatgtgagaaagacgttattaccaagaggaataaaggggaggggcagagactaactcaggtcacagttaagtatgagtaccttacccagggaggatataagtgtcaaggtctccagcatcacatcatggtacaggcatccctgagcctcattaagaagactccattcctccagggaaaagtttacagccacgtcttcaaaggtcacactgctctgttatgatggggatagatgaaaccataaatggcccctg

SEQ ID NO: 9111 - DNA, 1412 bp, Homo sapiens
tggccagaccagcggctcacgcctgtaatcccagcactttaggaggccaaggcgggaggattgcttgagcccaggagttttcgaccatcttaggcaacatggcaaaaccccgtctctattaaaaacacaaacattagccagtttctcgggagactgagatgggaggatcacctgagcctggggaggtcaagactatgctgagccatgatcgcgtcactgcactccaacctgggtaccaagagtgacactctgtcgctaaataaataaattcccaggacattaagatctagacatataggtgaggatgaggaccagtgagggactagagcatcctatacttccttctgtgggttccttaaatacttccatagccatgagaaggtgtgccaaaaggcggagctttcaggaatgtgtccctgctgggatttgatagactcaggtttctctgtaagctttttttggccctgtagccaggtgacctcaggctgagtctctaatcttgtggcccagtgctcaatgtcacctcttaccagctacgtgaccttgagcaaatattcaacctctcaatgcctcactgtcctcatcaccgccttacactccgttcttcctttgaacatcttttcggaatctttaactctaacacagatttcctcctttgttcaaaactgtccatggcttctacggtcctcacaaagatcaatcctcagcctggtactgaggaaataactccgactcatactttgttctcagtggacacaagatgtccctgtgttccgaatcctcctggcgcagtcgtgcctccaggcctttgcctaagccggtccctcggccagtctcgctctcccgaccgcatcaaccggtgtcggaaacagggattccacccgccggcgcctctaggtccctgacagaggcctgagctgcaaggacgcgaggaagcgcccctcacagtcaggggtctcagggtctgtgtggggatggcgggtgaggcctggaggtcgcagggctcacttgagcggccgccgccacgacttcatgcgcgggcggggacgcaggccaggcggttcctgtgctcgtcctgtcccaggtcgcgaccagcggcgtcgccaagcctcagatccgcctgtgtgcaatgggcacaaccactcctctcgcgcgctctcggtcctgacaaagaggtacagacgcagcataggtggatggtcccgacaagccaaaatggccaccgcggcgaggacgcaggaagtccctgcttgacgttacgtgcctccgcaatggcgcggcttctctgaggcttcaatgggctttccaattcacagagacgattccgggtaatatttaagttccgagagacgcgcggcgcttaaaggccgcctccaacctgactttcggaagaaggggctaagctccaccgc

SEQ ID NO: 9112 - DNA, 607 bp, Homo sapiens
gtatttagctggggaataagatgtccatagggctttgaaaaacgctaacatattcctgagactgtagaaggtgcttagggtgtgcatatgtctagggttatgtgaacactcaagataggcctgagaaggccctgagctctaacctctgggtgaccttgaggcactacagaagcaagaagtgaaggctaaggcagaattatttggttggttggtgcaaaaaattgcggttttgtcatttcaacgaaattactttggtaccaacctaatgtaaagtgcttggctgattgttgaaggcttgtcccaacgtaagtactaaacccctcaggaaagactgggagattttttggttgaaggtgtttaagaaaacctgtctctctaatcattagttgaccactaagctaactgagcagaaacctgagtggtcacacacaataaacaatgcagactttaaagaattcattcataagctaggtgcggtggcacacgtgtagtcccagctactcggtaaactaaggccagaggatcccttgagtcaccaactcagaccctatctctaaaaaaaaaaaaaaagaatgagttcagaaaagtcactaaatcaacaactgct

SEQ ID NO: 9113 - DNA, 465 bp, Homo sapiens
gctcaaccccagatttgagcagggagaaaaaaaaaatcagcaaacttcaatataggtcagttgagatgatctagtctgggcaacagattgaaaagagaaagaagaaacatcaacaggcctcaaagtcctgtgggacacaatcaagcacaccaacgtgcgcgtaatgggagtttcagaaggagaggagaaaaagaaaagggcaggcataatacttgaataaaagaatggccaaaaacttcctaaatttaatgagaaatatttatcgacacatccaagaagcttaacaaatgccaagtgacataaacaaatccacacctcaacacattgtaattaaccgattaaaagtcaagggcaaagagagactcttgaaagtggccactttcaagaagaaaagccacaaagagagaagccactcatcacataatcctccataagatttacagttgatgccatgaaagccaaaag

SEQ ID NO: 9114 - DNA, 475 bp, Homo sapiens
ttctaaatactccccactttggccttaactcagaccttcctcacttcttttttattttattttattttatatgtatttatttattaatgcatttttgagttagggtcttgctttgtcacgcaggctggagtgcagtggcgccatctgggctcactgcaacatcccgtccccgggctcaggcaaccctcccacttcagcctcctaggtagctagggctacaggcgcttgccaccatgcccagttaatttttatttatgtttttatttattttatttttttagtagagacaggatttcaccatgttccccaggctacttttttagaatgctctttgatctttccgccttcggtctgattccttttaatccattctccacctcactggtaaaaatttttgtgctatatgtagtcatgctccttctttatttaaaattccactagtggctccccataacattcattataaaggtcaaaa

SEQ ID NO: 9115 - DNA, 711 bp, Homo sapiens
ggcgtggtggggggtgcctgtaatcccagctactcgggaggctgaggcaggagaatggcttgaaccccggaggcggaggttgcagtgagctgagatcgcgccactgcactccaccctgggcaaaaagagcaaagctccgtctcaaaaaaaagtttcccaggagattctaatgtgcaactggagttgagaacctgtattttggaggcttacaaagcttttaataaaactgtgtggctgtgtctagatatccatgttaggttgggagtgaatttctgcatgaagaaaagacatctatttgggtggtgatgaaaatggttcccccccagaatcctgtcttttataacaatatgattagtaataataatatgactaatatgattagtaatatgattagtaataatatgactaatatgattagtaatatgattagttataatatgattatattactaatcatattgttaataatactaactatcagttatggaatagttatattaggctctgggctaatctccatattagcactatatataaacactattattattctaaattttataaataaggaaactgaggtgtagtaacatcacgtgtaatttcctcacgatcacacagctgtctgactccaaagctcatcctattcatcactcctccaagatgattaatttccatttaaataagcgaaaatgtggattaaagaatgagaag

SEQ ID NO: 9116 - DNA, 633 bp, Homo sapiens
ggttgtggtgagctgagatcgcgccactgcactccaccctgggcaaaaagagcaaagctccgtctcaaaaaaaagtttcccaggagattctaatgtgcaactggagttgagaacctgtattttggaggcttacaaagcttttaataaaactgtgtggctgtgtctagatatccatgttaggttttgagtgaatttctgcatgaagaaaagacatctatttgggtggtgatgttgatggttggggcagtggatcctgtcttttataacaatatgattagtaataataatatgactaatatgattagtaatatgattagtaataatatgactaatatgattagtaatatgattagttataatatgattatattactaatcatattgttaataatactaactatcagttatggaatagttatattaggctctgggctaatctccatattagcactatatataaacactattattattctaaattttataaataaggaaactgaggtgtagtaacatcacgtgtaatttcctcacgatcacacagctgtctgactccaaagctcatcctattcatcactcctccaagatgattaatttccatttaaataaggaaaatgtggattaaagaatgagaag

SEQ ID NO: 9117 - DNA, 368 bp, Homo sapiens
ggaaattcaagtctaaccctggagggacccctgtttagtcatctgtctagacagacgagttcatataatgggcctctatgtttcttttgctttgtataacagacggtggtcccttcctttaaactttgtgaagatgtcaacctttggttttttttatcccaacctgctgttgataagccaagaaagtgactcacacatgagccaacaataactcttgagtgtgacaattagtcttacaattgagtagcaagaaaatataggatttgcatacaggggacctgggtaaaatcctgactgtgtaacatcgagaaagtcagttaccctttctgaacttttttttttttcctaaaatgagagttaattaaaaa

SEQ ID NO: 9118 - DNA, 1365 bp, Homo sapiens
aaagagtgaagaatcaaatagatacaataaaaaatgataaaggggatatcaccacctatcccacaaaaatacaaactaccatcagagaatactataaacacgtctatgcaaataaactagaaaatcctgaagaaatggataaattcctggacacatacaccctcccaagactaaaccaggaagaagttgaatctctgaacagaccaataacaggttctgaaattgaggcaataatagcctacccaccaaagaaagtccaggaccagacggattcataccagaattctactagaggtacaaagaggagctggtaccattccttctgaaaatattccaatcaatagaaaaagaaggaatcctccctaactcattttatgaggccagcatcatcctgataccaaagccttgcagagacacacaaaaaaagaaaattttggaccaatatccctgatgaacatcaatgtgaaaatcctcaataaaatattggcaaatggaatccagcagcacatcagaaagcttatccaccacaatcaagtcgacttcatccctgggatgcaaggctggctcaatatatgctaatcaataaacgtaatccagcacataaacagaaccaacaacaaaaaccacatgattatctcaatagatgcagaaaaggcctttgacaaaattcaacagcacttcatgctaaaaactctcaataaattaggtattgatgggacgtatctcaaaataataagagctatctgtgacaaacccactgccaatatcatactgaatgggcaaaaactggaagcgttccctttgaaaactggcacaagacgggtgccctctctcaccactcctattcaacatagtgttggaagtcctggccagggcaatcaggcaggagaagaaaataaagggtattcagttaggaaaagaggaagtcaaattgtctctgtttgcagatgacatgattgtatatctagaaaaccccatcatctcagcccaaaatctccttaagctgataagcaacttcagcaaagtctcaggatacaaaatcgatgtgcaaaatcacaagcattcttatacaccaataacagacagagagccaaatcatgagtgacctcccattcacaattgcttcaaagagaataaaatacctaggaatccaacttacaagggatgtgaaggacctcttcaaggagaactacaaaccactgctcaatgaaataaaaggatacaaacaaatggaagaacattccatgctcatggataggaagaatcaatatcgtgaaaatggccatagagcccaaggtaatttatagattcaatgccatccccatcaagctaccaatgactttcttcacagaactgcagaaaact

SEQ ID NO: 9119 - DNA, 961 bp, Homo sapiens
ggaatattgtcatagtgcagaaatgtgtatagtaagacactttatcattgagtctctagcaaaaatcatcctaaaagtatgttccttagaactatacatagcaataaacatgttttctagctatagctctgtcttggtcatcctcattccctctctgatctttccccttgctttactaaataatttattaagcaatctttaattgtagtacaaaccacatctttgtcattctttggatgtagtgtcacaaaaatatcccagtccacatcagttacacccatagataagcttacagacagaggtaagaagggagcagtgagtggggtgcaagcattggcaatattgatgggcatcctctgtcctgtactgatgacctgaggttctggacattgggaattatagcacagactcaaaataaaacatttttttgccactgtgaaaaagtgtgttgattttgtaaattaatacaaattcttcaaagacatattcagaaaaaaattccatgatgtacatgtttaagtgaaggataactgtatgtccttacatagtgctgaaatatgtagaacattatagagctcatggatataaaatttgatgttgaacattatacagtcttcttaaatgcacatcttgctgtttaatgattgtgttaaaaattgctggccaggcacagtggctcacgcctgtaatcccagcacttggggaggctgaggcgggcggatcacgaggtcaggagatcgagaccatcctggttaacacgatgaaaccccgtctgtactaaaaatacaaaaaaaatagccgggcgtggtggtgggcgcctgtagtcccagctactcgggatgctgaggcaggagaatggcgtgaaccagggaggcggaggttgcagtgagccgagatcgcgccaccgcactccagcctaggcgacagagcaagacgccatctcaaaaaaaaaaaaaaattt

SEQ ID NO: 9120 - DNA, 344 bp, Homo sapiens
agccatccctgctacctcccagaagtttcatgcctttgaacctctctcaggcctgggtggccaagataacaagggggcttaggtagaagaaacaattttttccttggtgttacctggggctcataagaagaaagagtctcattacctgcttctatgcacaattagatgtcatgtagtcacagatgcctccttatgaactgcctgtagttttccacacttcagtgggacctatcacaccatagggcctgtgtttgcatgttgacatcaagaggtgggtgacgggacctaccggtataggaattcaacaatgcaaagttcatgcttcaggcagttcagcatatgat

SEQ ID NO: 9121 - DNA, 427 bp, Homo sapiens
ggcacatgtatacctacgtaacaaacctgcaggttctgcacatgtaccccagaacttaaagtaaaataaaaaaaatgctgttagtcctctaatatatattgcatccaaaggtgagcagcaaaagcattataagatacaaataaaattaagaaaataataagtggaaaatgctttatcaatacattagaaaatatttttattactcatttaaaactcaagttccaactttttcttttttcttctttttttattttttgtagaaatagggcctctctatattacccaggctggtctggaactcctaggctgagattacaagtgtgagccaccatacctggccacaacttaaatgtgaaaaaatggcaaaaatatggcacagtctgactatgtaacaagttaacattttacaggtagccttagatacagt

SEQ ID NO: 9122 - DNA, 444 bp, Homo sapiens
ggctccaagactggtgagtaagcagtcggcgtcgggaatggggagtccttggaccagagcaaggcctgctcacctgaagaccccggcgtggcgaaggctgctaccgagacgacggcggcgggggtggtggcggcggcgcccactcacgagctcacactcattccctctcccggggccccggccccgccctccccaatacagccagtcggcgggcgccttggaaagtttccggccctccaggaggcttcctggctcttgattggccagtgtgaacagactgtagagaccggcggtcacgtgacgctgaagattcccgcttcttaaagcaacctctcttgctacgtttgcgagtaggtgtgtattgttttaacacacgtttaataagcatattttattttttttaccaccacaatagtaacgaggaaataaacagtctcaaagaca

SEQ ID NO: 9123 - DNA, 444 bp, Homo sapiens
ggctccaagactggtgagtaagcagtcggcgtcgggaatggggagtccttggaccagagcaaggcctgctcacctgaagaccccggcgtggcgaaggctgctaccgagacgacggcggcgggggtggtggcggcggcgcccactcacgagctcacactcattccctctcccggggccccggccccgccctccccaatacagccagtcggcgggcgccttggaaagtttccggccctccaggaggcttcctggctcttcattggccagtgtgaacagactgtagagaccggcggtcacgtgacgctgaagattcccgcttcttaaagcaacctctcttgctacgtttgcgagtaggtgtgtattgttttaacacacgtttaataagcatattttattttttttaccaccacaatagtaacgaggaaataaacagtctcaaagaca

SEQ ID NO: 9124 - DNA, 1290 bp, Homo sapiens
ccgggtgtgttggcacatgcctgtaatcccagctactcgggaggctgaggcaggagaattgcttgaacccgggaggcggaggttgtggtgagccgagatcgcgccactgcactccaacctggccaacaagagtgaatctccgtctcaaaaaaaagagagaaactttctttccctcacatgtcacaaggcatacagtgaattcctttaagttcacccaagatggggtagtttgcactgagtgaactgtgggaacattctgcaagggagcatgaatgtacacattttttctctttccccctctcagggttagatgctgctgccgctggaaaagaaaatcccctgggacccgagctggcaaagccagatggatgcgactgtggttgccatggcaaccccacctaaggagaatgtgaccctgctgagtctcttccactcatattcagaaccatattagaagtggtttcaagtgtctgcccacctgtgcgttaagggaaagagagagggcgctctcctctaaggtctgactgagcctgaagtcagcttagccagacctgggcagctggctgacctccttgcttaggtttactgttctggacagccatcagcaaccttggagacactagaagatgggagggagaccgggactgcccgggacctattagatgtagtgaacctgtatccaacctgtctggagctcatttgctcccaatctgagtggaggcaggaaccagggaaggcagtagtgagacctccatggccacagatgggagaaaggtggctcgctccacacacccaatgcctggcaagaactatgatggctttggtgtcagactttttttcttttttcctttttttgagacggagtaacaccctgttgcccaggctggagtgcagtggcgcaatcttggctcactacaacctccacctcccaggttcaaatgattctcctgcctcaacctcccaagtagctgggattacaggcacttgccactaccaccagctaatttttgtgtttttagtagagacagggttttcaccatgttggctaggctggtctccaactcctgaccttgtgatccacccgcctctgcctcccaaagtgctgggattacaggcatgagccactgtgcctggtcaaagtcagactgtttttattcatttatttttatttttatttattttttgaaactgagtctcgctctgtcgcccaggttggagtgcagtggcgtgatagctcactgcaacctctgccctcccagtttcaagtgattctcctgccttagcctctgg

SEQ ID NO: 9125 - DNA, 6305 bp, Homo sapiens
tttttagtgaagaatcaccttaaaacttggaacctggatacaagataattgcttcattctggaaaagtttagtagcaaactatatgccaggactgtgataattactagggatacatgattgaatatatagtataagatgccttggagtgtcagtttcatataaatggctcatgcagtatatagacagtgtggtaaaaagagactactgagatgtgcagaggacagaaaatgaagggtctttgaatggtagataaatgtgttcggacttttcactcagggctgttgaagtttttgaaggtcagtggtcttagagttttggtgttttcaagccctgctaagtactttgtttctagctgatgattggccaccattactgatcatctattggctctgtctgattcagcaatcccaccgctgagtatttatgcaaaggaaaaaaatcaatgtatcagaaagataactgtacttttatatttgttgcaacactattaacagtagcacagatataaaatcaacctaaatgtccatcaacaaatgattggaaaaagaaaatgtagaaaatatacacaatgaaatactattcaggcgtaaaaaacagtagaatcataatttttgcagacacatggatggaactggaggccattgttgtaagtgaagcaaaccagacacagagtaaacatcgtattttatcactcataagtgggtgctaaaagatgtgagggtattgatgtagagagtggaatgataaaggagactcagcagggtgaggggatggaaggggtgaatagtgagaaatttcttaatgggtacaatgtgcattattctggtgatggatacctgaaagccctgacttcaccactatgccatccatgcttacagcaaaattgcacttggagaccaaaaatttatacaaaaaaagtcttagacctctctcttttctctcataagcctcagagctcagtgatccccttggatctcctcagcctgctgagttttaactttcctacctaaggtgattttgggcagagacaagggagtgtttcaggaagacgttttcaggcatacgcttctaaagaaacattggagactctcctagtggcttttatctagtcactgctttaagcaaggaataaaacatctgtggctaaaattttaaaaactatgtttcccatccaccctttagacctgacagaagagattttaggattttaagggaacagctttttcctgacccaaaagggcacagtagtgcaaagaccaatgtcacgtaggtaccttttccccatctgtaaaataactttcccatactattcccacagctggaatcagtacaatgttttgactgaggtattggaaaagcctatgagctcattatcatttgaacgtatgagtaatgtaaaatttggtagaactttatttgaaaggattatttatgccatttttagttaactgatttatattacggttatttcaaacaataaaatcaggttgttatgtcgtaagctagaaaaatttacaatgacacaaggtcttcattatctcacatgatgaattgaagattaaagcaaaataatttagggaattctgtgacagtttctgtttcatgttgtttaataatgacttcaaactgttgtatatatatggagaactcctgactaaagagaatttttttgtctattgtgctatgtttctgtaactttttaagatctagaggaacacatatttagtctcagttggccaactaaatgttatggagtcagcttctgtgttatgtgctgtgcattgaagggatggtggagacaaggctgctgacctcgcagagtctgcggagaaaacctgatggagcgtggcagggaacatgctgggagcatcccaggatgccaaaagtgcacacagagggaacacctgccttagaagtggggagggtcagacaaggagagttgtcaggaaaaacgaggaaaatttaatctgcaggaatagaaacacacttgagaaatccatgtggaatgaaaagagaatggctgagcagcagcagattgtcaaaaaggaaatcaagaaggagcagccaaagaggtggatggagaaccacgagaaagaaggtgacactgaagccaagggaaagaaagtgtttcaacatttctgggaaaaaaaatgacattctccgtcttaaccttgttattttatgagtcatatagccacattccaggttctgagaagtccagcactaaagatgtttcttttagtttgcttaacccagcatttgcgggaataatctgagctcagtgtgagtgtgtgtgcgtgtgtgtgtgtgtgtgcgcctgtgtgttccactaatatctctctggggttagtgctctatacaacataatttttaaaacactggttttatccatcttattatgttcagctgcagcaatacttacaaaggtcaactttgattatgtgtcttagttactaaagaaaacaaaacaaactaatgaataaagcccacctggcagtggctcctcactacctgtacgatggagcccacctggcttggcctgcgtgccctgtgccgacctggccatgctgtcttctgcctgttgctttgcctcccctttcctcctggagaaggtagagatgctctgagatttggcccgtctggaacatgtgtccttctcctcatgtggaccatgttttcctgagtccactttaatcttgtttaagggtatagaactttacttaaagcttctggtcaggtctcactctgtatgctgtcttcctgccacttctactatgtacatatttaactgatacattaattatgctatatcagccaagggttttacttctatatcattttatatcatcatctttttttcttagagcttagttcacttatttattcagtctttccacactataattgtatgtcatataattttatatttattttcattggtgtttatatatcttttctgtaaaaatggaggctttctaaatagatcttcattaatgttgagagaacaaggttttaagtcgtggtctcagccaaaaggagttccccgcactaccaggagggaaagaagcacttgcattgttgcattagatgttcttacagagaaagagaaccatgtgtaatggaaaattgctaactatgcctcagggggaccaggttgattcggtgagaaagtttctattggtttagaaagcatagttctgagttttctaggagaaggagaaaaattagagtagggcataagaagtaatgcccatatcaaaaagttagaaagatctcaaattaacaacctaacatcacaactgaaagaattagagaagcaagaagaactcaaccataaagcttatagaagacaagaaataactgcaatcagagctgaactgaaagaaattgagacaagaaaaactgttcaaaagatcacttaatcaaggttttatgaaaaaaatactaagatagataaggcactagctagactaataaagaagaaaagagaaaagattcaaataaacaaaattagaaatgatgaagggaatgttaccactgaccccagagaaataaaaataacaaccagcaactactgtgaacacctctacacacacaaactagaaaccccagaagagacgaataaattcctggacacatacactctcttaagactgagccaggaagaaatttagtctctgaacagaccaattatgagctccaaaaattgaatccataataaatagcctaccaacccctcgaaaaagcccaggacctgatagattaacaaattttaacagatgtacaaagaagagccactactagtcctactaaaactatttcaagaaatacaggaggagggactcttccccaacttgttctacgagaccagaatcatcctgataccaaagcctggcagtgatacaacaaaaaaagaaaacttcaggccagtatccttgatgaacatccattcaataatctacaacaaaatacttgcaaaccgaatttagcaacacatcaaaaggctaattcaccatagtgaactaagcttcttccctggaatgaaaggttggtccatcatgggcaaatcaataaaatgtgatatgtaacataaataaaactaaagagaagaccacgtgattgtctcaacagatgcagaaaaggctttcagtaaaattcaacaaagcttcatgttaaaaattctcaataaatgaagtatcgaaggaacatacctcaaaataataaaggccacctatgacaaactcacagccaacattttactaaatgggcaaaatctggacgcattctccttgaaacccacacaagacaaggatgccctctctcaccactcctattcaacatagtattagaagtcctttctggagcaatcagacaagagaaagaaataaagcatatttaaatagaaagggaagtccaactatctctgtttgcagacaacataattctctatctaaaccctatagttgtgacccaaaagctctttaagcagataaacaacttccacaaagtttcaggacacaaaatcaatgtacagaatttgctagcattcctatataccaagaagagtcaaactaagagccaaatcagagaggcaattttattcacaatttccacaaaaagaataaaacatgtacgaatacagctaaccagggagttgaaaaatctctacaatgaaaattacaaaacactgctcaaagaagtcagagaagatacaaacaaaagaaaaaccattccatgttaatggagagaaagaattaatataatttaaatggtcgtactgccaaaagctattcctattaaaccagcaatgacatgattcatggaagtagaaaaaagctatttagaaattcatatagaaccaagaaagaacctaagtagccaaggcaatcctaagcaaaaagaacaaagcttgaggcatcacattacctgacttcaacctatactatagcactatagtaaccaaaacagcatggtactagtacaaaaacagacacatacaccaatggagcagaatagagaagttagaaataagaccacatacctacaactatctaatatttgacaaagctggcaaaaacaagcaatggggaaaagattccctattcaataaatgatactggaataactggctagccatatgcagaagattgaagttggacttcttccgtataccatacgcagaaatcaatccaagatgggttaaatacttaaatgtaaaacccaaaactataaaagccctggaaggcaagctaggcaataccattctggacatagaaagagacaaagatttcatgataaagacaccaaaaacaacaaatgcaactattgacaagtgagatctaattaaacttaaaagcttctgttcagcaaaagaaattatcaatagagtgaacaaacaacatatagaatgagaaaaaatatttacaaactatgtatctgacaaagatctaatattcaatataaggaacttaagtttacaagagaaaaacaaaaaaccctattaaaaagtggccaaagccctgacttctgaatggcacttctggacccagccagggactgagggatctcactgccctaaaggaaagaacacaggactctctggctttgccacctgctaattgtagagaccaaaggccttgagtgaacataggcagtcgtcagaaagtgcatgcagaagaacttgagcaagatccggtgctgtgctagtttcaggtctgatccagggcagtcatagtggtggtggccagcggtgcttgtgtctttcttctctctttctaagctttaggtggcttagaatagagagaaagactctgtatctttgagagaaaataagggtaaggaaaaagtctctggctagtaatccagaaaattctcctggatcttgttgaaggctgtcaaggtggtacttctctgagtctggaagaattaccgcattattgggtataaggtgccccataaagcagatatggcttagatcacaacacccaagtttttttcaaatatgtgaaaagccttcccaagaaagacagctacaaataagcacagacagtgaagactacaataaatactcacctatactctttttaaattttatttttttaaacctctcatatggtgctacatgcccaagattttaatgtccagacactgaagaacatctactagcatcaacactgtccaggaaaacatgacctcaccaagtgaactaaataaggtaccagggacaaatcctggagaaaaagagatatgtgacatttcagacagagaattcaaaatagctgtatttaaaaaaaactgaaagaaa

SEQ ID NO: 9126 - DNA, 12100 bp, Homo sapiens
ctcaccctgcttatattccctgacatacataacagatgaagctcaggtgggcaatgcacctcaggccacagtgtggactgttgtaaccaagcgagttatagaggaatgccacactttgagacaaattaaggagtcctttattagccggtaaccgagaggcatgtaatgctcaaaattctcttggccccgaggaaggggctggttttgtttttataccgtggtctaaataggggaggggggagtttagctgaaacaagttttacagaagcagagctggcaaatagttaaaatattaattggttacaatagcagttacaaaacaaataaacagttccaggtgcaggggcttaaactatcacaaagagagaaatgcaggggttttgcgtgacattcaccgagtgcgtacccaggagcagctggtgcagcttgcctcaatatcttatcactaagtgcattcctggacctgctttgagtcagtttacactagttatgcaattaagggtggaaggtaaagggggctgcacgtgaagaaactaaaatggagtctgtccggctctctctccgctaggagagagtcactcaggttaaaacaaggtagggtatcacaggaccatgtacaattcttcaaactccagcttcaactctctttcttattgctctcttaggacagtatatttagatcagagtaaatgaaagtaatgttattaggagataagattaaaattgatcccatttgtaaaaagggaagtagattatttgtgaactgtaatacttttttttactgaagaatcaccttaaaacttggaacctggatacaagataattccttcattctgtaaaagtttagtagcaaactatatgccaggactgtgctaggtactagggatacatagttgaatatatagtacaagatgccttggagtgtcagatagtttcatataaatggctcatgcagtatatagacagtgtggtaaaaagagactactgagatgtgcagaggacagacaataaagcgtcttcgaatggtagataaatgtgtttggacttttcactcagggctgttgaagtttttgaaggtcagtggtctcagagttttggtgttttcaagccctgctaagcactttctttctagctgatgattggccaccattactgatcatctattggctctgtctgattcagcaatcccaccactgagtatttatgcaaaggaaaagaaatcaatgtatcagaaagataactgtacttgtgtatttgttgcaacactattcacagtagcacagacataaaatgaaactaaatacccatcaacaaatgattggagaaagaaaatgtagaaaatatacacaatgaaataccattcaggcataaaaaacaatagaattataacttttgcagacacatggatggaactggaggccattgttgtaagtgaagcaagccagacacagagtaaacatcatattgtatcactcataagcgggtgctaaaagatgtgtagatattgacgtagagagtggaatgataatggagactcagcagggtgaggggatggaaggggtgaacagtgagaaattacttaatgggtacaatgtgcattattctggtgatggatacctaaaagccctgacttcaccactatgccatccatgcttacagcaaaattacacttggaacccataaatttatacacaaaaagtcttagacctctctctcttctctcataagactcagagctcagtgatccccttggatccctcagcttgctgagttttgattttcctacctaaggtgattttgggcagagacaagggagtgtttatggaagatgttctcaggcacacgcttctaaagaaacattggagactattctagtggcctttatctagtcactgctttaagcaaggaataaaacatctgtggctaaaatttgtaaaactgtgtttcccacccacccttcagacctgacagaagagattttaggattttaagggaacagctttttcctgacctaaaagggcacagtagtgtaaaggccaatgtcaggtaagtacctgttccccatctgtaaaataactttcagatactattcccacagctggaatcagtacagtgttttgactgaggtattggaaaagcctatgagctcattatcatttgaacatatgagtaatgtaaaatttaggcagaattttatttgaaaggattatttatgcaatttttaattaactgatttatattgcggttatttcacacaataaaaatcaggtcgttgtgttgtaagctagaaatatttacaataacacatggtcttgattatctcacatgatgaagactaaagcaaaataatttatcttggggaattctgtgacagtttctctttcactttgctttaataatgacttcaaactgttgtacatatatagagaactcctgactaaagagaatattttgtctattgtgctatgtttctgtaactttttaagatctagaggaacatatatttagtctcagttggccaactaaatgttatggagtcagcttctgtgttatgtgctgagcattgaaggaatggtggagacaaggctgctgccctcacagagtctgcggagaaaacctgatggagtgtggcagggaacatgctgggagcatcccagggtgccaaaagcgcacacagatggaacacctgccttagaacaggggtgagtcagacaaggagaggtgtcaggaaaaacaaggaaagtttaaaatgcaggaatagaaacgcacttgagaaatccatggggaatgaaaagagaatggctgagcagcagcagattgtcaagaaggaaatcaagaaggatcagccaaagaggttgatggagaaccaggagaaagaaggtgacactgaagccaagggaaggaaagtgtttcagcatttctgggaaaaaatgacatgttctgtcttaaccttgctgttttatgagtcatatagcgacattccaggttctgagaagtccagcactaaagatgtttcttttagtttgcttaacccagcatttgccagaataatctgggcttagtgtgagtgtgtgtgtgtgtgtgtgtgcctgtgtgttctactaatatctcactgaggctagtgctctatacaacataatttttaaaacactggtcttatccatctttttgttcagctgcagcaacacttacaaaggtcaactttgatcatgtgtcttcgttactaaaagaaacaaaacaaactaatgaataaagcccacctggcagtgactcctcactacctgtatgatggagcccacctggcttggcctgggtgccctgtgctgacctggccgtgctgtcttctgcctgctgctttgcctcccctttcctcctggagaaggtagagatgctctgagctttggctcatctggaacatgtgtccttcccctcatgtggcccatgttttcctgagtccactttaatctcgtttaagggtatagaactttccttaaagcttttggtcaggtctcactctctatgctgtcttcctgccacttctacaatgtacatactttactgatacattaattatgctataccagcccaggtttttacttctatatcattttatatcatcatctttttttcttagagcttagttcacttatttattcagtctttccacaatataattgtatgtcatataatttcatattgattttcattggtgtttatatatcttttctgcaaaaatggaggctttctaaatagatcttcattaatgttgaaagaacaaggttttaagtcttggtctcagccaaaaggagttccccgcattaccaggagggaaagaaacacttgaattgttgcattagatattcttacagagaaagagaaccaagtgtaatggaaaattgctaacttggcctcagggagtccaggttgattcactgagaaagtttgaattggtttagaaagcatagttctgagttttctagaagaacaaaatttagagtagggcataagaagtaatgcccatatcaaaaaattagaaatatctcaaattaacaacctaacatcacaactgaaagaattagagaagcaaggagaactcaaccacaaagcttatagaagacaagaaataactaaaatcagagctgaattgaaagaaattgagacatgaaaaactgttcaaaagatcacttaatcaaggttttttgaaaaaattactaagatagggcactagctagattaataaagaagatgagagaagattcaaataaagaaaattagaaatgatgaagggaatgttaccactgaccccagagaaaaaaaaataacaaccagtaactactacgagcacctctatacacacaaactagaaaccctagaagagattaataaattcctggacacatatactctctcaagactgaaccaggaagaaattcagtctctgagcagaccaattatgagctccaaaaattgaatccgtaataaatagcctaccaacccccaaaaagcccaggacctgatagattaacaaattttaacagatgtacaaagaagagccagtaccagtcctactgaaactatttcaagaaatagaggaggagggactcttccccatcttgttctatgaggccagaatcatcctgataccaaagcctggcagtgacaaaacaaaaaaagaaaacttcaggccagtatccttgatgaacatccattcaatgatccacaacaaaatacttgcaaactgaatctagcaacacatcaaaaggctaattcaccatagtgaaataagcttcttccctggaatagaagggtggtccatcatgggcaaatcaataaaatgtgattcataacataaataaaactaaagataataaccacgtgattgtctcaacagatgcagaaaagactttcagtaaaattcaacaaagcttcaagttaaaaattctcaataaatgaggtatcaaaggaacatacctcaaaataataaaggccacctatgacaaactcacagccaacattatactaaatgggcaaaatcttgaagcatcctccttgaaacccgcacaagacaagcatgccctctctcaccactcctattcaacatagtattagaagtcctttctggagcaatcagacaagagaaagaaataaagcgtatttaaatagaaagagaagtccaactacctctgtttgcagacaacataattctgtatctaaaccctatagttgtgacccaaaactccttaagctgataaacaacttccacaaagtttcaggacacaaaatcaatgtacgaaatttgctagcattcctatacaccaagaagagccaaactaagagccaaatcagagaggcaattttattcacaatttccacaaaaagaataaagtacatacaaatacagctaaccagggaggtgaaaaatctctacaatgaaaattacaaaacactgctcaaagaagtcagagaagacacaaataaatgaaaaatcattccatcttaatggagagaaagaattaatatcatttaaatggttgtactgtccaaagctattcctattaaactaccaatgacatgcttcacagaagtagaaaaaagctatttaaaaattcatatagaaccaagaaagaacctaagtagccaaggcaatcctaagcaaaaagaacaaagcttgaggcatcacattacccgacttcaaactaacctacagcaccatagtaaccaaaacagcatggtactagtacaaaaacagacacatacaccagtggaacagaatagagaggttagaagtaagaccacatacctacaactaggtaatctttcacaaagctggcaaaaacaatcaatggggaaaagattccctattcaataaatggtgctgggataactggctagccatatgcagaagattgaagttggacttcttccttataccatatacaaaaatcaactcaaggtggattaaatacttaaatgtaaaacccaaaactataaaagctctggaagacaacctagacaataccatcctggacatagaaagaggcaaagatttcatgataaagacaccaaaaacaacaaatacaactattgacaagtgggatctaattaaacttaaaagcttctgctcagcaaaagaaattatcaatagagtgaacaacctatagaatgaggaaaaaatatttacaaactatgtatctgacaaagatctaatattcaatatgaggaacttaaatttacaagagaaaaacaaaaaacccctattaaaaagtggccaaagccctgacttctgaatagcacttctggacccagccagggactgagggatctcactgccctaaaggaaagaacacaggcctgtctggctttgccacctgctaattgtagagaccaaaggccttgagtgaacatagggagtcgtcagaaattgcatgcagcaggacttgagcaagacctgtgctgtgctagcttcaggtctgatccagggcagtcatagtggtggtggccagaggtgcttgtgtctttcttctcccagctttaggtggcttagaacagagagaaagactctgtatctttgagagaaaataagggtagggaaagagtctgtggctagtaatccagaaaattctcctggatcttgttgaaggctgtcaaggtggtacttctctgagtctggaagaattacagcattattgggtataaggtgctccataaagcagatatggcttagatcacaacacccaactcttttcaaatatgtgaaaagccttcccaagaaagatagctacaaataatcccagacagtgaagactacaataaatactcaccttttctctctttaaattttattttttaaacttctcatatggtgctgcatgcccaagattttaatgtccagacactgaagaacatctactagcatcaacaccatccaggaaaacatgacctcaccaagtgaactaaataaggcactggggacaaatcctggagaaaaagagatatgtgatgtttcagacagagaattcaaaatagctgtatttaaaaaaaaaaaactgaaagaaatttaagataacaaagtaaggaaattccaaattttatcagctaaactcaacaaagagattgaaatagttacagtaaattaagcagacattctgagctgaaaaatgcaattggcatgctgaagaatgcattagagccatgtaatagcagaatggatcaagcagaagaaatagtgagcttgaagacaggctctttgaaaatacatagaagagacaaaagaaaaagaataaaaacaacaaatcatgccgacaggatctagaaaatagcctcacaaagacagatctaagagttatttgttttaaagaagatgtaaagaaagaggcaggggaggatctagaaaatagcctcacaaagacagatctaagagttattggttttaaagaagatgtagagaaagaggcaggggtagaaaaatttattcaaagggataataacagagaactttccaaacctagagaaagacatccatatccaactacaaaaatgttatagaacattaagcagatttaacccaaaaaacactacttcgaagcattcaatagtcttccaaaagtcaaagataaaagttcttaagcaagaaagagaaaagaaacaaataacctactggggagctccaacatgtctggcagcagactttacagtggaaactctactggccgggagagagaagcaataaatatttaaagtactaaaggaaagaaacttttaccttagaatagaatatacagtgaaaatgttcttcaaaaaaaaagaatactgactttttcagacaaacaaaagctgaagtattttatgaataccatacctgtcctaaaggaatgctaaagggagtacttcaatcaggaagaaaaggacattaatgagtaataaatgatcacctaaaggtaaaaaaaaatcctcactgctaataggatacaaaacaaaacagaatattataacactatagctgtgtggtgtgcaaactactcttatttaaagtaggaatactaagtaatatccaatcaaaagtaatagctacaacaacatttcaagacatagcacaataaaatataaatagaaacaacaaaaagttaaaaagttaagggatgagcacgacccgtcctgagccggcagatgtggtggaagccccggagctccggagctcccggaaggactggagcgtgggcggaaaggaggccgcccctagagccggaagcctgcgcaggggacagaggcctccggcggcgccccccaacaacagcagggcggtgccacattggtcctgagccaggcctggccgccggagacggcgggactctctgggaggccggcggtcctcgggtgtagagggagacagctgcccgggggcacgggcgagcgcctctgggggtcctggatccgagacccgcggcccggggtggcgatgacgcctggagtcatgcgggcttggctgggccggctcttggggcagccaggcgccgctgctggcgtctaggccacaccaccctgaacgcgcccggctcgcctctgatctgttgaagctaagcagggtcgggactggttagtacttggatgggattccgcctggtaatagcggtaccgtaggcttttggcttcccgctccctccttctttcccccttttgtctccgtgcttcccaactgcgccccgcctctgctccccgttgaccgcccccgtgccccagccgaagcccaggacctcctcctgaagatccgccactgcagcaccgccaggcagcagcatcccacctcttccgactcgcggcagccccacccaacccgggcgggacgggaccgaccccgagggtgcaggcgcgggttccctgaggtcccgggtctcttcacgctccccggactcccaggcaattgtattcattcattcagcgtcactgcaaccgtccaagccggtgggaggggcgagcaggggcagcgggtgccacagaccccagccaagacctccgctccagaacccgagggctgctttccccagaggaaggacattttcttcgccagccacgaggaaatccgtccctgtgcaccctgtttcccaatgccaccgacttcgtgtaaactccagtccggaggacaggagagagacccaggcctcgccccgtggacaggctcggcgccacggctcctgccagacacacgagcacactctacaaatctcggggcccaccgcatcaaggagacagaaagaagcaaacaaaggaaggaccttatgaaacgcacccccaaagcaaccaaccaatccaaggaaaaaaacaagtctcagggctccattggttttctgggtggggggggccctgaccccctgttctagcccggcccaagaaccctccaccacaccccggcctgctgaaaggtgccctgtctacctgagcagagcctccctctccaaggctctgtcggtgtcgctccacaactgcctcaccctctccctttctctacttccccctccacctcgcgctctactgtggtgctctctcttcccccctctctctctcctccccccttttctgtctctctctctctctctctatcgctgtctctctctctccctctggttctatttctccatccctctctcccttgctctccttctgcagcaggaggagctgcagacagaacccctcagacaccgagttgtagaaggaagggctttattcagctgggagcatccgcagactcacgtctccaaaaaccaagctctccgagtgagcaattcctgtccctcttaagggcttacaactctaagggggtccgcgtgagagggtcttgatggattgaggaagcagagggtacgtgactgggggctgcatgcacaggtaattagatcagaacaaaacaggacagggattttcacagtgcttttctatacaatgtctgtaatctatagataacataaccgagtaggtcagggatcgatctttaactaccaggcccagggtgtggcgcggggctgtctgcctgtggatttcatttctgccttttagattttacttcttctttctttggaggcagaaattgggcataagacaatatgaggggaggtctccctttgagctatctgtgtctgtgtctttgtgtgtccgtgtgtgtgtgcccgggtgtggtgtgtgtgtgtgtctgcgcgcatgcacccgtgtgtatccgtgggtgtgtcagggtgggtttgctcgtggtagtggtggggtgtgtctgggtgtccgtcagcccctctttcccgggatgaggctgccggggctctagtgccagggcggggcaaagcagagccttcttgcccctttggccatggcgggtcctcctcagaacaagcgacgatggtgtgagcattgtgagaaaaagggcctgtggggctgggccggctgttcgcccctgggcagccctggcggctctgggtgtgtggggcaagagggggccttgcaggaggggcggtgaggaatccaaaataatttttccgcggcaaggcggaggaccggaggggaccccaggaccgtgggccctgggccctgacgcctcggagcacaccccgtcctaagcgggccccaggtgttggaagctcgggagctcaagagcctggggaaggcctggagtcccagcgagagggtggccgcctggagagtccagagccctggcaggggatggaggtctctggcgcctgggctgtctcgcgcatggtctggccgccggcgacatcgggacgctctgggaggtcggcggaaagcgcagcgcggcgatggtggtgcttgggcgtagagggggagagcagcccggccacaggcaagcggctccggggtgcctgatcccagcctcgcggcccccgggttggtggtgacgcctggaatcaggcaggcgtagctggactgggctcttgggccagccaggcgccactgccattgtccacggccataccacctggaaaatgagagagacccaagccgcggcccgtgggcacgctcagcgccactgctcctgccacagtgaggggcgcactctacaactttcagggcccacagcaccaagaggacagggaggagccaacaaaggaatgacgctacgaaaagcacccccaaagcaaccaacaaatccaagtaaaaacacgtctcagggctccgttggttttcccgcgtgggcggccctgcccccatgttccagcccagcccaggcaccctccaccctaccctggccaaaggggcccctgtctaccagatagagcctccctctccaaggctctgttgctctccctctctagctccctcaccctttccctttctctacttccctctccaccttgctctctctctctctctctctctcaatctccccagttcctctctgtctctctctccatcgctgtttctctccttccgtttctatttctcatccctctgtcccttgctctccttcaagttgtctgtgtctttgtgtgtctgtgtgtgtgcttgtgttcccgcgcgtgcgcccgtgtgtgtctgtgtgtttgggagtgggtttgctagtgattgtggtggggtgtgtctggatgtccatcagtacctttgtcccaggatcaggctgccaactctattgccaacgcctgggtgtcacagttgccgtgatagtctcacacacgcagttgtgttcatctcgttcgttttcacgtagacaacgagagcgaaaccacagagaaaagaaacatcccgtgcatcacggcctgatgatggattcctgtttcctgcaaaatggggagtctccaatatagcctgtttgaaaactggaaaggagagcaccgacacgatgctggtcttccacgcattcctggaagtttctggggccccacagagctcgcgaaacagtcaacatggtcacgctttcggggggcagaaacttgagcaacaggcacctttacagagggcaaagaaacgtggaatccagaatcacgcttcagttggcctgagtgtgactcctgtgtggatgggactatccgcctcgagctctgttgcagggctcaacgtggggatatgtcatctgtgaaccatgtggatgaaaaacagacaactacctggg

SEQ ID NO: 9127 - DNA, 334 bp, Homo sapiens
agatgttctcaggcgtacgcttctaaagaaacattgtagactcttctactggcctttatctagtcactgctttaagcaaggaataaaacatctgtggctaaaatttgtaaaactgtgtttcccacccacccttcagacctgacagaagagtttttaggattttaagggaacagctttttcgtgacccaaaagggaacagtggtgcaaagaccaatgtcacgtaggtacattttccccatctgtaaaataactttccgatacgattcccacacctggaatcagtacaatgttttgactgaggtattagaaaaacttatgagttcattatcatttg

SEQ ID NO: 9128 - DNA, 397 bp, Homo sapiens
agacgttctcaggcacacacttctaaagtaacataggaggctcttctagtggcctttatctagtcactgctttaagcaaggaataaaacatctgtggctaaaattcataaaactgtgtttcccacccacccttcagacctgacagaagagattttaggactttaagggaacagctttttcctgacccaaaagggcacagtagtgcaaaggccaacgtcacgtaagtacattttccccatctgtaaaataactttcaggtagtattcccacagctggaatcagtagaatgttttgactgaggtattggaaaagcctatgagctcattatcatttgaacatatgagtaatggaaaatttaggcagaattttatttgaaaggattatttatgcaattttt

SEQ ID NO: 9129 - DNA, 6495 bp, Homo sapiens
tttttagttaagaatcaccttaaaacttggaacctggatacaagataattccttcattctggaaacgtttagtagcaaactatatgccaggactgtgataattactagggatacatgattgaatatatagcataagatgccttggagtgtcagatagtttcatataaatggctcatgcagtatatagacagtgtggtaaaaagagactactgagatgtgcagaggacagacaataaagggtctttgaatggtagatgaatgtgtttggacttttcattcagggctgttgaagtttttgaaggtcagttgtcttagagttttggtgttttcaagccctgctaagtactttgtttctagctgatgattggccatcattactgatcatctattggctctgtctgattcagcaatcccacggctgagtatttatgcaaaggaaaaaaatcaatgtatcagaaatataactgtacttttatatttgttgcaacactattcacagtagcacagatataaaatcaacctaaatgtccatcaacaaatgattggaaaaagaaaatatagaaaatatacacaatgaaatactattcaggagtaaaaaacaatagaatcataatttttgcagacacatggatggaactggaggccattgttgtaagtgaagcaagccagacacagagtaaacatcgtattttatcactcataagcgggtgctaaaagatgtgagggtattgatgtagagagtggaatgataatggagactcagcagggtgaggggatggaaggggtgaacagtgagaaattacttaatgggtacaatgtgcattattccagtgatggatacctaaaagccctgacttcaccactatgccatccatgcttacagcaaaattgcacttggaacccataaatttatacacaaaaagtcttagacctctctctcttctctcataagcctcagagctcagtgatccccttggatctcctcagcctgctgagttttaactttcctacctaaggtgattttgggcagagacaagggagtgtttcaggaagatgttctcaggcacacacttctaaagaaacattggagactcttctagtggcttttatctagtcactgctttaagcaaggaataaaatatctgtggctaaaattttaaaaactatgtttcccattcaccctttagacctgacagaagagattttaggattttaagggaacagctttttcctgacccaaaagggcacagtagtgcaagggcaatgtcacataggtaccttttccccatctgtaaaataactttccgatactattcccacagctggaatcagtacaatgttttgactgaggtattggaaaagcctatgagctcattatcatttgaacatatgagtaatgtaaaatttggcagaattttatttgaaaggattatttatgccatttttaattaactgatttatattatggttatttcaaacaataaaaatcaggttattgtgtcgtaagctagaaatatttacaataacacatggtcttgattatctcacatgatgaattgaagattaaagcaaaataatttagggaattctgtgacagtttctgtttcacgttgtttaataatgacttcaaactcttgtacatatatggagaactcctgactaaagagaatttttttgtccattgtgctatgtttctgtaactttttaagatctagaggaacacatatttagtctcagttggccaactaaatgttatggagtcagcttctgtgttacatgctgagcattgaagggatggtggagacaaggctgctgccctcgcagagtctgtggagaatacctgatggagtgtggcagggaacatgctggaagcatcccaggatgccaaaagtgcacacagatggaacacctgccttagaagtggggagggtcagacaaggagagttgtcaggaaaagcgaggaaaatttaatcagcaggaatagaaacacacttgagaaatccatgtggaatgaaaagagaatggctgagcagcaacagattgtcaaaaaggaaatcaagaaggagcagccaaagaggtggatggagaaccacgagaaagaaggtgacacaggaaggggaatatcacactctggggactgttgtgggatgaggggaggggggagggatagcatcaggagatatacctaatgctagatgacgagttagtggatgcagcacaccagcatggcacatgtatacatatgtaactaacctgcacaatgtgcacatgtaccctaaaacttaaaagtataataaaaagaaatcattaaaaaaaaaaaaaaagaaagaaggtgacactgaagccaagggaaagaaagtgtttcaacatttctgggaaaaaaaatgacattctctgtcttaaccttgttattttatgagtcatatagccacattccaggttctgagaagtccagcactaaacatgtttctttttgtttgcttaacccagcatttgccagaataatctgggctcagtgtgagtgtgtgtgcgtgtgtgtgtgtgtgtgtgtgtgcacctgtgtgttccactaatatctctctggggctagtgctctatacaacataatttttaaaacactggttttatccatcttattatgttcagctgcagcaatacttacaaaagtcaactttgattatgtgtcttagttactaaagaaaacaaaacaaactaatgaataaagcccacctggcagtggctcctcactacctgtacgatggagccaacctggtttggcctccatgccctatgccgacctggccatgctgtcttctgcctgctgctttgcctcccctttcctcctggagaaggtagagatgctctgacatttggctcgtctggaacatgtgtccttctcctcatgtggaccatgttttcctgagtccactttaatctcgtttaagggtatagaactttacttaaagcttctggtcaggtctcactctctatgctgtcttcctgccacttctacaatgtacatactttactgatacattaattatgctatatcagccaagggttttacttctatatcattttatatcatcatctttttttcttagagcttagttcacttatttattaagtctttccacactataattgtatgtcatataattttatatttattttcattggtgtttatatatcttttctgtaaaaatggaggctttctaaatagatcttcattaacgttgagagaacaaggttttaagtcttggtctcagccaaaaggagttccccgcattaccaggagggaaagaaacacttgcattgttgcattagatattcttacagagaaagagaaccatgtgtaatggaaaattgctaactttgcctcaaggggactaggttgattcagtgagaaagtttctattggtttagaaagcatagttctgagtattctaggagaaggagaaaagttagagtagggcataagaagtaatgcccatatcaaaaagttagaaagatctcaaattaacaacctaacatcacaactgaaagaattagagaagcaagaagaactcaaccacaaagcttatagaagacaagaaataactgcaatcagagctgaactgaaagaaattgagacaagaaaaactgttcaaaagatcacttaatcaagattttatgaaaaaaataataagatagatagggcactagctagactaataaagaagaaaagagaaaagattcaaataaacaaaattagaaatgatgaagggaatgttaccactgaccccagagaaataaaaataacaaccagcaactactatgaacacctctacacacacaaagtagaaaccccagaagagatgaataaattcttggacacgtacactctctcaagactgaaccaggaagaaatttagtctctgaacagaccaattatgagctccaaaaattgaatccataataaatagcctaccaaccccccccaaaagcccaggacctgatagattaacaaattttaacagaggtacaaagaagagccagtacttgtcctactaaaactatttcaagaaatacaggaggagggactcttccccaacttgttctacaagaccagaatcatcctgataccaaagcctggaagtgacacaacaaaaaaagaaaacttcaggccagtatccttgatgcacatccattcaataagctacaacaaaatacttgcaaactgaatttagcaacacatcaaaaggctaattcaccatagtgaactaagcttcttccctggaatgaaagtttggtccatcatgggcaaatcaataaaatgtgatacgtaacataaataaaactaaagataagaaccacgtgattgtctcaacagatgcagaaaaggctttcagtaaaattcaacaaagcttcatgttaaaaattctcaataaatgaagtatcgaaagaacatacctcaaaataataaaggccacctatgacaaactcacagccaacattatactaaatgggcaaaatctggatgcattctccttgaaacccacacaagacaaggatgccctctctcactactcctattcaacatagtattagaagtcctttctggaacaatcagacaagagaaagaaatgaagcatatttaaatagaaagggaagtccaactatctctgtttgcagacaacataattctctatctaaatcctatagttgtgacccaaaagctctttaagctgataaacaacttccacaaagtttcaggacacaaaatcaatgtacaaaatttgctagcattcctatacaccaagaagagtcaaactaagagccaaatcagagaggcaattttattcacaatttccacaaaaagaataaaacatgtacgaatacagctaaccagggagttgaaaaatctctacaacgaaaattacaaaacactgctcaaagaagtcagagaagacataaacaaatgaaaaatcattccatgttaatggagagaaagaattaatataatttaaatggtgtactgcctaaagctattcctattaaactaccgatgacatgattcatggaagtagaaaaaagctatttagaaattcacatagaaccaagaaagaatctaagtagctaaggcaatccgaagcaaaaagaacaaagcttgaggcatcacattacccgacttcaaactatactatagcactatagtaaccaaagcagcatggtactagtacaaaaacagacatatacaccaatggaacagaatagagaagttagaaataagaccacatacctacaagtatctaatctttgacaaagctggcaaaaacaagcaatggggaaaagattccctattcaataaatgatgctggaataactggctagccatatgcagaagattgaagttggacttcttccttataccatatgcagaaatcaacccaagatgggttaaatacttaaatgtaaaacccaaaactataaaagccctggaaggcaacctaggcaataccatcctggacgtagaaacaggcaaagatttcatgataaagacaccaaaaacaacaaatgcagctattgacaagtgggatctaattaaacttaaaagcttccactcagcaaaagaaattatcaatagagtgaacagacaacatatagaatgagaaaaaaatatttacaaactatgtatctgacaaagatctaatattcaatataaggaacttaaatttacaagagaaaaacaaaaaaccctattaaaaagtggccaaagccctgacttctgaatggcacttctggacccagccagggactgagggatctcactgccctaaaggaaagaacacaggcctgtctggctttgccacctgctaattgtagagaccaaggccttgagtgaacataggcagtcgtcagaaagtgcatgcagcagaacttgagcaagaccctgtgctgtgctagcttcaggtctgatccagggcagtcatagtggtggtggccaggggtgcttgtgtctttcttctcccagctttaggtggcttagaatagagagaaagactctgtatctttgagagaaaataagggtagggaaaaagtctctggctagtaatccagaaaattctcctggatcttgttgaaggctgtcaaggtggtacttctctgagtctggaagaattactgcattattgggtataaggtgccccataaagaagacatggcttagatcacaacacccaactcttttcaaatatgtgaaaagccttcccaagaaagacagctacaaataagcacagacagtgaagactacaataaatactcacctatactctttttaaattttattttttaaacctctcatatggtgctacatgcccaagattttaatgtccagacactgaagaacatctactagcatcacaccatccaggaaaacatgccctcaccaagtgaactaaataaggaccagggacaaatcctggagaaaaagagatatgtgacctttcagacaga

SEQ ID NO: 9130 - DNA, 396 bp, Homo sapiens
agatgttctcaggcacatgcttctgaagaagcattggaggctcttctagtggcctttatctagtcactgctttaagcaaggaataaaacatctgtggcttagatttaaaaaactctgtttcccacccacccttcagacctgacagaagagattttaggattttaagggaagagatttttcctgacccaaaagggcacagtagtgcaaaggccaatgtcacataagtacgttttccccatctgtaaaataactttcagatactattcccacagctggaatcagtacaatgttttgactgaggtattggaaaagcctatgagctcattatcatttgaacatatgagtaatgtaaaatttagacagaattttatttgaaaggattatttatgcaatttt

SEQ ID NO: 9131 - DNA, 660 bp, Homo sapiens
acaaattgaggagtcctttattagccagcgaccgagaggcagctaacactcaaaattctcttggccccgaggaaggggctggttttgtttttattccgcactctaaataggggaggagggagtttaactgaaacaatttttacggaagcagagctggcaaatagttaaaaaattaattggttataaaagcagttacaaaacaaataaaccattccaggtgcaggggcttaaactatcacaaagagagaaatgcgggggttttgtgtgatattcactgagtgcgtccccaggagctgctggtgcagcttgcctcaatatcttatcagtaagtgcattcctggacgtgcttttagtcaatttacactagttatggccttaagggagggaggtaaagggggctgcacttgaagaaactaaaatagagtctgtccggctctctctccgctaggagagagtcactcaggttaaaacaaggtagggtatcacaggaccatgtacaattcttcaaactccagcttcaaatctctttcttattgctctcttaagacagtatatttagatcagagtaaatgaaagtaatgttattaggagataagattaaaatcgatcccatttgtaaaaagggtaatagattatttgtgaactgtaatactttttttt

SEQ ID NO: 9132 - DNA, 247 bp, Homo sapiens
acaagcactgagcctagcgtggggtccaggtgtctctggcatcatgccctcctaggtcgtggttgtccctccttgttgctcctgctgtcttcttcagttacatcagcttctctgcatttcctcattttacagtgtgtgggatgcagtcatctctgaacaggaataggcaactgtgcacctgttacaccgtgcttgatgctctgcattgatgtacactgggcccaggtttccctggtggactgcttgg

SEQ ID NO: 9133 - DNA, 1181 bp, Homo sapiens
gatggctgcagtggatgggctcatcaccagaataaaattttctctttaatacttttttagaacattaagtgagaaccagagagtctaaaactgggttacacagcagcaataaaatcagagtgacacttactttgcagcagcaggactggaattcttgctgttggggttggtggcagcaaactcaattatgggtgtctcctgcttcatgcttagatgatgtgttggaatatttcctgtttagaactctctaacacttcctgactagagctgtttaaaatagaaacaaactcctctgattttgaatttagcctatttattgttacgatttgttcatatgtttctactttttagactgtggctttcttgtagacagaaattatatcttatacctctttttcttcagcagcagtgtgcctggcacctatttgaattgtcaggttcattgaatgagtaaagcaaaattatactagacttaaactattaactttatcaattctactcagaaaatatatagctaagtatgacgtatgaatcaatttactcacttattcaacaaacttttttaagtgactacaatatgttatgagctaggaatatgacagtaaacaaatctcaccttgtctcaaacttcagtggatccaggagtctctagaagtttaattcttgctcaatcagcaattccttttcactgaagacttgacaagaagttttgagaaggcaagagtgtgtgaactcagcagatgtttgtgatgcacctacctactgtgtgccagaagctgtagtgtcacaggctctgcctgtgtctcctaggaaaggtgaaaactaaggacaatattttacacaacaaataatggcaagtatgccatgtgatggagagggaaagtgctggctcccaagagtataacaggcactgagcctagcatggggtccaggcgtctctggcatggtgccctcctaggtcctggttgtccctccttgttgcttctgctgtcttcttcagttacatctgcttctatgcatttcctcattttacggtatgtgggatgcagtcatctctgaacaggagtaggcaactgtgcacctgttacaccatgcttgatgctctgcattgacgtacactgggcccaggttttcctggtggactgcttgggccattcttgtcacctggctctgaagtcttt

SEQ ID NO: 9134 - DNA, 249 bp, Homo sapiens
acaagcactgagcctagcgtagggtccaggcgtctctggcatcttgccttcctaggtcgtggttgtccctccttgttgctcctgctgtcttcttcagttacatctgcttctctgcatttcctcattttacagtgtgtgagatgcagtcatctctgaacaggaataggcaactgtgcacctgttacaccgtgcttgatgctctgcattgatgtacactgggcccaggttttcctggtggactgcttgggc

SEQ ID NO: 9135 - DNA, 659 bp, Homo sapiens
acaaattaaggagtcttttattagctggcgaccgagggcagctaacgctcaaaattctcttggccctgaggaaggggctggttttgtttttattctgtggtctaaataggggaggggaaagtttaactgaaacaatttttacagaagcagagctggcaaatagttaaaaaattaattggttacaaaagcagttacaaaacaaataaacagttccaggtgcaggggcttaaactatcacaaaaagaaaaatgcaggggttttgcctgacattcaccgagcgcgtccccaggagctgctggtgcagcttgcctcaatatcttatcagtaagtgcattcctggacgtgctttgagtcagtttacactagttatgcccttaagggagggaggtaatgggggctgcacttgaagaagctaaaatggagtctctccggctctctctctgctaggagagagtcactcaggttaaaacaaggtaggggatcacaggaccatgtacaattcttcaaactccagcttcaactctctttctaattgctctcttaggacagtatatttagatcggagtaaatgaaagtaatgttattaggggataagattaaaatcgatcccatttgtaaaaagggaagtagattatttgtgaactgtaatacattttttt

SEQ ID NO: 9136 - DNA, 486 bp, Homo sapiens
aaaaattaattggttacaaaagcagttgcaaaaaaataaacagttccaggtgcaggggcttaaactatcacaaagagagaaatgcaggggttttgggtgccattcaccgagcgcatccccaggagctgctggcgcagcttgcctcaatatcttaacagtaagtgattcctggacatgctttgagtcagtttacactagttatgtccttaagggagggaggtaaagggggctgcacatgaagaaactaaaatggagtctgtccagctctctgctaggagacagtcactcaggttaaaacaaggtaggttatcacaggaccatgtacaattcttcaagctccagcttcaactctctttcttattgctctcttaggacagtatatttagatgggagtaaatgaaagtaatgttattaggggataagattaagatcgatcccatttgtaaaaaaggaagtagattatttgtgaactgtaatactttgttt

SEQ ID NO: 9137 - DNA, 508 bp, Homo sapiens
gccagcatgcctggctaaatgaaagcttcttttcttttctttcccttggtctcaaactcctggactcaagtgatcctcctgcctcagccttctgaaatgttggaattacaggctgagccactacacccagctcaattttcttccagtgttgctgtcctcagtaatttcagcttaatctgcatctctcaccatgtccaatgacagaccatgtacacagtaatatattcagagtgacacattgaatacagtaaatgtgtgtggtaattttttaacatgctctatgctgtccatatgtgaaatagtaagcattcaataaatggtagctttcctacataaatacccagcaacagtactgtataagcttttacagataatctgtaaaatatgtatctttacattatttatgttatcagaagtgataatagacaccctgttttgattcttgttgtctacttaattcataattccacattaatacataatatggcttttttgtacttttgaaaat

SEQ ID NO: 9138 - DNA, 508 bp, Homo sapiens; identical to SEQ ID NO: 9137

SEQ ID NO: 9139 - DNA, 1954 bp, Homo sapiens
tttttttcttttcttttttttttttttttttttgagacggagtctcgctctgtcgcccaggctggagtgcagtggcgcaatctcggttcactgcaacctccgcctcccgggttcaagccattctcctgtctcagcctcccaagtagctgggactacaggcgctcgccaccatgcccagataatttttttgtatttttagtggagacggggtttcaccgtgttagccaggatggtctcgatcgcctgacctcgtgatccgcctgccttggcctcccataatggtgggattacaggcgtgagccaccgcgcccggcctttttttttttaatttaatgtcacactccaggcacaggagtacctagggggaagtgcagatcttcacaagtgcctagggccatgccttccatttggcaagggaggtgtgtatgcctgaccgctcccctcctttccactgttcccaggcccctgctgggagcgagcctgcacagaaggtggtggagccggcagctgaaaaccagtcctggggaggctgggaggcatggggagcaggacctcgcttgagccaggctccaaaagtctctagcccatgttctgctttctcatcggacttcattataagacacaaattgaaagataaaattattaagaatttcaagacaggaaccacagagctttagaacccaaacacagtatcccttctaagcatggggcccttgtgtgactgccctggtcactcacccatgaagtttactctgctttctacactggtagaatagtttgttcagagagcatgttttttggtaatttcaataaatattgataaattgccctgcacaaagttgtatacttcactgtaccctggctttctccttagtgagtgagggaataatatcatccacttcatcagggttatcatgagaatgacatgaatgagtccctgtgaactgtgaatggtacacagtaaccactcagtaaatacagtcattagcccttacatgcagtgattttcttctggaactccctctagtggcataaatataaagaggaattcacgttttcttttctacttttgtggccctatttcccataatatttgtgtgtttaaattggtctagatattccactgaggctcaatgaccgatagactataaaatgtctaatttacatcaatttagccagatgcttcctaggtaggtcggagaaatgagaacactgatccgaatcaatgtgaggcagctcccagcaagtgagcgcctgtagcatgtgtgagcatgggtgctgtggtgaatgcagccaggggctgctctttcatactgctttatttctttttcttttctttcttttttttttttgagacggagtttcgctcttgttgcccaggctggagtgcaatggcacgatcttggctcactgcaacctccacctcccgggttcaagggattctcctgcctcaccctcctttgtagctgggactacaggcacccgccaccacgcccggctaattttttgtattttagtagagacgaggtttcaccatattggtcaggatgggctcgatttcctgacctcgtgatccacccgcctcgtcctcccaaagtgctgggattgcaggcatgagccaccgcgcccggccatactggtttatttctttttctttttttttttttttttgagacagagtcttgctctgtcgcccagtctggagtgcagtgacacgatctcggctcactgcaagctccgcctcccgggttcacgccattctcctgcctcagcctcctgagtagctgggattacaggggtgcgtcaccatgcctggctaattttttgtatttttttagtagagacggggtttcaccgtattagccaggatggtctcgatctcctgacctcgtgatccgcccgcctcggcctcccaaagtgctgggattacaggcgtgagccaccgcgcctggcc

SEQ ID NO: 9140 - DNA, 1959 bp, Homo sapiens
tgtggggtttttttcttttcttttttttttttttttttgagacggagtctcgctctgtcgcccaggctggagtgcagtggcgcaatctcggttcactgcaacctccgcctcccgggttcaagccattctcctgtctcagcctcccaagtagctgggactacaggcgctcgccaccatgcccagataatttttttgtatttttagtggagacggggtttcaccgtgttagccaggatggtctcgatcgcctgacctcgtgatccgcctgccttggcctcccataatggtgggattacaggcgtgagccaccgcgcccggcctttttttttttaatttaatgtcacactccaggcacaggagtacctagggggaagtgcagatcttcacaagtgcctagggccatgccttccatttggcaagggaggtgtgtatgcctgaccgctcccctcctttccactgttcccaggcccctgctgggagcgagcctgcacagaaggtggtggagccggcagctgaaaaccagtcctggggaggctgggaggcatggggagcaggacctcgcttgagccaggctccaaaagtctctagcccatgttctgctttctcatcggacttcattataagacacaaattgaaagataaaattattaagaatttcaagacaggaaccacagagctttagaacccaaacacagtatcccttctaagcatggggcccttgtgtgactgccctggtcactcacccatgaagtttactctgctttctacactggtagaatagtttgttcagagagcatgttttttggtaatttcaataaatattgataaattgccctgcacaaagttgtatacttcactgtaccctggctttctccttagtgagtgagggaataatatcatccacttcatcagggttatcatgagaatgacatgaatgagtccctgtgaactgtgaatggtacacagtaaccactcagtaaatacagtcattagcccttacatgcagtgattttcttctggaactccctctagtggcataaatataaagaggaattcacgttttcttttctacttttgtggccctatttcccataatatttgtgtgtttaaattggtctagatattccactgaggctcaatgaccgatagactataaaatgtctaatttacatcaatttagccagatgcttcctaggtaggtcggagaaatgagaacactgatccgaatcaatgtgaggcagctcccagcaagtgagcgcctgtagcatgtgtgagcatgggtgctgtggtgaatgcagccaggggctgctctttcatactgctttatttctttttcttttctttcttttttttttttgagacggagtttcgctcttgttgcccaggctggagtgcaatggcacgatcttggctcactgcaacctccacctcccgggttcaagggattctcctgcctcaccctcctttgtagctgggactacaggcacccgccaccacgcccggctaattttttgtattttagtagagacgaggtttcaccatattggtcaggatgggctcgatttcctgacctcgtgatccacccgcctcgtcctcccaaagtgctgggattgcaggcatgagccaccgcgcccggccatactggtttatttctttttctttttttttttttttttgagacagagtcttgctctgtcgcccagtctggagtgcagtgacacgatctcggctcactgcaagctccgcctcctgggttcacgccattctcctgcctcagcctcctgagtagctgggattacaggggtgcgtcaccatgcctggctaattttttgtatttttttagtagagacggggtttcaccgtattagccaggatggtctcgatctcctgacctcgtgatccgcccgcctcggcctcccaaagtgctgggattacaggcgtgagccaccgcgcctggcc

SEQ ID NO: 9141 - DNA, 459 bp, Homo sapiens
cttccaggtgccaaattctgtcacagtgatcttttgctgtgcaataagccatcttgaaaacactggcataaaataatgattatttattaccaatttttaaaaaagagagaatcctggcttctgtgggtcaggactttgggcaaggcacaacaagaaaggcttttctacttcatgatgtctagggtctcagccagaagccccagagctgagggtgactctagtatatgaggcggtggctggaggatccccttctaaggtgttctttttagtcctgtgtctgacacattggcagggatggctggaaggctgggctcagctgggacggttgctcagagcacctctctgcggccacttcagcatggcagcctccatgggtagtgagacttctgaaatgacaggtcagtgccttgtgagtaaggtaggagctgcatggctttttgtgacccagcctgaaaagtc

SEQ ID NO: 9142 - DNA, 6155 bp, Homo sapiens
cttccaggtgccaaattctgtcacagtgatcttttgctatgcaataagccatcttgaaaacactggcataaaataatgattatttattaccaatttttaaaaaagagagaatcctggcttctgtgggtcaggactttgggcaaggcacaacaagaaaggcttttctacttcatgatgtctagggtctcagccagaagccccagagctgagggtgactctagtatatgaggcggtggctggaggatccccttctaaggtgttctttttagtcctgtgtctgacacattggcagggatggctggaaggctgggctcagctgggacggttgctcagagcacctctctgcggccacttcagcatggcagcctccatgggtagtgagacttctgaaatgacaggtcagtgccttgtgagtaaggtaggagctgcatggctttttgtgacccagcctgaaaagtcacatagtgtcatgtctgctgtgtctaagcagtcagaagcctgcccactctcaaagggaggggacccaggctccacttctcagtgggaggaatgtcaaagaacctgtggtcatgttaaagttgctgctgctgcttctacaatttccatcctctttggtcctttttgatggctcctaataacccacatctcatcataaaccacaagactttgccagaagccaaggaaagagcagccctccaaattgcacctttgttcccagttcccaccagagtccctggagattttatccattcgtgatatcttctttctcttggttcttccagtcttaggggtggagcttccagtaatgtatttgtgtttccagagagctcaaaacacagctgaaaatatgcctgttggcatagggaatgttcatgctacatttggtaagtgaagaaagcaaaggaaaaatcaagtggaagaatatagatcaaggtgctaagtggttatctctgaatggaagatttagaggtaatttctattttgcttttgcatatatgtatttttcttttttatatgaagcccaactatcacatggaaattaagcgtgtaggctctgaagtcagactccttgggtttaaatctccattccttcaatttccagctttctaaccttgggcaagttacttagattttgtaaaactcagtttcctcatctctaaaatggggataatgatagatcaatagtttttacctcaaagggctgttttaaggattaaataaaattatgtatgtaaatactttgcataatttttggcataaaataagcagtcagggttagggattatttttagtggtttcattaataagttttaaaagagataaatgagttttgtttctaatatcttgataatggcacttcgtgtgaatgaatctgtgtgttttaccagaaacaccaactcggttttattgctggaaatatctcataatttgctttcacaccttttaagagctattttctcgagacatactcggcttttatgaagattttgaaaatctagggcagtgattttccttagaggggagcaagaaggtcaccaggaaagtctgctgtcctcccgtggatcctcatttttctagagtaagtatttaatcaggcaagattgagaagctaaaagcaatagaataattgacctaattttttttaagtgcagaagttttgttctttgcctgaacacaaacatatttcttatcctaaaaggatttttaaaaatttgttttgctgtcagcaaaaatttaggcttttgcacataacacttttgctagctaagtaaataggaaggacagacaagactatccactgtatatttagtctgaatgagcaaaaagtggtggagaggtcggggttacggtctccttatcccagtaaaactaggagactgagaccctccagcagtgttatgctgtgggaacagggctggcctggatctaaggagttagggttaagccagagctggaagtttgtcagttatacacctggtgtaagagctagcatggaaggaacatacaataagtgatgaagggatggatggatgatgaacagatagatggacggatggttaatggattgatggatgaatagacagacgatgaacggatggatggatgatggatggatggatggacggatggatggatgaatgaacagacgttcgaatgggtagatctctttccactgtcctaggctgcctgaaggtcttgagtcttggatcttcttgtgagctatcaattgcctgctcgataatgaaataccagttgagacaaattggccatgagagacatttttgggtaaattgagatcatttgaatttggtctgggtattagatgaggtgaaatcttactggaatgagaagatgaaatttattgaccaaaaaaagcaagcacagaatgttgtgtaatcttgtttgggttgaaaaactacgtatacgtataaatccaaatgctggctctcacaaaacactatcaaaatgagctcccgagaagacaaagtggagtgttctgctagactgcatcacctttttccccccgtggatctctgctcatgctgttcccactgcttggaacgtcatttccttcccaccctccaccttccccagttcctactcatcctcccgtgtgcagcttcactgtctctccctcagggagtctcccccgctctctaggttagaaaaccatatgcacgctcttggctctcattagatcgtaattttttaaatgtttgaaaatgtttgtagctagcacaacacaacacattccctgaatgtgtgcagtaggcattcaaaaatgtatttctaggtgaattatgtaaaaagaaatgttatggaatgtgttgttttttcctcctcccttccacaggatcctggcgtgttccaaaaagagaatatttgctaatttgacaaaatgctggaagatatagaaattttttttttttttttttttttttagacagtgtctcactctgtcgcccaggctggagtgcagtgatgcgatcttggctcactgtaccctctgcctcccgagttcaagagattctcgtgcctcagcctcctagtagctgggactacaggtgcccaccatcacgcctggctaatttttgtattttttggtagagatggggtttcagcatgttggccaggctggtgtcagattcctggccccaagtgatctacccacctcagccttccaaagttctgggattatagtcatgagccactgtgcttggcctggaagagatagaaattcttttagcaatgtaataccaagagctgggttaagaggagccccatttagcagtaatgcggttggaaggtggtgttggtgaactccctgtgagaggggaagccagctggacttcctgggtcgattggagacttggagaacttttctgtcttacaagagtttgtaaaatgcaccaatcagtgctctgtaaaaacacaccaatctgcgctctgtagctagctagaggtttgtaaaatggaccaatcagcaccctgtaaaatggaccaatcaacaccctgtaaaatggaccaatcagcactctgtaaaatggaccaatcagtgggacatgggtggggacaaataagggaataagagctggcctcccccagccaggaacggcaacccgcttgggtcgtcttgctttgttctttccctcttaacaataaatcctgctgctgttcactctgggtccgtgccacctttaagagctataatactcaccgcgaaggtccgcgatttcattcttgacgtcagtgagaccacgaacccaccagaaggaaccaactcggacacacctacagatgggaagcccctccctttggtccacacagacccagaaggactgagaaatggagaacccttggggtagggaaggaggtcaagggtccttgaagaggagaagagagagggggtctgaaagggagaagtcatggtggcttgtgacacagaactgagagctttcaggggaaggaccttgacagtttcagaagagttgaatgacggaactttctagacccccacaccctccaaacccctgggcactagattggagactatgactaaaatccaaaagaaaggactctttttgtttattttttttacattccaggtagggcttgcctagctaaaaatgagagcatttattactgacccaccatctctttcttgggaatagggtggtaggttatagaaaacaagatttatttttcttccagataacttccatattttctcaatgttcttatatgtgtatgtgtagatccaaatgccggctctccaaaaatactacgacaatgaaaacggagtggagtgtttcgctctgtcgccccatcttccctcctccggtctgtgcacccactgcatgagcacgtggtgttgtcttagataatttgagctgctgtaacagagtaccacagactgggtagcttataaacaacagaaacgtatttctcacggttttagagaggctggaagtctgagatcagggaacccgccaccgtggttgggttccggtgaaggccagctttcaggcaacagactgccaacttcgtgtttcaacctcacctgagggaagagggcaagagggctctctggggtcccttttatgagggcactaatccctttcatgagtgttccatccctctgacctcattacctccccaaaacccttcatcctactaccacccaactgggggttagggttagaacatataaatgaagatggggagaaatacaagcattcagtccataaccaatggtttgaatatttgtacaaaatttatgtctacagaagatactcgaatacacacgcttatctcaaacaatccctgtttccatcttgtcatgcatatttccagacccatagagtagtaaatggttgagagctgatggcatcctttccatcttaacctcagggagccctcccagcaactttgagatagagacgctttatagtatctttttacagatgagaaaacagaagctcagagaggtcaagcaacttgtccaaggtcacacagcagtgaggagaatgtgagtgagatttgagcaccggcattctaagtccacactcttaaatactctactggactgctccctctttataaacctagcaaaattaaaatgcaagtatatttttgtgatttaaaggtgaatttattatttgtttttttcatttttttgtatgtgaatttttctctctctttttttttttttttgagacgcagtctcactctgtcacacaggctggagtgcagtggtgtgatctcggctcaccgcaacctctgcctcaccagttcaagtgattctcctgcctcagcctcttgagtagctgggactacaggaacctgccaccccacccagctaatttttgtatttttagtagagagacacggtttcaccatgttgccccggatggtcttgaactcctgacctcaggtgatctgcccgcctcggcctcccaaagtgctggtattacaggcgtgagccactgcacctggccaaatttattttttttaataaggaaaggagaggatggtggcctgctgacaggtgcagaggtgcctgatgatttgtgtttcctaactggcttataccatgtgactaagaaggtggcagaagtgatgccacctgtccaggggagttttctggtacatcctgggaactggtcgtttatgatcatggcagaaaacacagctctggtagattcaaaagacccctatgtccagtgtatgctcaaagtatggaactaagcatacctgtggtcctgggaagtccagatggccatctcttccagggatcctgctctctctggcataccaggcagtcttttatcagctttgtgtccatgtcagagtacacctcaccaggcactcctttgctcctggttgccatctcagccctggtgcatcttgtggcccttgcaacgatgaagcatgacgatgttgcagggtgcccttgggcaggaccctctctggtggccaggaatgcgagtggtgaagacgggagctttgtggtaaggtgtgcatgtgctgtggctctgctgcaggagaggaagagaagccgttcagccccacgcccagccccttgcagaccgcgtccaagcaagttctgaggtctggctccggcagctcgtaatgcaaaggggccacactcgcat

SEQ ID NO: 9143 - DNA, 531 bp, Homo sapiens
cagacctaggagaacaatattttcccttctgtcgttttgataattacatcctctgtgctcagtggtggcctattaactcacatgaataccatgggcttgcaaaatggcctcaaatttccatatattggaactgtgagaactttctataatggtgctttagcaataatgatggaggtgcaggcatttcctgaggattaatgaccagctgggaggaaccagtggcccttggctctgcctcccagccagccattaattctaaggaaatgtcttttgctgaggtcgttactgctattataagcttaaaatggaaaaacataataggcatatgagttatttttatgggttgatgcagtttccaatggtgtgtactaatttgagaaaatgaatgtgtatacatacaagagtaagtcagattgttagactcatccctcagtattccatatgttttgtgactgattttacagttctctctacctttctcatttacaaaaaaaaaaaagaaaagaaaatttgattcagcaattcctaaaa

SEQ ID NO: 9144 - DNA, 531 bp, Homo sapiens; identical to SEQ ID NO: 9143

SEQ ID NO: 9145 - DNA, 531 bp, Homo sapiens; identical to SEQ ID NO: 9143

SEQ ID NO: 9146 - DNA, 301 bp, Homo sapiens
cacacacctatagtcccagctactcgggaggctgaggtgggaaaatgcttgagcctggcatgtctagccttcagtgagccatgactgtgctactgcactccagcctgggcaacagagcaagactctgtctgaaaagaaaagaaaagaaaagagaaaaggaaaaagggcatttaagacatctcacctactgaacatcctagcttcgcctagcctaccttaaatatgctcagaacagttacactgcctacagtctgagaatatttacattaaatatgctcggaacacttacattggcctacag

SEQ ID NO: 9147 - DNA, 537 bp, Homo sapiens
tagacctgaaaacacctaatttttattttcaatttagcctggaagctagcaaaagcttttgcagagaactgaaactgtgtcacagagcaccagcactgtatttgttatcattttggccttcagttttattaatgcttgtttgatgtgttaagcccctagctaagacaaaaagacagaactttagggtttttgtttgttttagcagtaataaagtctagaataaaatgtttgctctataatatttaatggtgtgtattcaatttttaaaccaaaatttaaaagaaagaaatcccattctcattcagcactgtcaaatgtattcattcccccagacttcactggttgaatataataatttgtgtgtataaacagtcttcctgactgcattctctttaatattcatttatcaatttgggaggaaatttccaaataacctttatttgcaccttaaaaaaatagttttaaacgaagtcatgggaatggattgctctgtcttttactgacttttatatatgtgattccaaacctccctttaaa

SEQ ID NO: 9148 - DNA, 1124 bp, Homo sapiens
gtctgacatcatggtgttggcagggccgtgctctccctgaaggctctagggaagaatctgttccatctctttcccttcacttctggtgctgttggtgatccttgatgctccttggcttttagatgcattgctccattctctgccttggttgccacatggtggtaacagcagttcctgtgtgtctgtgtctcttttcctcttataaggacaccagccatatttgattagggcccaccccactgacttcatcctaccttgattatatctgccaagaccttatttccaaataaagtcacattcatagagacaaggtgggttagggcttcactatatctttttaggggacacaattcaacccataacagttctttataactttaaacctgttagaaccaggctggtatttgtaatgcataatgagaaactgcagtgaatttcattaagtgtaaagcatcatatccaacatttgtagtttgttacaataacacattcaaaagattgatagactgcttttggtgtgatttttggattaattccctcttttgaagacatttgttgggcttagtttattttaaggaaggaatgaatagacctgaaaacacctaatttttattttcaatttagcctggaagctagcaaaagcttttgcagagaactgaaactgtgtcacagagcaccagcactgtatttgttatcattttggccttcagttttattaatgcttgtttgatgtgttaagcccctagctaagacaaaaagacagaactttagggtttttgtttgttttagcagtaataaagtctagaataaaatgtttgctctataatatttaatggtgtgtattcaatttttaaaccaaaatttaaaagaaagaaatcccattctcattcagcactgtcaaatgtattcattcccccagacttcactggttgaatataataatttgtgtgtataaacagtcttcctgactgcattctctttaatattcatttatcaatttgggaggaaatttccaaataacctttatttgcaccttaaaaaaatagttttaaacgaagtcatgggaatggattgctctgtcttttactgacttttatatatgtgattccaaacctccctttaaa

SEQ ID NO: 9149 - DNA, 301 bp, Homo sapiens; identical to SEQ ID NO: 9146

SEQ ID NO: 9150 - DNA, 1124 bp, Homo sapiens
gtctgacatcatggtgttggcagggccgtgctctccctgaaggctctagggaagaatctgttccatctctttcccttcacttctggtgctgttggtgatccttgatgctccttggcttttagatgcattgctccattctctgccttggttgccacatggtggtaacagcagttcctgtgtgtctgtgtctcttttcctcttataaggacccagccatatttgattagggccccaccccactgacttcatcctaccttgattatatctgccaagaccttatttccaaataaagtcacattcatagagacaaggtgggttagggcttcactatatctttttaggggacacaattcaacccataacagttctttataactttaaacctgttagaaccaggctggtatttgtaatgcataatgagaaactgcagtgaatttcattaagtgtaaagcatcatatccaacatttgtagtttgttacaataacacattcaaaagatttatagactgcttttggtgtgatttttggattaattccctcttttgaagacatttgttgggcttagtttattttaaggaaggaatgaatagacctgaaaacacctaatttttattttcaatttagcctggaagctagcaaaagcttttgcagagaactgaaactgtgtcacagagcaccagcactgtatttgttatcattttggccttcagttttattaatgcttgtttgatgtgttaagcccctagctaagacaaaaagacagaactttagggtttttgtttgttttagcagtaataaagtctagaataaaatgtttgctctataatatttaatggtgtgtattcaatttttaaaccaaaatttaaaagaaagaaatcccattctcattcagcactgtcaaatgtattcattcccccagacttcactggttgaatataataatttgtgtgtataaacagtcttcctgactgcattctctttaatattcatttatcaatttgggaggaaatttccaaataacctttatttgcaccttaaaaaaatagttttaaacgaagtcatgggaatggattgctctgtcttttactgacttttatatatgtgattccaaacctccctttaaa

SEQ ID NO: 9151 - DNA, 301 bp, Homo sapiens; identical to SEQ ID NO: 9146

SEQ ID NO: 9152 - DNA, 607 bp, Homo sapiens
gtttagcttgtacttgatttttactaatagtctaagaactgaaatccacagataactgtgaactccgtttagtcagtagtattactctctatccagctttttttcttttttttctatgcctataccactaacatattgtagaattaatttattttgaccttttctgtctccccccctccctttttaagaatttcttttaaagatggtgataagtaagtgaaactttgaaaggtaggcagtatcagatctacataattaagaactgcaggcaatttatggattactttcctttaaacttccaaagatgtaatagtataccttttagagatgtggctactgctctctggagagaattagggtaagcagattttcactcatactttatgagctcattaagtatgggcagttcaaccgtttagtaagtaaaacaaaatatgactattttgaagattaaatctgtttatagtaacctttagattatgtacaaaaaaaatttatgctgcagatatgatttttaattaataacttatggaaattaataacttactatggctgaactttgaagagagattatactcaagcagatactatagtagttaaaatataa

SEQ ID NO: 9153 - DNA, 607 bp, Homo sapiens; identical to SEQ ID NO: 9152

SEQ ID NO: 9154 - DNA, 532 bp, Homo sapiens
acctcgaagatagtacaggtttggtttcagaccgctatagtaaggcaaatatctcaaagcaagtcacacagtttttttttcctagtgcatgtaaaaattatgttcacactatactgtgtgcagtaacactgcttcttaaaaaaagtatatacctaaacaagtaaatattttattagtaaaaaacagtagtgatcatctgagccttcagtaagtcatcagctttttgttggcatagggtcttacatccctgctgatgactgtggacttattcaagggcagtggttgctgaaggctgggatgactgtggcgatttcttaattaaaagaagacaacagtgaagtatgccacgttgattgactcttcctttcatgaaagatttccttgtagcaatgtgatgctgtttgatagcattttacccagagtagaacttctttcaaaactgcagtcagtcctcccagaccctgccgctggcttatcgactgagtttatgtaatattctgaatcctttgttgtcatctcaacagtgctcaca

SEQ ID NO: 9155 - DNA, 221 bp, Homo sapiens
tttttaataattaaactaatttagtaaattcaagatggaggcgctttcctactgattatgcttccacctcagaagatgaatttggatcaaaccgtaattcccctaaacatacccgtctacgtacttctccagccctgaaaaccactcgcttgcagagcgctggatcagcaatgcctactagttcttcattcaaacaccggattaaagagcaggaagactac

SEQ ID NO: 9156 - DNA, 532 bp, Homo sapiens
acctcgaagatagtacaggtttggtttcagaccgctatagtaaggcaaatatctcaaagcaagtcacacagtttttttttcctagtgcatgtaaaaattatgttcacactatactgtgtgcagtaacactgcttcttaaaaaaagtatatacctaaacaagtaaatattttattagtaaaaaacagtagtgatcatctgagccttcagtaagtcatcagctttttgttggcatagggtcttacatccctgctgatgactgtggacttattcaagggcagtggttgctgaaggctgggatgactgtggcgatttcttaattaaaagaagacaacagtgaagtctgccacgttgattgactcttcctttcatgaaagatttccttgtagcaatgtgatgctgtttgatagcattttacccagagtagaacttctttcaaaactgcagtcagtcctcccagaccctgccgctggcttatcgactgagtttatgtaatattctgaatcctttgttgtcatctcaacagtgctcaca

SEQ ID NO: 9157 - DNA, 221 bp, Homo sapiens; identical to SEQ ID NO: 9155

SEQ ID NO: 9158 - DNA, 652 bp, Homo sapiens
tcctcagtagcataataataattttagctagcttgccatctggggacccttcctaagtggtagataagaaacttaaaataggattgtactttaccatcatatttccccacccagcactgttactggcataaatatgtgagcaagtgactggtgagagagtgatgcctttggcagggtatctgatggtgagatcgactgagaactgagtggaagagaaggcgaagtatcagattgccaaaagggcttttattcttagctcagcccttcacgtatcctgcaaagagctgctcagcaaaaggtgcttattgaattacacctcataacaggcagaatttgaatgctgttcatcacaggagctatggagtgcatagttttatagagagtatctccccgcaggcaagatacatagaacaggtgcagaattacagcatatactcatttcgcctcttgttaaataaaagcaaagacagtctcatgcgatcctgtgtgctgagtagaatatccattatagagcattttcttttatttttgttaatatttttacttgtagatttcccattaaaaaaaaaaaagtatagtcatttttccaaaccactaaaaaggacacttatattaaaaactgtttcagtaaaaaggtttacagccatgcttt

SEQ ID NO: 9159 - DNA, 119 bp, Homo sapiens
ttttgttttgttttgtttttttaactaaaaagtaaagtttaatgttgaaaatgcaaacttggggaagacagaaaagatcacacacaaggctgtcacttcacacttggaaggttgcacag

SEQ ID NO: 9160 - DNA, 420 bp, Homo sapiens
cctgggagtaaatattctgggacaggcacagggggtgtacagggaaagagtctttcctctctgtggcatctgggaggctttaggatgtgggaaagatggtctcctcatctcagttgcccctcattttcaggcagacacgtatgaaatgattacactcccctgaaagatcagcttctacataattcaagatcatcctcaatctctctcatcagagaggaagaaaagccgcatgaattatttacagaacactaagttatttccttttatgagctccaactttgtttttgtctctgcaaactgagattttgtttatccatgaatagtttccccaggggcatgaaaaatatgactcttaaattatgaatgaggttttttgtttcagtccatgttaactaaaacatgcaaaataaactatgtttt

SEQ ID NO: 9161 - DNA, 3569 bp, Homo sapiens
gtaatcccaaaactttgggaggctgaggtgggtggatcacctgaggtcaggagtttgagaccagcctggccaacatggtgaaaccccatctctactaaaaataccaaaattagccaggcatggtggcgggcgcctgtaatcccagctactcgagcccaaggcaggagaatcgcttgaacctgggaggcagaggttgcaatgagccaagatcgcgctactgcactccagcctgggcgatagagcgagactccgtcaaaaaaaaaaaaaaaaaaaaaaggtaataataaaaaaaataaagtaaaggctagagctgcatggaaagaactcttggctcaggtaggacttagagccagggagtaggaagagtggcatgcactctggagtcctatgaggaagcaagatcccacaggatatgggaccataggtgacagggaccagtgaggaaggattgagaccccttgccccatcggcctgccacttttttcattgtttttctcttcccctctccttctctttcttcttttctttaactgggttcttttcgagtattctcaacaacagtctaggggcctggaggtgtggggaggccgcccacggatgcctagtttggcgctctgtgcactgctagcatcttcgtagggatgggtttgggatgggagcggggtgatgctctggttctcagggctggactccgggcttggaggggaactccctcttgcgagtccccagtcctgtgggggctgggcctggaaggggaactgggagatgcggaagtgcacgccgtcgggtcgcatctttcagtgcggtgcgagagggcccagtggcagaggcccagcaaacagcgcttgtcaggcggacctgagttcgagttctgactgtgccatctacgctatgactttggggcaggcgacccaccctctgcgcctcattaacccatgtactgcatggaaaataagcgtctgcctgggttagaagagggctgtgtgtgaagattcaaaggacgaaggggaagagtcctcgctgggcgcccagcacgcggtgagcgcccggccagtggcagcgcgctcgggctggggttgcgctcgggctcggttccgcgcccccggcagctgcgggctttcccagctccggcccgggcccttccgctctccccggcacttacagcggtctctctccacttctcccttctaggaccgcggcggctaggtcacctcctccggacgccgacacgcgctgccctggcaaccgtcaccagggaaacaagcgacgtcacttgcgcgttttcaacgctactctacgggggccgagggggcgccaagagttctgaaagtgacagaggcgctgatggcgcgctgggctggatccaagcgagcacgatctcgagtgcgctggagattttaaatcttctggagtatatttttaaaaaagttttgtggaccaaacgttctgcacagagatgcccattccgctctcctgttggggagttaaaaagcgaacgatctcaccatgaaatttaaagtagccattcagatatatttgaaaaatgtaaaacagtgtggggaaaggccatgttatgatggtgagtgaaggaagcaggacgcaatatagcaatgctaaataaataaagttgtgtttatttcaaactaggcactaaaacaagaccgaaatagaaatattaaaagtggttatatttgggtggtggaatagcagtgctgtgtttttatttttacactttagagaatttttaaaataatgaacatcgtttattttcataaaggaaaatacttgtttttttttttttaaatggcaccttccaatgtaagacactactatatttcagggcaatatgggggtgggaggcaaatttctaggaaagatgattcaagggagatttctttctatctatctatctatctaatctatctatctatctatgatagagtctcgctgtgtcgcccaggctggagtgcagtggtgcgatctcagctcattgcaacctccatttcccaggttcaagcgattctcctgcctcagcctcctgagtagctgggattacaggcacccgccaccacacctggctaatttttttatttttagtggagacggggtttcaccatgttgaccaggctggtcttgaactcctgacctcaggtgatccgcccaccttggcctcctaaagtgccgggattacaggcgtgagccacagctcctgcccaaatatttatccaggacttcataatttgaaaaccttggcagttgtttttctattttttttcctcataaggtgaatgaatacccatcccatagacatgcatacataagatacggcactagactgccatcagcactgcaggtataaacccgaagtttcctgataaaggaaaaatggatctttcccgttggtctccaattgctgcctggtgagctgagggtgggagacgtataatatacaggtggcagcaaagagagacaggataaagagtaggattcaggtagatgtgagcctcaaaggattagggttttttttaaatggtgtgtgtagtggggagtatcattcgtttgcctcatgaccacgatgggactatgtggcataggaaaaggaatagccaggtctacttagagggcttctggaaagcatggatcctagcagaaagccaggttttcattaaaataagaacatgctgtgagaaaattaaggatgcaagagaatttcagaaccgacattctagaatgtatgtattagaaagtttgggaaaggggtaacatttgctccagcaatccaaggattatttttgacgaggatatcatttttgcagtaacccattttttaaaaagcagggatgattttcctctaggtttgttacttttccacggtcaccactaaggctctcatgccattttttttttctgcccaaaattcttttgagaattttctttagtttataagcttgacattttatcatccaagaagctggcgaatccaatctgggtcaccagtatttcctcatgtacagtatacagatgtttgttaattccagcccactttgtttctctagccagaagtatctgtaggacactgccctttgttttttgctttttaatttgaaattatattgagatttttatagaatcacatgcagttgtaaaaaataatagagatcccctgtatacttttccagttctccacaatgatattttgcagaactttagtataatattacaaccaggatattgacatcgatacaacctactcctcttagatttctccaatttaactgtacttttcttttgatttatcacgtgtcagtttgtgtatccatgaccatcaagatatcaaatactagccgggcatggtgactcatgcacgcctataatcccagcattttgggatgctgaggcaggcagatcacttgaggccaggagttcaagaccagcctggtcaacatggcaaaatcctatatctactaaaaataacaaaaattagccaggcatagtggtgcttgcctgtaatcccagctacttgggaggctgaggcatgagaatcgcttgaactcaggaagtggaggttg

SEQ ID NO: 9162 - DNA, 198 bp, Homo sapiens
tgttaagtgaagaagccggtctgaaaaggctacatgctgtataattgcaaactgtataatattctgaaaaaggcaaaattacagagaagtaaaagataccagtgattgtaaatcccttctaaatgaaaaatatcagtggtttccaggggttggtgggaaggaacaatgaacagtaaagcctagggggtttttggggag

SEQ ID NO: 9163 - DNA, 23030 bp, Homo sapiens
taattagcaggtgagctcctggcagggctggggtttcatcttctgggctctctgcaaggtcgtgcccggcacgggccaggaacaatttcataaactcgtcatctagacggcctttgactgacaccatctctccgtgtggaggagccgctggggtgcacggggcaggtgtcgtccgtttcaaaggtaaaataacccagctgcagacctccagaggccgactagagccggggtcagaaaacaggttttccctctcggggacagcgcccaggggaccggcattagaacatcggctgatgtttcatctggtcagggaaccatccagcgcttagtacacctggcgctaatcggcggggattaatctcacaccccgcagctggcggaaagcagcgggaggaggcacctagccctggggttgagatcccagttcccgcgtgcgcaaaccacgcccctgtagattctcgctgctgcgtgttcgcgcgcgtcccggagtgcgcatgcgcagcggcgggggttgttccggctgcctttcactgaggggacccgccagtttctaactcagtggcgtttgccctgattcccggggcctggctttcagcgtagcaattctgccggcgaagaaggtgagcgcagtgctgtgtggcagcagagctccttaggacgaggagcagcgggacgaggaagggcagactggtgaaatcgcaaactgggcgtctgttccggcgccggacccctatttgcaaaggtgggtggcccgtccggagcgggaaaacattccggaagtggagggccgggccagcgtgattgacaagcgggaacccctgtgtggggacgggtaggcctaggaaggttgtgcctgcggtggaactgggcggtgcgcagaagtgggcattaacagcagccgcgtgtctgggtcttagatttggcccagctgtgttgagcttttcatggattatcttacgtagataagacactgcaacagtgagtgagcgcttgtaacccacctgtctcttacggaaactgagccccagcgatgctaactttagcaaggatacagctgggatcctaaacttggcaatcagagcccagagccgataaagttagctgcatgagtctagcttcccccagggcgggaatcgaggcggagcagggtacagtacggaggccaggaatgagtgcacttgaccagattgttgacggaagtgtcataaaaatggacttaaatgctgataagcagctgtttgggttccacacagggtgcgagctcaggatgcacgttggaggggacacagggccagagcaaggtgggaatgcgggtattatgggccaggccatcctccagctggtggagcaccgcagtactgcagtgtgtggccctggcttaacagcagtgcggaaaagcttttttcttggggctgtggtgctttccaggtgtgtgaagttaaaacattttagggccatacggtagatagtacctgccacatagttgtcttggtcagccccggctgccatgacaaaataccataaactgggtggcttagacacagaaatgtgttttctcacagtcccagaggcttgggatgtccaagatcaatgtggggaggacacaactgagcccacaacaatagtctgtactcagtaatgagtgataattggggactgaagaaaatgaacacgttaagaactaatatgttcctgaagtgctttcacaactctaacctcgttttatgagcgtgagctttgctgtcctggtgtgtgccttggcactgggaggtgatggttgtcctccacacagccaacctgaagagggctgaacaagtcactgcaaatgtttttaatagggcttagtgaatccgttatactcagatttatctaaacctctatgatttagcctgtgctgcttctggaataatgagatccataattaccactgatggggaagtgaaataatacttacgtttcttctgtattgtttagtgttgtcattctagagtttggtaaccaagtctgtcttttttatcccacttatcctggtgggaggaaaagtgaggagatagaaagtttcaggtggcttgggggtctggcagatgtggttcaaatcctgagttcaagcacttgctgagtgaccttgggcaagtcatataagtttactgagtctcagtttctttctctataaaatagagcttataaaaataccacacagggtttttgtggggttatctgaaaacggtttgaaaccattaaagaactggccatttaactaataggtattcaagtcatgggacctccgttacccagcctcggaagagaaaccttcacttacagccccgatgtctggctggctactcattcgttcatcagatttttgttgaatgcctatgaggtgtcgaagcacctagttctgagtcctggagccagagaagagcaagacagacaaggttcctctatttatggaacgtatattccagtgaggaagaataaataggttcagatggtgctaagagctatgaataaattaaatacagagtaatgtgattttttaaaagtgacttagagcaagctagggggtgaggagtgggggtggtgtttgaccactgtccagcggccagacagccggagaggcttctctgaggaggtgagccaaagcctggatattgaggaggactccttctccaggccaaggggagcagcaagtgcaaggcccgagctgagtagatgaggctgggagcctgaccagtctcaggctgaccagtgctctgtcttgagaggagctgctggtcagctttttgtcttgggattcagaacgaggagacatgaagactttttacttggcagtgggagctgaagctgaaaggtccaggggctgatgaggccacgtgtaagcgaaagtttgggataagcagaaaccgagtgcgctgagggagtgagattgtggctgtatccggcacctggctgagcaggagagtgaaccccgtgggtgtgtgtttgctggtgacgttcctggagctgtcttgaagtccgagctgccttgcagcttgtagtctgcctctgtttttggctttcccagatagtttcaattcttactctcagtttgtgaacctcccttcagtgaacctcccttcacttatgctggatatctcttgcaaccggatgagcttcactaaagcagagtcatttggacctggattcgaatccctggttttccactttttagctgtgactttgagcaattatttaatttctgtaagcatcagtatccagtagctgtatccttatagtgttgtacagattaaatgagataataaaagcaaaagaccactgtagagtgtttaacacataggaggtactcaaaaatttgttaggtacctttcttcccctttccttcatgtgttaaagctttttcagtacatacccctctctcaggattgaattgtaaatcatgttttttgattacccttcttgtaataattcctctacctctgtagtcatgtttttcttttttcattttttcttgtccccagaatgtctaacaaaacagccaaatatacctctgtgaagacagagggtaaaataatgctagttctgtgagttctctcttcttgtgcaaatccataaactgccaccaatctgtagtcattttaattgcccctaaaccgaagagcatcgtggcaactacctttcccctcgtaaatagagtgacactatcactagtcttattgaggccaaagttataaagatgggctctcgatctactaatattagtaaaatgggtttgggacttactaacatttgtgcttagaagagacagacctggcaaagagcttggagaagtgagttccaaagagagaggtgtgggaaccaggatggaagagtcaggcctccagatagcgtttacttctcctttcttccttgaatcactgtctcagagataattaggttcaggagaggagaaaaaaaaagatgacgtcaacgtggagcagagtttttcttagaccttagcctagcaaggaaagagaaatgcctggtctcagtactgggaagctgttccagccagagccccgtggctgtgaagagagctctcctgtctggaaccaaacagaaagctcataggtctagaggccagaaaagttagtaggtggtggctctgttcggtgctggaaatggaggccaggatgaactaagaagcaaactaaagatacttgtaagataaggacgtgtaggccgggtgcggtggctcacgcctgtaatcccagcacttcgggaggccaaggcgggcggatcacgaggtcaggagatcgagaccatcctggctaacacggtgaaaccccgtctctaccaaaaaaaaaaattagctgggcgtggtggcgggcacctgtagtcccagctactcgggaggctgaggcaggagaatggtgtgaacccgggaggcggagcgtgcagtgagccgagattgcgccactgcactccagcctgggcgacagagtgagactctgtctcgaaaaaaaaaaaaaaaaagatagggacgtgtatgttaacttgcgctatccaaacaacaagctgtgcttatggtcctctgcctgtgcgtcatgattttccaggacttcacaacgggataaagtgaagtagcttcggcttgtgaatgtgcattgcagagacgtgggagaagaaagctgcaaaagtcattataagcaacacccttgatcttaggggtgctggtctgtgagaagagagctctaagccttttgtagaggcattagaaaggtatcggagccacggtgaaatgcaggggagattgggtttaggggctttcctggtctgcattctgctacagccgttaaatgccgctagatggagtgcgtgattctggtatggcctcacgtggacctgctgcgaaggatggagagaacatggtctctgcttcccagaaaaaaggagaaatttggtaataagtgtggagactgctcttaaataatgctccagatttcaagccacttcttcctggaccatgagagagctccctaatgttgtatttatttttcctaggtccatggctaatgaaacacagaaggttggtgccatccattttccttttcccttcacaccctattccatccaggaagacttcatggcagagctgtaccgggttttggaggctggcaagattgggatatttgagagtccaactggcactgtgagtatgaacagtgagagatactgaaaaggacaacttaacagcagccgtactagcttttcctgtttgcctatccagagattttcatagtttgaagttgggcagagtagtctctgtttatctgagtaatagtcacttcctctattaaagtcttttttttttttttttgagacggagtctcgctgtgtcgcccaggccagagtgcagtgggacgatctcggctcactgcaagctccgcctcccgggttcacgccattctcctgcctcagcctcttgagttgctgggactacaggtgcccgccgccacgcccggctaattttttgtagttttaatagagacagggtttcaccgtgttagccaggatgatctcagtcttctgacctcgtgatccgcccgcttcggcctcccaaagtgctaggattacaggcatgagtcaccgtgcccggcctaaagtcttaaacatagctctgtggtctgagaaaaattaggctgaagtcattggtgcctacctattacggtagatgagacggctttcttaccaactcttttccctcccgttccccatccttcaaatataattctaagttttagtctctgctgagtgaaccagtgtgttatgattatgttttgaacataattttgtcttgaacaatatgtcttaatattctgttttttctagttaataattgcccttttaaagttagtttagtttttaatatacctatgccagttcctcccacatcatccagtggcctctcaatatgattttccatacagataactcctgtcttagtcggccaggactgccatagtaaaataccatagactgggtgacttaacaggaatttattttctcaccattctggaggctggaaagttgaagatccagattctggcagggttctggttctggggagggggtctcttcctggcttgcagatggctgcgttcttactgtggagcaagaaaagacgaggaggagaaaaacaaatctttggtgtctctttctcttttatgaggacaagggctgctcccttatggctgctccgttatgacctcctttacccttgaaggccagatctgtagtagagtcacatggcggggttaggatttcaacatatgtttgtttgttaagatgggcagtctcactatgtggcccaggctggtctcgaactcaagcgatcctcccctctcagcctcccaagtacctggtggctggcaagatccaagattactggtgcacaccaccatacacagcttcttttgttttgtttttgttctttaaaaacatttttttaacatgcattttggtggggatacaattcagtccacagcagtgaccaattccatttttaccttggagccctcctggaatcctccatcctttccctgtcatttgaattagttgctcctcagactgacttgacagatttcagcatgagtgttaatggggacagacggccgcacccacaccacatcagggtatacgtccgtttggaggctttcctcaaacgtctggcagccctggactgcctgtgtatgctgaagaacagggcacagaaaggctgagtctgcagggcactggctgtggctgccaggctgggctcctttgttgggggcctccagttgccagcacatctgtgggattttccctagagtcttcagtctctccagagcaggtgcctctgagccctggcccagcaggtacagacgctgaagcccaatagccggtcttccgggaggtggtctggggaaggggatccaggtggagagtccccctcagtgcctgctttcagcctggccctcctccccctccctcttgcctcctcaatctgccggttgcctccagggctctcctagctcagcttccacttagagcccacttcctgtcttctgcaaggagcaggagcagggattgcaacctgagaatctaattgttcttaaaaagaatttcaacccgtccctttgttttcagtggcctgctgtgttcctaccacttcctgagtctttctgagaatgagtgggggagatctctggggacacttgggcttgagtgtctctgccgaaatcacttccatgtctctgccttctttccctctctcctaaaacatattactccttccactttctttttgtgggtgtaagcctccatattactttggttaattttagtgtgctttggaacacagatgagtgcatgttcattctgccttgtttaattttagagacagggtgttgctctgttgcccagggccgagtgcagtgttaagatcatggtttactgcagcctcaaccttctggcaacaagtgatcttcccacgtcagcctcctgagcagctgggactacaggtgtgcaccatcacacctagctaattttttaatttgtagaaatgagatctcactatgctgctcaggccggtggtcttaaacccctaggctcaagcaatcctccctccttggcctcccatagtgctgagattacaggcatgagccactgtacctgacccctttcaccttgtttagcctgacaacccatcttctccctctcaggtctttccatctcagtcttctgcactccaggcttctgcgtcttcttcctctgctcagcctttaattgtcgatgtttctggttctatagcttcatcttcttgtgtgcagtctctgtgaatgtaccctgtggctttattacctttgacattcttctgtcttctaaatcatctcctgaatagagtgttttctcctgtcctgggtgtcccgcagcccatagaagcagccatgctgtgggacaccctgagtggggtttgtgttacctgttgtgcctaccatgcccttccccgccgtggatgcacaggtgccccaccttagctgccccagatgctgtttatccttgatagtcaccttttaagccttatacaggtctatcaagttgagtcaccattaccacttggtgtgtgctgtgccttgtgtaatactgcagttccgggagtcatccaacctggaatgcatgctttgcggggatctatgatgccctcgaattgtatgttacatgtgaacctgtgagcattttctaggggctctgcacctttgtgtcctcagctctgagccccatgcttgctgcaaccagcaggtgttcagagtgaatgaatttgcttatcttggcataaatcatgtaactgttgatgataccccaggaaggtgagcctttggttataaatccttttaacattttccagtctaaaagttttgtggtcttattacacgatgtagaaaacagtgggcctcagttattcttttgctgttgtgccggagtataccacggttgtttttgaaagataactttgaccatacccttaggaacttcctcagctcactttcaaatggagggcactggctttctaaccattgtgtctcccagcccagtgacagctgaagctgactgcttccgatatcacagacagcacagaagagccgccctccaggtgctgctgggaaatgctgcctggaactctttgccatttactttctatcaaaagctgagggaaatggtacatatggggctttcctaaaaatatgggatccatccatttgtcaacaatgtcattctatcctatcccagggcctttcaagattttgatgaaaactaatagatcccatattccagaataatgctattaataattttattattattacttaatgatagcaaaaagttagctaactccaaccgctcacttgttatttgccaggtaatcctctaatccagaggatttggccttttgtgtgtgttaatgtcctgcttgcaccagctctatgaggaaggtgccgctgttgtcatttccatttctgcactcgtggaaacaagcgtagtgaggccagcctgagccacagagctgcaggtgggggagacagctggaaccctggcacctggctgtggagtttgagactctgactcctgcgccgcgctgctgccccaaccgtagtcatacgaggtgtttcaccccgccctggatactctgagatcccctctgggttcagcaggctcagagagctgactgcctggagcagaaggcatggggtcctccagagactcccctgagctgagttcccctgtggacaccagggccgcctccttgtggcgctccctgaagggtcctctctggaagaactgtattggttccctggggctgctagaggaaagcttcacaaactggggcttaaacaacagaaactgacatcccacagcgctggaggctggagtccgagatcaaggtgtcagcatgcttggtcccttctgagggtcgtgagggaaagatctcttcaggcccctttccttggcttataggtggcgtgttctccttgggtatcatcacatcgcctgccttctgtgcatgtctgcatccacgtgtcccctttccaataaggatattagccctttaggctgggtcccgtcctagtagtctcatcttaactaattacatttgcgacagtcctatttccagatcaggccacattctgagatgctgggggttaggatttcaacacaggaatttggaggaatacaactcaatcaggcttatggaaaattctggtcttaagtcaagggtagtgttctccagtctgtatatggaggcgcacacctatggtcccagccacttgggaggctgaggccagagaactgtgtgagcccaggagttccataccagcctgggcaacatagcaagacctcctctcaaaaacagacagagtggtgtcttccagagtgattagtttgcttaaaaaaaaaaaaacaaaacaaaacacaaaccgtaagcactggcgctcatgactgatcatcctgtatccacgcacgagctgcacgaaggccgcgcggtcactctggctccctgttggcgagtacctgggatttcttgctcagcattttggggccttaattcttttaggggactttttgtctaatgtctccccttcttctaattatgtgcgatatttacatagaatctgataaactgcttcaaatttgttttcagaacagtgagctggataattaaagaagctttttcctgcttcttgggcccagtttccatttctttcttttttctgtttttcctggctattctagtgctaatttccttcctttcctttcctaggctggtcttagagcatcctctcctatgtacagccagaccttctttcaagcttttattaaaatggggaaaggtcatttgggaggctttgttgttttcctgtttctaaagatcatttttcttcctgcaggggaagtccttaagtcttatttgtggggccctctcttggctccgtgactttgaacagaagaagcgtgaagaagaggcacgactccttgaaactggaactggccccttacatgatgagaaagatgaatccctgtgtctgtcttcttcctgcgaaggggctgcaggcaccccgaggcctgctggagaaccggcctgggttactcagtttgtgcagaagaaagaagagagggacctggtggaccgactaaaggtgagacctggggtatccggaagtgggagtactggaggaaacagggcttcagcgattgttctggggcgattccgagactcaggcagtgcatgctcccctgccgttgccgtgcctctcagctcttccctcagctccttgggtctatggtgctgccgctgtgctgtcttttttgagctggaggtcagcaggccttctccacataaggaactgttggtgcccatttattactcacctgggaaaggacctgatcattgccattggcagcatggttcaatggctgcaaatggatctgatggagagcgtgtggctttgggaggagtgtgccgccttccgcagtgagcagcgaggctgggaccggcagggatgaggtcccgggaggggatgcggcagcccttgagtgctggccggggaaggagagatgcccccagtgaggaggcgccgggctgagtggcccagactccttaggagaggcctggttttgggcttccttggtgattttccttcatgtctgcctcctgtaggcggagcaggccaggaggaagcagcgagaagaacgcctgcagcagctgcagcacagggtgcagctcaagtatgcagccaagcgcctggtgagcctcatttcttggggggcaggattatgtccaggcagggttgctctgcttggaggctcatgggtgcgtggtcagggccttggtctcccctccgtgaccctcactggctatgtgctcccgtacagaagctgggctgtgagtggttgaggcgtggatcctaggagtcgacctctctccagccaggcagccaggcctatgtgaatggggcgtggtgtgctttgtctctggcatgtggggaggtgggtactggtgctgagacttcttcctccctcaccacctccactacccctgtccagaggcaggaagaagaagaaagagagaatctcctccgcctcagcagggagatgctagagacaggcccggaggctgagcggctggagcagctggagtctggggaggaggagctggtcctcgccgaatacgagagtgatgaggagaaaaaggtggcgagcaggtgagacagaggcggtagcactaccctgccccaggccaggggacacccttgaagacagctctttccctcatgccacagatgccatgaagcacctggcaagaggcatggtggcctctgccctctgctctaagccgggtccttcctagggtccatgagtgccagtggcagtgaggacagtcaccggcctggcctgtgtcctctcagctgtcctcacggcagctcaggcagggcaggaacatttgtgtctgcgccttatacacaaggaggctgcagccccacaaggagagactccttggctgaggccacaagcctcggcagtggagagctgggctagaactcagctggcctggctctagatctcaggctctgaggcagctgactgcactgggtaacctgtgaggtgccaaccatcaaggcgtccttagcctgagctttccttctcccataaagcctctgttggtccagactcaaggtttccacttgatgagccatgagctgctgggtgacttagccctgagcaggccacccaggccatttcgggcccacaggatccctggtcacagccctgttcccattcacactggaacctcaccaccatccctgagtgtctgctctgagtatggcactgtccagatgctgtggacatagaagggaagaagacatggaggggacagttaatagacatgaaaacaaatagcacctatgtgaagtcagcatgtttgcctacaaggaaaacaaaatggtgatgtggatggggtggggggctgcacctgatgatgagtcccgtgtgtcctgtgacatcctggccaccacatctgtcggagggtaactgcaagaccagagaccctccatggatattcctgaaggttcatccccggccttcacagtctgtctgcagggcgccttctgatgccacctccagccgccatccaccagacgccagcttccccgctgccctgaacttcctccagcgcaccaggccttcctctgtcctgtctgaggatttgctcatgcaacgtgctgtggccaaacaccctgccctcctcccttggcagatgtcttcctctcctttaaggcctggctcaggtgtcgtcttggtggcttcgggtgtcagctgctctgttttgctcatgcacctgcttgtgcttctgttgttgcctcctctccctggctgggctcgagctgcttcagggcaggaaccacgtctttatagtttgatgttcccagagctgacccagtgtttggcataggggtgtgctcaataaaatcgagttgacatgaatgagcagatgctgcctcgttgcagtctggtagtgtaattccaggctgcgcatgtgaacttcgacttctgcccctgcccagggcagagaccaccgtgttgctttatgcctcgctggtgagagggggtcataaacagtttgtgctccatgaacccttcctgcccgcctccgaggtcatgtttctgctccctctcttctcccttagagcccgtggggacaaggcagagaacttgagtggagatggaggtggtgaatattaaaggaacaaagtgctccttcaggtctgggcaagagccatggatcctgtaggtcagcttctggggcttcccatgccctcacgtttcaggagataacgtgagcctcggaggacctgagttctgaatagaaaatttttgctcttcatttcttcacacacccagcctctcagtgagctcctgctggctttgtccagcatgcgacataagattgaatccaagccttttaagatagagccgcctgctctttagtgaccatgaagccaagcctgtaataattactcttctgatagcccaagacaattgtattctgttttgttagaaaggaatttcgaggtgaacaaaaatgttttctttttatgtgatgttgccataggtagcgtgtgcctgtcagatggttttgtgttttctgaggagcatagactagtagagctagctcagcttcaggccatgggatgcagggctggcttccctgccaacgcctggcgctgatggattcttcccgcattgctgggaagggcagactgaggcactgacacaagaagagttgtagctggtcataagtgacagcatcctctgttcactcgattggtcagttgtagcttcatccaggagatggtcatggggttcctgctgcataccaagctctaggtgaggccacggggactcagcagaaacaaggccgacctgggtcctcccttgtggacatgacagtctggggagatagaccgagaggaagcgattttgaatgagatgggtgtgaagagcaggggccatgaatctgtgtcagagcagccaggcctaccagggaaggtcaaagaaggcttcctggaggaggtgatgtttctgctgctatctcagagttgactgggagctggtgaggggagacaacattccaggcacagaacatccgaaggcctgagatgatgaagagcaaatatccgccctggggcctcagaggggtccagcttgctggagggagggcagagaggagagcagcctgccatgagtcccgaggcttccgactcaagacttgggttgggggtgctgagcccctttctcctttttacatttccctacccacagacctgagcggccatgggaggttggggttggcatttgcctgggggagtttctgagcgagcagcacctgctaccttggtggaacccattgctgggaatggccagggctcagcaccagcgctcagcagatgctcagtgcgttttgctgagtttgctgagggaagactgttttctgttctctctcacacacacagagtggatgaggatgaggatgacctggaggaagaacacataactaaggtaacacaagtgtcctcagctggtgctgtgctgggggtataggctgggctgtgcacccctggggaggaggctggagtcacttggctacttctcaccctcctctccacaaaggaggagcttccagcacttggactccgttgcttcttgcacacaaccctggtcctaagttgctcccttggccagctgcagtggaccctggagtcctctcctggggtcagggcctggggagtcctctcctggggagacctttcctgggaacagggacctgaggagacctctcttgagtttggggcctggggagacatctcctgggttcggggcctggggagacctctcctgggggcagggccatgcttgccaccccagggcatcgaggaacagctgttctgggctgaaatctgggtgttttctgtccctgctgggtggtacgggtaggacagacatgagtcccctgccctttgggtctctcatggtgtgcttctccctttgtctgtgttcccatttgcatggagggctatgggttgtgtatggtctgacatttcccatttggtttcattgatttatgacttgttttctgtcggaagtaggtattttctttgtattttctttttttctcccttcactcttgccttagaggagtagagagagggtattctggtcagccttcctttttccctttggggatgtgtgtgacacactccctcccctcccaccaacaacccaccctccccaagtggggaccctttgccacgggagatggtcacccatgtccaaagattggccaaccccccaaaagcggttgattagaggctggatatgactcgtggaaggagctgcctttggggcattcccttgaacttctggagctgtgggtgacttgggaatccctgggtccctcgatagatgcctgacatgggacattgctgtcctgcctcggctttgtgcattgggagccactccctttccctcagcctctcaggccctggcgtgccttgatgttagagaatgctgtgggatgttttggttctctctttgaagcgcctttctttctctctgctagatttattactgtagtcggacacactcccagctggcccagtttgtgcatgaggtgaagaagagcccctttggcaaggatgttcggctggtctcccttggctcccggcaggtaaacagtagccagtatttccaccaggggccatcctgctcctttcgccacaactttgtcctgctcgtccaggccttgggagacgctgggtctgtgacaggctgaaccgtgtgaggagcagccccctccctgacctggccggcccagcactggaaggcaaaggagaggtggcggggcaggtccacgtgtgttggtaggatgtcatttagctggcaccatctttttgcctctttctttctcctttgctgcagaacctttgtgtaaatgaagacgtgaaaagcctaggttctgtgcagcttatcaacgaccgctgtgtggacatgcagagaagcaggcacggtagccactgggaccatggtgtagccgcaggtggtctggagagagtgaggcaggggtggcagtgactgaagaccattaagtgtctttcatagaaagaatggcagaggagaccccagttccttcctgagtcccctctccttgggaaaaagtgttcctactctctgggtcagtgtctggtccgaatccttggcttggagatgattttacgggctctttctggagaacagaagtaaaaccttacagtgttccgatgagaccacagtaggcagtacttgggagggtcttatagaccctaccccatggaagtgggtctcaacattacacaaccccctcttgggcccgtggacagttgctgtcctctctgttttctctctttgtgcctgtgccaccctcagagaagaagaaaggagctgaggaggagaagccaaagaggaggaggcaggagaagcaggcagcctgccccttctacaaccacgagcagatgggccttctccgggatgaggccctggcagaggtgaaggacatggagcagctgctggcccttgggaaggaggcccgggcctgtccctattacgggagccgccttgccatccctgcagcccaggtgagggccctgcagggccagaaagccgctcttgactctcactgtggtctaggccatgaggggggtcctcatcacactgtagtttgggggatgccccccaccgtggtcaggttgatggcaccttaacccattctctcctgatgtgtgagttggaggaggcgcgtgggatcccttggggtctccaggcagcagggccagttggcattactggggatggtatttaggagccaggaaagccggtgcattcctagtgaaaccacagggagaggggggatgccaggagctgagaagagtgtgctgcatacatctatttacaaatggctttccaagtgatgctcccaacttccatgcctatgatgtgatggaggatgtcagtgatagaaccattcagttttccagtttttcctttttgtaatatcagtactcttaactggaaagctttccctaacttacacctacctgcagcacgtgagaatactgtcttctctgcctcaacttctcttgatttttaaacagaaggaagaactgctaatgtagcagatcaaaagtagtatctcactgttatttggtgggtgcagtttcactatttccttgctacttctttaatttgagtgactttggaaacgggatatcactagtggaaaattctgtataatccagaaaaaaatgtaaggttttaaaagattcagggaactaagtaaccatttgcacagcagctaaatgctcaccagcatacctgctgagctgtgtgggcactggcagagaaactgaggaaagctgccaggccccatggtgtcccaggccttccctcccgtctgtttgcctttagagcaagattagtgctataggcatttatacacaaataccataatatggcccaaaatctttacaatttttgaatttttaaagtactttgaccatattttgcttttatgttaatagtattccagtgaaattctgtgcatggggacactggagcccagaaaagttaagtgactcatattttctcaccaagcgtgggtgatggagccattcagttttccgatattttattttttatatgagtattcctttaactggaaactttcctaacaacaaacacctaaagatgtgcagagttgcttttatttttgttaccccagctccacgccttaaccctcactttgaaataggatgtatcaaccctattttgcagatgaggaaagcaagagtcagagaggttagacaactcttccagagtcacacagctggggagtagcagctccaggagtagaagctggggccgcttcctggtgcaccgatggtctgcaggtgtttgtggaaactcgggggcctccggggcgaccttgaggacatggacaaggctaagcaggggttcccttcacccagccctgcccttggtttactcaggagtcagaccagccctagtttcctgtgtttcatgtattggcttttcatgtgaaactcgaggagagcttgtccgttgccacaagctgtttttcgaatgtctctacacagtccaggcaggaaatagaagcactcacatcaggagctcagtgtcaggcaggcaaggctcctgcaggggagccccgccctgctcaggtggcctcatctcccctcccagctggtggtgctgccctatcagatgctgctgcatgcggccactcggcaggccgcgggcatccggctgcaggaccaggtggtgatcatcgacgaggcgcacaacctgatcgacaccatcacgggcatgcacagcgtggaggtcagcggctcccaggtgtgtgggcctcccctccccgggccagggcctgctgtgacgtaaagggacttggatggttcctccagacacctgggccaagagttcctccggaggtggggcttgatagagggtgcacgagtcaaggcggtgacctcatcggaggctgaccatggctttccagtgcatcgggggaccccgctatgacagagtgcctcatttccctgcacctcatctgcccccatgctcctgagtccctccagccctggatgccagcagccagttctgtaagccagggagatggcatgtgtgaggcagaagtcccctcaggattggattttgtcattactgaagttgtctggaggggactgaattgaggaatgctcaagatcagcgcaggctcctcctgctgccctatcatgcgccatgcatggcaccaggtgtctctggtcttcacgctgactctgccatgggtgtggtgttcctgttttacattggaaacttggagattcaaagatggtcaagctctgtcctgaggtcatgcagctcatgagtgtggagctggggtgtgcccactggtttctgactgtgaaaacccccacgacatcccaccagctctactgacctgtgcctgggctgaattgaggctgggatgtgatggtggccttgaaccatcactctttgtagactccaggtcttttcccaacccggtggaaacttagcagggagattccatacttgaggaattcagcctcttgctttttctctgacccacagtggacactggaggaaaacttcccttccttcccttttctcttagctcccaccagcctaagggctgtggaaacccgtaccttttgtctgcagccagccccctctcctccctttggtggcttcctgtgtgtccagggccagcatcttctaggtgaatctaagatgtcagtaccttagccctcagctgcttgctcagagcctggtttgtgttctttccccagctctgccaggcccattcccagctgctgcagtacgtggagcgatacgggtgagatgtgaccctctgaggtagtgggacagtcccttggtggccccctgcgtgggcctctgagaggcaggcagcactttggttcccacctctggcccgggctgtggcggggtggagctgcatgccattcatgtcctaggcacatcatggtgtgtgctgcacacagacctggaaggctggggactgaccgctggctctgaggcctggggccgtggccagcctgctctctgggaaaggatttgtagcttgtgacccagtttgagaggcaccgggcagcaaggcttccactggggtgggcggggcgagtcgccatcagggcaccaccacttaatgtccgttggcttcttctcaggaagcgtttgaaggccaagaacctgatgtacctgaagcagatcctgtatttgctggagaaattcgtggctgtgctagggggtgagagcctcgtccccctgctgaccccgggcctgcaaaactcgctgggctgctttttccttggatgcccatcaggacacctcagttctctgtgtttttaagaagggtcggccgggtgcggtggctcacgcctgtaatcccagcacttgggaggccgaggcaggtggttcacctgaggttaggagttttgagaccagcctggccaacatggtgaaatcccatctctactaaaaatacaaaaaaattagctgggagtgttgccgtggcctgtagtcccagctgctccagaggctgagacaagagaattgcttgctcaaacccgggaggcggaggttgcagtgagccgagattgtgccactgcagtccagtctgggcgacagagtgagaatcagtctcaaaaaaaaaaaaaaaaaaaaaaaagaagggtcttggtcattgatttagaaaattcttgttctttgtagcttagttgagttgtctgacttgagctttatttagacccatgggttctttgcccatgttctgaggactttttatttcaggccctgctctggggggatattaaggatacagcatcacatagacacacggtgtttccgtgataggcatagttctgtgggttgttcgaagcacttgcatatgcggttttgtgtgccctgtgagaacgcagtgctggtatttgaatccttgttgatagacgcataaactagagctcggagcaagggctgctcccagcacgggagcctgggatcttctgactccagctcccacgcctctttgcatgaccctgtcacgtccccttcttttatgatggggcacccccttggaaggcgtctgtggaagtggaagctgcagaaagcctgtgggagctcctggcgggagctggtctcgtgttgctgctctgagccaccagctctgctttgcctcaggctcaccagtggcctgggcagctcctctgtgctccggtgccctgcataccttggtctggctgctgtgtcccggcctcctggagaaggggtgaaaaacatgaacttacagggctttgggttccacgtgcaagcacgtgagtcagacatgggaggctcctggacccacctgccctctcagtgggtccgttgcatgctataaacagtgaaaagcaaaacaaagccatttaaatacagatgctcttcttacttgatgtgcagtgtggagggagagaagatagggaagggttgggggtcctgagaaccagcattgtgacctatttccattctcttttttagggaacattaagcaaaatcccaatacacagagtctgtcacagacaggtaagagagttgccctcagagggcccagagctgatctgagccacttccgagcttaaccctgggactgaaacctgaggcttagggtgaagctcccaaggcccttcatgtgtttgttctcagggacggagctgaagaccatcaacgactttctcttccagagccagatcgacaacatcaacctgttcaaggtagaggtttccacctttccacattccacatccaatttccttcctgtcaccacctgtgggtaaagtactatgttaagactgtagaaggaagaaaaagcaaaacagatgtgtaattacttaacccttaacgcaacatgcctgtgagacaaaagtcatcttcttttagagtgaaggccacagggatgagggatgggtgagaaagggacctttcttggtgccccatagaacagatagagactccaggtccttgctctctcactccgtcttctggcacagtctccctcaggcttatggacaggaataggacgttgatttgttctgtgcaacccctgtcacgtcttcccacttgggccttgggtctggttgcagcctcagacctctgctcactccaggtctgtgtacccagcgctccccagatgaaacacggccactgccgcctgaaccccaagctcgtaactcaaatcagcaacagtgactgcccccgggtacagggttctgcctctgttgtaggcggcatgccatgtgctgtgctctgagctaggatatccttttgccccagcaaggaaagcaaacaggcccgtggaggtgacttcaggagggtggcgagcacaggcttcccacaagtgagccaatagcaagtggcagagacagcgtccaaacctggctgcactgacttggggccccacattcttcccatcctgcctgccttttttttcttaaaaccagcttttcccctgaattacacatttgggtcactgtcactgccgccatccctgccagacaggctggatccaggtcatccttgatgcctttctccccttgtctcccacatgcctgtgacagccgccaggcctgacagcctgagacagtcctgccgtccctgcgcttctcccacagctgggacatgggtgcaggcactccttctctcgccttccctttgccctccttgctttccttctcccctcttcttcccatgggtctcgggtctcatcactcaccattgagggaatcctcatcgaaggacgtcgctctttttagaaaccggtttaaaggctccaaactcctcatctctgcatcccaagctaagatctggcaccaaaccacacacattggatgcaccgactgagtggcactgccccagcccctgagcaggtcccagccatcatctcctctgtggctttgctcatagaagttccttttttttttttaactctttgtcacctggaaggaaagccaaggggaactggattttactgagcactcttagacttgagagagacatttggaaagagggtctccaccctgaggaggacactgcgttgtgggcaggggcagtagaggagggggtggcctcggagaggagatgacaaggttggtggcaaggaggctccaggtgcctcagaaggtagcactgcgttgtgctgcctgggtggtagaagtggtgttttttgttttgtttttaagattatagcttgctcagtttgcactcatgcctacagctgggcttggtttttgcaggtgcagcgatactgtgagaagagcatgatcagcagaaag

SEQ ID NO: 9164 - DNA, 30420 bp, Homo sapiens
ctgaggccacccgccagtttcaaattcagtggcgtttgccctgattcccggggcctggctttcagcgtagcaattctgccggcgaagaaggtgagcgcagtgctgtgtggcagcagaggtccttaggacgaggaacagcgggacgaggaagggcagactggtgaaatcgcaaactgggcgtctgttccggcaccggacccctgtttgcaaaggtgggtggcccgtccggagcggaaaaacattccggaagtggagggccgggccagcgtgattgacaagcgggaacccctgtgtggggacggggccggcctaggaaggttgtgcctgcggtggaacggcgcggtgcgcaggagtcggcattaacagcagccgcgtgtctgggtcttagatttggcctagctgtgttgagcttttcatggattatgttacgtagataagacactgcaacagtgagtgagcgcttgtaacccacctgtctcttacagaaactgagccccagcgatactaactttagcaaggatacagctgggatcctaaacttggcgatcagagcccagagccgataaagttagctgcgtgagtctagcttcccccggggcgggaatcgaggcggagcagggtacagtacggaggccagggatgagtgcagttgaccagattgttgacggaagtgtcataaaagtggacttaaatgttgataagcagctggttgggttccacacaggttgcgagctcaggatgcacgttggaggggacacagggccagagcaaggtgggaatgcgggtattatgggccaggccatcctccagctggtggagcaccgcagcactgcagtgtgtggccctggcttaacagcagtgcggaaaagcttttctcttggggctgtggtgctttccaggtgtgtgaagttaaaacattttagggccatacggtaggtagtacctgccacatagttgtcttggtcagccccggctgccgtgacaaaataccataaactgggtggcttagacacagaaatgtgttttctcacagtcccagaggcttgggatgtccaagatcaatgtggggaggacacaactgagcccacaacaatagtctgtactcggtaatgagtgataattggggactgaagaaaatgaacacgttaagaactaatatgttcctgaagtgctttcacaactctaacctcgttttatgagcgtgagctttgctgtcctggtgtgtgccttggcactgggaggtgatggttgtcctccacacagccaacctgaagagggctgaacaagtcgctgcaaatgtttttaatagggcttagtgaatccgttatactcagatttatctaaacctctatgatttagcctgtgctgcttctggaataatgagatccataattaccactgatggggaagtgaaataatacttaacgtttcttctgtattgtttagtgttgtcattctagagtttggtcaccaaatctgtcttttttatcccacttaccctggtgggaggaaaagtgaggagatagaaagtttcaggtggcttgggggtctggcagatgtggttcaaatcctgagttcaagcacttgctgagtgaccttgggcaagtcatataagtttactgagtctcagtttctttctctataaaatagagcttataaaaataccacacagggtttttgtggggttatctgaaaacggtttgaaaccattaaagaactggccatttaactaataggtattcaagtcatgggacctccgttacccagcctcggaagagaaacctttacttacagccccgatgtctggctggctcctcattcattcatcagatttttgttgaatgcctatgaggtgttgaagcacctagttctgagtcctggagccagagaagagcaagacagacaaggttcctctatttatggaatgtatattccagtgaggaagaataaataggttcagatggtgctaagagctatgaataaattaaatacagagtaatgtgatttttaaaaagtgacttagagcaagctagggggtgaggagtgggggtggtgtttgaccactgtccagcggccagacagccggagaggcttctctgaggaggtgagccaaagcctggatattgaggaggactccttctccaggccaaggggagcagcaagtgcaaggcccgagctgagtagatgaggctgggagccagaccagtcttaggctgaccagtgctctgtcttgagaggagctgctggtcagctttttgtcttgggattcagaacgaggagacataaagactttttacttggcagtgggagctgaagctgaaaggtccaggggctgatgaggccacgtgtaagcgaaagtttgggataagcagaaaccgagtgcgctgagggagtgagattgtggctgtatccggcgcctggctgagcaggagagtgaaccccgtgggtgtgtgtttgctggtgacgttcctggagctgtcttgaagtccgagctgccttgcagctctagtctgcttctgtttttggctttcccagatagtttcaattcttactctcagtttgtgaacctcccttcagtgaacctccctttacttatgctggatatctcttgcgactggatgagcttcactaaagcacagtcatttggatctggattcgaatccctggttttccactttttagctgtgagtttgagcaattatttaatttctgtaagcatcagtatccagtagctgtatccttatagtgttgtacagattaaatgagataataaaagcaaaagaccactgtagagtgtttaacacataggaggtactcaaaaatttgttaggtacctttcctcccctttccttcatgtgttaaagctttttcagtacatacccctctctcaggattgaattgtaagtcatattttttaattacccttcttgtaataattcctctacctctgtagtcatgtttttcttttttcattttttcttgtccccagaatgtctaacaaaacagccaaatatacctctgtaaagacagagggtaaaataatgctagttctgtgagttctctcttcttgtgcaaatccataaactgccaccaatctgtagtcattttaattgcccctaaaccgaagagcatcatggcaactacctttcccctcgtagagtgacactatcactagtcttactgaggccaaagttataaagatgggctctcgatctactaatattagtaaaatgggtttgggacttactaacatttgtgcttagaagagacagacctggcaaagagcttggagaagtgagttccaaagagagaggtgtgggaaccaggatggaagagtcaggcctccagatagcgtttacttctcctttcttccttgaatcactgtctcagagataattaggttcagaagaggaggaaaaaaaagatgacgtcaacatggagcagagtttttcttagaccttagcctagcaaggaaagagaaatgcctggtctcagtgctgggaagctgtttcagccagagccccgtggctgtgaagagagctctcctgtctggagccaaacagaaagctcataggtcttgaggccagaaaagttagtaggtggcggctctggtcggtgctggaaatggaggccaggatgaactaagaagcaaactaaagatacttgtaatataaggacgtgtaggctgggtgcggtggctcacgcctgtaatcccagcacttcgggaggccaaggcgggcggatcacgaggtcaggagatcgagaccatcctggctaacacggtgaaaccccgtctctaccaaaaaaaaaaaaaaaaaaaaattagccggccgtggtggcgggcgcctgtagtcccagctactcgggaggctgaggcaggagaatggtgtgaacccgggaggcgagcttgcagtgagccgagatcgcgccactgcactccagcctgggtgacagagtgagactctgtctgggaaaaaaaaaaaaaaaaaaaaaagataaggacgtgtatgttaacttgcgctatccaaacaagctgtgcttatggtcctctgcctgtgcgtcatgattttccaggacttcacaacgggataaagtgaagtagcttcggcttgtgaatgtgcattgcagagacgtgggagaagaaagctgcaaaagtcattatgagcaacacccttgatcttaggggtgctggtctttgagaagagagctctaagccttttgtagaggcattagaaaggtatcggcgccacggtgaaatgcaggggagattgggtttaggggctttcctggtctgcattctgctacagccgttaaatgccgctagatggagtgcgtgattctggtatggcctcatgtggacctgcgaaggatggagagaacatggtctctgcttcccagaaaaaaaggagaaatttggtaacaagtgtggagactgctcttaaataatgctccagatttcaagccacttcttcctggaccatgagagagctccctaatgttgtatttatttttcctaggtccatggctaatgaaacacagaaggttggtgccatccattttccttttcccttcacaccctattccatccaggaagacttcatggcagagctgtaccgggttttggaggctggcaagattgggatatttgagagtccaactggcactgtgagtatgaacagtgagagatactgaaaaggacaacttaacggcagctgtgctagcttttcctgtttgcccatccagagattttcatagtttgaagttgggcagagtagtctctctcagtttatctttctgagtaatagtcgcttcctctattaaaatcttttttttttttttttttttttttttgagacggagtctcgctgtgtcgcccaggccggagtgcagtgggacgatctcggctcactgcaagctccgcctcccgggttcacgtcattctcctgcctcagcctcctgagttgctgggactacgggtgcccgccgccacgcccggctaattttttgtagttttaatagagacagggtttcaccatgttagccaggatgatctcagtctcctgacctcgtgatccgcccacttcggcctcccaaagtgctaggattacaggcatgagccaccgtgcctaaagtcttaaacatagctctgtggtctgagaaaaattaggctgaagtcattggtgcctacctattacggtagatgagatggctttcttaccaactcttttccctccggttccccatccttcaaatataattctaagttttagtctctgctgagtgaaccagtgcgttatgattatgttttgaacataattttgtcttgaacaatatgtcttaatattctgttttctctagttaataattgcccttttaaagttagtttagtttttaatatacctatgccagttcctcccacatcatccagtggcctctcaatatgattttccatacagataactcctgtcttagtcggccaggactgccatagtaaaataccatagactgggtgacttaacaggaatttattttctcaccattctggaggctggaaagttgaagatccagattctggcagggttctggttctggggagggggtctcttcctggcttgcagatggctgcgttcttactgtggagcaagaaaagaggaggaggagaaaaacaaatctttggtgtctctttctcttttatgaggacaagggctgctcccttatggctgctcctttatgacctcctttacccttgaaggccagatctgtagtacagtcacatggcggggttaggatttcaacatatgtttgtttgttaagatgggcagtctcactatgtggcccaggctggtctcgaactcaagcgatcttcccctctcagcctcccaagtacctggtggctggcaagatccaagattactggtgcacaccaccatacacagcttcttttgtttggtttttgttctttaaaaacttttttttaacatgcattttggtggggatacaattcagtccacagcagtgaccaattccatttttaccttggagccctcctggaatcctccatcctttccctgtcatttgaattagttgctcctcagactgacttgacagatttcagcatgagtgttagtggggacagacggccgcacccacaccacatcagggtatatgtccgtttggaggctttcctcaaacgtctggcagccctggactgcctgtgtatgctgaagaagagggcacagaaaggctgagtctgcagggcaggctggctgtggctgccaggctgggctcctttgttgggggcctccagttgccagcacatctgtgggattttccctagagtcttcggtctctccagagcaggtgcctctgagctctggcccagcaggtacagacgctgaagcccaatagccggtcttccgggaggtggtctggggaaggggatccaggtggagagtccccctcagtgcctgctttcagcctgaccctcctctccctccctcttgcctcctcaatctgccagttgcctccagggctctcctagctcagcttccacttagagcccacttcctgtgttctgcaaggagcaggagcagggattgcaacctgggaatctaattgttcttaaacagaatttcaacccgtccctttgttttcagtggcctgctgtgttcctaccacttcctgagtctttctgagaatgagtgggggagatctctggggacacttgggcttgagtgtctctgccgaatcacttccatgtctctgccttctttccctctctcctaaaacatattactccttccactttctttgtttttgtgggtgtaagcctccatattactttggttaattttagtgtgctttggaacacagatgagtgcatgttcattctgccttgtttaattttagagacagggtgtcgctctgttgcccagggccgagtgcagtgttaagatcatggttcactgcagcctcgaccttctggcatcaagtgatcttcccacgtcagcctcctgagcagctgggactacaggtgtgcgccatcacacctaactaattttttaatttgtagaaatgagatctcactatgctgctcaggccggtggtcttaaacccctaggctcaagcaatcctccctccttggcctcccatagtgctgagatgacaggcgtgagccactgtacctgaccccttttaccttgtttagcctgacaacccatcttctccctctcaggtctttccatctcagtcttctgcactccaggcttctgcatcttcctcctatgctcagcctttaattgtcgatgtttctggttctatagcttcatcttcttgtgtgcactctctgtgaatgtaccctgtggctttattacctttgacattcttctgtcttctaaatcatctcctgaatagagtgttttctcctgtcctgggtgtcccccagcccataggagcagccatgctgtgggacaccctgagtggggtctgtgttacctgttgtgcctaccatgcccttccccgccttggatgcacaggtgccccaccttagctgcccgagatgctgtttatccttgatagtcaccttttaagccttctacaggtctatcaagttgagtcaccattaccacttggtgtgtgctgtgccttgtgtaacactgcagttccgggagtcctccaacctggaatgcatgctttgcggggatctatgatgccctcgaattgtatgttacatgtgaacctgtgagcattttctaggggctctgcacctttgtgttctcagctctgagccccatgcttgctgcaaccagcaggtgttcagagtgaatgaatttgcttatcttggcataaatcatgtaactgttgatgataccccaggaaggtgagcctttggttataaatccttttaacattttccagtctaaaagttttgtggtcttattacaggatgtagaaaacagtgggcctcagttattcttttgctgttgtgccggagtataccacggttgtttttgaaagataactttgaccatacccttaggaacttcctcagctcactttcaaatggagggcactggctttctaaccattgtgtctcccagcccagtgacagctgaagctgtctgcttccgatatcacaggcagcacagaagagccgccctccaggtgctgctgggaaatgctgcctggaaccctttgccatttactttctatcaaaagctgagggaaatggtacatatggggctttcctaaaaatatgggatccatccatttgtcagcaatgtcattctatcctatcccagggcctttcaagattttggtgaaaactaatagatcccatattccagaataatgctattaataattttattattattacttaatgatagcaaaaagttagctaactccaaccgctcacttgttatttgccaggtaatcctctgatccagaggatttggccttttgtgtgtgttaatgtcctgcttgcaccagctgtatgaggaaggtgccactgttgtcatttccatttctgcactcgtggaaacaagcgtagtgaggccagcctgagccacagagctgcaggtaggggaggcagctggaaccctggcgcctggctgtggagtttgaggctctgactcctgcgccgcgctgctgccccaaccctagtcatacgaggtgtttcaccccgccctggatactctgagatcccctctgggttcagcaggctcagagagctgactgcctggagcagaaggcatggggtcctccagagactcccctgagctgagttcccctgtggacaccagggccgcctccttgtggcgctccctgaagggtcctctctggaagaactgtattggttccctggggctgctagaggaaagcttcacaaactggggcttaaacaacagaaactgacatcccacagcgctggaggctggagtccgagatcaaggtgtcagcatgcttggtcccttctgagggtcgcgagggaaagatctcttcaggcccctttccttggcttataggggcgtgttctccttgggtatcatgacatcgcctgccttctgtgcatgtctgcatccacgtgtcccctttccaataaggatattagccctttaggctgggtcccgtcctagtagtctcatcttaactaattacatttgtgacagtcctatttccagataaggccacattctgagatgctgggggttaggatttcaacacaggaatttggaggaatacaattcaatcaggcttatggacaattctggtcttaagtcaagagtagtgttctccagtctgtatgtggaggcgcacacctatggtcccagccacttgggaggctgaggccagagaattgtgtgagcccaggaggagttccataccagcctgggcaacatagcaagacctcctctcaaaaacagacaaaaaaagtggtgttccagagtgattagtttgctttaaaaaaaaaaaaaaacaaaaaaacaaaaaaaaaaaaacacaaaccgtaaacactggcactcgtgactgatcatcctgtatccacgcacgagctgcacgaaggccgcgcggtcactgtggctccccgttggcgagtacctgggatttcttgctcagcagtttggggccttaattcttttaggggactttttgtctaatgtctccccttcttctaattatgtgcgatatttacatagaatctgataaactgcttcaaatttgttttcagaacagtgagctggataattaaagaagctttttcctgcttcttgggcccagtttccatttcttccttttttctgtttttcctggctattctagtgctagtttccttcctttcctttcctaggctggccttagagcatcctctcctatgtacagccagaccttctttcaagcttttattaaaatggggaaaggtcatttgggaggctttgttgttttcctgtttctaaagatcatttttcttcctgcaggggaagtccttaagtcttatttgtggggccctctcctggctccgtgactttgaacagaagaagcgtgaagaagaggcacgactccttgaaactggaactggccccttacatgatgagaaagatgaatccctgtgtctgtcttcctcctgcgaaggggctgcaggcaccccgaggcctgctggagaaccggcctgggttactcagtttgtgcagaagaaagaagagagggacctggtggaccgactgaaggtgagacctggggtatccggaagtgggagtgctggaggaaacagggcttcagcgattgttgtggggcgattccgagactcaggcagtgcatgctcccctgccgttgctgtgcctctcagctcttccctcagctccttgggtcgatggtgctgccgctgtgctgtctcttttgagctggaggtcagcagggccttctccacacaaggaactgttggtgcccatttattactcacctgggaaaggacctgatcgttgccattggcagcatggttcaatggctgcaaatggatctgatggagagcgtgtggctttgggaggagcgtgccgccttccacagtgagcagcgaggctgggacctgcagggatgaggtcccgggaggggatgcggcagcccttgagtgctggtcggggaaggagagctgcccgcagtgaggaggcgccgggctgagtggcccagactccttaggagaggcctggttttgggcttcctggtgattttccttcatgtctgcctcctgtaggtggagcaggccaggaggaagcagcgagaagaacgcctgcagcagctgcagcacagggtgcagctcaagtatgcagccaagcgcctggtgagcctcatttcttggggggcaggattatgtccaggcagggtcgccctgcttggaggctcatgggtgcgtggccagggtcttggtctcccctccatgaccctcactggctatgtgctcccgtacagaagctgggctgtgagtggttgaggcgtggatcctaggagtcgacctctctccagccaggcagccaggcctatgtgaatgggcgtggtgtgctttgtctctggcacgtggggaggtgggtactggtgctgagacttcttcctccctccccacctccactgcccctgtccagaggcaggaagaagaagaaacagagaatctcctccgcctcagcagggagatgctagagacaggcccggaggccgagcggctggagcagctggagtctggggaggaggagctggtcctcgccgaatacgagagtgatgaggagaaaaaggtggcgagcgggtgagacagaggcggtagcactaccctgccccaggccaggggacacccttgaagacagctctttccctcatgccacagatgccatgaagcacctggcaagaggcatggtggcctctgccctctgctctaagccgggtccctcctagggtccatgagtgccagtggcagtgaggacagtcaccggcctggcctgtgtcctctcagctgtcctcacagcagctcaggcagggcaggaacatttgtgtctgcaccttatacacaaggaggctgcagccccacaaggagagactccttggctgaggccacaagcctcggcagtggagagctgggctagaactcagccggcctggctctacatctcaggctctgaggcagctgactgcactgggtaacctttgaggtgccaaccgtcaaggcgtccttagcctgagctttccttctcccataaagcctctgttggtccagactcaaggtttccacttgatgagccatgagctgctgggtgacttagccctgagcaggccacccaggccatttcgggcccacaggatccctggtgacagccccgtttccattcacactggaacctcaccaccatccctgagtgtctgctctgagtatggcactgtccagatgctgtggacgtagaagggaagaagacatggaggggacagttaatagacatgaaaacaaatagcacctatgtgaagtcagcatgtttgcctacaaggaaaacaaaatggtgatgtggatggggtggggggctgcacctgatgatgagtcccgtgtgtcctgtgacatcctggccaccacatctgtgggagggtaactgcaagaccagagaccctccgtggatattcctgaaggttcatccccggccttcacggtctgtctgcagggcgccttctgacgccacctccagccgccatccaccagacgccagcttccccgctgccctgaacttcctccagcgcaccaggccttcctctgtcctgtctgaggatttgctcatgcaacgtgctgtggccaaacaccctgccctcctcccttggcagatgtcttcctctcctttaaggcctggctcaggtgtcgtcttggtggcttcgggtgtcagctgctctgttttgctcacgcacctgcttgtgcttctgttgttgcctcctctccctggctgggctcgagctgcttcagggcaggaaccacgtctttacagtttgatgttcccagagctgacccagtgtttggcataggggtgtgctcaataaaatcgagttgacatgaatgagcagatgctgcctcgttgcagtctggtagtgtaattccaggctgcccatgtggacttcgacttctgcccctgcccagggcagagaccaccgtgttgctttatgcctcgctggtgagagggggtcataaacagtttgtgctccatgaaccgttcctgcccacctccaaggtcgtgtttctgctccctctcttctcccttagagcccatggggacaaggcagagaacttgagtggagatgaaggtggtgaatattagaggaacaaagtgctccttcaggtctgggcaagagccgtggatcctgtaggtcagcttccggggcttcccatgccctcacgtttcaggagataacgtgagcctcagaggacctgagttctgaatagaaaatttttgctcttcatttcttcacacacccagcctctcagtgagctcctgctggctttgtccagcatgcgacataagattgaatccaagccttttaagatagagccgcctgctctttagtgaccatgaagccaagcctgtaataattactcttctgatagcccaagacaattgtattctgctttgttagaaaggaatttcgaggtgaacaaaaatgttttctttttatgtgatgttgccataggtggcgtgtgcctgtcagatggttttgtgttttctgaggagcatagactagtagagctagctcagcttcaggccatgggatgcagggctggcttccctgccaacgcctggcgctgatggattcttcccgcattgctggaaagggcagactgaggcgctgacaaaagaagagttgcagctggtcataagtgacagcatcctctgttcactcgattggtcagttgtagcttcatccaggagatggtcatggggttcctgctgcataccaagctctaggtgaggccacggggactcagcagaaacaaggccgacctgggtcctcccttgtggacatgacagtctggggagatagaccgagaggaagcaattttgaatgagatgggtgtgaaggggccatgaatctgtgtcagagcagccagacctaccagggaaggtcaaagaaggcttcctggaggaggtgatgtttctgctgctatctcagagttgactgggagctggtgaggggagacaacattccaggcacagaacatccgaaggcccgagatgatgaagagcaaatatcccccctggggcctcagaggggtccagcttgctggagggagggcagagaggagagcagcctgccatgagtcccgaggcttccaactcaagacttgggtttggggtgctgagctcatgtctcctttttacatttccctacccacagacctgagcggccacgggaggttggggttggcatttgcctgggggagtttctgagcaagcagcacctgctaccttggtggaacccattgctgggaatggccagggctcagcaccagcgctcagcagatgctcagtgcgttttgctgagtttgctgagggaagactgttttctattctctctcacacacacagagtggatgaggatgaggatgacctggaggaagaacacataactaaggtaacacgagtgtcctcagctggtgctgtgctgggggctgtgggctgggctgtgtacccttggggaagaggctggagtcactcggctacttctcaccctcctctccacaaaggaggagcttccagcacttggactctgttgcttcttgcacgcaaccctggtcctgagttgctcccttggtcagctgcagtggaccctggagtcctctcctggggtcagggcctggggagtcctctcctggggagacctttcctgggagcagggccatgcttgccaccccagggcatagaggaacagctgttctgggctgaagtctgggtgttttctgtccctgctgggtggtgctggatatgactcgtggaaggagctgcctgtggggcattcccttgaacttctggagctgtgggtgacttgggaatccctgggtccctcgatagatgcctgacatgggacattgctgtcctgcctcggctttgtgcattgggagccactccctttccctcagcctctcaggccctggcgtgccttgatgttagagaatgctgtgggatgttttggttccctctttgaagtgcctttctttctctctgctagatttatcactgtagtcggacacactcccagctggcccagtttgtgcatgaggtgaagaagagcccctttggcaaggatgttcggctggtctccctcggctcccggcaggtaaacagtagccagtatttccaccaggggccatcctgctcctttccccacaactttgtcctgctcgtccaggcctgggagacgctgggtctgtgacaggctgaaccgtgtgaggagcagccccctccctggcctggccggcccatcactggaaggcaaaggagaggtggcgggggcaggtccacgtgtgttggtaggatgtcatttagctggcaccatctctttgcctctttctttctcctttgttgcagaacctttgtgtaaatgaagacgtgagaagcctaggttctgtgcagcttatcaacgaccgctgcgtggacatgcagagaagcaggcacggtagccaccgggaccatggtgtagccgcaggtggtctggagagagtgaggcaggggtggcagtgactgaagaccattcagtgtctttcatagaaagaatggcagaggagaccccagttccttcctgagtcccctctccttgggaaaaagtgttcctactctctgggtgagcgtctggtccgaatcgttggcttggagatgattttacgggctctttctggagaacaaaagtaaaaccttagtgttccgatgagacacagtaggcagtacttgggagggtcttatagaccccaccctgtggaagtgggtctcaacattacacaaccccctctcgggcccgtggacagttgctgtcttctctgttttctctctttgtgcctgtgccaccctcagagaagaagaaaggagctgaggaggagaagccaaagaggaggaggcaggagaagcaggcagcctgccccttctacaaccacgagcagatgggccttctccgggatgaggccctggcagaggtgaaggacatggagcagctgctggcccttgggaaggaggcccgggcctgtccctattacaggagccgccttgccatccctgcagccaaggtgagggccctgcagggccagaaagccgctcttggctctcactgtggtctaggccatgaggggcgtcctcatcacactgtagtttgggggatgccccccaccgtggtcaggttgatggcaccttaacccattctctcctgatgcgtgagttggaggaggcgcgtgggatcccttggggtctccaggcagcagggccagttggcattactggggatggtatttaggagccaggaaagccggtgcattcctagtgaaaccacagggagaggggggatgccaggagctgagaagagtgtgctgcatacatctatttacaaatggctttccaagtgatgctcccaacttccatgcctatgatgtgatggaggatgtcagtgatagaaccattcagttttccagtttttcctttttgtaatatcagtactcttaactggaaagctttccctaacttacacctacctgcagcacgtgagaatactgtcttctctgccacaacttctcttgatttttaaacagaaggaagaactgctaatgtagcagatgaaaagtagtatctcactgttacttggtgggtgcagtttcactatttccttgctacttctttaacttgagtgactttggaaacgggatatcactagtggaaaattctgtataatccagaaaaaaatgtaaggttttaaaagattcagggaactaagtaaccgtttgcacagcagctaaatgctcaccagcatacctgctgagctgtgtgggcgctggcagagaaactgaggaaagctgccaggccccatggtttcccaggccttccctccggtctgtttgcctttagagcaagattagtgctataggcatttatacacaaataccataatatggcccaaaatctttacgatttttgaatttgtaaagtactttgaccatattttgcttttatgttaatagtattccagtgaaattccgtgcatggggacactggagcccagaaaagttaagtgactcatattttctcaccaagcgtgggtgatggagccattcagttttccgatattttattttttatatgagtattcctttaactggaaactttcctaacaacaaacacctaaagacctgcagagttgcttttatttttgttaccccagctccacgccttaaccctcactttgaaataggatgtatcaaccctattttgcagatgaggaaagcaagggtcagagaggttagacaactcttccagagtcacacagctgggaagtagcagctccaggagcagaagctggggccgcttcctggtgcaccgatggtcttcaggtgttttgtggaaactcgggggcctccggggcgaccttgaggacatggacaaggctaagcaggggttcccttcacccagccctgcccttggtttactcaggagtcagaccagccctagtttcctgtgtttcatgtattggcttttcatgtgaaactcgaggagagcttgtccgttgtcagaagctgttttttgaacgtctctacacagtccaggcaggaaatagaagcactcacatcaggagctcagtgtcaggcaggcaagcctcctgcaggggagccccgccctgctcaggtggcctcatctcccctcccagctggtggtgctgccctatcagatgctgctgcatgcggccactcggcaggccgccggcatccggctgcaggaccaggtggtgatcatcgacgaggcgcacaacctgatcgacaccatcacgggcatgcacagcgtggaggtcagcggctcccaggtgcgtgggcctcccctccccaggccagggcctgccgtgaggtaaagggacttggatggttcctccagacacccgggccaagaattcctccggaggtggggcttgctacagggtgcacgagtcaaggcggtgacctcatcggaggctgaccatggctttccagtgcatcccagaactctggggaccccgctatgacagagtgcctcatttccctgcacctcacctgcccccatgctcctgagtccctccagccctggatgccagcagccagttctgcaagccagggagatggcatgtgtgaggcagaagtcccctcaggattggattttgtcattactgaagttgtctggaggggactgaattgaggaatgctcaagatcagtgcaggctcctcctgctgccctatcatgcgccatgcatggcaccaggtgtctctggtcttcacgctgactctgccatgggggtggtgttcctgttttacattggaaacttggagattcaaagatggtcaagctctgtcctgaggtcatgcagctcatgagtgtggagctggggtgtgcccactggtttctgactgtgaaacccccacgacatcccaccagctctactgacctgtgcctgggctgaattgaggctgggatgtgatggtgaccttgaaccatcactctttgtagactccaggtcttttcccaacccggtggaaactagcaggcagattccatacttgaggaattcagcctcttgctttttctctgacccacagtggacactggaggaaaccttcccttccttcccttttctcttagctcccaccagcctaagggctgtggaaaccagtaccttttgtctgcacccagccccctctcctccctttggtggcttcctgtgtgtccagggctagcatcttctaggtgaatctaagatgtcagtaccttagccctcggctgcttgctcagagcctggtttgtgttctttccccagctctgccaggcccattcccagctgctgcagtacatggagcgatacgggtgagatgtgactctctgaggtagtgggacagtcccttggtggccccctgcatgggcctctgagaggcagcactttggttcccacctctggcccgtgctgtggcggggtggagctgcatgccattcatgtcctaggcacatgatggtgtgtgctgcacacagacctggaaggctggggactgaccgctggctctgaggcctggggccgtggccagcctgctctctgggaaaggatttgtagcttgtgacccagtttgagaggcaccgggcagcaaggcttccactggggtgggcggggcgagtcgccatcagggcaccaccacttaatgtccgttggcttcttctcaggaagcgtttgaaggccaagaacctgatgtacctgaagcagatcctgtatttgctggagaaattcgtggctgtgctagggggtgagagcctcgccccccggctaacccccggcctgcaaaacccaccgggctgctttttccttggatgcccatcaggacgcctcagttctctgtgtttttaagaagggtcggccgggtgtggtggctcacacctgtaatcccagcccttgggaggccgaggcaggtggttcacctgaggtcaggagttttgagaccagcctggtcaacatgatgaaatcccatctctactaaaaatacaaaaaaattagctgggagtgttgccgtggcctgtagtcccagctgctccagaagctgagacaagagaattgcttgctcaaacccgggaggcggaggttgcagtgagccgagattgtgccactgcagtccagtctgggcgacagagtgagagtcagtctcaaaaaaaaaaaaaagaaccaaaaaaaaagaagggtcttggtcattgatttagaaaattcttgttctttgtagcttagttgagttgtctgacttgagctttttttagacccatgggttctttgcccatgttctgaggactttttatttcaggcgctgctctggggggatattaaggatacagcatcacatggacacacggtgtttccgtgataggcatagttctgtgggttgttcgaagcacttgcatatgcggttttgtgtgccctgtgagaacgcagtgctggtatttgaatccttgttgatagacgcataaactagagctcggagcaagggctgctcccagcacgggagcctgggatcttctgactccagctcccacgcctctttgcgtgaccctgtcacgtccccttcttttatgatggggcacccccttgctggaaggtgtctgtggaagtggaagctgcagaaagcctgtgggagctcctggcgggagctggtctcgtgttgctgctctgagccgccagctctgctttgcctcaggctcaccagtggcctgggcagctcctctgtgctccggtgccctgcataccttggtctggctgctgtgtcccggcctcctggagaaggggtgaaaaacatgaacttacagggctttgggttccacgtgcaagcacgtgagtcagacgtgggaggctcctggacccacctgccctctaagtgggtccgttgcatgctataaacagtgaaaagcaaaacaaagccgttcaaatacagatgctcttcttacttgatgtgcagtgtggagggagagaagatagggaagggttggggggcctgagaaccaccattgtgacctatttccattctcttttttagggaacattaagcaaaatcccaatacacagagtctgtcacagacaggtaagagagttgccctcagagggcccagagctgatctgagccacttccgagcttaaccctgggactgaaacctgaggcttagggtgaagctcccaaggcccttcatgtgtttgttctcagggacggagctgaagaccatcaacgactttctcttccagagccagatcgacaacatcaacctgttcaaggtagaggtttccaccttgccatgttccacatccagtttccttcctgtcaccacctgtgggtagagtactatgttaagactatagaaggaagaaaaagcaaaacagacgtgtaattacttaacccttaacgcaacacgcctgtgagacaaaagtcatcatcttttagagtgaaggccacagggatgagggatgggtgagaaagggacctttcttggtgccccatagaacagatagagactccaggtccttgctgtctcaccccatcttctggcacagtctccctcaggcttatggacaggaataggacgttgatttgttctgtgcaacccctgtcacgtcttcgcacttgggccttgggtgtggttgcagcctcagacctctgctcgctccaggtctgtgtacccagcgctccccagatgaaacacggccactgccgcctgaacccccagctcgtaactcaaatcagcaacagtgactgcccctgggtacagggttctgcctctgttctaggcggcatgccacgtgctgtgctctgagctaggatatccttttgccccggcaaggaaagcaaacaggcccatggaggtgacttcaggagggtggcgagcacaggcttcccacaagtgagccaatagcaagtggcagagacagcgtccaaacctggctgcactgacttggggccccacattcttcccatcgtgcctgccttttttttcttaaaaccagcttttcccctgaattacacatttgggtcactgtcactgccaccatccctgccagacaggctggatccacgtcatccttgatgcctttctccccttgtctcccacatgcctgtgacagccgccaggcctgacagcctcagacagtcctgccgtccccgcgcttctcccacagctgggacatgggtgcaggcactccttctctcgccttccctttgccctccttgctttccttctcccttcttcccatgggtctcgggtctcatcacccaccattgagggaatcctcatcgaaggacgtcgctctttttagaaaccggtttaaagcctccaaactcctcatctctgcatcccaagctaagatgtggcaccaaaccacacacattggatgcaccgactgagtggcactgccccagcccctgagcaggtcccagccatcatctcctctgtggctttgctcatagaagttcctttgttttaactctctgtcacctggaaggaaagccaaggggacctagattttactgggcactcttagacttgggagagacatttggaaagagggtctcccccctgaggaggacactgcgttgtgggcaggggcagtagaggagggggtggcctcggagaggggatgacaaggttggtggcaaggaggctccaggtgcctcagaaggtagcactgcgttgtgctgcctgggtggtagaagtggtgttttttgttttgtgtttaagattacagcttgctcagtttgcacacatgcctacagctgggcttggtttttgcaggtgcagcgatactgtgagaagagcatgatcagcagaaaggtaactgctcccatcttgtggtcctgaacaagacccagctgtgccccaaccccctgccgttgccatgctttcctcccctgccctcagggaactccagagtccccttcgtctccaccctccttggtgcagtgggccttgctggggtggtgggatgtgcgcttcaggtgtcttgagcctggcagagcctccgatccacccagcctctctctcatggctgttcctcgttcctctccactgctctctctcatcccacccagctctttggcttcactgaacggtacggagcagtgttctcatcccgggagcagcccaaactggctgggtttcagcaattcctgcagagcctgcagcccaggacgactgaaggtgaggcaggagggtgagcaggcagagccggctgcaggcatgggcaaggacttctgttcctcatgtgtggacctgactagagggaggcctcctccccattctgctctgtgcagctcttgcagcccctgcagacgagagtcaggccagcgtcccgcaaccagcttccccactaatgcacatcgaaggcttcctggcagctctcactacggccaaccaggacggcagggtcatcctgagccgccaaggtaatcaggtggttcttggccaggttcagttcccaggaaggagccaagctgagcccgggagccgcagcatgaaaggattctttccttccatcctgggaacttcctgggttaggaggaagcagtgcagtgggcactggcctgctgtgacctgggcaagcagtggaggtggacgggaggagatcgaggggctgggatggaggtcctctagggcaggggtcctagggaaacttgtattgtggggtaggtgggctttggtttgggtcatgattttgtcatctatgagccttgtgatttggactattttctttctcaacttcagtttcctcatatgaaaatggagaggataggccgggcgcggtggctcacgcctgtaatcccagcactttgggaggctgaggggggcggatcgtgaggtcaggagatcgagaaccatcctggctaacacagtgaaaccccgtctctactaaaaatacaaaaaattagcagggtgtggtggtgggtgcctgtagtcccagctactcgggaggctgaggcaggaaaattgcttgaacccaggaggcggaggttgcagggagccgagattgagccactgcactccagcctgggcaacagatcgagactcctctcaaaaaaaaaaaaaagagagagatggagaggacagtatggtccacctctgtgggctggttgtcctagagattaaatggtgtttaatttaaagagaaagcactagcacttgtgcctcagacctggactcacctgggggaccccctttgctgggacgatagaagtgtctgttgggcttgcactcacctcccaccgatctgtttttccaggcagcctcagtgagagcaccctgaagtttttgctcctgaatccagctgtgcactttgcccaagtggtgaaggaatgccgggcagtggtcattgcgggggggaccatgcagccggtaaggacacctttcccagcccctcgtgccccaggtgttgggatgagatggggacttgggagagatgcattatcagtcctgttctctcctggggccccaagccagaaagggtcagctcgagcaggcccagtggtgtccactgggtgacactgctattctctcactgctgtgccttttaggctgcaggagcagtgcagactcctctgctgctccattctgtagccccaggatcacacttctcccagagaaagctgttctgtggtttcaaactcaaggaaaaaaatcatgattccacttttaaaaggttcattttgatgtatatgaatataatagtctttgtaggcataatttttacttatgtgcatagctattttaaaaacaaaagtgcggctccctccatgtgctgtcactggaacttgctcttttcactcagcagccagagggtcataaaccctgtctccttgtcagcaagcatgcacgtatttcagtatcccagctgtgctggattccagttacccagatatacagcatttcatgtacctccttctcttttgttaggtgtgcaagctatttgtagttttctgttttgagcatgactgtgatgaatataaccgcatttccgcacagtggtgactcctacctagcaaagggcctcctggacaaaaagctgctgggaatcctgaagcagtgcttcccagccccagctgccttagcttttgatttttatatttttgtatggatagattcatagttttattcattcggcatattaaaagttgtttacagtcattattgtttctgacgttcacatggtgagagccccttcctgctagctcaggtcctccccgtggcccggtcagtctcgcctccagcacagcagaatgtcatgggatcaccatgggtgtccttgccgcacactggattgattcatttctccaagctgctctggtttcttgtaatggggaatgacatttagaagtcaagctgtgggtgctagggtgtttgtcgtgctcctggggcattttggtagacagatctaggaaatgttttcagagtgaatccatactggtatttctttctttctttctttttttttttttttttgagacacagtctcgctctgtctcccaggctggagcgcagtgacccgatcacggctctctgcaacctctgcctccggggttcaagcgattctcatgcctcaacctcctgagtagctgtgattacaggcatgtgccaccacacccagctaatttttgtattttagtagagatagggttttaccatgttggccaggctggtcttgaattcagttgatccgccagccttggcatcccaaagagctgggattacaggcatgagccaccacgcctggcccatattggtgtttctaagtaaaaatcaaaggatttgtttacttgaccttttattgtacctctttttctcttaagcctgaacatgtgtgctacattaacatacttatctgctctatcctataatatacttaaaagttttgaaatcatagtaccaatattacttctaacaatagatctgattgaaattgcctttcctctttgcccttagagtgtaacccactaaggatgcctggtcactaggctctaaagtcacgtggaaccaggcttctctccgtgtgcttctgttgtcagtttcatagatagctaggctgtttttgtttcattttcttttcaattttagaatttgctttcttcttttctgacttgtagtttttaaatatgtaaatatttgtatggctcaaaagtcaaagcaatataaaaagatctattcaggaaagcctcactctcatccctttccagcccattccccacccccatagggaatccgttttactagcttatcctttcagtctttctttttcccctaaataagcaaaaacgtgccttcttttttccctttcctgttttatttacacggaaggcatcttagtcagttgtctggccatcgctcctctagtgggctgcgtggttctctgttggacagatgtaggaagcttatccaaccagtaccctctggataggcaggcgcatgattacagggaaaggtccgggggcacatgctgtttggtatttgtgggctgtatcttctcactggactcctaaatatgggattcctgggttaaaaagtataaatatgtttaatttgttaactactgtgaaatttcatgagaattgtaccattctgtatcccaccagtactgtctaggaatgcctgtttctccagagtggttacttttggatttttgccagtctagcaggtgaaagcctggagattgttattcagtagtttgggctggggcctggccacgtgtatttttgaaaattttcgctggtgattttgctgcatggccagggttgataatgactgtgccagatttgctggatttcctttgctattcctgcacatagtttaaacgagactgccagcactgggtatcagtcaccatttttctttttgttagtttgccgtcagccttttctttgacctcttctttcagtttgtgtgtacttgctgtctcttaggccagacttctcgcttcctttctgctgggcctctgaggggtcatggggccatgacgccgtggccttggtctacaggtgtctgacttccggcagcagctgctggcctgtgctggggtggaagctgagcgcgtggtggagttttcctgtggtgagaagctgtgcccagggtggggcaggctagaggtcaggttctggcccccgttttctgtgggtaatacctcataccgtgaccaggcacagaggcggaggagaccccgggatgggagcctcacccttcgtgcgctcgcccaggctctcctgctttgctccctgctgcctgctgcccagtgtgactggcgatggtgggtgggtgagcgctgtcagtcgctgttcctgtgctggatgatggggcaggtaaatgccctctctgcagtgtcttacagcacacctgcatctccagttttcggcccctccctgatcttaccaggtcacgtgatccctccagacaacatctgccccttgtcatctgcagcgggatctccaaccagccgctggaattcaccttccagaaaagagacctgcctcagatggtcagtcccagccagctcgctgcaccacagcctggcctcaggcagcaaagggttttctggggcagggacgctctggcccaccctgagtgttttcaggtgttggggaaattgcacagggacacccacttagagccacacagaatgagcggcgtcgatctagatgcttatggaggaaggtctgagcttccccgcctctcacaccttaggctgcgaaatatgtattcataaaacctccaggcatcttctgaggacgcctcacgcaggagaaagctgctagttccctttggctctcttgccctttggttatatctgcccctgctgggggcagggatgtggggcttgggggcatctcctgtggtgtgcctggggtgtgcagcccctgattgtcattgtggtgcccatcaggaccctggacagaagaagggaggactcagtgccagggcaatagggaggccccccagggacgctagtgctgtgacatgtgtcagaaaggcgcagtcagcagcagcggctgggtgtgtttggtgggaggtggcacctaccaccccgtggttcccacccaggggagccaagtcctcttccttggctgtagtcctgccaagggtctctcctcagttttgagtctcaaggtgaagacgcggtttgtgggtggctgaggggttgctccatgggggctccctccctcccttccttccttagatggacgaggtgggtcgcatcctctgtaacctgtgcggtgtggtttctggaggggtggtctgtttcttctcctcctacgagtacctgcgccaggtccatgcccactgggagaagggtggcctgctgggccgtctggctgccaggaagaaggtgagtggcctgtcggcagccttgccacttgtgaggacagtgccactgagtcctcctgggagctcttgtgctcatcgggtcgggacaggcttctggctcctcatccccactgctcccagtccctgactacagaggatttccccaaagtccctggctgtgaggttctccagtccgctggccagaaaacacaaggccacgagcagacccgagacctggcaccctaaacctgtctctgggaaatgtcctctgtctttctcagatattccaggaacctaagagcgcacaccaggtggagcaggtgctgctggcgtattccaggtgcatccaggtgcgggcgtcatgctgagcttgggtctgagaccatgtgggggtggcagctggaaacgtgggtgtcatccaagttttggctcagcaactcagcgtctgggtttctcctacaggcctgtggccaggagagaggccaggtgacagaggccctgctcctctctgtggttggaggaaagatgagtgaagggatcaacttctctgacaacctaggccggtaagtagtggttctgctcatctcctgggtcgtgatacatggccggccctcactcccagcagctgggcccctgcctgctgtctgctgccattagagcccacagctgggctgcgactgctcagaccagccagctggagggaggggctcagcagctctgggtttggccctgagagagtagttggattttaggctggccattgctgtatcaggacccaatcaattggcctagacgggatctctcagccttacaagccctctccaggtggtaggtacagagtggagagaggctgagttttgatcacagtcggagagggctgacggaaggggtagaacggagcagctggtgacatgggtgatgacccgggagttcctgacgtccacccactgggctcttgtctcccccccacgtgtgtggtgatggtgggcatgcccttccccaacatcaggtctgcagagctgcaggagaagatggcctacttggatcaaaccctcgtgagtgaccccagtgtcacagagggtgacagagtaggcagtgggtgggagtggcatcacccccagggctgatacagccaggccttccccactgcgctggtgtctcctgccccctccggaagcttggatgcccctccacaccctcttgatcttccctgtgatgtcacctggacccctgctgctggcattggccacaaagcctcctggtctggctccaaagcctggcagggtcttttccccgggggagctgcaggcagggaacagtcctgatgggtcatccccttcactcccagcccagagcccccggccaggcacccccagggaaggctctggtggagaacctgtgcatgaaggccgtcaaccagtccataggtgagcctggctgcctccagctgggtggacagatgggggctggagaaggggagaacaggaaagaggggttgcctgccctgtttcctatataagtctgaggaaggggagggggtcgccatgggaatgtgctgtaggggaggcaggtgttgctcggagccccagcctctgttcctatgcaggcagggccatcaggcaccagaaggattttgccagcatagtgctcctggaccagcgatacgcccggccccctgtcctggccaagctgccggcctggatccgagccagtgtggaggtcaaagctacctttggccccgccattgctgctgtgcagaaggtcagtcctacctttttctttctgagagcctcccaaccccgagatcacatttctcactgccttctgtctgcccagtttcaccgggagaagtcggcctcttcctgatgggcaaccacaccaccgcccggcgccgtgcccttcctttgtcctgccctctggagacagtgtttgtcgtgggcgtggtctgcagggatcctgttacaaaggtgaaacccaggaggagagtgtggagtccagagcgctgccgggacccaggcacaggcgttagctcccgtaggagaaaatgcgggaatcctgaatgaacagtgggtcctggctgtccttggggcgttccagggcagctcccctcctggaatagaatctttctttccatcctgcatggctgagagccaggcttcctgcttggagtccgcaggaggctgtggcagcagtggcatccactgtggcatctccgtcctgcccaccttaagaggcgagatggagcaggtccatctgcctctgccctttctagccaaggttatagctgccctggactgctcactctctggtctcaatttaaaatgatcccgtggccacagggctcctgcccaggggcttgtcaccttcccctcctccttcctgagtcactccttcagtagaaggccctgctctctatcctgccccacagccctgcctggatttgtatccttggcttcgtgccagttcctccaagtctatggcacctccctccctctcaaccacttgagcaaactccaagacaccttctaccccgacaccagcaattatgccaagggccattaggctctcaacatgactatagagaccccgtatcatcatggagacctttgttcctgtgggaaaataaccctcccacctgcaacagctgcccctgctgactgcgcctgtcttctccctctgaccccagagaaaggggccgtggtcagctgggatcttctgccaccatcagggacaaaccgggggcaggaggaaagtcactgatgcccagctgtttgcatcctgcacagctacaggtccttaattaaaagtgtactgttggtttctgctgagtttttta

SEQ ID NO: 9165 - DNA, 294 bp, Homo sapiens
tattttaaaacttttttatgcaaaaacatgttatagggtggaatgcaacatttttatgggcctgtgggccatttgtatacatctttggagaaatggctatttaagtactctgcccattaattctaaacttaaaactaagacttcaaagtccctctaaggattttgctgggccacatcccaagaccctgaagggtattacttactcgccctctccaaactgccgaagtcggaagcaggtgacaaaaaagctgaccctggaatcaccttttgtaaatttcccacctccaagctttt

SEQ ID NO: 9166 - DNA, 11749 bp, Homo sapiens
agctctttggattcactgaacggtacggagcagtgttctcatcccgggagcagcccaaactggctgggtttcagcaattcctgcagagcctgcagcccaggacgactgaaggtgaggcaggagggtgggcaggcagagccggctgcacgcatgggcaaggacttctgttcctcatgtgtggacctgaccagagggaggcctcctccccgttctgctctgtgcagctcttgcagcccctgcagacgagagtcaggccagcaccctgcgaccagcttctccactgatgcacatccaaggcttcctggcagctctcactacggccaaccaggacggcagggtcatcctgagccgccaaggtaatcaggtggttcttggccaggttcagttcccaggaaggagccaagctgagcccgggagccgcagcgtgaaaggattctttccttccatcctgggaacttcctgggttaggaggaagcagtgcagtgggcactggcctgctgtgacctgggcaagcagtggaggtggatgggaggagatcgaagggctgggatgggggtcccgtgaccagggtaagcagtggaggtggacgggaggagatcgaggagctgggatgggggtcctctagggcaggggtcctagggaaacttctactgtggggtaggtgggctttggtttgggtcatgattttgtcatctatgagccttgtgatttggactattttctttctcaacttcagtttcttcatatgaaaatggagaggataggccgggcgcggtggctcacgcctataatcccagcactttgggaggctgagggggggcggatcgtgagttcaggagatcgagaccatcctggctaacacagtgaaaccccgtctctactaaaaatacaaaaaattagcagggtgtggtggtgggtgcctgtagtcccagctactcgggaggctgaggcaggaaaattgcttgaacccaggaggcggaggttgcagggagccgagattgagccactgcactccagcctgggcaacagatcgagactccatctcaaaaaaaaaaaaaaaaaaggatggagaggacagtgtggtccacctctgtgggctggttgtcctagagattaaatggtgtttaatttaaagagaaagcactagcacttgtgcctcagacctggactcacctgggggaccccctttgctgggacgacagaagtgtctgttgggcttgcactcacctcccaccgatctgtttttccaggcagcctcagtcagagcaccctgaagtttttgctcctgaatccagctgtgcactttgcccaagtggtgaaggaatgccgggcagtggtcattgcggggggtaccatgcagccggtaaggacacctttcccagcccctcgtgccccaggtgttgggatgagatgggggcttgggagagatgcattatcagtcctgttctctcctggggccccaagccagaaagggtcagctcgagcaggcccagtggtgtccgctgggtgacactgctattctctcactgctgtgccttttaggctgcaggagcagtggagactcctctgctgctccattctgtagccccaggatcacatgtctcccagagaaagctgttctgtggtttcaaactcaaggaaaaaaatcatgattccacttttaaaaggttcattttgatgtatatgaatataatagtctttgtaggcgtaatttttacttatgtgcatagctgttttaaaaacaaaagtacggctccctccatgtgctgtcactggaacttgctcttttcactcagcagccagagggtcataaaccctgtctccttgtcagcaagcatgcacgtatttcagtatcccagctgtgctggattccagttacacagatatatagcatttcatgtagctgcttctctcttgttaggtgtgcaagctatttgcagttttctgttttgagcatgactgtgataaatataaccgcatttctgcacagtggtgactcctacctagcgaagggcctcctggacaaaaagctgctgggaatcctgaagcagtgcttcccagccccagctgccttagcttttgatttttatatttttgtatggatagattcatagttttattcattcggcatattaaaagttgtttacagtaattattgtttctgacgttcacattgtgagagccccttcctgctagctcaggtcctccccgtggcccggtcagtctcgcctccagcacagcagaatgtcatgggatcaccatgggtgtcctttccccacactggattgattcatttctccaagctgctctggtttcttgtaatggggaatgacatttagaagtcaagctgtgggtgctagggtgtttgtcgtgctcctggggcgttttggtagacagatctaggaaatgttttcagaatgaatccatactggtatttctttctttctttctttttttttttttttttttttgagacacagtctcgctctgtctcccaggctggagcgcagtgacctgatcacggctctctgcaacctctgcctccggggttcaagcgattctcatgcctcaacctcctgagtagctgtgattacaggcatgtgccaccacacccagctaatttttgtattttagtagagatggggttttaccatgttggccaggctggtcttgaaatcaggtgatccgccagccttggcatcccaaagagctgggattacaggcatgagccaccacgcctggcccatattggtgtttctaagtaaaaatcaaaggatttgtttacttgaccttttattgtacctctttttctcttaagcctgaacatgtgtgctacattaacatacttatctgctctatcctataatatacttaaaagttttgaaatcatagtaccaatattacttctaacaatagatctgattgaaattgcctttcctctttgcctttagagtgtaacccactaaggatgcctggtcactaggctctaaagtcacgtggaaccaggcttctctccgtgtgcttctgttgtcagtttcatagataactaggctgtttttgtttcattttcttttcaattttagaatttgcttttttcttttctgacttgtagtttttaaatatgtaaatatttgtatggctcaaaagtcaaagcaatataaaaagatctattcaggaaagcctcactctcatccctttccagcccattccccacccccatagggaatccgttttactagcttatcctttcagtctttctttttcccctaaataagcaaaaacgtgtcttcatttttccctttcctgttttatttacacagaaggcatcttagtcagttgtctgaccatcgctcctctagtgggctgcgtggttctctgttggacagatgtagggagcttatccaaccagtaccctctggataggcaggcgcatgattacagggaaaggtccgggggcacatgctgtttggtatttgtgggctgtatcttctcactggactcctaaatatgggattcctgggttaaaaagtataaatatgtttaatttgttaactactgtgaaatttcatgagaattgtaccattctgtatcccaccagtactgtctaggaatgcctgtttctccagagtggttacttttggatttttgccagtctaacaggtgaaagcctggagattcttattcagtagtttgggctggggcctggccatgtgtatttttgaaaattttcgctggtgattttgctgcatggccagggttgataatgactgtgccagatttgctggatttcctttgctgttcctgcacatagtttaaacgagactgccagcactgggtatcagtcaccatttttctttttgttagtttgccatcagccttttctttgacctcttctttcagtttgtgtgtacttgctgtctcttagcccagacttctcgcttcctttctgctgggcctctgaggggtcatggggccgtgacgctgtggccttggtctacaggtgtctgacttccggcagcagctgctggcctgtgccggggtggaagctgagcgcgtggtggagttttcctgtggtgagaagctgtgcccagggtggggcaggctagaggtcaggttctggcccccgttttctgtgggtaatacctcatactgcgaccaggcacaggggcggaggagaccccggggtgggagcctcacccttcgtgcgctcgcccaggctctcctgctttgctccctgctgcctgctgcccagtgtgactggtgatggtgggcgggtgagcgctgtcagtcgctgttcctgtgctggatgatggggcagggaaatgccctctctgcagtgtcttgcagcacacctgcatctccagttttcggcccctccctggctcttaccaggtcacgtgatccctccagacaacatcctgcccctcgtcatctgcagcgggatctccaaccagccgctggaattcacgttccagaaaagagagctgcctcagatggtcagtcccagccagctcgccgcaccacagcctggcctcaggcagcaaagggttttctggggcaggggcgctctggcccaccctgagtgttttcagtgttggggaaattgcacagggacacccgcttagagccacacagaatgagcggcgtcgatctagatgcttatggaggaaggtctgagcttccccgcccctcacgccttaggctgcgaaatatgtattcataaaacctccaggcatcctctgaggacgcctcacacaggagaaagctgctagttccctttggctctcttgccctttggttatatctgcccctgccgggggtagggatgtggggcttgggggcatctcctgtggtgtgcctggggtgtgcagcccctgattgtcgttgtggtgcccatcaggaccctggacagaagaagggaggactcagtgccagggcaatagggaggccccctagggacgctagtgctgtgacatgtgtcagaaaggcgcagtcagcagcagcggctgggtgtgtttggtgggaggtggcacctaccaccccgtggttcccacccaggggagccaagtcctcttccttggctgtagtcctgccgagggtctctcctcagttttgagtctcaaggtgaagacgcggtttgtgggtggctgaggggttgctccatgggggctccctccctccctcctttccttccttagatggacgaggtgggtcgcattctctgtaacctgtgcggtgtggttcctggaggggtggtctgtttcttcccctcctacgagtacctgcgccaggtccatgcccactgggagaagggtggcctgctgggccgtctggctgccaggaagaaggtgagtggcctgtcggcagccttcccacttgtgaggacagtgccactgagtcctcctgggagctctcgtgctcatcgggtcaggacaggcttctggctcctcatccccaccgctcccagtccctgactacagaggatttcccccaaagtccctggctgtgaggttctccagtcccctggccagaaaacacaaggccacgagcagactcgagacctggcaccctgaacctgtctctgggaaatgtcctctgtctttctcagatattccaggaacctaagagcgcacaccaggtggagcaggtgctgctggcatattccaggtgcatccaggtgcgggcgtcatgctgggcttgggtctgagatcgtgtgggggtggcagctggaaacgttgtgggtgtcatccaagttttggctcagcaactcagcgtctgggtttctcctacaggcctgtggccaggagagaggccaggtgacaggggccctgctcctctctgtggttggaggaaagatgagtgaagggatcaacttctctgacaacctaggccggtaagtagtggttctgctcgtctcctgggccgtgatacatggccggccctcactcccagcagctgggcccctgcctgctctctgctgccattagagcccacagctgggctgcgactgctcagaccagccagctggagggaggggctcagcagctctgggtttggtcctgggagagcagttggattttaggctacccattgctgtatcaggacccagtcaattggcctagacgggatctctcagccgaacaagccctctccaggtggtaggtacagagtggagagaggctgagttttgatcacagtcggagaggctgagggaaggggtagaacggagcagctggtgacgtgggtgatgacccgggaggtcctgacgtccacctgctgggctcttgtctcccccgcccaggtgtgtggtgatggtgggcatgcccttccccaacatcaggtctgcagagctgcaggagaagatggcctacttggatcaaaccctcgtgagtgaccccagtgtcacagagggtgacaggagagtaggcagtgggtgggagtggcatcacccccagggctgatacagccaggccttccccgctgcgctggcgtctcctgccccctccggaagcttggatgcccctccacaccctcttgatcttccctgtgatgtcacctggacccctgctgctggcattggccacgaagcctcctggtctggctccaaagcctggcagggtcttttcccagggggagctgcaggcagggaacagtcctgatgggtcttccccttcactcccagcccagagcccccggccaggcacccccagggaaggctctggtggagaacctgtgcatgaaggccgtcaaccagtccataggtgagcctggctgcctccagctgggtggacagatgggggctggagaaagggagaacaggaaagaggggttgcctgccctgtttcctatataagtctgaggaaggggagggggtcgccgtgggaatgtgctgtaggggggaggcaggtgttgctcggagccccagcctctgttcctatgcaggcagggccatcaggcaccagaaggattttgccagcgtagtgctcctggaccagcgatatgcccggccccctgtcctggccaagctgccggcctggatccgagcccgtgtggaggtcaaagctacctttggccccgccattgctgctgtgcagaaggtcagtcctacctttttctttctgagagcctccccaccccgagatcacatttctcactgccttctgtctgcccagtttcaccgggagaagtcggcctcttcctgatgggcaaccacaccactgcctggcgccgtgcccttcctttgtcctgcccgctggagacagtgtttgtcgtgggcgtggtctgcggggatcctgttacaaaggtgaaacccaggaggagagtgtggagtccagagtgctgccaggacccaggcacaggcgttagctcccgtaggagaaaatgggggaatcctgaatgaacagtgggtcctggctgtccttggggcgttccagggcagctcccctcctggaatagaatctttctttccatcctgcatggctgagagccaggcttccttcctggtctccgcaggaggctgtggcagctgtggcatccactgtggcatctccgtcctgcccaccttcttaagaggcgagatggagcaggcccatctgcctctgccctttctagccaaggttatagctgccctggactgctcactctctggtctcaatttaaaatgatccatggccacagggctcctgcccaggggcttgtcaccttcccctcctccttcctgagtcactccttcagtagaaggccctgctccctatcctgtcccacagccctgcctggatttgtatccttggcttcgtgccagttcctccaagtctatggcacctccctccctctcaaccacttgagcaaactccaagacaccttctaccccaacaccagcaattatgccaagggccgttaggctctcaacatgactatagagaccccgtgtcatcacggagacctttgttcctgtgggaaaatatccctcccacctgcaacagctgcccctgctgactgcgcctgtcttctccctctgaccccagagaaaggggctgtggtcagctgggatcttctgccaccatcagggacaaacgggggcaggaggaaagtcactgatgcccagatgtttgcatcctgcacagctataggtccttaaataaaagtgtgctgttggtttctgctgagttttttattgatatgtgctgctgttttctctggaagcctctttagggaatcgaggagcgcactggtgcaggggctgggtggagccatcctccgatggagcacaggcagacggaagcccccaccccagctgcgtggcctcaagccagcctcccgctccccgaaggtggtctccacacagacctgggacagtttcatccccgccccttccagggcagcagggctgaggatcccattctggctgtgtccacgtccgggccatggctagagtctgggtttaggggaggaaggcatggcggcgcccgctaggatttccagttgtcctcttcttcctctgcctgtggctgctgggggttagcagagacggtttgttgtctgacatacgggctctctcctcccggcccctcaccagccccagaggtgaaaaggctggaggggaaagggtgagtgagggaggtctgtggggagcactggtttccccaggccccagagacttaaacacaggaagaaaaaggcaagagagaattaacgatgccacagcccatggcagacagcggccctgcctcctacccttgcgtctcaggaccagcttgttgaagagatcccacatcagttccctgccttggcttacggctctcactgcaataggaaagccacggagtggggtgtggggttcagtcacatttgacccccggctccgtgttcctgtcccctgtagtgtttttgttattagacccttttttctccttggtttaggaatgggggccccagggccacccttgtccaggctccctctaccgtagaggtgagaattccagggagctacaatttgaaaaccactattttatgagccaagtagaacaagaaatgacaactattaaaaaaaataagggatttctgaccagctaacaaccccacagaaaatccgccagggatccagaaatgagactgaggtggcctcagagagctccctcctgaaggggatgctgctgctgtcgtcctgcccggcgccttggactgcagtggccggggcctggggtggggatgagggtgcactgaccagcaccgcagcagctgggggaggttggggtgctgttaacgtgccatcttataggtaggaagtggaaatgggagaaagtgtggggtgcctagggaaggaggtgactgagcagggagcctggctgccatcctaacacccagctcactgggcttgagcgacttgagcctggtgccagggcagagtgggtgatgctggggcccaggctggcaccatacttgaggtctgccaggcaggtcaggtaggatggcacatcgaccttgggggacttggcccaggtctggcatgtagaagtagttctctgggacccatgggattaggtggggacatgtgagaggtgacagggacctgcaggagcagctagcgagacctcatgtgcaccctgcacagctgtggtggcataagggattcaatagagcctctcctagagaggagcctggcagggcccccagcccttgcacctgcccctccctctccaccttctgctccagctgctctctcactgatggacaaggggcactgaacagtttatctgtctctacccccagcatcacatgggtctttgttacagcaccagccagtccgtctgggaagacagacttcttgtatctacaggggcgacgtggaggtcaggcaagccggcacctgctgtcctgggaccatgttcctgacctacctctcccatgtcatcagggacactgcactgaggggtcccaggccactgagccaagccaccctggtcaccttctggctcccacctctgtgctgcacctgagtgtgatgccctaggaccccattaagtcaggctgagtcttgcacccacaccctgcgactccattttctgctacacaggatctctctgatgttgacgagcagcatggagacctggggagaccccccaagcgcctcctccatgtcatccttgggctccagcttggcgctcacacacacaggaaaggacttcagcttctcctgggagggctgggtggctgaggggtggtggatttcggagttggactagcagctggcctagaggctactggggaggagggagcagggagcacccactcctgatccagattcactgcttccctcgcatctgtcatgaccccaaagaagcagatcctgaacctgggctcttgtctttacctttgttctcttccactctggggtaattaagaatgatttgctggccaggcgcggtggctcatgcctgtaatcccagcactttgggaggctgaggcaggtggatcacaaggtcaggagatcaaaaccatcctggctaacacggtgaaatcctgtctctactaaaaataatacaaaaaaaattagccagtcgtggtggcacacatctgtagtctcagctactcgggaggctgaggcaggaggatggcgtgaacctaggaggcggagtttgcagtgagtggagattgcgccactgcactccagcctgggcgacagagtgagactccgtctcaaaaaagaaaaaaagaatgatttgctaattaattatgcaggcagctgatccagtgctgtgtaaccttgggggccaccagatgccaatcaatcagtagaatgggagagaaggatggaggaagtgaggacaaggggcaaggaggaaggtctgtccacctgtctcttctgtgcaggaggtgtccaagcaggaggagcacgtcacatccccactgaaaaagcccacagaaaatgaaaagcccacatgcttgtccattgctgcaggatgggggcaagtggagggggagaggtgtcggcgctcccaccttactcccagtcatggctgactcctccctttccttcgttcttgttcctaatctgtcaccatgtcctgtcgttttctttgtctcacccaaccctctctgcctgaaaatcccctgacggcagcctcatccctgtcacctcctgactgtagttggtgacagaagaggaggctgcactagtgaaggagcagggactccaggtctggcaacaaccagggatggggccgggtgggggtgacttggaccaggagaggggcctgagtcaggcagtcacatacttcatgctggggtcccccaagtgaagcacatttagcaagatctgaaatacagggaaacagtcttgtttcttcaataaataaattgcaaaggagaaacaattgatgaaaggagaaacctatagatccagaaatactaacaggcaaatcaaacaatcataaggagagactttatttggattttgattcaaacaaactaacaaaaaaatgaaattactggaaatttggagacagtagggtagttggtagtattaaagaatagtagtgtgcgatggttggtatgataatggtattgcaattttgctttttttttaaaagagttcttggctgggcacagtggctcatgcctgtaatcccagcattttgggatgctaaggcgggaggctcatttgaggccaggagttcatgaccagcttagccaacatggcaaaaccccatttctactaaaaaaaaaaaaaaaaaaaaaaaatacaaaaaat

SEQ ID NO: 9167 - DNA, 636 bp, Homo sapiens
ggtttaggaatgggggccccagggccacccttgtccaggctccctctaccgtagaggtgagaattccagggcgctacagtttgaaaaccactattttatgagccaagtagaacaagaaatgacaactattaaaaagaaataagggatttctgaccagctaacaaccccacagaaaatctgccagggatccagaaatgagactgaggtggcctcagagagtggctccctcctgaaggggatgctgctgctgtcatcctgcccggcaccttggactgcagtgggcggggcctggggtggggatgagggtgcactgaccagcaccgcagcagcttggggaggttggggtgctgttaacatgccatcttataggtcggaagtggaaatgggagaaagtgtggggtgcctagggaaggaggtgactgagtagggagcctggctgccatcctaacacacagctcactgggcttgagagacttgagcctggtgccagggcagtgggtgatgctggggcccaggctggcaccatacttgaggtctgccaggcaggtcaggtaggatggcacatcgaccttggggacttggcccaggtctggcgtgtagaagtagttctccgggacacacgggattaggtaggga

SEQ ID NO: 9168 - DNA, 274 bp, Homo sapiens
ccatgacatcccttctcattaaacgtgggaaacaaaaaaggatttagatagagggcaattttaggaataaaataaataatgacagtaatggattataacccactgaataaaacagaaagacacgagcccataaataaacaaatgatttaaaagtttgactaggaatgggaatcctaaataatttcaaattgcctccccacaaaatacttattaattagaaagaggaaaaagagacacgctacagtgaagaaatctgggaggccctatcttaatc

SEQ ID NO: 9169 - DNA, 274 bp, Homo sapiens; identical to SEQ ID NO: 9168

SEQ ID NO: 9170 - DNA, 895 bp, Homo sapiens
catggcctcctgagaatccgacaagacgtaaatagccaagaatatctgtgaaacttcatcactgagttacaatatttatcactgcaagtgtgttgttcattgacactataaagccatgtggaattaagcagccttgaaacacaaaatggagaaaggctaagagctgagaattgttgccttcagggaaatacaatcaatgtcaagcaaacaaccaccccaaaatggttagctttatcagcattcaggcctacagtgaacgcaaatgttccagatctgagtttcaatttttaaagaataaacatatgcaaatgaccattagtcttagtagttttagggctcagaatgatcttatcttgttaacattcagggcaactgcttatacccatttgaatgtcatttagagggctaggaaagactgcttcaacatttgatgactaaatggcagggctcagccacaatgctcactccgagaaatgagaaatagacacaccagtatgctagatgctgatgcagttcaggaaatgctaccccaaaatatggcccctcagcatactgagtattttaagcagaaggcaattaagaaaaccacaaaaacagaaaggtccctctgaccttctcccaccctctctctcttgaagatcctcatgtgacaggtgacctgccatataatcagaaggaagaaatgttacacagagaggctgagaagaatctgaggacttgctaagttttccccagtttattaccattagatcatatgccttttttgttcaatcatacttctatacaactgtccatcattcattaaacctaaccacaaaagtagttttcactcggtttttgagtgaaggctcctgtgtcacataaaacttacattaaataaatttgttccactttt

SEQ ID NO: 9171 - DNA, 431 bp, Homo sapiens
tatttcctgacttggcttagaattgtgatgatgattgtaagaccagcctttgaagtaaaggagtttgagctgcacctttaccccatgtgcctgtagactgacacatggtgtcaccaacattgagcaccccctgccccccactccagacactgtgctctctagtaggtacactcatctctacctgccttgcaatatttgtatactgcaggggcaggtgtctgggttctggccctggctctggactctagtgtcctgatggagaaagtaggtagggagactggactggattagtggtgtttgaacttttttttcttttgtttactggaacctcttttccaaatgaaatcttaaaggcaaccctagtatataaaagagtgaaggaggaactgctgaggatgaagctgagcatggggcccccatcctcttttccc

SEQ ID NO: 9172 - DNA, 436 bp, Homo sapiens
gtgtttatttcctgacttggcttagaattgtgatgatgattgtaagaccagcctttgaagtaaaggagtttgagctgcacctttaccccatgtgcctgtagactgacacatggtgtcaccaacattgagcaccccctgccccccactccagacactgtgctctctagtaggtacactcatctctacctgccttgcaatatttgtatactgcaggggcaggtgtctgggttctggccctggctctggactctagtgtcctgatggagaaagtaggtagggagactggactggattagtggtgtttgaacttttttttcttttgtttactggaacctcttttccaaatgaaatcttaaaggcaaccctagtatataaaagagtgaaggaggaactgctgaggatgaagctgagcatggggcccccatcctcttttccc

SEQ ID NO: 9173 - DNA, 495 bp, Homo sapiens
ccccagtgtgttcttgaagcccttcctacactgattgtggtcaagtcagaacctgcctacacagtgcaggcccatcatgtggcattcaggacgttgctctccaagcctgcgcagcacaggaatgcctgctctctgtttcctttaccagtgctcagtgacctttaccagagacctgttcttgctgactctgattgtgtgcttctctgattagaaacgaatttttcttggctgggtacagtggcttatgcctgtattcccagcactttgggacgccaaggtggaagaattgcttgaacccaggcattcaagactagtttgggcaatatggcaaaccctgtctctacaaaagaaaaaaaaaatacaaaaattagctgggcatcgtgcgtgcctgtagtcccagctacttggtaggctgaagcaagaggattgcatgagcctgggaggttgaggctgcagtgagtcgtgttcactgagaccctatctcaaaaaaaaaaa

SEQ ID NO: 9174 - DNA, 1543 bp, Homo sapiens
ggagtgattttgctagtttgacttctccaaagcctctgtgtaggtggtagggagtgagtcaaagcactaatagaccaggcaacttaccacttggagtggatttgccttacttttgccctctcccattttctgttttgagttatttatcttgtaaagtctgttttcctttcccaaggaataattccttttgtctacctaacattgacttatgtcttagactgacactgttttaggcttttcactaggcacattccgaaggtaccaacaagttaataacgtcacctactctccactaatagatgctatgctaagagaagtgaataatctttctttggtagaaaataggctgagatataaggtgatattgctattgacctgaaaatgtgatagaacttctggttgcctattgattattcctccatgtctgataaatgaatctgcttcctaccatttgtacttgtcttggagctggctataaagaagtatgctggtttgttatgtactcttttcaacagtatcatagcccaacttcatctcattgaattgttcacatataccagagtactctctcttgaggaacacctgcaggcagatagttagggatgaccatgaggagcataatcaacagggatagaagtacacttatacaacagcacttacatgggcggtttctctggtagcatgtcccataagaggccatatgcttataattaatgtgtaacttgttgatgcttttgagatcaggactgctccaggcacgctaaaaatgtgctaaagtatagtgggctctctaaaaagaggctatttgggagtctctgaattttgtttcagagtttagccatcagaaaggtgagtttggccatcagagttttgtcctgtgcaccataaaagtctctgaattttcgtttcctcatgtaccttaatttctaaaacggatgataaaagttaggttggacacagaaggggcaatcaaatttctgtattcagatacctcttaaaggtacactgtgccaccttgctgcctttgattgcaaatacaaagttaattttcaaaaaggaaaaacaaaacagctctttttcctaaaacacatgttgtacttcagacctaaaattctaagtcttatttgtttctcacccatgagttagatttaggtaatagtattagtagagtccttagagaatcttaagaggtcatttactccacctctttcattttaaattggggtatccaaagcctgaagaggtggcctggccaatattgaccaaggtataactaaatatgagctagcatcttcttccttcttctcgctatcccttggctttaaaagatttagtacatgaagaataatgcattagcaaaaagctcctagtttgtgtttcccctttgtgtctccctgttggctttctgagacaacctgaattttgccaacaaaatatcgcagagggatttatattaattattttttagttagatgaatattatattcttcccatccaagtgagtgatttgctaggtttgtttagggagggaaaaagcaagaat

SEQ ID NO: 9175 - DNA, 1543 bp, Homo sapiens; identical to SEQ ID NO: 9174

SEQ ID NO: 9176 - DNA, 785 bp, Homo sapiens
agattgttaaggtagaatctattggggatgtatcagaggttagaagtaaaaaagatcagaaccagtttatttcttctgaacccactgctttacattcatcagagccccagcactccctgataaattcaactgtggaaaacagagtaagtgaaatagaacaaaaccatctccacaattatgccctttcttatacaggcagtgataacatcatcatggcctcaaaagatgtctttggccctaatattcgaggtgtagacaaaggcctacagtggcatcaccagtgcccaaagtgtaccagggtgtttcgtcacctggagaactacgccaaccatttaaaaatgcacaaactctttatgtgtctactctgcggcaagactttcactcagaaaggcaaccttcatcgacacatgcgtgtgcatgccggaattaaacctttccagtgtaaaatctgtgggaaaaccttttctcagaagtgttccttacaggatcatcttaaccttcacagtggagataagccccataaatgtaactattgtgatatggtttttgcacataaaccagttttgaggaaacaccttaaacagctgcatggcaaaaacagctttgataatgccaatgagagaaatgtacaagacctcacagtggattttgattcttttgcatgtacaacagtcacagactctaaagggtgtcagccacaacccgatgcaacacaggtcctggatgcaggtaaactggcccaagctgtcctgaacttaagaaatgatagtacttgtgtgaattga

SEQ ID NO: 9177 - DNA, 1761 bp, Homo sapiens
tgatttttgtcttttgttcaaatatttaaaatgataatacagttgagtggtaagactaataggtaccttatgcctaacatcactcattatatggtctaatgatgcttcctagcattgtgatttttacatgatccagccaaagagtaccaattctatgcaatagtgagactctaccctgtcaaccaaacagcattttttggtattttctgtcaacatcatttcttcacagggaaatttcaagttggagtgcttcgtttgctcacattcatgtcttgtttttgttactggtttgaagactaaaaggcacgggttcaaataagattggtctctttggttggagactatttctgggttcattcagttgttcaagaaacattagttaagcacctactgttgctagacactatgctagatactgaggataatgaaggtaagattgatatagtccctgccctcatggagcttatagtctcatgtggtcttagtgaaacaaagtctcaatttgcttttatactagaaataataaagaaagctgccttgctgtattcgatcagttaaaatcagcaactttgtgcttttgtatcagtaaaacatttagttctcaccttttgaaaatgcaaaccactgaagtgatttacagtctcctccatttttggctggagaggtgttctgtttctgtgagacatttttctaatttttgtggaacttcactttcctccttctttgcttatacgtgtttgttagattatattgcaaagaagtcaagttactgatatccagtattttacagaggaagatgactttcaaaactagtcatatttctgtagaggaggaagatttttaaaacctttatcattcagcatttgtattttatggatccccaggagaactaaaaaggagatgactctctaccatagtttggtttaaaaaaaaattactctgtcagttatttatttattatttaatactaaactccaaactgaagtggctctgaggtaaatcagatatgattttaatttaagtttctttattagcagatctataaatggaaggtgaccaatgtcactgcttctaaaatactgtcctaaacaacccagaagattttatttcagctcatgaatagctgttctaaatctgttgtatgttagacatactatgaactacctcttcacttattatggggaagtttccttaataaaagtgtgacgattaaagctctggtgtcattggttattttctcactctcccctccttctattcttttttaattgctttactttgaatacaggaaggtcttctttatgtatagtcttaaaaatacatattaagcatgctgagcttgccttcagaaaaaaatacgaattaatcagaaagttgttactagattcatttacttccacgagaacctgttgctggaggagcagagcaactgcctttaagaattggttcagaggcggccgggcgcggtggctcacgcctgtaatcccagcactttgggaggccgaggcgggtggatcacaaggtcaggagatcgagaccatcctggctaacacggtgaaaccccgtctctactaaaaatacaaaaaattagccgggcctggtggcagggcattagtcccagctactcgggaggctgaggcaggagaatggcgtgaacccgagaggcggagcttgcagtgagccaagatcgcaccactgcactccagtctgggcgacagagcgagactttgtctcaaaaaaaaaaaaaaaaaaaaaaaaaaa

SEQ ID NO: 9178 - DNA, 1761 bp, Homo sapiens; identical to SEQ ID NO: 9177

SEQ ID NO: 9179 - DNA, 785 bp, Homo sapiens; identical to SEQ ID NO: 9176

SEQ ID NO: 9180 - DNA, 540 bp, Homo sapiens
ctttgagggggttagactatacaatcgacatttaatgagggcctcctgttttctgggcacagcacgaggcccgaggacacagaggtgaatcagactctgcctctgaccttgaggagcttctggaccagtggaaaggaaggcagtcatgaaaactgatgatccactgaggttctgctagaactaagtcgtccaaagtgatatggagcatcagaggaggcttctgggagaggtgacatttcagttgggcctcaaagaatgacaggggaggtgccagacagagagggcagaggattggcactccagagagcatcatgggcaatggcacagaggtatgaaacctcctggctggattcaagggatagttacctaatgtggtcataggacaggacagagggcagggctgataataggcagcccagtgggagtggttggccttgaagagttggaattttttttttttttttttttgatacagggtctcaccatctgctaggctggagtgcaatagtgagatcatagctcactgcagcctccaactcc

SEQ ID NO: 9181 - DNA, 124 bp, Homo sapiens
ttttttttttgagatggagtctcacactgttgcccaggctggagtgcagtggggcaatctccgctcactgcaacctctgcctcccaggttcaagcgattctcctgcctcagcctcccgagtagc

SEQ ID NO: 9182 - DNA, 604 bp, Homo sapiens
ctggcctgcctctggtctcctcctacccccactaggctcagagaatctcccctccacacccacaccacaacctactttagaagggctgctgcatttcctccaggctttctgacccccttcctgtccctgcagggcaggggccccgaggagctggaggcccaagggccttgttctggtcccagggcctggggacacctgccaccgagggccaagaggaggatggacgtggacacagccccgagagcctggcccggacacagcagcagctctgcagaaccaaggcaagcattggggaccttgttgggagtcggggggcagcccaggggccagtgtctgaggtcctgctgtctgtctggccacccaggactccctcatccctggaaactgtgctttaccatggaggccacccactctgtctcctctaaggttctgaggctgaatgggctagggggcttgcggggaggccccagtgtccagcactgtgggacctggcagggtgcctgcggccaggacccagcggggccaggtgttggtctaacagtgcagcttcgttcatatccccagcccctgcccacctgctctgagcacagtgatggccctggga

SEQ ID NO: 9183 - DNA, 98 bp, Homo sapiens
cacccaggctggagtgcaatggggcgatctcagctcactgcaacctctgcctcccaggttcaagcaattatcctgcctcagcctcctgagtagctggg

SEQ ID NO: 9184 - DNA, 681 bp, Homo sapiens
gagacagagtctcactctgtcacccaggctgcagtgcagtggtgcgacctcggctcactacaacctctgcctaccaggttcaagcgattctcctgcctcaacctcctgagtagctgagattacaggcacacgccaccacgcccggctaatttttgtatttttagtacagacagggtttcggcatgttggccaggctggtctcaaactgctgacctcaggtgatccacccgactcggcttcccaaagtgctgggattacaggcatgagccactgcgcccgaccagaacaccagacattaacttgcatccagatgaagaaataaagagcagaggtaagggtaactatgtaggtatggtgaaagacaatataaacagttttgtttgtaaattttctgttttaaaggacagctgcctaaagcaataattacaaaactgtgttgatgggcttataatatatagagatgtaatttgtatgataataatagcacaagggagtgaggagagaataaaggtatattggagtgactcttgactgccactattgaaattaagtggatatgaatccaaaagagattgttttaagatgttaattgtaatccccaggctaaccactaagagaatacatttaaaatacatatggcaaaggaaataacaaaggaattttaaaagatacaatggaaaa

SEQ ID NO: 9185 - DNA, 681 bp, Homo sapiens; identical to SEQ ID NO: 9184

SEQ ID NO: 9186 - DNA, 238 bp, Homo sapiens
ttttttttttttttgagacagagtctcgctctgtcgcccaggctggagtgcaatggcacaatctcagctcactgcaagctccgtctcccaggttcacgtcattgtcctgcctcagcctccccagtagctgggaccacaggcacccgccaccacgcctggctaattttttgtatttttagtagagacggggtttcactgtgttatccaggatggtctcaatctcctgacctcgtgatct

SEQ ID NO: 9187 - DNA, 218 bp, Homo sapiens
ttttttttttttttgagacagagtctcgctctgtcgcccaggctggagtgcaatggcacaatctcagctcactgcaagctccgtctcccaggttcacgtcattgtcctgcctcagcctccccagtagctgggaccacaggcacccgccaccacgcctggctaattttttgtatttttagtagagacggggtttcactgtgttatccaggatggtctca

SEQ ID NO: 9188 - DNA, 493 bp, Homo sapiens
atttttaaaaatcctaaagaatcaacaggtcaaaaaaagagatcatccagggaaagtaggaaatactttgagatggatgaaaataaaaacaccaaaatttatggaatactactaaaccagtgcttagagggacatttatagttaatgcttacattgaaaagaagatatatctcaaatcaataatctaacattctaccttaagaaactagaaaaagaagagcaaatgaaactcaaagcaaacagaatgaagaaaataataaacattagagtggaaataaatgaaatacagaaaaggaaacagtggagaaaaatctgtgaaatagtaagttagttctttgaaaagatcaacaaaattggcaaccctttagttagactcaccaggaacaaaagagaagatgcaaatgactaaaatcagaatgtgggaacactgtgatgttggcacgagtctgaatatactgaaagtccccaaattgttgtgtacactttttttttt

SEQ ID NO: 9189 - DNA, 1216 bp, Homo sapiens
  SITE (951): n equals a,t,g, or c
tttttttttccccagtggttatcatgagacttatgtaaaacctcttgtattttaatagtctagtttaagatgataacaatttagagtattctgaatttcagtatgtatttaccatttttagtgacatttatactttagtatttttcatattgttagttagcatttcgtcatatcaatgtgaagatttcttccagaccatggctggagaaggaaagaaggtgtgttttgcctgattcagggactatagagagaaccaagttctgcaggcctgtcacctaagtctcagatgagtatgaattctcttgtgtttttcacagatttttgcagtggcaggaccaagttcaaatgagttatagccaagtctacagtaagatgtggcagtattctgttttgaaccgaggaccatgattggcaagcttgccacttggtcaagtgcttaccctctaaagatgtcttccttggtctttgcctccagctgggtgtcacaaactctgaactggattccaaggctttcatgaatgcacttatgtttcctgtggcagctgcattatgttgtgggggatgtggatgcagaacctcccattctgtcatcttgcttatgttactctcctttatgtttcactttctcaaatgaatgtcaagctggtgatttttagattcaaaaattctaaaataaattgctcaaatttccacattatgtaagctattaataaaatgtcttgtaggtgctacatatttattaaaatttttggttgtaattttaagctcactgcaggcagaaaggaatcattaacatttatattcttttctttagtctgtatctaaatgatggcatattttaattccagatatttactttatactgcagtaatgctcgtcatattttgcaaaatgtatgttgttcttttatttggaaatataaggcttttttagctcctgaaatctatattnatagtcatataattttattatgttttgtggtaagaagtgcagcaacatattgagaacataataaaattatcctgtatttttaatgattatttattaaattcctctcattagagcctgttattaatgattgtaatgtattttctgtataattttactgcaatttattaaattctaatgacttaaattgtctgcttttcatgagtgcacacagttgaatgctgtagatatctaaagaattatttttcggccggttgtggtggctcat

SEQ ID NO: 9190 - DNA, 1496 bp, Homo sapiens
ttttttttttccccagtggttatcatgagacttatgtaaaacctcttgtattttaatagtctagtttaagatgataacaatttagagtattctgaatttcagtatgtatttaccatttttagtgacatttatactttagtatttttcatattgttagttagcatttcgtcatatcaatgtgaagatttcttccagaccatggctggagaaggaaagaaggtgtgttttgcctgattcagggactatagagagaaccaagttctgcaggcctgtcacctaagtctcagatgagtatgaattctcttgtgtttttcacagatttttgcagtggcaggaccaagttcaaatgagtcatagccaagtctacagtaagatgtggtagtattctgttttgaaccgaggaccatgattggcaagcttgccacttggtcaagtgcttaccctctaaagatgtcttccttggtctttgcctccagctgggtgtcacaaactctgaactggattctaaggctttcatgaatgcacttatgtttcctgtggcagctgcattatgttgtgggggatgtgcatgccgaacctcccattctgtcatcttgcttatgttactctcctttatgtttcactttctcaaatgaatgtcaagctggtgatttttagattcaaaaattctaaaataaattgctcaaatttccacattatgtaagctattaataaaatgtcttgtaggtgctacatatttattaaaatttttggttgtaattttaagctcactgcaggcagaaaggaatcattaacatttatattcttttttttagtctgtatctaaatgatggcatattttaattccagatatttactttatactgcagtaatgctcgtcatattttgcaaaatttatgttgttcttttatttggaaatataaggcttttttagctcctgaaatctatattatagtcatataattttattatgttttgtggtaagaagtgcagcaacatattgagaacataataaaattatcctgtatttttaatgattatttattaaattcctctcattagagcctgttattaatgattgtaatgtattttctgtataattttactgcaatttattaaattctaatgacttaaattgtctgcttttcatgagtgcacacagttgaatgctgtagatatctaaagaattatttttcggccggttgtggtggctcatgcctgtattcccagcaccttgggaggccaaggcgggtggatcacgaggtcaggagatcgagacaaccctgactaacatggtgaaaccccgtctctactaaatatacaaaaaattagccgggcatagtggcaggcgcctgtatccccagctactcaggaggctgaggcaggagaatggcgtgaactcagtggacagagtttgcagtgagccgagatcgcgccactgcactccagcctgggcaacagggcaagactctgtctcaaaaaaaaaaataaaaaaa

SEQ ID NO: 9191 - DNA, 3891 bp, Homo sapiens
gggaaccgcccaatcaggcgcgcggtggcagaggagaggaaaggagggcgtggcttcctgcatttggcgggatctgtgtctctcgctggtgctggcacaagagcttgggatccgtctcctctttcgcctcctgcaccttgggagccccgggctactctctcacagcccctgttgccctgtgatctgtaggtcttgggggacgcatagttaaggtgccaggacatcctggaagctgggaaatggtgagtatacggggttcgccatcccgagaggggagaacagactgtgaaaccggcaggaccggcctccccacggttagctccgagtctcccgcagcttggccctcagtcccctgtggctgcaagatggccgctgggccagcagcgagggcccccacgtcccgtccggcccatccggtcctgtccctgggcagcgccctgctctgcgcccacagccatgagtatttcccagattgttcagggaggcctggtgggtcatcagggaaaaaccgcgactgggtgtttgcgtgggaggagctgcggcccgtggggtccccagtctctcttgttaaaaattaacgggagtctatgttaaaaggttcatcagtttatctgaacaaagagtgattggtgaaatggaaagcacccagccatgatttctggtccaccagaggggcataaaggaaaggcttttataagatgcatgagaaagcaacccaaattcaagaattggttccagttatatggtagccttatttgaactatccagatggaaatgtcctggttacatattcagaggttaattgcatgtttgtcatgggttaaacctgcattttgcttcaggctaagatagtgttttataggaaatatatttgagttaggttttagatttttttttgtttgttttttgctttttacctatgaacacagggcactagagccactttagactaattttctgatctttaattattttaacactccagaggaggactggttttctcctgtgtttttttaatgtatggcaagtggaacctctaatcgaccaccctgtttttcatcctaactcaggcttgcagtaaaattatcagttcccactttctttgctgcattctcaaatgcaacacatgagaccagctttcccttgccaatttacaatgctgttaactatatgtcctttattatacatttcattaaagttttctattatttggtttctttctacttctccctacagttctggcaatatttgctttttatatttagaagcctcccttttgggtgcataaatatataaagctatattctcttgagaaattaacctctattattattgtatggtaaactcatttcatgcttgtgagagacattgctagaaagtctattttgtctaatttaagcattaccgttgcactcctttggttattgtttgcatggaatatcattttctatcctttcacttttagcctatgctcttaattcataattgagtctcttgtaagcagcatattacgaggtttaaaagattaatttatccactctgtctgctttagtctcttttggctgctataactgaatatcacacactggtaattaataaagaatcgaattttatttgacttatgattctggaggctgggaagccaaaacaacatgatactggtatatgttgaaggtctagttgctggataataacatagacaaagatgtgagggagagagagctttttttttttaatatataacagatccattcttgttaaaattagcccattcccataataagaacattaatccattcatgagggcagagttcttagagcttaattaatttttaaaggttccacctcttaattctaacatgttggctattaaattttatcctaaattttggagatgacattcagtgtacagcagtatctgtttagtagatactttaatctttttatttgtaaggtagtgataggtaaggagttactattgtaaatttgtagttttctgtccattttaagtttgcttcttttttttctggttctgtctttcctgtggtattgttcatttttgttgagacaaagttatgctttcttgctcagactgaagtgtagtggcatatcacagctcactgtagcttcaacctcctgggctcaaataatcctcccaccttagccacccaagtagcttggactacagacacgtaccgcaacacccaaggagatttcatccttccaccttggcctcccaaagtgttggaattataagcaggagacaccatatccaatgtgtaatttttgttgtttgtgtatgctttaattactttctctttttctttactgcagtttttttttcctagtggttatcatgagacttaggtaaaacatcttgtattttaatagtctagtttaagatgataacaatttatagtattctgaaattcagtatgtatttaccattttagtgacatttatactttagtatttttcatattgttagttagcatttcatcatatcaatgtgaagatttcttccagaccatggctggagaaggaaagaaggtgtgttttgcctgactcagtgactatagagagaaccaagttctgcaggcctgtcacctaagtctcaggtgagtatgaattctcttgtgtttttcacagattgttgcagtggcaggaccaaggtcaaatgagttatagccaagtctacagtaagatgtggcagtattctgttttgaagccgggaccatgattggcaagcttgccacttggtcaagtgctcaccctctgaaaatgtcttccttggtctttgcctccagctgggtgccacaaactctgaactggatttcaaggctttcatgaatgcacttacgtttgctgtggcagctgcattatgtcgtgggggatgtggatgcagaacctcacattctgtcgtcttgcttatgttactctcctttatgtttcactttctcaaatgaatgtcaagcaggtgattttcagattcaaaagttctaaaataaattgctcaaatttatacattatgtaagctgttaataaaatttcttgtaggtgctacatatttgttaaaatttttggttgtaattttaagctcactgtaggcagaaaggaatcattaagatttctattcttttttagtctgtatctaaatgaccatatattttaattccaaatatttactttatacttcagtaatgctcattgtattttgcaaaatttatattgttcttttatttgaaaatataaggctttttttagctcctgaaagctatattatagtcatatagttttattatagtatttgataagaagagcagcaacatattgagaacagataaaattctgctgtctttttaatgattatttattaaattcttctcattagagcctattattaatgattgtaatgtatttactgtataatttttctgcaatttattaaatgccaatgacttccaatgtctgcttttcatgactgcacacagtttaaagctgtagatatctaaagggttatttttcagcccggcatggtggctcacgcctgtaatcccagcactttgggaggccaaggtgggtggatcacgaggtcaggagatcaagaccatcctggctaccacggtgaaaccccgtctctactaaatatagaaaaaattagccgggcatagtggtgggtgcctgtattcccagctactcgagaggctgaggcaggagaatggcgtgaacccagtaggcggagcttgcagtgagccgagatggcaccactgcactccagcctgggcgacagggtgagactgtctcaaaaaaaaacaaaaagggcttatttttcattgtatatttatgttgtattcaggattttatgcattaaaatctctcttcttattttca

SEQ ID NO: 9192 - DNA, 5905 bp, Homo sapiens
gggaaccgcccaatcaggcgcgcagttggagaggacaggagaggagggcgtggcttcctgcatttggcggggtctttgtctctcgctggcgctggcacaggaacttgggatccgtctcctctttcgcctcctgcaccttgggagccccgggctactctcccacagcccctgttgccctgtgatctgtaggtccttggggacgcatagtcaaggtgccaggacatcctggaagctgggaaatggtgagtatacggggttcgccatcccgagaggggagaacagactgtgaaaccggcaggaccgtcctccccacggttagctccgagtctcccgcagcttggccctcagtcccctgtggctgcaagatggccgctgggccagcagcgagggccccacgtcccgtccggcccatccggtcctgtccctgggcagcgccctgctctgcgcccacagccatgagtatttcccagattgttcagggaggcctggtgggtcatcagggaaaaaccgcgactgggtgtttgcgtgggaggagctgcggcccgtggggtccccagtctctcttgttaaaaattaacgggagtctatgttaaacgttaaccagtttatctgaacaaagagtgattggtgaaatggaaagcacccagccatgatttctggtccaccagaggggcataaaggaaaggctttcataagatgcatgagaaagcagcccaaattcaagaattggttccagttatatggtagccttatttgaactatccagatggaaatgtcctggttacatattcagaggttaattgcatgtttgtcatgggttaaacctgcattttgcttcaggctaagatagtgttttataggaaatatatttgagttaggttttagatttttttttgtttgttttttgttttttacctatgaacacagggcactagagccactttagactaattttctgatctttaattattttaacactccagaggaggactggttttctcctgtgtttttttaatgtatggcaagtggaacctctaatcgaccaccctgtttttcatcctaactcaggcttgcagtaaaattatcagttcccactttctttgctgcattctcaaatgcaacacatgagaccagctttcccttgccaatttacaatgctgttaactatatgtcctttattatacatttcattaaagttttctattatttggtttctttctacttctccctacagttctggcaatatttgctttttatatttagaagcctcccttttgggtgcataaatatataaagctatattctcttgagaaattaacctctattattattctatggtaaactcatttcatgcttgtgagagacattgctagaaagtctattttgtctaatttaagcattaccgttgcactcctttggttattgtttgcatggaatatcattttctatcctttcacttttagcctatgctcttaattcataattgagtctcttgtaagcagcatattacgaggtttaaacgattaatttatccactctgtctgctttagtctcttttggctgctataactgaatatcacacactggtaattaataaagaatagaattttatttgacttatgattctggaggctgggaagccaaaacaacatgatactggtatatgttgaaggtctagttgctggataataacatagacaaagatgtgagggagagagagcttttttttttaatatataacagatccattcttgttataattagcccattcccataataagaacattaatccattcatgagggcagagttcttagagcttaattaatttttaaaggttccacctcttaattctaacatgttggctattaaattttatcctaaattttggagatgacattcagtgtacagcagtatctgtttagtagatactttaatctttttatttgtaaggtagtgataggtaaggagttactattgtaaatttgtagttttctgtccattttaagtttgcttcttttttttctggttctgtctttcctgtggtattgttcatttttgttgagacaaagttatgctttcttgctcagactgaagtgcagtggcatatcacagctcactgtagcttcaacctcctgggctcaaataatcctcccaccttagccacccaagtagcttggactacagacacgtaccacaacacccaaggagatttcatccttccaccttggcctcccaaagtgttggaattataagcaggagacaccatatccaatgtgtaatttttgttgtttgtgtatgctttaattactttctctttttctttactgcagtttttttttcctagtggttatcatgagacttaggtaaaacatcttgtattttaatagtctagtttaagatgataacaatttatagtattctgaaattcagtatgtatttaccattttagtgacatttatactttagtatttttcatattgttagttagcatttcatcatatcaatgtgaagatttcttccagaccatggctggagaaggaaagaaggtgtgttttgcctgactcagtgactatagagagaaccaagttctgcaggcctgtcacctaagtctcaggtgagtatgaattctcttgtgtttttcacagattgttgcagtggcaggaccaaggtcaaatgagttatagccaagtctacagtaagatgtggcagtattctgttttgaagccgggaccatgattggcaagcttgccacttggtcaagtgctcaccctctgaaaatgtcttccttggtctttgcctccagctgggtgccacaaactctgaactggattccaaggctttcatgaatgcacttatgtttgctgtggcagctgcattatgtcgtgggggatgtggatgcagaacctcacattctgtcgtcttgcttatgttactctcctttatgtttcactttctcaaatgaatgtcaagcaggtgattttcagattcaaaagttctaaaataaattgctcaaatttatacattatgtaagctgttaataaaatttcttgtaggtgctacatatttgttaaaatttttggttgtaattttaagctcactgtaggcagaaaggaatcattaagatttctattcttttttagtctgtatctaaatgaccatatattttaattccaaatatttactttatacttcagtaatgctcattgtattttgcaaaatttatattgttcttttatttgaaaatataaggctttttttagctcctgaaagctatattatagtcatatagttttattatagtatttgataagaagagcagcaacatattgagaacagataaaattctgctgtctttttaatgattatttattaaattcttctcattagagcctattattaatgattgtaatgtatttactgtataatttttctgcaatttattaaatgccaatgacttccaatgtctgcttttcatgactgcacacagtttaaagctgtagatatctaatgggttatttttcagcccggcatggtggctcacgcctgtaatcccagcactttgggaggccaaggtgggtggatcacgaggtcaggagatcaagaccatcctggctaccatggtgaaaccccgtctctactaaatatagaaaaaattagccgggcatagtggtgggtgcctgtattcccagctactcgagaggctgaggcaggagaatggcgtgaacccagtgggcggagcttgcagtgagccgagatggcaccactgcactacagcctgggcgacagggtgagactctgtctcaaaaaaaaaaaaaaaaaaaaaaagggcttatttttcattgtatatttatgttgtattcaggattttatgcatttaatctctcttcttatgttcaattctgtgttgttgtgtttcttttcttgggggggtatgttttctcagatcagttaattgtatttttgcttttaaagcttgatatcatgagttgaatgataattttttaactcggtacactttatgacaatgtgatatttaatttatatgtgaattagccgtgtttgttgcttatacatatatctatgtgtttttcacctatgtatgtcatttttttcatcttttttccttgtttttttttttaagtttcagatacgctttctttttcttttttttgtttttttcttttaaagagaattttaaaacagagtcaaatgaacaaaaatcagttatttgtcctcttgcagggcgggtagaccttccttccccacgggtttgaggctatggctaagtggtgagccttggggagatgcaggaaggatccatcccaggcacttggctagaggtaagtaaaaatagcctttggaccagaagacctgatagtttgggtactcgtctgaacataagtccccatcttcccagaaatgtcgtcttttgtctgcaacaactggctggagaaatatttcagaaagatgtgtgcctggaacacccaaagacgtacctttcctttctctttggcataggccttgtagcactgtagaaagaccaggtttgcaatggagccttcaatactcttcatccctatggatctcaggggctcatagggtgacaggagaggagacaagctagcttgggaagagtctttgtacttcagcttctcccctactgaaacactatatacttggggccacagttcatcacaaaacacacatgctctctttctttctctcacacccacatcttgggaacccaacaacttgatggcaggtagctctgggtatccttggtctggcattcacccactgggcatctaagctgtcctaaagctcttttcaatcacttctcactctttccaggcccatgtgggtaggtgttccagccttcactctttcaggctgatcatagaggcacagtgtgggaaaatcccctactgtgatggccattgctgggaagcagggaaggttaagggcccactgctgcccaaggctagtgcagaggccctctgctcctccactcatctcctcaaagaatgatatcaggtgcagcagctgctgtctggaatgttatcaaaccaggactgcacaggcactgcattctctgtgtggaagaggtaagaagcaggctagttgtccaggatgagttttcctcaggtccctccccagatggctgacgttcttgacatagcagccctggtgaaacaaacatgactcatgggtcaggcagccccaaaccatcccatacccgtccagctcacccgtcacaggatctgcctacttgttcaggctgggaagaagagagcaatgacgaaaacacatttaaacatttcctccattcatgtcaggaactcatccatataaggcctcatgagcacatggatctggtgcatggtcccctcaagctctacaggcactaggcagtcagcattgctgattggcttaaaggagctatgcacaagggtttcatccaggtcagtgaccatacagatccttccttgatttttctctgtcacctctgggagcaggcaggttcctgggatctgataaaactgatattggagacgctggagctgatccgacatagcaatggtgttgactccctccttatgtgtggattgctcagcgggggaacttgactgtccaacatgctgggtgcaagaacagcagaaaggggacttttaagatgtggcaaacatgaggcctcttcggagaggactttggaaaccaggccttgcttggtaaggaccagggcatcttccctccatgcctgggtgatgatggagccttgttccatctaacaatcctgagggctgggctggggggcatgggctggggcctgattcagttcccgagattctgacctccacagctgttcacataccccttctcctttccatactggtcgggaaggga

SEQ ID NO: 9193 - DNA, 5834 bp, Homo sapiens
tttggcgggatctgtgtctctcgctggtgctggccaggagcttgggatctgtctcctctttcgcctcctgcaccttgagagccctgggtactctgtcacagcccctgttgccctgcgatctgtaggtccttggggagcatagttaaggtgccaggacatcctggaagctgggaaatggtgagtatacggggttcgccatcccgagaggggagagcagactgtgaaaccggcaggaccggcctccccacggttagctccgagtctcccgcagcttggccttcagtcccctgtggctgcaagatggccgctgggccagcagcgaggacccccacatccggcctggccatccggtcctgtccctgggcagcgccctgctctgcgcccacagccatgagtatttcccagattgttcagggaggccagatgggtcatcagggaaaaaccgcgagtgggtgtttgcgtgggaggagctgcggcccgtggggtccccagtctctcttgttaaaaattaacgggagtctatgttaaaaggttcatcagtttatctgaacaaacagtgattggtgaaatggaaagcacccagccatgatttctgggccaccagaggggcataaaggaaaggcttttataagatgcatgagaaagcagcccaaattcaagaattggttccagttatatggtagccttatttgaactatccagatggaaatgtcctggttacatattcagaggttaattgcatgtttgtcatgggttaaacctgcattttgcttcaggctaagatagtgttttataggaaatgtatttgagttaggttttagatttttttttttttttttttttttttaacctatgaacacagggcactagagccactttagactaattttctgatctttaattattttaacactccagaggaggactggttttctcctgtgattttttaatgtatggcaagtggaacctctaatcgaccaccctgtttttcatcctaactcaggcttgcagtaaaattatcagttcccactttctttgctgcattctcaaacgcaacacatgagaccagctttcccttgccaatttacaatgctgttaactatatgtcctttattatacatttcattaaagttttctattattgggtttctttctacttctccctacagttctggcaatatttgctttttatatttagaagcctcccttttgggtgcataaatatataaagctatattctcttgagaaattaacctctattattgtatggtaaactcatttcattcttgtgagagacattgctagaaagtctattttgtctaatttaagcattaccatttcactcctttggttattatttgcatggaatatcattttctatcctttcacttttagcctatgctcttaattcataattgagtctcttgtaagcagcatattatgaggtttaaaagattaatttatccactctgtctgctttagtctcttttggctgctataacagaatatcacacactggtaattaataaagaatagaattttatttgactcatgattctggaggctgggaagccaaaacaacattatactggtatatgttgaaggtctagttgctggataataacatacacaaagatgtgagggagagagagctttttttttttaatatataacagatccattcttgttataattagcccattcccataataagaacgttaatccattcatgagggcagagtgcttatagcttaattaatttttaaaggttccacctcttaattctaacatgttggctattaaattttatcctaaattttggagatgacattcagtgtacagcagtatctgtttagtagatactttaatctttttatttgtaaggtagtgataggtaagcagttactattgtacatttgtagttttctgtccattttaagtttgcttcttttttttctggttctgtctttcctgtggtattgttcatttttgttgagacaaagttatgctttcttgctcagactgaagtgcagtggcatatcacagctcactgtagccttaacctcctgggctcaaataatcgtcccaccttagccacccaagtagcttggactgcagacatgtaccacaacacccaaggagatttgattcttccaccttgacctcccaaagtgttggaattataagcaggagacaccatatccaatgtgtaatttttgttgtttgtgtatgctttaattactttctctttttctttactattttttttttcctactggttatcatgagacttatgtaaaacatcttgtattttaatagtctagtttaagatgataacaatttatagtattctgaaattcagtatgtatttaccattttagtgacatttatactttagtatttttcatattgttagttagcatttcatcatatcaatgtgaagatttcttccagaccatggctggagaaggaaagaaggtgtgttttgcctgattcagggactatagagagaaccaagttctgcaggcctgtcacctaagtctcaggtgagtatgaattctcttgtgttttccacagactgttgcagtgtcaggaccaaggtcaaatgagttatagccaagtctacagtaagatgtggcagtattctgttttgaagcgaggaccatgattggcaagcttgccacttggtcaagtgcttaccctctaaagatgtcttccttggtctttgcctccagctgggtgtcacaaactctgaactggattccaaggctttcatgaatgcacttatgtttgctgtggcagctgcattatgtcgtgggggatgtggatgcagaacctcccattctgtcgtcttgcttatgttactctcctttatgtttcactttctcaaatgaatgacaagcaggtgattttcagattcaaaagttctaaaataaattgctcaaatttacacattatgtaagctgttaataaaatttcttgtaggtgctacatatttattaaaatttttggttgtaattttaagctcactgtaggcagaaaggaatcattaagatttctattcttttttagtctgtatctaaatgaccatatattttaattccaaatatttactttatacttcagtaatgctcattgtattttgcaaaatttatattgttcttttatttgaaaatataaggctttttttagctcctgaaatctatattatagtcatatagttttattatagtatttgataagaagagcagcaacatattgagaacagaataaaattctgctgtctttttaatgattatttattaaattcttctcattaaagcctattattaatgattgtaatgtatttactgtataattttactgcaatttattaaatgccaatgacttctaatgtctgcttttcatgactgcacacagtttaaagctgtagatatctaaagggttatttttcagcccggcacggtggctcatgcctgtaatcccagcactttgggaggccaaggtgggtggatcacgaggtcaggagatcaagaccatcctggctaacacggtgaaacccagtctctactaaatatagaaaaaattagccgggcatagtggcgggtgcctgtattcccagctactcgagaggctgaggcaggagaatggcgtgaacccagtaggcggagcttgcagtgagccgagatggcaccactgcactccagcctgggcgacagggtgagactgtctcaaaaaaaaacaaaaagggcttatttttcattgtatatttatgttgtattcaggattttatgcattaaaatctctcttcttattttcagttctgtgttgttgtgtttcttttctgggggggtatgttttctcagagcagttaattgtatttttgcttttaaagcttgatatcatgagttgaatgataattttttaactcggtacacattatgacaatgtgatatttaatttatatttgaattagctgtgtttgttgcttatagatatatctatgtgtttttcacctatgtaagtatgtcatgtttttcatcttttttccttgtttttttttttttaagtttcagatatgctttctttttcttttttttgtttttttttttttaaagagaattttaaaacagagtcaaatgaacaaaaatcagttatttgtcctcttgcagggcggggagaccttccttccccacgggtttgaggctatggctaagtggtgagccttggtgagacgcagaaaggatccatcccaggcacttggctagaggtaagtaaaaatagcctttgggccagaagacctgatagtttgggtactcgtctggacataagtccccatcttcccagaaatgtcgtcttttgtctgcaacaactggctggagaaatatttcagaaagatgtgtgcctggaacacccaaaggcatacctttcctttctccttggcataggccttgcagcactgaagaaagaccaggtttgcaacggagccttcaatactcttcatccctatggatctcaggggctcatagggtgacaggagaggagacaagctagcttgggaagagtctttgtccttcagcttctcctctactgaaacactatatacttggggccacagttcatagcaaaacacacatgctgtctttctttctctcacacccccatctcgggaacccaacaacttgatggcaggtagctctgggtatccttggtctggcattcacccactgggcatctaagctgtcctaaagctcttttcaatcacttctcactgtttccaggcccatgtgggtaggtgttccagccttcactctttcaggctgttcataaaggcacagtgtgggaaaatcccctactgtgatggccattgctgggaagcagggaaggttaagggcccactgctgcccaaggctagtgtagacaccctctgctcctccactcatctcctcaaataatgatatcaggtgcagcagctgctgtctggaatgttatcaaaccaggactgcacaggcactgcattctctgtgtggaagatgtaagaagcaggcgagttgtccaggatgagttttcctcaggtccctccccagatggctgacgtccttgacatagcagccctggtgaaacaaacatgactcatgggacaggcagccccagaccatcccatacccgtccagctcacccgtcacaggatctgcctacttgttcaggctgggaagaagagagcaatgacgaaaacacatttaaacatttcctccattcatgtcaggaactcatccatataaggcctcatgagcacatggatctggtgcatggtcccctcaagctctacaggcactaggcagtcagcattgctgattggcttaaaggagctatgcacaagggtttcatccaggtcagtgaccatacagatccttccttgatttttctctgtcacctctgggagcaggcaggttcctgggatctgataaaactgatattggagacgctggagctgatccgacatagcaatggtgttgactccctccttatgtgtggattgctcagcgggggaacttgactgtccaacatgctgggtgcaagaacagcagaaaggggacttttaagatgtggcaaacatgaggcctcttcggagaggactttggaaaccaggccttgcttggtaaggaccagggcatcttccctccatgcctgggtgatgatggagccttgttccatctaacaatcctgagggctgggctggggggcatgggctggggcctgattcagttcccgagattctgacctccacagctgttcacataccccttctcctttccatactggccgggaaggga

SEQ ID NO: 9194 - DNA, 1358 bp, Homo sapiens
aggttaattgcatgtttgccattggttaaacgtgcattttgtttcaggctaagataatggtttataggaaatgtatttgagttaggttttagttttttttttttttaacctatgaacccaggacactagagccactttagtctaattttctgctctttaattattttaacactccagagggtgactggttttctcctgtgtttttttaatatatggcaagtggaacctctaatcgaccaccctgtttttcagcctaactcaggcttgtggtaaaattatcagttcccactttctttgctgcattctcaaatgcaacacaggagaacagttttcccttgcaaattcacaaagctgttaactatttgtcctttattatacatttcattaaagttttctattattggatttctttctacttctccctacagttctgcccatatttgctttttatatttagaagcctcccttttgggtgcataaatatatatagctatattcacttgacaaattaacctctattattattgtatggtaaactcatttcatgcttgtgagagacattgctagaaagtctattttgtctaatttaagcataactaccattgaactcttttggctattatttgcatggaatatcattttctatcctttcactattagcctatgctcttaattcataattgagtctcttgtaagcagcatattacgaggtttaaaagtttcatttatccactctgtctgctttagtctcttttggctgttagaatatcacagactagtaattaataaggaacagaattttatttgactcatgattctggaggctgggaaggtaaaagaacatgttactggtatctgttgaaggtctagttgctggataataacatggccaaagatgtgagggagagagagctttttttttttaatatataacagatccattcttgttaaaattagcccattcccataataagaacattaatccattcatgagggcagagtgcttatagcttaattaatttttaaaggttccacctcttaattctatcacattggtcattttatcctaaattttggagatgacattcagtctacagaagtatctgtttagtagataatttaatctttttatttgtaaggtagtgataggtaagcagttactattgtacatttgtagttttctgtccattttaagtttgcttcttttttttctggttctgtctttcctgtggtattgttcatttttgttgagacaaagttatgctttcttgctcagactgaagttcagtggcatatcacagctcactgtagcctcaatctcctgggctcaagcaatcctccccccttagccacccaag

SEQ ID NO: 9195 - DNA, 105 bp, Homo sapiens
ggagactaaggcaggagaatcacttgaacctgggtggcagatgttgcagtgagccgagatccttccactgcactccagcctgggtgacagagcatgactccatct

SEQ ID NO: 9196 - DNA, 906 bp, Homo sapiens
gtcctcttgcagggtggggagacaacttccttccccacaggtttgaggctatgcctaagtggtgagtcttgaggagatgcagaaaggatccatcccaggcacttggctggacttaagtaagcatagcctttaggccacaagacctgatggtttgggtactggtctggacataagtccccatcttcccagaaatatcatcttttgtctgcaacaactggctggagaaatatttcagaaagatatgtgtctggaacacccaaagacatacttttcctttctccttggcataggccttgcagcactgaagaaagaccaggtttgcaatggagccttcaacagtcttcatccctatggaactcagggtctcatagggtgacaggagaggagacaaagctaacttgggaagagtctctgtccttcagcttctcccctactgaaacactatatattgggcccacagttcatcacaaaacacacatgctctctttctttctctcacacccacatcttgggaacccaaaaacttgatggcaggtagctctgggtatccttggtctggcattcacccactgggaatctaagctgtcctaaagctcttttcaatcacttctcactgtttccaggcccatgtgggtaggtgttccaggcttcattctttcaggctgatcataaaggcacagtgtgggaaaatcccctactgttatggccattgctgggaagcaggaaaggctaagggcccactgctgcccaaggctagtatagatgccctctgctccactcatgtcctcaaagactgatatcaggtgcagcagctgctgtctggaatgttatcaaaccaggactgcacaggcactgcattctctgtgtggaagacataagaagcaggcgagttgtccaggatgagag

SEQ ID NO: 9197 - DNA, 541 bp, Homo sapiens
ttttttcaagttttattttaagttcaggggtccatatgtgataaagtttatttttcaacttctattttaagtttaggggtccatgtgcagactatgcaggtctcttacatacataaatgcgtaccactgtggtttactgcacagatcatctcatcacccaggtaccaagcccagcatccgcagctattcttcctgatgctctccttcccctcccccatgccatgaaacaggtgtccagtgtgtgttgttcttcctgatgtgtccatgtgttctcattgatctgcttctgctaataagttagaataataataggcggtgtttggttttctgttcctgcattagtttgctgggagtaatggcttcaaattccaaccatgtccctgcaagggacatcatctcattatattttatggcttcatagtgttccatggtgtatgtgtaccacatttcctttatccagtgtatcattgatgggcatgtagattgattacatgatgttgctattgtaaatagtgctgcaatgagcatttgtatacatgta

SEQ ID NO: 9198 - DNA, 105 bp, Homo sapiens
ggaggctaaggcaggagaatcacttgaacctgggtggcagatgttgcagtgagccgagatacttccactgcactccagcctgggtgacagagcaagactccatct

SEQ ID NO: 9199 - DNA, 564 bp, Homo sapiens
agagaatccaccagaaacacatttttttttcaagttttattttaagttcaggggtccatatgtgataaagtttatttttcaacttttattttaagtttaggggtccatgtgcagagtatgcaggtctcttacatacataaatgcgtaccactgtggtttactgcacagatcatctcatcacccaggtaccaagcccagcatccgcagctattcttcctgatgctctccttcccctcccccatgccatgaaacaggtgtccagtgtgtgttgttcttcctgatgtgtccatgtgttctcattgatctgcttctgctaataagttagaataataataggcggtgtttggttttctgttcctgcattagtttgctgggagtaatggcttcaaattccaagcgcatgcctgcaagggacatcatctcattacattttatggcttcatagtgttccatggtgtatggtaccacatttcctttatccagtgtatcattgatgggcatgtagattgattacatgatgttgctattgtaaatagtgctgcaatgaacatttgtatacatgta

SEQ ID NO: 9200 - DNA, 105 bp, Homo sapiens; identical to SEQ ID NO: 9195

SEQ ID NO: 9201 - DNA, 430 bp, Homo sapiens
catgggctgaccttctggccgctggatacaggtatgctggttgtcgctgaggaagaagccttcccggcagtggcactcatagctgcccatcatgttgacacagctctgctgacagccgccgttgccctcggcacactcgtccacatctgtgcaggataggtagtcagtggggtcatggggtacaggcagggtccagggtatatcccaagacttcagcaccaaaggcagtcttaagaactactaccccctaagcccagccttaagccaggaagtcctcacacccttgtcagctaatatttcactaagtgtaaaaaggctgccctgagggcagagctgggaagctaagcaagtgggggaaaaggggacctttgaacctcaaatgtcacctaggtgaagccatgcctccctttccctcacctgtgtaaactgg

SEQ ID NO: 9202 - DNA, 430 bp, Homo sapiens; identical to SEQ ID NO: 9201

SEQ ID NO: 9203 - DNA, 262 bp, Homo sapiens
gaacagtaggctctcacccccaaatcaccacccctaggttctagagccaagctcaccctggagcccccaattcaacaccttgattccatctctatgctagctactgccctcccaagtccatggcccttctcagtttgccttggcccaggaggcatcacgtagattggttgtcaaatggagcagctagaatctgggctcctgagggcttcatctgcccctctcttcccatcctctctgctgagatcctgcaaccttctcttcc

SEQ ID NO: 9204 - DNA, 262 bp, Homo sapiens; identical to SEQ ID NO: 9203

SEQ ID NO: 9205 - DNA, 345 bp, Homo sapiens
tttaaccagcattcctctgcagcacactaaagttttggaagcaacagtctagactaaaatcctaattcctaaacctagcgttcgaggtcttgcaaagtttggctttccttactcctcaacaagtaccttcccctccagccaggctgaagggttccttaatgtgccttctagcttgtgtctgctcaggcctgcccttcactggcatctttcctatctctccttaatccacgtgatgccaactcagcttcaagacctaattcaagtcccatctgctcccagcagactttctgatcaccccagcctccctcccaggggttccttcctttctctgatttcattcaacat

SEQ ID NO: 9206 - DNA, 4549 bp, Homo sapiens
ccattgagattgccaagaaccaacctcccatcctgaatcgcctggcaaaaatcttctacttcctgggaaagcaggatatggccattggaacctgcaacatggccctggatgtcctacgagatccagagctcaactggcaggcgtactgcacaagggccaaggtgggtcaacttcctgccccaccataccctgccattgggaatcagagaacaagggccagaggccaagaccctgttgccagggcccaagggtcaggcagtcctcatggtggaagggagcttaggagccatcaaaaaacacagttgggttctataaagtttttggtttgttttgagacagtgtctcgctctgtcacccaactggagtatggtggtgccaccacggctcactgcagcctagacctcctaagctcaagcaatcctcccgcctcagcctcccaaatagctgggactacaggtgcacaccaacacacccagctaattttggttttgttttgtagagacgaggtctcactatgttgcccagactcgtctcaaactcctgggctcaagcagtcctcccacctcgacctcccaaagtgctggaattccaggtgtgagccactacacccagccctgtaaggtttttgagtgaaagaatgcaggagcctccactcactgcaggaatcccttctacaattcctggtcagtgagcccccagcctcttctggattggcacgggtggaatcagactgaccagagttgaaatctggcttctccgccttgtggaacttgcagcaagccacttacccccacaaacttcagttcccaaatctgtaagatataaataacaacactttccttaaaatgttgtcaacagacacagtgaggtagcatctaaagcacagtgccttggacatagggggtgcttttctgaaagccagtagaggtcatttaatatagtggatcagagctctggctctgaacacagacagccttggttcaaatcccacaacaccacgtgctacgggacctttggcaaaatactcttgcccagattctgagcctcaatttctttatctgtagactggagttgttatgagaattacattagattttgtatgtaaaactcagcatcaagcacacagtaagatttcataagagactgactgctactaatttaatattaggcatatttttgaattatctcactgtctcttgatgcagtccactgcatagtcattcagctctgcaagttacacacttaggtgagttctgcctcctgctagcttcccgcactggtcccagacctgcctcctagagcccacacagagcccatgtgcttgaggaagccgactcggagctcccagtttacttcactgcaagccgaagagtcctcccatcccctcatcttctccactactatccacatgacctagtggcaaatctactcccagtcttggtctcagtggcttaattactttgccagcaggtacgaggcaggagtgaaattccttcactgtcgtggatgtggttattattctagataataatgacattaaccataatagtaaataataaaatatctctataaaattctgcatttcatcaagcactttcaagttcatggtctgatttaatgttcacaagaaccctctgagagaggccggacatgtccatcctacaaatgaggccacatagaaccagggaggcagggaacttccccaaggaactgcattcaataatcagaaactccaactttactctcctccctccatcaccatctggtgtcttatgatcctggcctctctgtggtgccagaggtcacacttactactcagatgactagaggagcacaggatggtggagaagagatgggaggaggagggaactcacattatctgtgtaaaagcctcagtccatgctgcggcccataagcgtggccctggcctcatgacctctctaccccacctccctctgctcatgcctctctcagtcttccaaccctactggcctgggcctctgcctggaatgctcttctcccagatatctgattggcttcctcccacacttcctacaggtcttctagtggccatctaattgaaaatatcaaagccatgccaacatttaatttgttaattaatttatttttaaaattattttagagataaggtctcactctgtcacccaggctggagtggagtggcatgatcacggcccactgcagccttgaactcctgggatcaagtgatcctcccacctcagcctcccaagtagctgggaccacaggtgtgcaccacaacacccgcccagctaattttttaaaaattatttgttgtagatacagggttctgcctatgttgcccaggctggtttcaaattcttgggctcaagcaatcctccagctgcagcctcccaaagtgctaggattataggtgtgagccaccacacctagcctccgccaacattttatgttttcctttcctggtttagttttcttcttagcactaatcactcccttacacactatttacatatttatcatgtttattttctctctcccccaaaacatataagctacttaatggcagggatttttgtggttttgttgtctactgtattctcagtgcctggaacagtgtctggcacagaggaggctcttaatgaatatttgctgaatgaataaatgaactgagcacctaccatatgctagctcctgactagaatatgttctttcagacatcatggtaattccccaaggaagatattcatgtactaagttttcagatatagaaatgaggttcaggttcatagagttgtggaactccctccagatgacatggctaatagctaggggttaagggaaggactggaattcaaaccctagtccaactgacccgaaagccagagattcatctccccctgcctccatgatgctgtcttataagcaaatcccttctgatgactataaagcattaataccttcaacaacaataaccccttttcccttgcttccttctacccaacccaaacccacccctcctaaacctccaaactttgtaaatgctctaagtgtggggaaaatggaggaattcaggaaagcaagggtttgagatcatttgtaatgtgatgcttggcagttggggccacctgccattcttcccaaactgcttgttgacatagactctcacaaaatcggtgctgccatcctacctaaaataatcctccccaatcacctctatcccattgccatatttattttgtcatagcacttaccacttgaaatagaactgtttactattgactgcctcccctactggaatgttaagttctgccagagcagggacctcatctatcttgttaccacggtacctcctgtacccagcataggaactggcacatggtgggcactcaatacatatctgctgaatgagtaagggactcttacttcatcctactcactcattgcacagacagggaaactaaggaccagaaagagggtatggctaacccaagttggtccaaggctaggacctaggactcctgggtcctggcctcagggtctttctactgcaacacataacctccctggttgctgttgaaaaaaagactgggttcatttagagcagagaggaaggcagaggcccttgcctggatcatctttcctaagctggctctctgttggcagatccacatcagagcctacctgcatgacctcaagcgggccaagatgggtctcgggggcatgcctgacaggaaccacctggcctgtgccaaggctgaccttgaggaagtggtcagggtgtgcccaggcttcaaggcgtacctggacatcggccaggtaaggcagtctcttggcttagccaatagctgagcaagaatctgtttactccttgccaggctagaccaagggctaggccaagatgcagaggaaaaagtttcactccctgataacagtacccatctcctccagccgtggtgaggactgaataagacgtgtgtacagtatttagaataaggcttggctcttcctaagcactcaggaagtgtgggcattattctttatctagaagatacctattctctatctgtgttcagggaatgtttaccaagaagtgacaatatcataattttaggtacaagaaaaccgagatccagagattgactcactcaaggttatatagctaggtgtgaaggggctggaactggaatcggggtactccttttctagaggagcaggaataaaacgtgtgattaataattgtcgatggagagagggtgggaatgagtgaaggagtggaatttttttttaaagcaagcgtggggcgggaatgagcgtggagccgcgcctgcggtgaagggctcaccccgcgtccccgaccccaggtctactactatatgggcgtggacgcggtgcaggagctgctggcggtggacgaggcggcgctgaaccaggcgctggtgttcctggccaaggcgggcgagtcggagctgggtgccacgctgcccgagctgcagctgctgcgcggcaagtgcctgcgcatcaagggcgaggacgccaacgcggccgc

SEQ ID NO: 9207 - DNA, 6199 bp, Homo sapiens
ggagcagaagagactgcctgccttcaaccgcacgctggccctactccggcaagtgctgaagtccgaggacccccgccaccgaggtggggacccgggggatgggtgggacagcagcctctgccccctgccaacagcccgctggcattgcatccacctctggcattacctccccttcttggctcctgtttcttcctccttcgctctgtcccctacactcatctgtgcacctcaaggagcccacataccttgcccaagtgaacatgccaactacaagtcactgtgactgcaggcttgcccgtctgcagctcatgacctggagggtgagaggtagtttcccctatttccacctatttatggtcagaagattgaagcctctgttggagaggagtcgagtcatttttttgcagggccagacagcaagagcagggactagaaccaccagagctggtgagagctgaagtcagaagagacctacgtacctgaaatgaggtcccccgatgacacattgagcacagaataagcactaaaatgggttcactaacccctcacatggcccctctctccacctttgcttctctctgtccctgtgttgccctcagtgatcccactctactatcccttgctttgtcttcatgggtgacacctaggatggggatggccccttccctctctccaccctgctgcttcctagagaccctctcccacccttcacccccagccctggcctggtgctacctcgggatgctgctggagcggaaggacaccttctccaccacccccatgggcgtccatgactgcgggtactcagggaccgaccctctagactgcttcggcaaggtacttgcccccagccacacccaccctctaaactgagaaggagcctggcaccccagcctctccacctagaacccaggcttctctgggtatcaacccccaccgcgtggcccacccaggaagtacacttactccagaccttgctctccatcctctcttcattcaaaacaaaagagaccctccccatacccagtctggccccagcccatttctccagccttgaaatagacccttagactttttcccttgagaccttcattcacagtattccctctgccaggagttccctacctctccacccccagtggcatagtagaaagatgggtttagctggtgtctccttgccagccctgcccataggctgtgtgaccctaaggcaagtcacttacaacaggaagcagtcaatgacaatagtgggggtaagtgttattacccaggtagaaaccctgtactttgtaaggttgggggatgggggttgcctctggcccttcctctcacctgccctaggaagatgggagagcatacactgggaaggaggggtctgactgggctctggaaggctttactggatgtgaccggtgatgtggtcgtgggccaggctctcaggagttgagtgccaataggttgtgccccaaggtgttggggcttcgtgatgtgacaacttactggcaggtggataagggtggatatgggtaaagggcaccatgttgatacggctgtatccaaagatggggttcctgtggttcagcactgtttagccagctctggctaatgaccaagcaagtggtttgtttttgcactcctcccttacctaggccattgagattgccaagaaccaacctcccatcctgaatcgcctggcaaaaatcttctacttcctgggaaagcaggatatggccattggaacctgcaacatggccctggatgtcctacgagatccagagctcaactggcaggcgtactgcacaagggccaaggtgggtcaacttcctgccccaccataccctgccattgggaatcagagaacaagggccagaggccaagaccctgttgccagggcccaagggtcagggagtcctcatggtggaagggagcttaggagccatcaaaaaacacagttgggttctataaagttttttgtttgttttgagacagtgtctcgctctgtcacccaactggagtatggtggtgccaccacggctcactgcagcctagacctcctaagctcaagcaatcctcccgcctcagcctcccaaatagctgggactacaggtgcacaccaccacacccagctaatttttgttttgttttgtagagacgaggtctcactatgttgcccagactcgtctcaaactcctgggctcaagcagtcctcccacctcgacctcccaaagtgctggaattccaggtgtgagccactacacccagccctgtaaggtttttgagtgaaagaatgcaggagcctccactcactgcaggaatcccttctacaattcctggtcagtgagcccccagcctcttctggattggcacgggtggaatcagactgaccagagttgaaatctggcttctccgccttgtggaacttgcagcaagccacttacccccacaaacttcagttcccaaatctgtaagatataaataacaacactttccttaaaatgttgtcaacagacacagtgaggtagcatctaaagcacagtgccttggacatagggggtgcttttctgaaagccagtagaggtcatttaatatagtggatcagagctctggctctgaacacagacagccttggttcaaatcccacaacaccacgtgctacgggacctttggcaaaatactcttgcccagattctgagcctcaatttctttatctgtagactggagttgttatgagaattacattagattttgtatgtaaaactcagcatcaagcacacagtaagatttcataagagactgactgctactaatttaatattaggcatatttttgaattatctcactgtctcttgatgcagtccactgcatagtcattcagctctgcaagttacacacttaggtgagttctgcctcctgctagcttcccgcactggtcccagacctgcctcctagagcccacacagagcccatgtgcttgaggaagccgactcggagctcccagtttacttcactgcaagccgaagagtcctcccatcccctcatcttctccactactatccacatgacctagtggcaaatctactcccagtcttggtctcagtggcttaattactttgccagcaggtacgaggcaggagtgaaattccttcactgtcgtggatgtggttattattctagataataatgacattaaccataatagtaaataataaaatatctctataaaattctgcatttcatcaagcactttcaagttcatggtctgatttaatgttcacaagaaccctctgagagaggccggacatgtccatcctacaaatgaggccacatagaaccagggaggcagggaacttccccaaggaactgcattcaataatcagaaactccaactttactctcctccctccatcaccatctggtgtcttatgatcctggcctctctgtggtgccagaggtcacacttactactcagatgactagaggagcacaggatggtggagaagagatgggaggaggagggaactcacattatctgtgtaaaagcctcagtccatgctgcggcccataagcgtggccctggcctcatgacctctctaccccacctccctctgctcatgcctctctcagtcttccaaccctactggcctgggcctctgcctggaatgctcttctcccagatatctgattggcttcctcccacacttcctacaggtcttctagtggccatctaattgaaaatatcaaagccatgccaacatttaatttgttaattaatttatttttaaaattattttagagataaggtctcactctgtcacccaggctggagtggagtggcatgatcacggcccactgcagccttgaactcctgggatcaagtgatcctcccacctcagcctcccaagtagctgggaccacaggtgtgcaccacaacacccgcccagctaattttttaaaaattatttgttgtagatacagggttctgcctatgttgcccaggctggtttcaaattcttgggctcaagcaatcctccagctgcagcctcccaaagtgctaggattataggtgtgagccaccacacctagcctccgccaacattttatgttttcctttcctggtttagttttcttcttagcactaatcactcccttacatactatttacatatttatcatgtttattttctctctcccccaaaacatataagctacttaatggcagggatttttgtggttttgttgtctactgtattctcagtgcctggaacagtgtctggcacagaggaggctcttaatgaatatttgctgaatgaataaatgaactgagcacctaccatatgctagctcctgactagaatatgttctttcagacatcatggtaattccccaaggaagatattcatgtactaagttttcagatatagaaatgaggttcaggttcatagagttgtggaactccctccagatgacatggctaatagctaggggttaagggaaggactggaattcaaaccctagtccaactgacccgaaagccagagattcatctccccctgcctccatgatgctgtcttataagcaaatcccttctgatgactataaagcattaataccttcaacaacaataaccccttttcccttgcttccttctacccaacccaaacccacccctcctaaacctccaaactttgtaaatgctctaagtgtggggaaaatggaggaattcaggaaagcaagggtttgagatcatttgtaatgtgatgcttggcagttggggccacctgccattcttcccaaactgcttgttgacatagactctcacaaaatcggtgctgccatcctacctaaaataatcctccccaatcacctctatcccattgccatatttattttgtcatagcacttaccacttgaaatagaactgtttactattgactgcctcccctactggaatgttaagttctgccagagcagggacctcatctatcttgttaccacggtacctcctgtacccagcataggaactggcacatggtgggcactcaatacatatctgctgaatgagtaagggactcttacttcatcctactcactcattgcacagacagggaaactaaggaccagaaagagggtatggctaacccaagttggtccaaggctaggacctaggactcctgggtcctggcctcagggtctttctactgcaacacataacctccctggttgctgttgaaaaaaagactgggttcatttagagcagagaggaaggcagaggcccttgcctgaatcatctttcctaagctggctctctgttggcagatccacatcagagcctacctgcatgacctcaagcgggccaagatgggtctcgggggcatgcctgacaggaaccacctggcctgtgccaaggctgaccttgaggaagtggtcagggtgtgcccaggcttcaaggcgtacctggacatcggccaggtaaggcagtctcttggcttagccaatagctgagcaagaatctgtttactccttgccaggctagaccaagggctaggccaagatgcagaggaaaaagtttcactccctgataacagtacccatctcctccagccgtggtgaggactgaataagacgtgtgtacagtatttagaataaggcttggctcttcctaagcactcaggaagtgtgggcattattctttatctagaagatacctattctctatctgtgttcagggaatgtttaccaagaagtgacaatatcataattttaggtacaagaaaaccgagatccagagattgactcactcaaggttatatagctaggtgtgaaggggctggaactggaatcggggtactccttttctagaggagcaggaataaaacgtgtgattaataattgtcgatggagagagggtgggaatgagtgaaggagtggaatttttttttaaagcaagcgtggggcgggaatgagcgtggagccgcgcctgcggtgaagggctcaccccgcgtccccgaccccaggtctactactatatgggcgtggacgcggtgcaggagctgctggcggtggacgaggcggcgctgaaccaggcgctggtgttcctggccaaggcgggcgagtcggagctgggtgccacgctgcccgagctgcagctgctgcgcggcaagtgcctgcgcatcaagggcgaggacgccaacgcggccgc

SEQ ID NO: 9208 - DNA, 506 bp, Homo sapiens
cgcgcagtggagctggacgacgcgggctccagccacaccgacggcttcggctgcctgctcgaggcgctgctggcgcagtggagccaggcacagctgagcgacggggagctgggccgcgaggtggacgcctggctgcgccgcgcccaggacaagtaccccgcggcgcgcctgcgccaggagctgcagcgcgtgtggcgcgggcacacggacgaggtgttggggctggcccgggccctggtggcccagggacggccggcgctggtgcggctgctcttcgagaccatggagcgcgagggcgagggcgccagcgcgccgcgggaccgccgggctgtctcattctagggctcaggtgcccaggccggaggctccctgggaccccgcccaggccccgcccagctgatgggaccaggtccggatggactccctgccttaggctgacctgggagcggagccagttcgattcttggtcgggaattgtgaatggggatgttgcgacacccgcgcgg

SEQ ID NO: 9209 - DNA, 1876 bp, Homo sapiens
cgcgcagtggagctggacgacgcgggctccagccacaccgacggcttcggctgcctgctcgaggcgctgctggcgcagtggagccaggcacagctgagcgacggggagctgggccgcgaggtggacgcctggctgcgccgcgcccaggacaagtaccccgcggcgcgcctgcgccaggagctgcagcgcgtgtggcgcgggcacacggacgaggtgttggggctggcccgggccctggtggcccagggacggccggcgctggtgcggctgctcttcgagaccatggagcgcgagggcgagggcgccagcgcgccgcgggaccgccgggctgtctcattctagggctcaggtgcccaggccggaggctccctgggaccccgcccaggccccgcccagctgatgggaccaggtccggatggactccctgccttaggctgacctgggagcggagccagttcgattcttggtcgggaattgtgaatggggatgttgcgacacccgcgcggtttgaaacgcccacccagactggaaggcctgattcccgagagcagaagaggctgggagcagaggtgagaaaacactgggaagctgccaattaagggacagaattttctagacatacaggtaaaataagatggttgtgaggcttctgagagaaacagaagacagctacctcagtgtggcagttttctagtccgggcgctcaatccctcaggcctgagtgcctgtctttgggctccggtaggccacactctatccttatgagaaagccccgtttactttagttgactggagtgtggtctcagctcctgcagccagaaaagccctgactaaagcagagggcagggtggcacggcgagtgagttacgggacagggccctagcctaagcctcgtgctcagggctcattcctgcctctctgctacttttctagtaggcctccttcttggtccgcttggcccaaaaggcctcccaaatgctctgaaatagagctcatcaatagaaccttcacttgatttccctcttcttgggggaaactaagggcgccacccattaggaggtgccacctgcccccccccttttttttttttttttttgagagggagtttcgctcttgttgcccatgctggagtgcaatggcacgatcttggcccactgcaacctccatctcctgggttcaagcgatcttcccgcctcagccttccaagtagctgggattacagacgtgtgccatcaggcctggctaattttgtatttttagtagagacagggtttcgccatgttggtcaggatggtctcgaactcctgacctcaactgatccacccgcctcagcctcccaaagtgctaggattacaggtgtgagccactgcacccggccctgcccccagtcttgaccattctactaattttaaagaacatcttggaattttacactcttggaatcatagtcgtagaatcctttttttgagacagagtctcactctgtcgcccaggctggagtgcagtggccagatctcagctcactgaaacctcagcctcccaagttcaagtgattctcgtacctcagcctcctgagtagctggaattccaggctgtactcactgctttgctcatatcctcgctcattaccagggacaggccagcacccctgcattgcatctcacatatccactgatggatggagaacagactgaaattcagtgccttagagaccacacactccaaccccctcattgtgcagatgggaaaactgagagccatagaagggaagtggcttgcccaaagccacacttactgttttccccacactgtaccacaaactttcaccattcttcaggtttggaaaaatactaataaactgatcaacactaaagta

SEQ ID NO: 9210 - DNA, 433 bp, Homo sapiens
cttgcataacacaggggttggggcgccgatccccgacgcagtcgaaaatctacatatcacttctgactcttccaaaacttaatagccggctgttggctgaaagcctcactgataacataaatagtccattaacacatattttgtatgttatatgtattatatacctgcaataaagtgagctggaaaaaacaaaatgttattaagaaaatcataagagaaaatacatttcctaagtgagagtggatcatcataaagggcttcatcctcacggtattcacattgagcagactgaggaggaggaagaagagggattggtcttgctgtctcaggggtggcagaggcagaaggggtggaggaggtggaagggaggcagaagaggcaggtacactcagtgtaacttctatcgagaaaaaaatccacgtatatgtggacc

SEQ ID NO: 9211 - DNA, 433 bp, Homo sapiens; identical to SEQ ID NO: 9210

SEQ ID NO: 9212 - DNA, 623 bp, Homo sapiens
cccccaaacatagcctaaaaagacaatgactctcattccagtagcagaggttcactgttactaaatgaagccacaggttccactgtgggctagctgtatctggaagaaaattcttgttttgagcccaaatctctttctctataatttcttttagttctgcttttgctagaataacaaatgtctttcagatatctaaatgcagcttttgtgtctccccttgtttttctcttctccaggctaacctttctctgttccttcaaccactggttacaagacagtctctgacaccctctccattcctcatgctgtgttcataaagcactcaagtttgtttgttttccttttctttcctttgttttttgtttgtttttttggggggaagtcagagtcttgctctgtcacccatgctgcagtgcaatgacatgatcatagctcactgcagcctccaactcctggtctcaagcaatcccaccgtcttggctgcccaaagcattggaattacaggcaagagccaccacgtccagtttatgttccttttcaaatgtactggtataatactcctaatgtgatctaagtactgcagagtctaatgaaatcatgactcttccttctgtgggcatgag

SEQ ID NO: 9213 - DNA, 623 bp, Homo sapiens; identical to SEQ ID NO: 9212

SEQ ID NO: 9214 - DNA, 3644 bp, Homo sapiens
tttttttttcacaacaactccctgactaattcctacaacacaactctagcacagcgaaggtggcacttgccacccttgggggctttggccacacacacacacgacacggaatatactgagagctgcttttatatattaatgaggtcaaagctgcttgctaattagttagcagggcagtctcctagtctgcagctaagtcacagacattctccctgacctgaggcctggcaccgctgccctctctgaggagcagaccagagcggttcaggaagggagagtaaacatcgccacacttgccactacatctacgcccccttgggtctcagaaatggaaagtcaaattccaaacacactatccctacaccttgaactttcttcctcagacatctccaaccggtcgctctgcgaaaccagcagcattggacaggtggtcggccgaggagaatcagaggaaaacagcctcctcatttctgtgatcttcctatgacagctggaatgtacctaaaacacctaaccttcttcaccagccctgatctagttttagttatcagtggcgtatctatgactcggtatacaatttaaagcccactgataggaagctaaacacaggcacacatttctaatggacgattctatgaaaagaccacttaacagacacaactcccttttattgacattaaggccaaggttgtttctttttttgttatttttgtttaatatttcttcaaattttgtcaattgctgaagcccaggctgagcttctgtggcacatgacgattctctgaatttttgaaaagaacacatgtacctaaagttcaaaatcgaccagtgacacagatcttggggatctgggaggaggagaccccacagacacttccaagcactgccgggagattcgtttcgcctctcagacctgcctgccttgctcatcagcatgcagtcagagtgccaggggagggcacagccagcggcaacgcttcctggtgctccaggggctgccctcaggaggaggcctgccactcagtctgtgaagcaggattcttccatcaaaagaagccaaaccaaagagctcctggaacactcaggaccaaggcagatgagaagcctctaattaattttgtggccttttttggtttgttggtttaaaaaaaaaaagttggggggagggagagagagagaagagtaaaaggaaagtgcagggaaatttactctttcgcctcagccagtttattgttcatctctttgctttgctccttgtcgtctggcttggtggtacttgggccctccgcgctctttttcttggcagcctggcctgacaccgcctgcttgtctttggccttcctcgtgggcttatggctcgctgaggtcttttttggtttggaactctgaacactaggtttttccacctgtacggagagacagaccgcaaatacagaaacacaaaaaggtggggcgtgggaaggaatttagagagaaaagatatggttaattaaggaatgacggtaatgacagaggttggctcaggtggaacacagtgcataaggtgttcccaaggacattagggcattcggcatctcccgtctgaactccctgttccgtcactttggcagcacccactggccacgtggtctcccttgtcctgccagccttccaccgaccaccccaggcagtgggccataccactgttgggcaatatttgagcccctccctgtaggaagttaacacctcatcacgttgctcaactcacccacaggcataggattttgctttagtcaatgaaatgtgagcagtgacttgggtcaccttcaggcggaaaattcgagagtcagcctgtgctgcccagtgctctcttttcctctgccacagagacaggctgctctgccacccaagacccagatggagaggcaacgagggttagagtggcagccaacccacaatggatattaatgagaaataaacctttgttgatgtaagatgcagatgttctggggcggtgggtcgctgcagcacccgctggcttcccctgttctgtctctaggctggctcacccatatggagaagcatcctcgctgagatgctttgggcaggggggcatctccagtctcagctaggctttccgctgccagcactctgctcctcctctctgcctggctcctccaccattttccccagagcagctgttctaagctcactccactctccccaacctccctcctctagctctgtccccttcatctggagaagatggccttgcctgctctttctcaggaaacttcggagtcactgaaagtgacccctcaataggccacccccctcatctatctctagatttagtttccctcattttccctccttccttctctacgtcctcttttgtccaatgctaaccccatgccccgggtgccacaccatctctggatggacagagctgatgctgggccttgcaggctggatcattcactcactgaggtgcagcggctttcagtcactcctgacctgtaaggaaaggaaccaatcgtcctggtttgcctggaactgagaggtttcctggaacacagaactttcagtgctaaaatggaagaatcccaggcaaactgggtcggttagttaccttacccataaactggtcctgggccaaataggaaactccactgaagtgcaagactttaggacaaaagcagagaaaaggataattaggttccagagttatttaagttctcaggcattttctgctattatagagaggacagtggatatttgtacaattccatggggcctgacatcagaagatgctagattgcatggcttatatgattcctgcttcaccagctatatctccaacatgcttctcctgatcacgaactcctatgtaaggtggaggaatgttaccttaggaaaatccttgagtccactttcacaaactgttcattttggtaacaaatgctgggaacatatattatagctgatgtgacaggtgtgttgtgacagaccgagaagtcatagtggatggtgtttagcccgagaagatgagagagggcaggtgcttttcagggactagggagggaagaaagggtccagtgattggagccaaggatgaggcaaggcagggtctggtgggaggggagccgggcatgggggcctacaatactgggccagcccttctggggcccaagcacatctattttaagacaaggggatttagggctcaggtgaggttttctgccattgtttatctggatttctcaaaatcagaagctaattccctggaaatctgccagcctttaagctgtctttattttaggtgatgttcctctttaatattccctttgagtttaacaaaggttcctattgaagatggccctgggtctcagtgtgctttagaggaagcagggattttaaaggtgcccgtggaggctgggccagatttgacagcagcccaccccatgctctgctgcagttaacccttatggtccaggctgtgctgatgggttcccacaaggtctgtctcacctttgggggttccttgaagggttcgctgtagaggctgcgtattcttctgcgatcaatgaccttattgtcagctgttgttggcttgctggcctctcctttgaactgagcactgtagctggtctcatgaaccatct

SEQ ID NO: 9215 - DNA, 3645 bp, Homo sapiens
tttttttttcacaacaactccctgactaattcctacaacacaactctagcacagcgaaggtggcacttgccacccttgggggctttggccacacacacacacgacacggaatatactgagagctgcttttatatattaatgaggtcaaagctgcttgctaattagttagcagggcagtctcctagtctgcagctaagtcacagacattctccctgacctgaggcctggcaccgctgccctctctgaggagcagaccagagcggttcaggaagggagagtaaacatcgccacacttgccactacatctacgcccccttgggtctcagaaatggaaagtcaaattccaaacacactatccctacaccttgaactttcttcctcagacatctccaaccggtcgctctgcgaaaccagcagcattggacaggtggtcggccgaggagaatcagaggaaaacagcctcctcatttctgtgatcttcctatgacagctggaatgtacctaaaacacctaaccttcttcaccagccctgatctagttttagttatcagtggcgtatctatgactcggtatacaatttaaagcccactgataggaagctaaacacaggcacacatttctaatggacgattctatgaaaagaccacttaacagacacaactcccttttattgacattaaggccaaggttgtttctttttttgttatttttgtttaatatttcttcaaattttgtcaattgctgaagcccaggctgagcttctgtggcacatgacgattctctgaatttttgaaaagaacacatgtacctaaagttcaaaatcgaccagtgacacagatcttggggatctgggaggaggagaccccacagacacttccaagcactgccgggagattcgtttcgcctctcagacctgcctgccttgctcatcagcatgcagtcagagtgccaggggagggcacagccagcggcaacgcttcctggtgctccaggggctgccctcaggaggaggcctgccactcagtctgtgaagcaggattcttccatcaaaagaagccaaaccaaagagctcctggaacactcaggaccaaggcagatgagaagcctctaattaattttgtggccttttttggtttgttggtttaaaaaaaaaaagttggggggagggagagagagagaagagtaaaaggaaagtgcagggaaatttactctttcgcctcagccagtttattgttcatctctttgctttgctccttgtcgtctggcttggtggtactcgggccctccgcgctctttttcttggcagcctggcctgacaccgcctgcttgtctttggccttcctcgtgggcttatggctcgctgaggtcttttttggtttggaactctgaacactaggtttttccacctgtacggagagacagaccgcaaatacagaaacacaaaaaggtggggcgtgggaaggaatttagagagaaaagatatggttaattaaggaatgacggtaatgacagaggttggctcaggtggagcacagtgcataaggtgttcccaaggacattagggcattcggcatctcccgtctgaactccctgttccgtcactttggcagcacccactggccacgtggtctcccttgtcctgccagccttccaccgaccaccccaggcagtgggccataccactgttgggcaatatttgagcccctccctgtaggaagttaacacctcatcacgttgctcaactcacccacaggcataggattttgctttagtcaatgaaatgtgagcagtgacttgggtcaccttcaggcggaaaattcgagagtcagcctgtgctgcccagtgctctcttttcctctgccacagagacaggctgctctgccacccaagacccagatggagaggcaacgagggttagagtggcagccaacccacaatggatattaatgagaaataaacctttgttgatgtaagatgcagatgttctggggcggtgggtcgctgcagcacccgctggcttcccctgttctgtctctaggctggctcacccatatggagaagcatcctcgctgagatgctttgggcaggggggcatctccagtctcagctaggctttccgctgccagcactctgctcctcctctctgcctggctcctccaccattttccccagagcagctgttctaagctcactccactctccccaacctccctcctctagctctgtccccttcatctggagaagatggccttgcctgctctttctcaggaaacttcggagtcactgaaagtgacccctcaataggccacccccctcatctatctctagatttagtttccctcattttccctccttccttctctacgtcctcttttgtccaatgctaaccccatgccccgggtgccacaccatctctggatggacagagctgatgctgggccttgcaggctggatcattcactcactgaggtgcagcggctttcagtcactcctgacctgtaaggaaaggaaccaatcgtcctggtttgcctggaactgagaggtttcctggaacacagaactttcagtgctaaaatggaagaatcccaggcaaactgggtcggttagttaccttacccataaactggtcctgggccaaataggaaactccactgaagtgcaagactttaggacaaaagcagagaaaaggataattaggttccagagttatttaagttctcaggcattttctgctattatagagaggacagtggatatttgtacaattccatggggcctgacatcagaagatgctagattgcatggcttatatgattcctgcttcaccagctatatctccaacatgcttctcctgatcacgaactcctatgtaaggtggaggaatgttaccttaggaaaatccttgagtccactttcacaaactgttcattttggtaacaaatgctgggaacatatattatagctgatgtgacaggtgtgttgtgacagaccgagaagtcatagtggatggtgtttagcccgagaagatgagagagggcagggtgcttttcagggactagggagggaagaaagggtccagtgattggagccaaggatgaggcaaggcagggtctggtgggaggggagccgggcatgggggcctacaatactgggccagcccttctggggcccaagcacatctattttaagacaaggggatttagggctcaggtgaggttttctgccattgtttatctggatttctcaaaatcagaagctaattccctggaaatctgccagcctttaagctgtctttattttaggtgatgttcctctttaatattccctttgagtttaacaaaggttcctattgaagatggccctgggtctcagtgtgctttagaggaagcagggattttaaaggtgcccgtggaggctgggccagatttgacagcagcccaccccatgctctgctgcagttaacccttatggtccaggctgtgctgatgggttcccacaaggtctgtctcacctttgggggttccttgaagggttcgctgtagaggctgcgtattcttctgcgatcaatgaccttattgtcagctgttgttggcttgctggcctctcctttgaactgagcactgtagctggtctcatgaaccatct

SEQ ID NO: 9216 - DNA, 3644 bp, Homo sapiens
tttttttttcacaacaactccctgactaattcctacaacacaactctagcacagcgaaggtggcacttgccacccttgggggcttgggccacacacacacacgacacggaatatactgagagctgcttttatatattaatgaggtcaaagctgcttgctaattagttagcagggcagtctcctagtctgcagctaagtcacagacattctccctgacctgaggcctggcaccgctgccctctctgaggagcagaccagagcggttcaggaagggagagtaaacatcgccacacttgccactacatctacgcccccttgggtctcagaaatggaaagtcaaattccaaacacactatccctacaccttgaactttcttcctcagacatctccaaccggtcgctctgcgaaaccagcagcattggacaggtggtcggccgaggagaatcagaggaaaacagcctcctcatttctgtgatcttcctatgacagctggaatgtacctaaaacacctaaccttcttcaccagccctgatctagttttagttatcagtggcgtatctatgactcggtatacaatttaaagcccactgataggaagctaaacacaggcacacatttctaatggacgattctatgaaaagaccacttaacagacacaactcccttttattgacattaaggccaaggttgtttctttttttgttatttttgtttaatatttcttcaaattttgtcaattgctgaagcccaggctgagcttctgtggcacatgacgattctctgaatttttgaaaagaacacatgtacctaaagttcaaaatcgaccagtgacacagatcttggggatctgggaggaggagaccccacagacacttccaagcactgccgggagattcgtttcgcctctcagacctgcctgccttgctcatcagcatgcagtcagagtgccaggggagggcacagccagcggcaacgcttcctggtgctccaggggctgccctcaggaggaggcctgccactcagtctgtgaagcaggattcttccatcaaaagaagccaaaccaaagagctcctggaacactcaggaccaaggcagatgagaagcctctaattaattttgtggccttttttggtttgttggtttaaaaaaaaaaagttggggggagggagagagagagaagagtaaaaggaaagtgcagggaaatttactctttcgcctcagccagtttattgttcatctctttgctttgctccttgtcgtctggcttggtggtactcgggccctccgcgctctttttcttggcagcctggcctgacaccgcctgcttgtctttggccttcctcgtgggcttatggctcgctgaggtcttttttggtttggaactctgaacactaggtttttccacctgtacggagagacagaccgcaaatacagaaacacaaaaaggtggggcgtgggaaggaatttagagagaaaagatatggttaattaaggaatgacggtaatgacagaggttggctcaggtggaacacagtgcataaggtgttcccaaggacattagggcattcggcatctcccgtctgaactccctgttccgtcactttggcagcacccactggccacgtggtctcccttgtcctgccagccttccaccgaccaccccaggcagtgggccataccactgttgggcaatatttgagcccctccctgtaggaagttaacacctcatcacgttgctcaactcacccacaggcataggattttgctttagtcaatgaaatgtgagcagtgacttgggtcaccttcaggcggaaaattcgagagtcagcctgtgctgcccagtgctctcttttcctctgccacagagacaggctgctctgccacccaagacccagatggagaggcaacgagggttagagtggcagccaacccacaatggatattaatgagaaataaacctttgttgatgtaagatgcagatgttctggggcggtgggtcgctgcagcacccgctggcttcccctgttctgtctctaggctggctcacccatatggagaagcatcctcgctgagatgctttgggcaggggggcatctccagtctcagctaggctttccgctgccagcactctgctcctcctctctgcctggctcctccaccattttccccagagcagctgttctaagctcactccactctccccaacctccctcctctagctctgtccccttcatctggagaagatggccttgcctgctctttctcaggaaacttcggagtcactgaaagtgacccctcaataggccacccccctcatctatctctagatttagtttccctcattttccctccttccttctctacgtcctcttttgtccaatgctaaccccatgccccgggtgccacaccatctctggatggacagagctgatgctgggccttgcaggctggatcattcactcactgaggtgcagcggctttcagtcactcctgacctgtaaggaaaggaaccaatcgtcctggtttgcctggaactgagaggtttcctggaacacagaactttcagtgctaaaatggaagaatcccaggcaaactgggtcggttagttaccttacccataaactggtcctgggccaaataggaaactccactgaagtgcaagactttaggacaaaagcagagaaaaggataattaggttccagagttatttaagttctcaggcattttctgctattatagagaggacagtggatatttgtacaattccatggggcctgacatcagaagatgctagattgcatggcttatatgattcctgcttcaccagctatatctccaacatgcttctcctgatcacgaactcctatgtaaggtggaggaatgttaccttaggaaaatccttgagtccactttcacaaactgttcattttggtaacaaatgctgggaacatatattatagctgatgtgacaggtgtgttgtgacagaccgagaagtcatagtggatggtgtttagcccgagaagatgagagagggcaggtgcttttcagggactagggagggaagaaagggtccagtgattggagccaaggatgaggcaaggcagggtctggtgggaggggagccgggcatgggggcctacaatactgggccagcccttctggggcccaagcacatctattttaagacaaggggatttagggctcaggtgaggttttctgccattgtttatctggatttctcaaaatcagaagctaattccctggaaatctgccagcctttaagctgtctttattttaggtgatgttcctctttaatattccctttgagtttaacaaaggttcctattgaagatggccctgggtctcagtgtgctttagaggaagcagggattttaaaggtgcccgtggaggctgggccagatttgacagcagcccaccccatgctctgctgcagttaacccttatggtccaggctgtgctgatgggttcccacaaggtctgtctcacctttgggggttccttgaagggttcgctgtagaggctgcgtattcttctgcgatcaatgaccttattgtcagctgttgttggcttgctggcctctcctttgaactgagcactgtagctggtctcatgaaccatct

SEQ ID NO: 9217 - DNA, 3644 bp, Homo sapiens
tttttttttcacaacaactccctgactaattcctacaacacaactctagcacagcgaaggtggcacttgccacccttgggggctttggccacacacacacacgacacggaatatactgagagctgcttttatatattaatgaggtcaaagctgcttgctaattagttagcagggcagtctcctagtctgcagctaagtcacagacattctccctgacctgaggcctggcaccgctgccctctctgaggagcagaccagagcggttcaggaagggagagtaaacatcgccacacttgccactacatctacgcccccttgggtctcagaaatggaaagtcaaattccaaacacactatccctacaccttgaactttcttcctcagacatctccaaccggtcgctctgcgaaaccagcagcattggacaggtggtcggccgaggagaatcagaggaaaacagcctcctcatttctgtgatcttcctatgacagctggaatgtacctaaaacacctaaccttcttcaccagccctgatctagttttagttatcagtggcgtatctatgactcggtatacaatttaaagcccactgataggaagctaaacacaggcacacatttctaatggacgattctatgaaaagaccacttaacagacacaactcccttttattgacattaaggccaaggttgtttctttttttgttatttttgtttaatatttcttcaaattttgtcaattgctgaagcccaggctgagcttctgtggcacatgacgattctctgaatttttgaaaagaacacatgtacctaaagttcaaaatcgaccagtgacacagatcttggggatctgggaggaggagaccccacagacacttccaagcactgccgggagattcgtttcgcctctcagacctgcctgccttgctcatcagcatgcagtcagagtgccaggggagggcacagccagcggcaacgcttcctggtgctccaggggctgccctcaggaggaggcctgccactcagtctgtgaagcaggattcttccatcaaaagaagccaaaccaaagagctcctggaacactcaggaccaaggcagatgagaagcctctaattaattttgtggccttttttggtttgttggtttaaaaaaaaaaagttggggggagggagagagagagaagagtaaaaggaaagtgcagggaaatttactctttcgcctcagccagtttattgttcatctctttgctttgctccttgtcgtctggcttggtggtactcgggccctccgcgctctttttcttggcagcctggcctgacaccgcctgcttgtctttggccttcctcgtgggcttatggctcgctgaggtcttttttggtttggaactctgaacactaggtttttccacctgtacggagagacagaccgcaaatacagaaacacaaaaaggtggggcgtgggaaggaatttagagagaaaagatatggttaattaaggaatgacggtaatgacagaggttggctcaggtggagcacagtgcataaggtgttcccaaggacattagggcattcggcatctcccgtctgaactccctgttccgtcactttggcagcacccactggccacgtggtctcccttgtcctgccagccttccaccgaccaccccaggcagtgggccataccactgttgggcaatatttgagcccctccctgtaggaagttaacacctcatcacgttgctcaactcacccacaggcataggattttgctttagtcaatgaaatgtgagcagtgacttgggtcaccttcaggcggaaaatttgagagtcagcctgtgctgcccagtgctctcttttcctctgccacagagacaggctgctctgccacccaagacccagatggagaggcaacgagggttagagtggcagccaacccacaatggatattaatgagaaataaacctttgttgatgtaagatgcagatgttctggggcggtgggtcgctgcagcacccgctggcttcccctgttctgtctctaggctggctcacccatatggagaagcatcctcgctgagatgctttgggcaggggggcatctccagtctcagctaggctttccactgccagcactctgctcctcctctctgcctggctcctccaccattttccccagagcagctgttctaagctcactccactctccccaacctccctcctctagctctgtccccttcatctggagaagatggccttgcctgctctttctcaggaaacttcggagtcactgaaagtgacccctcaataggccacccccctcatctatctctagatttagtttccctcattttccctccttccttctctacgtcctcttttgtccaatgctaaccccatgccccgggtgccacaccatctctggatggacagagctgatgctgggccttgcaggctggatcattcactcactgaggtgcagcggctttcagtcactcctgacctgtaaggaaaggaaccaatcgtcctggtttgcctggaactgagaggtttcctggaacacagaactttcagtgctaaaatggaagaatcccaggcaaactgggtcggttagttaccttacccataaactggtcctgggccaaataggaaactccactgaagtgcaagactttaggacaaaagcagagaaaaggataattaggttccagagttatttaagttctcaggcattttctgctattatagagaggacagtggatatttgtacaattccatggggcctgacatcagaagatgctagattgcatggcttatatgattcctgcttcaccagctatatctccaacatgcttctcctgatcacgaactcctatgtaaggtggaggaatgttaccttaggaaaatccttgagtccactttcacaaactgttcattttggtaacaaatgctgggaacatatattatagctgatgtgacaggtgtgttgtgacagaccgagaagtcatagtggatggtgtttagcccgagaagatgagagagggcaggtgcttttcagggactagggagggaagaaagggtccagtgattggagccaaggatgaggcaaggcagggtctggtgggaggggagccgggcatgggggcctacaatactgggccagcccttctggggcccaagcacatctattttaagacaaggggatttagggctcaggtgaggttttctgccattgtttatctggatttctcaaaatcagaagctaattccctggaaatctgccagcctttaagctgtctttattttaggtgatgttcctctttaatattccctttgagtttaacaaaggttcctattgaagatggccctgggtctcagtgtgctttagaggaagcagggattttaaaggtgcccgtggaggctgggccagatttgacagcagcccaccccatgctctgctgcagttaacccttatggtccaggctgtgctgatgggttcccacaaggtctgtctcacctttgggggttccttgaagggttcgctgtagaggctgcgtattcttctgcgatcaatgaccttattgtcagctgttgttggcttgctggcctctcctttgaactgagcactgtagctggtctcatgaaccatct

SEQ ID NO: 9218 - DNA, 386 bp, Homo sapiens
aggatccactctagtcatttcctgatagctttcaaaatctgtgactcataaacacggagacccaccagcattttctaccttccttcatacttctccttcctcacagttttaaaccctgagatagaaaggaaggtcgcagtgggcctgatcaacaacttcgtttctgatattcctgttctgttaataattatggctcatgtagcacacgccgaattaatttacaaaagacttctcactcagccccaaggtgacaaccaaaatgatgtaagcagagactttgctgcctgaatggtcggagtaagagagagttcgtggaggctccacttcctccaaaccagaaggacctaaagggactttgaggtaaggaactgtgagaccctcactct

SEQ ID NO: 9219 - DNA, 386 bp, Homo sapiens; identical to SEQ ID NO: 9218

SEQ ID NO: 9220 - DNA, 386 bp, Homo sapiens; identical to SEQ ID NO: 9218

SEQ ID NO: 9221 - DNA, 386 bp, Homo sapiens; identical to SEQ ID NO: 9218

SEQ ID NO: 9222 - DNA, 1387 bp, Homo sapiens
ggtccttgctgcaactgcaagccactgaagacaggtgtgtctgatcccaacgtggagcccacagtaacagcaagcagcgactgttgcttgtgcaggaggccctgtgtgccacatgttgctcttcactactgatcagggctgtttacgtgggtcccatcacagctgctctgtgactagggaacttgacgtctccatttttcaactgaaaacacagaagtacaaaggggttcaccaccttgtccacggttgccctgcttctaactggtcatgttggaataaaaacaagcaactgtcatccgggatattaaccacgcaggctgtggtgttgcaaagcaggggagcacggagcagggagcataccaccctgctgagatcagctcactcacaagtggcagggctagggctgcagtgcagctcacttacgggcactgtgtaagcctgaaagcaaagtccacatccaaaggtcgtagtggccccaaaacagcttcctgacctgcttctgtggtcccagacctcttgctgctgaggtaccttagctttccaattactcttgccaattctgcctgcccagtactgctaaaaggccacttccctccgtcccatggcctcaaacacacttcagagagaatttctgggcactttcagaaggctggtcactacagcacaaaagaagtcaaagttatcgcgttagtgctcccaaatctgaggcacagtttggagatgggggctctgagtcaaggggcaggctggggactgttccggtgcctgtgactatgggactgagtcagtcacagcccctctcattttcaccagtgaaggacataatgtatacagtgttgcatttccaagacaaagtgccttaaattggcttaggtcagcagactacagaagaaacaggatattccaggcccctgcttggatagctgatgcctgcttgtaggcctccccctttccccgcttaccccccattagttgccttcaccagaaccgaagaagtttagtctaaaatgaaagcttactactagcctgcaaaatagctccctttgtctgttcttatcagccagcccagctacttaggtcgtaagtgaaatacttgaagagcccctgagctgactaggattgcaatgcattgtgggctgtgacaaaatgcagcaagacaaccctaaaaacaaacaaacaaacaaaaacacctaaagcccctgcctaacaatcaataggtgacgtccaggaaggttgtgaccccatagtactcagcctgtgggaaactgggggaggagcctgcacactagtggacaaattgcttgttgaaactgctgggtgtgcctgtccgtcagacacccgattttgcaagactgactgtttattaaaaatctcactttcgctgttc

SEQ ID NO: 9223 - DNA, 1387 bp, Homo sapiens
ggtccttgctgcaactgcaagccactgaagacaggtgtgtctgatcccaacgtggagcccacagtaacagcaagcagcgactgttgcttgtgcaggaggccctgtgtgccacatgttgctcttcactactgatcagggctgtttacgtgggtcccatcacagctgctctgtgactagggaacttgacgtctccatttttcaactgaaaacacagaagtacaaaggggttcaccaccttgtccacggttgccctgcttctaactggtcatgttggaataaaaacaagcaactgtcatccgggatattaaccacgcaggctgtggtgttgcaaagcaggggagcacggagcagggagcataccaccctgctgagatcagctcactcacaagtggcagggctagggctgcagtgcagctcacttacgggcactgtgtaagcctgaaagcaaagtccacatccaaaggtcgtagtggccccaaaacagcttcctgacctgcttctgtggtcccagacctcttgctgctgaggtaccttagctttccaattactcttgccaattctgcctgcccagtactgctaaaaggccacttccctccgtcccatggcctcaaacacacttcagagagaatttctgggcactttcagaaggctggtcactacagcacaaaagaagtcaaagttatcgcgttagtgctcccaaatctgaggcacagtttggagatgggggctctgagtcaaggggcaggctggggactgttccggtgcctgtgactatgggactgagtcagtcacagcccctctcattttcaccagtgaaggacataatgtatacagtgttgcatttccaagacaaagtgccttaaattggcttaggtcagcagactacagaagaaacaggatattcgaggcccctgcttggatagctgatgcctgcttgtaggcctccccctttccccgcttaccccccattagttgccttcaccagaaccgaagaagtttagtctaaaatgaaagcttactactagcctgcaaaatagctccctttgtctgttcttatcagccagcccagctacttaggtcgtaagtgaaatacttgaagagcccctgagctgactaggattgcaatgcattgtgggctgtgacaaaatgcagcaagacaaccctaaaaacaaacaaacaaacaaaaacacctaaagcccctgcctaacaatcaataggtgacgtccaggaaggttgtgaccccatagtactcagcctgtgggaaactgggggaggagcctgcacactagtggacaaattgcttgttgaaactgctgggtgtgcctgtccgtcagacacccgattttgcaagactgactgtttattaaaaatctcactttcgctgttc

SEQ ID NO: 9224 - DNA, 1387 bp, Homo sapiens; identical to SEQ ID NO: 9223

SEQ ID NO: 9225 - DNA, 295 bp, Homo sapiens
cttttttttttttgagacggggtctcactctgtcgcccaggctggagtgcagtggtgcgatctcggctcactgcaagctccgcctcctgggttcacgccattctcctgcctcagcctcccgagtagctgggactacaggcacctgccactgcgcccggctacttttttttgtatgttttttttagtagagatggggtttcaccatattagccaggatgctcttgaactcctgacctcatgatccgcccgcctcggcctcccaaagtgctgggattacaggcgtgagccaccgcgc

SEQ ID NO: 9226 - DNA, 294 bp, Homo sapiens
ttttttttttttgagacggggtctcactctgtcgcccaggctggagtgcagtggtgcgatctcggctcactgcaagctccgcctcctgggttcacgccattctcctgcctcagcctcccgagtagctgggactacaggcacctgccactgcgcccggctacttttttttgtatgttttttttagtagagatggggtttcaccatattagccaggatgctcttgaactcctgacctcatgatccgcccgcctcggcctcccaaagtgctgggattacaggcgtgagccaccgcgc

SEQ ID NO: 9227 - DNA, 162 bp, Homo sapiens
tttttttgagacggggtctcactctgtcgcccaggctggagtgcagtggtgcgatctcggctcactgcaagctccgcctcctgggttcacgccattctcctgcctcagcctcccgagtagctgggactacaggcacctgccactgcgcccggctactttttt

SEQ ID NO: 9228 - DNA, 531 bp, Homo sapiens
gtaaagatggcggcgcgagggtctccgccctctgctccgggctgaagcgctctgagagaggcggcagcggcaactcgagccccaacagtaatttagtgttggtagttttggcagcagctgccgaggccggagcaatggcggaactggagcacctaggagggaagcgggcagagtcggcgcgaatgcggcgggcagagcagcttcggcgctggcggggctcgctgacagagcaggagcctgcggagcgacgaggcgcggggcggcagccgctgaccaggcgcgggagccccagggtccgcttcgaggacggtgctgtctttctggccgcctgctctagcggggacaccgacgaggtgagaaagcttctggcaagaggtgctgatatcaacacggtcaacgtggacggcttgacagccctgcaccaggtaactcctttcttggtcttagaggcgtccagtctcctacagatgagcctttgaccctgcgagccaccccatggggagtatcagtgttgccgccgactccttctgc

SEQ ID NO: 9229 - DNA, 531 bp, Homo sapiens; identical to SEQ ID NO: 9228

SEQ ID NO: 9230 - DNA, 531 bp, Homo sapiens; identical to SEQ ID NO: 9228

SEQ ID NO: 9231 - DNA, 423 bp, Homo sapiens
cttgaatcctgtgggatgagaactgtcattacagagaggaagaatcaggacattatgggcacatagagtagtggcatctacgccagaatgggaaaaagcctggataatttgcaaaggaaatcctgtattaatttttgccacattaaaaaaaaatctttttttagtcctgtggtgttattttgcactgttttatgaccttttcctggatgataggtattctgattacagaaaaaaaaaagattcctctctctctttttttaaattttaaattattctttcatgtatgtgtcatatgtagcctgggagcttgaatttggtaaggcaatcccaggcttgccatcttggcttaaacagaaaataacatattcctcacttaaggcttctaacctggttgttctctttacatagttagcttcctactca

SEQ ID NO: 9232 - DNA, 447 bp, Homo sapiens
  SITE (5): n equals a,t,g, or c
cttanatcctgtgggatgagaactgtcattacacagaggaagaatcaggacattatgggcacatagagtagtggcatctacgccagaatgggaaaaagcctggataatttgcaaaggaaatcctgtattaattttgcccacattaaaaaaaaatctttttttagtcctgtggtgttatttggcactgttttatgaccttttcctggatgataggtattctgattacagaaaaaaaaaagattcctcttctctcttttttttaaattttaaattattctttcatgtatgtgtcatatgtagtctgggagcttgaatttggtaaggcaatcccaggcttgccatcttggcttagacagaacaatagcataatcctcactaaggctttctaacttgttgttctctttacatagttagctccctactcaactgcagtctgcctgaggttgg

SEQ ID NO: 9233 - DNA, 8853 bp, Homo sapiens
agttacattacttcgttcagaaccatttcacaagtgcaagaatggctttgattggacttggtaagtttagagtattgcctgcctgtcagtttgcttccttaagagcagttccttaaactgtaattacgtgaacataggattgaacaaaatttgaaaacttcggccttctatttatgtcagacaggcaatatatcataggattttaattgctagtcatttgttttggaaagcagaatccaacatttaaatttgtaaaccactggctttaaattctttacagtatttgtaaaacctgtgacaaaggtgaatttctcaaagcaaagagcttttacaaacttttttaaaaggaagtacagcttactagaaaaacaggcaaagggcatgaacagacagttcatgggagaaatatgtttgtatatgtgtagccaactatctttgttttaaatgatcagcctcactaataattaagaaaattttaatctgtgatgttggcaaaattaaaagatggactctgcccagaattaaccagggtatggagaaataggcactctcacaaattgttagtaggaatataaactagtacaacattttgggagatctttttgaacatatctgttaaaattctaggctgggcatggtggctcatgcctgtaatcctagcactttgggaggctgaggcgggcggatcacctgaggtcaggagttcaagaccagcctagccaacatggcgaaaccccgtctctactaaaaatacaaaaattagtcgggcatggtgacacatgcctgtaatcccagctatcggggggctgaggaggagaatcgcttgaacccaggaggcagtgattgcagtgagctgagatcgtgccactgcactccagcaagggcgacagagtgagactctgtctcaaaaaaatacaattccaaatgtttacactcatagacccagtgacttttaagaatttgtcttacagaaacattaggtcaagtttacaaagtagttgcatgagaatatcatttgtaatattttttgttttgttttgcaaattacagcttaagatataatttacatgctataaaattcacccttttgaagtgaatagttctgtggtttttaacagattcaactattaccactacctaatttcagggtgtgttcatcatccccccaaaagccccatacccattagcagtcactccccattctcatcttccccctgcctgtggcatccactaatctactttgtttttgtttttttttttaaagagatggaggtctcattctgttgcccaagctggagcacagtggcacaatcatagctcactgccttgaactcctaggctcaggtgatcctcccacctcagcctcctaagtagcaataatctactttgtctctatagatttgactattctggacatttcctataaatggagtcatacgatatgtggccttttgtaactggcttttcttacttagcataatgttttcaaggtccgtccatattgtagcatgtgtcaattcaatgtcttattcccttttatggctcaagaatactccattaccacattttgtttattcattgattggcatttgggttgtttctaccttttggctgtcgtaaatataaacattcacgtgtacatttttcttaggaaacctgtttttagttcttttggttatgtctaagaacagaattgccaggacatatggtaactctgtttaaccatttggggaactgccagactgttttccaaagtagctgcaccattttacattcccaccagcaatgcacaaaggttttgatttctccacatcctcaccaacacttatcgtctgtctttctgattatgaacaacctactgggtgggaagtggtcattgtagttttgatttgtatttccctaatgacaaatgacattgaacatattttcatgtgctttttgtccatttgtataactttttttgtttgtttgtttttttgagacagaggcttgctctgttgcccaggctggagtgcagtggcgcaatctcagctcactgcaacctccacttcccaggttcaagcaattctccggcctcagcctcccgagtagctgggattacaggtgcatgccaccattcctggctaatttttgtaattttaatagagatggggtttcaccatgttggctggactggtctcgaactcctgagctcaggtgatccacttgcctcggcctcccaaactgttgggattacagatgtgagccaccgtgcccagtcaactttggagaaatgtctattcaagtctttgcccatttttaagtttttttttttaattgttgagttgtaaaggttctttatatattttggttactcaagctgttagcagatatattatctgcaaatattttcctgcatttcatgggtcctctttttactttcttgatacagtgttctttgatggacaatgcaatgttgttttaagagctaactattagaaacatgctagcgtccattaggaggggattgatcaaataaatggtggtagagccatagaaagggattctttataaccattaaatatttgatgtagactactcacttagaagtttgtaaattatgaaagataagttagaaacaatatcaatagaatgataccattttagaaataaattgaagataatattaactacacagaaaattctagatgaatagtaatactaagtatatagtaaatagtttagtaatagtaaactgtaattgggtatctctgggagagtggcattatggcaggaagactcttatttattttgtagtgttaggattttacaatcgtatttttaaaacaaggaaaaaatattttacgattgtgttttagtaattgtggttctagctttgtttttgcttctgttgaaacaggtgtgagtcatcctgttctaaagcaagttgctgaacagtttctcaacatgaggggtgggcttggtttatctggtgcaaaggccaactaccgtggaggtaagcatttcattctattagggttaatttatcagaagggcgtttccccactagaatagcatattgaggtggaataggcctgaatatttactactgaacagtctcggcatagaattggatggcttgggtgttgtattttgagcatatgttttgtgtgtgtttggggacaggatggcatggggaaagcaccgagccgcagaaaagactcgtgggttaatactgtgttgtaggaaatactggagaatgaaaccaatggtgaacaagccattttcttcttccctctatccttaatctggccccaggtgaaatccgagaacagaatggagacagtcttgtccatgctgcttttgtagcagaaagtgctgtcgcgggaagtgcagaggcaaatgcatttagtgttcttcagcatgtcctcggtgctgggccacatgtcaagaggggcagcaacaccaccagccatctgcaccaggctgttgccaaggcaactcagcagccatttgatgtgagtctgaacagttggtatctctctttttgctttcaaaggctcagtatttaagatataattctgataatctactcttaaaatgtaagacaaacacacagaaaatctttgtacaattgaagagatagccaggcttgattttagtatctttgaaggcctatcaaaaactcactggcttttccactttgtctattacttgtcattagtaatataaaaagaggaattgaatgcttagaaataaagggaatccacacatccgttccctttagaataaagttgtagatattaaactttcccctagattctaactagtctttttttctagattttcttctgtccgcttctgttcttttggttacttcctgaatctcactatttgttttccaaccaagtggacaagatgaacaccaagaaattgtttacagactcactcattcagcttgagattaaatttgaaaagaaaaatgagaggctgggcacagtggctcacaactaaaatcccagcactctgagaggccgaggtgggcggatcactggaggtcaggagttcgagaccagcctggccaacgtggtgaaacccccatctctcctaatccaatgaagtaatttaatagaaattcctagttcagaactcagccagaaatttagagtataaataggatggcctcagaattataattaaagaaattgaagtccaggccaggcacagtggctcacgcctgtaatcccagcactttgggaggccaagttgggcggatcacaaggtcaggagatcaagaccatcctggctaacacagtgaaaccctgtctctactaaaaatacaaaaattgtctgggcgtggtggcgcacgcctgtagtcccagctacttgggaggctgaggcagaagaatcacttgaacccaggaggcggaggattcagtaagctgagatcgtgccactgcactccagcctgggtgacagagcaagactctgtctcaaaaatatatataaataaataaataaaagaaattgaagtgccttcttatgctttacatggactgagccaatggttctccaagtttattgtacataagaattacctggaacacttgttaaaaatctgggcttccaggctgcatccacagggacctgagtcagtaggtccattttgggaatctgaaagtttgtatttttaataagaacttagataatttttatgtaaatggtccacataaacactgcaaatcgggttcaccctagagagctaaaagctctgctcaaactagataacaatatccctgttattcagaggttaaactcttgatagcttggacatctggataatgaccactaagcagaaatttttctctaactttctgacatgagtgtataagagaaatgaaagtaaattggtgaaaaagtccctaccaacagcagagagaagaaacctggtctgcctaatgccaaagcctatctatattataataataatgtttgcagattagtgtttgcataaacctttaatcatctaaagcaggttagaaaatacccagcataaaggaaagggagcagtcattttagaaatatttaaatgaaaaaacaaagccgtgatagttctgaaagaggtaacctatttacagaatacttcagttcgtgacagaactggctaagtaaaatattaatctattttgtttataccgtgaaggtccaagttttttctaggcaaacttaaagaaatcgtgccctgttttacttggtagaatatcatacagtaaagtctcattatctttcaggtttctgcatttaatgccagttactcagattctggactctttgggatttatactatctcccaggccacagctgctggagatgtaagttgcaaactcaccaaacttctttcatgaacaagttatttctcccccccgccataaacatgttttcggttaaaatatggaatgtttgaatgcagtgcaatgacttatcagagctctgtatagtatgatgtcattgaagcattatctgctatagggaaatttacacatgtatactaatgcttccaggaaagaggagagaattgcctccttcatgttttggttctggttggacaagttgcattgagttggctctgagacatctaaattgagaacccaggagaggggaagaccaggaggtttatttgcaagtcttcagtgtagagattgtgttgaaatcagggatatgtgtgaatgattgtaggaaaagaaaactaaagctcaatttctgggaaacaacaccatttaaggagcaagtggctaagaaaaatggcccaggtaaacagaaagaaaaagagaagctgatatatttgaaggataggaaagagagtatgtttaacaccattttgacccacagtgaaataacattcattaccactgagaagtctggtagtttcagcaagctaggacatcatgggtgatcttaacagttttgactagagtagtggaaattgggtaaaatgtgtagtgattaaggaatgaatgacaagtaagaaatgagaggttggtgtgggctagtggagcttagacattcaaggagcaagttgttttaggagagtttacactgagagattaggttgaaagagacatactgagcaaaaagatcggagcagatatcggagatagaaaattataaatggctcaagtctgagaaaggaatacttgggatccagcacacaagtggaccttttagccttacagacaggctaatattggaagatattgggaagatggggaagtacctcctcagtgagacaggaggctaagtcatgttttgacagacgtgagaggaaagtttaaagaaagtagtgaagtttgggacagacaaatagtgaggtacacaaaaagtgggtattcgctgtagtgtagatgtatccttgaaatcagcgaccacaaattcatagtacagtcagtcagcactgtcatgtaatttttcttcagttgcattcagaagcctaatagagaaatggaggaggtaggtattagggttaatcccaggttggaatcctgcaaagtgggcaggtgagaagtatgaggagatagcaagggagttgggagcattggcaagagtgattaaaaggatgattcagggatctaggctcaatagagaagtgaagccagagggggcctgataaattgaaagactggacaagtcaaggaactagagatcttgataaagtggaagaataaggatagtgagattaaagactgaggtcggggtcttagaattgagggcttcagaggtatgcaaatttaggctatgatcaggtctggggtgtggctctgaaaatgggcagctaaaatgaaggggaaacagaggtcctagaatttaggtgatcagagggaaaaataagtagcagacccagccagcactgggatggagaaaatcatggtcagatttatttatttattcaacaaatatttaccaagtacccacatccccggaactttattctttctttctttttttaaataccatacaaggattcagattccttcttgaccctggcttacaaagtatggacaagccttacaaattggctgtgtatggattactactctcttcttagtgaatagtaagagatagcagtattaatggcatgacactgcaagagtctggggaagttttaaaggtgcttattctttatgggtgattagaaatccatgtgtttggccgggtgtggtggctcacacctataatcccaacactttgggaggttaaggtgggaggatcacttgagcccacacatctctacaaaaaaagctaaaaaattagccaggcctggtagcatgcacctgtagtcccagcttcttgggaggctggggcaggaggattgtgtataaacagctgctttatgaacataggaagaataaggaacccatagtgatgacagcattccgcatggacactgtgctgtttgtctggaactaaccttccatctgtgtttttgcctcagtaaagaagtgtgtcagtgctgcaggagactctggtactgaccacagatgaccaacttttcttatctgtcctaggttatcaaggctgcctataatcaagtaaaaacaatagctcaaggaaacctttccaacacagatgtccaagctgccaagtaagtctcagtattaactgtgttttatgtttttgttatttgaaagttgtattcttttcagattataacaatattacaatctatgctcataaggactgagaagtacagaaaagcgtaaaaagggaaacatacccatatcctaccacctaaagatataattgttaacattttggccaggcacagtggctcactaatcccagcactttgggaggccaaggcaggtggttcatttgagaccaggagtttgagaccagcttgggcaacatagcaagacctcgtctccaccaaaattagagaataattgttaacatttttcttagtttattgatcatgcatttttaaacataattgttaatattgtatatatagatgctgcttgacttacactggggttacgtcctgagaaatgcgcatatcgaaaatgcatttaataccctaataacccagtcatccagccaaacaaacataagtcaaaccatcataagttaagttagggaccatctgtatacttttttatcttatttaaatagcatccttattatagaagtttgaaaattacaaataaaagacaaaaatgatctctgatttccctagcaatgattctgtttccattgattcaaattactaaaaatttaaacaatattcattggtgtgtcaaaatacacttgtgcattttctgcagttataaagatatctttgggcttaaaatatttttgtgtttcgtattactttcttggtgtagattcccaactaagttaagagttataaacataacgaaagactccatgttagagtgtgtgtatgtgtgtatgtttaaataatacatttgactaggcgcagttgctcatacctgtaatcccaggactttgggaggctggggcaggaggatcacttgaggccaggagttcaaccagcctgggtaatgtggcaagacactgtctttacaaaaagatatttaaaactagccaggtgtggtagtgtgtgcctgtagcctcagctactcaggaggctgaagaggggggattgcttgagcccacgagtttgaggctgcagtgaactaagatcacgccattgcacactagcctgggcaacagagcaagaccctgtctcttaaaaaaaaaaaatgtatttctaagtcacaaatctaaagagattgtaccagtttataatcataccaccagtatataagagtacctattctacaatagtttctttcttcataactaatttatacc

SEQ ID NO: 9234 - DNA, 766 bp, Homo sapiens
gattgaaagtgctatcaacactcctaattcattagtagttcgagggtttctctaaaagagacagacttgggacaaagttggaaatcaacctgcattttcatacagccgcttaagacatttaagtttgactccatctacttagaacaattcaaaatgtgaatcttgcaactccagtggtcgttatgatcatttagtattgcccacaggggaagcagaattacaacccaggatggaacaaccttttggtcatttctgttcccattagtattgttagttttgttatgctgagcacactacaaagttgcatctcttgtataagtacaacacaatttattaaatattgtatacatagaaccaagaatcgataggatgcagggctgcttgattgtaccagaaacaaaacatgatgagaatacattgaaacactggatttacttaagaaaaacctaagtttttcaaatctaatttatttaagaaaacgtattttcttaataagtgtaacacagttcttacaaggtatggtaataagcagaaagtagaattttgaatattaatgtcaaagtatgttttctgccattttgatggagttgatactttttcttgtaagttcttcctgtagtgaaagagagaaagtgaggtgtcattgccgaaaggacacactaataacctcttggtagtttattgcaggtaaaatcattttttaattaagctgacaacgtggtaaaactgcagcattaaattgtaattatgtttaaatggaagtctt

SEQ ID NO: 9235 - DNA, 8082 bp, Homo sapiens
ttttttaattttgaagggtacgctagctgggattttgattggtctggctcagttaaactgctctgaactaaagctcaagaggctttcctatcgacatgggtaagtgaatttattatatgaagctttaagtgaagttatcaaagttagtgtacaacaaatttaaaaactgagttttcttagcatgcatacacaattttacagtattttatttagagagctcatttttagaggactcttaagatttaggcactgatttctattctgagggattagaagtagtttgaaaagagtagtatttggaaaaaacagttatagtttaggatattttaaataattttctaaggttgtaaattagcttattcagtgaaaagattggaagttcttagtagcaattactggcaatttagaaactttgggttaatcttatgccaaagccttaagatgttcaagaaataagaacattggaaaaacacactaatacgtattacctgagtcttgtagaaattattaacattagaattggattttatatatatgtgtgtgtgtatgtatgtatatgtatatttagagaaattcaggttgtgagttaaaaggatgatttgtgtttctttttgatttgaaaaatgttacctgtttttgaagcacctgtaatatttgcccttataatttgtagaatttgttttaagtaaaaaaaaaccctcaaactaatctgtgtctataaatgtatttctccttttgacatactaataatcatttgctctagtttactaggcgttgacaaattattctcatatgcaatcactgagtggcttaatgacattaagaagaaccagctaccaggaatcctgggaggtgttggacctatgcattcactagtacaattaggtgagttttcttcttttttaatcaaaagataagttattttttcagatgagtaattcttatccctttgagaacttatgtgaggaccattagtctagaaaactcacatatgtactcatatacacaaaactttgcctccagttttaggagttaaaaaccccagggttagaatgatagaaaagtctgaactgtggcactgatgttgattttgtgttgactgttgtagtacaaggcctaaaggacttggtctggctcccaatagagcagtaccggaaggatggccgcattgtcagagggtttcagagaggcgctgcttcctttggtacctcgacagcgatggctgctctagaactcacaaacagaatggttcaaaccatacaggtatctttttagactgccttagtctatccaaaaagagccattgtgaaatggttgggtccttttgtttttaaaacgatactgtgaagatatacaaaatgttgtgagtagatactttattcgtagtgatttaatgtcatgcttgttttattgcttaaatgtttagtgttaaataattagaataaagcagtggaatacagtgtcagatttgtttgcctatttcaggtaaattgtaaacattaagttagcagaggattgatttcaccatatttgtatgaaaggatcgtagctaaatttgaagaaggcgttgtagattaaacagaagtattaaagatcattctagtaagtattaagctccatagactgatgtggaaatgttgagtgttctcagtgaacagaggaggggctaaaaatttagctcaatccaggtgttagttattaatttatacttttatgttctcgttataaaagtcatcaattcttgtggtaaagaattcagatacgcagaagtgtcttcattagggtttgtgagttcctctgctcttcctcactccctgtaggaagtgctctgctggtccgtaactcttcagactttcttctaattcatttcttccttttgacaaaatgatccaggcagctgcagagactgcttatgatatggtgtctcctggtaccctttctatcgagcccaagaagaccaaaaggtttcctcatcaccggttagcccaccagccagtagacctgagggaaggtgtggccaaggcctacagtgttgtgaaagaggtaactgaatacttgggtggacacatcagaacccttctgtgcgctttcccaactttcacctaaagagcatttaatggcttaaatgtattctgtagaaatccctgggagcagaatggcaactgccactaataacatgtgcccatatctgtgtgaggtgatggaaaagggccagtctgggaccaataggctgacaggaatactagtgattgcgtgggtggatggattctctctcttcacctgcagaagcactcagggagtgatagaaacaaatgccgtgtgatcgctgtctaggtttaacacatttatactctgccctgcttacctcagatttgcttaagaactagaacttttcagatgaatctcccaccctgatcctattcccatgccttcactatgctgaacgtggaacatatttttttgtacatgtttttatatagttttattatgtatgtatttttatttagtatgtatttataagcaaaacatactagtgttaatgttttaaaagtttccgtaaatggtgttatgtgtctcattctgcaacttatttcaagatagatccatgttaatcttaatccatgtaggtctaatttccacagttttatggtatttcactgtatgaatatatcataatttatttattttcctgttggtggacattcagtttccatttttcccctgaaacaccactatggggagtgctcatttaactctctttttgttcatatgtacaagaaattctttagggtcaactggggagtaaccgttggaatctcgacatgtattaagcattgctgaattgctctctgacacggttgtgccagtgaaccctgtttttttttttttttctgggtgttgtcagcgtcattccctggcatactctttttgacattctttttaatatgacataagggagtttgaggtcatttgacttatgatttgtgttttaggatttcatgaaagatatttttctcagtcatattctaacaacagtcagacgtgcctaggatggtcttttacttgagaaaagtagcctctgtggtcccaaacggcaggaagtccacgaaggtagggccccaagaaatgtattagtggataaataaaggtaagaccaatggtcagctttgaaaaaaagatttactggggagaataaagagataattaccagtcagatttgctcctacagatgtcaggattgagccagctatcaataggctaaaattagatctgtgaaacagacactggggttagtaagggcagtgggcagtaagatgtaatagcagtttgatttaacaacttgtgaagtggttgcctaatttaatctatattaattttaaaataaatgtgtgcttactttgtgccaaatatatggtaatcaccattagagataggcgatatttctaatttacagatgaggaaacgggttctgccagacagtggccttccccaagtaccacagagaaaagggagtggagccaggattggaactgggtatttgggtttaaagtttagttctctttctctaagctgtcactaggaagaatgagggaagggagggtgagattagtaagtgtggattgagatggtaggatgtgcttgtttggacttgctctggattctctattaaagttaaaaaaaaaaaagttcctaagtggtgcttggtatttcttttccattttagatgtcagtaagtcaaagatgaagagaaaatgccttgtgtgtgtcatagataggctcatcttttagatcagaagttggcagactaggctgcagggtagactagccatgcctcttttgtatgggcctttgagctattaataatggtatttacaattttaaaggattgtaaaacaaaacaaaacaaaaaataaataacagagaccatggcccacaaataccttctgtgtggcccttacataaaaagtatgtcaacccctacttacatagttctatttggtggtagtcaggcacttacgagggtggtagtaggaattatttattgaacacttactgtcttccaaactctgtcaagctcttgagatgaattatttaattctaacaatcaccgtaggaggaaggcagcattttagttccctctttaaatgacttatctaaggtcacacagctaaataatagggctgagactggaatttacttctgttgtccgcaaacgtagtggtggtcggcctcgtactctactcatctactcctgtttatcgcaggtgggatagggaggagagctggtggagaggggagggagatggtgcagggaaatgtacaagttgtaaacattgttgtgctcatggtttctcttattggctgttatcctctagatagtttttaaagtagtacttattatttctttgagtttttctggacacgttttttttttttttttttttgagacggagtctcgctctgttgcccaggctggagtgcagtggcatgatctcggctctctgcaagctctgcctcctggttcacgccattctcctgcctcagcctcccaagtagctgggactacaggcgcctgccaccacgcccggctagttttgtgtatttttagtagagacggggtttcactgtgttagccaggatggtcttgatctcctgacctcgtgatccgcctgcctcggcctcctaaagtgctgagattacaggtgtgagccaccgcgcccggccttctggacatcttttttattgctctgtggtattacgtttttgccagatatactgggtagataggacgctcttgttaacttgccaaaatgatggctagattctgggttagttcaaggtccttgatttccctggagaactcaaagttcctttatgctgtccccatcactgaagctgtcacaataatataataatataataataataatggaatgttgctttgagttccctagggatttctgagttagataaatggtaaagattcagaagtcatgtgaagttttaccacattggtttgacctacatgtttgtatattcagcttcaaagctcagaagtcattactagcatagagactgaataaatgaaaaagaaagcttagcaatcatcattattttattatgttgtgagaaagatggaaaatgctactaaagttttgttgagaattattaaacatgttcctgctttttgttctcagaattctctaatccaataaaatgttctattgagctttttatcttaattgaattttccatttttttcctaatacatagccagtaatttaaaacaaattaagtaatttcccagagcttagtagaattaggttgaatcaaagggaactatcaccatatttctttagtgaatatattcaagaagctttgtttgccaagtttgatttaactggagtgattaatagtaccagcaaagcccgtatttctgtcttcccaatgcgaaattttagtttacctacattttccacgcactagtgtcacaacaaaatactaagtcataattgcctctttcccttatagttagaattctgtcattaaaaataataatcctggtttatctaaaagcatggcatttttttttgtctggttacaaacataatgttacctgctttaaaagtgtgtactgcaggatagcttagagagttttccgaccagagtttgttcactgccctcctctctcctacctccctcctctacgcagggaatcacagacacggctcagaccatttatgaaactgcggctcgagaacacgagagcagaggggtgactggtgccgtgggcgaggttctgcgccagattcctccggcagtggtgaaacctctgattgttgccacagaagcaacgtcaaacgtgctgggtggcatgagaaaccaaattaggccagatgtccggcaagacgagtcacagaaatggcgccacggggatgactgatggcttggaactgacagtgtgaagataaggagagtggaaccaggagctcagagtcctgacagcagcttcagaggaagctcgtttaattttattgtgctcatctcaggaacaaaagcattttttagttaaataatttaacatcaaaacaacatgcaaccaaaaacttctgacatttatagttgatacttgcctatagaaatgtttggtggctggtgtcaaaggtccttaaagcatttgctgccaagttagtggaaggctcacttttgttaagatgactgtaattctccttgttaccgacgagagatcattggaagctgccttctaacactttgtgtagctctgtggagttggattttcttaaggtttaaaaagaatcacagcttcggaacttttaactgaaaatgagagacagaagccacaggggaagcaaagcaaataggattttcaatataaatatcagtgtggaaaaataacctattctgttgaatttagtgttcatgcacttgagaacaacattatttccatttactccgaaaatccttctgtgggggtttgagaaagtgaatgttgcagacatgttctgttgtgttgcactttatcctgtgtttatgtgtatgtgtttttagattaattcaagttgtgtgctatatttcttgtataatttacaaagttacacaaaatataaagagcagtaaacttgtctgaaagtttttggcaaaggaaggtaacttcaatgtaatagcttcctttaagagtacaggaaaatgcattctgtaatgaagtggggcccatgtaattgtttatattttcagttttaagcaggtatagtgcaggcttgttaggaatgtgtggaagggaagattggaagtgatttttcctcttttaaaagtaaacaaaattcttcaaatatgccctagttaactatttcagcataccatttttacttggttaacagtgtacattttgataacctatcaggaatgaataaagtatttttatttaaaggtgatattgttttatgcttccatgaatattttgcttttcttagagcatattcatagatgcagtactgtgatttaccacaagataattgggaacactttctcaaaatcgattttggttaatatcaggtaaatcattacctaggagtaagagggaaattgttgtcaattcctgactttagattgatccagcagaaagaaaaggtggaactttgtatatatccactgttgaaagttgcatgacctgacttcctgttttctaaagttgggggaatattattgaacttcaatttcagaactgcatttcaatttggggcttggaaaatgtagttaaatcaatttcgttctctaaattttctaagcaggaaagcaatgtaaaccaaaaatcaaaatgtttagaatttataaaaatggggttatatagcttttaattttagtttcctttttactgccaaaaaacttaaaaagacaacagcgtaaccacctgtttaagcaccgtgggaccatctcttattcgggtagagcctggtcctggcgacacactaacaggaaggcgtgctgtgttaccgggaaggcgcctctggctgtggggtgcgttctgaccaccccgctcagatgccagcattttccatttgcccttaaggaaacttgctatgtgtgttaacccagttatgattagtcaaactggaaaacacttgatcaaacttaaaattgtaaaatctgtctaacttttaaatatactttccacagttgtacttaagttcaattaactacagtatagagaaaaataattattctcttctttgcacccggagttgcaaacaaattaagtttacaaatctcatttaaacatatatctttgtaatgtaatctccgcggttctttctttgttctaccctcctgcacctgttgtcgatgtaatcattttgggaacagaaacgttgtgtctcaaaaagattcgttgtcagttcagccaagatgttctttacctgagattctggaaagatgtttatctatatcggaacacttctacattattaaatgtccttaagctttttcttttttacaagtgtcttttcagactttggtgttgtgatgacacagtagaaagagcgtggctagaatccgtggtttgcc

SEQ ID NO: 9236 - DNA, 2078 bp, Homo sapiens
aaaatgatagtgccaattcagtggaagtggttaatggcatggaagagaagaacttctctgctgaagaagcatcttttagggatcagcctgtgttttttaggtaactaatttagttttaataacaaatgaagttattttagacttttgaagattgttctgtgatgtatgtgtgctggtaatcatgaggttccgtcagcttttctttgcactgccaaatcatcagctggtgtatttatctgtttgtggtccccatctaattgcaccccccttatttgcacatagtaacctggttccaaattcgtctctctttcaattctctggcaggaatttccttttcttctagcttcttccttctttttctctcctctgtcccctctttccagcactgttatggtgtgtttgtaccagcccagcaggatatcatccttttgctttttttcctttatgtatctcaacctggctatgcctgtctgtcttttcccttgtggggattttctacctattttctctgtctgcccttcccagtcgttatgtgtctttcctgacccttccctccctgctcagtgggcactgttaagagacccaggtccgctgtgctgctgccgtcggctgtgactgctgcccaacggctcggccagctcgagcacagcacactgcagtttcctcatttacagacctgtttgttcttctcatcttctttcttttccaaaactggatggtagggatggtggcttggccctatgggaaagagaagggactgaagatcagtgcccccttgttatgaggagcagttacatcttccctgattttctgtgctgctttctcatatgtcccgggttgctgatttctctctttctctctaggttctgaagttagactttaggcatgggccaaagtcagcagtattactaattggaagggttgtcacgttttaaatattttgcatagtgatgaaaataggtagaaaaaatggaatatgataattggaaagatcttggaatagatgattcctggtggttctaaatctttccaccgccaaagaaggaccttttaaaattaatttcctacattgatccttttatttttacaaaaacatgtatcttaagtgataatatgcattcttattttattagtcacatttataaactgccaatttggtttttgtaaacatgggcctgaaagcaaagaattttgccttttttttttagcccagaggaagtagggttacccatttatttacgtttaaaaagtacacaagccctatacttacttaggtaaatgtttattttttccattagactatttaaaatattgagaatagcttatagattttcatttgtactctcaaaggctcctaatcagtgccatagtctaaattacacaccttacaaatgaggaaatgaatgcccagagagattagttgacttgctcaagaccacagttcgtggccaaggcacaactagaacacagattttcttatctctaatccagaaaatccagtacagtttttagtaatgtcatgagagcccccttcctccaaacatttattcattttacaaatatttactgagcacttaactgtatgccaggttttgatctaggcacaaatgaacaaagtagagaaaatatttaattgagtttacaaattgagattacaaataattaaaataaatggtttgtcctattaatatgtgccatggagaaaaaaaaagtgagaaaggagagtattggagggcactggcccgacagccaagtggagctgagtattcaggggatgggcgtgacctggggtctgaggcttctggtagtgattggtgtaaatatagcatctccattttgttgtaggcgcagtggactttggtgagatggcttaggatgtaaccaccaacattaattctgtgggaaaactgtgtttcaagttccaaacattgtttgcagccaacttttggaagccagatcattttgttagatgtgtaccatcagtgtacaaccagccctctatatctggaattctacatctgagattcaaccaaaatattaattaaaaaaggcaataaaaataatacaaattaaaaata

SEQ ID NO: 9237 - DNA, 2260 bp, Homo sapiens
ggttttggatgattaggctgtgtgtgcgtgtgagaatgatcacatgtggcgtcatgctttgtacagagcctcagaccactgggcctcgtccagtgagagtcctctctggcgacatcacacgcggagcagccaggggccaccttagatctcagatctctcagagcaatacttttctgaactgccactgtgcctgggtggttgggttggtgtcatgcttctgactagagtagatcgcgcatgtccaccagtgatacgttgagtccttacagttccccccatggagtcccataagcagctccatcgagatctgtcagcaagttgcaggaccccacaatgttctgacatgttaagacccccttacatgacgagtagagaggcagctgaggccacaaccgtgtcttcctcttgaatggagctaactcggaaccccccgttttctcttcctttctgcccaccactgaacattgccttttagataactcagtgtttcttctagatgtcatagcaatagactttcactttcatgaagtttgggtacgatttggattctcgcttaagtacatatatttatcaatatttttataaggcaaagttcacttaaaaaatctttccaagtagcagtgtgcctaagatggcaaaatactaaaaactggtgtttcctgctcctgttgtgtgtcacttttcaagccgattgaaatatttctggcttttagggcattactttttaactatctcctttaaaaacgatgttctgtaggtttagtgtctttgttcatttccaaaagagtccagacaactgtgtctgcccctgcagaggctgtttgtccaaaggcagcatgccgcttccaccggaatgcagacagcaggggagcggaattctaaagcagcgacttaaaatgaggaatccccaattgcactaaatggtttcaggattgactaatcattgtcttaacattaactcagattttcaatgtgtaaagagctgtgtgacttggcgtctgagagatccctctgctttgctttgcttcagagtcctcgcacccgcatcctcagaactgtggggcatggtgggctctaacgagcactccccttctgttttccttcattacttttgacctccttaagacttcagagagaatgtccgtcaagttcttttctccatcaagttctttaagttccttgaaaggaagggactgtgcaaacacaaagcaatattcttttgtatctgcaaatgcatcagctggacataccaattggtatcaaatagaataaaatcaaatataaatgtttgagtcttaggttaaaaaggaaggttatttgtatagtttatagataatgaaggaaaaatttctttttcattgcaggaaatcttgtttactggaagatagagtcactcttttcatataagacaaatagtgctttaatgccaacttctttttatctcaacatttcaggatcatgctaggcacactgcccccttgaatagacattatatgcacagttgcaagtcagccaatgtttttattcagaagtatttccccccattatagtgcctgcatatcagagatacaaaaagcatccaacacactaccgtaataggcttctttggggatgagaaatttgagtctcaacaactcagagtttgagatgtcagcttttttggtaaacgtaggtgttagaggtatattttgctttcctacaacaattgttggcccttgatttcaagcatgttgcttcataggaagcaccagagtgccatctgctgcatttcaagagattgtaaatgtcatctcagctggctcagttatatctctaatgtcccgggtagcagcacctccctctaaaaatatgtttacttcactgtttcacttgtattttgtgtatacgaaatggcagcttccgatttctagttggatttgtcttgcattgtttgtataacttgctggtcacccagggctatttgctttttcattgagaaatttggtaggggtgtctagttcagcttttatgttgatccatcctgacttattttagacattgaatttatctcaccacaagtaaaagaacatgtgtattgactgtctttgctaagtttcctaatttttcctaattatggcaattatggatgtgaataagaatactgatgctgtacaaatatttttgtggaaatgtaccttgttaatgtgactatttaaataatatgaaaataagaatactcttgaagaaaaaattaaaatatttactctttggattttgcttt

SEQ ID NO: 9238 - DNA, 4206 bp, Homo sapiens
caggctccatctactctttgaagcttctgcccagcttgcattgtttctaggagaacccgcgtcatacctttatctatagccttcccctaggtcttcagaagcatcaagttttaactgtggacattggatttggtggaacagcaatcatggtaagctgtatgataaggctgagggttgaaatgtgctgtaagggccgaaagaaatagtttgccagcatgtgcagtgatcttgggttctgaatgttagaaataaggatacatccatggatatggattctcattgcattgagtatcagctgaagatgagctgatttttttatttttatttttttcagacggggtcttgctctgtctcccagtctggagtgcagtggtgcgatcttggctcactgcaaccctgggttcaagagattctcgtgcctcagcctctttattagaaacagggtttcactgtgttggccaggctggtctcaggctcctgacctctggtgatccacccacctcggcctcccaaagtgctgggattacaggcatgagatgagccactgtgcctggccatgagaaatgtttcatgatgtgagaaaatacaggagtttttggtcatgattccaccagtggtgaaggactgtcctgcagatgatggactctcaggtcagattacaatagaaataaagagggctttgaaaatggaagggttttggcattaacagtacagagaaaagcagtctggagagagagaacaccctacatcattgtggtttggtttacttaggggagtggacagtttagagcatgcatcgtcacagagaaggataatcacctgtaaggaggtgaaaattggttcttgagatgtgaaaaaatacttcataatcctttgtggtcctccaaagagccatactaaatatggaagaatgttggtgaaaaaggagagaatatttgtttagttaaggaaaccaggcttagattatgtaagggtggagaagaaacaggagaagattagaagactagggtgttggcaagctgaacatgactcttgtcttactgcttctagactgttggcaagagtagcaagatgctgcagcacattgactatagaatgagatgtatcctgcaagatggccgaatcttcattggcacctttaaggcttttgacaagcatatgaatttgatcctctgtgattgtgatgagttcagaaagatcaagtaaggctgatttgggcaaatgggggttggacacagaggcagtgggaagggaaggccagagctggagtaagggatttccgagggtaactgaagtagttagggaaactatggtagagccagtctattgtttaacctcttgacctgatctctgaattaggtcagagtctgcatctgaactcttttaagtttgtaaaacaatcatggatttattactgggagtaaaagtatatgctatggtcagaatactcgtatttatttttaaaattgagaaaaatgctatattaattaattggttggcttctgcagcagtcttagaccaaatcttggttgaaatggagaagaacagttgttcttcatggttgaggagttgggatatggttgccatttggtatcctctctttgcctatcactgttcccattatttcagttctgtgtcacctgtcattatgatttaattatttaagtaattttttaaagaaatttccattttaatgtggaaacccaggtttcaattttgtttttcttaaaaggtatttcacaaaagaaattagtcttgttgtagtgtaacatcaaaggaacattctgtaaaagactaaagttagattagaaaatagcttcactatttacccttgtatattaactgtgtttacagatattttttggcttgtttttcagtgataactcagtaaatgtttagcatcagttgtcttaattgatacttgaggttgtataaatattttgatgagtgagtgatcactaaaatttatctcactaaaatttaattctgatttgtaggccaaagaatgcgaagcaaccagagcgtgaagaaaagcgggttttgggtctggtgttgctgcgtggggagaacttggtatccatgactgtggaggggccaccccccaaagatgtaaggaagatgtagggcaggacagaactttaatttgcagggacatcatattatgtgagatgtctgaaatcagggtagagcagacacagttcaacatggattgtcaaataaaatgtgccaggcacttaatatcaattgttggttgcctatgctattcgggattaggggatttttggtgaattattctatgtgctgggcattacctaggtaagggtaggagttggtgattcatgtttgcttggtatgtttataaaagaggtgttttcacaatttgacaaataatgtgcattttatacacaagatacctccatggtatacttgcttgtttgttcatttggacacagaactaatatgagataggtgtcatgggaaaatggtggagagaagtgatctctgatgaataagaatactgagaacttgtaaattgtttgattttaggctatgaattttcttgtttcagactggcattgctcgggtaccacttgctggagctgctggaggccctggggttggtagggcagctggtagaggagtaccagctggtgtgccaattccccaggcccctgctggattggcaggccctgtccgaggagttgggggaccatcccagcaggtgaggaaccagcagagggttttatattattgggagaatatgactaagccggaggccgaggagatttaaaaacctaagtgtatgtgtcatacaatgtaaacagcatatggtttaggaggaaccaaaaaacagatatatgggaggaagggaataaaactagctgcttaaaatggtcattgggtgattaaagttacccaagttactcttggcaagagtaacttgccactagtggtgagtgaacagaatgcatggatataccacagttgaaaagaccaaagggctttttggatgtcagtgtactaagattagtttttaaaatatgggaataggccgggtgcagtggcttacgcctgtaatccagcactttgggaggccgaggtgggcagatcacttgaggtcaggagttcgacaccagcccggcccacgtggtgaaaaccctatctctactaaaaatacaaaaatcagctgtgtgtggtggtgggtgcctgtaatcccagctaccaggcagggagacaggagaatcgcttgaacccaggagtgggaggctgcagtgagctgagattgcgccattacactccagcctgggtgacaagagtgaaactgtctcaaaaaaaaacatgggaataatgagagaagtacattgcaacagttgtttgtaactaattggtcatttttctcatttattttctgtgtttgaataatgtgaaggtttgcatcgctttgactgtttcccgccctgccttctcaggtaatgactccacagggaagaggcactgtagcagctgctgctgttgctgcgactgccagtattgctggagccccaacacagtacccaccaggacggggcactccgcccccacccgtcggcagagcaaccccacctccaggtaagggattggtgaacacgaagacgaacttgaatctctgatgatagcttactgatttaagacacagcctgagagcctaagaatttggggaatatgcttccttcttctagatactggtttttaatgaaagacatagaagagtaattgtcatatagaagttatttgactctatcattgttgtctggcccatttctttagggattatttgggctaaattctaacttttctaagccattttatgaggcctttatttctaccatttttcactgtaggcattatggctcctccacctggtatgagaccacccatgggcccaccaattgggcttccccctgctcgagggacgccaataggcatgccgcctccgggaatgagaccccctccaccaggcattagaggtgagtgggagcataggggtttgatggttcagccaggcccctgaatatgtgtatcctctttttctcaatgtttctatttcctttccaggtccacctcccccaggaatgcgtccaccaagaccttagcatactgttgatccatctcagtcactttttcccctgcaatgcgtcttgtgaaattgtgtagagtgtttgtgag

SEQ ID NO: 9239 - DNA, 8957 bp, Homo sapiens
aggcgcgctcgggcgaggtaggagcgatgtggcctgggaacgcctggcgcgccgcactcttctgggtgccccgcggccgccgcgcacagtcagcgctggcccagctgcgtggcattctggagggggagctggaaggcatccgcggagctggcacttggaagagtgagcgggtcatcacgtcccgtcaggggccgcacatccgcgtggacggcgtctccggaggtaacgctccgttccgggagtcgttccaagacctttcccgagcttgcgctggaatggaggtcctggaggtgggggtgggcggctcctacactcttagctactgttccccttcgcatctctcagggcgactttatggcttcctaatattgactcttgcctggttaaacccttttgacggagggaggcgatttgcccagcaagaaaacccgcatttcttgagcggctcctttgtgaaggtctctaccaattgttgctgcacgtgaactcctgctaacttctagacgcaggaatgactaattccactttacaaacgaagaggctgaaatccacagatgtgaaatggcttgcccaaaagcccccagctagctgcaggcagcgctggaatattggagctggaacattgcctgactggccagagaggacagcttgctgggtaaactcatagcaagcaaggggtcccagggctgccacagaaatcacatgatgagttggccctgccaggtctccctcatttctttctttccttttttttttctgagatggagtctcgtcttgctctgtcgcccaggctggagtgcagtggcgagatctcggttcactgcaacctctgcctcccgggttcaagcgattttcatgcctcagcctcccaagtagctgggactacaggcacgtgccagcacacccggctaatttttgtatttttagtggagactgggtttcaccatgttggccaggctggtctcgaactcctgacctcaagtgatcctcccgcctcagcctcccaaagtgttgggattacaggcgtgagccaccactcccagccctccctcatttcactctaaccagtggttacacctgacttattcgtgtcaggcctcaggtgagtggtaatcatcaacaagctcccaaagctgccttctgcccaggaaataggcatagaacccttggtgctgttgcactcatttgtaaaacagaggtcccaggtaatcccttctctccctcaggggaagcttagagccggtcaaaagatgggaaattaggagacccaagttctcatcctgtttttgcctttcccaggctgtgtgaactttcccctctggctgtttgctcctaaggtcagctgtgttcactctgggctttagaattcggggactggtatctcaggcacctacctttgggggtgtgattctggcagcaaagtaaactgtggagttccaggactgcagcaggcgtctgatccagccctcttctttaaccctcaaggaaaccaaggggtcagataaggagtcagtggtggtcttcaggcacaggagaagcctgtgaggaagggctgagttcctccttgggtagaatgtgattcaaagccagagtttaggctgggcacagtggcttgtgcctgaaatcgtagcactttgggaggccaaggcaggaggattgcttgaggctaggagttcgagaccagcacggacaacataatgagaccccatctctacaaaaaataaaaaaatttaatcgggcatggtggcacgcacctgtagtcccagctactcaggaggttaagtgggaggattgcttgagcctgggaggttggggctacagtgaaccatgattgcaccactgtactccaacctgggcgacagagctagaccctgtctcaaaaaaaaaaaagtttaaacttcttgctcttcaagatgtgtagcactgacgctccttctgtagctgttgaatttggtgcctcctcaatggtgactccaggtctgtttcctttctggaccatttccccagggcctggcactgtcatctttccaggcctgcccttgccccacctgagctgctgtatccatctcctctccttcacctcaggaatccttaacttctgtgccaacaactacctgggcctgagcagccaccctgaggtgatccaggcaggtctgcaggctctggaggagtttggagctggcctcagctctgtccgctttatctgtggaacccaggtacacagtgagtggtggggggttgtggggactgaccccagctgcctgcttcccacagtcagcaaggctggtttagccagctcagctcagccacagccctgggcctactgttggcctcagagctgtgcagcagaaaggctgagtgcaggcctctgttttgctgaaaagctttggccaaggaactttatatatatattttttctttttgagacagagtcttgctctgtcacccaggctggagtgcagtggcacaatcttggctccctgtaaccttcgcctaccagactcaagggattctccatgcctcagcctcctgagtagctgcgattacaggcatgctaccacacccagctaattttttttttttttttttttttgagatggagtctcgctctgtcgctgaggctggagtgcggtggcatgatcttggctactgcaagctgcgcctcccaggttcacgccattctcctgcctcaacctcccgagtagctgggactacaggcgcctaccaccactcccggctaattttttgtatttttagtagagacggggtttcactgtgttagccaggatggtctcgatctcctgacctcgtgatccacccaccttggcctcccaaagtgctgggattacaggcgtgagccaccgcactcggcctaatttttatatgtttagtagagatggggtttcaccatgttggccaggctggtcttgaactcctggcctcaagtgatctcctccaccttggccttccaaagtggaaactgcctttttgagcattcattttcccacctgcaaaacagagtccctcacacctgaccttctataagaaaagaggagtaggcggcaggaactgagactaagggctctggggctgttctgacgggagcacagttgccagtgctgccctttagtgtccctgttcctgtgggcaagtatcttaacttttctctgtctcaattacttcatagggaaaatgaagataatagcacttaataggatcattacaaattaaagacttaatacatgtaatgcttagaataggccgggcgcagtggctcatgcctgtaatcccagcactttgggaggctgatgcaggcggatcacctgaggtcaggagttcaagaccagcctggccaacatggcgaaaccctttctctacaaaaatataaaaattagctggcatgatggtgggtgcctgtaatcgcagccacttgggaggctgaggcaggagaatcgcttgaacctaggaggtggaggttgcagtgagctgagatcacgccactgcactccagcctgagcaacagagtgagactctgtctcaaaaaaaaaaaaaaaaaaaaaaagcatagaacagcctggcacatagtactgctcaatgaatgttggctattatttattttccaaatgttacaaaataaatttatataagtatgaaacttaaatagtacttattatgtgccaggaattcttttaagaaaattacaactattggccaggcgtggtggcttatgcctgtaatccaggcactttgggaggccgaggtgggtggattactgagttcaagaccagcctggccaacatggtgaaaccctgtctgtgctaaaaatacaaaaattagctggccgggctcgcttgaacccatgaggcaggggttgcagtgagccacgacggtgcgaccacactccagcctgggtgacagagggaaactctgtctcaaaaaaaaaaaaaaaagaacattacaagtattaactcattaatcctaagtgatagttgctattcttattcccgctattgagatgaggacactgagatccagagaggttaagtgacttgcccagaggcacacagcctgttgtgggatttgaaccctggctcaagagtccatgctggctgggcatggtagttcacacctgtaatcccaatacttttggagcccaaagcagaaggatcacttgatgcctggagtttgagaccagcctgggcaacatagcaagaccctctctctaaaaaaaaaaaaatgtttttaattagctgggtgtggtggtgcgcacctgtagtcccagctactagggaggggaggctgagttgggaggatcacttgagcccaggagttcaaggctacagtaagctatggtctcactactgcactccagcctgagtgacagagaatccctgtctcatttgccaaaaaaaagaaagagtctgtgctcctgactacttgtgattatcattaactgccctctcagaaaggtgagagtgaaatgaatgtcagaggcagaactcctgactcgcatccagtcacttcccagcaaagccctcacccagacccaacagttttcaaatttacaaattagaggcccaggtgaacccagaattacctctgtgatctttttcttcaccattaggcgaccaaaaaagacactcagtatggtgttaggaagacacatctttcttctccacgagtgcccgtaattccaccattagactgccactgtaaaaccaaagtctgcccagggagggaacctaacaggtccccagttcctcagtgggaactgtctgtcagattcctggcagctctgggatagcccatgtgtggcagaaagtaaggagactgaggctgcaggctttctgggttgggtctctgtggtcctccaagcctctgtcccctcgaacttgtcccacatgaccccacaggcatcaacacgtgtctcactcattttcttcagagcatccacaagaatctagaagcaaaaatagcccgcttccaccagcgggaggatgccatcctctatcccagctgttatgacgccaacgccggcctctttgaggtgtgtggaagctgtcctgcgggtgagggttggtggggcctgttaggctgaggaaggcttgggtgtgggcagtcgggagaacctagcaggattcagtgccatgcctagaggctccagagcccgcttctggaggtcaaggttgggccaggtaggtgctccaggaggaatcctggggcttgcagggagcctgagttccagagcctttgggggataagctacatcagctggaaggctgggggaggcgggggcctggtactcaccaaatatattctcacctcctcttactagagcagggcgctggtccagcccggcactgagacacgggggccccagagagaagcacagaacaccttgcctctctacccagaggagcgccctggctggcagtacagttttttgatttgctggagtcccggtcaagggagaagcccagggtggttaaatgatggctctacgctcactgcctccctccaggccctgctgaccccagaggacgcagtcctgtcggacgagctgaaccatgcctccatcatcgacggcatccggctgtgcaaggcccacaagtaccgctatcgccacctggacatggccgacctagaagccaagctgcaggaggcccaggtggggcgacgcctgggtccaccctcagcctccgcctggggaaggaagtgaggcttagagaggccaactcctcactcacagagatagcctgaaagtttgaaacagcagagatttgtccaagatgtgaacccagatccctcacacccagagcattattcttttttttttttccctgagacagagtttcactctgtcgccaaggctggagtatagtggtgtgatctcggctcactgcaacctccacctcctgggttcaagtgattctcctgcctcagcctcccaagtagctgggattacaggcatccgccaccccacctggctaatttttgtatttttagtaaagacggggtttcatcatgttgtccaggctggtctcgaactcctgacctcagttgatttcacccacctaggcctcccaaagtgctgggattatagacgtgagccactgtgcctggcaccagagcattattccattgtgccatggtgccttgaggtttttccctgtgtatgtgtgacagtctcactctgttgcccaggctgtattgcaatggtgcagtcatagctcactgcagcctcaatcttctggactcgagcgatcctcccacctcagtctcctgagtagctgggactaccggtgcccaccacacccagttttttatttatttgttttttagatggaatttcactctttttgcccaggctggagtgcaatggcgtgatctcagctcactgaaacctctgcctcccaggttcaattgattctcctgcctcagcctctggagtagctgggattacaggcacacaccaccgtgctcagctaattttctatttttagtagagatggggtttagccatgttggccaggctggtttcgaactcctgacctcaggtgatctacctgtctcagcctcccaaagtgttgggattacaggcatgagccaccgcacccagcctgtttgtttgtttttgagacagggtctcactataatgctcaggctagtcttgaactcctgggctcccaaagttacaggcatgagccaccatacccagccagtttttaaaatttttagtagagacagggtctcactatgttgcccaggtgggtctcgaacccgtaagctcccaaagtcctgggattacaggtgtgagccactgtgcccggcctgccttgagtattagcaagcaccttctgtgtggcaggcccttgctaggcataaggatagaatgtacatgttggtgagacctggtcccagcctagcctgccctctgggaccttacacaggagactgagatgtgagcccattctcactgtccagagctcagggtggagatgggtgacgctgagaggcacagatgagggagaggatgttccagcccccaagatggtggtacctctgtgcccacctctgtgctgggcactgggcaggatgagctctcagagctccaagcagcacaagagacgggtggtttggcccaacttgacaccacccaccatctgctcatgtctttcctgcagaagcatcggctgcgcctggtggccactgatggggccttttccatggatggcgacatcgcacccctgcaggagatctgctgcctcgcctctagatatggtgccctggtcttcatggatgaatgccatgccactggcttcctggggcccacaggacggtgggaccatgtggcacctgaggcctggggtggggcttctgagggtggctgggaaacgaggaggccagtccccagcatgatccataatccctgggctctcaggaggccagtgacagcagcggtggcttcccttgcaggggcacagatgagctgctgggtgtgatggaccaggtcaccatcatcaactccaccctggggaaggccctgggtggagcatcaggtacctgcaaggttgtgtccctggggtccccttgtccttttgaagggccctggaggggctcagggaagtggggagggcagcatggactgtactttcaggagggggttgggtaggctctggcccctgaccaacccctccccccacctcttcccttcttctcagggggctacacgacagggcctgggcccctggtgtccctgctgcggcagcgcgcccggccatacctcttctccaacagtctgccacctgctgtcgttggctgcgcctccaaggccctagatctgctgatggggagtaacaccattgtccagtctatggctgccaagacccagaggtgcgactcccagcagggcaggctcgggggcggagagacgtggtgagagccagcctcatgtgtctgcccaggcccacagacagctctgtgcccaccgggtctgcttctgcctgttcccctcccttctctctgtccctgcctctcccctctagcttctgtgtctccttcttatccctcctgtctttccacctcccttgttgttctccctgccccctgcctggctcccctctgcctcttagagcttgtaactgtctttgttgatccttcttgcagacttgggcatagacctcgggcctggtccctgcaaggagcgggtgtgaatgctccacggccccttagctacctgtgacaccttgtgcccacaggttccgtagtaagatggaagctgctggcttcactatctcgggagccagtcaccccatctgccctgtgatgctgggtgatgcccggctggcctctcgcatggcggatgacatgctgaagagaggtaagggtgctgagacaagggaactggtggtgggtcctgagagaagagaaagggaaacccctagactgtgacccagccccgtacccagccacgctgcggcctcttaggccagctgtctgtctaagcttgaacaccccaagccatgaggcagtcccgaatctgagacctggggcagttcccttgccctctgtgttctgcccccaagcctgttggttctggcacgcccttgctttctaccctcccaggcatctttgtcatcgggttcagctaccccgtggtccccaagggcaaggcccggatccgggtacagatctcagcagtgcatagcgaggaagacattgaccgctgcgtggaggccttcgtggaagtggggcgactgcacggggcactgccctgagctctgggtaaggacgagaagagccaaggtccgcctactgccacagggtcaaaggaggttttcgatcagcccagaccagaggctctgagccctgaaccaaagtcccagagctgggctgggacgtgacctgtgctgagggctgtgagaatgtgaaacaacagtgtgaaaattggctgtgac

SEQ ID NO: 9240 - DNA, 2182 bp, Homo sapiens
agaggaggcggaggcagaggcagaggcagaggcagagcccgagcccggtgccgagaccaagcgacagaccggcggggctgggcctcgcaaagccggctcggcgagctctcccgacacccgagccggggaggaaaagcagcgactcctcgctcgcatccccgggagccgcactccagactggcccggtagtcaggggctcaggagcagatcccgaggcaggctttgctcagcctccgacgagggctggccctttggaaggcgccttcaacagccggaccagacaggccaccatgaccgagaattccacgtccgcccctgcggccaagcccaagcgggccaaggcctccaagaagtccacagaccaccccaagtattcagacatgatcgtggctgccatccaggccgagaagaaccgcgctggctcctcgcgccagtccattcagaagtatatcaagagccactacaaggtgggtgagaacgctgactcgcagatcaagttgtccatcaagcgcctggtcaccaccggtgtcctcaagcagaccaaaggggtgggggcctcggggtccttccggctagccaagagcgacgaacccaagaagtcagtggccttcaagaagaccaagaaggaaatcaagaaggtagccacgccaaagaaggcatccaagcccaagaaggctgcctccaaagccccaaccaagaaacccaaagccaccccggtcaagaaggccaagaagaagctggctgccacgcccaagaaagccaaaaaacccaagactgtcaaagccaagccggtcaaggcatccaagcccaaaaaggccaaaccagtgaaacccaaagcaaagtccagtgccaagagggccggcaagaagaagtgacaatgaagtcttttcttgcggacactccctcctgtctcctattttctgtaaataattttctccttttttctctcttgatgctcaccaccaccttttgcccccttctgttctgactttataagagacaggatttggattcttcagaaattacagaataattcatttttccttaaccagttgtgcaaggacagcaacaaccaatctaatgatgagaatgtacttatattttgttttgctattaacctacttacggggttagggatttgcggggggggcttgtgtgttttgttggcttgtttgccatgaaggtagatgtgggtggggagaagacacaaggcagtttgttctggctagatgagagggaacccaggaattgtgaggttagcaggaatatctttagggtgagtgagttttctttgagttgggcacccgttgtgagagtttcagaacctttggccagcaggagagaggtggtagggagcagccagccggcaaaggaaggagggggaaaaaaaccgccaccgggctgacttccacctcccagtggtgagcagtgggggcccaaacccagtttccttctcatttttgttagtttgcgctttcggcctccctattttcttagggaaggggagtggggtccaagtgacagctggatgggagaagccatagtttctcccagtcagctaggatgtagccattgggggatctttgtggcttcagcaaattctcttgttaaaccggagtgaaaacttcaggggaagggtggggagtcagccaagtgcctcagtgtgccctgttgaaacttaggtttttccacgcaatcgatggattgtgtcctaggaagacttttcttttcctctggatttttgttcctcctgtacaagaggtgtctttgcttggtttggtggggctgcggccacttaaaacctcccgatctctttttgagtcctttattataagtagttgtagctgcgggagggggagggggagtgggcgggcagtggatagtaagacttactgcagtcgatttgggatttgctaagtagttttacagagctagatctgtgtgcatgtgtgtgtttgtgtatatatacatatctagggctagtacttagtttcacacccgggagctgggagaaaaaacctgtacagttgtctttctcttatttttaataaaatagaaaaatcgcgcacttgcgcgtcccccccccacccccttttttaaacaagtgttacttgtgccgggaaaattttgctgtctttgtaattttaaaactttaaaataaattggaaaagggagaaactga

SEQ ID NO: 9241 - DNA, 5312 bp, Homo sapiens
ctggagaaagctgggagatgcagccagctccaagccctccatacggcagcacctgtctgggaaccagttcaaggggcctttgtagggccactcttctgtggacgtggactggccctgctgggggtccccagggggagtttcaggccccagacacgggcaggacctccagcccagcccctgtcttcttcctctgtggtgaactgtacataggacgctgcccgccctggcccagctgccatgggtccgatgcactggcccaagccgccatctcccgcctcatacaccagcaacctgggaagacgagacgctgcgactgttcctgcagcagagcggcccggacgcctcattccccctctgggccctgggctccatgagcaagaggctgcaggctgcttctgagatccagcctgggaactgtccaggctcctctgtcctgcctgggatggaggggccactcatcaaaccctctactccccggctgccacccacactggacagagaccaccactacctgggtcttgacgcaggtggcaccacttcttgcccaaatgccgtggcctggccccaggccccccaagcactgggtccccggcatgtggacaaggccactcaccacatctgtggctggctggaggctgccctgggcccttcctgtgaccctcagccttggaggtcagggtgccctcacacctggggatctgtgctcagccacccgatgcccgctgctccttgcttttggaggtcatccccctcccccccagtctctgcaatgtccccctgccaccctgtccaggctatgcccttcttgggctcctcctgccccatgcctgaggcacgtcccttttcgtggtttacatgacaggccagtaacaggaagggcctggggagagtttctgggctgagccacatgtgattttcctgatgggcagcactgggccacagctggggctctggttggctgtgacctcccccagggcctggctgcatcttgggtccctgtggacagagctgtgtaggctgcagatgagagttctgttctttttgggaaggagcgtgtctggccaggttctgcctttagtttgtggtgtgacctttagcagttcactcagcctgtctgggctcttggtggaaacaggtctctgaggttccttttcggccatgcttatggctccaggtcatccagcgccacagggcaggggtcctcactgagggggcgtgagccaacagccgacggctgagggcgggccgggtggagctgagttctgctgccttgcagtcgctgcgggtggagagttgcctccccactctgagcccgtgtcctcagtagtaaaatgggcagcataaggccctcctcacaggattctggcatcaagtgagatcttcagtgtaaatgaccatgtataaactgtaaagtgcaatagaaaactgtgtgtgtgaggaaagtaaggcctagagggggtgatgtgtggcacatgacagggattttgatcccacagctgcagcacggggacaggccgcttccccacatccgctcatgccactgtaagcagccctagctcttgggtccaggacctcaccaggtcctcgtcagactcctgtgctcttccaggggctgctcagccccacctgaagagcccagagaggctgtcttcctacccagcaggtctcatgcaggcccagggctggggatgcaggcaagaggagggagatggccgccctgtccctctccctagctggcggctctattctgagcagttcttgctgcccgtttgctctcaggggaaaggctcacgccccccatcttagccccaggggggtaagtgggtgctggtgatgggatggtgtggcgctcctgccgtgggtgttgccaggaggctctttgggaaggagtgtcgcccggtcaggtggtgcgctcccggtcactaggggtgtacacgtgaagttgggtgaacacctgctgctcatggtacccagtgattcttgcccgagtgggcagctgagcagaggcccctctgggtcttgcagtccaaagaaccgcagagtagcccaagggctgtgggtccattttgagtggcagccaagtctgggagcccgtgtgcatcatgtttgggtcaggttggcgtggccaccactgaaataagcaataagtacgggctcctggtacctgcggatctcctgcaaacaggcccagagaacagccttgaagccacctttcccctcaaggggactgaccctgtctttaatgctgcagtggcatccagggatcagtggaacattgctttgagaaccctcctgctgttacggaggcagcacaaagctggtgacccctgagccaacacggcactgggatggctttctaggacagaaccctgtcggcgactgtcacatctcaaactaatagctgattttaaaagccagcagcagcgacgccatgtacctgagtacaggtggcagttgcagagccgtgggctgtagaaggtcagatggggcttcccacaggggaaatctgggcatgctgtagctcagggtgactcccagctccgtcactagcagggcgacccccttccttctggagccttagctctgaaagcccccagtgggggtgccctttcagatgccccctttccatttcaaaggctctgactcttgatcttgaagccggacgcggcactggcactcggcttcagtttccactgtgacagatggaggtctcctttcgccccagcccaggtggccaagcccatcctggcctcagaacatgctgagcacattttgtagggtggcacctttttatccaagttactagctacacatcagtgtttaaagagaaaaaagtgacctttcattttttttttcttgaaacttgaggaaacaagatacatactactgattttttttttttcttaaaactaaatgcatgactgcagagcggtagaggtgtatatttttcatactgtggggcaaagtatttgtgctgctttttggagatggactggaacgtctggtttctgtccccgggcccggcagctacgtctattttctgtagaaggtgccacagtgagacctggagccaccccttcctgccctggcgccgtttagagctgggagcccgtggactcccggcctgtttctaccttctattcaaccactctgacgtggggagacaagaagaaatagaactttttgatagtgtggtaaaaacattgatttgaactattttagtaaaaggagtaacaaacaagattgtgatagtgtctactttgagctagataaataaaggcctctttgtgagcctcctggctgggtgctcagtgcttgtttctgtcgtgggtggcagggtcagcaggcagagacagggccaaggcccctcaagcaccgcagatgggggctcagtcggggccccttccacagacagagccgtggcccctcaaggtggacagtgaggccgctgctcctccagctgcctctgtctcatcacaggccagaagtggaaagggtttcaaatccaagcccccgggttcctgtgtgcgttctacgcagcaaggcttcaaagtttcaaactggtttggaactcaaccaggtcctccaaaggaaaccaaggcaggcacaggatgggggcaggctggcttggcaggcagctgtgcggatccacccagagtgccttgggaggcagtggggttggctgtggctgctgtgagctgcagccaggcctctcccgcgtccccagggtctggaaggagggcctctgcacattttataagccacagactgcgaaggcctggagccccaccttccacccataacaaagaaagggatagtttcagaactgcttttatttggataactgactgaaggagtctcatttgtaaccaagatggaattcacagtatgttgttacattcacacttaaaaaatatatctctatgtacaggaatttgcaaagagatgtaaacatacattaatttccaagtacatttctccccttctccctggaggaaaaaaaaaaagccatccaatgaggcaaccccttcaaaataattttaatacaaaggatgcaaacatctataaatgaaaaatgtggttcttctgccccttctgggtgtcatgggagagaatgtcaccgaatgaaaatgacaacagcttggcttcagatggaattggactatttaaaattgagtttccaggaaaaataggcactgatttctagaaggaaattaactccttaccgaagctatttattgagccaatatggctggttaacgtcctcactagtataaagtaacccagtgcaggactctcagacattagctgaaccaagtgtacacagtcagactgcaagggcactgatgaggctactctgaaagctggttgtccccgtcctctaggtgtgaggaccactctgattttatcccaggggcccggtccattcttcccatactgcaactgtcgtgcattatacaaggtaccctgctgcttacccacttcaactactctgcaagtcgattagaaaatcttgttaaaaaaacaaagagggaaaaaaggctcacgttatctcatccaggctgcccgccccagccccccaactggaggcatgccgggtgggggaatgggcgggggcacaggaggctgtcctccaggggggacggcaggaggtgggtagctggctggcggcaggcccaaccctggaggaggatgaggggggactgcgtgggtaggcgggaggcgtgggggtgggggtgggaagttggggttgtaggtgggtgggggtggggggtagccaggagtagggggtgggatggcaggtggggggaaggaggctgggggaggaggcacaggtggcgggggcgggttgggcgggtagacatgggggtggtagggcaggtgtgcaggtgggccgtaggcggggggcagggcaccgtaggagggtccctcggtcttcatcatggactgcaggctctggtagccctctccagacatgtaggagctggtggtggacatcccggtcatgtagctggaggggggtgggggcgggggccggtgtggcagcggcggtggctggtgcacaggggccgggtgggccggagggggaatctggactttggggaggtcagtggcatccacagggcccggcggctcagcctcacctaaggcagcagcgaggggaggcttccggtctgcaggagagagacgcatcagtgcccggcctccgccagcaatggttgctttttcagtgcctcctggcccttcagggccatctttacagaggagcagggagcagctgcccgcctcctctgtggcccaacgcatgggcc

SEQ ID NO: 9242 - DNA, 323 bp, Homo sapiens
ctgcactccagcctgggcaacagagtgagagactccgtatcaaaaaaaatctccatttggaagtctaataactgacctcttgatgtccaaccctgctttgaacttgctccttttgcagctttctccatctcaattgatataactccatctttcagttgctcaagccaaaaacccagagtcctctctttctcctacataccacatctaatctgtcagcaaagcatggctgattgtaccttcaaaatatatccagaatccaatcactttttactgtttcttccactgctatcaccctgacctaagacaccatcatctggcaccta

SEQ ID NO: 9243 - DNA, 415 bp, Homo sapiens
ctgcactccagcctgggcaacagagtgagagactccgtatcaaaaaaaatctccatttggaagtctaataactgacctcttgatgtccaaccctgctttgaacttgctccttttgcagctttctccatctcaattgatataactccatctttcagttgctcaagccaaaaacccagagtcctctctttctcctacataccacatctaatctgtcagcaaagcatggctgattgtaccttcaaaatatatccagaatccaatcactttttactgtttcttccactgctatcaccctgacctaagacaccatcatctggcacctagattatcataaaccagtggttctcaactgggggtgattttatccccaaggtgacatttgacaatgtccaatgcagtcctgtacactgtcaga

SEQ ID NO: 9244 - DNA, 415 bp, Homo sapiens; identical to SEQ ID NO: 9243

SEQ ID NO: 9245 - DNA, 415 bp, Homo sapiens; identical to SEQ ID NO: 9243

SEQ ID NO: 9246 - DNA, 183 bp, Homo sapiens
attgagaccatccgggctaacgcggtgaaaccctgtctatactaaaaatacaaaaaattagccgggcgtggtggcaggcgcctgtagtcccagctactcgggaggctgaggcaggagaatcgcctgaacccgggaggcggaggttgcagtgagccgagaccgcgccactgcactccaggctgg

SEQ ID NO: 9247 - DNA, 111 bp, Homo sapiens
aatcccagcactttgggaggccgaggcgggcggatcacttgagttcaggagttcgagaccagcctggccaacatggcaaaaccctgtctctactaaaaatacaaaaattag

SEQ ID NO: 9248 - DNA, 111 bp, Homo sapiens; identical to SEQ ID NO: 9247

SEQ ID NO: 9249 - DNA, 194 bp, Homo sapiens
gcagtggctcatgcctgtaatccgagcactttgggaggccgaggtgggaggatcatgaggtcaggaaattgagaccatccgggctaacgcggtgaaaccctgtctatactaaaaatacaaaaaattagccgggcgtggtggcaggcgcctgtagtcccagctactcgggaggctgaggcaggagaatcgcctga

SEQ ID NO: 9250 - DNA, 111 bp, Homo sapiens; identical to SEQ ID NO: 9247

SEQ ID NO: 9251 - DNA, 111 bp, Homo sapiens; identical to SEQ ID NO: 9247

SEQ ID NO: 9252 - DNA, 194 bp, Homo sapiens; identical to SEQ ID NO: 9249

SEQ ID NO: 9253 - DNA, 719 bp, Homo sapiens
agtaaacaaatgcccctaatgtcccaacagaatgacttactattattaaaagccaaactaaacttctcctcctataatgaagaaagtaaaaaacttccagaacagttaataaacaaagatatgtaagtgaaaataagaccaaaaagggtaaaaagaaaaagaggaggtaagtgtaaaaaataacctacatgtgaagaaggttcattttcataagtgccttagaatatgtttaagcaggccacatggaaacaaagagataaagaagcaaaatatactaagccacaatcccctccttcctgctttccctttgacccagtgtccaggagcctactggtcagggccccctcaatgacccccctccccacctcaccaaagaatttagtttgggctagcttgccatcacctaagtgcagccactagggccataagtcaaatgctcagagtcttgagacagtcgccatgcattatgggtggctgcaacaaaatgcagcaaaaaatgcagcaaaaagaccctaaagaacatacttgaagtcttaatacaactaccaataggcgatgcccaggaagactataaccccgtagtactcagctaatgaggaattggggaagggacttgcacactagggaagaaatagtttgttgaaactgtcccaggtgtacctgcactccagacacctgatcttgcaagactgtcattaaaagtctctctttcgctgttc

SEQ ID NO: 9254 - DNA, 719 bp, Homo sapiens
agtaaacaaatgcccctactgtcccaacagaatgacttactattattaaaagccaaactaaacttctcctcctataatgaagaaagtaaaaaacttccagaacagttaataaacaaagatatgtaagtgaaaataagaccaaaaagggtaaaaagaaaaagaggaggtaagtgtaaaaaataacctacatgtgaagaaggttcattttcataagtgccttagaatatgtttaagcaggccacatggaaacaaagagataaagaagcaaaatatactaagccacaatcccctccttcctgctttccctttgacccagtgtccaggagcctactggtcagggccccctcaatgacccccctccccacctcatcaaagaatttagtttgggctagcttgccatcacctaagtgcagtcactagggccataagtcaaatgctcagagtcttgagacagtcgccatgtattatgggtggctgcaacaaaatgcagcaaaaaatgcagcaaaaagaccctaaagaacatacttgaagtcttaatacaactaccaataggcgatgcccaggaagactataaccccgtagtactcagctaatgaggaattgggggagggacttgcacactagggaagaaatagtttgttgaaactgtcccaggtgtacctgcactccagacacctgatcttgcaagactgtcattaaaagtctctctttcgctgttc

SEQ ID NO: 9255 - DNA, 719 bp, Homo sapiens
agtaaacaaatgcccctaatgtcccaacagaatgacttactattattaaaagccaaactaaacttctcctcctataatgaagaaagtaaaaaacttccagaacagttaataaacaaagatatgtaagtgaaaataagaccaaaaagggtaaaaagaaaaagaggaggtaagtgtaaaaaataacctacatgtgaagaaggttcattttcataagtgccttagaatatgtttaagcaggccacatggaaacaaagagataaagaagcaaaatatactaagccacaatcccctccttcctgctttccctttgacccagtgtccaggagcctactggtcagggccccctcaatgacccccctccccacctcatcaaagaatttagtttgggctagcttgccatcacctaagtgcagtcactagggccataagtcaaatgctcagagtcttgagacagtcgccatgtattatgggtggctgcaacaaaatgcagcaaaaaatgcagcaaaaagaccctaaagaacatacttgaagtcttaatacaactaccaataggcgatgcccaggaagactataaccccgtagtactcagctaatgaggaattgggggagggacttgcacactagggaagaaatagtttgttgaaactgtcccaggtgtacctgcactccagacacctgatcttgcaagactgtcattaaaagtctctctttcgctgttc

SEQ ID NO: 9256 - DNA, 8448 bp, Homo sapiens
tttggggcgcccccgcccgttgacagcgccccgcagcagaatgggtacgtcggcccctgcccgcccgcgcccacgccatcaggcccactgtggccccacgcccgctgcccgctgctgctcagtctgtgctgcgccccagcccggcggaaccgtgcggcagcgccccctggcggccggggtggggctgcaggcacagggcccctcccgaggctgtggcgccttgcagggcaccgccctggggaggggtctctgaatgacgccgcgccccctgctggcggctgggggttgggttgtggtgtcgggccagctgagccccagacactcagtgccgccttgtccccggctgttctgacccctccccgtctttcttcctctcctgtgtctgtccctttgtccctttatctgtctgtctgtcttatttccttcacaggtgcagacccctgacaagtcagtgagcccccctctgcctgtgcctttcttcttccttttggcactctgggtggcggcccctccccaccctggctgccctcctctccacttcgccctcctgtcctctcacctacccgcccagcagggctcctggcctcacccttacccactccctcccatcactgtaacccaaacccacatgcaccaaatcctgggaggggctgcccccaccgcccacccccagtgtggggttctgagccacaccctccccacagacagccgctccgaccgctggtcccagatgccagcaagcagcggctgatggagaacacagaggactggcggccgcggccggggacaggccagtcgcgttccttccgcatccttgcccacctcacaggcaccgagttcagtaagtgccagcccagggcagggggtactttcctcgcccccagcccaggcgtgatccctgaccctgtgtcttttttggtcaatgcctgcctctgccctctcagtgcaagacccggatgaggagcacctgaagaaatcaaggtacagggacgggcaccagcccctctcccacctcctgcctcttccattccagctactgccctgtgtctactcctgaggctcccagctggggctctcaattctcccttccttccttccttccttccttccttccttccttccttccttcccttcctccttccttccttctttcatttcttccctccctccttccttccctcctccctccctgcctcccttccatctctccttccttccacttcttcctccctctctctctgcccctcagggaaaagtatgtcctggagctgcagagcccacgctacacccgcctccgggactggcaccaccagcgctctgcccacgtgctcaacgtgcagtcgtagcccggccctctccagccggctgccctctctgcctccctctttctgttcctcctgcccagggcacccccttagtgcctccagcttctgcctacctcaccccccctttcgtgcccctggcctgagcctcctgctggcctggccctggccgcccacctgggttcatctgacactgccttccctctttgccctgtggtactgctgtctgccaggtctgtgctgccttgggcatggaataaacattctcagccctgcttgctctgcctgtcttctatctttgtggacctggtttgcatttggggtgtgggggtgtttcgtggttcggactgtttgggccctgccgtcctcgttttcagtgggagggggtacctggcaaaggggccctgccctgccatcacagatggcttcctggcatgaggggagccccaggagctgcctcagaagcgggagccctgcctcgtctcccagctagagaccgcacaccagctaactggacattgctaggagaagctgcccttcccatccctaccccagtgggacctggaatccaactcggcagtttccacgcccccagtcatctcccgtggggccagcaggacccaggttggggggtggggccatgtcaggaagctcagccatgcagggccttgaatggcagatcttgcagccaggtgcccaggacagaagccccagccccagcctcatctacaccccaggagccctggcctggtgagagggagtgggctcgggcctgggcaagggtgggcagcctccaggggcatgggggtggtgggcttctctcagctgcctggggctccacccccgtcctttggggtccctgggcacccctttagagtcactttccccggcaggccctaccgcccccagccctaccagccgcccgccctgggctgtggaccctgcgtttgccgagcgctatgccccggacaaaacgagcacagtgctgacccggcacagccagccagccacgcccacgccgctgcagagccgcacctccattgtgcaggcagctgccggaggggtgccaggagggggcagcaacaacggcaagactcccgtgtgtcaccagtgccacaaggtcatccggtgggtggcctgttcctgtccgaccctggctttcccatcctgcagcccagccccacctgtctgcccacctgtcttgcctcagctgcgactggggggaataaggattcagttctcagctggagtaggagtagggacctgggctgggtcctcccattcttaatcccacgctacctaccccagcccacccacaacaactgctagcagcatctgccgtggcgaaatagccgaagggccaaccataggctgaagctgcaccccctacctttgctgctctctgggcaaagaggggcctgccccctcccagcgcgtctgcccctccctcctgctctctgtctccctctgctctcagagcatacaggcctggagccactccctctgtgcactgccccgtggggccaagcagcatcaaacaccccccagcatcagcgtgccggattctagagccttcctaattcgcaggcctggcctgctctcatctctgtcagctcttttttttttttttttgaaacagagtctcactgtgttgcccacgttggcgtgcagtggcgcgatctcggctcactgcaacctctgcctcctgggttcaagagattctcctgcctcagcctcctgagtagctgggattacaggcacccgccaccatgcctggctaattttgtatttttagtagagacggggttttaccatgttggccaggctggtctcaaactcctcacctcaggtgatctcaggcctgccttggcctcccaaagtgctgggactacaggtgtgagccactgtgcccagccgactctatcagctcttgccaggtagaacaggcaggccagcaggacagggcagctccagggtttgcccaggggcggctcagcttttatgaggctccagtcgtcagcccttcctcccggggtcctccctgctctaaagctgcctctcctgtcaccagcagttcagtgtggcggactggctctgtaagcttcacggctgccacggtcacttcccaagcctgtcttctatcctatgtggaaaatggggagaatgaactgtccctcccaaggcctcctggtgggtggtcagtcaacctgaagggggccaagacccccacctctctgcgtgtgctccctctgaccgctctcgcctccctgcaggggccgctacctggtggcgctgggccacgcgtaccacccggaggagtttgtgtgtagccagtgtgggaaggtcctggaagagggtggcttctttgaggagaagggcgccatcttctgcccaccatgctatgacgtgcgctatgcacccagctgtgccaagtgcaagaagaagattacaggcgtgagtagggctggctggcggggaggtggtcccaagcctgtcagtgggaacgagggctgctgggaaacccacagtccaggtctctccccgagtgagccctccgggtccttaccagcgtaataaatgggctgctgtactggcctcaccctgcattagtcaggatgctcttaacaaatgaccatgttcctgctcagaaaccgcccaaggctgcaaagagcaggaggaccaagccaggagaagccctgggccctcctgactcccactttgggctctccctgccctggtgaaatgacagaacggccaacttgacacgctgaagctgctctgtctcatgcgtcctcctcatttctggatccagagccagggctgccaggagtagccagagagctctgtgtggtgatgttcatattagtgaggtttaccttgaccacgagcagtgggaaactcaaaataatggtggcttatttctcatctaaaaacatcccggggtgggtggtctgggactgatctggtggacccaggctccgccttgttgcttgactgttggcagcacctgcttacttaccactcatggtgcaagatgacacttcagcctccgccaaaatgctcaccttccagccagcaggaagtcggaaggagaagaaaggggacagagccccatggcgtccatccttagaggatgctgccacctgaacctctgctttcatcctgttggtcagaacccagtcacatgaccacacccagtggcaacggaggctgggaaatatagtctttattttgggcacccatgtgtccagcaaaactgggggttccatcagtcggcaagaacgggagagtggccgatgcagtggctgatgcttgtatcccagcactttgggaggtcgaggtgggcagatcacctgaggtcaggagttcaagaccagcctggccaatatggtgaaaccctgtctctactaaaaataaaaaaattagctgggtgtgctggcgcacctgtagtcccagctacttgggaggctgaggcaggagaatcgcttgatcttgagaggtggaggttgcagtgagccaagattgtgccactgccttccagcctgggagacagcaaaaaaaaaaaaaaaaaaaaaaaaaaaaaaaagggccaggcacggtggctcacacctgtaatcccagcactttgggaggccgagatgggcggatcacgaggtcaggagattgagaccatcctggctaacacggtgaaaccccatctctactaaaaatacaaaaaaattggccgggcatggtggagtagtcccagctactcgggaggctgaggcaggagaatggcgtgaacctgggaggcagagcttgcagtgagccgagatcgcgccactgcactccagcctgggcgacagagcgagactcttgtctcaaaaagaaaaaaagaaagagaaatctgcctcccagccttgggctcctgccccaccagcccacacccctggtagagccccctctcccaccagctcaaagcccaagttccttcactgtgaccttgtctgctcctctaaaacaggcaacaccagacagtgagaagagccagccagacatgggcagaaaacctatttctgtgatctactggctgtgtgagcagggggctagttgctctctctgggcctcactgaagagaagggtggcactatgctagggccggcacggttgcaaggtagatgtaagatggggtacaggtgttgtggagggcagaaatgcaccatccgaaggctacatgtcccccacacttatgtcttgcttggcccacactgtttcattttaaaatcagtagcaaacaatttaaaaaatcagaagatttgcctgcatgatgcagtggctcatgcctgtaatcccagcactttgggaggccaaggtgggaggattgcttgagcccaggagttcaagaccagcatgggcaccatagcaagacccctgtttctacaaaaaaaaaaaaattagaaaattagccaagtgtggtggcatgcacctgtggtcccagctacttgggaggcagagggaaagtgagatctcctgctttttatttctttatgtataatgatagggtcttgctctgttgcccaggctggagtgcagtggcatgatcactgctcactgcagccttgatctcctgggctcagaggatcctcccacctcagcctcccaaatagctaggactagaggtgcccaccagcatgctcagcagatttttaaatctttttgtagagatgaggttttgctatgttgcccaggctggtctcgaactcctggcctcgagcgatcctcccaccttggcctcccaaagcactgggattacagacgtgagccactgcgcccagcagatttctctttaacacctagatttcagcctgagccaggcaggcattcctgaatgaaccagtagtactgctcccagaagaagaggtcctcctccgtgtgacacagtccccacttggcccttgcagggattggatctgggatccctggatttaaactcagggccatcctcataacagcctcacaaggctgggattagcttcccagttcacaagggaagaaaccaagacttgagaaggtcaaggtctggccagacccacacatcttggaccctcataccgcctcgaggccccatgctgccctctgcctgctccagatgtgaatactgctggccctggctggccccggctggccccgagggtcctagggatgaacagcccagcccagggagagctcagccccttgtgcctctgccccttcccacctcctgtggaggccagtcgactcacccacaaagggccaggcactgtggggatagatcagctaacaaaacagttgatgcttcctgcccttctgggccttacattttggctggaagaagaggggagaggcagactgtaagcaataagcgcaataagtaggttgcctggaagtaatgttagatcacgttacggaaaacaggaaagagcagagcaacaagtgctggggtgcgtggtgcagggaaggcagctggctgctgctggtgtggtcagagtgggccctcatggagaagactgcattcgagcagaaacttgaagggggtgaggggtgagcctagagatatctggggcagagcagtccaggcagaggggacagccggtgtcaagcccaggacaggagtgtgcctggtgtgccagtttcaggcaagaggccagtgtgcagaggcaaggtgagaacgcaagggagagcagtggcggagacgggtgggaacgaggtcagacctgctggcctccagcctctgcatggggcttggctcttgctgggagcaatgggaagcagtacacagtttcatgcagggggagaaggcctgtcttgggttgcaggggcccgctgtggcagctgggatcagagagaggagcttgtaggccagttgttatgtggtcccacgggccagatggccatggcttacctcacttcagggaggctgtgagaagcactcagaatctggatgtgccttgggggtgggccccactggatttcctggtggacctggtgtggggtgtgagaggagggtgtgtttggctgcagcagacaggagaatggagttgccatccgcgtgatggggatggctgtgggaggagaggtttggggtgagggaatcaggaactgagtgctggacatggcaagtctgaaggcgcagtggtcgtccactcagagaccttggagttggagatggaggtgtgggagtcctgaacagttagatgtagtgtttaccgcgagaaggaacagggcttgcggccagccctcctgtgttcccgtgacccagggcagggcaggaggggcctgagcctgccgagtgactgggacctccttccaggagatcatgcacgccctgaagatgacctggcacgtgcactgctttacctgtgctgcctgcaagacgcccatccggaacagggccttctacatggaggagggcgtgccctattgcgagcgaggtacccactggccagtgagggtgaggagggatggtgcatggggcaggcatgaatccaggtcctctttctctctgcccccattctcagactatgagaagatgtttggcacgaaatgccatggctgtgacttcaagatcgacgctggggaccgcttcctggaggccctgggcttcagctggcatgacacctgcttcgtctgtgcggtgagagccccgcccctcgaactgagccccaagcccaccggccctctgttcattccccaggagatgcaggagaagttgggaaggggcctctcctgctgcccccaaccccatgtgactgggcctttgctgtccttagatatgtcagatcaacctggaaggaaagaccttctactccaagaaggacaggcctctctgcaagagccatgccttctctcatgtgtgagccccttctgcccacagctgccgcggtggcccctagcctgaggggcctggagtcgtggccctgcatttctgggtagggctggcaatggttgccttaaccctggctcctggcccgagcctggggctccctgggccctgtgcccacccaccttatcctcccaccccactccctccaccaccacagcacaccggtgctggccacaccagccccctttcacctccagtgccacaataaacctgtacccagctgtg

SEQ ID NO: 9257 - DNA, 14221 bp, Homo sapiens
agaacactggcggccgatcccaacgaggctccctggagcccgacgcagagcagcgccctggccgggccaagcaggtatcgacgaccgcgcggggcgtcttgggctggaccaggcgggcgcccggggcctgctgaggaccacaaagggcactgggggtcgtggtccaggctgtgcttcctcccgctggccctggcccctgcctccgcccccgcccccgccttcctgccgctaagccggctgcggcggggccgattggcgcctgccggcttcctgcgccggggccagtctaatgcatggggcccgggcgggggactaaggggaaactgagtcacgtcggtgtgggagcagttctgtgtgggaggcaccaccccccactgggctcggggaaggatccccctccaagctatgcttgagggtcccagcccccatctgtctccacaggggccgcaccccactcccgccttccccttcttcagcacccaggggtcccgccctggctcccagcagcctcgactggtcccggaatggctaggaggatccgctgcagccgcctccctcccctcccctcccctcccctcccctcccctcccctcccctcccctcccctccccctcgcgtcccaagcccccgtgtgctccctccgctggctctccgcacagtgtcagcttacacgccttatatagtccgagcaggctccagccgcggcctgctgccgggacctgggggcgggggagaggagagccggcccctgactcacccggccgcccgaggctccaggctggcttggggggaggccgcgccagtttagtccctcggcccacccctggttgcaaagaacctcaagcctggattcaggcacccctcaccgttccagtcccaaggggaggggggctgctcctgtctttccaaagtgaggtccgccagccagcagcccaggccagcctgacaaaatacctgcctcctatggcttgggcgtgctcaggggctgcccgtgcctgcctggcccctgtccaaggctggtatcctgagctggcccggcctgcctgcctgcccgcccaccatgctggccactcaccttctcttctctcctctcaggagccggcatcatggattccttcaaagtagtgctggaggggccagcaccttggggcttccggctgcaagggggcaaggacttcaatgtgcccctctccatttcccgggtgagcctaggtttggggagggggctcccccagcggtctttcggtgcttaggtctccagagggtgatggggggagtcctaacaggagctggtcaggggccagcaggccaggagatgtctaggtccggagatgtagtggtacctgcctgccacaaggactcccaatgaggtggatactgggagggagcacccaggcttctccagccctgcactgtacccgatgctgttctcccaagctcctgtggccacctctgagggctggagggaggctcattgtgcaggatgggagcctaacatttcaggaggtatctaaacttgaggtggcaatgcttggagccaggccccaggcaggacactgtgactataggatttcacttcagcctcactgccgcccagggaatagcaatcctcatcccgtttttccagatgagagaagaactcatggagaggtggcggggctcgctcatcgagtccatggtgaagcagggattggaattgaggcacagcatggcgtacattttttgtgggtagaaggggtctctccccagcctatgtaaggacccacatccactgttcccattcaggatgtggtggcctttgaccccaagcagaagtgtaggacagggctccattctaggggcttaacttcagcttccaagagcctgccctggtgtgggtggagctggaggctggctcctccctgtagcagggggattgccttataagcccaagaatgcagccccacgctgggatggccaacagtggctgcggtctgcagagctgaaaagggctggcctaggcctggccccctgaaccccactggtgggcctctcagctggtcaccaggctgcagctccagctgtatggtccagttgtgagacacaacaaattgcctgcccagagtgggtgaggccagcctgtcggctggcatctctgactggcctgggggtcaggagggggtggggacttcctgcccctatatccgcctgccccgagagacccacccaggcgccgggtgggcaggcagctgttgtcaggaagcccaaggcaagcccagcctggaggggcccagagggtcgtggcctgaggaggggctcaagctggagtctgtctgtaggagctgggcgtgggggttagggtgggcaggccagcagtgctcttctcaggggtcctttgatggcattctcctggaacctgccccgccagcagggtagtgaggcagtggttgccctatgacacacgtcccactacatagccctcacacagccctgaaacctacctgacgtcctgctccctgggaaagtgctggcccagtgtgtctggggagcctgaacctcagtttcttccctgatggagatgactttcagatatggcctgttgggggcactccgggctccagctccctggtcagcatccctggcatgtgggcggggccactagctgatcccagccctggagttggacctgggcccacatgggtgggtgaggtgggcttttctgagttaggccagccccctccccctcccctgaccccagaatggagggaggtgggaggggcaagggctggctgtgggcccaggcctgggagatgaggtaacgtctgggactggggggctgggctgctcaggctgactcacccccacctcatgcagggtccagccccctggctttttccctccttggttcctctggccttaccctgcccctggcttgagcccctccctgcctctctccagccacccgcccagcgctgtcttctgctctcctgctgccctccccacgctctgaacacccctcatcctctgtgcttcctgccctcctcactctgggaagggaagccgtccccgccccccaccccctctccaggagccagctagctgcaccccaagacccccacctcgggctcagcccacagctcccaggagccagccctgtgggcagggagtggctgggccaggtttcccttctactgactcaccatgaccttgagtaagtcacttcccctctggggtgtcacttccccatacacagtataaggggttgatttagttggattgaactaaaggtgagggagtggctcagggtgtctccaggtgggctgacccctcagttgggcccccatgctcagcagaggtggcccacagtggtggagccttagggtcagagacacttcctggctctgcctcttactagctgggtgacttgaggcaagttgtttaacctctctgtgtacatttgcaagtgcaaaatgggtaaaatcccagattactccacaaggttgttggaagattcagtgtcaatatgtagcatagttggtgctcaataaactgaagcaagtcttcttatttagcgagtgaggaaggggccgccgagctctcttagccttctgacctcctacgcaagcaagaggtcatgttgagcccagctcgcctttcttttcccagtgctgtcaagctctgtgcctggctgccctgccctctgacatctctctgaaacctcttgcctcccctctccctgcctcagctcagtctgtgcactgacccacctgaggagcctcctggggccactggcagcctggacccccccagatcccccccacccagtgaaattgtcttccagcactgcctcacaaaagcctacttgatgcagtgccaggcctcttgccagatggctgggtggtcccttaggcttggacccagtcaagctgccctgcctgtgttgctggggctgggctagaggcctggaaggggtttatcagggtcaccctctcagggcctgggagatacccaatcccagacattaaaactgccagtagcccctctaccttcaaagccaagtcctggtcccttcccctggcattcaaagccatcgtaagtgaactctcacccgctaggcagcacacgccattctcctttaccgaggcccaccgcttcctcaaagtcattcctgatggtctcagctcatgctggtggcagccatttctcccagcctactgtctctactcattgccacaggaaccagggactcccagctcaagagcctgaaggattggggtcaggggaaattggcagtcgagggcttgggagtgacagccatgtatggcctacgaagtcccagctgtcaacttaggtcccattcaggcagtgttcacagggaaccgggagataacagggcctgttcctggctctcaaagggtcccagcagacccctatagatggcccccgacagggtgctggggggtgagaggtccataagagcccccggtggtttcggggaggaagctgccccctgcatgggccagagggcatatctggtaggtggagtggcctgggcaggaggccagcaggagcctcaaaaggcaatggtcctcctgaaacacttgggctttagcctgagcgtggctgtttgtggacatcatagcaatttctggactgtgggggagggtggtggcggtgaatagataagcatcgtgactggggaagctcaggtgagcaccacctgagggagagggtctggcagtgaataaataagcagtgtgactgggaaattgtgaagctcaggtgagcgccaccacctcctgggttgctttagtgtccagcagctgcctagaactatgttgaatgaagagctctctgggttctggaagtgggacagctttgggtggggcagtgttaccaccgtcagcctggcttgggtctgcagggtccagggcctcggtcactttgcttctctctccacagctcactcctgggggcaaagcggcgcaggccggagtggccgtgggtgactgggtgctgagcatcgatggcgagaatgcgggtagcctcacacacatcgaagctcagaacaagatccgggcctgcggggagcgcctcagcctgggcctcagcaggtatgcgggtggacatggatgggtgcgcccgcgctggcagtggggatccctgcggcccggcccgctgtcacgctttccttctcctccagggcccagccggttcagagcaaaccgcagaaggtacgaggctggccgggacatccgggcggtgggcggtgtgggcttggacggccaggcctgctcgccctcctggcacattctcggtaccccaatccctggccgggagtggagggcagaaaccggagctaaggcgggtctagggccctggagttgagccaggggctgctgcacggtcctggcaccacgcatgtccgcctgtctgtccgcctgtctgtccgcctgctgcctcccgccgccggcgctgcgtgctcgcccgcactcggtcagccctcggtcctgcgtggactgagatcgccactcccaaatgggccccttgaaacctgagtcgtcctctccccgtagcctccaaatagatgtagggggtggggtgggggtggggggctggagctgccgctgtcctctgctgcaggcgccccacttccacccaggcccccaccttaccctgcccgcccgccctgcccggctgtgtctctgcccaggcctccgcccccgccgcggaccctccgcggtacacctttgcacccagcgtctccctcaacaagacggcccggcctttgggcgcccccgcccgctgacagcgccccgcagcagaatgggtacgtcggcccctgcccgcccgcgcccacgccatcaggcccactgtggccccacgcccgctgcccgctgctgctcagtctgtgctgcgccccagcccggcggaaccgtgcggcacgccccctggcggccggggtggggctgcaggcacagggcccctcccgaggctgtggcgccttgcagggcaccgcctggggaggggtctctgaatgacgccgcgccccctgctggcggctgggggttgggttgtggtgtcgggccagctgagccccagacactcagtgccgccttgtccccggctgttctgacccctccccgtctttcttcctctcctgtgtctgtccctttgtccctttatctgtctgtctgtcttatttccttcacaggtgcagacccctgacaagtcagtgagcccccctctgcctgtgcctttcttcttccttttggcactctgggtggcggcccctccccaccctggctgccctcctctccacttcgccctcctgtcctctcacctacccgcccagcagggctcctggcctcacccttacccactccctcccatcactgtaacccaaacccacatgcaccaaatcctgggaggggctgcccccaccgcccacccccagtgtggggttctgagccacaccctccccacagacagccgctccgaccgctggtcccagatgccagcaagcagcggctgatggagaacacagaggactggcggccgcggccggggacaggccagtcgcgttccttccgcatccttgcccacctcacaggcaccgagttcagtaagtgccagcccagggcagggggtactttcctcgcccccagcccaggcgtgatccctgaccctgtgtcttttttggtcaatgcctgcctctgctctctcagtgcaagacccggatgaggagcacctgaagaaatcaaggtacagggacgggcaccagcccctctcccacctcctgcctcttccattccagctactgccctgtgtctactcctgaggctcccagctggggctctcaattctcccttccttccttccttccttccttccttccttccttccttccttccttccttccttccttcccttcctccttccttccttctttcatttcttccctccctccttccttccctcctccctccctgcctcccttccatctctccttccttccacttcttcctccctctctctctgcccctcagggaaaagtatgtcctggagctgcagagcccacgctacacccgcctccgggactggcaccaccagcgctctgcccacgtgctcaacgtgcagtcgtagcccggccctctccagccggctgccctctctgcctccctctttctgttcctcctgcccagggcacccccttagtgcctccagcttctgcctacctcaccccccctttcgtgcccctggcctgagcctcctgctggcctggccctggccgcccacctgggttcatctgacactgccttccctctttgccctgtggtactgctgtctgccaggtctgtgctgccttgggcatggaataaacattctcagccctgcttgctctgcctgtcttctatctttgtggacctggtttgcatttggggtgtgggggtgtttcgtggttcggactgtttgggccctgccgtccttgttttcagtgggagggggtacctggcaaaggggccctgccctgccatcacagatggcttcctggcatgaggggagccccaggagctgcctcagaagcgggagccctgcctcgtctcccagctagagaccgcacaccagctaactggacattgctaggagaagctgcccttcccatccctaccccagtgggacctggaatccaactcggcagtttccacgcccccagtcatctcccgtggggccagcaggacccaggttggggggtggggccatgtcaggaagctcagccatgcagggccttgaatggcagatcttgcagccaggtgcccaggacagaagccccagccccagcctcatctacaccccaggagccctggcctggtgagagggagtgggctcgggcctgggcaagggtgggcagcctccaggggcatgggggtggtgggcttctctcagctgcctggggctccacccccgtcctttggggtccctgggcacccctttagagtcactttccccggcaggccctaccgcccccagccctaccagccgcccgccctgggctgtggaccctgcgtttgccgagcgctatgccccggacaaaacgagcacagtgctgacccggcacagccagccggccacgcccacgccgctgcagagccgcacctccattgtgcaggcagctgccggaggggtgccaggagggggcagcaacaacggcaagactcccgtgtgtcaccagtgccacaaggtcatccggtgggtggcctgttcctgtccgaccctggctttcccatcctgcagcccagccccacctgtctgcccacctgtcttgcctcagctgcgactggggggaataaggattcagttctcagctggagtaggagtagggacctgggctgggtcctcccattcttaatcccacgctacctaccccagcccacccacaacaactgctagcagcatctgccgtggcgaaatagccgaagggccaaccataggctgaagctgcacccctacctttgctgctctctgggcaaagaggggcctgccccctcccagcgcgtctgcccctccctcctgctctctgtctccctctgctctcagagcatacaggcctggagccactccctctgtgcactgccccgtggggccaagcagcatcaaacaccccccagcatcagcgtgccggattctagagccttcctaattcgcaggcctggcctgctctcatctctgtcagctcttttttttttttttttgaaacagagtctcactgtgttgcccacgttggcgtgcagtggcgcgatctcggctcactgcaacctctgcctcctgggttcaagagattctcctgcctcagcctcctgagtagctgggattacaggcacccgccaccatgcctggctaattttgtatttttagtagagacggggttttaccatgttggccaggctggtctcaaactcctcacctcaggtgatctcaggcctgccttggcctcccaaagtgctgggactacaggtgtgagccactgtgcccagccgactctatcagctcttgccaggtagaacaggcaggccagcaggacagggcagctccagggtttgcccaggggcggctcagcttttatgaggctccagtcgtcagcccttcctcccggggtcctccctgctctaaagctgcctctcctgtcaccagcagttcagtgtggcggactggctctgtaagcttcatggctgccacggtcacttcccaagcctgtcttctatcctatgtggaaaatggggagaatgaactgtccctcccaaggcctcctggtgggtggtcagtcaacctgaagggggccaagacccccacctctctgcgtgtgctccctctgaccgctctcgcctccctgcaggggccgctacctggtggcgctgggccacgcgtaccacccggaggagtttgtgtgtagccagtgtgggaaggtcctggaagagggtggcttctttgaggagaagggcgccatcttctgcccaccatgctatgacgtgcgctatgcacccagctgtgccaagtgcaagaagaagattacaggcgtgagtagggctggctggcggggaggtggtcccaagcctgtcagtgggaacgagggctgctgggaaacccacagtccaggtctctccccgagtgagccctccgggtccttaccagcgtaataaatgggctgctgtactggcctcaccctgcattagtcaggatgctcttaacaaatgaccatgttcctgctcagaaaccgcccaaggctgcaaagagcaggaggaccaagccaggagaagccctgggccctcctgactcccactttgggctctccctgccctggtgaaatgacagaacggccaacttgacacgctgaagctgctctgtctcatgcgtcctcctcatttctggatccagagccagggctgccaggagtagccagagagctctgtgtggtgatgttcatattagtgaggtttaccttgaccacgagcagtgggaaactcaaaataatggtggcttatttctcatctaaaaacatcccggggtgggtggtctgggactgatctggtggacccaggctccgccttgttgcttgactgttggcagcacctgcttacttaccactcatggtgcaagatgacacttcagcctccgccaaaatgctcaccttccagccagcaggaagtcggaaggagaagaaaggggacagagccccatggcgtccatccttagaggatgctgccacctgaacctctgctttcatcctgttggtcagaacccagtcacatgaccacacccagtggcaacggaggctgggaaatatagtctttattttgggcacccatgtgtccagcaaaactgggggttccatcagtcggcaagaacgggagagtggccgatgcagtggctgatgcttgtatcccagcactttgggaggtcgaggtgggcagatcacctgaggtcaggagttcaagaccagcctggccaatatggtgaaaccctgtctctactaaaaataaaaaaattagctgggtgtgctggcgcacctgtagtcccagctacttgggaggctgaggcaggagaatcgcttgatcttgagaggtggaggttgcagtgagccaagattgtgccactgccttccagcctgggagacagcaaaaaaaaaaaaaaaaaaaaaaaaaaaaagggccaggcacggtggctcacacctgtaatcccagcactttgggaggccgagatgggcggatcacgaggtcaggagattgagaccatcctggctaacacggtgaaaccccatctctactaaaaatacaaaaaaattggccgggcatggtggagtagtcccagctactcgggaggctgaggcaggagaatggcgtgaacctgggaggcagagcttgcagtgagccgagatcgcgccactgcactccagcctgggcaacagagcgagactcttgtctcaaaaagaaaaaaagaaagagaaatctgcctcccagccttgggctcctgccctaccagcccacacccctggtagagcctcctctcccaccagctcaaagcccaagttccttcactgtgaccttgtctgctcctctaaaacaggcaacaccagacagtgagaagagccagccagacatgggcagaaaacctatttctgtgatctactggctgtgtgagcaggggctagttgctctctctgggcctcactgaagagaagggtggcactatgctagggccggcacggttgcaaggtagatgtaagatggggtacaggtgttgtggagggcagaaatgcaccatccgaaggctacatgtcccccacacttatgtcttgcttggcccacactgtttcattttaaaatcagtagcaaacaatttaaaaaatcagaagatttgcctgcatgatgcagtggctcatgcctgtaatcccagcactttgggaggccaaggtgggaggattgcttgagcccaggagttcaagaccagcatgggcaccatagcaagacccctgtttctacaaaaaaaaaaaaattagaaaattagccaagtgtggtggcatgcacctgtggtcccagctacttgggaggcagagggaaagtgagatctcctgctttttatttctttatgtataatgatagggtcttgctctgttgcccaggctggagtgcagtggcatgatcactgctcactgcagccttgatctcctgggctcagaggatcctcccacctcagcctcccaaatagctaggactagaggtgcccaccagcatgctcagcagatttttaaatctttttgtagagatgaggttttgctatgttgcccaggctggtctcgaactcctggcctcgagcgatcctcccaccttggcctcccaaagcactgggattacagacgtgagccactgcgcccagcagatttctctttaacacctagatttcagcctgagccaggcaggcattcctgaatgaaccagtagtactgctcccagaagaagaggtcctcctccgtgtgacacagtccccacttggcccttgcagggattggatctgggatccctggatttaaactcagggccatcctcataacagcctcacaaggctgggattagcttcccagttcacaagggaagaaaccaagacttgagaaggtcaaggtctggccagacccacacatcttggaccctcataccgcctcgaggccccatgctgccctctgcctgctccagatgtgaatactgctggccctggctggccccggctggccccgagggtcctagggatgaacagcccagcccagggagagctcagccccttgtgcctctgccccttcccacctcctgcggaggccagtcgactcacccacaaagggccaggcactgtggggatagatcagctaacaaaacagttgatgcttcctgcccttctgggccttacattttggctggaagaagaggggagaggcagactgtaagcaataagcgcaataagtaggttgcctggaagtaatgttagatcacgttacggaaaacaggaaagagcagagcgacaagtgctggggtgcgtggtgcagggaaggcagctggctgctgctggtgtggtcagagtgggccctcatggagaagactgcattcgagcagaaacttgaagggggtgaggggtgagcctagagatatctggggcagagcagtccaggcagaggggacagccggtgtcaagcccaggacaggagtgtgcctggtgtgccagtttcaggcaagaggccagtgtgcagaggcaaggtgagaacgcaagggagagcagtggcggagacgggtgggaacgaggtcagacctgctggcctccagcctctgcatggggcttggctcttgctgggagcaatgggaagcagtacacagtttcatgcagggggagaaggcctgtcttgggttgcaggggcacgctgtggcagctgggatcagagagaggagcttgtaggccagttgttatgtggtcccacgggccagatggccatggcttacctcacttcagggaggctgtgagaagcactcagaatctggatgtgccttgggggtgggccccactggatttcctggtggacctggtgtggggtgtgagaggagggtgtgtttggctgcagcagacaggagaatggagttgccatccgcgtgatggggatggctgtgggaggagaggtttggggtgagggaatcaggaactgagtgctggacatggcaagtctgaaggcgcagtggtcgtccactcagagaccttggagttggagatggaggtgtgggagtcctgaacagttagatgtagtgtttaccgcgagaaggaacagggcttgcggccagccctcctgtgttcccgtgacccagggcagggcaggaggggcctgagcctgccgagtgactgggacctccttccaggagatcatgcacgccctgaagatgacctggcacgtgcactgctttacctgtgctgcctgcaagacgcccatccggaacagggccttctacatggaggagggcgtgccctattgcgagcgaggtacccactggccagtgagggtgaggagggatggtgcatggggcaggcatgaatccaggtcctctttctctctgcccccattctcagactatgagaagatgtttggcacgaaatgccatggctgtgacttcaagatcgacgctggggaccgcttcctggaggccctgggcttcagctggcatgacacctgcttcgtctgtgcggtgagagccccgcccctcgaactgagccccaagcccaccggccctctgttcattccccaggagatgcaggagaagttgggaaggggcctctcctgctgcccccaaccccatgtgactgggcctttgctgtccttagatatgtcagatcaacctggaaggaaagaccttctactccaagaaggacaggcctctctgcaagagccatgccttctctcatgtgtgagccccttctgcccacagctgccgcggtggcccctagcctgaggggcctggagtcgtggccctgcatttctgggtagggctggcaatggttgccttaaccctggctcctggcccgagcctggggctccctgggccctgccccacccaccttatcctcccaccccactccctccaccaccacagcacaccgatgctggccacaccagccccctttcacctccagtgccacaataaacctgtacccagctgtg

SEQ ID NO: 9258 - DNA, 9566 bp, Homo sapiens
tggcggtgaatagataagcatcgtgactggggaagctcaggtgagcaccacctgagggagagggtctggcagtgaataaataagcagtgtgactgggaaattgtgaagctcaggtgagcgccaccacctcctgggttgctttagtgtccagcagctgcctagaactatgttgaatgaagagctctctgggttctggaagtgggacagctttgggtggggcagtgttaccaccgtcagcctggcttgggtctgcagggtccagggcctcggtcactttgcttctctctccacagctcactcctgggggcaaagcggcgcaggccggagtggccgtgggtgactgggtgctgagcatcgatggcgagaatgcgggtagcctcacacacatcgaagctcagaacaagatccgggcctgcggggagcgcctcagcctgggcctcagcaggtatgcgggtggacatggatgggtgcgcccgcgctggcagtggggatccctgcgggcccggcccgctgtcacgctttccttctcctccagggcccagccggttcagagcaaaccgcagaaggtacgaggctggccgggacatccgggcggtgggcggtgtgggcttggacggccaggcctgctcgccctcctggcacattctcggtaccccaatccctggccgggagtggagggcagaaaccggagctaaggcgggtctagggccctggagttgagccaggggctgctgcacggtcctggcaccacgcatgtccgcctgtctgtccgcctgtctgtccgcctgctgcctcccgccgccggcgctgcgtgctcgcccgcactcggtcagccctcggtcctgcgtggactgagatcgccactcccaaatgggccccttgaaacctgagtcgtcctctccccgtagcctccaaatagatgtagggggtggggtgggggtggggggctggagctgccgctgtcctctgctgcaggcgccccacttccacccaggcccccaccttaccctgcccgcccgccctgcccggctgtgtctctgcccaggcctccgcccccgccgcggaccctccgcggtacacctttgcacccagcgtctccctcaacaagacggcccggccctttggggcgcccccgcccgctgacagcgccccgcagcagaatgggtacgtcggcccctgcccgcccgcgcccacgccatcaggcccactgtggccccacgcccgctgcccgctgctgctcagtctgtgctgcgccccagcccggcggaaccgtgcggcagcgccccctggcggccggggtggggctgcaggcacagggcccctcccgaggctgtggcgccttgcagggcaccgccctggggaggggtctctgaatgacgccgcgccccctgctggcggctgggggttgggttgtggtgtcgggccagctgagccccagacactcagtgccgccttgtccccggctgttctgacccctccccgtctttcttcctctcctgtgtctgtccctttgtccctttatctgtctgtctgtcttatttccttcacaggtgcagacccctgacaagtcagtgagcccccctctgcctgtgcctttcttcttccttttggcactctgggtggcggcccctccccaccctggctgccctcctctccacttcgccctcctgtcctctcacctacccgcccagcagggctcctggcctcacccttacccactccctcccatcactgtaacccaaacccacatgcaccaaatcctgggaggggctgcccccaccgcccacccccagtgtggggttctgagccacaccctccccacagacagccgctccgaccgctggtcccagatgccagcaagcagcggctgatggagaacacagaggactggcggccgcggccggggacaggccagtcgcgttccttccgcatccttgcccacctcacaggcaccgagttcagtaagtgccagcccagggcagggggtactttcctcgcccccagcccaggcgtgatccctgaccctgtgtcttttttggtcaatgcctgcctctgccctctcagtgcaagacccggatgaggagcacctgaagaaatcaaggtacagggacgggcaccagcccctctcccacctcctgcctcttccattccagctactgccctgtgtctactcctgaggctcccagctggggctctcaattctcccttccttccttccttccttccttccttccttccttccttccttcccttcctccttccttccttctttcatttcttccctccctccttccttccctcctccctccctgcctcccttccatctctccttccttccacttcttcctccctctctctctgcccctcagggaaaagtatgtcctggagctgcagagcccacgctacacccgcctccgggactggcaccaccagcgctctgcccacgtgctcaacgtgcagtcgtagcccggccctctccagccggctgccctctctgcctccctctttctgttcctcctgcccagggcacccccttagtgcctccagcttctgcctacctcaccccccctttcgtgcccctggcctgagcctcctgctggcctggccctggccgcccacctgggttcatctgacactgccttccctctttgccctgtggtactgctgtctgccaggtctgtgctgccttgggcatggaataaacattctcagccctgcttgctctgcctgtcttctatctttgtggacctggtttgcatttggggtgtgggggtgtttcgtggttcggactgtttgggccctgccgtcctcgttttcagtgggagggggtacctggcaaaggggccctgccctgccatcacagatggcttcctggcatgaggggagccccaggagctgcctcagaagcgggagccctgcctcgtctcccagctagagaccgcacaccagctaactggacattgctaggagaagctgcccttcccatccctaccccagtgggacctggaatccaactcggcagtttccacgcccccagtcatctcccgtggggccagcaggacccaggttggggggtggggccatgtcaggaagctcagccatgcagggccttgaatggcagatcttgcagccaggtgcccaggacagaagccccagccccagcctcatctacaccccaggagccctggcctggtgagagggagtgggctcgggcctgggcaagggtgggcagcctccaggggcatgggggtggtgggcttctctcagctgcctggggctccacccccgtcctttggggtccctgggcacccctttagagtcactttccccggcaggccctaccgcccccagccctaccagccgcccgccctgggctgtggaccctgcgtttgccgagcgctatgccccggacaaaacgagcacagtgctgacccggcacagccagccagccacgcccacgccgctgcagagccgcacctccattgtgcaggcagctgccggaggggtgccaggagggggcagcaacaacggcaagactcccgtgtgtcaccagtgccacaaggtcatccggtgggtggcctgttcctgtccgaccctggctttcccatcctgcagcccagccccacctgtctgcccacctgtcttgcctcagctgcgactggggggaataaggattcagttctcagctggagtaggagtagggacctgggctgggtcctcccattcttaatcccacgctacctaccccagcccacccacaacaactgctagcagcatctgccgtggcgaaatagccgaagggccaaccataggctgaagctgcacccctacctttgctgctctctgggcaaagaggggcctgccccctcccagcgcgtctgcccctccctcctgctctctgtctccctctgctctcagagcatacaggcctggagccactccctctgtgcactgccccgtggggccaagcagcatcaaacaccccccagcatcagcgtgccggattctagagccttcctaattcgcaggcctggcctgctctcatctctgtcagctcttttttttttttttttgaaacagagtctcactgtgttgcccacgttggcgtgcagtggcgcgatctcggctcactgcaacctctgcctcctgggttcaagagattctcctgcctcagcctcctgagtagctgggattacaggcacccgccaccatgcctggctaattttgtatttttagtagagacggggttttaccatgttggccaggctggtctcaaactcctcacctcaggtgatctcaggcctgccttggcctcccaaagtgctgggactacaggtgtgagccactgtgcccagccgactctatcagctcttgccaggtagaacaggcaggccagcaggacagggcagctccagggtttgcccaggggcggctcagcttttatgaggctccagtcgtcagcccttcctcccggggtcctccctgctctaaagctgcctctcctgtcaccagcagttcagtgtggcggactggctctgtaagcttcacggctgccacggtcacttcccaagcctgtcttctatcctatgtggaaaatggggagaatgaactgtccctcccaaggcctcctggtgggtggtcagtcaacctgaagggggccaagacccccacctctctgcgtgtgctccctctgaccgctctcgcctccctgcaggggccgctacctggtggcgctgggccacgcgtaccacccggaggagtttgtgtgtagccagtgtgggaaggtcctggaagagggtggcttctttgaggagaagggcgccatcttctgcccaccatgctatgacgtgcgctatgcacccagctgtgccaagtgcaagaagaagattacaggcgtgagtagggctggctggcggggaggtggtcccaagcctgtcagtgggaacgagggctgctgggaaacccacagtccaggtctctccccgagtgagccctccgggtccttaccagcgtaataaatgggctgctgtactggcctcaccctgcattagtcaggatgctcttaacaaatgaccatgttcctgctcagaaaccgcccaaggctgcaaagagcaggaggaccaagccaggagaagccctgggccctcctgactcccactttgggctctccctgccctggtgaaatgacagaacggccaacttgacacgctgaagctgctctgtctcatgcgtcctcctcatttctggatccagagccagggctgccaggagtagccagagagctctgtgtggtgatgttcatattagtgaggtttaccttgaccacgagcagtgggaaactcaaaataatggtggcttatttctcatctaaaaacatcccggggtgggtggtctgggactgatctggtggacccaggctccgccttgttgcttgactgttggcagcacctgcttacttaccactcatggtgcaagatgacacttcagcctccgccaaaatgctcaccttccagccagcaggaagtcggaaggagaagaaaggggacagagccccatggcgtccatccttagaggatgctgccacctgaacctctgctttcatcctgttggtcagaacccagtcacatgaccacacccagtggcaacggaggctgggaaatatagtctttattttgggcacccatgtgtccagcaaaactgggggttccatcagtcggcaagaacgggagagtggccgatgcagtggctgatgcttgtatcccagcactttgggaggtcgaggtgggcagatcacctgaggtcaggagttcaagaccagcctggccaatatggtgaaaccctgtctctactaaaaataaaaaaattagctgggtgtgctggcgcacctgtagtcccagctacttgggaggctgaggcaggagaatcgcttgatcttgagaggtggaggttgcagtgagccaagattgtgccactgccttccagcctgggagacagcaaaaaaaaaaaaaaaaaaaaaaaaaaaaaaagggccaggcacggtggctcacacctgtaatcccagcactttgggaggccgagatgggcggatcacgaggtcaggagattgagaccatcctggctaacacggtgaaaccccatctctactaaaaatacaaaaaaattggccgggcatggtggagtagtcccagctactcgggaggctgaggcaggagaatggcgtgaacctgggaggcagagcttgcagtgagccgagatcgcgccactgcactccagcctgggcgacagagcgagactcttgtctcaaaaagaaaaaaagaaagagaaatctgcctcccagccttgggctcctgccccaccagcccacacccctggtagagccccctctcccaccagctcaaagcccaagttccttcactgtgaccttgtctgctcctctaaaacaggcaacaccagacagtgagaagagccagccagacatgggcagaaaacctatttctgtgatctactggctgtgtgagcaggggctagttgctctctctgggcctcactgaagagaagggtggcactatgctagggccggcacggttgcaaggtagatgtaagatggggtacaggtgttgtggagggcagaaatgcaccatccgaaggctacatgtcccccacacttatgtcttgcttggcccacactgtttcattttaaaatcagtagcaaacaatttaaaaaatcagaagatttgcctgcatgatgcagtggctcatgcctgtaatcccagcactttgggaggccaaggtgggaggattgcttgagcccaggagttcaagaccagcatgggcaccatagcaagacccctgtttctacaaaaaaaaaaaaattagaaaattagccaagtgtggtggcatgcacctgtggtcccagctacttgggaggcagagggaaagtgagatctcctgctttttatttctttatgtataatgatagggtcttgctctgttgcccaggctggagtgcagtggcatgatcactgctcactgcagccttgatctcctgggctcagaggatcctcccacctcagcctcccaaatagctaggactagaggtgcccaccagcatgctcagcagatttttaaatctttttgtagagatgaggttttgctatgttgcccaggctggtctcgaactcctggcctcgagcgatcctcccaccttggcctcccaaagcactgggattacagacgtgagccactgcgcccagcagatttctctttaacacctagatttcagcctgagccaggcaggcattcctgaatgaaccagtagtactgctcccagaagaagaggtcctcctccgtgtgacacagtccccacttggcccttgcagggattggatctgggatccctggatttaaactcagggccatcctcataacagcctcacaaggctgggattagcttcccagttcacaagggaagaaaccaagacttgagaaggtcaaggtctggccagacccacacatcttggaccctcataccgcctcgaggccccatgctgccctctgcctgctccagatgtgaatactgctggccctggctggccccggctggccccgagggtcctagggatgaacagcccagcccagggagagctcagccccttgtgcctctgccccttcccacctcctgtggaggccagtcgactcacccacaaagggccaggcactgtggggatagatcagctaacaaaacagttgatgcttcctgcccttctgggccttacattttggctggaagaagaggggagaggcagactgtaagcaataagcgcaataagtaggttgcctggaagtaatgttagatcacgttacggaaaacaggaaagagcagagcaacaagtgctggggtgcgtggtgcagggaaggcagctggctgctgctggtgtggtcagagtgggccctcatggagaagactgcattcgagcagaaacttgaagggggtgaggggtgagcctagagatatctggggcagagcagtccaggcagaggggacagccggtgtcaagcccaggacaggagtgtgcctggtgtgccagtttcaggcaagaggccagtgtgcagaggcaaggtgagaacgcaagggagagcagtggcggagacgggtgggaacgaggtcagacctgctggcctccagcctctgcatggggcttggctcttgctgggagcaatgggaagcagtacacagtttcatgcagggggagaaggcctgtcttgggttgcaggggcacgctgtggcagctgggatcagagagaggagcttgtaggccagttgttatgtggtcccacgggccagatggccatggcttacctcacttcagggaggctgtgagaagcactcagaatctggatgtgccttgggggtgggccccactggatttcctggtggacctggtgtggggtgtgagaggagggtgtgtttggctgcagcagacaggagaatggagttgccatccgcgtgatggggatggctgtgggaggagaggtttggggtgagggaatcaggaactgagtgctggacatggcaagtctgaaggcgcagtggtcgtccactcagagaccttggagttggagatggaggtgtgggagtcctgaacagttagatgtagtgtttaccgcgagaaggaacagggcttgcggccagccctcctgtgttcccgtgacccagggcagggcaggaggggcctgagcctgccgagtgactgggacctccttccaggagatcatgcacgccctgaagatgacctggcacgtgcactgctttacctgtgctgcctgcaagacgcccatccggaacagggccttctacatggaggagggcgtgccctattgcgagcgaggtacccactggccagtgagggtgaggagggatggtgcatggggcaggcatgaatccaggtcctctttctctctgcccccattctcagactatgagaagatgtttggcacgaaatgccatggctgtgacttcaagatcgacgctggggaccgcttcctggaggccctgggcttcagctggcatgacacctgcttcgtctgtgcggtgagagccccgcccctcgaactgagccccaagcccaccggccctctgttcattccccaggagatgcaggagaagttgggaaggggcctctcctgctgcccccaaccccatgtgactgggcctttgctgtccttagatatgtcagatcaacctggaaggaaagaccttctactccaagaaggacaggcctctctgcaagagccatgccttctctcatgtgtgagccccttctgcccacagctgccgcggtggcccctagcctgaggggcctggagtcgtggccctgcatttctgggtagggctgggcaatggttgccttaaccctggctcctggcccgagcctggggctccctggggccctgccccacccaccttatcctcccaccccactccctccaccaccacagcacaccggtgctggccacaccagccccctttcacctccagtgccacaataaacctgtacccagctgtg

SEQ ID NO: 9259 - DNA, 393 bp, Homo sapiens
gaccccatgtgccaggcccggtgcccacagacatgaggggagccactggtctggcctggcttggaggttagagaagggtagttaggaagggtagttagcatggtggctcatgcctgtgatcccagcactttggaaggccaaggtgggcagatcgcttgaggtcaggagttcgagacctcatggccaacacggtgaaacagcgtctctagtaaaaatacaaaaattagccgagtgtggtggggcatgcctgtaatcccagccactcaggaggctgaggcgggaaaatcacttgaacctgggaagtggaggttgcagtgagctgagatcacaccactgcacgcgagcctgggtggcagatggcagagcgagaccctgcttcaaaaaaaaaaaaaa

SEQ ID NO: 9260 - DNA, 393 bp, Homo sapiens
gaccccatgtgccaggcccggtgcccacagacatgaggggagccactggtctggcctggcttggaggttagagaagggtagttaggaagggtagttagcatggtggctcatgcctgtgatcccagcactttggaaggccaaggtgggcagatcgcttgaggtcaggagttcgagacctcatggccaacacggtgaaacagcgtctctagtaaaaatacaaaaattagccgagtgtggtggggcatgcctgtaatcccagccactcaggaggctgaggcgggaaaatcacttgaacctgggaagtggaggttgcagtgagctgagatcacaccactgcgcgcgagcctgggtggcagatggcagagcgagaccctgcttcaaaaaaaaaaaaaa

SEQ ID NO: 9261 - DNA, 930 bp, Homo sapiens
  SITE (929): n equals a,t,g, or c
ggggcgcaggccctacaggacgcgggctatgccaccgatcctcactatgcccgcaaactcaccaacatgattcagcagatgaaatcgataagcgacaaggtgagcaaaacctacagtatgaacattgataatctgttctgaataactcaagtccggcgggtcgctgccgataatactctgtaattgaaggcttataaggaacctccatgtccagcttgattaataacgccatgagcggactgaacgcggcccaggcggcgttaaatacggcaagtaataatatctccagctataacgttgccggatatacccgccaaaccactattatggcgcaggccaatagcacgttgggcgctggcggctgggttggcaatggtgtctacgtttctggtgtgcagcgtgagtatgatgcgtttattaccaaccagttacgtgcggcgcagacgcaaagtagcggtctgactgcccgctatgagcagatgtcgaaaatcgacaatatgctctccaccagtacctcttcgctggcaacacagatgcaggatttcttcaccagcctgcaaacgctggtgagtaacgcggaagacccggcagcgcgccaggcgctgattgggaaatcagaaggattggtgaatcagtttaaaaccaccgatcaatatctgcgcgaccaggacaaacaggtcaatatcgcgataggtgccagcgttgatcagatcaacaactacgctaaacaaattgccagcctgaacgatcaaatctcgcgcctgacaggcgtgggggcaggggcgtcacctaacaatctgctggatcaacgcgatcaactggtgagcgaattaaaccagattgttggtgtagaagtcagcgttcaggatggcggcacttataacatcacgatggccaatggttactcactggttcagggaagtacggcng

SEQ ID NO: 9262 - DNA, 331 bp, Homo sapiens
gctaaacctaggtccaggacttgggcaaagctactttctaagattaatggtcacatcctgtaagtagcaaattaaaaaggtcaagtataacaaagcttaaaactaagtctcaactggatcaaagtcattcactgaagtgctttataactaaaaaataaaaacagcactttcgtgggaacatcatatagagaatgtacagtatgctatctatattctgaaaaccgactgaaaattataaaacatgtcaaaaataacaacagcaaatgaccaacacagagggaaaaggggggaaatttagaaataaattaaaaaaaaaaaaaaaaaacccagg

SEQ ID NO: 9263 - DNA, 101 bp, Homo sapiens
tgtccccaaatctgcatcctaatttccctcaaattgtgggtaaatttctgacttgtgcatgtacaaggcaagccttcaagatatgtagtgggaaacagcaa

SEQ ID NO: 9264 - DNA, 278 bp, Homo sapiens
caaccccgccccaggcggggaggaacctgagtgggcggggctcggggtgactcgggtaaccgggttctgtggcttccgtagtggcaggtttgacagcgctggtgcccggagcgggcgctgaagaaacttctttcctcatcccctttcccctctgttctaatcagcggtcttgcgccatagggtacgtgctgtggctccaacacttattccccagagtgctgctggggagtgactcaccgccgctgcaggttttctgactttggcacccactagcgtgg

SEQ ID NO: 9265 - DNA, 278 bp, Homo sapiens; identical to SEQ ID NO: 9264

SEQ ID NO: 9266 - DNA, 269 bp, Homo sapiens
cacgcctaggcgccctccggctccgccctagccgccgcgtcccagctagagctccagcgcccgctcaggccccactcgaccctctcgggcctcggctacttggactgcggcggaatatggcggctccgatgactcccgcggctcggcccgaggactacgaggcggcgctcaatgccgccctggctgacgtgcccgaactggccagactcctggagatcgacccgtacttgaagccctacgccgtggacttccagcgcaggtaccgccgg

SEQ ID NO: 9267 - DNA, 267 bp, Homo sapiens
cacgcctaggcgccctccgtccgccctagccgccgcgtcccagctagagctccagcgcccgctcaggccccactcggacctctcgggcctcggctacttggactgcggcggaatatggcggctccgatgactcccgcggctcggcccgaggactacgaggcggcgctcaatgccgccctggctgacgtgcccgaactggccagactcctggagatcgacccgtacttgaagccctacgccgtggacttccagcgcaggtaccgccgg

SEQ ID NO: 9268 - DNA, 557 bp, Homo sapiens
attcaaatcagcaagtgtttattgaggaactcctataaataaaacactgctctagggattgtaagggatgtgaagtttcattcttgagcttgtatatagtagtgaatgaggcctctgtaaaataatcaccttgagctgtccctcacttaatcagatgattatgctcttatataaaccatatgaggagcagccttgtgaaattgttttcagaatttacagtatatgctttcagagaaacttagtgcataatcgtcataggtttaaggttggatttgatttagaaatagtcagaaaaaatttagaacaaaagatagtgattaaaggtagtggttagattttttttttgatgtccttgtaaccatgacattaatttacctgtgtgctttgtaaaaggacacttaagatatttattaaagaagagttgtggaaatgttttatctacacccccttccttttttttttaaatgacacaaacagattaacattctttattaagtgtttctttcatgtactttatttccaactccactgggattgaagcatttataatcttcttt

SEQ ID NO: 9269 - DNA, 1999 bp, Homo sapiens
agcagaaaagtgatattgttctcaacatgacagatatttgagttcctacaatgggaaaggcacattaatgatgtttttctttattgcctataattatggttcgatatactcaggaaatctcttgagagagatatctaacccttctcaaagatggcttgaaatgttcagcacttgggagaggttgtcatagttaaaattaattaggaacaagttcatccaatagcaagtctctcaggaataatctaagagtgcattcctttgttttcactctatttgcagacagaatgctagtaacagactaacgtgtaatagaaaaagattgagtatcattagcaacgaatcatagttcagaatctctgcaatctctaatagtgtgattttaaaggcctaatctaagatattttacttgttctttagggaattacaaaaagcactttatatacttgtttgtgagtttggggcttaataaaattgggagcagaaaagataactattgggtactgggcttaatacctatgacacaagtccactgatgtaataaaccttcacatgtacccttgaacctaaaataaaagtttttaaaaaaaaaatcagtactctggaaaccaaaaccaagtaaatggcctgagagagatctggttagttggagaactggtagaaataataaacgaaaagttactccaggcagagttcattaggcaaattcatatgctggagtttcatttttaaagcagttgaatcaacaaggtatgccttcattaattatatttattaggtgtttttaataatctgaggaatcttgtaaattgaatgctgtattacagtaaagtgaactttttttatttagacaaatgatctaacccagttaagcatgcgtagaagaaagcctggaagaaaaaaaacactaaaattttatagtagcatggttgtagtttttatctaccttgttttcaacagtgagaatgtattccttctgtaatcaactgatttagcttttctctatggcatttttgagaatttattcatttaaattgaatacacaataactacgtgtaaagtaaagctttgtgttctaagattgtgtctacacttagttttcatcctaaacatttagagaaattgattagaggaatgataataattatattaattgatttggacaattcagttagaggactaatttataattttttgtgctgctttataacttaacaaagcgtaacctatgaactaagctattattatcatcatttcaaattggaggatactgaggctcagaatttgggacttaggttttatagttagtaaattaaaaaaccaatataaattcatggttaaaaaaattcatacaatgctagtgaagtcttctttctgctttaggccctcatttgctttcccagaggcagccattcttgccagtttcttgtgtgaatttccagtaatagtctgtgtatatgcgaataaatatatatgtatactgtatatgtatattcttttgtgtaagctgtttattgtttcacagtttgttgttatattatttttagcttaactgatttaggagattgctctataacatcacatatagatctcccttattgttttcaaaacctcagggtatttctatatgtgaacttactgttatttattttactggccacctaatgctggacatttattttgttttcaatcttttgttacaactatgctgcagtggatactcttttacatgtttttgtgcacatgtgtgagcatatggattaatttctagtaggtgtaatttttgggccagaggatacttttaatctgcatagatactgctaatttggggtaggcatagtggctcaggcctataattccagtgctttgggaggctgaggcggaaggattgattgaagccaagagttcaaggcctgggtaacatagtgaaatccatctgggacaaaaaaaaaattttttttaattagctgggcatggtggtgtgtgcccgtagtcctagcag

SEQ ID NO: 9270 - DNA, 1999 bp, Homo sapiens; identical to SEQ ID NO: 9269

SEQ ID NO: 9271 - DNA, 511 bp, Homo sapiens
tagagatgatagaatgctagagtaccaaaatgttagttccagttctgctttggccacagctaactgtatgggtttgggttaaatatccaggcctcagttttcttaactttaaaagagactcaacaaacatttgctgagcattcagtatgtgctaggaattactctaggtactgaggatatatatactcatgaacaaaaatagttaacaattctttgaccttggagacaaaacctggaacttatttctgctagaggagtttgaattagctgatctaaggacctttccaacttttaagatcctgttttatagacagtgttctatgatttatagacctagtggactttctctgggttctttagtgctttacagccttaaatgttttctaattcagttgtctttactaggtgttctgtttacttcttgtcaatgagaagtaaaacctgagggagaaagatcttgatttttgcttctgttggtagattagaaaaaaagcatgtaatacttaaaaaa

SEQ ID NO: 9272 - DNA, 511 bp, Homo sapiens; identical to SEQ ID NO: 9271

SEQ ID NO: 9273 - DNA, 210 bp, Homo sapiens
ttagatcatggtttctcagccttggcactttgagattttgggctggagaatttcttgttgtgggaggctgttctgtgcattgtagggtgttttgcagcatccttatccattagacgtaacaccttcaccagttgcagcaatcagaaatatctccagacactgacaaatatttcctagaggattaaattgcctctggtttagaatcactgg

SEQ ID NO: 9274 - DNA, 210 bp, Homo sapiens; identical to SEQ ID NO: 9273

SEQ ID NO: 9275 - DNA, 845 bp, Homo sapiens; identical to SEQ ID NO: 5916

SEQ ID NO: 9276 - DNA, 776 bp, Homo sapiens; identical to SEQ ID NO: 5917
  SITE (709): n equals a,t,g, or c
  SITE (738): n equals a,t,g, or c

SEQ ID NO: 9277 - DNA, 2429 bp, Homo sapiens
ctcaatgcatattttatttttttacacaaaaatatgagatcctgtttaagtgccttaaaatgtatttgacaagagcgttatttccaaaatatgctttgttgattactgccaggggtggtacaatatttgggggttaattttgctttcctaatgcaggaatcagtcatggtaagtgacaaaaagcaaacatgctttccctgcagcacctttgtgcaatacaaccctatagtagttactgtaatgtttgaaatgaggtcacaccatcaggaaaatgcccttctgatgacagtgaaaatttccaaagtcttattcatgcatactttgatttactgtgtgattctttttttctacgactgtgacatgcctcttccttatcaactcagcaggggtcatagatcgaatagatgctgaaaagcgtaagatatatgcattccttgacatcatttttaaagacattccttcaaatagtttccacacagaaattcctcactcccattatgagagattgtggttatatgtcttaaatttattataagctgcttcaaagaaagggtctgaatgtttgaattatgagtgaaatcatgtgaaattttgagttaaactctgtgatttgattttcagggtctttaaaatatatcttaatatcttcttcctctttattcaataatttctgtcttgcacttacacactcataacagccaaatatgaggcacacaaaatgttacaatcagtttgaaagcagcatcaattaatggtagattctattcacattccacaacccagaccaaatttttttcctattacgcagatgtgctgagcactttccagattgcccctgttggccaaaagcagcctgttacatcctggaattaagcacacttaaggtatttgagacaatttattaatgaaaatttccttggcagatttgacaaatgttggcaatatttttttagaagttaaatcatattgctttcatgaataaatgaaaatataaaggtcatggatgcaaacaaatgttacatatacacattctgtctctccagatgaaaagaacatgcaaaaccatttaataaccaaaatatcaagtaaaattagttcccaacggggcagcagctttcaaatgagtgtccaatatttgcttctgctatagctgcaagaactgtaactggacccaagtagagaatgaagccacgtatagaactacgagaacacttttctgtgtttcccccatgccgtcctgtcacatcctcttacacgtcctctcttgatttgatagacaatattggcatcctgggtctcactgaggccgtgctatgtcctcagcagctgtttttgttgtttcgttattatgcccacaacaaaaaatcattccttagaaactcaccaagtttatctactgtgtaaatttatattattgttactaccaggtctcatcttttgtcaatgtcattgaataaatttcataagagttattctcagtgtgaattttaaggctaatgccagatcctgcaaaaatctatgctaaccaggctgtagtacacactgttataaagaattttacttgtgtctaaaactacagtaattttgcttaggtaattgtgcttacctatggagcacaggaaggctcttaggttttgttcctacaagtttctttgaattttggagtaaatggaagtgtctgtctgtctgtcatctatctgccctatcataaaaatctttctccctaacattaaaatactgatccccgcccccaacttatctacctctattgtctaacacctatagtaggtgtgatcatgggataaaattcaactgaaaatgctatgataacattttatcgtttgctttaaaaatgtgctttgttttcaaataatctttacatagtgaactttggtggcgttagtgatatgtttatgcctatttcttttttttacacaaattccttggcatattttttcataaagaacaaaaaataaaatcaaaatttatttttaattcatgcttattgggatttaattattcagagcttaaaatattttgttatgtttatacactgtaaagctatctgttttatgcatttgttttgtctaaatgtatttatgaaagaaatacattagattatatttatgtttactcatttttccacctggattttttttaatggttgttacaaaattagattttttaatgggtaataatgttggtattttcatgttttttcttagtattaaaatttttgtgggttttttaaaatttttccctattctgttaaaaattaacacacctctagctaatgttcagtgtttgtgctaaataccaaattttttcaaaaggattggttaagtcataaagtggattatttatgatgactggaagatgaaaataattatatgattaaacaaagaatgtttcagaaatcacaagagaaa

SEQ ID NO: 9278 - DNA, 2428 bp, Homo sapiens
ctcaatgcatattttatttttttacacaaaaatatgagatcctgtttaagtgccttaaaatgtatttgacaagagcgttatttccaaaatatgctttgttgattactgccaggggtggtacaatatttgggggttaattttgctttcctaatgcaggaatcagtcatggtaagtgacaaaaagcaaacatgctttccctgcagcacctttgtgcaatacaaccctatagtagttactgtaatgtttgaaatgaggtcacaccatcaggaaaatgcccttctgatgacagtgaaaatttccaaagtcttattcatgcatactttgatttactgtgtgattctttttttctacgactgtgacatgcctcttccttatcaactcagcaggggtcatagatcgaatagatgctgaaaagcgtaagatatatgcattccttgacatcatttttaaagacattccttcaaatagtttccacacagaaattcctcactcccattatgagagattgtggttatatgtcttaaatttattataagctgcttcaaagaaagggtctgaatgtttgaattatgagtgaaatcatgtgaaattttgagttaaactctgtgatttgattttcagggtctttaaaatatatcttaatatcttcttcctctttattcaataatttctgtcttgcacttacacactcataacagccaaatatgaggcacaaaaatgttacaatcagtttgaaagcagcatcaattaatggtagattctattcacattccacaacccagaccaaatttttttcctattacgcagatgtgctgagcactttccagattgcccctgttggccaaaagcagcctgttacatcctggaattaagcacacttaaggtatttgagacaatttattaatgaaaatttccttggcagatttgacaaatgttggcaatatttttttagaagttaaatcatattgctttcatgaataaatgaaaatataaaggtcatggatgcaaacaaatgttacatatacacattctgtctctccagatgaaaagaacatgcaaaaccatttaataaccaaaatatcaagtaaaattagttcccaacggggcagcagctttcaaatgagtgtccaatatttgcttctgctatagctgcaagaactgtaactggacccaagtagagaatgaagccacgtatagaactacgagaacacttttctgtgtttcccccatgccgtcctgtcacatcctcttacacgtcctctcttgatttgatagacaatattggcatcctgggtctcactgaggccgtgctatgtcctcagcagctgtttttgttgtttcgttattatgcccacaacaaaaaatcattccttagaaactcaccaagtttatctactgtgtaaatttatattattgttactaccaggtctcatcttttgtcaatgtcattgaataaatttcataagagttattctcagtgtgaattttaaggctaatgccagatcctgcaaaaatctatgctaaccaggctgtagtacacactgttataaagaattttacttgtgtctaaaactacagtaattttgcttaggtaattgtgcttacctatggagcacaggaaggctcttaggttttgttcctacaagtttctttgaattttggagtaaatggaagtgtctgtctgtctgtcatctatctgccctatcataaaaatctttctccctaacattaaaatactgatccccgcccccaacttatctacctctattgtctaacacctatagtaggtgtgatcatgggataaaattcaactgaaaatgctatgataacattttatcgtttgctttaaaaatgtgctttgttttcaaataatctttacatagtgaactttggtggcgttagtgatatgtttatgcctatttcttttttttacacaaattccttggcatattttttcataaagaacaaaaaataaaatcaaaatttatttttaattcatgcttattgggatttaattattcagagcttaaaatattttgttatgtttatacactgtaaagctatctgttttatgcatttgttttgtctaaatgtatttatgaaagaaatacattagattatatttatgtttactcatttttccacctggattttttttaatggttgttacaaaattagattttttaatgggtaataatgttggtattttcatgttttttcttagtattaaaatttttgtgggttttttaaaatttttccctattctgttaaaaattaacacacctctagctaatgttcagtgtttgtgctaaataccaaattttttcaaaaggattggttaagtcataaagtggattatttatgatgactggaagatgaaaataattatatgattaaacaaagaatgtttcagaaatcacaagagaaa

SEQ ID NO: 9279 - DNA, 900 bp, Homo sapiens
ctcctgtttgccttggtagcttcccagcttcctctcacatgactgtttctgtttacttctccctctggccttcctgcctgcggcgtccctgtgccacctagagtctcatctaccgcactagacatagcctctgcaatggccccgcaccagggcctccttccagggcatatcccgtctctgtctcacccttctagtctgcgcttgcccttctcactccccagctctctctgttactgtcagtggagggtctgtgcactttgtcgttttgatcctatgacgttgtatctgtggctcttccttcaagtgcccaggagaggcccagctcctggggccagaaaggggttagtcttgaagtcttgggttggacatttcaccatggccagcccagagctcggctggaaacagatgagagacaacatgtgaggaggcagacaggagctggggatccaggctctgagcacctgagaggtttgggggaaggtattggtaatggattggattgtgtcccccaacaaaagattttcaagtcctaacccctgtacaggtgaatgtgaccttatttggaaatagcgtctttacagaggtaatcaagttaaaatgaggtcatttgggcaggtgcagtggttcatgcctgtaatcccagcactttaggaggctgaggtgggtagatcacttgagtccaggagttcaagaccagcctgggaaacatggtaagaccctgtctctacaaaaaatacaaaaaaattagccattagctgggcatggtggcatgtgcctgtagtcccagttactcaggaggccgaagtgggaggactgcttgagcccaggaggtggaggttgcagtgagtggagactgcaccactgcattccagcctaggcaacagagcgagaccctgtctc

SEQ ID NO: 9280 - DNA, 876 bp, Homo sapiens
ctcctgtttgccttggtagcttcccagcttcctctcacatgactgtttctgtttacttctccctctggccttcctgcctgcggcgtccctgtgccacctagagtctcatctaccgcactagacatagcctctgcaatggccccgcaccagggcctccttccagggcatatcccgtctctgtctcacccttctagtctgcgcttgcccttctcactccccagctctctctgttactgtcagtggagggtctgtgcactttgtcgttttgatcctatgacgttgtatctgtggctcttccttcaagtgcccaggagaggcccagctcctggggccagaaaggggttagtcttgaagtcttgggttggacatttcaccatggccagcccagagctcggctggaaacagatgagagacaacatgtgaggaggcagacaggagctggggatccagggctctgagcacctgagaggtttgggggaaggtattggtaatggattggattgtgtcccccaacaaaagattttcaagtcctaacccctgaacaggtgaatgtgaccttatttggaaatagcgtctttacagaggtaatcaagttaaaatgaggtcatttgggcaggtgcagtggttcatgcctgtaatcccagcactttaggaggctgaggtgggtagatcacttgagtccaggagttcaagaccagcctgggaaacatggtaagaccctgtctctacaaaaaatacaaaaaaattagccattagctgggtgtggtggcatgtgcctgtggtcccagctactcaagaggctgaggcaggaggattgcttgagcccaggagactgaggttgcagtgagctgtgattgcaccactgcactccagcct

SEQ ID NO: 9281 - DNA, 1977 bp, Homo sapiens
catactgtccccaaggtccatccattctcttccttttgaaggctgagttgtgccccactgtgtgcctagaccgcatctggttgacccatccatccgtcgatggacacattatgaatggtgctcctgtgaacactgtgtaccaataagtgctttttgagcatgatcacgtgcctggcattgtgctgggctgcagtgggaaatgaacttggttcccatgctctgggggtaatgttaagaagcaaacaccaatagatgtttactaagagactgcaatatgtcccgtgatgggaaagagcagtgttcggggagagaattatggcaggggtggaggtgggtggctgggacaatggtcaggtctcaggaagtggcctgaagaatggggaggagaggtgggcaggggtggggagggtccaggcagaagtaacaacatgtgtgaagccactggattgcgacagagttgcccgttggagggattgatgcttagatttctgcttcagtgtcttctccagcaagcatcctatcagcctccaggcccacctctccccatcatcttctcctctctgctcttattctagttcattcaaactgcctctttgctcagctatttctcccactgtccagtgagcggcttgagtgcaggaactgttttattttatgtttgcgccttcttttcatatcttagtaggtgtcagtgactctcaaacagatactctcctgaaggagggtagtgctttcactggcaatgacccaagaccatcatctggggcctgccagagtcaggcacagccccggcattagaactttgggctgtaagcctgtcctctgtgcttatgtgggtggtgcacaaagcacttgcaaacatctgtgtgcagtgctgctccattcggcctgctgaagctttcctgccctgttgccgctgaagcagggagtgtgggaagcgcccagctcagagctgggccagatgtggccatacctcccagcagtgcaagcagcatcactgcgccaggccagctgactcggctggccctggtgcacagtgcttaggggcttgtggccacgagccatgccccaccacctctcctgtttgccttggtagcttcccagcttcctctcacatgactgtttctgtttacttctccctctggccttcctgcctgcggcgtccctgtgccacctagagtctcatctaccgcactagacatagcctctgcaatggccccgcaccagggcctccttccagggcatatcccgtctctgtctcacccttctagtctgcgcttgcccttctcactccccagctctctctgttactgtcagtggagggtctgtgcactttgtcgttttgatcctatgacgttgtatctgtggctcttccatcaagtgcccaggagaggcccagctcctggggccagaaaggggttagtcttgaagtcttgggttggacatttcaccatggccagcccagagctcggctggaaacagatgagagacaacatgtgaggaggcagacaggagctggggatccaggctctgagcacctgagaggtttgggggaaggtattggtaatggattggattgtgtcccccaacaaaagattttcaagtcctaacccctgtacaggtgaatgtgaccttatttggaaatagcgtctttacagaggtaatcaagttaaaatgaggtcatttgggcaggtgcagtggttcatgcctgtaatcccagcactttaggaggctgaggtgggtagatcacttgagtccaggagttcaagaccagcctgggaaacatggtaagaccctgtctctacaaaaaatacaaaaaaattagccattagctgggcatggtggcatgtgcctgtagtcccagttactcaggaggccgaagtgggaggactgcttgagcccaggaggtggaggttgcagtgagtggagactgcaccactgcattccagcctaggcaacagagcgagaccctgtctc

SEQ ID NO: 9282 - DNA, 5402 bp, Homo sapiens
  SITE (4456): n equals a,t,g, or c
gggcgcggtggctcacacctttaatcccagcactttgggaggccgaggcgggcggatcatgaggtcaggagatggagaccatcctggctaacatggtgaaaccccgtctctactaaaaatacaaaaaattagctgggcatcgtggcgggcacctgtagtcccagctacttgggaggctgaggcaggagaattgcttgaacctgggaagtggagcttgcagtgagccgagatcgcaccactgcattccagctgggtggcagagcaagactccgtctcaaaaaaaaaaaaaaaaaagagaattgggccaaatttttaccccttctataccggggactatgctcctaatcatatggtctaagaacaaaatcttttattattaatttaaggcttaggtattatcaggtataggtggcttccctacatgctggcattaaccaggcctcactcttcctaaggctttgtaggggatatcttgggcaggtcttctggttatcaccaggtagttttcctcttgatgaatccaattcatggtttaagccaccatcctgatccaggtactcagcataggtgctgtctcctcaaacttgtgtcacctgcagattcagtaagcatgggttccaacctttaatcaatttaaagactaatgggtataccaaggccaaggccaaagacagagttgttaaaaatatgcagctagggccaggtgccatggctcatgcctgtaatcccagctctttgggaggttgaggcgggtggatcacctgacgtcaggagttcaagaccagcctggccaacataggacgactccatttctacaaagaaaaatacaagtgcatatctatggtcccagctattcagaagggtgaggtggaaggattacttgagcctgggaggttgagactgcagtgagctgagattgcaccactgcactccagcctgggtgacaaagcaagcctgtctcaaaaaaaaaaaaaaaaaaaaaaaaaaaaagcaatgaggctaatattgattggattgtagtcatttaacccatcacaaacccacccaattctaacttccacctccatcttataactgcctttgtcaaatcccttgtcaaaaaccagtagtcgatacacactacattttctccaacactctttgaccctgtcaaggaagaaaacaaagcggagcttagcaaagcagcccacgctgattgctggtattcaccacttccatggagcctaaggtgttctcaaagagaatttgtggttacaacatgcacatgaagattaattcacttgccagtagaagcaaagaattctggggaccagaattcaagaagggagtttggcctactcgaagttagaagaattctccagtatctatgattaatggtcatcagatgttatagtttattcttaatacttagtttgctaacctggtttcctagtataccttctcatgactcattattttaggtctttttaaggacatcgtaatcctttcaatgcaaacatcaatgcaatttgatggcattctttattttgcggacattcgctgttcttcaggtggttgaagcttaaatgaggcgcacagagatgagctacagagccccaggctgtaatttgcgctaaccagtggatgacctgccaaggcatgagttaggcatttgggattacatcttcaacttcttggagcagtgagacacggtggacagaatatcagcttacccctcagctctgcttttttggggaattcttggacaggagataaaatgagaggacattattgctggaagcatctatagagagcctctaggacagtagttaccaaactgaagtgtgcatttgaaccatctgggaagcttgttaaaaatgcaggttctcagccaggcgcagtggctcatgcctgtaatcccaacactttgggaaccgaggtgtgcagattgcttgagctcgtgagttcatgaccagcgtgggcaacatggcaaaaccccatctctacaagaaatacaaaaattagctggccatggtggtgtgtggctgtagtcccagctacttgggaggctgaggtcccagctacttgggaggctgaggtcccagctacttggctggcgtgtgcctgtagtcccagctacttgggagcatggcttgagcctgggaggcagagattgcagtgagccaacatcgtactactgcactccagcctgggcaatagagccagaccttacctaaaaaaaaaaaaaaagtaggttctcagaccaccactctcccaagatgggcaactggaattgtgaacacttctgggcctcactggttcctcctccagtgtcaaatgaagggttagactcgagttattctagaacaggaatttgcgtgttgacagtctccccagctggttacaagcccttggccttttgccccacacttggagaaacactgagtctactctcagtttacactggggaggacagggaggctcagaaatgctcggtaatctgcccgaggtacccagtgagtgaccacagttctgagcttctgtttccttctgggtaaaaggggcctgatgatgttttccccccccgccatccaagattttgataaggcttaaacgtacgtgtgtgaaaactgtcaagtgctctgtggatacaagtcgagtgactcttaatggccaataggccaggtcctgggagcctaggaccatggaaaaggggagaggacaccacaacctcccaccagcccagtcgttccagaaacccatcaaggtgggccagtgtgaggtgaccccagtcttatttgtgtatatgtcagcccctaccccagtgggtctttcccccatagctgtcaatgggaaggtggtgatgttagaggccctcctctatagttgacttgggggtgtctgagcctctgcagctcacttttctctgccccctttttagtgtgctggctgggacaatagagtgggtttctctttgagaaactagcaggtggatttggggcaggcacatctacctccttcactttattctcagggcttttgcaattactgtaccccttgcttgtaaacctccttcccgcaggtccccatgtggccccctttctacctccttcaggccttggctcaaatgtccactttgcagtgaggtcttctagacttccagtccactgttcccactttatttgatttatttatttttttgtggagatagggtctcactctgttgcttaggatggagtgcagtggcatgaacatagctcactacagcctcaacctcctgggctcaagtgattctctcaccttggcctcctgagtagctggcaccacagcacacacccccaggcctagctagttttttaaacttatttttttagagacttggtcttgctatgttgcccaggcttgtcttgaacttcaggccttcagcaatcctctcacctcagcctcctgagcagctggaattacaggtgtgagtcaccgtgctcagctctgctttctttttatccgtagcattcaccaccgcctgactgagtggtattttatttaccttttttgttcgtttattgtctccctccccagcccaccacgtaagcttcaagagggagggatccagtgaaatttctcagcacctactctaagccagtcacagctttagggcactggggagctggagatgagctgggcttggagccccaccctctagcagctggccatgcagcagaggcatgcccagtggggctctgtgacagtgcaggtgggggaagctggcacctgtgtagaggtggctaaggcccactgagttccaggcaggtaggtgtgtttctgtcctggcctattctctgtccctcagtactgctctgaggtgcactgctctgggccagagccctgaactaggaagcaggctggggttaggcctggcccatggctgactttccgtgggaccttggacaaatcacttcctggtgcaagcttcatttttctcatctgtacaaagaagaaaatcttatcaccccctgcagtttgggttattttaatgggaaagcctctcaggggcctgcaagcccctcctccttcaaagtggggccagatgaaaggaagactcgttccgaggctcctctctgacagatccgataaagctccctagcttcggctgcgtggcccctgggacggctcccatttttattggtcttggcgcaaaagcacagtggagctttgatgactaaagaagccctttgctttgtctccccgtggcccttaccttgacaaaagcagcttttactgctgccattctcccctggtttgctttgtgtccctaacccccgacctgaaaagcctggagccctcaaagggccttgcctccgcctgtcagcgctggggttctagatggaggaaagcaaagacgcagatgcagaggcctctctgttccctgcgccggggtccctgcgggtgacgtgatctctcttcggctttcgtgtcncagaggtcagttgcagaggcagagatcccattactcgggcttgcaatctataacttccttgtgccttgtgtcttacagaaatttaaagagtatgtgaatggcagtaacctcatcaccaagctgcaggccaagcacgatttactcaagcagaccctgggcgaaggtgagtgggctggtggaggccctctgggaggtgctgcgttccccactggctctcactgtggccccctgacgtgttgagctgttcaggcttgagacagcaggcacctggcagaatgaacctggacttaccaggactgggcaggctgggaaaatcaccttggtacagatgccttgtggggtccaatctggctatagaaaatagagggtgtgagttgctttttgattaatagaaagaaaaaaaataaaataaagaaaatagaggctgggcacggtggctcacgcctgtaatcccagcactttgggatgctgaggtgggcggatcacgaggtcaggagatcgagaccatcctggctaatacggtgaaaccccgtctctactgaaaaaatacaaaaaattagccgggcgtggtggcgggcgcctgtagtcccagctactcgggaggctgaggcaggagaatggcgtgaacccaggaggcagagcttgcagtgagccgagatcatgccactgcactccagcctgggcgacagagcgagactccatctccaaaaaaaaaaaagaaaagaaaagaaaatagaggccaaccacaagtcttagtttaggttggcagggacagtccaaggcaaagtgatagaggggcatccatcaggtagggagtgggaatccagggcctcagaggctggcactgacatttttcagcagacactatttgcaaggaatactactggagtgtctggctagggttctaggtccagagaaggaaaatccatacatgtaagtcagggtt

SEQ ID NO: 9283 - DNA, 688 bp, Homo sapiens
catactgtccccaaggtccatccattctcttccttttgaaggctgagttgtgcccccctgtgtgcttagaccgcatctggttgacccatccatccgtcgatggacacattatgaatggtgctcctgtgaacactgtgtaccaataagtgctttttgagcatgatcacgtgcctggcattgttctgggctgcagtgggaaatgaacttggttcccatgctctgggggtaatgttaagaagcaaacaccaatagatgtttactaagagactgcaatatgtcccgtgatgggaaagagcagtgttcggggagagaattatggcaggggtggaggtgggtgcctggaccaatggtcaggtctcagaaagtgtcctaaagaatggggagcataggtggccaggggtggaaagggtccaggcaaaagtacaaacatgtgtgaagccactggattgcgacagagttgcccgttggagggattgatgcttagatttctgcttcagtgtcttctccagcaagcatcctatcagcctccaggcccacctctccccatcatcttctcctctctgctcttattctagttcattcaaactgcctctttgctcagctatttctcccactgtccagtgagcggcttgagtgcaggaactgttttattttatgtttgcgccttcttttcatatcttagtaggtg

SEQ ID NO: 9284 - DNA, 694 bp, Homo sapiens
cccatggtgctgggattaaaggcgtgaaccactgcgcccggcctatttttagcctttctaaataattgttttaggtgtttctcttgaatagagcatatagttggttctttatgaacccaaatgaagatcttttccatttaataagtgaagtaagccctttcacatgtgttaagatgaatatgtttgctgtcaaccctgccagattattttatgctgtaattattatatttattacatttagtctgtttttcgttataatgtgtttactgtgctcttctttaaaaacaaaatcttaaatttggtatttaggaaggtttatgtttctgttgtccttttgcttatactttttttaatgcccttagcgccccccccattttttatttagaatctgtattgtccatctttaatgacattctttaactttcacatgttgcttaaataccagttattgagttttcctactttccttttttcatctaccttctcttcctatttttagttgcatcattttttattcatcagaacatacagcacaaaacaaatagcattatcatataacctattattattataccctgttctcaccttaattttgatcttagatttgcaattaagtatatttaatgctaaattgctgaagtttctctagtcatttttttgtttgaataaagtttattttctagcagatttctta

SEQ ID NO: 9285 - DNA, 694 bp, Homo sapiens; identical to SEQ ID NO: 9284

SEQ ID NO: 9286 - DNA, 190 bp, Homo sapiens
atttctgccatataatcagatgcatgagtttctctttttatttccttttgttccatttttacaaatgtattgagaaaaatagttcaaaaatctttccttacaacggtttgcttgctttgcttgctacttcatccaatatcagtattgtgcttctgctttttttttttgaggtaaagtctcactggagtgc

SEQ ID NO: 9287 - DNA, 190 bp, Homo sapiens; identical to SEQ ID NO: 9286

SEQ ID NO: 9288 - DNA, 337 bp, Homo sapiens
ggtgaacagtgagggagatgaccgctcacctctgctgcttcccatcaggacaaacccccagagttccccagtatggtcaggctgaagctaaaagccgctgtccaccggattttgcctgagaaaggactcatctttggcttgtctctttccctttcctgcctcctttactcccttcccagtttccctgaggaccacattcttaataaatcacttgcagagaaatcctcacttcatcaagatctgcttctggggaccccgacctaaaacagtaagtcacctaggacccccatcattgtttttgagtcttctggaaaacagcatcccttctcaacacaca

SEQ ID NO: 9289 - DNA, 337 bp, Homo sapiens; identical to SEQ ID NO: 9288

SEQ ID NO: 9290 - DNA, 337 bp, Homo sapiens
ggtgaacagtaagggagatgaccgctcacctctgctgcttcccatcaggacaaacccccagagttccccagtatggtcaggctgaagctaaaagccgctgtccaccggattttgcctgagaaaggactcatctttggcttgtctctttccctttcctgcctcctttactcccttcccagtttccctgaggaccacattcttaataaatcacttgcagagaaatcctcacttcatcaagatctgcttctggggaccccgacctaaaacagtaagtcacctaggacccccatcattgtttttgagtcttctggaaaacagcatcccttctcaacacaca

SEQ ID NO: 9291 - DNA, 238 bp, Homo sapiens
tttttttttgagatggagtcttgcactttcacccaggctggagtgcagtggcgtgatctcggctcactgcaccctccgcctcctgagttcaagcaattctcctgcctcagcctcccgagtagctgggattacaggcgcctgccaccacacccggctaatttttgtatttttagtagagacggggtttcaccatgttggccaggctggtctcgaactcctgacctcaggtgatctgccc

SEQ ID NO: 9292 - DNA, 101 bp, Homo sapiens
gggattacaggagtgtgccatcacacctggctaatttttgtatttttagtagagacggtgtttcaccatgttggccaggctggtctcgaactcctgacctc

SEQ ID NO: 9293 - DNA, 130 bp, Homo sapiens
ctgcctcagcctcccaagtagctgggattacaggcgcctgccaccacaccgggctaatttttgtatttttagtagagacagggtttcaccatgttggccaggctggtcttgaactcctgacctcgtgatc

SEQ ID NO: 9294 - DNA, 24173 bp, Homo sapiens
caggcttgcccacagaccggatcttgctgcggtcgaggcggacccgggcatctgggcgcccatcggagcctgtggtgggagtgatggtaacgagtccctcgccagcctccagcaagactctcaggatcacaaaccgggcctgcatatgggcctgccggagcaggggaaagacagcatttgtagcccgtatcaagtgcttggtcctaggcttggtccttggcttggtccttggtcccaggcttggtccttggtcccagttgcccattaactggcaactgttattgtcattctccccaaccctgcgggtccttttctgcttattctcctcccctcaaatgcttcctccttcctcttctcacagagagggcaggctgccctaggagacagggaggccatttccaggcgggacctggtgcccatgctccccatgtcacccactgtgatccctgctgctccagatcccctgctgaggacagcagctaccccctccagggtccccaaacactttctcctccacaaccttgtttgtgctcaaaaggggaaccaagtaggcatcattatccccagtttacagatgataaaacagaggcccagagaggtaaagggacttccttaggggcacacagctaataacggaagagccaggactcagacccacatttctggaccctgaatgacgtcacatcgcctcctcaaaccacacctatttgattttgtcaaaaagtttctattgctggtgggatgcggtggctcacacctgtaatcccagcactttgggaggccgaggcgggcggatcacaaggtcaggagatcgagaccatcctggctaacacggtgaaaccccatctctactaaaaatacaaaaaattagctgggcgtggtggtgcatgcctgtaatcctagccactcgggaggctgaggcgagagaatggcgtgaacccaggagatggagtttgcagtgagccaagatggtgccactgcactccagcctgggtgacagagtgagactctgtctcaaaagaaaaaaaaaatacaaaaaattagccgggtgtggtggtgcgcctatagtcccagctactcgggaggctgaggcagaattgcttgaacccgggaggcggaggttgcagtgagccgagatccggccactgcactccagcctggtgacagagcgagactttgtctcaaaaaaacaaaaacgaacaaacaaaaaagtttctattgcttaccccatatccaaaggacacataactgagccgtggcactgaatggccctgtaggcactgtatggatgcgaatcctggctctgcacttagtggcaagttgcttcatctccttgtgcctcgacttcctcatctctaaaatgagggtaacaatagcacctacctcctggggtagttaattcatggagggcgtttagaattgtgtgtggcagagagtgcgtcaactgcgaggagtcctaataaagtcacctcatctgattcaccgtgaaatggtggccggggagagtcctactcccatttcacagagaggaactctggggctcacaagagtgatgtgacttgcctcccaaacagtggagtctagcattaaacccagttcatctgccttaaaggtacagtggtcccatccttgcaccctgatcttggcacccactgcaggctcccttccgcctccagggggctccacctaggccctacctgtcgccagttgaaggcctcaggtgtgtagaactccagagcgagcagcccggcccgaaccatgttgagccagttcacgtagatcacgtcctccgcatcagccccctcaaagccaaagatcctgtgagaggggcaggcaggtggcaggatggtcagaggctgccctgtccccatcccactggccactaccacccaccctccacgcccccagggctggccactgcagcgggacagcccgcccctcggccctgctgctcttactccagcacttgcgggtggagacagaggtagagacccacgctctcagcccggcactcttcgtagctggaggcgatggtgctgaacttgctatcccaggtctccccgctccgataccagctctgaatctggaaaaggagctccactgtcgggcttagggtgccactgccccacctgtgcccaccctcccagtaccctggggctctgctgaggcctccctcacctgctcgcccgtctctgggttgatcactgtttcctggtcaaagttgaatgctcctttttcgtcctgcagaacacacggtgggtgagggaaaggcgcccccaactggatccaggcctccagccccagaatccacaggccggaaagtggctcaggaaggcaagcgggagcgcaggagcgggcggcgggagcagcaggtctgtccacacactgacgcctgcacagccctgagccctgtgacgctggctgcctcctcagagccattgggagcctgagaacctgagctgcctaccccaccacacagagaggaaaactgaggaccagacagccgagggacttgccccaagtcctgtgaggacccagatctggtgtctccagaccccagtgggagatgccccaatgggtaggccagacagcccagctgtgcccaccacgggctcctggcactgccagaggaggccacggtgtcattctcaccctcccactgcatgccatgcgtctttcatgcagcatcctttgaatcctcacaaccatcttccgaggacagtgccactatcaccccacttcacagatgaggaaactgaggctcagagcctaagagccccacactggagtcagagcacacaacctccgtggacgctgtctctcaacactaacacctgtttgctgtcagggcttactgtgtgttagggcttactgtcttcacctttactcctcacaacagcccacacagcaggggtcaggaatctcattttacagatgggccaactgaggctcggtgaaggtgctgaattatccaaggccacacacagccttgataaagtctggacaaggcgtttcgccagactgctgacccagcagctgttctgcgcatcctcctgaccccagggcccagttccagcccttcctgatccagggaagcagccccacaccccgagaagcaggacccacccagaaccccgccctcggaggggaggggccacacctcaccccatttctggtcatcttcatgctgggggtccacatcagcttttcagccccccataaatgactgtctgtgtttccatattccctgggtaggtatggagggggctccagccactctggccggctggcaagaagggtctgctctggggagaagtggctccctacgatacccggaaaagcccaggttccacggaacagcagcgcaaacaaagacagcactgctgcctcagatgggagcacccagagatgccccctgccccaagtgtctgtcctggggctgctggagccacgccctaagcacgcccttagggtgtgcttccttagcctgagccaaacaattcctcctggtgcggggaacagcagctgaactgtcccgaaggccctctacatccaggctctacatccaggctctacaccaggctcatccctgagccccagatgtacacccaggctctacatccaggcatctgagctcctgggacatcttgagggagggcaagacagggtcttctctgcctaaggggccattttccccactcaacccatagctcctgagggcagaggctggagcagcttcaccgctgggtagggcaggttgtggggagtggagctgtaggctggggtgccagggctggccactgccttctcacctgtacgaagagcttgccactgccatggcccagcagctcgtgcaggcccacctgcacatcgaaggagggccccttccagaggatgtacaggtcctgccaagacaagcagagacccgcgctgtccactggccagccctggctatacagcctgtcggcctcccctcccctgggccatggacccatctcagtgcatgtgcttggtaaaggccaactgtgctccaccccacagcccatttcatccttgcaacaacccaggaggaagggagggatgcctccctagtgtgacccaagaggaaactgaggctccaaagtccacacggtcacatggttgggaagtggcagagccaggactgaagctatgtgctttcctctctactgctctgggctgtctctcttcctgagtctgctgaggaaggtgaggcccagccccgaccctccgactgctggcgcccaccttgtcatcctcctccagaaaggtaagcttctcccgctgcgtggcgtaggccacagccagcacattccccagcgacacgttcttaaagccttccgtctgcctcagatcatcgtctggagaaggtggagaaggaccagaaagaagaggtgagggtcaaaggtaacagacaagaggcacagagcagtttgtggagggtgtgtgtgtggacagggaggggcgactctaaaggaaggtttctggggctcggggctgggcctgagacactcacagttggggatgttgatcgcggcagggatgccggagccagcgaaggtgagaacatccagggaggtgaagtcaggggtgaggaacttgtccttctcaaaggttgggggccagggcagctccttcagcagctgctctgcgctcgccaccagccgctcaaacttggcactcatggccttgttcaccacagctacgaaacctgcagaggagggagggggttgtggcttggcagggttccaggagggctcccacttcaccctactccagccatcacgcatgtactgaatgcctactgtatgcagtcaccctgggctggaagatggggatagcagtgacccaggcctgggccctactgggtcaggacctggacaggaaagatgcagctgcacaaacccgtctctccctcaggcccctggccgcctgccccttctccctgggcctgggtcatccctgagccccaacaggtgtgtgctctcctcccaggctaatctctccagctttagcaggcagatgctcagactcttctaaatccaggggctggggaggattagggcagtcagagaagtggctgaatcctcaggctggatgccctgccttgcacaggtgggtcccctggggaagggggtgggggccgcggcagcctgccaccagcctgggatgacagccccgggtcaggtccacagtcacaatgtccatcctgcttccagccactgagtgcagcagtctgcatcctaatcacattggtgctcagaggtctggctatttggcccaagatcacacagcctaggagtggtaaagctgggcttgggaggcacatggctacctggagcctgtgccctgaccagacaccagaggcagcacagcaaaatagctcagagccagggttcctgggccaccccccaactgtgccccagtgctcacatctgcaaagtgaagataaatatcctcatgggatgatggactctaaattagttaatatagctaagcttcttacaacagtgcccaatacattgtaaacggtgtttatttaccatggctgttcttactgttatggttatggctgagcgggggtggggagaaccatcaggggacactggaaacgtggacttggatgtgggggaagggactgtgactgacctcctccctgaggaagttaccttcaaattctcctcgggaaccaaaggggtcgcggtagctctcgatgaacccgatgtaactgggggagagaagggcagaggtggaggaggggcaggcaggagggggcaggtggggtggagctggcgcctcacctctccacgatggggcctttgtcctggatccagaagcgggagcccctcttgtgggcctcgatggagccctgggtgaagctctctatatactgggccagcatctgcccctggtggctgttggctgcataggcctgaggtgagcgggggtcggtcagcctcgggccacccacccacctccacacccgctctgctgcccagaggggtcctcagcccgcacccctcagcccccagccagtccaaccttggctttctccagctgctccaccaccttctggaggatgggcgcgtagtccccccgggtcacctggaaagggcttccccggaattcatagctcttcagcttggaagtcacctcagagtccagggaaggctctggggaaagaaggtgtcattcaagagaaaaggctggagtaagaggcctcactcagagaaaaggcctgagtaagacacctcagccggcttttccccatagcactctttcactctaagattttcaatggctccctgtagccaacagacatgagcataaactctcaacttcaaaaaaatatatatcagccgggcatggtggcttacgcctgtaatcccagcactttgggaggctgagacgggcagatcgcctgaggtctgaagttcgtgaccagtctggccaacatggtgaaaccctgtctctactcaaaatacaaaattagctgggcatggtggtaggtgcctgtcatgccagctactcgggaggctgaggcaagagaatcgcttgaacccgggagacagtggttgcagtgagctgagatcgtgctgctgcactccagcctgggcaacagagaagagactccatctcaaaaaaaaaaaaaacaaaacaaaaaaaacaaaacaaaaccccaaaactaaaaaacaaaaatatatgtatcacataacatgtgctttccgtgtgttaactcctttaagcctgactccaactctgggaggaggcggacattatcatttccatttcaccgatgggaaactaaggcaccgagagcttaagtggatagcaagtggcagactggatttaaaaagacagccacatcccaaatgtaatcgacagtcccatggggagacaagagggtgactgggaggaggagctgtgacgatagcagaggggagctggagtgaagttggggggctggacagccttccagaagctggaaaaggcaaggaagcaggttcttcctgagactccagaaggaatgcggcccagccttgcttttagactctggacctccacaactgtaatagaataagtttgtgttgttttgtgccagtaaatttgtggtaatttgttacagaagcaatgggatgcttacacactactgtattttccttgttgtctctgatcaataaaatatacttcaaggctatgtaaaaacaaacaaacaagcaaaaatagccacagtatttcctgtcttactgcctttttttttttttttagataggatcttgtaaggttgcccagttgatctcagactcctgggctcaagcgatcctcctggctcagcctcctgagtagctgggattacaggtgtgagccatcatatccagctcaactgtgactttgcccatggagatgtgggatctgtgttccctcctcctgaagccaggaaggctgtgacttcagcagcagggacaccatgtgcttaggccaggtcacacaaggtgagcaggcttctgcctggctctcctgggatgctcactcttggagcccagctaccacgaacaataggagggtgccacatgaggtattttagtcaacagcccagctgggttccagccggcagccagcacctgcgtgtgagtcaacaagcctggggatgcttgcggccccaagctgtcgtcttcccagctgaggccccagacatggtcacccagcgaccggctgttcctactgtgctccacctgcattcctgacccagagtccatgagcatgaaaaggtggttttgtatcactaaatttgcggagcatttgttccacagcaatagattatgacccactcgggcagtccggctccagggccacattcaaccactgcccgaaactgcatcttgtactctaagtataggcccagcttatgttccagtgagatccactcctgttcctctgaacccacatctgccatcatctccccagtggatgctcggatccaccaagcgctaggcaccagggagacaacagtggatgaaacacacaggccctcctctcggggagcttgtagtcagggaagctactgaatgtgccgatgggaagaaagaagggcacagactcagttatgggaagatagggaaaggtcctggggaaggcaagtccatgcatggcctagaggatggggaggaggtggccaggggacaaggagaggctggagggggttccgcatgagaagcagggaatggattgtgcaaagacctggacaggggccaggcgcggtggctcacgcctataatccagcacactgggaggccgagaggcacgcggatcacctgaggtcaggagttcaggaccagcctggccaaatggcgaaatctcatctctactaaaaatacaaaaattagccaggtatggtgatgggcacctgcaatcccagctactggggaggctgaggcaggagaattgcttgaacccgggaggcagaggttgcggtgaaccaaggtcgcaccactgcactctagcctgggcactccagcctgggcgatacagcaagactctgtctcaaaaaccaaaaacaaaaagacctagagagggtccatcagaactggatgctgttgagcatggccagagcacagagtctgagtgggaggatgtggagatgaagcaggggctggggtgcgagtgggaacaaagagccaggtggcaaaggtcttcataaaggcctggacacttctgtccatactatttcctctctcctgggaatggaccccaatttccccttgagaataccaccccaggccccactactactaccccaagtgcaggtggtttgggaagggccagcctctttttttttttttttttttccttgatctggagcttcgctctgtcacccaggttggagtgcagtggtaagatctcggctcactgcaacctctcccttccaggtttaagcgattctcctgcctcagtctcccaagtagctggaattacaggcacacgccaccacgcccggctaatttctgtatttttagtagagatggggtttcaccatgttggccaggctggtctcgaactcctgaccttaggtgattcgcccacctttgcctcccaaagtgctgggattacaggtgtgagctgccatgcccggcctgaagggccaacctcatcgcctgactccagggtaggcttgagaccaggttgagccaatcagagacctgtcccttgccagccctcagggattggttcacagacaaataggggactgatttagagaaactagagccattcccaggacttatgtagaaaatcctgggagagaaggatgctctttctgaaggagtggcagagttggtaggacctgagccacccaggtccggaaatgcccaggagggagcagaagggaagcctggggctaagctcacctgagccaagcacagaagccagccgcacctcgtagtagggcttcccttctccatcgacctctttgaagagccgggtgttgtaggcactgaggttctagaagagaccaggacaggggttaagagtgaagtctggagagggcagtggggtgggaggaaggaaaatgggtcaaccctaggggagaaggcatggaggcaaagcaggctgggccttctgggttggctgggagcaggagtgggagagagtgggagtgggcagcccagggccgactctcctgctctgctcaggacactgtgcacttctactaagcactgactgcaaccactggccaggcactgcacggcctctgcgaacccagggctactggaggtgggtaccacttcacagacatggaaactgatcacatggctggtgagtggctgagctgggagcaccactgacacatggaccccggagcctcacacccctgtggcctgaggtcctggttcctcgccctgccctgaggctgtcattaggctctatagcctggggtgggcaggggtcacgccttccctagtacacagggagtagtcaagcagagacccaggagtggtcaccagttgtgagggggctgggactaggaaccccaccaaacctctgctaccttgagctcccctaaccccaaacctgtgagtccagaaagtcctgggccaatttggcatcttccatggtacaattcccagagaaataggtggtgattccctgttggggaagacaggggacatgagaaagaggagttgccaaggtcagggctgcagggacgtcatattcccaggcttcccgcccctccctcctttcagcagcctctaccccttacccctccatctacctccaggggaaaaagttataaaacaaacaaacatgctcatctccagtgttgctgcagctctgcccaggcctctctctggctggcccacccctaaggcttgccaaggtcctcatcccatgcaacggatgtggcctccagaggtgggaaacctgggacccccctccttccctgccatcccctcctcagctccctccacctccagccttcctctccttccctccatcagcacatggcatcctgtgtacagaatgtcagatctgggagggcattcagaaagcattcgacccaacatgcttaccattctacagatgacaaaactgaggcctgcagtggggagcagcattgcctcaggagtgtgaggcagagcccactgcctccccatcccgtgtccttccctccttaccaggtggccttgaaggattccctccactccctgtcccctcgggggagtcaggggcctcacctccttccccagtccgaggtgtcgaagccttggctccagagagaacataagctccccgcaggtctgccagaggcccctgacttcttctgggtgctgctgagcagcctcactccctaggatcacccgttccagcttttcctgcaaggaaagggaggccaatggcccagtcacaccacccaaacctgccttccagagcctccctacccactcccaagctcttctcctatgatctaagagctctggctcattgtgtggtccatggaccagcagcacttgtaggtcctgagaaatgtcaagcgtccatgtgtggtggctcacacctataatcccagcactttgggaggcagaggagggagagatgcttgaggccaggagttcaagacaagcctgggcaacacagagagaccccatctctacaaagaataaaaaaaattaggccagacgcagtggctcatgcctgtaatcctagcatttggggaggccaaagcatgaggattgcttgagcccaggagttcaagaccagcttgggtaacacagtgggattctgtctctacaaaaaatttttaaaaattagccaggtgtcatggtgacaggcatctgtggtaccagctactctggaagctgaggaggatcacctgagcctaggaagttgaggttgcagtgagctgtgtccgtgccactaccctccagcctgagtgacagagtgagaccctatctcaaaaaaagaaaagaaaagaaaagaaaagaaaagaaaatttagctggtgtggtgctgcatacccatattcccaactacttgggaggctaagccaggaggatcacttgagtccaggaggttgatgctgaagtgagtcatgatcacaccactacacttcagcttgggtgacagagcaagaccctgtctcaaagaaaaaatgtcaaatcttgggtccaccacagacctgctgaatcaggatgctgcatgtcagcatgactgccaggtgagctgtgtgtgcatattgaagtcccggctcttatacctgctataagaaccacctctgcccgagataggctcaagtctcataaccctgggagggatcccccggcccagcacttcccactgttcctggtgatgaccaacaagctccatttttgagagcacctaaaagttcacagaacacttccacatctcgcccttgttcagcctgcggatcagcagtcagggcgagtggtgcttttcctttatacacgaagaggccgcagcacccagtgaggctggtgacacccacagtcatgcagggtggaagcgacagggtccatgctctgctcagggcttctgacactccagttggggctccttctactgcattttccatctctaccccaccagccccccatccccaccttccccaaccctcccttggctcaccttgggcaagttgggaacaaacttggtgtcaccaaaggacttgtagttgcccatgttggagtaaacacccgcggcatagaccaggaacgcctgagggggaggcaggcatcagagacccaggaagcacagcctccctgaccccagcgacacctcctcctgagatgcgaatgccccagcagagccagtgtgggtgaggctgggaaatgtgtgggcaggacctaggtcctgggaagccccagtctggcccacactcacttccacagacccattttcacacccccgttgtctggcctaactgatcttctgggcagttcccaaacacacccaagcattcgtctgccttttccctccccaccccagcaccctctcagccacctgaagctactgtgtcctttaaggcccagttccagcagcacctccctctttctccagagcctgtcctcagcctctgacctgtcaggcagctggccttggaagcatcacatgttagagccggagaggcttaatcatctgtctattctatggcttctgctggccccagatcttcctctggtaacaagacctcaatcctccttttgtgggtgggagggtggggtgggggatctcccttcccccagctccaggggtgggcatgtaacctggctcagtcagtctgagaaaccaccatccttggctacaggatggacacaaggctcaagctggcataagagagctacccaggacatttcccattggcaaagagcctctgtacaccagggatcatcaggcctggaactcctggagctcccctccaggagtaagaaaagcaagcaagctgagagacgaagactgcatcccagtggtagcactgagtccgagtccagccatgcctgaaacttcctctagacctggacttttcaagcatgtgacccaacaattctccttttcatgtaagccaatttgagctgggtttctgccacttgcaaacatatgaattcccctaaatggccaggcgtggtggctcacacctgtaatcccaagcactctgggaggccgaggcgggcagatcacgaggtcaggagattgagaccatcctggccaacatggtgaaaccccatctctactaaaaatacagaaattagctgggcgtggtggtgcatgcctgtaataccagctactcaggaggctgaggcaggagaatcgcttgaaccagggagttggaggttgcagtgagctgagattgtgccactgcactccggcctggtgacagagcgagactccgtcccccacaaaaaaaaaaaagaatttccctgaaaataataacgcttgggttgcacctttctgtttataaacatttccacggatattagctcttttaatgagtaagccaaggcctcaagatgggaagtgaatgcccaaagttcaaaagaggtagaataaacagtacatcagctcagagagaaacaatccaatccctttatttcacatatagaaaaacaggccatattcttgtacattcttggtgggaatataatgcagtgaagcttttttagaagatgatttaacagaatcagtcaattgtaaatgtacagagcctttgacccagcagttcttctagaaatagatcctcctcacatgtgtgcacaagtatgctcaccatggcactgtttgtaagaaaaacgggacaagctaaatgtccagtaatgaagattaaattgattatagtgtacactgctgtggaatgctttacagtcaataaaaaagaatgaggtacatttaaatgtaccccattctccaagttcttcaagacatggcattcaatggaaaaagcaggacacaaagcaggaaaagaacattatctcatttctataaaaaagaaaataaggaactgattcaccatgcatatacacataaatgtatgtaatacacagatgggattgaaaaggctgtaaccaaggctgggcacgatggttcacgcctgtaatcccagcactttgggaggctaaggcaagtggatcacttgaggccaggagttcaagaccagactgggcaacatggtgaaaacccacctgtactaaaaatacaaaaattagcccggtgtggtggcacatacctgtagttccagctacttgggaggctgaggcatgagaagtgcttgaacctgggaggtggaggtttgcagtgggccaacattacgccactgcactccagcctgggtgacagaatgagactctgtcacaaaaaaaaaataaaaaataaaaaagagagagaaagaaaaggctgtatcagcctcagtgggttacctctgaggagggcactgagaatgagtgatctttgtgttttcttttgtgtctttctgcattgctgcaatgcactaagaatttgtgtattacttggccaatacatccaaaaacaaaaaccaagggacaggcagaacattctgcccagggccacacagtgtggtagagaagaactggtcctgaactcagacctcctgatacctactctggactccttcttctgccttccctgaatctccaccacagtttcttttgttataatcacagcagccatcatttatcttgaagtcaggcactgttctaagtgggtcatcacaacactaagaggtacagacatcccacatgcatattttacgggtgagaagactgaggctccagagaggggaagtgcctgaatttgtaacctttggtctaatcctccacctaccccttgaaagacacagacatttgcatcctggtctttcacacccagaagccactcaggtaatgtgggttggcccaagagaactgacctgatactcctcctcggtaaggccttcagccagggcatgttggcgcagctggtcggggtcctgggcgcggaagaggcggctgagcagagcatagatgtagggggcctcaggggaggtctgaagcagcacagccaggcctccgtaccaggcggcacgggacaggtggtaggcatagaggcgctctgtgggtgacagcaggcggaaggcctcacggcagtccaggctagacacgccgatgtcattgggcaggatgtactgggtgtccgccatgggccctgctgagaaccatcactgtcatcacagctgttgtttaccccataccaattgcatacctggctctgaactcttatgatctcatttaatcctcccaaaagcccatgtggaagggaatactattgtacccattcaccagatatgctaactgaggcttagagaaggtgagatgactcacccaaggggtcacaaaatacactggtggaccatatttggtctgtagtccctaaaccttaaagattgactctaaggtcaggcatggtggctcacacctgtaatcccagcactttgggaggccgaggtgtgtggatcacctgaggtcaagagttcaagaccagcctgaccaacatggtgaaacctcctttctactaaaaatacaaaaattagccaggcttggtgccaggcacctgtaatctcagctactgggaaggctgaggcaggagaatcacttgaacccaggaggtggaggctgcagtgagctgagaccgcaccattgcactccagcctgggcaacagagtgagactccacctcaaaaaaaaaaaaattgattgactctaactacctagtattacagatggggaaactgaggttcagagaggctaagagccttgcctaatcccacaatggagacatcagcagcagagatcctcatctctaggctcccagcccaggcccctccctgcttccttgttcagtattatttttttaagacggagtctcacttagttgcccaggctggagtgcagtggcatgatcttgactcactgcaacctccgcctcccgggttcaagcgattctcctgcctcagcctccaaagtagttgggactacaggcgtgcatcaccatgcccagctaattttttgtatttttgatagagacggggtctcgctattttgtccaggctggtctcgaactcctggcctcaagcgatctgcttgccttggcctcccaaagtgctgggattacaggcgtgagccaccgcgcctggcctttgttcagaattctttacactttccactgtgctcacaaggataaagtgccaggccgccagctggaaggctcagcctttagccaggactcggccccagactcctaaaagtcaagtccattgcttcacttttctgtacctccgtttcctcctctataaaagagagaataaccccaatattaccaggtgggtgcgctaatcagatgaagtcgccctggacggaaagtatccacagcaataaatgatttggcttgaaactgtcccattctcatccctctaaatgccttttccttggccctccattctcctgctcgctccctgtgctccaccagggaagccacagaagttcacaaccagaagaaagcccattttacagatagggaaactgaggcttggaaagggcaacaatttactgaaggtctgacagccccgttggaacccggggattccccaacccggggcattctccccgccacgccccgtcccggctgggacagagtgtccagcctcctcgccctgccccggcctccagaagccccgccccaatagcacagcctcgaggttcggaaagggctgttaactctttgctccccggagcactccttggcctcgagggcggggtgaatttggagggggtactggagagtgggcagaaagggaacgattttgcgctcagtatggattcgccttggtcccccgggatgacacgctttgaccccaaaagcccaggcgccgcgcctcacctgcagcagctgctccgttcgcaaactcacttcctgcttccggctcccccattcattggggctctgcgaaccccgccccccttggccaactgcctggcctcggggtccggatgggcgtcagtaccagccaatagacgcgccaagacgagcttctcggctcgcccgctcccgcccccaggcgctacggggtggcgcgcggattggccctgcggctcggccttttgtcagcaggccgcacacgcgccggaccgggtaccgctgtgcccggcctggccgcggcctagtcccggcagacgggactgacgaggtcaccaagcccaggccgagacggcgcgggtgtcagggacttgggaatccccctcccccagtcccgatcccgctttcctttggggtttcacctcagaggacccgacagcactcttgcaggtgggaacctacacaataggagtaatgtggctccaccttcctctcgggactcgggacctgggggtggagacttggaagttgcaaagctctcggtgccgggaatcggggctacggttgagtgggatcgggccagggctgaggtggtcccacccgtgtaggggcgcggagaaacgcctcgactgcttcactgtaccaccacccacccgccacgggcctggaaggagccgctaaacattcccgagcctcagtttccttagcacaaacaggctggtagtttcctggtgcttgccagatgcctgatggatgagaaagcctcctgcggccccgaaagggagtccagagcagaggcgggcccgcggtccacttttacaggtctggacggactcacgggaccacggtctgggtggggcatgcggaagggcctaggccaaatggggagtagtggtgagggcccagggtcagactggggggtggagtgaggttgtctgggagtcttggctttatgaaccggaaaaccaggctaataattgaatccaatccaagggatattgtaagttgtgatgtgttgactgcagtgccgctccctatagttgcgcagggtgaggggcgtttgggtactgaaatcccgcacggtctccttgctacgcccgtgtctaggccagacagcctctgcttaccatagacaccagtttctcatccacaaaggtgcccaaggccctgcttgacacaacagtgttacaagctgttagctttgatgattacttgttatatgggggagttcaacaagttggtcggtgtccttaggaaagtcacccctcttctttcctgtgcctccgttttcattgtctttaaaatgggtataaagttggctgacaggtgaagttgaaatgtgcacaggtaagggaggtagtgctgcccactgccagcagggggcagctcaggcaaggaaaagaccccagtgctctcaggaccccccaaccagctacgtgatcacatttttatgatcacagataagatgagcatatactgaggtcccttgctagcagtttggcatggaggacctcatttaattcttgcaaaaatcctgaggtatgatcactttacccattgtacagatagggaaactgaggctaagaggttcgccgactcctataacaccacacagttcagatatccctggccccaacatagagatacacacacacagtcactcacatggagcagtctatcactggagtcataactccccagccttggctcttccccatgggaatgcaaaaggggtcggtgaggagcaacagttacgaatcaactgtgttacaggtgctctctgtatattcacaaccacctggcgaggtagtgactgttatcccctttagcactgaggaaactgaggctctaacagctggcaaaggcagagctgggacaagaccagggctctgacctcctccaccaatacctctgaatcctccccagcatctactgtggtgccctttgctggtctttcctcctagggtctgaggttccccactggaaatgggatcagaatgttcccctgcctggttcccaacagggtcagaagagagaacttggaagagttggattttgagtgctttgtgtgttgtgtgtatgttgaggggagagaagttggaatgctcccacacctcctgcagcatccccaccctccccttcacccccactgcagcagtgccatgctctggaagcaagaatctgatcacaccctcctccttctctcatcacattcgggtgccctctgtcttctcaataacccaggtctgatctccctggccgcaaccagctgtgtggccttggtcaggtccatccctccccttggaatctgtacttccctaggctctgtcatctattggggacgatgcccaggtcaggcctatactcagagccttcttctcttcatctccagaacagccgtctgcctgtcttcctggctcgctccctgcaggaatggtctgggcaaccccagcaacacgcccacctgtggccaggatgaataggaatccagttcaggcttggcttccatggcaatcaaggcccaccaggccccagcaaccttccctaccccccattcctttttgctgcccccctccacaccaggcatgttccctgccacaccatgctgttcccctcacctgggctgccctcccaactcctctctgcctctggagatgctctgccattcaagacttggctcaggctccaggtcctccctgggccttctagagcccctggttctcactcctctgaacacttccagcctgctaatagcccactgcatcctggcctggggtacaggtggccagcacaggtgtgggggccagcttccaacacaagcacgggtaggtccctctgcagaccatgggctgcaagaggcccggccttgcccactgcaggggccctgcgcagggctgggcacgaagcaggtgggtgtccaccaatctagtatccaaaaccctgcttggttcacccccacctctgttgaaggaaagcaacactgtgatggagaggagcagctgtggattcaaatcctggcttggccactttctagttgtgtgacttggtgcatctgccctcatctcctcagagacaaaaatggcaacacctcccttcttgggttactatgaggattaaataacaaaacctccaagaagcagagcccggtgtctggagagtgctcaatggacgtagttattattatcatcatcagcacagtgcggggcacatggtgggcattcagggatgatggcccttgtgtcacagccgacactcttgaccagtgagtcctctctcctccctttgttgactcctgaccgtccacaaatgaggttcagaatcctccatccagcatcttccctggtcacatggtcccaaccttttgctccacccccttctctgttccccccgcagtccatgctccagccatcctgactctgtccctggatttctggcttactgacacctgagcctgtgcacaggccctcccttctgtatagagcacgcttcccatcttgtggacttgcttcccatcttgtggactcggagggttccgagcagccgttgaggctgagctcctatgacacctcctccgtgaagcctccctcacttttccattaccagtgaggcctgccacagcctgatttgtactctgatcctggcacgcatgaagccgtgttgccatttgttaacagtctgtcctccactagactgtgaactccaccagggggggaaccaggtctgattgcctctgtgtccccagataccacttagcacagagtcgagcccatagtggctatcagcaagtgctaggcccagcctgccacccacccaccactcacttgggggctggaggcattgcacgcatgcggggcatgtgggacttgtgggggcagctgagcagcgaggtttatagaggaacccagggcggcagcaggaaggatgaaggatgagtgtctgaaactgggttggcaggctcagggcatagccagcctaagctgggggtcaaaggcccctggccccttcactcccccaggggcacacagtgtcggcggcacgatgtgggatgccccaggaagggcaaggccatggggctgggctttcctccatcgacccaggacagagctggtgctgaaggccccatcagcatgactggggtggagatcttggggacctccttggggggccacagttggggggaagggcacagcccatccaacatgtccatctggtgtggctgtgccagcagggagtgtcccacatgcagagctccctctgggctgcaggaggtggggacctgggtgggcaggtgggcacagcagcagggggccccagggagcctaatccagcgggccctggaaaatgaggcggacgcagccatgctcgccggtaagccaggccccgcaaaaggggcaggcggcatggaaagcatgggtgccgtggggcagtggtgtctgggcccagtagcgggcagtcttctcagagcagacgtggccgcaaggtgcaaaggcatggctaggcggcccagggtccaggcagaggccggcctcctggcaagccatagaggcacataaggccccacaaggcggcagagaggacattcgcgctcctgggggccccgctcccgccggcagccccagccgtggtagccatggacgtgcccgcagcggacgtagacccagggctgctgtttgtcgggcgctgtgcgcccacgggctgggctggggaagcccagagtgctgaggccacggggcactggggcgcgctgcatttgcctcctgccgctggcctccagttgcttcagtgtgggagcccgcagcagccccgccggtgtgcgccacagcagtgtggccccacacaggtcgatgagagagccgtcctgcagcacgttggactcgttttccacttgcagaggcagtagaagggccttactgcccaagaggcccctgctgagccgcgggtccatcccacagagcctccctggagagggcaccctggcgggcagggcaggcagggcagaggagcaaggcaggctaggaggccaagtgggcaggcaggtgcatcccaggcacatgctgatcccccctcccaacggggcatgggccttggtttccccatctgtctaatcaggaagtctgacccagacagggtttttctaaaataagatgttttctgaagtgccctcctcctgacagaggcaggaaaggcctctaatgaggaatgctgggtacttagctcaaagctaacggggaatgctgggtacttagcccaaagcagctgtcccagtagttacagttaaaagcaaaaactcaggagctaggctgcccaggctgaattctggcctcaccgttgactaactgtgtcccttgtcgagtaacttaacctctctccatctcagtttcctcatcctcaagatggactgcaccttctggcatctcaagtggttcttgtgaagattaaatgaatccatcaggccgggtgcggtggctcacgcctgtaatcccagcactttgggaggccgagacgagcgcatcacctgaggtcaggagttccagaccagcctggccaacaaggtgaaaccccatctctactaaaaatacaaaaagttagccaggtgtggtggctcatgcttgtagtcccagctacgtgggaggctgaggcaggcgaatcacttgaacccaggaggcggaggttgcagtgagccaagattgtgccattgcactccagcctgggggatagagtgagactccatctcaaaaaaaataaataaataaataaataaatggatcaatcagtttaaaaacttagaacagtgcgtggcaaatagtgctcaagaagagtaggcttgtgaaacattcacatgcattgttttaacaaacaatgcttccccagacctccccacagagttgacgctctggaaagaaaagccaggcttttctctgaggttttgcatctccttggccaatgtgctcatgccagagaagagcagtgcatggccagtttgaggagcacggccatgtgaccttggacagcccctgcctctctctaggactcactcccggtccctaacctcagctctctgatctgtaccacaaggagctgccactaacacctgtgtcagaactactgtaaggaccctttcctcctgcgagaggagaacagtgctaaacctgtctgaacgtgatagacatgctacaaactgccaaccctttaggctataaactgctcacacatgggccaagtgtcactctcataagaaggtgtgattttttttaagctgccagcagccttgaagccacctgggactgcacagtatgtctgtgtgtgccttgatcgcatcaccccctggacctccagtggtatgcatgctatgcttggggaccctggtctgtctgcctgtctgtgggacaagtggctcatgctaagaaccccctgggcctgggattccctgatatggagcctgttggggctccctggggcagaaggactggagatcatctcctggcttgggcagggggatgggcagcttgtgagggcctggcaaggataggggtggggaatggagcgggccacctaccagcttgccccgctgctgggctgagcggctgtcccgcaatgtgtacacattcccacagaccgagatctcccgccagacacccggggctgagtcctcggagaagccgcctgccgggtgcatcaccaggactccattggtggtcagtccatccatcaggccatctggggtccgccatttggccgctcgctcctgggaccacatgagggatcagatcacatcccccaggggccccccagcaggccatgtgccagaggcactgcccccgctaccttcaagttcagaggcggcccagagaggactggcattgaagctgcatgacttgagcgtctctctgggcctcactttgctcatcagttaggtggggttgctaactgccaggaccaccatttggattactgtgggctggttcatcacctcaagatgctgcacctcccaagcctaccccttgcctcacagatgaagagttggtcccttcctggggctcactcactccaaggaagatgttgctagaggcatcgaagccagcggcatagatgcgggcagtatagggtggccggcggtcacagaggatgcggcaggcatagcgggagatggtgctctgggcagaagggcctcggcagcccctcctccaggggacgtgtctgttaccacgaagtcaatcatgttctctgtggagcggccaatctg

SEQ ID NO: 9295 - DNA, 1452 bp, Homo sapiens
ctcaaagctaacggggaatgctgggtacttagcccaaagcagctgtcccagtagttacagttaaaagcaaaaactcaggagctaggctgcccaggctgaattctggcctcaccgttgactaactgtgtcccttgtcgagtaacttaacctctctccatctcagtttcctcatcctcaagatggactgcaccttctggcatctcaagtggttcttgtgaagattaaatgaatccatcaggccgggtgcggtggctcacgcctgtaatcccagcactttgggaggccgagacgagcgcatcacctgaggtcaggagttccagaccagcctggccaacaaggtgaaaccccatctctactaaaaatacaaaaagttagccaggtgtggtggctcatgcttgtagtcccagctacgtgggaggctgaggcaggcgaatcacttgaacccaggaggcggaggttgcagtgagccaagattgtgccattgcactccagcctgggggatagagtgagactccatctcaaaaaaaataaataactaaataaataaatggatcaatcagtttaaaaacttagaacagtgcgtggcaaatagtgctcaagaagagtaggcttgtgaaacattcacatgcattgttttaacaaacaatgcttccccagacctccccacagagttgacgctctggaaagaaaagccaggcttttctctgaggttttgcatctccttggccaatgtgctcatgccagagaagagcagtgcatggccagtttgaggagcacggccatgtgaccttggacagcccctgcctctctctaggactcactcccggtccctaacctcagctctctgatctgtaccacaaggagctgccactaacacctgtgtcagaactactgtaaggaccctttcctcctgcgagaggagaacagtgctaaacctgtctgaacgtgatagacatgctacaaactgccaaccctttaggctataaactgctcacacatgggccaagtgtcactctcataagaaggtgtgattttttttaagctgccagcagccttgaagccacctgggactgcacagtatgtctgtgtgtgccttgatcgcatcaccccctggacctccagtggtatgcatgctatgcttggggaccctggtctgtctgcctgtctgtgggacaagtggctcatgctaagaaccccctgggcctgggattccctgatatggagcctgttggggctccctggggcagaaggactggagatcatctcctggcttgggcagggggatgggcagcttgtgagggcctggcaaggataggggtggggaatggagcgggccacctaccagcttgccccgctgctgggctgagcggctgtcccgcaatgtgtacacattcccacagaccgagatctcccgccagacacccggggctgagtcctcggagaagccgcctg

SEQ ID NO: 9296 - DNA, 154 bp, Homo sapiens
ctgagcatacctggaacatgtctgtgtcgctatcatgtgtatactccactatgaccgagtggctccgggacagtgtatacgagatgctgtgctgaccacggttactcagtgcctggtggggagaaaaaagtcacttgccagggtgtgcagccat

SEQ ID NO: 9297 - DNA, 196 bp, Homo sapiens
caaggaagatgttgctagaggcatcgaagccagcggcatagatgcgggcagtatagggtggccggcggtcacagaggatgcggcaggcatagcgggagatggtgctctgggcagaagggccctcggcagcccctcctccaggggacgtgtctgttaccacgaagtcaatcatgttctctgtggagcggccaatctg

SEQ ID NO: 9298 - DNA, 282 bp, Homo sapiens
gtggctcacgcctgtaatcccagcactttgggaggccgaggcaggcagatcacgaggtcaggagatcgagaccatcctggctaacacggtgaaaccctgtctccactaaaaatacaaaaaattagccgggcatggtggcgggcacctgtagtccctgctactcgggaggcagaggcaggagaatggtgtgaacccaggaggcggagtttgcagtgagcacagatcacgccactgcactccagcctgggcgacagagcgagaccctgtctcaaaaaaaaaaaa

SEQ ID NO: 9299 - DNA, 873 bp, Homo sapiens
tacagtgagccactgagtttattcagaaggttacgttctcagcctttattccagggcccaattttcaagacaagccttcgcgggacaggaggagtcctctgaagatagcagtgcatgagcagagaaacacacatggcttggtctcgccgcccagcagctgattccgaggaggggctgagaggggccaatttcacccttccctagcaagactcggaggaggttcttcctacacaagaagcccatctgaccaccagggcttcctggcagagagtggtgctagatgtcagccaggaactccccagaccaggtattcttccaggctcaggcataaagaaccaggaggcttttattttctattaatcaacctagttggaagcagagccattgtaaaggcagagaggtattgattacaggattaaagaaggaaaacgctgcttatacaatgtgctgttcagcagaagcctcccctggatacttgaataaaatcctcggtaagggtcgcctgcagtcactgggcactttctattgtactagctcccatacagcaacatttctagcagcagaaaagcaggaaaaccactctccagggagaggttcctgccctgtcctggccccaaattacctggcaccaggctatcacactccaccaatacttcgctggcctgggttttcaggggtggcacgatgatggttcgggggttccccgtgcagtgattctccaggctccccttggtgtcaaaggcattggcattgttgtgcccagcacgctgctgcacggagtaggggctggtgttgctggaggagtcggagtagggggagtcgtggactgtgacacagctgatgacgttttttctttgcttggagacagtgctg

SEQ ID NO: 9300 - DNA, 873 bp, Homo sapiens; identical to SEQ ID NO: 9299

SEQ ID NO: 9301 - DNA, 934 bp, Homo sapiens
ttcgaggtttgcacaaacatatatttaaggaacttaaataatgatacaagacaaattctatcctttgcaaatatttaaacttaaaaatgtgtgctgcatatacccttaaacaatatttaaaggatagctgagctgaaaagtatgcagctctctttaaggaatcctggctcccgggaatgacttcgggtgcctcccagggccctttggttactgctagagaatgttgcttcctggcagggtttccaccaaaacatttgcccgggtggaaaaagatggtttttggagagagatgtccttgtagccttgtggaagggacagcttcattttcttttcctcacagagatgcctaattttgggagggctccagcctgcttctctggccccaggtcaccagaccctagcagcaagtacagcctggcccctgtcaaccagaatgctcgccctggcatgtggcactgctgtggctctatttttcctgaaggtaaggtctccttcttccgagagagcacagcgcgagctgcgtgctgcttgtgtgtctttctcgctgtaggcaccacgaccccctgcccccaggcccacaggagcgctggctctgatgtcaaagctgcttggaggctgcatcgtcatgacggtactgttggggacagaccaggacttgcaaaaggagacgttttagcagggtgctgagaagctgcatttcacaagcatttcttcagaggaaaggtagctggggtaactccaaagtcagggaaaaagagcttcgccgcaaatgtcggaaagggtgatgctgccttgggttaggaagtaggtggcggggagcgcaagcctgtggctgtcaccatctcccctttaggcagagcctctcagcaaaaggggccccatcccaggcaatgccatgagctcttgggagagcgtgccagggctctgaccctca

SEQ ID NO: 9302 - DNA, 934 bp, Homo sapiens
ttcgaggtttgcacaaacatatatttaaggaacttaaataatgatacaagacaaattctatcctttgcaaatatttaaacttaaaaatgtgtgctgcatatacccttaaacaatatttaaaggatagctgagctgaaaagtatgcagctctctttaaggaatcctggctcccgggaatgacttcgggtgcctcccagggccctttggttactgctagagaatgttgcttcctggcagggtttccaccaaaacatttgcccgggtggaaaaagatggtttttggagagagatgtccttgtagccttgtggaagggacagcttcattttcttttcctcacagagatgcctaattttgggagggctccagcctgcttctctggccccaggtcaccagaccctagcagcaagtacagcctggcccctgtcaaccagaatgctcgccctggcatgtggcactgctgtggctctatttttcctgaaggtaaggtctccttcttccgagagagcacagcgcgagctgcgtgctgcttgtgtgtctttctcgctgtaggcaccacgaccccctgcccccaggcccacaggagcgctggctctgatgtcaaagctgcttggaggctgcatcgtcatgacggtactgttggggacagaccaggacttgcaaaaggagacgttttagcagggtgctgagaagctgcatttcacaagcatttcttcagaggaaaggtagctggggtaactccaaagtcagggaaaaagagcttcgccgcaaatgtcggaaagggtgatgctgccttgggttaggaagtaggtggcggggagcgcaacgctgtggctgtcaccatctcccctttaggcagagcctctcagcaaaaggggccccatcccaggcaatgccatgagctcttgggagagcgtgccagggctctgaccctca

SEQ ID NO: 9303 - DNA, 4761 bp, Homo sapiens
  SITE (3231): n equals a,t,g, or c
  SITE (4716): n equals a,t,g, or c
  SITE (4719): n equals a,t,g, or c
ggccttctctctgccactccccacgagtgggtcactccacggggagccccaacgctggcaggagaggatcctacaggtaggaagtgagggttgaggatgatgggaagagggaggggagcaggtacagggatttcgtttctctaaaagagagttgcaaggaatgacttctgtacagagtcagcctggttgagagaaaaaactccatcctccccactgaccccaaccctgtctgaggttccaaagagactgtgaactgacttttctgaaggatatgagagacaaatttggactcaggagagtctcctggttcagtctaaagctcaggaaagcatccctgtgtccagacctaaacataaggtcccctccttctcccaggacagcaaggagatgccacctaaaaacaaagaaaaagggaagaaatctggggcacacaagaagaaaaagaactggggtgagtcatggtgggtggaggtgccccctgcttctccatgttctgccatgaagaccacgcagagctcctccagagagaattcagccttctgcaggacaggatggagctctcttgacctacctctttcatgtcctcacagccagatccagggagctgaggaagtggggaaatggtcacccacgctctcctttaagccccatctagctctgtgccttcctaatatatttgtcatgtgtattttgcatatctgttatgtgctggtccgtgaggacactgtgctgacttcagtagactctgccactgtggatacctcatttagtggtcctcagttctgctgtggcaaaagtgcagggtgtggggtgaggatgtgagcagagtgaggaatgctgagatcatgaagagctgaggctctgccactttgcaccgcaggtgcagatgtggtgggcgagtccaggcacaggctggtggtgctggagaaggagctgctccgagaccacttgggtaaggagggtagaagctggcatgggtgggcaacaggggaagtgaaatggggcatttctgtatcctgggggattggagagttggaggtatggtggggggttaagttgaccctaaccatcccctagtggaaaaagatgatgagagaggggtgggcagtgagagttgataaaggaaggtgttttttttgtttgtttgttttttgttttttttggtttttttgacagaattttgctctattgcccgggctggagtgcagtggtatggtcatagtccactgtaatctctaactcctgggccgcaacaatcttcccgcctcagcctcccgagtagctggtattacaggtgcacaccaccatgcctggctactttatttatttatttatttatttttttttttttttttttttttgagacagagtcttgtgctctgtcgcccaggctggagtgcagtggtgtgatctcggctcactgcaacctctgcctcccaggttcaagcgattctcctgcctcagcctcccgagtagctgggattacaggcacgtggccaccacacctggctaatttttgtattcttagtagagacgggttttcaccatgttggccaggctggtctcgaactcttgaccttgtgtcccaccagccttggcctcccgaagtgctgggattacaggcgtgagccaccgcgcctggccctatttattttatagagacaaggtctcactctgttgcccaggcaggtctcaaactcctggcctcaagcaattctcccacctaagcctcccaaaatattgggattacaggcatgagccaccatgccaggctatccgaaaagaacatagagggagtttttacttcttaataatgaggagcctgtgagactctagggataaaaaacaaaaacaacaaaacccagagagagagtaagaggctggacaccccaccaccagatttctagaggtgggcaaagtccatcacgttcatgggggctgatttagtgggacccagccagtcctgacggcggctctgggactgctcacagctctacggagggatgaagcccgtcgagccaaggcttccgaagaccagcagaggcagaggcagcaaggggtggaggtagagctggaaggggcccgaagagaagggaaggccatatatgcaggtgtgtggtcggttaagcaggagggcaggagacaggggcttggaggaggacaaccaacagggacagttgatgcaaggaaggaaaacaaggagggcttccgactgccaggcctggtcttggtctttcccaaacagtacaaatcaggaaggatcctgcaggaaccaaaggcaggtaggttcctgggatcccaggcaggggccttccaggatgcctggtgccatgtgcttgatgctgtgtaggatacacatgcagtcatagccatcatctcaatcagcccatgggcggggagaagggctagcatccccatccaaagctggactgggggaggtaggtcgggcttcctgtcccttcctcaggttttcatggtctgcagcttctcagaatcacaaaaagaaccaagaaggcctttgtgctcctgttccactagaccaagtagagtcttccccacccacaacttcatttcctttctccatccctccatctccaacctgggtccctggtggcccactgcccccaccccagagatgagtcgccagtgccatgccctgcaggaggatatgcaaacccgcagcaagcagctggaggaagaagtcaaaggcttcgggggcagctaggtaggtttccccaccctccaagccccttctctccaagagttgcagcaagggccagcatgaaggggtagacttcaaagtctctgctccagaaagctgccgtctgggctcttggatcactttccccactttcgctgaccctccaccactgaggactgcagcagagggttcgggataccaaaaatctctgctgtaagtaaagaagaggctccaggcgcggtggctcaggcctgtaatcccagcactttgggaggccaaggcgggcggatcacctgaggtcaggagtccaggaacagcctggccaaatggcaaaaccccgtctctactaaaaatataaaaattagccggatgtggtggcgcacacctgtaatcccagctactcgggaggctgaagcaggagaatcgcttgaacccaggaggcagaggttgcagtgagccgagatcacgccattgcactccagcctgggcaacagagcaagactctgtctcaaaaaaataaataaaaatanaaaagaagatgtaggcctcacaccccatttcctcctctcaagtccagccctaactccccaccactgccatgtctcttgtgagcaaaacatattcccttttagtttagctgatttctacaatgaaactaaggggaaatgtttgacttatttacttctgtatcttcaagacctagcatctggtagatcctaaataactgttcaccaaataaatgaataaacactcctaataagcaaaaatatttttaaaaaccaggaagcctttgcttctcttgtctcttgcttacaaaataatgttgaaatatctcagcatgacacatgagctctttcacaattttggtctcaaagttttcataccttaaaaatgccttcaaccgggtgcggtggctcacccctgtaatcccagcactttgggaggccaaggcaagagaattgcttgaggccaggagtttgagaccagcctggccagtatggtgaaatgccatctctactaaaattacaaaaattagctgagcatggtggcgtgtgcctgtaatctcagctacttgggaggctgagtcaggagaatcacttgaacccaggaggcggaggctgcagtgagctgagatcgcaccactgcactccagcctcggcaacagagtaagattccaactaaaaaaaaaaaaaaagatgaagacaccaaggctcagaaagagacatgcatgtggtcacttacgtagtaatccgactttggagcgttctatctcaagcccgccactctctgctatatacctcagtggagcttcagcttttacagggactgcgggaaatttggtgatgctgggggagtctggaacgagcccatttgaggtctcctttccagatacctttggagagactggtcaaggatagagtgtcaccatcctgctctctttcatcctgcctgcccccagaggcatgccaaagggaggctgcagctgcccgggaagaggctgaacaagctctcggagagcgggaccaggccctggctcagcttcgggcccacatggcagacatggaggcgaagtatgaggaaatcttacacgtaagcaccaccccgtggatcccagccatcccagtacccaggactcccccatgcccacaaaccccagctcgtatgatgactgacaacccagggttaaggagaaggagcgtctccaagggagccctgctctatcctgagggcagacagaggggatacgaccatgtctactgggcaaggaaagcttatgaaccaacctggggcagcactcactccttccctctctctctttctggggtctgaaatattgatgtctgcaggacagtctggacaggctcttggccaagctgagagccatcaagcagcagtgggatggggcagcactgagacttcacgccaggcaccaggatcagcaacgccagtttggactcactccccctggatctttgaagcccacagcccctagtctctagtgttctctgaagccncancaataaagtgtcttgatgtagaactcaatagagctgtgggct

SEQ ID NO: 9304 - DNA, 1580 bp, Homo sapiens
gagaaatggatcttatttttatttttatttttatttagttttcttctttttttgtttttgttgttgtctatttttaggagtggctgtcatacagacatctcagttctgggttgaggcattctccctgagattcagtgattgataggaaataaatttgaccaggtctcaacctctctcctgcaggagccgcatcccaccccttgagcctgaggcccttttggtcccttcacaccactgccccttacccccaccaacacaaacacaggcagtcagatttatggcgaatggccatttctataacaaatgcaacggtgaccaagcaccaccctcccgcaatgctaaggcacccacagagggcaggcatagctggtctccaaatttttgcattacactcaagggtcctggagtcatatctagaaaaggtccagatggcttcaatcctagccagacccacagccacaccttcatccttgggacacagctctctaaaactcccatatgacatcctctggagcctcagactccttcagggacctgtctgaggcctccaaccacaccctctgctggcaggtgggcctgcaggaagggagggagcacctgggccagcctgtgatcggtggtgtctgagtccctctggtctggcttagagagagcatcctgccttcaccacctcaggctggagagtgaagacacggtagcccctgagtatgtctgtaccaagcaggggtgctctacagtagatccgaggccagagcccagtcctatacagagagaggaggtagaaggtcattccaggtgggacccagaagagttcctttttcttgccccgccctgcactggaatgcccagaaatggggtttatttcacgagtccttctgtccccacctaccacgacctgaagtcccaacctgcataccccacacggcttcaccttgtacctcgcccactctgcccttctttctcactcctccctgccctctgtagctactcacagtcccatctgtttcttcttcctcacctctgcagccccagggggaatccaggcttccaagccccgcagagacctggctgccagcttcaggcagaggggtggctcagcctcaggcagctgctgaagcctctccaggtcattctgtcccccaacaggatacccgttcacttccagaatcacgtctcccacttgcagcccagcccgggcagctgagcctcctggagtcacctggtgttgtgggggcatgcagaacaggggacaccgggggaaagtttgctggctttaggctctgggagggaagcagaggaagaccgatcaggcagcaaaggatcgaagggattcaagatccatggggcatcagtcacctgggagatgaagagacgaggcccactggccacacaactgagtcggaagccatagctgccaccaggcccagggtacaggaagcactgtcgggagccaagaaggacagaatgcacgcttgtgtcttccagtgaagggtcctctgtctcaaccactgaggctgaactgctgccccggggcgaggcgggagcctctgtgttctccaagaaaaggagtggggacaggc

SEQ ID NO: 9305 - DNA, 1407 bp, Homo sapiens
ggcctccttcttgtcaagaacaactgttctccagttttcaagaaggctctgttgaagtggaaacataagcctccattaaagtataagggtttgcgaggaggtcaagggagtcattactttgtcttttacaacaaggatgtatttatatattctgagttaaaaaaaatgcttttaaagaaggtgtgagcaaagataaaaattatttcttacagctaaagaaaagtagtctcttcatcgttatccatgagggaataactcattgacacttataaaagagcgtcctagcccaagatatcatgtggtgggaaatttgattggaagaatctcttccactaacttgtgcatgagaatatttgttccagctccaaagccttagaagctgttagagaaaggtgggagggtatttggctggccttgggaaatggtaacctaacactggaagccccttgcttttgttctccttattgtacataagaagatgagattttatttccagatttcaaaacacggaccaacttgcaataagaaataaacccccgccaaggtgatgaattatgttgctttttaatttagaaactggccctccgatcagaaagagtaaggatgactttaaataaccagattgatttgcaggttggggcaaagtagagggatctggtggatctcagagactctttcttggctgcctagaacctcatattgaggctccttcagaggctgcttgtgtgagcctctgactaaatccttaaaataactgctgttggaagtcctgtaagtttcaaaatttgttactggagcaaggaaagggtgtgttgggtgtctcactcggcttgaagtaaggacctgaaagcttagcagccaataaaaagagaattaggggaagatgaatattaattttaggaaatacaaacctcagttttctcatccaagcccttcctttcctcctcctcccatttagaattgaagaattgcaatggctttgacttaaaaggataagaaagagtagtgattttcttaaatcggaggagacaaacatggaatttttataaaatgtaatatttgctggtatttaagtatactttggtggtatcttggctggcgttcagagactgttgaaatcatcttgattgtgaaaagtcgctaaatggagctgttaaattgtgcttcgcaaattacatttagctgcaaagtattggttcagtctaggcctcctgaatgataacacctattatatagatgttctctgtccacatcccacctgaggaaaaaaaaatcacatcaggtttgaagttcagttgaggcaaattttatattagtaatatcgttcattattgagagagatctcggctgctgacctgcgtatgaagcacttgccccatggaagttgtggcaagccaagtgccagaa

SEQ ID NO: 9306 - DNA, 1407 bp, Homo sapiens; identical to SEQ ID NO: 9305

SEQ ID NO: 9307 - DNA, 540 bp, Homo sapiens
agcctcccaaagtgctgggattataggcatgagtcaccatgcctggcctgaggtttttatcttttttttccctgtagtttggcattaaatgtcataatgactgtggtgttaataaacatcaggaagtgtgcttggcagtttgcaaactggaccttatcttacctgttcaggtgtgtgagatcttctcagagatggaacaagttcctcaagtttatgatctcaaaacccacaatgtctgttcctcaatgcaggtctcttaacacctgtctgttacattatgttggtcatccaaggatgcattaagcagaaaagaaacacctcacctaggtgttactaaattccattatcctcctgtcagacgtccatggtgggagagactttggtccccaccaacctgggtttctgcagggtttcactacctgcctttttatagagtcttgtataagacaaatggcattttaagctgtttttctttttgcaggtttggaaatcttatttaaatcaatgtaatgagacactttgaacaaaatgtaatcattc

SEQ ID NO: 9308 - DNA, 540 bp, Homo sapiens; identical to SEQ ID NO: 9307

SEQ ID NO: 9309 - DNA, 156 bp, Homo sapiens
ttttttttttttttttttgagacggagtctcgctctgtcgcccaggccggactgcggactgcagtggcgcaatctcggctcactgcaagctccgcttcccgggttcacgccattctcctgcctcagcctcccgagtagctgggactacaggcgccc

SEQ ID NO: 9310 - DNA, 156 bp, Homo sapiens; identical to SEQ ID NO: 9309

SEQ ID NO: 9311 - DNA, 528 bp, Homo sapiens
gcccagggattaagtgttgaaatgacattaggtaacaggtttagagacagtaggaaaggtgtaataatagaagattggagacagatggagaacatttctgggatctagatttcagtactgttacagtaatggttgatgacagattccaaattatagataacatcaaaatagaaaataggtaatagttatgagaataaggatgttaaggaagtgtgaagctaaactgataagtgacagtgacacagtaattaacatttatgaagccaggttttttggcaagcctgttatatatgttatcttattaggtcatcataataaatcacaagtagatacgattacctgttttgcagatagagaaactgagttggggtagaggtgaggtgacgacacagagatagtggttattgggaactacagttgaagaaggctagaaatactgattaactttagtctgtattttaaaaacataaatctaaatataagtgttataaataaagagaataaacactaaaaaaaaaaagaagtaaa

SEQ ID NO: 9312 - DNA, 528 bp, Homo sapiens; identical to SEQ ID NO: 9311

SEQ ID NO: 9313 - DNA, 352 bp, Homo sapiens
ttgaaccctggaggtggaagttgcagtgagttgagattgcaacactgcactcaagcctgggcagcagagtgggtatggaactgttttagtttgctagggctgctataacaaagtaccatagactgggtagcttaaacaataggcatttatttctccttgttcttgagtttggaaatctccaagatgaaggttccagtagagtcagttcctgttgaaagctctcttcctggtttacaagcccaacttcctgccatgtcctcatatggcagagagagagaggagagagagagaactctggtttcccttcatctttttataaggacatcaatcccatcagattaggacccagccc

SEQ ID NO: 9314 - DNA, 231 bp, Homo sapiens
ccgggcgcggtggctcatgcctgtaatcccagcactttgggatgccaaggcgggcggatcacgaggtcaggagatcgagaccatcctggctaacatagtgaaaccccgtctctactaaaaatacaaaaattagccaggtgtggtggcaggtgcctgtagtcccagctactggggaggctgaggcaggagaatggcgtgaacctgggaggcagagcttgcagtgagccaaga

SEQ ID NO: 9315 - DNA, 176 bp, Homo sapiens
tcccagcactttgggaggccaaggtgggcagatcacgagatcaggagattgagaccatcctggctaacatggtgaaaccccgtctctactaaaaaatataaaaaattagccaggcgtggtggcgggcgcctgtagtcccagctactcgggaggctgaggtgggagaatggcgtgaa

SEQ ID NO: 9316 - DNA, 352 bp, Homo sapiens; identical to SEQ ID NO: 9313

SEQ ID NO: 9317 - DNA, 466 bp, Homo sapiens
ctaagagactaaagacaggggcgtggaggggcggagctgggcggggggcgcctcatgaaggccgggctgggtgtcccaaaccagggccacggaagggcagcgggaaggaggcgtgcgggtcgtaggggctgaggggcaggtgttgggggcggaatgggagggacccgggacctcgcatgcatgaagctgcaggcccggggcgccctagtgtttgagaggacgcgcgatgcatacctgaacctgggtgcgagccgcacgtgccgccatctgcttcagggtgctgggctttgaccaggtggctggcagcgccagttgaaagcggttgagcaggcagggcgcagtcgtcacgcctgtaatcccagcactttgggagaccaaggcgggccgatcacggggtcaggagatggagaccatcctgctaacagggtgaaaccgcgtctctactaaacatacaaaaaaaaaaaaa

SEQ ID NO: 9318 - DNA, 128 bp, Homo sapiens
aattagccgggtgcggtggcgggcgcctgtagtcccagctactccggaggctgaggcaggagaatggcgtgaacccaggagatggagcttgcagtgagccgagatcgcgccaccgcactctagcctgg

SEQ ID NO: 9319 - DNA, 373 bp, Homo sapiens
aaagagggaagatttatgtacatctattttttaaaatactaccagagggatatataagaaattggtaacaggctgggcatggtggctcacgcctgtaatcccaacactgggaggccaaagtggacaaattgctagagcccaggagttcaagactagtgtgggcaacacggcaaagcactgtctctagaaaaaatacaaaaaattagccaggtgtggtggtgcacacctctagtcccagctactcagagggctgaggtgggaggatcacctgttcccaggaggttgagactgcagtaagccatgattgtgccactgcattccagcctgggcaacagagtgagactatatctggaaaaaaaaaaaaaaaaaggcc

SEQ ID NO: 9320 - DNA, 1611 bp, Homo sapiens
attctgagtcaatctattttattgaccaaaagattcctgtggaaacaggaggtgagtgccctaagccctcactccttagcactctgcgtgctgatgtagtcctggagaagcgcctgcgcctccatccgccggctcatcttggtggccttgccctgaaaacggcctttcttccctgctcctttgccttccaggacctcagccaccctggggaacagaggtatagtcagggagactttgagggaaaagtcacaaaaaaaaacaagggcagctctgagtctttttccagggactgggagagggataagaagagtagatgacttctaggaatctttcttgaaaacacttgcacataggctgggcatggtggctcacacctgtaatcccagcactttgggaggccaaagtgggtggatcacctgaggtcaggacttcaagaccagcctgaccaataggatgaaaccccgtctctactaaaaataaaaaaatcagccgggcatggtggtatgcgccataatcccagctactcaggaagctgagacaggagaattgcttgaacccgggaggcagaggttgcagtgagccgagatggtgccattgcactccagcctgggcaacaagagtgaaactttgtctcaaaaaaacacttgcacatatgcacaaagatatatgtaccatcatcacataagagtgaataactggaaacaacatcagtgtctatgaattgggctagataaattatgttaatctccagagagcagggtgagcacctgtaatcccagcactttgggagggcaaggcaggtggatcacttgaggtcaggagttcgagaccagcctggccaacatggtgaaaccctatctgtactaaaaatacaaaaaattggacgggtatggttatgtgcacctgtaatcccagctacttgagtggctgaggcaggaaaattgcttaaacctgggaggtggtggctgcagtgagctgagtagcctgggctctccaggctgggcaacagactaagactccatctcaaaaaacaaaaacaaacacatttcataaaaacaaaaacaaaaacatacatgtgagatgtggagccaaaagaccttcaactgtcaaactggaaatgacagtagtaataattatctctgctcagcccacctcacatgcccatgatgtgaattaaatgagatcgcagatgtgatggtcctttgactcagtaaaggaatgtatttgtaggatacaggctctactacatgtgcaagagagtccacaaagaattacctgggccccagggtctccacagacgcaggtggccctgccagtaagaagagtccaccacctttctcatcgcccacagttaagaacaggagggtctcctaggaggtaagacaaggagataagccctgatactgaaggatgtagagtcaaccccccaaatcctgcactctcttcaatcttaagaatagattatttccccctaaaccaccaagtgacgctcctgatgaatgatgatacagcccctccacactggcccacgagggccaagaaactttttgagagcaactatgggaacttaggtgaaacattaagaaggcagcagaagactgctgatcctgg

SEQ ID NO: 9321 - DNA, 208 bp, Homo sapiens
gggctgggtgcggaggctcatgcctgtaatcccagcactttgggaggctgaggcaggcggatcacctgaggtcaggagttcgagaccagcctggccaacatggtgaaaccccatctctactaaaaatacaaaatattagctgggtgggatggcaggcgcctgtaatcccagctactcgggaggctgaggcaggagaatcacttgaacc

SEQ ID NO: 9322 - DNA, 360 bp, Homo sapiens
agctgtggtccctgcaaaggccaagagcactctgaggaaacatcagtacctggggaggcagtgtgtggtacccagcggagtgtgtgatgggtgatgggcatgggcggaacactcacacagaagtggcagcgtgccacaggggtggctgcaggggtggccatgcctggggaaacgcgactgcctggtttgtcagtgggccctgtaggacagcagtgaggcacctcccaggcagctctgcaagtggcactccaaaggagagctggagaatagaggagggaaaaatgggaattccttgagtcataattgggtagagctttagaaggggttgaaggtcataagtgggaaacatgagcctagaaa

SEQ ID NO: 9323 - DNA, 245 bp, Homo sapiens
aataagttagccaagtgtggtggtctacctgtaatcttagctacttgggaggctgaggttggaggattgcttgagcacagaagtttgaggctgcagtgagctatgattgtgccattgtactccaatctgggtgacagagtgagaccctgactcttaaaaaaaaaaattctgttgtttataagccacccagtttatgacttttggtatagcagcttgaatgaactaagtaggtatgttttctaagt

SEQ ID NO: 9324 - DNA, 246 bp, Homo sapiens
aataagttagccaagtgtggtggtctacctgtaatcttagctacttgggaggctgaggttggaggattgcttgagcacagaagtttgaggctgcagtgagctatgattgtgccattgtactccaatctgggtgacagagtgagaccctgactcttaaaaaaaaaaaattctgttgtttataagccacccagtttatgacttttggtatagcagcttgaatgaactaagtaggtatgttttctaagt

SEQ ID NO: 9325 - DNA, 576 bp, Homo sapiens
tttagtgttatgatgtcttttaaaccacagtttatgcctctatcccttttttttccttagtttttatgttgaagaacccagggagagttaaccaaagtttgaattttactgattgtacactcatgttgcatctttcttcattccttgtatattttgcaaattggttactgaactcagagacttggtcagactctggttcggtctctttagcaatactgtaggcagtgttgtgttctttcatggggaggcagaagtctggttttctcttttttttaaatcatgtccgcagttgttgggctcagtgcccagatccattaatttatcaatggtttaaaaatagtgacattctaattgtgtgggtttttttaaaattttttgttggaatacttttattaagagatgcttctgcttacctgctgttcagttatccagtggcacagttatataggaaaggtaggatatatacttgattctttgcctttatttattcttttttcaaaatagtgacttagttccctattattctctaagagaaccagctatttaatttaatttaattaattaatttttttgaga

SEQ ID NO: 9326 - DNA, 576 bp, Homo sapiens; identical to SEQ ID NO: 9325

SEQ ID NO: 9327 - DNA, 19696 bp, Homo sapiens
gcacaaacctttcaagaaaagaaaagaaagatgtaccagtaggtattgatagtcataagttctacttgtatttgtttcctttttaactgttaagttagttttatgcttacaattagtgacactatagcactagtatattttacaattactatattgatattttagtatattaattataatggtgaatagattatttaaatcttgaaaaaagtaacttagctatggtaaacttgaatgatggctttttatcgtttacattatttagaccaatttgttatgtagtacgttataaaacatcttctttatacagataaatgcttagtattcttgtgattattcacaaaataactattattattctcattgaggataattgattcttgatagtttctcttacagtctcatgaagttacggaaagaaggacatagataaagaaagctgtagcttctaccccaggacaaatttctaactatagatcaggggtccctaacccctgggccgcagaccagtaatggtcagtggcctgttaggaaccaggccacacagcaggaggtgagcagtgggcaagtgagcattaccgcctgagctccaccttctgtcaggtcagctgcagcattagattctcgtagtgcaaaccctgttgtgaagtgtgcatgcaagggatctaggttgcacgctgcttacacgaatgtaactaatgcctgattatctgaggtggaacagtttcatccccaaaacatccctccccttcaacccccatctgtggaaaaattgtcttccacgaaaccagtccctgatgccgaaaaggttggggaaccactgttagagattacataagtagtgacattgctgctcttacttaccacttcaagaaaggtgaaattagtcttagcagctactcctatcacaaatgttagctaaaacatcagaactattaaaacataaatgttattcatcagggatcataagagatgaaacattttaaacatttgtaaagaattgacttacaatcactggaagacattcaactatcatcatagaatttaaaatagtagaaaatccttaaaatccccaatatctcaacagatgtcaacaagatgaatagggttttttggaagtttttgtatatactaatatttgttatttttatagaaatttctagtatattcggtatgtttgtctagtacattcagtatgctatggtttctgcagtaagcacatcactagagtcttttgtgctatatctgtttaactttttaaaaatatttcactatacaatatgacatattattcttaaaattcacataaagtatttggtgttattcattgtaatttctgaaatttaggaatgggttttatgaagttctgtccaactgagcagtgcctttttgctttcaacaatttaaattttaatagacctgctaacataatagtacaaaaatgcagctgagtgactgtaacacagtataaaataaatagcctttgagagatgtaaactttttttttaacctttccaatggtactaagtaaacattttttatgtatgcatttttagttcactttttctgttaacttacttcattaagataaggaactgtttcagtaattctgaaataaatatgtccatggctctatcataggataaacagtatcagtgatatattgaagcatgcttacagtttatgctgtaattcttgaaattatttacagccgtcacatctgtaatcccagtgctttcagtggaaaaggcaaggggatcacttgagagcagaagttcaagaccagcctgggcaacatagcaaaaccctgtctctacaaaaaataaaaatttagccagacatggtggcatgcacccataatcctagctgctcaggaggctgagacaggagaatcacatgagcccaggaggttgaggttaaagtgagctatgcttgcctgccactgcactccagcctgggtgacagagcaagaccatatctctaaaaaaaattaaatgataataaataataaatttattttattttatttatttatttattcattttgagatggagtctcgctctgtcgcccaggccagagtgcagtggcgcaattttggctcactgcaacctccaccttctgggttcaagtgattctcctgcctcagcctcctgagtagctgggattacaggtgcacgccaccacgcctggctactttttgtatttttagtacagacggagtttcaccatgttggtcaggctggtctcgaatccttgacctcatgatctgcctacctcagcctcccaaagtgctgggattacaggcgtgagccactgcgcccagccttatttattttaaataatatttacaaccagttctattagtgcttaggttaaatctgagagttataacactcagagctccctaatttaaaatgatgttttgctaggccgggcacagtggctcacacctataatccgtacactttgggaggccaagacaggtggatcatttaaggccaggagttcaaaaccaacctcgccaacatggtaaaaccccatctctactacaaatacagaaacagccgggtgtggtggcaggcgcctgtaatctcagctactcaggaggctgaggcacgagaatcacttgaacctgggaggcagaggttgcagtgacccgatatcgtgcccctgcactccagcctgggtaacagagcaagactgtctcaaaaaaaataaaaaaacaacaacaaaaaaagatgttttgctaaaatagatgacatcagataatttaataacatcaatataagaaaaaatatatattatttgcataatggaataaaaaggtatcagaaattattggcaataataagatgtgcgcatcctcaaaaatatatctacaaagtatgtcattttaatttcagaaatgttatatttttatgttgtatatatgaaatcaattaacagtagcttttttattagttttcatctcattgtttaagtgattctgatgtatggcagctctagggaaaaattagaatgtcattccttaaaatgatgttactgagattaaccttgaaagaaatgtagactgtcacaaagttcatgtttaaagtatacccagggggttccctctcaggggacagttcgtatactcaagaatgtggccacttggagaaatatctggcattcttcagcatagtgtgggtgagcaaatgtgttacatttcttctccttataattgcctgtatactctaaccaatgattaatatatttgaattcatcaaaatttggaacttcacttagcaaaactcattgtaaacatggtgaagattatctacacaaggagaaactatttgttgtatatatataacagataaaatactcaaacctagaatatatttttaaaagctccaacaaatagatatgaaaaaagataactcagttaaaaaaaatgggaaaagaattcacaaaagaggaaatacagatagcaaataaacactgggttaaaaagattcttaatcttcctagcagtcagaggcatgcaaattaatgaggagcacaggagaaaaggttttttactaatcagcttggtgatattgctgtgagactagaaagaaccaggagctctcatacattgctggtgggtgtgatgtgatatgtacactctgaaaagcagtttgacagtcaatatgcactaaaatgtaaaagatagagaccctgtgtatcagtagtttctcagtatacccatactgcggtatacttctcacagtataccaataaaggcatccactcatacactgtgtaagtaggtatatacaggaaagtttatttcagcatctgtgttctagtaaaatattgacaataatctaaataccgaataatgtttaaggatagctaaataaagtatatttatgccatgctgcagttaaaacaaatgaactaagtctacatgaccgatatggattactgtccaattttaaggcaaagatcctgcagatagtgtataactatttgtgttttaaattcctaacacacacacaaacactattttctatgggaacatgtatttacatatataccaaaaatgtctggaaagccatatgattacataagtatatctaattcactagagaaagatttggaaggttttacaccaaactagtttttctggggcaagtactagaaatagtgcattgtgaaagaattatggggaacttcagccttaactgtaatgttttgttttacaaagaatgtattcatgtattttatttgaataaatgtgtttgaaatacagtattattatatcaaacagcagcaaaaaaagtgtaatcatacatgtgttctttttctagaagcctattagtaatggtcttcctccaacacctaaagtgcatgtaagtactaaatatggagtaggctaagtttcaagctaagtcacttgtgtgtgttatctttgcttaggtttttttgtctgtttgaaagaactttcattattattgaaaaaaaatctataagattgctaatttaattacaggcatgtgtcaccatgccccgctaatttttgtatttttaatagagacagagtttcaccatgttggccaggctggtctcgaattcctggcctcaagtgatctgcccaccttggcttcccaaagtgctgtgattataggcataaactaccatgcctgccctttttctttttttttttttttgagacggagtctcactctgttgcccaggctagagtgcagtggcataatctcagctcattgcaagctccacctcccaggttcatgccattctcctgcctcagcctctcgagtagctgggactataggtgcctgccaccatgcctggctaattttttgtgtgtttttatagagacgggttttaccatattggccaggctggtcttgaacttctgacctcaggtgatgtgtgcacctcggcctcccaaagtgctgggatcacaagtgtgagccaccacgccttgccgttttttacctttaaattctactttttaattagcacagagtatactttataaactgtatgttacaaaatatatatactttatatttgtaatttatataatacttaaattataaatattttaaaataattttaatattgatttatacagtatactttatattatatagcatatatattacagcagagaaatacataaaatagggcagattttcccacttgactgtaagataaaacacttacctcaggcttgcagtttgacagggaaaagctatctgtggaatgccaggtagactccagctatacaaattagcttaagattgggaactggcttgattgttttgttcttcgttttgtcatttaaatttctaggggttagcagtaccctaacacagaaatttccgtagctgtcttaaaaggtcgttattagggttagttaaatgatagtttctgccctacatcctaaagacatgtttctattggtctgctactacttgatggtattgccaagctaaattgttcttttttggtaccagagtctttaaagatatattgtttggtagatttctgtcattaaaagggaaattttaaggtccatgttttaattatgttaatatttttaatccattattgtcaactagtgatgttttcgttcagtatgttacctccgtgtttgtgaggaagacattccttctataaaatgatgcacaaatgctgttcttttaatttaggccaacatggcaaatactgaaattttctctgaccaaaaatatttttgtactgtttttccctcaagttgtcagtagtaaaagtgattacctgagtcaacattcttgtaccttgagtatttaaccagaaggataatttcagagttaatattttgctctttgataatataaagttcaaatgggtgatatatttcattatgatatatttattatctgaaaagtttgtaaatggacttgataagtaatattaacatcaaagagttaagctttttaatgaatctttccagggaaataatcagattgcttaattgaaaaaaataaaaataaaagtctgtgtttggaggttgaagcacatatatgaatttcaaatcagccatacctgtttcagtttgtaatgtgaaattcaatttttaataccatttttaggctcataaaaccaaacaagaaaaatgtcttcctttgtagagattatgatttcctttttaccagagactattgtattgctcttgacatggagcatgtaagatacattattatgcagaattggttcctattattgctttgtttagttgaaaagatagaaaaaataagaccttttttttttctcttttttccaagtaaaattattgtggcacctggaaacttgtggtaccactgttaggcaaatgactatgatgatttcttacacttacttctgtaaatttgaagatgatcataatttcagtatactatctatagactctcacattaaaatagataatagttacattttatatattaaagactgttacttgtcactgtttcatattggttattctttgtttccctagatgggtgcatgtttttcaaaagtttttaatgggtgtcccttgaaaattcactgtgcatcatcatggataaacccagatacaagaggtagtattgtgtgtttttatctgttatcttcctaattttttaaaactggggccatgaaagcatttgtgattttgtttattttctgagtatctttctggggaaaaaaagttttgttataattttttttttattttaaggtaaatatgtttctttgtgctgttatcagtgtttgaggtgacacataacattaaaatttcactgtatagttaccatatcagtatagtgaagccatgtattctgagccaccctagtttcctccagaaatgtttctgctgctgctgcacagtagtctggtatctttttttattttttatttatagggaaaatgttttgctctgccacccaggctagagtacagtggcatgatcatggctcactataacctcaaacttctggccttatgcaatccccctgcctcagccacccgagtagctaggactggaggcacatgccaccattcctagctgtttttgttttttaattttttgtagagatgggagctgtctgtgttccccaggctggtctcgaagtcctgggctcaagcagttgtcgcctcagcctcccaaagtgctgagattacagacaggagccactggccagtagcttcatttttttcaaaacagccattatggaaggaatttagctaccaaggatccggggtttagtgaccactttagaggatctctgaccttaaaaggggccataatcacaacagttgtccttaggcaaccactaagaactgtctgtgtcctctcactgtatatctgattcttaatagctgtctatgtaagatacacatagaacatttatacgtgaacatttttatatacatacacatacactcattaaatatgctgagtacttttatgtcataggcaaggaaattggcactcagagaggttcattgtttatagccaattggtgctagaaagggtcagtttaaatccaatactgtctgaccacaaatcttatgccattaatctcccagtactaatcttaaattctgggcactttaggaatgctcttagcattctatactgttctcagcgtacttcagtttagcctagttagtctagaaaagttcttgacctgtattatcttaaaaacagatcgggcacttttcttcaagttgcctgcttggatctcttggaagtgttctttcctttctttcctgttctaaagtctttttaataaatttccactcctgctcctgctctgggaaacaaacaaacaaacaaaaaaatggaaaggacgatggccatgcttctcatatcttttagaagatactgagtaccctagcaggtatccaagttttagttaactttttaatagactgtggtcagattctggggttttttaaattagagtacttatagtatagctctgaaaaaaaattctgtagaaataattagaatctgtatcagccactctcgattttatattctgtatgtcagttgcacatgatcctgtctttagggggttttagaaaaaggagctgcagatcctttgccagttcttagcattctctgatgagtgaagaatctactatgccactcttcagaacctcccttacataaaaattctcttcactgctttgaggctaatgtttacatataattcagtttatgggtctaaagtgtctaacctctttgtattcactgcttataaatcatagtaattcttgttttatatgttaatacttatttacggaagtttagattatagaaatcctatttaaaaatattttatttaccaaaatcagtcagtgaattacttttatttcagatcagtacttgatatttggtgccgaagaagggatttataccctcaatcttaatgaacttcatgaaacatcaatggaacaggtatgttattttgtatattctttttttttttaatttttaagttaccataagtacacattagaccagaaataaggttcagtttcatgacttgctgcctcttttattcttttttgttttgttttgttttgttttttgagaccaagtctcactcttgttgcccaggctgcagtgcagtggtgtgatctcggctcactgcaaccagtttcaagcaattctcatgcctcagcctcccaagtagctgggagtagaggcacgcaccaccacgcccagccaatttttgtgtttttagtagagacagggtttcaccatgttggccaggctggtcttgaactcctgacctcaggtgatctgcccgcctcggcctcccagtgtgctgggattatagacatgagccaccatgcctggctaatttttgtgtttttagtagagatagggtttcaccatgttgcccatgctggtctggaactcctggcctcaagtgctgggattatagatatgagccaccccaccccagcgtcttttattcttaaaatcctcatgacgccgagcatggtggctcacgcctgtaatcccagcactttgtgaggccaaggcaggcagatcacctgaggtcaggagttcgagaccagcctggccaacatggtgaaaccctgtctctactaaaaaatataaaaattagctgggcatggtggcctgtgcctataatcccaactgcttcgaaggctgagacaggagagtcacttgaacccgggaggaggaggttacagtgagccgagattacgccattgcactccagcctgggcaacaaaagtgaaactccacctcaaaaaaaaaaccttctggagcatgttctaattaccagatactgaagacaggttaacaggactagtccatacccttgagaagctcatgatctaatagggaaaacaggtgtataaaccagtaactacagcactcaggattagatgtcatattaggaatgagtataagatattggccacagaggtggatgtcaccagcacctcctgtggggagatgagtagaggcatttgagatggaccttaaattatgatgaatagaagtttgtcacacagacaggataagcatgatggcatagagatgtgaaatagcatggcaagtttgggaacaatgactgggcatttgactggagtacagaatggtaacaatagatggagctgggtaggcaggcagaagccaaacaccagagcttggtgtactatgctgatggaacagacctgtgttttagaaatatctgtttgcagtacggtgagagatgagactagaaaccatggtcaaatggtaaaagagtgttaattcagggcaaaggtagagaacagaggggaaaagatatttttcaaaaacagttttatcgagatataattcacatatcatacagttcacccacttaaagggtacaattcagtggcttttagtacgttcacagcgttgtgcagccattacaccatcagttttaggacatttttatcatctccaaaagaacctccgtaatcattagtggtcattccccatttctctcctcctctcccccagtatggggatgtttttgagtgtcacaatgagtggggggagcttttatcatttagtacccacgagtcaggaacataaaacaacctacaaactgataataatggtgatgctattaatagctaatacttacataaagcttactatgtgtccacgcagtgtttttaaatgcttgacatatattatttagtcttcatgaaatctctcacaggtagacaccattgataatctcacttcacggatgagaaaactaaagcaccgaaaggattagtaacttgccaaagactccatagctattcagtggctggactgcgatatgaacctaggcaagctagctccagattccatgtgcttaactacttcaccatattctctctaccgattgtatagttcctgtagagaaatgctggacctagagaaagatcagagatctagaattgaccgaattgaatgaccgtttcaacatggaggttgaagagaggtctaggttaactttaggttttccacttgagtgactgggtgcctgacagtaacagaaagatggagtatagtatactgaaggatgtgttgatttgaagagaatggtaatgctttcaatttggtcatactgagtttggggtgccttcgggatgtgtgactaattcttttatcaatataaatcgattacaaggccggccgtggtggctcatgcctgtaatcccagcactttgggaggccgaggtgggtggtcacctgaggtcaggagttcgacaccagcctaacaaataaggtgaaaccccgtccctattaaaaatacaaaaattagccaagcatggtcatgtgcagctgtagtcccagctactcaggaggctgagacaggagaatcacttaaacccgggaggcggaggttgcagtgagccgagatcacgccactgcactccagcctgggcaacggagtgagactccatctcaaaacaaaataaaaataaaaataaattgattacaaataaaatggaaagaaaaatatataagtaatgatttattcatgactaaacagtttcatcttcattttttaaatcaaattttctagcaagatcctaaactgtatgatatactgtaaatcttttaatctggaaatggtgtacagtgaaatggctgaaaagtgcctaagaacagggaaagggaggaaaaggatcttgtaattataataattagtaaataattcaaaggtggtcatatttttattgggtataatgagatatccaaaaataatattggtaacaatattaattgtaaggaataaggccagctttatgcataggtggagtaagcatttatcaacctaatttgaagaactcttttgttgttgttgttatttttgagacagggtttcattctgtcacccaggctggagggcagtggcgtgaacacagctcactgcagccttgacctcctgggctcaagtgacccacctcagcgttctcagtagctgggactacagccacatgccacaatgcccagctaattttttgatattttgtagagactgggatttcactttgttgcccaggctggtctcaaacttctgggctccagcagtccttctgccttacccacccagtgctgggattacaggtgtgagtcaccaggcctggccaggactcttgagagaaggcacccatcaaccacacctagccccagtctgcaataacttcccttcttagttgctttagcatttgaattacattactagagtaattttttttgaaacattgcccttcaaaggaaacatttttccctcctagagggagcctataagagtaaagaattagtatatgtggagcctgaatttttcatcttactgtgaaattgatgattaggttgattttctctagactttataggaaacagggtggcgtgagcctactaaataggggaagattctgaaaagtgagaagatgacactaatcagggtcctgatttaaagttttttatctgcttttattatttatagctaacatttattcagtactcagcactcttctaagtgctttacaaggagtatcttgtttaattactattcagctctatgagatacaggtattctgttttacagataagaacactgagacagagattcagtaaattacccaagatcacacaatcattgataaaacagatatatgagtctaggcagaatatagaagctacccttcttaactgttatattcttatttattaaactgatcatttcacctagaacctaactcactaaaggaagaaagcattgaaaatctagtaaagctttagatttgtaaaagttgttaaaaatgaaaattcagggtcaggcgcgatggctcatgcctgtaatccctgcactttgggaggccgaggtgagtggatcatgaggtcaggagatcgagaccatcctggctaacacggtgaaaccccgtctctactaaaaatacaaaaaaaaaattagccgggcgtggtggcgggcgcctgtagtcccagctactcgggaggctgaggcaggagaagggcgtgaacctgggaggcggagcttgcagtgagcggagatcgcgccactgcactccagcctgggcaacacagcgagactccatctcaaaaaaaaaaaaagagagagaaagaaaattcaaaatgaaatccagtactttttaaataaaactatacataaataccttttcattgtccctatgttgaaaatatgaaaggaatttgtgtcttgtcttgctactttatatatgtttatattaaataagcaaacctacttacatttggaagtatataattttatagtaaaccatcgatgtagtatcagatacttttttagtggatatgtgtatgaaaacccagttcaacactgaattaaataaaaatctgtatcttgctactttgataacacgtactgatatgtggtctggaataagtcattgccccttctctacctgattttttcagtatagccaatgaagtcccaattttgttgtgaattttttgtgaaaagcagaaagtaggaaatggatgttgataacttctctatttgaggcacaggtataggcacattttacaaattaaaaaactgtattggcaatgccacattttagttgtttggagaaattggttattttatgtaagtacattttcccagtaaatgaaataaaatttttattaaaatgttactttgtttctcctcccttttattattaccttttctcttttagttattcagtcccattattatggctgtgtttccataaagtaatgtccttagaggccttgatgtgtttcatcattcacccctgggtcctctctattccattctctcatctcaattagttttggagtaacttagttgtaggaattgccagagcaaacccagcaacaaaggttgttaaatcaggatgtctaattatgtacatcagtggctctcaaacttcagtctgcctcagaattacttggaggcctagttaaaccatagattcctgggtcctccttcagaacttcttgcttcagtagatctggggtgaggtccaagaatttacatttctaccatgtgcccaggtgttgttgaagctgctggtccaaggaccatttaaaaaccactgatacgcataacgaaatgtcttaatgagagtatttttttttaaatatatagattgtgttccatgaaattcctttttctttgctctaagttgtgaccactttcaggcttccagagatgcctctcagttcttatggtactaaattttagtaataaatttcatatatatatatatctgctttgtgatttatgagttttcatcatcttctatctcagccttttttttccctccatacctagtgtttctgtatcctgtgttccactacaccatgatgctttttcctgtatcatacaccctagaatgcatattgtgcctagatacgtctattttgggaggagtagagaggagaatcttattcaaccccagaaccaaaataaaggaatagatgttgtttgaaaatgttgttattccctgcatagtttggggttacatagcccttaatcataagggagacttgagctgatcatatcgtgtttaggctaaaatttagcctaatttattttttctctcacataaatatgtatgtatatatatcatcttggtttgaatccttgataaagttaatttatgttaaaaataatttacttttaaagaactgacctgtagataagacagcttacgtgattactgtgtacagatttacattgccattatgtattattctttgtaaactttgtgcctttttttaatcagctattccctcgaaggtgtacatggttgtatgtaatgaacaattgcttgctatcaatatctggtaagtatattagtttttaaataccttacaattgttactatttattattagcttttatgtcatatctgtttttctttataggtaaagcttctcagctttattcccataatttaccagggctttttgattatgcaagacaaatgcaaaagttacctgttgctattccagcacacaaactccctgacagaatactgccaaggtaagggtacatccttagaggcaatatgatattaacagttcattctcataaatatttatgttacagaaagtgaaagagcactcagtttgggttaataaaaatcatgatgaaaaaataataagtaatatacattaacaagtgcttagtgatcacactcttgttctaaaatttttctactttgtactttcaaattatatcagacattttctctctgaattttttattctttttctgcaagtttaaaactagtttttttcttgtactttgccataattttacattgcatttagtgcctttgcttttgacatatgtgttaactttataaaatttttctcaaagtttctatacctagaaaatcaaaatgatttattgaaaagtgtttttgcaacctggcatggtggctcacgcctgtaatcccaatactttgagaggctgaggcaggaaaatggcttgaggctaggagttcaagaccagcctgagcaacatagcaagacctcatctctacaaaaaatattttttaaaaagtagccaggcatggtggctcgagcctgtggttccagctactcaggaggctgaagtgggaggatcagtggagccctggaggttgagactgcagtgagctatgatcatgccactacactccagcctggctaacaaggcaagaccgtgtctcagtgttttgcattagaagataattagtttgaagttgagtggttttgcctttctagtttcagtaatttgttattatgctctgttctttcgttatttaatataatattggacctctttattgactgaaagattttctagctctggtataaattgtattttacaaaaactttataatatgcctattcttttttataatatttgttgtaaagcaactaacataaaaccttaattttcgagtaccttgagaatctgctgttctcaatagagacctttttagcttatttgcttttagctgtgttcgtttcttccagattttactgaatacaccaaatgtgtatgaaatgtcccatgtataaatgagacaaaattgaataagatatagtctcttcctttaaggagtttccatatggtatgattttacctacgctgaatataggtacttattgtaccatattataattcatttttaataaagcataagctttggaattcaagtaaagttgaatttaaatcctggatcattgacttactagatatgggaccttggataaattatacaacctttccccatgtgttcagctctaagggtatttcacctccaggttattatttcaggaattttattatagtcaatctttagtttttttaatagtaacagccacaaatatgtccttcccactttcttcagtttcattatctagtaattactgtaaaatcttttaattctctcacttattggcaggaaacctaaaaacccttttagcatcataatattttatatatgtgcattcataccatttcttctgccatacagtgagcacaacttaaacctctactgagtgtcttattcttaatctgatgataaagagcctcatggttctcattctgaagataggtactcattgtaccatattgtaatccatttttagtaaagcataagctttggaattcaagtacagttgtatcatttacttactaggtatgggaccttgggtaaattatacagcctctccacgtatattcagctgtaactggaacctatatactcatctggcagagttgttttgaaaatgataaatcgtgtatgtaaagtacctaccacagcacctagtaagctctcaagaaatagaccttttgtcatcattattgggcatgataaattgaactctgccttgtagtgtactctaaaatatcctatgttaaatacattcagacagttaatttagaattccagttaattgggtgctggtaaaataagttgtattgtgtttcataaaatcatgactaaaattaaggcaagtctatagatcactatagaacattaactaaatttttgaaacatttcagtgtactgcccacaactcttattttgaaaagtttttgaaatccttaattcacagccatacttaatagttgatttctgtttgtgtagtagtcatccctatggtctttcagaacttggcagttaatcctcctgggttttgactagttcagtgttttaacccctaagttagctttgggagctaggacacaagttcacaagtgtggacaggaacattaaactttctgccagccgaaatctgtcaggagcttggttcagattttttttaactctaaaaagcgctttggttcaaagcagattcgttaagagtgtggggagtttttgttttgttttattttaagctgcattaaactccaatgtatatgaaaggggcatttttataattgtaagttataatgtaaaacttttcctaatgtaaagttagtcaagggtacaatgaggtgttttaaccagaaaatcgtaatcagaatattctagattgccattgtagtcgttcagtgtttcaacatctgaataaattctgtgtcattgtttagctgtcacagtgtgaaaaacgttttgattcacaaagacaagtacttaaaaagaggtaacagtttttgacagcttaccttgcacactctgaataatgttcatttaaattgatacagcctgtagttccagctacctgggaggctgaggcaggagaattgcctgaacccaagaggcagaggttgcggtgacccaagattgagccactgcactccatcctgggcaacagagtgagaccctgtctccaaaaaaaaaaaaaaaaaaaaagacctgagcaaaaatctaagcttcagatttctatgctgtaacctacctctttattggagggactgaatgacacagatgtctaaaatgcatggcacatagtaaggactcagtaaatgaagctaaaattatagcttttcataaataggtcaatatataaaatgtattaagggttaaaattacagtactacgatattatattttttaatattatatttatgcttatcattcagttgccaattgtgtggttacaagaacatccatcaggaaaattgttctgagcttgtttggaattgcactgaacatcacacatgtgctgtacaattttatataaaattgtacaactctaaaaaaaaaaaaagacttgtacagagcactggcatctatctaatctttggcaaatttacacatttaagtttaagtggctcatgcctgtaatcccagcacttaaggaggctgcacttttggcagattacttgagcctcaggaatttgagaccagcctgggcaacatggtgaaatctgtctctttcttctaaaaattatttttttaaaaaaaagagtttagatgtttgtagaagtcaggcacggtggatcaattgaggtcaggagttcgagaccaacctggccaacatgtcgaaaccccgtctctactaaaagtacaaaaattagttgggtgtggtggctgatgcctgtaatcacagctatttgagaagctgaggcaggagaatcacttgaacctgggaggcagaggttgcagtgaactgaggtcaagccactgcactccagcctgggcgacagagcgagactccgtctcaaaaaaaaaaaaaaaaaaaaaaatagaaaaaatctttagccgggcacagtggctcacacctgtaatcccagcactttgggagtccgaggcggacggatcacctgagctcaggagtccgagaccagcttgggcaaagtggcacaaccccgtctctactaaaaatacaaaaattagctgagcatgatggcaggcacctgtagtcccagctatttggcattctgagacaggaggattgcttgaacctgggaggcggaggttgcagtgagccaagatcacacccttgcactccagcctgggcgacagagcgagaccttgtccaaaaaataaaataaaatttaataataaaaagtatgtacagaaatgggtttaatttgaggtttttacaatttgatgcaccaacaacctttattatattacattttaaaagacatttgagtgtatgtgtagtttttaaattgtagtttttaaaaaaattcagaattgatttttatctattaaattcgagtcagatgtttgcaaaacacctatagcacctttgcagaacatctgtatcccacttttcctgagtagagaaacaaagatttctaaaaaagaaattcttcacaaatttttataataagacagctttttacagtacatgtaaatgtattacatgtactaaaaatagctctctccagtttttggcttttcattttctcaatgatatcttttggtaaaccaaagttactaattcagtaattgactgccacctgtagtttgaggtgctaaggttgaatcagtgggggcaaaaaagccaattaaaatgtaacagcattttcctgtatgatttgttgtttttgtatttcttaaatcccaaggtcatatatttctatagacttctatagtttgttttcatatttaaacccttaacccatttggaactgattgggggccatgagaaggggatccaatttatttaatttttttttttttttttttggagaccgagttttgctcttctgttgttgcccaggctggagtgcaatggtgtgctctcggctcaccacatcctccacctcctgggttcaagcgattctcctgcctcagcctcctgagtagctgggattacaggcatacaccaccatgcctggctaatttttttgtatttttagtagagacggggttttattatgttggccaggctggtctcgaagtcttgaccttgtgatccgcccacctcggcctcccaaagtgctgggattacaggcaacgtgccatggcacccggcctttttattctaattttaatagatgagctagtatgtcagcaccagttttgaactcatcctttgtgcactgatctataacagtagctttttcatatactaagtttgcctacatatattacgtactcacttttatttacatttaggaaattttctgtatcagcaaaaatccctgaaaccaaatggtgccagaagtgttg

SEQ ID NO: 9328 - DNA, 1190 bp, Homo sapiens
cacattttagtgtacatttttagaatatatttaaaacaataagatagtctgaattggatggttgagtaacctttaaactcatctggtaaacctctaatgtatagtagaaataatttgaaagcttttaatgtataatagtacttacttcaggaaaataatttgatgtttcattgttggtctctttttctatattatttcagcctaagtctatcttcataccacaggaaatgcattctactgaggatgaaaatcaaggaacaatcaagagatgtcccatgtcagggagcccagcaaagccatcccaagttccacctagaccaccacctcccagattacccccacacaaacctgttgccttaggtaatggtggagggtgacagcaaatatgttaccaggttttcatactatggggagaaaaaaaactttcttttaagagattatttgaaattcttttggtggaggacagaaggaaagcagtggctatggagatgttttctgctttttgcctactagcttaaagtgtttttatgacaggattccctatgacacagtctgagatattttgtcctcatttctcatttcatatttagccttctctcttctagagactggttccccattcatttagctacggtgtggaaacaatgcaaattaaactatgaacaaacatggaaaatgtgttttgcgtctaggttacttctgttttagaagagagtaccttgtcctaactccttatttcatttaatcatttctaaaaaaataattggtattatttgctaggtatttgcctccaaattaatactagaaggtgctattttaacactgtaaagactcctctgtgtttatccagaagaagcaattttaaaaaagagcaactaggctgggcatggtggctcacacctgtaatcccagcactttgggaggccgaggcaggtggatcacctgaggtcaagagtttgagaccagcctgaccaacatggtgaaactccatctctactaaaaaaaaaaatacaaaattagctgggcgtggtagcgcatgcctgtaatcccagctacttgggagactaaggcaggagaatcgcttgcttgaacctgggaggcggagtttgcactgagccaagatcacgccattgcactctagcctgggtgataagagcaaaactccttctcaaaaaaaaaaaagagcaact

SEQ ID NO: 9329 - DNA, 1451 bp, Homo sapiens
ttttatcacaccctgttttccaagggtcctgttacgtaccattcaccattctgcttagcaatggcttgtgagatggcatttattccttcagcatgtatttttatgttcaccttcctctcacctaaattcctcccccaccccaataacaattagttgttctatttgcatgtagccagagcaaaaaatgatttctttcccttaagttactattattataaaagggacgataaacacatgagtcattataccacaagtatagtgtggaaaggactctaaacataggctcactgaagaaggtggcatttgggccaggcctcaaaataaggcagattcagatttgaactgaatagatggagagtcatttcaaacagaagaaatgacataacatgtggaggcaaaaaaaaaatcataaaggttacataataaatgctgactattcgcttagctggatacagatgatagaaaggagagtggcagatgagtgtgagccattggccttgtgtgagcatgtacttattactgtgcaacaagtaaggaaggaagtcttgtgctagagcagtagcagtgcaaatagcagggaaggagtatctgggtgtgaagggaaaagatgtcagagatgactgaggcctcaaacccaaaagactggcagaagggcaagtgttaacaggaagcgagaacagctggtttagagcaaaagaggatgacaaggttgggtttagacatggtggttgagtctctgttagaactgcagcaaatttacttgactctacctgaggacaaaggggcaggtttttaggaaaagttaattataggaaagaatttcctatatagacttctctgttttctttggcgggacagttttgctgttctcctcctctgccatttaaatatttcaaatctatttgaagtgtgtgaactttactgctgttccccttttcacagttcagtttttttatctttattccaaatatatttacttcacatatatttactttacttcttctggtttataaccagaagaaaatttcaaaatctgaggtaattcaattttattatttgtaaaccagtattttaaggttcgattaatatctgtgatgttttctagtgaccataagaattgaatcaaaagggggaagatagacaagtgttttattttcagaaacaaaacattattgcctctgaacattaccaccaaaagcaccttgtgaaccacccgaatgtgttgtatcttaggagtctgacaacttcttcccaaatttactttgacccttttatcagaatgttgccacctcaggtaattttcctaccatcataagacgaaaagtccttcctcttaccccacagcctcattataaccagcagtttcatttgtgcatacaaataaaaatcctgcaagttaagagggcatttcctgctattacctgaaacagtatttttttcacccagccctc

SEQ ID NO: 9330 - DNA, 293 bp, Homo sapiens
cttccatattattttaaacaacctcctcccagtttttctaatctgattactttgaagcaaatcttggtatagttacttttaaataggaagcagataggcacctttccagaatctatagaacttttccttagaatggcagggcatgagtttgtcagaagccccagatggggtcttcatttcaatcaggtgttatgcttggcaacggtttccctgtggggaactttgagggacttgggaagcattgttatctgtttttgtagctgcatctgcgttaaaaaaaaaaaaaaaaaaaa

SEQ ID NO: 9331 - DNA, 503 bp, Homo sapiens
agtgtttcctgtggtaataagtttcttttttacggaagtgacattttctatctgagttaaataaaaggaatttcaccgtattaggttttattttggtttatttatttttttttactttttattatgaaaattatcaagcatatagaaaagtagaaacaatagtgtatcaactcccatatacctgtcatctagatctaacaattattatagttttccacatttgcttcatctattttcttatagtattttcagtatattagacattttaaatctaattttttaattttaatatttgtctctgcagtcatatctttataacacttaacgtaattagcaataattctctaatatgtgatattcatttcatattcagattttcccggatgttccgtaaaggtcttttacatgtggtttctctgaagcagagtacaagcaagagtacacattgcatttagttgttctctctcttaagtcttttttaatgtaaaactgcgtccaccttc

SEQ ID NO: 9332 - DNA, 78 bp, Homo sapiens
aaaaagtcaagattttctgaccacaatgtactacaatttgaaattagttaacaaaaagataactccttaaaaaaaaaa

SEQ ID NO: 9333 - DNA, 225 bp, Homo sapiens
gatctagaaagactaaaaacaatggaatggcaaaataattaccaggcaaatattaatttttaaaattgatggcacagaattttatagccacaacagaggccagaacacagtgtaattatgttgatatcagacaaaaaagacttaaaaagtatttagggataaagaaagtcactgcaaaatgaaaacatgaacaattcactaggaatattcaacagttctgatttt

SEQ ID NO: 9334 - DNA, 379 bp, Homo sapiens
cattgaacacctgccgtttggtcaagcatttctaggcactggagattcaaagtattcacatattccttttctttataagactagcaagattctgaagattcatgtactcattcactcaacaaatatttgccaatcactactaaggttgccagacactattttagtgcttgggatgtatcagtaaacagaagagagagagaaaacaaatacccttccctgttggagctttcattctaatataaggagaaagatgataaatgtaagagaattatgtaatatgttagaaggcatatggggaaaaaaaaatacaccagggtaaggggtatgaggaaaactggaggaagggggtttgcaatttttttttaagagggaatcctgc

SEQ ID NO: 9335 - DNA, 1516 bp, Homo sapiens
cattgaacacctgccgtttggtcaagcatttctaggcactggagattcaaagtattcacatattccttttctttataagactagcaagattctgaagattcatgtactcattcactcaacaaatatttgccaatcactactaaggttgccagacactattttagtgcttgggatgtatcagtaaacagaagagagagagaaaacaaatacccttccctgttggagctttcattctaatataaggagaaagatgataaatgtaagagaattatgtaatatgttagaaggcatatggggaaaaaaaaatacaccagggtaaggggtatgaggaaaactggaggaagggggtttgcaatttttttttaagagggaatcctgctctcccgcccaggctggagtgcagtggcgcgatctcagctcactgcaactcccgggttcaagtgattctcctgcctcagcctcctaagtagctgggattacaggcgcgcgctaccacacccggctaatttttgtatttttagtagagatggggtttcaccatgttggccaggctggtctcaaactcccgaactcaaaagtgatccgcgctcttcggcctcccaaagtgctggcattacaggcctgagccaccgcgcctggcctgcaattttaaatagagccgtcagcatgggcctcatttataaaatgactttaaatcggagacctgaaagagctgagggagtcagccatgcagttgtctggggaagagtgtcccaggcagaaggaacagctagctggtggaaaggcctggagacaaaagcctcgggaagtgttaaaaataatgagaaggccaggacggttggagccgtgagcaaatgggagcctaatgaggagataagatcagagagaggggtctcaagtagggagctgtaggaatcttggctgaaacagaaccactgctgggctttgaacagaggagtgataggatctgactcgtgctttcaaaagatcactctggccgccgtgctaagagcagaactaagaggacaatggtggaagccagaggctccattacccaggtacagaatgatggcttgaactagatagtagcaatgagtaagataaataagatgcagtctcagccgggcacagtggcgcttgactgtaatcccagttattaaggaggctgaggcaggaggataggatcacttgagcccaggagttcaagtgcagcccgggcaacacagcaagcccccatctctaaaaaataaataacgtacagtctgtctatggtctcccaacacttaggcagaggcggaagattgcgtgagcacaagagttcaagactagcctgggcaacataaggagactgtctctacaaaaataaaaaaattagccggcagggtggtgtgcatccttggtcccagctatgtgggaggctgagatgggaggattgggcccaagaggtcaaggctgcagtgagttgtgactgcgccactgcactccagcctgggtaacagagtgagaccctgtcttt

SEQ ID NO: 9336 - DNA, 1516 bp, Homo sapiens; identical to SEQ ID NO: 9335

SEQ ID NO: 9337 - DNA, 673 bp, Homo sapiens
cgctgggacaagtagtgccctgagactcccgaggctctgcatcggcgcagccggtgtcatctagcggccggcagttccgagcgacttggggtccttgtgcctcggagtggcgtctgggagcaaaggcggcggaggcaaccccgcagttgaggacagtagggatcggtggctttggaccctgcccacggatacctggggccccatgccccgaaggaatggtgccttctgccctcccccgccccccaacatccgccacctcaccgaagcgcccggcaccttagcctcctctccaggaaagcggacgccttttccgacctggcacaccgcggattccgggacccccaacaaaggcgccttggaccttcaggacacccctcttttcagaacttcatgagtcccaggtgctagactcatgtctgcggaggcctttcccgtgcctggtctttctttctttcttaaaggagttggacctctaaaggcccttctaattctcaaggtagctacccaggttatggtactactatcagtaggtggagcgtttagaagggtagtttggtcgacgagtgaactttggaatttacttctacgtcagtcttcactgattctttctctaaactattagcactgataatctgccctataatttcacacttaattacattccagtgtagta

SEQ ID NO: 9338 - DNA, 672 bp, Homo sapiens
cgctgggacaagtagtgccctgagactcccgaggctctgcaatgcgcagccggtgtcatctagcggccggcagttccgagcgacttggggtccttgtgcctcggagtggcgtctgggagcaaaggcggcggaggcaaccccgcagttgaggacagtagggatcggtggctttggaccctgcccacggatacctggggccccatgccccgaaggaatggtgccttctgccctcccccgccccccaacatccgccacctcaccgaagcgcccggcaccttagcctcctctccaggaaagcggacgccttttccgacctggcacaccgcggattccgggacccccaacaaaggcgccttggaccttcaggacacccctcttttcagaacttcatgagtcccaggtgctagactcatgtctgcggaggcctttcccgtgcctggtctttctttctttcttaaaggagttggacctctaaaggcccttctaattctcaaggtagctacccaggttatggtactactatcagtaggtggagcgtttagaagggtagtttggtcgacgagtgaactttggaatttacttctacgtcagtcttcactgattctttctctaaactattagcactgataatctgccctataatttcacacttaattacattccagtgtagta

SEQ ID NO: 9339 - DNA, 673 bp, Homo sapiens; identical to SEQ ID NO: 9337

SEQ ID NO: 9340 - DNA, 11598 bp, Homo sapiens
tccaggagttgcttgctcagactctgaagatctgccttgctttccccagctggctctatttctagggagaatgtccaggcatttggatgactatcttgggggtcattcaagtgtccaggtctcctcctgggtgaagctgccaagactccatgctctggaccacactgtgatcaataagggctgcagacagcacgtactattttattgggcctcaaaagctttaaatacagaatgggctggccagagcgaagatgtgaacacactggcatttgagaatggacgtatcagaaaaatcacataatcaacagttggacagagagctgggacgagggcagtctgggatagaggcaggtgccagctggcggccagcctgggtgttaggattactccctccactaggacatagtctttgatgtttcttcctgatttgaggactttttttttttaaaaaaagcccacaaacctccaaataaaaccaactggcagagactgtggatagcagtgcccatcatcccagaggacaagggtctgccccagaaagccttggggtccccaccccgcagccccgatgccaccccacgagacatttccacacactgaagcaaagctggacccaatctacaacccctctctggggtttggagttgaaaacaccctcccggcagaggaagagggactggcgtgagcggggctgggggccaaacccgatcccctccttagcggctgtagccaaattcgtctgcatcatcagctcgaaagtctccatagcgccacaggttcagctgtaagaaaaaacagacaatagctcttcagggatacgggacccaccggaactcagagggccaaacccctcaactcggtaccctctgggggctcccaaggtaagaactcaccctggcgctcttggctgactcttgggcattcaggtattctgtgatctggagggacgagagaagaaagggagtggtcagagttgccctcaaatgatcagccagcaggaccctgcagaatgcttaggtaagcgccagagctctcccttgctcaagcctgtccaatggagccttagttccctcagagtaaaacggaaaacacaatcacattagtctcctggcttttcccttaactcttcgcactagctcttctgtctgcctggaacgctcctctggtcacgtcctcctggctacctctcccacctgcttcagtctgtggtaaagtatctccctcttaatgaggtctcgggcaaccccatttaaaattacaacctaggccaggtgtggtggctcatgcctataattgctgcactttgggaggccaaggcaggaggatcacttgagcccaggagttcaagaccaggctgaccccatctctattaaaaaaaaaaaaaaattagccaggcatggtggcccatgaatgtctgtagtctcagtacttggcaggctgaggtgggaggatcacttgggccagggagttgaaggctgcagtgagtcgtgattccggcactgtgccatggtactccagacccggtctcaaaagaaaccaaaccaaacaagagcaatacaaatacaaccttcccctcccattcctgactccctggattccacttctatttttcactgcagttatcatcttctaatatcctatttaatttacttattatgttcattgtaattgttgtctcctcatgcttgaatgtaagcttctcagggcaggggtgctgtttcttgctcactgatatactgtaggccctcaataaatgtctgctgatagaatgaataaataaatgagcatgttaggtgtttatctcagggactgcggcagaaggaattttctagatagcaggggcattatgggcagtttcatatggggtacaataagatctccaattctatagggaggctgaagctgacctcctaggagccatctcctaaggaaagtgggggtctatccagaggggcttaggggtcgggcttctcttgagacacagcggcagtccacaggggtgtcttgttccagtgagtcgtcagcctgcacagccaccgacacattatgtgggcttgcggtgtggtggggagagaggaaaggccaggagggctgggagaagggagagcagtgggcgaatggaagagagatgaagaggaggaaagtgtttggttttcatgccccgcctttcttgcccctgtctctgaaggaacatagggagaagctggccacatcctgctgccctctcatcactttctgccaggagacggcagctctgtcgggggcccgagcttccccaagtctggccctcttggatggttcgctgattcagcccagctgggacgcagggctggtctgcaatagggcctcagtggctgcttggtgaaagggtagagagggactcagaaatgtatagtgttgggtggaaggggctgccttgtatccagagcccaaagctaatcaccaaaggctgctcagtgcaagctgtttctcaggtacgagcgcactgattgtcacgatcagccctgagaagtggcaaggcagctagtcctcccctcacttcataagcagggagatggggctcaggaggctggcttctcctctcagaacagtggaggcaggactccaagtccaaggggctttccaaatagccagagggttgtgtggcagtctttctgggccctttggtgctgcctcctcgacagctctggctcggggtggcactgggtgttaggagttggttattgacttggaagctgtctgttggacagtgagactgggagagcgggagggacaggccttgaccctctccacatagcccctggcaaagctttctcgcctgtcacctgggggtacatggggagggaagctttccgctctagtttgcagctgcattctcagccaaacccgcagccaattaatttgggatgtaattagctttaaaacaaaaacaaaaaaacgccaacaaacccaaatccattatctttcctcagcaggaacagcaggatggtggattccctgctcccttcctggcttgtggaacagtccctttctctgtgagggtggtggcgcaatgctggggccgcctctccacatcacataccactttctggaactgtttctccttgcgcacctccaccatgaccagcccttccttcaccaagcccagccccacatcgcccttggaatctgcaaactgcagggtgacatgggggcagccggcactcaggtgttccacgttgagcaggcactgagtgttctggatatcccgaactacgctgtccacggcgtccgtgcgggcatcatcctggagcagagacacactcaggtcagagcaagccagagaacaaccacttgggccccagctcctgtccatagactcccaagaaagtctggccagcaggggcctgtaattttctccccagagaaccctagtgaggttggccaggcacggtggctcatgcctgtaatcccagcactttgggaggctgaggtgggtggaccccttgaggccaggagttggcgaccagcctggccaacacagtgaaaccccatctctaccaaaaacacaaaaattagctgggcatggggtgcatgcctgtaatcccagctacttgggaaactgcggcacgagaatcgcttgaagctaggaggcggaggctgcagtgagccaagattgcgccactgcactcctgcctgggtgacagagtgagacttggcctcaaaaaaataccaaaaaaacaaaaaaacacaaaccagaaagaaccctagtgaggcagaaacaggctctggataggaagccttccccttttcttttccttgccctcagccagagactatttgcaagtgacccctttctttcctaccctgtgctcccacccacctgccctgtgtctccgagaaaaagtgacttcttcccactcaaagctcacctacacttggtgccctttcacttccttcctccagcaggaccttgctccagtgcactatgtccatgacatcctgtgtctctgtcttttttttttttaaagagacagggactaggccaggtgtggtggctcatgcctgtaatcccagcactttgggaggccgaggtgggtgggtgacctgaggtcaggagttcaagaccagcctggccaacatggtgaaaccctgtctctactgaaaatacaaaaattagctgggcgtggtggcgggcacttataatcccagctactcggaaggctgaggtgggagaatcacttcaacctgggagggagaggttgcagtgagccgagattgtgccactgcactctagcctgggtgacaaagcaagaattcatctcaaaaaaaaaaaaaaaaaaaaaaagagagatagggactggccagagtgcagtggtgtcatcatctcactgcaaccttgaacttgtgggctcgagcgatcctctcaccgcagtctcctgaatagctgggactagctgggagtacaggcgtgtgccaccacacccagctattttttttttttttttttttttagagacagggtcttgctatgttgcccagggtggttttgaacacctgggctcaagcagtcctccctgcttggcctcctatgctgggattacaggcgtgagccactgcacctgactccacatgtctgtcttcaccgacgtgttttgtgatacttgccttcagcattttctgttgcatctctcctgaccttcagcaactttgtgaaaaggtaaagagtaaatttgcttattcttcatttgcaccctttatctggtgacagtgccaaccatggtgatcacgcagctctcactccaggtaccaggcaccttctcaaagctaaagccaagggcagcccctgggaagcctcaacctgcctgagctcccgggggatctggacattgtagactggctttctgtttctggggatagagggtatccacgaccctcagcatgggttctctcctttctggctgcatatgctgcctctgggctcctgttctcagatggcaggaccccagcacttcctaacactctctctcctccccatcacaccttccacatactcaatctgggcaatcttgtacaccgcatggttttaactacacagacccataaattccaggtctcatctcactccccaactgaaaactgtaaggctgcctggaggtcccactgcccaaattcgctccttctcattcttcttggccaacagcaacacatccacacataagaaacccagcaccacctttgtctctagcctggactgttacaattgtctcccacccattcattctagtccctctgttcactgtgccatcagaactaactttcagaaacacactggaccatgtcacacttctcctagaaatggtgccacattcctcctgcctatacagcacaaagaataaactccttgccagggtagacaaccccacgacaccaagccctttcccatctcacctcctgccactgcctgatcacctcctgccactgcccaaaagccccctgggatccagctgtggtggtctagtctttgtccaaatgcaccctggcctacctgcttctatgaactagctggaatgctctaatactacctcctcggtggcatcttcctcaacttcccatctcttgagtactattactaagagaccatcatagtttccatcttctcctgtcagcccatgagggctgctgcagcggctaagtgtcagtggatagtcccctttggaaggaggaagactccagactcacatcttggggcacctggatgaaggcgaaggcatactccgtggcttgagctggcagcacccgagtgctgaaggcaggtgatagggtacccaggcgggtggatggcaggacctctctctgcagaggaagcagcaggccaacatgtcacatactcgctgcccccttgctctctcacaggacagctctctgtggccaggcctctgggaatgctaactctgggccaccctgttcatcccatgacttggttccactttgcaatgtacaaaggctccccagtgggtgaagcctggagagaacgtgccctgctggtccagcagtagatggggagctcactctgggcctggtgctggcacacctagtggttcccatgaaaacaatcgcagtataactggactctaatcgcttttccatttcctcccaatgcccttctgtctgtgacatgggttccctgactacgttcccacaggccagggggttctccagctgctggctaggggagcacaccaagacaagtatccctgtggtcaccgggcctgcctgtggttctggcccaggcatctgggttcacccttgtctggcaggacctcttcctttgtgtattcccaggagatgggttgggagcatggcccaactctgggctctctactaacagatcctcagtcctagtacttgaggaaggcatgggaggtacgcagacaagcagtgccatgactcaggagcgtcaccctcctgaatgacagttttctcaccagctggctgctgttcctcaagagaatctcccaggagttgtcaacagactcccaggcccagccggagaaatttttctcccaagggtgccagtcagtcactgtcaccttgtgactgtcccttcccagcaaacctgagtttggggatgtgccggggattagcgcatggaacaaacacccagtttggcttgaacaccaggaactgtgggtgtaaaggccctccatgtgctacagaggccctgcccccattctgcagagacctcaggcagaagaggaactgtgggtgtggctggacactcatccgtggggtctggatgcgggacctatcagtgcttgcagccactggtcatagaccccagttttgccaggtcactgagggggcctggcctgttacacgcacagcagagatgccccaatgctcattgttctattggtaagctcagagggaccttggagagatcagatggatttgactcgggggctgctgtgtttgatagcccctccaacactctggtccccaacactcacgttgccgtagtcaatgtagaagacatgtattttggcaggagactcgactttctctactcgggcacggtacctgcaatggcatcatgggcagagctcaagagacagccctgaggactctgggctcccagagcctcagcaatggcggggcaggggcacagcatttccctgcctgggttcaacgggtgtcacaggggacagtaactgcactccatctaggcccagcctcggccactgtggtcaccacctaatggaatcagagcatagctgggagcagaagagggagaaaggagcatgtggagcagattaatgtgtccttggggcataaagcaacaagactaatgactagattgatgtctgctgtttaaacccagtgcactaaacagcagctgtaattagccagcagatctgcctgggaggccgcagcagggaacatatccaagtcacttcgtcaccctgggaaggccatgggccctcccttggtagattacacatcagcgaccttcttccggcctgtgagcactgctgctcatgtcctagacagccggggaagagggtcgggcagctggtttaggcttactgtagcccagcctctacctcagccccctgtaacatcattcttcctgggtggggtgaggggtgtgctggacagcctggccggccggccagccagccagccagcaagggctcccaccctggaatcccccaggagacaaggaaggagccacttctgtctggctggactgcaggggtgcacaggccagagcaaggccccagatgggctgtgggcaatgaagagggacacccaggagagctgctaggggccatcattaaccagctggggaaaccagactgctaaggcaacacctgaggcctgaggacagccctgctatcgttcctgctcaagactctgccttgcttttccaagtggcttaccattctccatctacaaatttggcaatgcagaactctcccctgcggggggcataggagccctctacaggggggtgactggcaatgtcattgcgcatgttctccatcagcttctccaactgggtgcctgccagggaggaagagcacagtgagacctgggtgctgggttcctcgacggctcagcagggtttttctgggagtggttggggagggagctcaatgtaaaattctggggggcactgcagcactggctctgtccccaacccatgcggggaagccctcttggtctccactccagaggtttcatgccatctgccttcagaagtgggactggtgacttgctgacatgttgggccttaaaggcacacacagccttgccatctcagctctccagtctgctggcccagggtgtgggagcccttgggatgtgcctgagctttgattaaggaggtggagaaagaaagtagacagggagcaaggacaatccaaacagcctcctccagggtgagagctggccagcccgtaccccattcctgcaaggccagctcctggcctgggccacagaggtggtaactgacagaagccactgtctactgtctttcagggggcaaaagtagggatgaaggatgggccccacaccaccgtggaaaaggccccagaattgaagccatggaaggtgggggaggaattcttggatcagggcctagagcctcagtattattcaaacttggcccctctgacccttgtcaccctgcaagatacatgctgaacaggacttccagtgctgctgggctggggctgtactgtcccaccctgctactcagggcccctgcgccacaggaggagggattccctgccttgtctttccctaagcactctgaccttgggtcagtggtcctgctgcttatttgctgcttttgcctgttttagcaacacccagggcctactcagtttctctccctggctccttgtagaattctcccaccctgactctgggaggcatcagtcccttctggccctgattctagctcagtctcagaccttttttgccccttgcgtctcagaagcaaggagggtgactgtggatctgtggtctaagtgtggggctcctctctttatcttcaggcccaaggcagtgctgtaaggagggcgcaacatatgtctgttgttacacttgccacagtcagccttataagttccctgctactatactgtgagctccttcagggcatagagcatagctcacttctttctgtttacttgcacaaagcctggtagaatccccaatgcatgcagggtgcttaataattcagctgcattgaaaataaactgcataagcatgcagggatgtatgtccactcttaagctgctgcagaggccactggtcctgcatccacacgacagaggcctgaaggtagcagccgcccctctccctacccagtggtcagccctctataattctctttagacagtgctccttgccatagacagtgaaattccagggattaagaagccttgacagacagcttcctccctaacttggtctactttcattttttttgctccaaggcaacagaagcaggactttgcctcctgccaacaggcaaagccctctgggaggtccttacagagcctcactggtcatttgcagctaatggcaatgttttcgtcagatccctcttgaagacagactctaattgaaagaagggagacagggtgagaggatgccacccaagaggggatgaaaggtttcagcagagagggggctgtggatcctgaggttcatctccatggataccatggagccaccagagggcaggggccttcctctctggagcccaccacaaatccccaggtggcctgccaggaagggcctcactcccttctcttccagcattctaaggacacatggttttctcttttctcttgttttctgcctcagatttctgctctctaagacttcaggggcttgttctgagtcaaggcgggtcctccccagcaggacccagaggctgagtagagcctgcctgggagtgatcgcatccttttgctcaagttctctggtgggctggcggggattttggggtggtggattccagctggttcctctgcccaggaacggctcttgttcccactgagaccaccactacaagactccttccctgtcacatgacccagccctagaggctggccaccgccccggttcattcaggcaactgctggagcagctttcagcaggactgtggctgacctcaagagaacctaatcccgcaggctcgtgggctccatctctacccctcccccttgcgtttttcctttttcaagcacagccagcccagggccaggaatggtcaagtttttcctggtgaaatgacactgccacaaaggcagctgcctgggaaacagcattagagggaagtggctgagacggggctggagcggacctggggtgggctgaggaggctgggcagagctgtgtcctgccatctgggggactgcccaagtgctgctgacacttctagccccctctgtccacctgtgcctaccatgatttgtttcctgggatccagaagcagctctaagagcttttccttccgctccaaactcaactgtttccctgcacagggtggccatgagaaaagggaggtcagggtggaaagcgtaagcggttggaggtgtagtcgggctagcggctgccagagctctctcctgccctttggcctccagaaaccccaggtctctgcccaggggaccctggccacagtgcacaccactcaggacggaaggaggagaaggtccttcagagactgcccggggatgtcttcccctagagcgctgcctgtttccatggaaactggctatcactcagggctatgttaacctctagagaaggagaaaccccagcagagacaaacccagcaccactccttgctcccccagagggaaacgggctgagcaatgcctggctggtgcctgacagattctgggggctacaaatcatcctgcccagcatagccaggggtatgtaggaacaaacaatcacctaagagactcagagctccacccagataaacctggttatctcacctgcgtccagaggacctgtccggcagcacctccatgcctgagcccaagccagggctcatgtgaaggctcctgaagtaactccaagcccagaggagcagtgggacaaggcagggagacaggggcggcaacgtgagctcttcaggggaggctcctggactgcctaggcattgttcctcccacccactgggcagaggccccctacccccaggcagcgccagctggaccaagccaggaaccacgagccagcggcctgagcactcaccggtctccacatcctgcacgtagaagtgcaggtcatcagtgatctcggtcacaaacacgggcttgtagctagcagatcgctccttctcctccagcactggcatcacctcctccacgggctgctcctcatagtgggcccagacctgcatgttcagtcggcagaggtgagaagagggcgaggaagtgaagtcataaaagacactgggaggccaggcgtggtggctcatgcctgtaatcccagcactttgggaggccgaggcgggtggatcacgaggttaggagttcaagaccagactggccaatatggtgaaactctatctctactaaa

SEQ ID NO: 9341 - DNA, 11600 bp, Homo sapiens
tccaggagttgcttgctcagactctgaagatctgccttgctttccccagctggctctatttctagggagaatgtccaggcatttggatgactatcttgggggtcattcaagtgtccaggtctcctcctgggtgaagctgccaagactccatgctctggaccacactgtgatcaataagggctgcagacagcacgtactattttattgggcctcaaaagctttaaatacagaatgggctggccagagcgaagatgtgaacacactggcatttgagaatggacgtatcagaaaaatcacataatcaacagttggacagagagctgggacgagggcagtctgggatagaggcaggtgccagctggcggccagcctgggtgttaggattactccctccactaggacatagtctttgatgtttcttcctgatttgaggactttttttttttaaaaaaagcccacaaacctccaaataaaaccaactggcagagactgtggatagcagtgcccatcatcccagaggacaagggtctgccccagaaagccttggggtccccaccccgcagccccgatgccaccccacgagacatttccacacactgaagcaaagctggacccaatctacaacccctctctggggtttggagttgaaaacaccctcccggcagaggaagagggactggcgtgagcggggctgggggccaaacccgatcccctccttagcggctgtagccaaattcgtctgcatcatcagctcgaaagtctccatagcgccacaggttcagctgtaagaaaaaacagacaatagctcttcagggatacgggacccaccggaactcagagggccaaacccctcaactcggtaccctctgggggctcccaaggtaagaactcaccctggcgctcttggctgactcttgggcattcaggtattctgtgatctggagggacgagagaagaaagggagtggtcagagttgccctcaaatgatcagccagcaggaccctgcagaatgcttaggtaagcgccagagctctcccttgctcaagcctgtccaatggagccttagttccctcagagtaaaacggaaaacacaatcacattagtctcctggcttttcccttaactcttcgcactagctcttctgtctgcctggaacgctcctctggtcacgtcctcctggctacctctcccacctgcttcagtctgtgataaagtatctccctcttaatgaggtctcgggcaaccccatttaaaattacaacctaggccaggtgtggtggctcatgcctataattgctgcactttgggaggccaaggcaggaggatcacttgagcccaggagttcaagaccaggctgaccccatctctattaaaaaaaaaaaaaaattagccaggcatggtggcccatgaatgtctgtagtctcagtacttggcaggctgaggtgggaggatcacttgggccagggagttgaaggctgcagtgagtcgtgattccggcactgtgccattgtactccagacccggtctcaaaagaaaccaaaccaaacaagagcaatacaaatacaaccttcccctcccattcctgactccctggattccacttctatttttcactgcagttatcatcttctaatatcctatttaatttacttattatgttcattgtaattgttgtctcctcatgcttgaatgtaagcttctcagggcaggggtgctgtttcttgctcactgatatactgtaggccctcaataaatgtctgctgatagaatgaataaataaatgagcatgttaggtgtttatctcagggactgcggcagaaggaattttctagatagcaggggcattatgggcagtttcatatggggtacaataagatctccaattctatagggaggctgaagctgacctcctaggagccatctcctaaggaaagtgggggtctatccagaggggcttaggggtcgggcttctcttgagacacagcggcagtccacaggggtgtcttgttccagtgagtcgtcagcctgcacagccaccgacacattatgtgggcttgcggtgtggtggggagagaggaaaggccaggagggctgggagaagggagagcagtgggcgaatggaagagagatgaagaggaggaaagtgtttggttttcatgccccgcctttcttgcccctgtctctgaaggaacatagggagaagctggccacatcctgctgccctctcatcactttctgccaggagacggcagctctgtcgggggcccgagcttccccaagtctggccctcttggatggttcgctgattcagcccagctgggacgcagggctggtctgcaatagggcctcagtggctgcttggtgaaagggtagagagggactcagaaatgtatagtgttgggtggaaggggctgccttgtatccagagcccaaagctaatcaccaaaggctgctcagtgcaagctgtttctcaggtacgagcgcactgattgtcacgatcagccctgagaagtggcaaggcagctagtcctcccctcacttcataagcagggagatggggctcaggaggctggcttctcctctcagaacagtggaggcaggactccaagtccaaggggctttccaaatagccagagggttgtgtggcagtctttctgggccctttggtgctgcctcctcgacagctctggctcggggtggcactgggtgttaggagttggttattgacttggaagctgtctgttggacagtgagactgggagagcgggagggacaggccttgaccctctccacatagcccctggcaaagctttctcgcctgtcacctgggggtacatggggagggaagctttccgctctagtttgcagctgcattctcagccaaacccgcagccaattaatttgggatgtaattagctttaaaacaaaaacaaaaaaacaccaacaaacccaaatccattatctttcctcagcaggaacagcaggatggtggattccctgctcccttcctggcttgtggaacagtccctttctctgtgagggtggtggcgcaatgctggggccgcctctccacatcacataccactttctggaactgtttctccttgcgcacctccaccatgaccagcccttccttcaccaagcccagccccacatcgcccttggaatctgcaaactgcagggtgacatgggggcagccggcactcaggtgttccacgttgagcaggcactgagtgttctggatatcccgaactacgctgtccacggcgtccgtgcgggcatcatcctggagcagagacacactcaggtcagagcaagccagagaacaaccacttgggccccagctcctgtccatagactcccaagaaagtctggccagcaggggcctgtaattttctccccagagaaccctagtgaggttggccaggcacggtggctcatgcctgtaatcccagcactttgggaggctgaggtgggtggaccccttgaggccaggagttggcgaccagcctggccaacacagtgaaaccccatctctaccaaaaacacaaaaattagctgggcatggggtgcatgcctgtaatcccagctacttgggaaactgcggcacgagaatcgcttgaagctaggaggcggaggctgcagtgagccaatattgcgccactgcactcctgcctgggtgacagagtgagacttggcctcaaaaaaataccaaaaaaacaaaaaaacacaaaccagaaagaaccctagtgaggcagaaacaggctctggataggaagccttccccttttcttttccttgccctcagccagagactatttgcaagtgacccctttctttcctaccctgtgctcccacccacctgccctgtgtctccgagaaaaagtgacttcttcccactcaaagctcacctacacttggtgccctttcacttccttcctccagcaggaccttgctccagtgcactatgtccatgacatcctgtgtctctgtcttttttttttttaaagagacagggactaggccaggtgtggtggctcatgcctgtaatcccagcactttgggaggccgaggtgggtgggtgacctgaggtcaggagttcaagaccagcctggccaacatggtgaaaccctgtctctactgaaaatacaaaaattagctgggcgtggtggcgggcacttataatcccagctactcggaaggctgaggtgggagaatcacttcaacctgggagggagaggttgcagtgagccgagattgtgccactgcactctagcctgggtgacaaagcaagaattcatctcaaaaaaaaaaaaaaaaaaaaaaaagagagatagggactggccagagtgcagtggtgtcatcatctcactgcaaccttgaacttgtgggctcgagcgatcctctcaccgcagtctcctgaatagctgggactagctgggagtacaggcgtgtgccaccacacccagctatttttttttttttttttttttttagagacagggtcttgctatgttgcccagggtggttttgaacacctgggctcaagcagtcctccctgcttggcctcctatgctgggattacaggcgtgagccactgcacctgactccacatgtctgtcttcaccgacgtgttttgtgatacttgccttcagcattttctgttgcatctctcctgaccttcagcaactttgtgaaaaggtaaagagtaaatttgcttattcttcatttgcaccctttatctggtgacagtgccaaccatggtgatcacgcagctctcactccaggtaccaggcaccttctcaaagctaaagccaagggcagcccctgggaagcctcaacctgcctgagctcccgggggatctggacattgtagactggctttctgtttctggggatagagggtatccacgaccctcagcatgggttctctcctttctggctgcatatgctgcctctgggctcctgttctcagatggcaggaccccagcacttcctaacactctctctcctccccatcacaccttccacatactcaatctgggcaatcttgtacaccgcatggttttaactacacagacccataaattccaggtctcatctcactccccaactgaaaactgtaaggctgcctggaggtcccactgcccaaattcgctccttctcattcttcttggccaacagcaacacatccacacataagaaacccagcaccacctttgtctctagcctggactgttacaattgtctcccacccattcattctagtccctctgttcactgtgccatcagaactaactttcagaaacacactggaccatgtcacacttctcctagaaatggtgccacattcctcctgcctatacagcacaaagaataaactccttgccagggtagacaaccccacgacaccaagccctttcccacctcacctcctgccactgcctgatcacctcctgccactgcccaaaagccccctgggatccagctgtggtggtctagtctttgtccaaatgcaccctggcctacctgcttctatgaactagctggaatgctctaatactacctcctcggtggcatcttcctcaacttcccatctcttgagtactattactaagagaccatcatagtttccatcttctcctgtcagcccatgagggctgctgcagcggctaagtgtcagtggatagtcccctttggaaggaggaagactccagactcacatcttggggcacctggatgaaggcgaaggcatactccgtggcttgagctggcagcacccgagtgctgaaggcaggtgatagggtacccaggcgggtggatggcaggacctctctctgcagaggaagcagcaggccaacatgtcacatactcgctgcccccttgctctctcacaggacagctctctgtggccaggcctctgggaatgctaactctgggccaccctgttcatcccatgacttggttccactttgcaatgtacaaaggctccccagtgggtgaagcctggagagaacgtgccctgctggtccagcagtagatggggagctcactctgggcctggtgctggcacacctagtggttcccatgaaaacaatcgcagtataactggactctaatcgcttttccatttcctcccaatgcccttctgtctgtgacatgggttccctgactacgttcccacaggccagggggttctccagctgctggctaggggagcacaccaagacaagtatccctgtggtcaccgggcctgcctgtggttctggcccaggcatctgggttcacccttgtctggcaggacctcttcctttgtgtattcccaggagatgggttgggagcatggcccaactctgggctctctactaacagatcctcagtcctagtacttgaggaaggcatgggaggtacgcagacaagcagtgccatgactcaggagcgtcaccctcctgaatgacagttttctcaccagctggctgctgttcctcaagagaatctcccaggagttgtcaacagactcccaggcccagccggagaaatttttctcccaagggtgccagtcagtcactgtcaccttgtgactgtcccttcccagcaaacctgagtttggggatgtgccggggattagcgcatggaacaaacacccagtttggcttgaacaccaggaactgtgggtgtaaaggccctccatgtgctacagaggccctgcccccattctgcagagacctcaggcagaagaggaactgtgggtgtggctggacactcatccgtggggtctggatgcgggacctatcagtgcttgcagccactggtcatagaccccagttttgccaggtcactgagggggcctggcctgttacacgcacagcagagatgccccaatgctcattgttctattggtaagctcagagggaccttggagagatcagatggatttgactcgggggctgctgtgtttgatagcccctccaacactctggtccccaacactcacgttgccgtagtcaatgtagaagacatgtattttggcaggagactcgactttctctactcgggcacggtacctgcaatggcatcatgggcagagctcaagagacagccctgaggactctgggctcccagagcctcagcaatggcggggcaggggcacagcatttccctgcctgggttcaacgggtgtcacaggggacagtaactgcactccatctaggcccagcctcggccactgtggtcaccacctaatggaatcagagcatagctgggagcagaagagggagaaaggagcatgtggagcagattaatgtgtccttggggcataaagcaacaagactaatgactagattgatgtctgctgtttaaacccagtgcactaaacagcagctgtaattagccagcagatctgcctgggaggccgcagcagggaacatatccaagtcacttcgtcaccctgggaaggccatgggccctcccttggtagattacacatcagcgaccttcttccggcctgtgagcactgctgctcatgtcctagacagccggggaagagggtcgggcagctggtttaggcttactgtagcccagcctctacctcagccccctgtaacatcattcttcctgggtggggtgaggggtgtgctggacagcctggccggccggccagccagccagccagcaagggctcccaccctggaatcccccaggagacaaggaaggagccacttctgtctggctggactgcaggggtgcacaggccagagcaaggccccagatgggctgtgggcaatgaagagggacacccaggagagctgctaggggccatcattaaccagctggggaaaccagactgctaaggcaacacctgaggcctgaggacagccctgctatcgttcctgctcaagactctgccttgcttttccaagtggcttaccattctccatctacaaatttggcaatgcagaactctcccctgcggggggcataggagccctctacaggggggtgactggcaatgtcattgcgcatgttctccatcagcttctccaactgggtgcctgccagggaggaagagcacagtgagacctgggtgctgggttcctcgacggctcagcagggtttttctgggagtggttggggagggagctcaatgtaaaattctggggggcactgcagcactggctctgtccccaacccatgcggggaagccctcttggtctccactccagaggtttcatgccatctgccttcagaagtgggactggtgacttgctgacatgttgggccttaaaggcacacacagccttgccatctcagctctccagtctgctggcccagggtgtgggagcccttgggatgtgcctgagctttgattaaggaggtggagaaagaaagtagacagggagcaaggacaatccaaacagcctcctccagggtgagagctggccagcccgtaccccattcctgcaaggccagctcctggcctgggccacagaggtggtaactgacagaagccactgtctactgtctttcagggggcaaaagtagggatgaaggatgggccccacaccaccgtggaaaaggccccagaattgaagccatggaaggtgggggaggaattcttggatcagggcctagagcctcagtattattcaaacttggcccctctgacccttgtcaccctgcaagatacatgctgaacaggacttccagtgctgctgggctggggctgtactgtcccaccctgctactcagggcccctgcgccacaggaggagggattccctgccttgtctttccctaagcactctgaccttgggtcagtggtcctgctgcttatttgctgcttttgcctgttttagcaacacccagggcctactcagtttctctccctggctccttgtagaattctcccaccctgactctgggaggcatcagtcccttctggccctgattctagctcagtctcagaccttttttgccccttgcgtctcagaagcaaggagggtgactgtggatctgtggtctaagtgtggggctcctctctttatcttcaggcccaaggcagtgctgtaaggagggcgcaacatatgtctgttgttacacttgccacagtcagccttataagttccctgctactatactgtgagctccttcagggcatagagcatagctcacttctttctgtttacttgcacaaagcctggtagaatccccaatgcatgcagggtgcttaataattcagctgcattgaaaataaactgcataagcatgcagggatgtatgtccactcttaagctgctgcagaggccactggtcctgcatccacacgacagaggcctgaaggtagcagccgcccctctccctacccagtggtcagccctctataattctctttagacagtgctccttgccatagacagtgaaattccagggattaagaagccttgacagacagcttcctccctaacttggtctactttcattttttttgctccaaggcaacagaagcaggactttgtctcctgccaacaggcaaagccctctgggaggtccttacagagcctcactggtcatttgcagctaatggcaatgttttcgtcagatccctcttgaagacagactctaattgaaagaagggagacagggtgagaggatgccacccaagaggggatgaaaggtttcagcagagagggggctgtggatcctgaggttcatctccatggataccatggagccaccagagggcaggggccttcctctctggagcccaccacaaatccccaggtggcctgccaggaagggcctcactcccttctcttccagcattctaaggacacatggttttctcttttctcttgttttctgcctcagatttctgctctctaagacttcaggggcttgttctgagtcaaggcgggtcctccccagcaggacccagaggctgagtagagcctgcctgggagtgatcgcatccttttgctcaagttctctggtgggctggcggggattttggggtggtggattccagctggttcctctgcccaggaacggctcttgttcccactgagaccaccactacaagactccttccctgtcacatgacccagccctaaaggctggccaccgccccggttcattcaggcaactgctggagcagctttcagcaggactgtggctgacctcaagagaacctaatcccgcaggctcgtgggctccatctctacccctcccccttgcgtttttcctttttcaagcacagccagcccagggccaggaatggtcaagtttttcctggtgaaatgacactgccacaaaggcagctgcctgggaaacagcattagagggaagtggctgagacggggctggagcggacctggggtgggctgaggaggctgggcagagctgtgtcctgccatctgggggactgcccaagtgctgctgacacttctagccccctctgtccacctgtgcctaccatgatttgtttcctgggatccagaagcagctctaagagcttttccttccgctccaaactcaactgtttccctgcacagggtggccatgagaaaagggaggtcagggtggaaagcgtaagcggttggaggtgtagtcgggctagcggctgccagagctctctcctgccctttggcctccagaaaccccaggtctctgcccaggggaccctggccacagtgcacaccactcaggacggaaggaggagaaggtccttcagagactgcccggggatgtcttcccctagagcgctgcctgtttccatggaaactggctatcactcagggctatgttaacctctagagaaggagaaaccccagcagagacaaacccagcaccactccttgctcccccagagggaaacgggctgagcaatgcctggctggtgcctgacagattctgggggctacaaatcatcctgcccagcatagccaggggtatgtaggaacaaacaatcacctaagagactcagagctccacccagataaacctggttatctcacctgcgtccagaggacctgtccggcagcacctccatgcctgagcccaagccagggctcatgtgaaggctcctgaagtaactccaagcccagaggagcagtgggacaaggcagggagacaggggcggcaacgtgagctcttcaggggaggctcctggactgcctaggcattgttcctcccacccactgggcagaggccccctacccccaggcagcgccagctggaccaagccaggaaccacgagccagcggcctgagcactcaccggtctccacatcctgcacgtagaagtgcaggtcatcagtgatctcagtcacaaacacgggcttgtagctagcagatcgctccttctcctccagcactggcatcacctcctccacgggctgctcctcatagtgggcccagacctgcatgttcagtcggcagaggtgagaagagggcgaggaagtgaagtcataaaagacactgggaggccaggcgtggtggctcatgcctgtaatcccagcactttgggaggccgaggcgggtggatcacgaggttaggagttcaagaccagactggccaatatggtgaaactctatctctactaaa

SEQ ID NO: 9342 - DNA, 419 bp, Homo sapiens
ctgtgaagaccgtgagatgatttcagaccctttcacaaaagagtgggctggcatcttgccctctgccgattgtgttcactgtgaatacacatcgcaccctaccagaagcaccttggaggtcaagaaataagtgagatgggcattctcttcttgatggataaaaataaaatcagagaccatggtgagagtgtgcttctctgctgggggcaggacagcttctccaggagtggggatgatgaagagattcacaccaagtcatcatccacacccctcctgacttcctgggccccctaaggggctgcatgtagtcaagggaagcacagtttactgggaccataaagggtctgattcagacagtgtaagcgcttgttctggctaagccggaggcgctgcaagtagaaactgtgagtccccacgag

SEQ ID NO: 9343 - DNA, 418 bp, Homo sapiens
ctgtgaagaccgtgagatgatttcagaccctttcacaaaagagtgggctggcatcttgccctctgccgattgtgttcactgtgaatacacatcgcaccctaccagaagcaccttggaggtcaagaaataagtgagatgggcattctcttcttgatggataaaaataaaatcagagaccatggtgagagtgtgcttctctgctgggggcaggacagcttctccaggagtggggatgatgaagagattcacaccaagtcatcatccacacccctcctgacttcctgggccccctaaggggctgcatgtagtcaagggaagcacagtttactggaccataaagggtctgattcagacagtgtaagcgcttgttctggctaagccggaggcgctgcaagtagaaactgtgagtccccacgag

SEQ ID NO: 9344 - DNA, 647 bp, Homo sapiens
ggaaagagcaggccccataaaaaaaacaggttctttttttatggggagcgtctaaggtgagattcataaggtccttctctaaggttaaatctttttccatggtggccggaacttggtgtcttgtagcctggttacgaagtggcacgttgagcttctattgacgatgccctgcatggaccagctgggatctggctggggctgccctgtgtccctaacgaccataggcaatccatcttcttgtgtcagcaatttctggacacccactgttttccaccaagagctgaggtggcaacaactcagtgagcaataaacaaaatgacacagaaatgcacagtgttgttatgaaggagcctgtttacctgtgttcaaaatctggcaccattcccttgagcagggcccgctcaggagggaccaggtctgccagtttctgtgcctgcagagagacgaagccccacgagccacaccctactctacaagaggaaagggggttggatgggaagaatctattttgctgttttggaaagcacacagccgacctacaaacctcctgtgatggtgtttcttcgcgatgtgtaaaataaggctttatttgtcaattccgctgtaaaataagcattgtccgagtaaaaacagcagcaacaacaaaa

SEQ ID NO: 9345 - DNA, 643 bp, Homo sapiens
ggaaagagcatgaccgataaagaaaacagttcctttctgatggggagcgtctgagtgcagatcatgaggctctttctctaggtttaattcttttccatggtgaccggacttggtgtcttgtagcctggttacgaagtgggacgttgagcttctactgacgatgccctgcatggaccagctgggatctggctggggctgccctgtgtccctaacgaccataggcaatccatcttcttgtgtcagcaatttctggacacccactgttttccaccaagagctgaggtggcaacaactcagtgagcaataaacaaaatgacacagaaatgcacagtgttgttatgaaggagcctgtttacctgtgttcaaaatctggcaccattcccttgagcagggcccgctcaggagggaccaggtctgccagtttctgtgcctgcagagagacgaagccccacgagccacaccctactctacaagaggaaagggggttggatgggaagaatctattttgctgttttggaaagcacacagccgacctacaaacctcctgtgatggtgtttcttcggatgtgtaaaataaggctttatttgtcaattccgctgtaaaataagcattgtccgagtaaaaacagcagcaacaacaaaa

SEQ ID NO: 9346 - DNA, 643 bp, Homo sapiens; identical to SEQ ID NO: 9345

SEQ ID NO: 9347 - DNA, 422 bp, Homo sapiens
caaactgaaagtggaaaaatttaaatttccaatttattctagatttcctcagagcataattattctgttaaatcctcaatgagtgtgatgtaaaccacctctatccagaaatatacattcttttctcatcatgttggacacagttgagggtgacatgcacagaactggaacagatcactattagtggaaaataccaaatggacaaataaataccagtcgttttctccgttctccaagcacaggagccaggtttaccatctgaacaatgaagacgaagggagtaaataaaggaagaattctcatcttttttcctgatcattcaaagaacagtttctcaaggttaagccaagtcctccttgcaagttgccaaataatagcttaggaaaagaattagtctgcctgcatgatgatcttcttaggca

SEQ ID NO: 9348 - DNA, 422 bp, Homo sapiens; identical to SEQ ID NO: 9347

SEQ ID NO: 9349 - DNA, 1375 bp, Homo sapiens
aaggcagtattgaccagacatttctatttcagagttggatttgtgcttagttttttttaggtgttgggacccttgtagttgctttttattttgcttagtcaacaaacactaaaatgataaaatttggtatgtataagtactggacgaaggatgttttgacactaaaaaggacataatttaggaaattaagaatttagacaccaagtttggcttaatagaaaaagtcactatctgaacttctttctttttcaccacaaatcaccgcagaccagtgtttgggagcaggtgtaggaaattgaattattggatctatgtttaggtaagaaaactaaaggtacttcagaatttaggctatgacataactgtctttctgaagtttaaagaaagaaagtgaactatagaaatctattcagctaattaaagtgaatgaaaaatattacagattccataactgcatggcgccttacctgctattaatactgccgccttactgtcagccagatgattttttcccaccacggccagtcttaaatttggcaataagaaaaagctaatcttccaagtgtaagtaggtatgtgttagaatcttggtgaaagataaacacaagacagtcttcttggcgcaggtcctaacagttggtgagataatacataagatggtttcaggattattgtagaattatttaggttgaaagagactgtaagagactaatgaagcatactcagagaggttgctacagtgactccagtcagttttaggacccaggactcctgaacttcaatttcagtattatttttctgtaccaaactcattcaataaatacttgagattagggataagtttgaagttagaagattccagagtacactcaaatagtatttggcacatagcttgttgatcaaaagtatttactaagtgagtgacaaaaggcactagcaactttaaggattttgcctattagtatcatatggcatgtagctatcaagccagtttcgtttagttattttgtgttgccaagcatatgatacgtggtgtcacactgagcctttgggatcctttccctggatacataaccctagtagataatgttactgcaagatgtaatgaccaaatccaacctactgcaaatgttactatggaaatctcaatgcaaaagtagcctttgtgattttttttttaaaccgtctccataacagaacacttagaattattagccatttgctgcaaagtatttgttttaaaatgtctggcatatacaccactaacatttaaatgcccaacattcggtctatacgtgaaaaaactagaagaaaagccctgttggagttttgatgtagagtgcaataatacatcaataaaggtattttaaaatga

SEQ ID NO: 9350 - DNA, 1375 bp, Homo sapiens
aaggcagtattgaccagacatttctatttcagagttggatttgtgcttagttttttttaggtgttgggacccttgtagttgctttttattttgcttagtcaacaaacactaaaatgataaaatttggtatgtataagtactggacgaaggatgttttgacactaaaaaggacataatttaggaaattaagaatttagacaccaagtttggcttaatagaaaaagtcactatctgaacttctttctttttcaccacaaatcaccgcagaccagtgtttgggagcaggtgtaggaaattgaattattggatctatgtttaggtaagaaaactaaaggtacttcagaatttaggctatgacataactgtctttctgaagtttaaagaaagaaagtgaactatagaaatctattcagctaattaaagtgaatgaaaaatattacagattccataactgcatggcgccttacctgctattaatactgccgccttactgtcagccagatgattttttcccaccacggccagtcttaaatttggcaataagaaaaagctaatcttccaagtgtaagtaggtatgtgttagaatcttggtgaaagataaacacaagacagtcttcttggcgcaggtcctaacagttggtgagataatacataagatggtttcaggattattgtagaattatttaggttgaaagagactgtaagagactaatgaagcatacccagagaggttgctacagtgactccagtcagttttaggacccaggactcctgaacttcaatttcagtattatttttctgtaccaaactcattcaataaatacttgagattagggataagtttgaagttagaagattccagagtacactcaaatagtatttggcacatagcttgttgatcaaaagtatttactaagtgagtgacaaaaggcactagcaactttaaggattttgcctattagtatcatatggcatgtagctatcaagccagtttcgtttagttattttgtgttgccaagcatatgatacgtggtgtcacactgagcctttgggatcctttccctggatacataaccctagtagataatgttactgcaagatgtaatgaccaaatccaacctactgcaaatgttactatggaaatctcaatgcaaaagtagcctttgtgattttttttttaaaccgtctccataacagaacacttagaattattagccatttgctgcaaagtatttgttttaaaatgtctggcatatacaccactaacatttaaatgcccaacattcggtctatacgtgaaaaaactagaagaaaagccctgttggagttttgatgtagagtgcaataatacatcaataaaggtattttaaaatga

SEQ ID NO: 9351 - DNA, 99 bp, Homo sapiens
gagttttgctcttgttacccaggctggagtgcaatggcgcaatcttggctcaccacaacctccacctcccgggttcaagtgattctcctacctcagcct

SEQ ID NO: 9352 - DNA, 4119 bp, Homo sapiens
gatattttctgacatggtatttggttttgggtatctgttactttggcactattcttgtttgcctctttatttttgccagtgtactatacctcagtcctatttgaaagacctaattgaaagaaaaatcatagaaataagtaaaatgatttgttttataatttatccaccatgtccagtttggttagcttgttatgcaatataagtgaaatatcaggtttttacccgtgtcccttttatcatgaaaattaacacaaaatgtgcattctcttttgtttcatacttagcgggatattgattgttttgaaattatgatcaatacttaatttatttttttctgtccttgaagtcactacaccttgatacagtctttctagtagtcaccatgattcaacagtctcaaaaatcttacaaataaaattctgagaagctttattattctataaattcttcagggtacaaagggtgacatattgaggtgaaattgtcagatttacttagcctggtgacatgaattagctgattgtggaactctcagcagcatttcacgtattgttaacatgtatggcatttattagcatattgtatattatataagattgagggatgtcatattttcagctttcttttaaataaaaattgagtatattttcctattttatatcaggtaactaaattatgctagttatgtggaaaaaattgcaaagatgctttgacagatataatccctttggtgctccatctgatcaaagttgaaaagttgatgttttttaagagacaagctttatcattgtctctgatttcagtagaataatggtttattgttagacaatgatgtttctgcttggataaatcaaagataaattacagttacatggttagatgcatcttttgtcatctatattgtagtttctacataactgtaaacctgacagataagaatagtttcggtttgatttttgtttaaaacagatgagtacttcttaatgttctagacaaatgagtaaaatgtatttctggtagaaattagttgggcaaagatactatgaatgaaaaagtattttaaacgtaaaatgttctttgtgaatatgtaagtatagtataaagatttctttcatcccatttatccccttcctttaaataaactagtttacaattggtagatctgtctatatataaatatatattaaagaacaaagatatatatctaaaaatcacctaaatctgctttattagactacagttcacttattgcatagaaactggacttggctttacattcttaatgtacttttacttttcctcaagatatgaacttactctcttgaagctgaattttcttttactacttaaatcatttatgtatatctggtaaattatgaccaaatttttgttagattgcatacagtaaattgaaatacacacttggtacactacgggattgttgtgcttttgtttggttttagttggaaataaggtttgatgtagatggcttgttactgttaatttaaaatattctataattgtccattactttatgttgtgttgtgacagatttggctatatttttagtcaattgaaatatgatactttaaaagtttgtttttaggtaatccaaaggaaaagtgtttatactcttgaatatattagcctcagcctatataaaaatttctttgaagtaaacattttaccggaaacagaattgacacatttttctacttgctgactgcctaacttattttgtttcatgatctcgagggactgccttttcccatctagatcttttaaaaaaatagttttagtactaaggtatactactggacatttctatttttttaagtgtattctttttctgacttacagtaaaatttcaggaagttgatagatactaagaacttatgattggtctcagaggtaacaatgaaatactcataattttgtctgtggaactctggcagaattatgttacacatttggcgaagttgtctcttgtaatttatattttaaatgaaaaagtattttagagcttttaatgaaggggaagagtataaactttctttcatattcactctgtagttacagaccgtctcataaatcaagattgtgcattattagagttctcagagacagatacttccatatggacccctgttcatttttcttatttactagatattttgctaaatttagcacactagcaattaagagtttaaaaaagaagaaacgttataggaaagggaaactgaacagtaatgagtagctttgaaattggggaaaacacactagctgggttaggtacagctatcctaatggagaagagtgagctaaatgcgttaattcatgtaaagtgcttagaacactggtacataataggtgcataacacatcttaaagttgtttaataatagataagaaccaagaggaaaaagaaataagaaaagatgggggaaaggaaggagaaaataggaaatgaaaggattaggacttgggcatttatattaatacaaaatggtgtaaacggcctgaatatcactgtagtagtatcatacgggggaaagtgtgatggaaaataggtttaaaaatcttaatttttaaaactttagtaagctttatttatattttttaggattttctgaacatagcatgaagggtttagattcatttttctgaaaaacgattaaaaaaactaccaattttttttttgagtgcccacacttgccgttgtgctgtatacatgattttaccttaatcctctataaggtaggtgctaattgtctccattttatagatgaggaaaggctcagagaaattcagaaacttggctaatttaacacagctgtgacagagctcgaatttgaccacgtctgattctgaagcccatactctttcagggaggctctattgctgcctcattaaacaactcttgtagaatttcagctcttaatggagtctatggattatatttttcctataagacagctgtgtttagaattttgagtgtctttcctccccccaataaatttccttactactctttcttcataaagcagttgttttgtcactttgactatattaagacacatcagtgtagcacatgctcttaactggctgtggcattttaattttataaaagaatggtttttatctgaagaactagatagaaaccccagtttttgtgccgttcagtcacccagatccttaaacttaactatggtacataatatccacacttagaactaacaggtgtttagtcactttaggacttaaaatggaaagtttttttttttttcctgctgtatctctgctttcaactgaagttaaagaattctagatagtttaaaatgtgttagggataagcacacttcaaaagatgttttctagccctaaattttatgacattgggtacttaaatttggagtacactagctattgagaacaatattttgggttgaggagagatggttgaggccattatttagtgggagcattggcattttgaacactgtaaacaaaagaacacttccgcctgctgtttgtaaaagctctttgggaagatcttttacgaagaccaactttttaaatgtaaattacctacctaatataagtgtcctaagacatgtatgtaaacttccggaactgttttgtctgtgtatttagaaaatacacaagaatctttattcaaacctaaaaatataaacttgtgagcactaaactgcttctggctttgtgaattttattgactgacatttaattcagatttctttgcaagtgtactaatttagactaattggggtaaggggaacaccttaatgaactttgacttatgtataattcagatatctttgtacttaaggcttacaagtttgaattatggaatactataagggttttttgtttatttgtatgtttttatatgaaagtacataaatgacagactacctccaagtaatcctgctttaattaatagcagtgatttgtaatcagtgtatcttttaagattctctacaggttttagaaaatattaaaaattccctgtaatttacatttgtgcataatcttggaaatgggttgaaaagcaaaggtaaactgcttcatcccatgttgtatatttgtggactgattg

SEQ ID NO: 9353 - DNA, 99 bp, Homo sapiens; identical to SEQ ID NO: 9351

SEQ ID NO: 9354 - DNA, 5961 bp, Homo sapiens
taccaggtgcttcaaatgatttcaagtatggattattgccagaatcttggccaaaacaagaaacctgggaaaatggcaagtattagtcaactaaacaaatacagaattaattaaataattgttaacaattaaaagctttcatgttctgcattttttaaaaaccaagtagcagtagctccacataattgctgttctcagagatagagataagaagttttgatagcaagttttctgtttaatgtgtaataagcactttctctttttttaattctcataggtgaatcatctctaatcatgaacaagttaaaatgccctcattgtagctatgtagccaaatacagacgaacactaaaaaggcacttgctcattcacacaggagtgagatcatttagctgtgatatttgtggaaaactgtttactcgaagagaacatgtaaaaagacattccctggtaagtaactttaaatacagctgatctttgagataaactatatttatgtcagtgaagtttaaagggatttaaacagttaattgtgaatttaaggaagattgtctcctaaattgctttaaacagtttgactttatgaactgatagtgagctttttacagagaaactggtgtattcactcactattaaatgtgtggtttaatttgagtggttcaaatgcattctattatatataatatccttatattggattttttccccctccaattaggtgcataaaaaggataaaaaatacaaatgtatggtgtgtaagaagatcttcatgttagcagccagtgttggaataagacatggatctcgacgttatggtgtttgtgtagactgtgcagataaatcacagccaggagggcaagaaggtgtagatcagggacaggatacagaattccctcgggatgaagaatacgaggagaatgaagtaggagaagctgatgaagagctagttgatgatggagaagatcagaatgatccctctcgatgggatgaatcaggagaagtttgtatgtctctagatgattaactgacctactatactcctcaaggatgctgcatttggacctaatatgaatcgacaatttggattgttgaacttgaaggcttgcaaaatatggtacatgctggatagtagttatgttgctgtgaaaactgtagggtcaaagccttatagcaaaaaaaatttttttttatatttgcacaggactatacagcaaacaaccatgtggttggattacatggagtccccacatactcagtcagttatcaaagtaaaatattttttatttataggatatacagtaactatttgggtcctatgaaaatagtccttaaagagcttacattcatgtgctactttaacatgaatggagaaaatccgtttatggaagtacagtgacaattgacccaatcactctgtccatcaaaccactcaggctagtttgtactagtagagttttgtttctatttttatttttattaattttattttttttaatacagattttcagtgaggggctttttcaaccccattggttctattttcttgtatttttccatttaatttgcttcataacttaaaccaagtctcttctagtcttaggtattatttctcgattttgtgctgatgggcatgtttataagaactggagaggtaatttattggaatgaactaactgacttcctccattcccctcttcctttttgacatgaattttactacttcacaaatgaagaatgatgttatgaagttaccgtggcgaagttgacaaataccactaaaatgattatgatttagaagtaactttcttctgctgctctaatctgataaatggttactatatgatattttctgacatggtatttggttttgggtatctgttactttggcactattcttgtttgcctctttatttttgccagtgtactatacctcagtcctatttgaaagacctaattgaaagaaaaatcatagaaataagtaaaatgatttgttttataatttatccaccatgtccagtttggttagcttgttatgcaatataagtgaaatatcaggtttttacccgtgtcccttttatcatgaaaattaacacaaaatgtgcattctcttttgtttcatacttagcgggatattgattgttttgaaattatgatcaatacttaatttatttttttctgtccttgaagtcactacaccttgatacagtctttctagtagtcaccatgattcaacagtctcaaaaatcttacaaataaaattctgagaagctttattattctataaattcttcagggtacaaagggtgacatattgaggtgaaattgtcagatttacttagcctggtgacatgaattagctgattgtggaactctcagcagcatttcacgtattgttaacatgtatggcatttattagcatattgtatattatataagattgagggatgtcatattttcagctttcttttaaataaaaattgagtatattttcctattttatatcaggtaactaaattatgctagttatgtggaaaaaattgcaaagatgctttgacagatataatccctttggtgctccatctgatcaaagttgaaaagttgatgttttttaagagacaagctttatcattgtctctgatttcagtagaataatggtttattgttagacaatgatgtttctgcttggataaatcaaagataaattacagttacatggttagatgcatcttttgtcatctatattgtagtttctacataactgtaaacctgacagataagaatagtttcggtttgatttttgtttaaaacagatgagtacttcttaatgttctagacaaatgagtaaaatgtatttctggtagaaattagttgggcaaagatactatgaatgaaaaagtattttaaacgtaaaatgttctttgtgaatatgtaagtatagtataaagatttctttcatcccatttatccccttcctttaaataaactagtttacaattggtagatctgtctatatataaatatatattaaagaacaaagatatatatctaaaaatcacctaaatctgctttattagactacagttcacttattgcatagaaactggacttggctttacattcttaatgtacttttacttttcctcaagatatgaacttactctcttgaagctgaattttcttttactacttaaatcatttatgtatatctggtaaattatgaccaaatttttgttagattgcatacagtaaattgaaatacacacttggtacactacgggattgttgtgcttttgtttggttttagttggaaataaggtttgatgtagatggcttgttactgttaatttaaaatattctataattgtccattactttatgttgtgttgtgacagatttggctatatttttagtcaattgaaatatgatactttaaaagtttgtttttaggtaatccaaaggaaaagtgtttatactcttgaatatattagcctcagcctatataaaaatttctttgaagtaaacattttaccggaaacagaattgacagatttttctacttgctgactgcctaacttattttgtttcatgatctcgagggactgccttttcccatctagatcttttaaaaaaatagttttagtactaaggtatactactggacatttctatttttttaagtgtattctttttctgacttacagtaaaatttcaggaagttgatagatactaagaacttatgattggtctcagaggtaacaatgaaatactcataattttgtctgtggaactctggcagaattatgttacacatttggcgaagttgtctcttgtaatttatattttaaatgaaaaagtattttagagcttttaatgaaggggaagagtataaactttctttcatattcactctgtagttacagaccgtctcataaatcaagattgtgcattattagagttctcagagacagatacttccatatggacccctgttcatttttcttatttactagatattttgctaaatttagcacactagcaattaagagtttaaaaaagaagaaacgttataggaaagggaaactgaacagtaatgagtagctttgaaattggggaaaacacactagctgggttaggtacagctatcctaatggagaagagtgagctaaatgcgttaattcatgtaaagtgcttagaacactggtacataataggtgcataacacatcttaaagttgtttaataatagataagaaccaagaggaaaaagaaataagaaaagatgggggaaaggaaggagaaaataggaaatgaaaggattaggacttgggcatttatattaatacaaaatggtgtaaacggcctgaatatcactgtagtagtatcatacgggggaaagtgtgatggaaaataggtttaaaaatcttaatttttaaaactttagtaagctttatttatattttttaggattttctgaacatagcatgaagggtttagattcatttttctgaaaaacgattaaaaaaactaccaattttttttttgagtgcccacacttgccgttgtgctgtatacatgattttaccttaatcctctataaggtaggtgctaattgtctccattttatagatgaggaaaggctcagagaaattcagaaacttggctaatttaacacagctgtgacagagctcgaatttgaccacgtctgattctgaagcccatactctttcagggaggctctattgctgcctcattaaacaactcttgtagaatttcagctcttaatggagtctatggattatatttttcctataagacagctgtgtttagaattttgagtgtctttcctccccccaataaatttccttactactctttcttcataaagcagttgttttgtcactttgactatattaagacacatcagtgtagcacatgctcttaactggctgtggcattttaattttataaaagaatggtttttatctgaagaactagatagaaaccccagtttttgtgccgttcagtcacccagatccttaaacttaactatggtacataatatccacacttagaactaacaggtgtttagtcactttaggacttaaaatggaaagtttttttttttttcctgctgtatctctgctttcaactgaagttaaagaattctagatagtttaaaatgtgttagggataagcacacttcaaaagatgttttctagccctaaattttatgacattgggtacttaaatttggagtacactagctattgagaacaatattttgggttgaggagagatggttgaggccattatttagtgggagcattggcattttgaacactgtaaacaaaagaacacttccgcctgctgtttgtaaaagctctttgggaagatcttttacgaagaccaactttttaaaatgtaaattacctacctaatataagtgtcctaagacatgtatgtaaacttccggaactgttttgtctgtgtatttagaaaatacacaagaatctttattcaaacctaaaaatataaacttgtgagcactaaactgcttctggctttgtgaattttattgactgacatttaattcagatttctttgcaagtgtactaatttagactaattggggtaaggggaacaccttaatgaactttgacttatgtataattcagatatctttgtacttaaggcttacaagtttgaattatggaatactataagggttttttgtttatttgtatgtttttatatgaaagtacataaatgacagactacctccaagtaatcctgctttaattaatagcagtgatttgtaatcagtgtatcttttaagattctctacaggttttagaaaatattaaaaattccctgtaatttacatttgtgcataatcttggaaatgggttgaaaagcaaaggtaaactgcttcatcccatgttgtatatttgtggactgattg

SEQ ID NO: 9355 - DNA, 1034 bp, Homo sapiens
ccgggcgcggtggctcacacctgtaatcccagcactttgggaggctgaggcgggtggatcacgaggtcaggagattgagaccatcctggccaacatggtgaaaccccgtctctaccaaaatacaaaaaattagccaggcgtgacggtgcgtgcctgtagtcccaactactcggaaggctgaggcaggagaattgcttgaacccgggaggcagaggttgcagtgagccgagatcgcaccactgcactccagcttggcaatagagtgagactccatctcaaaaaacaaaacaaaacaacaacaaaataaactactgtggcagcgttggtaccctgcatcactgccatggttgtgctattctcatctcaacatagaattggtgggttctcctaagggtgtcaggaacctctaaaaagatgtgattctttgggaggggatatttgaaattccaacttccattccccctagcaaaaggaagcagctgctgtttaagggttttatctgagccactttaaagatgaatccatggtattactctggatactagccattccttaggattttaaggtcacattttattcctggatgctttatgtccccacctccacctgagccctcatcctctgttccctactatactcccaacttctactctttgttttatccacctatccctattacctgaccctttgtcttccctgtctcccatccttggggggacatgtagccctgtggtcatggttctgatgacatcatcagggcagcccccctgcccaggtattatggcctgtcagcattccctgtgccctccaaaccttaggcctagaatgcggagctgccaacataacattcacccttttgaacagatggagtcaggcacactaacacagccttctgtcctcaataacacagccattattgccacttgctcagtcgtcaatgtaaaccctcagagtcagctgaactattttaggccaaacatactgtttttgtaaagtatttttcattaataaatctataagacagttctatttaa

SEQ ID NO: 9356 - DNA, 3214 bp, Homo sapiens
tttctcctcggtccccaactctaccttccccaaccacagttcctgtccccagatgtcctgatgcccaccatggcaggggagcccaatagactcccaggtaactcccccaaatctaatattatatgccagaatttggtaccttttcaggggcctccaagggtcaaatcagtatacctatggggaggggggtatcccaaggtggagtggtgtgaagatatgaattactgcttcaaagtcgtgcatttatctagataaatattaaatcatttgttgggcaccatgattcttagaccaagggtttagaccagcacccctagagtctgtctacttacgaaaatgacctgcttcagtcatgacagaataagcttttaactgacaaaggggagttaatacccagtctttgggacatccccagaacagaaatggtcatctctccttctatcctctgagctagttttctccccttctatcctctgagtctcagctgagggatggtctaggaagataaggaatgagtgggagaattggaaagaccctttacatggagtacccacaccatgtgtacagacccagacaattgtggggaaggtgggcaatatcattttggctttctttgaccttccgagtgagatgttctcttttttcccctcatgcactggatgtacaagcttgaggcagtggttctcaatggataaaggggatgtaccaccggtatctagtgggtagaggccagggatgtcctcaacagcacagccattattgtcacttgctcagttgttgttgtaaaccctcagagtcagctgaactattttaggccaaacatactgtttttgcaaagtatttttcattaataaatcacacaatgcacagggcagtctctccccaaccccaacaaagaattatcagcccaagataccaagagtgccaaagttgaataaatgtataagaaaaggcattccacattagatctcagagatcaaacaaaggcagcttaactgaagtgaaggtaacattttaagaaaagttggagaaacaaaaaaaaagcaaggcacagcgtctcacacctgtaattccagcactttgggaggccaagatgggaggatgacttgagtccagcagttcgagaccagcctgggcaacacagtgagatcccgtctctattttttttaaaaagaaaagctgcgtgaggttttggtatggtggctctaggagtatagtcatcacaaagggagtatacgtttgccatatattgctatatattagggagcccttcttttgtaggtgtgtgtatagtggatgagagattatagtggagggaggtagaggtatggcaacatccatgagactgtttcatttgcccaggttggaggtatgagatttgattttgatgtatattaagaattttaagaaatggaatcaaaagcacagcttgattcattctttcccttgtatgtatgctcttggaggagtagggaattgggctacacagctaggcatggctctctgggaaggagaatggttttctgaagatgctcagtctttgggtttcttttctttccccaggaacttcaaggagtgtccagcagtttctggctatgtgtgacaggggtgaaacttcccaaggggccaagtacacaggaaggactttgaactaccagagcctcccccatcgctccagaacagacaactcctgggcaccctggtcagagaccaaccagcatattgggaccagattcctgactactccagggtgcaatcctcaactaacctacactgccacactaccagaaagaagcaagggccttcaggttcctcacactcagtcctggagtgatcttttccattcaccctcccaccctcccattgttcatcctgtgtacccaccatctagcagtcttcatgtacccctgaggtcagcttggaattcagatcctgttccagggtcccgaacccctggtcctcgaagagtagatatgcccccagatgatgactggaggcaaagcagttatgcctcccactctggacacaggagaacagtgggagaggggtttctgtttgttctatcagatgctcccagaagagagcagatcagggctagagtcctgcagcacagtcaatggtaaaggttattcctttcctttcctggagctacacctttctttgtaaaactgtactgtgggccgggcgcggtggctcacacctgtaatcccagcactttgggaggctgaggcgggtggatcacgaggtcaggagattgagaccatcctggccaacatggtgaaaccccgtctctaccaaaatacaaaaaattagccaggcgtgacggtgcgtgcctgtagtcccaactactcggaaggctgaggcaggagaattgcttgaacccgggaggcagaggttgcagtgagccgagatcgcaccactgcactccagcttggcaatagagtgagactccatctcaaaaaacaaaacaaaacaacaacaaaataaactactgtggcagcgttggtaccctgcatcactgccatggttgtgctattctcatctcaacatagaattggtgggttctcctaagggtgtcaggaacctctaaaaagatgtgattctttgggaggggatatttgaaattccaacttccattccccctagcaaaaggaagcagctgctgtttaagggttttatctgagccactttaaagatgaatccatggtattactctggatactagccattccttaggattttaaggtcacattttattcctggatgctttatgtccccacctccacctgagccctcatcctctgttccctactatactcccaacttctactctttgttttatccacctatccctattacctgaccctttgtcttccctgtctcccatccttggggggacatgtagccctgtggtcatggttctgatgacatcatcagggcagcccccctgcccaggtattatggcctgtcagcattccctgtgccctccaaaccttaggcctagaatgcggagctgccaacataacattcacccttttgaacagatggagtcaggcacactaacacagccttctgtcctcaataacacagccattattgccacttgctcagtcgtcaatgtaaaccctcagagtcagctgaactattttaggccaaacatactgtttttgtaaagtatttttcattaataaatctataagacagttctatttaa

SEQ ID NO: 9357 - DNA, 615 bp, Homo sapiens
gaacttcaaggagtgtccagcagtttctggctatgtgtgacaggggtgaaacttcccaaggggccaagtacacaggaaggactttgaactaccagagcctcccccatcgctccagaacagacaactcctgggcaccctggtcagagaccaaccagcatattgggaccagattcctgactactccagggtgcaatcctcaactaacctacactgccacactaccagaaagaagcaagggccttcaggttcctcacactcagtcctggagtgatcttttccattcaccctcccaccctcccattgttcatcctgtgtacccaccatctagcagtcttcatgtacccctgaggtcagcttggaattcagatcctgttccagggtcccgaacccctggtcctcgaagagtagatatgcccccagatgatgactggaggcaaagcagttatgcctcccactctggacacaggagaacagtgggagaggggtttctgtttgttctatcagatgctcccagaagagagcagatcagggctagagtcctgcagcacagtcaatggtaaaggttattcctttcctttcctggagctacacctttctttgtaaaactgtactgtg

SEQ ID NO: 9358 - DNA, 652 bp, Homo sapiens
aaaaaaagaagaaaggaataattagctgtgtcacatgctgagaggactggcacctggtccttaggcagtatgataaatgcttactttgtgccattttgtagtaggtgctgtgagcatacactgatgaaacaacacaaattctgcccttgagtagcttgcagtctcgtaaaggaaattagacatactggcatatagattattttatttaatgtattattactaagtgcccacattgttctaggcactgttcaaggtgctgcggatacagaagtaaaaagaaataggggagaagacaataaacaaataaatgacataatgccagacaatgataagtatgataaagaataataaggcaagagaataaagagtaaagaggtaatagtggtttttttgagggctattcctgatagtagggtagtgagggaaatcagctctaaggaagtaacttttgattagagatctcagtgatatgaaagtatgagccatcagaagaatattcttggtaacagaaacaggaagtataaagactctgaggtagcaatgagcttggtgtgtttgaggaatattaaagttagagtgtaaaagctccaggaatgataggaaataaagtgaggagcagcagggccatatcacacaggaccttgtaggccac

SEQ ID NO: 9359 - DNA, 866 bp, Homo sapiens
aggaattaatttccaattccctatttactcctctgccttccaggaggaggttgtatccttttcaggtgaattcttcagattctttgcacatctcttggtgtcatcccctttattccccttacctgttttgacaaactatggcgcctaaattgctctagctgcagtcttattctgtgctttcagactcttgacaattccagactctaaacacaaaggccagaattctctttcaaactccattttggatggtcccttctccactctagaacctacaatgcttcctctattctctggtcccctaccaacccttcagtattcagatctggtagctaaatcgttatacatttctctattagtaggagatcctgaggtttaatcacgtcttctcagtttactgggaatgccatgagagcgggtgtgtttcctcgcagtcgttcgatcgcagcacctcctcattcttcattctgcatgcaaagaattttaacctgatcccttggcctcgtcctgtttctctcctagcttcagtaattttgcccaagtccctagagcctaccccgcccccacccccgcacgcgcagtgcatgccggtcttagcccctctgtagggaaagagggtccgccatgttccccggcggcgccgccgcttggctctggtagccgccgcccccgcccccaaccccgcccggcccagagcctagccgagccccgggcccagcatggccgccccggagccggcccgggctgcaccgcccccacccccgcccccgccgccccctcccggggctgaccgcgtcgtcaaaggtgagaggtggacgaaaccctgggggcctggcctgaagagctagctgtgtgtgagggcgggcggg

SEQ ID NO: 9360 - DNA, 2176 bp, Homo sapiens
cagctttgcagccaccttggtcagccctaaggccgagcccaccgcctgcaaggtgcagccgtcctcactcccctcatctctctctctcctctcccctctgcatttctctcttctccagaccagctcctccactgtggctctgagtgccccggggctgtccagctctgctccgtcctcatactgctcccttcctccttctcctcctcccatgccatctgtatttctgccacccaccactataccctcccctcgaggccagggccacactccggagttcccttgtactgagcagagtggacgaggccttctacctcctgtagcccccagctggcttgatttggctggtcttggggtgatgcctgacaccttcaactcaaggtctccctctgtggagggttctctgtgggcagtgggcacagagagtcagggtcgagattggaggcacctgccgaccatcacaagtgagctctctggggctccccgctgccacactgtaccctgtgctgggagcacagctctccaagagcctggggagccccagggggccaccagccagcccttcgtgcccagaggaggccttggctgccacatgggagcagccatgggcttcggaggtattcgggcctgagagaatgcccccctctggagctgctcgaagcttccaagaagtaacagagccagctgtagtggcagtggaccggcaggccatcttcccagatacctggactctcacggaggaacatggcctacagcaggagaggccaaggccagagccagggaggctgggaagcagctcccctgcctcagttaccacggagcagctaggtgcaaagatgaccgagaggggaagtgtggccaggccaacccagggacctgaaaccccaaggagcccagagggcaccacggaagctgccacccaggacgggaaggaacagccagagcttccatgtgccatggccatgggcacacccagcaccacggagaggatttccacctctggccaggcaggcaccagctcgcatggctgctgggcatggccattggcgggtctgagtgtgggccgctcctcgctaactgcatgcagcctcccactctgcgcatgtctgcttgggcagaaaatgctgagacactgtggccggacctgacagtcagcacttggcagtgggctctgtggacccagcatttctcatagcgtcaacccacctcttgccttgttgaggctttttcctttcagatgagctgtccttgacattctgatgtggtgaaatggttagcagcatggactttggaaccagatagacctagatacaaaccacatgtctaacacttgctacctctgtgaccttgggcaaccccctccctcagcctcagttttctcatctgtaaagtggggagaatttccatcaagattgtccggagacctaaatgagataattcctggaaagtgtttagaacacagcatgtggtccctcaataggccgtggctgacagtacttttattacttgctttttgcttaaattaaaactttatgccgggccaggtgtggtggctcacgcctgtaatcccagcactttgggaggccgaggcgggcggatcacctgaggttgggagttcgaggccagcctgaccaacatggagaaaccccatctctactaaagatacaaaaagattagctgggcatggtggcgcatgcctgtaatcccagctactcaggaggctgaggcaggagaatcacttgaacccaggacgcagaggttgcggtgagccaagatcataccattgcactccagcctgggcaacaagagtgaaacttggtctcaaaaaacaaaaacaaaacaacaacaacaacaaaaaactttatgcctcaccctggcacagtagcttatacctgtaatcctagcactttgggaggctgaggcaagaggatcgcttgagcccaggagtttgagaccagcctaggcaacacagtgaaaccctgtctctacaaaaaattaaagattagctgggcgtggttgcacatgcctatagtcccagctgctggggaggctaaagcaggaggatggctttagcccaggagtttgaggctgcagtgagttgtgatcgcaccactgcattcagcctgagcaacagatcaagacactgtctcaaaaaaaaaaaaaaaaaaaaatcccccaa

SEQ ID NO: 9361 - DNA, 2174 bp, Homo sapiens
cagctttgcagccaccttggtcagccctaaggccgagcccaccgcctgcaaggtgcagccgtcctcactcccctcatctctctctctcctctcccctctgcatttctctcttctccagaccagctcctccactgtggctctgagtgccccggggcgtccagctctgctccgtcctcatactgctcccttcctccttctcctcctcccatgccatctgtatttctgccacccaccactataccctcccctcgaggccagggccacactccggagttcccttgtactgagcagagtggacgaggccttctacctcctgtagcccccagctggcttgatttggctggtcttggggtgatgcctgacaccttcaactcaaggtctccctctgtggagggttctctgtgggcagtgggcacagagagtcagggtcgagattggaggcacctgccgaccatcacaagtgagctctctggggctccccgctgccacactgtaccctgtgctgggagcacagctctccaagagcctggggagccccaggggccaccagccagcccttcgtgcccagaggaggccttggctgccacatgggagcagccatgggcttcggaggtattcgggcctgagagaatgcccccctctggagctgctcgaagcttccaagaagtaacagagccagctgtagtggcagtggaccggcaggccatcttcccagatacctggactctcacggaggaacatggcctacagcaggagaggccaaggccagagccagggaggctgggaagcagctcccctgcctcagttaccacggagcagctaggtgcaaagatgaccgagaggggaagtgtggccaggccaacccagggacctgaaaccccaaggagcccagagggcaccacggaagctgccacccaggacgggaaggaacagccagagcttccatgtgccatggccatgggcacacccagcaccacggagaggatttccacctctggccaggcaggcaccagctcgcatggctgctgggcatggccattggcgggtctgagtgtgggccgctcctcgctaactgcatgcagcctcccactctgcgcatgtctgcttgggcagaaaatgctgagacactgtggccggacctgacagtcagcacttggcagtgggctctgtggacccagcatttctcatagcgtcaacccacctcttgccttgttgaggctttttcctttcagatgagctgtccttgacattctgatgtggtgaaatggttagcagcatggactttggaaccagatagacctagatacaaaccacatgtctaacacttgctacctctgtgaccttgggcaaccccctccctcagcctcagttttctcatctgtaaagtggggagaatttccatcaagattgtccggagacctaaatgagataattcctggaaagtgtttagaacacagcatgtggtccctcaataggccgtggctgacagtacttttattacttgctttttgcttaaattaaaactttatgccgggccaggtgtggtggctcacgcctgtaatcccagcactttgggaggccgaggcgggcggatcacctgaggttgggagttcgaggccagcctgaccaacatggagaaaccccatctctactaaagatacaaaaagattagctgggcatggtggcgcatgcctgtaatcccagctactcaggaggctgaggcaggagaatcacttgaacccaggacgcagaggttgcggtgagccaagatcataccattgcactccagcctgggcaacaagagtgaaacttggtctcaaaaaacaaaaacaaaacaacaacaacaacaaaaaactttatgcctcaccctggcacagtagcttatacctgtaatcctagcactttgggaggctgaggcaagaggatcgcttgagcccaggagtttgagaccagcctaggcaacacagtgaaaccctgtctctacaaaaaattaaagattagctgggcgtggttgcacatgcctatagtcccagctgctggggaggctaaagcaggaggatggctttagcccaggagtttgaggctgcagtgagttgtgatcgcaccactgcattcagcctgagcaacagatcaagacactgtctcaaaaaaaaaaaaaaaaaaaaatcccccaa

SEQ ID NO: 9362 - DNA, 449 bp, Homo sapiens
ccaaaaacccccaaaacactaccaacaagtataatagcataatataatattagcataataatataaataagaaaaaaaaaactagttaaaaaagttcctggctagctgagcacggtggctcacacctgtattcccagcactttgggaggccgaggcaggcagatcacgaggtcaggagtttgagaccagccgaaccaacatgatgaaaccccatctctactaaaaaaaaaaacaaaaaacaacaacaacaaaaattagccaggcgtggtggtgcatgcctttaatcccagctactcaggaggctgaggcaggagaatctcttgaacccaggaggcggaggttgcagtgagaccagatcgcgccactgcattccagcctgggcgacagagcgagactctgtccccccccaaaaaaaagttcctggaaggaaacactttttctattataaa

SEQ ID NO: 9363 - DNA, 849 bp, Homo sapiens
ctcccacgctagctgtcctcaacacatcctctttctttctgcctctgatcctgaatccacaagcctcccttgctactcttctcccatccttccctctcgccctccagggcctctgagttcccacgagcgtgtctgtgggaaaccatggggccaggcttgcacgaggtacctgcccttcccctcccctgctgggcctccccagtcctgccaggcctgagatgtttaatttagaggattcagtgtttccttggggattgatattgacagaactcaccagcagctgctgacttcatacttccacgtgggtcagctggagacctttggggcatgacctagggaatatgagaggggagtgaacggtccctgcacccttggccctgatggtgtctcctagcctcccttcagctgaggtttcatggtgggagacaggagtgtggctggggtggagggttgagcctggccctgtgacccttgcgtgctatagttccagctccaggccagtggttctgagcagccatggtcagaagcaagtaagttggattcagggcctggcctgagggagctgtgccccggtgcttttaaggctgccgttttctcagacagcctgtgtcctgatgccaggagaagcagcagtggttttagtcagatccctggagcaaggatgtggaagacgtagaggacttggggtgtaggaaagctgggattgtccggagggacatggccgagttgggccagtgtccgaggcgggttcagcagcccctggggctggctctccctccatttgtgcctggggctgtcttccgtagccacctggctccccatttgtccaccttaccgtggtcttttctt

SEQ ID NO: 9364 - DNA, 849 bp, Homo sapiens; identical to SEQ ID NO: 9363

SEQ ID NO: 9365 - DNA, 449 bp, Homo sapiens; identical to SEQ ID NO: 9362

SEQ ID NO: 9366 - DNA, 773 bp, Homo sapiens
gaattttcttggaggccgaggccctgcgcctctgtctgcacccaaggcgaccgcccagcttacccccggctcttctgagcacagggaggcctcccagcaaagcctgaaccctctaagtttagctgcaggcttcgaaccccgaccgtccccgccgagccttgggctgctgaggtggggatgaactgggcgaaagacacttgggagttaggaagaaacaaacaagcagggaagtgaccaggagacaaggtgagactttgcccggctcaggtctgaactgagtgttggagataaccacagttaacaaaataaacaaaattattcgcccccgtggagctgttagcaaccctggtgcctgggaagcctggaagaggctcgggttagtaacaacctccaggatgccctccgaactggtactggcgccgggactctagacaaggtccagattcccgggcccttccccttacgggtgcaaaaagggagggtcaggacctgccagtcctggcttcaggatgttgactggacggacctggactcatgggaactgtgcgccaaagtcctgggagcaaagtgtcataacgctcctcgtttgtctcttgccttcacaggagacagccctgctgcaagcggccagtgggaatccttggcctttgggggtatgatccaagaatgtaaacgctagcttttcagtgttttcgatttcgtgatattcaatgcatacaatacaatgtgactcttgaagcttaataataaaattatcattcttgagcccagca

SEQ ID NO: 9367 - DNA, 773 bp, Homo sapiens
  SITE (12): n equals a,t,g, or c
gaattttcttgnaggccgaggccctgcgcctctgtctgcacccaaggcgaccgcccagcttacccccggctcttctgagcacagggaggcctcccagcaaagcctgaaccctctaagtttagctgcaggcttcgaaccccgaccgtccccgccgagccttgggctgctgaggtggggatgaactgggcgaaagacacttgggagttaggaagaaacaaacaagcagggaagtgaccaggagacaaggtgagactttgcccggctcaggtctgaactgagtgttggagataaccacagttaacaaaataaacaaaattattcgcccccgtggagctgttagcaaccctggtgcctgggaagcctggaagaggctcgggttagtaacaacctccaggatgccctccgaactggtactggcgccgggactctagacaaggtccagattcccgggcccttccccttacgggtgcaaaaagggagggtcaggacctgccagtcctggcttcaggatgttgactggacggacctggactcatgggaactgtgcgccaaagtcctgggagcaaagtgtcataacgctcctcgtttgtctcttgccttcacaggagacagccctgctgcaagcggccagtgggaatccttggcctttgggggtatgatccaagaatgtaaacgctagcttttcagtgttttcgatttcgtgatattcaatgcatacaatacaatgtgactcttgaagcttaataataaaattatcattcttgagcccagca

SEQ ID NO: 9368 - DNA, 153 bp, Homo sapiens
aaaaattagccgggcgtggtggtgggcgcctgtagtcccagctactcgggaggctgaggcaggagaatggcgtgaacccgggaggcggaggttgcagtgacccgagatcgcgccactgcactccagcctaggcgacaaagcaagactccgtct

SEQ ID NO: 9369 - DNA, 602 bp, Homo sapiens
ctcacgcctgtaatcccagcaccttgggaggccgagacgcgcggatcacgaggtcaggagattgagaccagcctggccaacatggtgaaaccccgtctctactaaaaatacaaaaaattagccagtcatggtggcaggcgcctgtagtgccagctactcgggaggctgaggcaggagaatggtgtgaacccaggaggtggagcttgcagtgagccgagatcgcgccactgcactccagcctgggggacagaacaagactctgtctcaaaaaaaaaaaaaaaaaaaaaaaaggccgggcgcagtggctcacgcctgtaatcccagcactttcggaggccgaggcgggcggaccacgaggtccggagatcgagaccatcctggctaacacggtgaaaccctgtctctactaaaaaaaaaaatacaaaaaattagccgggcgtggtggtgggcgcctgtagtcccagctactcgggaggctgaggcaggagaatggcgtgaacccgggaggcggaggttgcagtgacccgagatcgcgccactgcactccagcctaggcgacaaagcaagactccgtcttaaaaaataaaaaataaataaaataa

SEQ ID NO: 9370 - DNA, 9453 bp, Homo sapiens
ggcagccctctctgctgccattttcacttcagccccaaggtgatgttcacaaaggtactgaaggcccagctgtgggtgtacctacggcctgtaccccgcccagccacagtctacctgcagatcttgcgactaaaacccctaactggggaagggaccgcagggggagggggcggaggccggcgtcacatccgtatccgctcactgaagattgagctgcactcacgctcaggccattggcagagcatcgacttcaagcaagtgctacacagctggttccgccagccacagagcaactggggcatcgagatcaacgcctttgatcccagtggcacagacctggctgtcacctccctggggccgggagccgaggggctggtgagcagggggcctgaggtggtggatatgtgtaacctggccctgaggagatagggttacattggaaaaggtagacaaggaatgtgaaggaggttggggaccagcattacttctctggggtcagcagctgattctagaggaggaggtgaggagtggggtggcaactattacttctcaaggatccaaatcagacaacagctgaaaactggatttgaaggtaaaggtgtcagttaatggaagagctgtgagaacaaaaaaactggctgttgaggcgttgggccaaggggctgacagggatcaggttgccagaagagtaagaattagagatggtgagttgaaggagagctagctagctggcaagaaaagtgggcaaaagataaattctgggggtgggagcaatggaaaagctgagaagtcagcagtctctattctgatgcccctggcaggtgggaaaggaacagggaagaggaactgttcaggaccatatcacatttctttcccctctccctgaccctcagcatccattcatggagcttcgagtcctagagaacacaaaacgttcccggcggaacctgggtctggactgcgacgagcactcaagcgagtcccgctgctgccgatatcccctcacagtggactttgaggctttcggctgggactggatcatcgcacctaagcgctacaaggccaactactgctccggccagtgcgagtacatgttcatgcaaaaatatccgcatacccatttggtgcagcaggccaatccaagaggctctgctgggccctgttgtacccccaccaagatgtccccaatcaacatgctctacttcaatgacaagcagcagattatctacggcaagatccctggcatggtggtggatcgctgtggctgctcttaaggtgggggatagaggatgcctcccccacagaccctaccccaagacccctagccctgcccccatccccccaagccctagagctccctccactcttcccgcgaacatcacaccgttccccgaccaagccgtgtgcaatacaacagagggaggcaggtgggaattgagggtgaggggtttgggggaaaggggaagcaggggcatagtcagggtggggagtgtttgaagtttgcagatgagaaggtttgacaaaaagacagagagatgtagagacagtgatagagacagaggaacaaaaagagcagcagtgagaaggcaaagagagaggcagaagagacagacgaggcagagacaaaacactgagaaagagactgaaatggagtaataaatgaaagccccacaccaagcctcctttcttccactggcaaggtgaggggcttggtatagtttggggagatcccctgactattcagtaggagaagaaatcaaaaatccattcttttctccttctctccctccaacagtggccaggggaaggggaagtgagggcaggggcaaaaagatttgggaatttttatttatttatttattgtgacttttcatttttttggtatttggctttactggaataggagggcccctgcccactgtgccccgtttatcccttattccccaaaccctgctctccccaacacctactcacttaagcacttgtataaagcctccagggttgggaatgggagtaaagggcaagagggcggacacatgaagtttagtttctaacccatcatcaccctaactcaaccttttctgagccaaatggcttgaattgaagccagttgtcatggaaatagtaagaggttagggtttaagagctggggatgcgggggtgggagagagaaccctcaacatccaggatctatataatgagagctactttaaaccctcaggtccaccctcatgatgctgagttatttagccagagggtgcagcctgcttatgcccaaattccctcagccaagagagagaccaaagagcctctggaatggccctgctcccagcctctatcttcaggtcaattagagagagtatagagaccccagagtcccctgggtctggaaagcgttaggagaggtcaagaaaggagcagtaaggaggctgaaggttacagggcatttgaatccaaatcactgctctgggctagggaatagagccagcagaccaaggtgggaaggattctggaagggggacattttagtctcctaaccccaaagctcagggtggaagaggggagaacaaggaagcagagtgtataattattttttccttttatttttggaatctaacagtacctggcagcagggaggggaaagtacagtggggaaaagcatctgacaaggccagttagaacagaggatgggaaggatggagactcccgggcttggaaggctaggaagcaggcagagactggttgccatttcaagtcactagctaggcccattcattcctcccacaaccctgacccattctcctctggactcactgtgcctcagtttcttcccctcaatggaatgagaaatgacagcacccgccacagccaagagatgaattctgagcacttaccacgggcactttatggacataaaatacctctcgctgtgggacagataaccagggcaccagagtagtggtgaagagatgtgaggcttaagaggagtcacaggcttcagagtacaagttcccctctgcctcccagctggacagtgcctagaagccaaggagttgagaatctcctgatccacaccctatccttacttcaccaccaggcctcttggctccaggcaagagcttagaggatgtcaggagaggtgggggtaagaatcttcagcaaaactgtcactctaagtagagccagcagttacgggtctgataaaaacagtactgaactaaagtaaagcccaagctggtgagcaaaactggatggctcattcttcccaagagcatgactctcccccttggccagttggtggaaggggcaaaggtatgtgaccacccttgagaaggtgatgttggtgagctttaacatcttattcctattcttatagtgagaaagtgaaacaagatctttcagtagaggaatgggcagggctgttaggctcttcagcttgccttcacccatatagcagctatgctaaccccaagcctctctggccctgttcttcatccttccttctgccccaatcctgaaggacaagacacacccggccatcaacaccactcacatttccttggtggaaggaaaggaacagagaagtgaagaacagatacctccctccaaggtcaaatgcctcgtgatcttggcagagtagggattgggcaataagcatcaggtatcttccctctacagattctagagagctggggcattaaatatgggggacacttagaatacagctccttaaataccaccaaataaagacctttgtgtgtgtgtggtgggtggggggggggcaggggtctttctcttatgaacataaatctgtgagctgaagtctcattcccctgttcctccctacccccaaagaggcacagagtgaagggacttggggggcacagctcagcaacccagtgggagttagcaccccctcccaccttatgatgtgtgtggacctggccagtgcccctctgaacatatcattattagtgtaattatcatttattttgtgtatttgtcacattgtgtgcatgacagcctttgttaagggtgtctgaggagtatggagctgacaggggcattggaatgccaggaaagaacttcttcaactgagatcaaggcttcctggagggaaccactgcaaaaaggccatcaggcagttttcaagttatgtgacagagggcaaagacggccatagggtgctctgagttttgggatggtcacatgacacaatccagcacttgaacctgaaaaaaaaaataaaagcggtcaaagagtttagaattcagtgctgagctcttctccctaatcaagtgccacatttacaccttggagaaccggaggtgaagaggatctgagacaggaaacctcgtgttcaatgactaagaagatggggtcctggagcaagacagaaaacactaagggcatggtggtataaggtttgggacatgcaggccaaggaaggatggaaagaggacaggaaactgggggtacctagaacaacccctctctgaaaagcttgagccaaaacagtcccaaagacaacaagacccctctcccagcctccacagaatggaagatctaaaggttctcttgagatgatccagctagtatggaagatctaaaggttctcttgagatgatccagctagtgtcctattctcctgcagtccctgttcctaggtttcctcaacgaagtttgacaaaaatctaaaccaacatagccaacgaacttgccttgttacacaagagtggctaaaatagcatctcaaatattctttcagttcactgtaaaaatttttcccatgtacctagagcacaattccccaggaatatgagttgggaatggcaaaagaatattgcctgactcacatttttcaaaaataaggaaagctggctgggcgcagtggcttacatctgtaatcccagcactttggggggccgaggcgggcggatcatgcaaggtccggagttcgagaccatgctggccaacattgtgaaacctcatctctactaaaatacccaaaattagccgggcgtggtggcgtgcgcctgtaatcccagctacatggaaggctgaggcagaagaatcgcttgaacccaggtggcggaggttgcagtgagctgagatcgcaccactgcactctagcatggtgacagagtgagactcccatctccaaaaaaaaaaaaaaaaaaaaaaaaaggaaagcaggacccagtggtgtgctcctgtagttccagctattcaggaggctgtggcaggaggaccacttgaggccagagggtcaaggctgcagtgtgctataattgggcctgtaaatagccactgtactccaagctgagcaacacagtaagacactgtctctaaaaataattaaagtaaaataaaaataaggaaagctcctgtgacatcaacctgatccagaattggggacagcgctactgcgggttcaatgtactgccatgttttccctgtcttatcagttctatcagcacactgaccccactcgagaccaactacaagactaaggctggaagtggttgagtagcagaagtgttatgtattctatcttcccaagggaaccatatccacatctacccctaactttggcctgagctgaaaatgggttttctctccctgtggctcatttgtttcctatattgagagaacacccaaaaaaagactactcaagatgactttttacaagtcttttctttatcctaaaacatcctccaaccgaaggcatgggaagctatcctatactctgaccttgcctatattttaaatggcaggggccccaagctaagaatcagcaggcagtggcatctacagcttctggtctgtagtggcgtagaagcaggaaaatcaatgctccaaagcaacaatgtccagctttcctgccagtgagctgggcttgagggagtgaatgggactctttctgccttttctttttctcaaaatacgactgcattaactgggtgtatgcacacacaaacatgttcaaactagggcactcatacctagctagaacctactcagggaaagaaatatgtatttccacagtaccctgatcacccagtaaaagctaatatttattgaataattactatgcaaattatggtaagcaaattgtagtgtgaatacatgatatgagaatatcacttaattcacacagcaaccttcacaatggggttccttttggtacagtctgaaaagagaatgattatctgcgcagggtctcagagctagtgtggtagaataagaaattaaacctaagtagttgctaaacaatattacattctaatctatcctattgaaagtgatccgggaggtagaaacctaaatacaggaataacataagggaaagagataacaagaaagttagggacaccttggactcaaagaatctggaaagatgtgaaacctgtaattttaaatccctttggaagggaaaaacaagaaaagtctagatatggcaagagaaggggaggttaaattttggggggattccaataatcagaaataagtggcattgccagaggccctcatataagagaacagcaaaaaagttatcctcccttaagttcctccctcactcctcatatcagacacagcaagagaactcagctcaacaccaagaagtcctgcccttattcacaccttccttcctatagccctcatcctcacagaagcttctagcctctatcttcagcagttcttaagaggtggggtggggggctgggcagtttagagtgagagtggaaaaaaagaataatcctagagaaccataaaaaagtacagatttacagctgaggaagctagttctccccacagcttttatagactccctcattaagagcttccaggtatgcagagaatgtcacagcttcaggaattggaatcagttaaccacatctggatgctggatcaactatagtagggaaacggggagaggaaggaagggtactaagatctcaggtaaacaattacaagcctcaatgtctgttccatctccaaacggaattactattttaaaactgaattgggaaaaaggcatcctgaactattcatgctcaaagagtatgtggagaatgactataatgagataggaaggggaggacttcatctggcttggaggttagagacttctgaccaacataggaacagctgctgaaatgggatgaaagaggttaataagaaaaaaaaaaaaatcctcacaaattggaaaacactgttcaaagatctaggggaagtaagatgagtgaggagaataattaggcttcaagaagagaatcctggcaagtaaggctgaatatctttctggaaggttatagaggataaagagacgaagaaaacttccaaaagatccactgttccacttcataatcagcatctgctctattccctcatgtatttttctctttttaaaaccatattcaggaagaaaccattagtgaatctataatctctcaagttacaaatcagatctattctgttttcagatgaaggcagagtagagagaggaaaagctagccccaagatcagagcctgaggtaaagaaaaggaaggcagacagaaaagagggaaaagggaaggtcattccaattttaaggtttatttggttgaagaggtgtcaaaaatttaaccagcattcccttttgttcacttctccaaagtctcagaatggggcaaacttcacaacaaatgggcagcagtttttggatctgctctccaaggcacaatttttctaaattatctaaactttaggtccctgctttcctcaccaaccagagactttggagaaataaagagatatcttgacattagaaaggtgatcaaactattaccatttcattaagcacaaaaccaggcaggttttagtagaaataaggataaaggattacaccacagcaacatgggacctgatcatagtaccaaagtcttcaggtaaggtgtcaggctcctaagtcttattaccaaaaatagctcaaacaaaaaccgagcttatataaagattaagaggagaaattctgcaataacatatccaaaaagattaagcaggtttcagatctacatgaacttgaagcctccagttccactgcttatgttcccaatgatttagctaacaatgcgtaacagctctgacatcctctgtcatgctttgattctgcatacaaaatttcttctgtctctgagggatatccagcccatctcccttcctgaactgactgaccaacatagtatcgtatcacatcacccttgaaatcagggcccttttcctttaatgtgggaccctggactccattttatccaagaaaaagtctgcattattagctaataacagaaggctactaatcactgcccttgtatttatatcctttgcaacacctaaaacctcccatgttctgttttatttcagtgggtcactacaagctgctggagcaaagacttggtgggtgggtaacttaacctcttcacagaggataaaaaatgcttgtgagtatgacagaagggaataaacaggcttaaagggtaaactcagtccttttccttgtcttctcttctaagggataaaggtattatggccaattctctataatatttgcccctgaagctccccttatctggtctaatctagctccaataaatcaaaggagcacctaataaaacacattgttctcttttctatttttttttattaacaagcaacataatcaaaaacaaaaacacaacaaccttaaagctgaaacagcaataagtcaaactgctgccgcagttcatggatgtacctggggtacatgctccctcattgcgaggcaggacgtaggcacatgactgtgcatttaggcatatatgtgaccaagaagaaggagagaaatggaaaacactggagaacagaaagtatcaggaacttttcatcaggcaatcccaaagcgctctgctcttttcctcttctttgcctgtaaagaagaagcaagaagaaaaaaattagactgaagacaatagttgcctgggttcctggctgctttaatccaaactcacatgaactgtcacaaggcccgagaaggaaggatggcccagacttgagcttggtagctagagatttcattcctgaatctctccaatccttccagttatccagtaggagctggaaagtttaatgggtaaggagggtgaggagtaaagaagattactgggggtgagggacagagagaagaacagtggtagaaaatgggaagattcctgaagcaaagagagccactcagcctgagatcaagctagcctggaaacaatgggctcttaacaggctgggaaaagtcttccagtcaatggggagacggaagatttcagaggataaaggattaaccaatgctattcatagaggtgaaggagatgcccttctgagcagtcaggcccagacagtagctattccttaggactccaacccacaaaaaaggcatataaatc

SEQ ID NO: 9371 - DNA, 5469 bp, Homo sapiens
attttgtgtatttgtcacattgtgtgcatgacagcctttgttaagggtgtctgaggagtatggagctgacaggggcattggaatgccaggaaagaacttcttcaactgagatcaaggcttcctggagggaaccactgcaaaaaggccatcaggcagttttcaagttatgtgacagagggcaaagacggccatagggtgctctgagttttgggatggtcacatgacacaatccagcacttgaacctgaaaaaaaaaataaaagcggtcaaagagtttagaattcagtgctgagctcttctccctaatcaagtgccacatttacaccttggagaaccggaggtgaagaggatctgagacaggaaacctcgtgttcaatgactaagaagatggggtcctggagcaagacagaaaacactaagggcatggtggtataaggtttgggacatgcaggccaaggaaggatggaaagaggacaggaaactgggggtacctagaacaacccctctctgaaaagcttgagccaaaacagtcccaaagacaacaagacccctctcccagcctccacagaatggaagatctaaaggttctcttgagatgatccagctagtatggaagatctaaaggttctcttgagatgatccagctagtgtcctattctcctgcagtccctgttcctaggtttcctcaacgaagtttgacaaaaatctaaaccaacatagccaacgaacttgccttgttacacaagagtggctaaaatagcatctcaaatattctttcagttcactgtaaaaatttttcccatgtacctagagcacaattccccaggaatatgagttgggaatggcaaaagaatattgcctgactcacatttttcaaaaataaggaaagctggctgggcgcagtggcttacatctgtaatcccagcactttggggggccgaggtgggcggatcatgcaaggtccggagttcgagaccatgctggccaacattgtgaaacctcatctctactaaaatacccaaaattagccgggcgtggtggcgtgcgcctgtaatcccagctacatggaaggctgaggcagaagaatcgcttgaacccaggtggcggaggttgcagtgagctgagatcgcaccactgcactctagcatggtgacagagtgagactcccatctccaaaaaaaaaaaaaaaaaaaaaaaaaaggaaagcaggacccagtggtgtgctcctgtagttccagctattcaggaggctgtggcaggaggaccacttgaggccagagggtcaaggctgcagtgtgctataattgggcctgtaaatagccactgtactccaagctgagcaacacagtaagacactgtctctaaaaataattaaagtaaaataaaaataaggaaagctcctgtgacatcaacctgatccagaattggggacagcgctactgcgggttcaatgtactgccatgttttccctgtcttatcagttctatcagcacactgaccccactcgagaccaactacaagactaaggctggaagtggttgagtagcagaagtgttatgtattctatcttcccaagggaaccatatccacatctacccctaactttggcctgagctgaaaatgggttttctctccctgtggctcatttgtttcctatattgagagaacacccaaaaaaagactactcaagatgactttttacaagtcttttctttatcctaaaacatcctccaaccgaaggcatgggaagctatcctatactctgaccttgcctatattttaaatggcaggggccccaagctaagaatcagcaggcagtggcatctacagcttctggtctgtagtggcgtagaagcaggaaaatcaatgctccaaagcaacaatgtccagctttcctgccagtgagctggggttgagggagtgaatgggactctttctgccttttctttttctcaaaatacgactgcattaactgggtgtatgcacacacaaacatgttcaaactagggcactcatacctagctagaacctactcagggaaagaaatatgtatttccacagtaccctgatcacccagtaaaagctaatatttattgaataattactatgcaaattatggtaagcaaattgtagtgtgaatacatgatatgagaatatcacttaattcacacagcaaccttcacaatggggttccttttggtacagtctgaaaagagaatgattatctgcgcagggtctcagagctagtgtggtagaataagaaattaaacctaagtagttgctaaacaatattacattctaatctatcctattgaaagtgatccgggaggtagaaacctaaatacaggaataacataagggaaagagataacaagaaagttagggacaccttggactcaaagaatctggaaagatgtgaaacctgtaattttaaatccctttggaagggaaaaacaagaaaagtctagatatggcaagagaaggggaggttaaattttggggggattccaataatcagaaataagtggcattgccagaggccctcatataagagaacagcaaaaaagttatcctcccttaagttcctccctcactcctcatatcagacacagcaagagaactcagctcaacaccaagaagtcctgcccttattcacaccttccttcctatagccctcatcctcacagaagcttctagcctctatcttcagcagttcttaagaggtggggtggggggctgggcagtttagagtgagagtggaaaaaaagaataatcctagagaaccataaaaaagtacagatttacagctgaggaagctagttctccccacagcttttatagactccctcattaagagcttccaggtatgcagagaatgtcacagcttcaggaattggaatcagttaaccacatctggatgctggatcaactatagtagggaaacggggagaggaaggaagggtactaagatctcaggtaaacaattacaagcctcaatgtctgttccatctccaaacggaattactattttaaaactgaattgggaaaaaggcatcctgaactattcatgctcaaagagtatgtggagaatgactataatgagataggaaggggaggacttcatctggcttggaggttagagacttctgaccaacataggaacagctgctgaaatgggatgaaagaggttaataagaaaaaaaaaaaatcctcacaaattggaaaacactgttcaaagatctaggggaagtaagatgagtgaggagaataattaggcttcaagaagagaatcctggcaagtaaggctgaatatctttctggaaggttatagaggataaagagacaaagtgaagaaaacttccaaaagatccactgttccacttcataatcagcatctgctctattccctcatgtatttttctctttttaaaaccatattcaggaagaaaccattagtgaatctataatctctcaagttacaaatcagatctattctgttttcagatgaaggcagagtagagagaggaaaagctagccccaagatcagagcctgaggtaaagaaaaggaaggcagacagaaaagagggaaaagggaaggtcattccaattttaaggtttatttggttgaagaggtgtcaaaaatttaaccagcattcccttttgttcacttctccaaagtctcagaatggggcaaacttcacaacaaatgggcagcagtttttggatctgctctccaaggcacaatttttctaaattatctaaactttaggtccctgctttcctcaccaaccagagactttggagaaataaagagatatcttgacattagaaaggtgatcaaactattaccatttcattaagcacaaaaccaggcaggttttagtagaaataaggataaaggattacaccacagcaacatgggacctgatcatagtaccaaagtcttcaggtaaggtgtcaggctcctaagtcttattaccaaaaatagctcaaacaaaaaccgagcttatataaagattaagaggagaaattctgcaataacatatccaaaaagattaagcaggtttcagatctacatgaacttgaagcctccagttccactgcttatgttcccaatgatttagctaacaatgcgtaacagctctgacatcctctgtcatgctttgattctgcatacaaaatttcttctgtctctgagggatatccagcccatctcccttcctgaactgactgaccaacatagtatcgtatcacatcacccttgaaatcagggcccttttcctttaatgtgggaccctggactccattttatccaagaaaaagtctgcattattagctaataacagaaggctactaatcactgcccttgtattcatatcctttgcaacacctaaaacctcccatgttctgttttatttcagtgggtcactacaagctgctggagcaaagacttggtgggtgggtaacttaacctcttcacagaggataaaaaatgcttgtgagtatgacagaagggaataaacaggcttaaagggtaaactcagtccttttccttgtcttctcttctaagggataaaggtattatggccaattctctataatatttgcccctgaagctccccttatctggtctaatctagctccaataaatcaaaggagcacctaataaaacacattgttctcttttctatttttttttattaacaagcaacataatcaaaaacaaaaacacaacaaccttaaagctgaaacagcaataagtcaaactgctgccgcagttcatggatgtacctggggtacatgctccctcattgcgaggcaggacgtaggcacatgactgtgcatttaggcatatatgtgaccaagaagaaggagagaaatggaaaacactggagaacagaaagtatcaggaacttttcatcaggcaatcccaaagcgctctgctcttttcctcttctttgcctgtaaagaagaagcaagaagaaaaaaattagactgaagacaatagttgcctgggttcctggctgctttaatccaaactcacatgaactgtcacaaggcccgagaaggaaggatggcccagacttgagcttggtagctagagatttcattcctgaatctctccaatccttccagttatccagtaggagctggaaagtttaatgggtaaggagggtgaggagtaaagaagattactgggggtgagggacagagagaagaacagtggtagaaaatgggaagattcctgaagcaaagagagccactcagcctgagatcaagctagcctggaaacaatgggctcttaacaggctgggaaaagtcttccagtcaatggggagacggaagatttcagaggataaaggattaaccaatgctattcatagaggtgaaggagatgcccttctgagcagtcaggcccagacagtagctattccttaggactccaacccacaaaaaaggcatataaatc

SEQ ID NO: 9372 - DNA, 646 bp, Homo sapiens
agctgacaggacaccctaagtccatcctgattttgcagaactcaagacatggggaggatacttaaaggcctagacttcctaaccctgcttatatggctctggaagctcattcctgattcttcctatctagagtcaggatagacatattctgtccaatggagacatgttgtaggacactcccaactgacttaggaaaggcagtgaagaggagctggaatggaggcagaggcagatatttattgagaatcatctattagacccaagaaggatcaatttaaggtccagagcaaggggaaatgggtcaaaatgtaaagttgggatgttcaaactttgtaaagacctactggcactagactgagaagtcaaaggaagctcaggggagaaaaaaggcattgtagttaatctggtgtatttaatattatttctggtgctttaggcaaataggaggcaacaccatggaggtaattattcctttcctcaagagctgggggcagtcatggtgatgatgatggagcagcagctgaagaaacttcttaagagagaatggggagacagatgtataggaagtgcttggatagttccattttgctgggtgttattcctaatgggagtgaggcaagaagcctagatctgaattctggtttac

SEQ ID NO: 9373 - DNA, 428 bp, Homo sapiens
tctactaaaaacacaaaaattagccgggtgtggtggcacacgcctgtaatcccaggtactcaggaggctgaagcacaataatcacttgaacccgggaggcggaggttgcagtgagctgagatcgcaccactgcactccagcctggacgacagagcgagactccatctcaaaaaaaaaaagaagcttttcataaagcatcatcctgttggtactgtcctcaagatagtaagttcttgccagatatggctgtttaaggccttccaccatgattgtaagcttcctgagcctccccagaagccaagcagatgccagcaccatgcttcccataaagcctgcagaaatgtaagccaattaagcctcttttcttcataagttacctagtctcatgtatttctcctttacagcaatgcaagaacagcctaatatac

SEQ ID NO: 9374 - DNA, 245 bp, Homo sapiens
taagtctcccggccaagtaggaaacagttttcaggaaaataaatggagcctctcttcttgcggagaggcaagactagaccactatcttgttaaactaccattataaacttttttccattcaatttagcactagcagtacttcagcaagttcaaatcacagaggagataagacttttgaaacccagacattatataagcacaaaccctgaggccaagccctcccccaacgtatgtccacttggaat

SEQ ID NO: 9375 - DNA, 481 bp, Homo sapiens
caacccccacacctccacaaacacacaaaaaccttgaaaatctggacaaaataatgaaacaatgggttttagactttggacaacagcagtgcaggactgtgatccctaaaagaagggaaacaaacaaagtgagctttacaggcacccacccaccctggctttttgcctggggcacattctaaattgtagatctgggacagggaatcttgagcaaagaacaagatgaagagatagagatcagaatttatggaagctgaggcagcaagaagttgtagggcaaagttcagcaggaaggacactttgtcaaaattaatgctatccatagaagtctctgactttttgctgaattctagaatgaacatacatggagtaaaactgtaaagccagacaaagagcaaccagattgatgtgaactgacagacatcagaggtcacagagggctgggaagcatttgaggttttactagctagaggggaaagtc

SEQ ID NO: 9376 - DNA, 579 bp, Homo sapiens
cacctcagccttccaaagtgttgggattaaaggcatgagccaccactctggcaacttttcagaattttcaagtgaccatgatggagtttaccatctgtcaacccccacacctccacaaacacacaaaaaccttgaaaatctggacaaaataatgaaacaatgggttttagactttggacaacagcagtgcaggactgtgatccctaaaagaagggaaacaaacaaagtgagctttacaggcacccacccaccctggctttttgcctggggcacattctaaattgtagatctgggacagggaatcttgagcaaagaacaagatgaagagatagagatcagaatttatggaagctgaggcagcaagaagttgtagggcaaagttcagcaggaaggacactttgtcaaaattaatgctatccatagaagtctctgactttttgctgaattctagaatgaacatacatggagtaaaactgtaaagccagacaaagagcaaccagattgatgtgaactgacagacatcagaggtcacagagggctgggaagcatttgaggttttactagctagaggggaaagtc

SEQ ID NO: 9377 - DNA, 579 bp, Homo sapiens; identical to SEQ ID NO: 9376

SEQ ID NO: 9378 - DNA, 125 bp, Homo sapiens
cctgtaatcccagcactttgggaggccgaggcaggcagatcacgacgtcaggagatcaagacaatcctggctaacatggtgaaaccctgtctctactaaaaatacaaaaattaactgggtgtggt

SEQ ID NO: 9379 - DNA, 125 bp, Homo sapiens; identical to SEQ ID NO: 9378

SEQ ID NO: 9380 - DNA, 453 bp, Homo sapiens
tattaacatttttgatctttacaataaaatcccttcttcagtccaaaagagcccaagcgttaagctgagtataaatgtttagacttaccaagcagatacataaggaaatactttttaacattttttcttccaggccaggtgtggtagctcacacctgtaatcccagggaaggccgaagtgtggggatccctgtgcccagcctgggcaacatgacaaagccctatctctacaaaaatgtacaaaaattagccaggcatcatggcctgcacctgtggtcccagctactagagaggctgaggtgggaggatagtttgagaccgggaggtctaggcttcagtgagtcgtgatcgcgccactgcactccagcctgtgtgacaaagtgaaaccccatcacaaaaaagttttctttcttgaaatgtaaaagaaaaatgccacggagtggtttaacagatt

SEQ ID NO: 9381 - DNA, 451 bp, Homo sapiens
tattaacatttttatctttacaataaaatcccttcttcagtccaaaagagcccaacgttaagctgagtataaatgtttagacttaccaagcagatacataaggaaatactttttaacattttttcttccaggccaggtgtggtagctcacacctgtaatcccagggaaggccgaagtgtggggatccctgtgcccagcctgggcaacatgacaaagccctatctctacaaaaatgtacaaaaattagccaggcatcatggcctgcacctgtggtcccagctactagagaggctgaggtgggaggatagtttgagaccgggaggtctaggcttcagtgagtcgtgatcgcgccactgcactccagcctgtgtgacaaagtgaaaccccatcacaaaaaagttttctttcttgaaatgtaaaagaaaaatgccacggagtggtttaacagatt

SEQ ID NO: 9382 - DNA, 494 bp, Homo sapiens
tgtgatccagcaattctaccctagagaaacctgtatgtgttataccaggatgtatgtacaagaatgtgcatagcagcattgtttgtagtagtcaaaaattggaaacatccagatgtctgtcaactgtagaatggataaattgtgttatgttcatatactataatatcatacagcaaagaaaatgattgaaccacagttacattcagtatcagagatggatctggcataatctggaatgattcaaaaaaagcactaaagaatataaacagtataattccatttatgtaaagttcaaaaacaggcaaaatgatattgaataagaatatagctcactattcttaaaatgcaagaaaatgattttcacaaagtcaagataatagatactttaaaagggagggatggagttgtgattggagaagggcacatgagtaggcttttaggactctggcaatgttatttcttgatctggggaaaaagataaagtaaaaagaaaa

SEQ ID NO: 9383 - DNA, 912 bp, Homo sapiens
aagtgaatgtaatgtcagtagactcttgaaaatgtcccttaccctctggatctgttaaaaatgttattttatattcaaagttcaggttgttttttggtttcatcctctcttgcttttttaaagttgtatatgtgattatgtcattactggaagagtcttattcctttcccttaatctctcactcttgccccctgcccctgtgtaggactgaatacttcattctgttgtagagggtctttgtacacagtacattattacattatttaatttcttcactccccacctgtgaccttcctttctctgatgtctccttactaattccttcactttcacttttcctttcagctgtcatccactctttcctttttacttatctgctgaattaacttgctcacactgattaaccctcttttgtttgttattagtgctgcttagagtctttcttctattttctccatccagctttccttttactctctcattctgactttgcatccccagtcatgctcctagcctttaaagagttatccttagctacaagaaaaactggtaaataaaaatataaaatgaaacaaaacaaaaacttcacattcttctcacccgtctgcttgtgtatctgagcttaagttttctctattttcatttaatttcacccttaggacacaggccatttatttagtaaacatttgtttaatgtctgttatgtaccaggctctgtgctagagaaaacaaagtctgctctgcatgtgcttacagtctcttggggcattgtgcatcaggggtgcagggagcgacagacatgaataaattatcatagcgttgagattaaagctctgttgaaccacacaggagagcagttactgctgtccaaggagattaggaaaggcgaaggcatttttgtgaacttcatgt

SEQ ID NO: 9384 - DNA, 11051 bp, Homo sapiens
ctcggcgatgagctaagacgctgtttcagagcgtttgggtcctctgaggccccttgaccaggtgagcggaccctggagctgggccccgggctggggcggaactgcggcctaggggcctagggagcagctgcttcccggcgggtgcagagaatcttccctcgaccgagggggcggggtccgtagcggaggtgtcggccctggggcctatgagagtgatgaagctgtggatctggtaaacagagtacaaccttctgctgcatatttttcatccattcagcgcaattttaagtagatattaaaggtaggcgccaccgagaaggtaatatttgagcagaaatctgaaggaggtgggtggaaagacctaagtggcttttgcggtcaggaactttctaggtagagggaatagcaagtgcaaaggtcttaaagcaggagcttgcttggcatatttgaggaataacggggagaccagagcggttggagcagtgaacaaaggcgacctttgtagggaatgatgtcagagagattggggtatggagaggaagagtgtagaggaaatgagaactgtatcgtgtaaggaattttgtctttttttggtgtgtgtttttggaggattttgagcagaagaaaacatgatctgacttatgttttaaagcttctttacttggagactcatgatgataatagattgtaagtgggcaagaatggaatcaagaaaacttaaaagttaagagtaattttttaaaattccaagtaattcaggtgggagataaggatatcttgagccagtgatcagattatgatctgctttgaaaatagagacaataatatttgctactgggtcagatgtagggtgtgacagtaagaaggcaaatataaatccaaggttttgggcctgtgggtgcaagagatactggagaaaagatctgaggtttagctttggtacctcgtgtaagttcttcaactctccccgtctcaatttccttctctgcacgaagaaattaggaatagtgtcttctttatagggttgtgtgagggttaaataattaatatatgtgaaacatgtagtatagttgtcctggctcattgttttattatgctgagacatgaagtgtgagtgggcattaacaagaagaaaattggagggttggagggtggtccaagcagaaggaataagctgtggaagggccaaggagcaagaaggagtattgcaaatttgatgaaataaagtactttattagatcaaaaaacaatgtaaaccatattaaatgttttgaacttgatcctaagggtaataatcagccattatatgtaacaggcatagcagggacataataatatttcatatcctccttagaatgatcactgtttgcgtgtggaaaatagattggtgtctcagaccagtctgtttgtcacagtggtctaggtaggagaagacaatggcaaaggggatgagaagtggattgatttgagagatatttaagcaatagaatcaatagaacttgattgatcagatacatgagatatgaaaggaggaaggaatggtcagttttctggctcaaatagctgggtagatggagctcctcccaaaacagtttatcaaattatttattatatattgtgtttgatatatttaatcacattatagaaatgaactcaccactaattcagcctcatacccagccaggcacggtggctcatgcctgtaatcccagcacttcgggaggctgaggacggtggatcacttgaggtcaggaattcgagaccagcttggccaacatggtgaaacactgtctctgctaaaattacaaaaattagctgggtgtcatggcaggcatttgtaatcccagctattcgggaggctgagggaggagaatcacttgaacccgggaggcggaggttgcagtaagccaagattgcgctgctgtactccagcctgggcaacagaggcagactccatttcaaagaaaaaaaaaaaacacatcataccctatatatacatatcaacatcataccacatgtttatttatataccaatactgatatagataccagtatatatatatgtatgtggcatagatatatactgatatgggtatagatatctctatagatataataatatgaatacaggtatatataaaaaatacgaatacaggtatatatacctaaacaataatacgaattatgtatatatatacatatgcctgtatttgtgtcattatttgtataactagggtatctatatcggtaaagataggtagagatctagaaagagatttactatagggaattagcataggtcattatggaggctggcaagtctcagtatcttcagagtgagttttcaggctggagacccaggagagcaaatggtttagttccagctcaagcccaaaggcctgagaaccaggagagctgatggtgtagttcctgtctgaaggccataggcttgagattcagtaagagctgttttagttccaagtctgatggcaagaaaaaagctgatgattcagtttgaagcattttagacaggaagaattctcttactcagggatgagtcagcctttttgttctagtcagacttttaactgcttggatgaggcccaccaacattatggagggcagtctgttttagtcaacagtctaccaatttaaatgttaatctcattccaaaaacaccctcacagaaacatccagaataatgtttgaccaaatatctgagcaccctgtggccagttaagttgacacataaaattaaccattacaataccaatcttttattttctggctaataatcatcactttttttgagacagagtctcactctgtcgcccaggctggagtgcagtggtgtgatctcagctcactgcaacctccacctcctgggttcaagtgattctcctgccttagcctcccgagtagctaggactacaggcgtgtgccaccacacccggctcattttttgtatttttagtagacacggggtttcactgataatcatcactttcttggacttttttacttatattaagaatactaggaattggctttttaaagtttaagttcattttgactaagaaaaataattatcagctgggaaatgttaactatatacacattcaggaatatataacagcaaactgtttggaggctaagccactgattaagtgagccttctcccgttctcccacttaccgcatgcacattgattcaaaggcatgtgtcagcagctgacagatggtgtttcactgatctatagggatactcaagcatagtcaaaatcaagaatgctaaatccccacataccaagggcctgccccaaaggatggtagggaattgtctgagttcatttttgacatgttggatttgagaggcttctgtagggtatcctggtcccaaataggcagaaggaaattcaggtctgacacttgagatatctgacctgaagaataaggaaatcatcagcataaggacagtaattgaagtcacaaaaatacttatactctacattagccctttctagtttctgccctatctttcttgttccattcaatgtattacttttttgaaatttgtcatttatgctcactctccattttctcatttcctatggcaggctagctattctcactaccaaaattaccttcacagaggtcactaatgacatctttgtttttgaatcaagtgtctatgccaggtcttagattaattcaccatcttatagcatttcacactcttgaacactgtgctcatatcatttcccttataaatcagtgaattccttctgttctttagaattatctcatttacctcaaaacttctgtgaattaggtattatcttcattttacaaatgagtaaactaagtccaaaaggataagttacttgccccaggtcacaacatgtaagtgacagggctggattggaacccaggcctgtctaaggcccagggtctttccaccattccacatttacagaaatagacctccttgaccttctggatactattgtcttttttctcctcctacctttccagttccatctcacttctgtttcttacatgtagatgtttcccaggattccggctccatataacgttttcccagccataactaactactacactgaacatccaacagctttatggtgtcttttttgtctgaaaaaactttctctatttccttgtctttcacttgtcttttttcttttctttttctttctttctttcattctttttctctcttttcttccttttttgatataggtcttgctctggttgcccaggctgaactcagactcctgggctcaagcagttctccctcctcagcctcccgagtagcttggattacaggcatgtgccaccatgcctggtgtcactatgttgcccaggctggactcaaactcctgggcttaagcagtcttcccacctcagcctcccaaagtgctgagatgacaagtgtaagccacagtgcctagcctcagttattttgagggctacaaaatggtgatttttcaaatctattattccttctacattagatggtattctgtaagatagttttttccttctgtatgtatgtttagaaatggttgttttagagagaaaaaatggataataggaaatgtataaacccaagaaaatgttactgttcttgttagcagtactattactgtttctgtcactcttgttactataattttaggagtgtctctgaagatacagtccaaagaaagttctccaaaacaaggagaacagtctgaagctggggatggcaacagcattggtgagtgcccattccctggctcccctgaatctgaagaaggaggggcttcgggtagtgagggaggatcactactctacttgggaacagggattcaagctgcaaggaaacagtaaaggccttggacaggagccattgtgcaaacaattcaggcagttgcgttatgaagagaccacaggacctcgagaagcactaagtcggctccgggagctctgtcaacagtgctacagcccgagacccataccaaggagcagatcctggagctgctggtgctggagcagtttctgatcatcctgcctaaggagctccaggcccgggtgcaggagcatcacccagagagcagggaggacgtggttgttgttctggaggatttgcagctggatcttggagaaacaggacaacaggtggtaagggtcagatgtgctctttttcaggaatgcaggaattgagatctctggccagacaggtggacatgggctcatcagcggaaggagaattactaagctttgattcagtttttttccagtctagctgttaatttccttaggtcttacctcaaccttacctggcccttgcttggagaaaactgaatgtgcaccagattccccatcttcttttctttgcccctctggggtttctctttcttctcttttttaacacctaggtgttttactgaacagcagtttcctaaacccacatatatctaattatgcctccatatacctaattgtccctaggacccagaccagccaaagaaacaaaaaatacttgtggaggagatggcccctctgaaaggagtacaggaacagcaggttcggcatgagtgtgaagttacaaagcctgagaaagagaagggtaagaattggattgcatcttctgtgtgtgagacgtggtggactgtgcctttccctctgaggttgtgcttagcacccttgtattttgttttttgcttttgttttgagtcaggtttactgaagcataatttatatgtagtaaaattcactctttttagatgtacaggtcaatgagttttcacaaatgcgaaataattgtggtctaatcaggaccactatcaagagataagagatatctatcaccccaaatattttagctgaacaaaatagcaagaaaagggtacaaagggaacctggaccttcaccttgctcttcttcctcttactgtaggggtgaataaaaaaagcagtgccaggccagctacttgggaagctaagggagaaggatcacttgagcccagttcaaggctgcagtgagcaatgattgttgcactgcacttcagtctgggcaacatctcttaaaaaagcaaatagtggccaggcatggtggctcatgcctgtaaacccaacactttggggggccaaggtgggtaggtatacgaggtcaggagttcaagaccagcctggccaagatggtgaaacactgtctctactaaaaatacaaaaattagccaggtttggtggcgggtgcctgtaatcccagctactcgggaggctgaggcagagaactgcttgaatccaggaggctgagattgcagtgagctgagatcacgccactacacttcagcctgggcgacacagcaagactctgtctcaaaaaacaaacaaacaaaaaaaaaaacaagtactgctagtttcttaatcaaggcaaagaaagccacatgcttcattactcattttttaacatttccttcaaattattgtaaatggccactatctttcatttctaaacgtcacctggatttttttttttttttggttctatactttcttttttgttgtttttctattgagacagggtcttgctctgtcttcaggctggagtacaatggtgcagtcatagctcactacagccttgaccttccaggctcaagtgatcctcccacctcagcctcccaagtatctgggactaccggtgtgtgtgccaccacacctggctttttattattattatttgtagagacagggtctccctctgttgccctggctggtctcgaactcctggtcttaagcatttctcccatttgggcctctcacagtgctggcattataggtgcaagccactcgcccagcctcctttattttctttgtcactgaaattcttcttcctaatttttgctccttacattttttcatttcttcttttttttttctgtcatagaactaattacattatattgcagtttctagtttgcttctctttttctcttgccagactaaaagggaaggggttttgttttgttttctgagtcagctacagtccctggcctagtgtagaccctcaataaatgtctgtttgatgaatgactggttttatatgtaaaatcatgctttacatgctacctattcctctgttcaatttccaagtcagcttcaaattacctttcttctgggagcatcctgaataaagtagctgaaagaaaggggcctaccttttctcaatagccttgcagaaatgaattagccttgcagaaatgattaccatgtaatcagtgatgggtgtatagtttaaatacaaaaagtaaatgtggctgctgtaatcccactactttgggaagccagagtgggaggattgcttgaagccagatgtttgagaccagcctgggcaacatagtgaaaccctgtcctctacaaaaaataaataaatagctaggcgtggtggcatgcagctgtagttctagccacttgggaggctgaggcaagaggattgcttgagcccaggagttcaagactgcagtgagctatgtgattgcaccactgtactccagcgttggcaacagagcaagaccatgtctcaaaaaaagtgaatgtaatgtcagtagactcttgaaaatgtcccttaccctctggatctgttaaaaatgttattttatattcaaagttcaggttgttttttggtttcatcctctcttgcttttttaaagttgtatatgtgattatgtcattactggaagagtcttattcctttcccttaatctctcactcttgccccctgcccctgtgtaggactgaatacttcattctgttgtagagggtctttgtacacagtacattattacattatttaatttattcactccccacctgtgaccttcctttctctgatgtctccttactaattccttcactttcacttttcctttcagctgtcatccactctttcctttttacttatctgctgaattaacttgctcacactgattaaccctcttttgtttgttattagtgctgcttagagtctttcttctattttctccatccagctttccttttactctctcattctgactttgcatccccagtcatgctcctagcctttgaagagttatccttagctacaagaaaaactggtaaataaaaatataaaatgaaacaaaacaaaaacttcacattcttctcacccgtctgcttgtgtatctgagcttaagttttctctattttcatttaatttcacccttaggacacaggccatttatttagtaaacatttgtttaatgtctgttatgtaccaggctctgtgctagagaaaacaaagtctgctctgcatgtgcttacagtctcttggggcattgtgcatcaggggtgcagggagcgacagacatgaataaattatcatagcgttgagattaaagctctgttgaaccacacaggagagcagttactgctgtccaaggagattaggaaaggcgaaggcatttttgtgaacttcatgttattgtcaaggtcttatagtacattattctttctttatggatgaggacacagagcccagatgatttaccttacttttttaagattacacagttagtgataaaattgggcaccacatctacatttcttcattttcagttaaaatgtcgtccctttcttatgggccctgggggcctcaattaacctagctttttttattttccatgtgacaagttatcttcaagactgtacagccatgccctttaagacagtttatttgcttgcttgctagcttctctgtgtgtggtatcccatgataaaatttaaactatttaaaataagtcacctcccaccagaattccccatctttccccaaagacagtcacagttaacaatgtcttgtgtaccattctgtaactattttacgcaatcacaagcatccacaatgtttttactttgcacacatggcttcattatatttttttttccttttagttgcagattcctttccccaagcatcaaaagacaagtaattggtggtatatatttaatattgcaggtgaggagacaaggattgagaatgggaagcttattgtagtaacagactcttgtggaagagtagagtcatctgggaaaatatctgaacccatggaggctcataatgagggctctaacttggaaaggcatcaggccaagcccaaagagaagattgagtataaatgctcagaacgtgagcagagattcatccagcacttggacctgattgaacatgcgagtacacacacgggaaagaaactctgcgagtctgatgtgtgtcagagttccagtcttacaggacataagaaagtcctctctagagagaaaggtcatcagtgtcatgagtgtgggaaagcctttcagaggagttcacacctcgtcagacatcagaaaatccatcttggtgagaagccttatcagtgcaatgagtgtggcaaagtctttagccagaatgcaggccttttggaacatctcagaattcatactggagagaaaccttatctatgtatccattgtggaaaaaattttaggcgcagctctcaccttaatcgacatcagagaattcacagtcaggaggagccctgtgagtgcaaggagtgtggaaaaacctttagtcaggccttactcctcacccaccatcagagaatccatagtcactccaaaagccatcaatgtaacgagtgtggaaaagctttcagtttgacctcagaccttattcgacaccacagaattcatactggagaaaaacctttcaagtgtaacatatgccagaaagccttccgactaaactcacaccttgctcagcatgtaagaatccacaatgaagaaaaaccctatcagtgtagtgaatgtggagaagccttcaggcaaaggtcaggtctttttcaacatcagagatatcaccacaaagacaaactggcttgatgaggtgttctctccttgtagaacatcagagaaggcacattgactagcaaacagcactttaggaaaagtcaccgtagcccactgtggcatcagaaaattcttgggggctgagttggaggctccctgcctctattctctctcctttgctttccttgaagtcagctttggaccacaataatttcactgtagatgatatgctaggatcaaagttaaacagcattcttcactgcaggacatctcagagcatgtaacataactgcatgattatatactctaagcaatagagagcttcatgactgagtaagagttttgaagtcagcagtgaatcaagtgcccacagatttgcaggcttaagcagaacaagggaagattgatatttttggatatgctatagcagctttctcctatgaaataaaactgatgatgtttggaagtatactactctcaaaggtgtctttaaagtacaggttaatggtgaacattttcccccagtggcttcacctcattcctcccactggccttaccccttccttccccagtggaagcattttcaaaagcaaagataattttcgctggtgaacttcagaacttgccttcagggttagcttcatgtaattttaccatttcccatccccattccccaccacattatgtcaagattcaagttataaattaacgttttacttagactttgaaagagatttcatgagtaatttgaatgaaccttgctgaattaatctgaatagcaactgtctgacttgataactccagtgccagtatagtggctgctgcatagacactattcagtaaatgtctgatgaaagaaattggactttttccctttaatactgatgatgcaattttgaaatgttgcttgttctggaatacttcggaagttaaacaataaagtcagcttggagaggagatcatgatctttatactgtgaatagcagaatgtcacagatgaagaatattaaaattaggggcgtccactccaaaacatatcaccagagtgacaacttcagccctcagcctctgcaatccatatatatcctggtcttgggagtccatagaatactgtttccttctaataaaggtttcaaacaaa

SEQ ID NO: 9385 - DNA, 2339 bp, Homo sapiens
  SITE (2274): n equals a,t,g, or c
caagttatcttcaagactgtacagccatgccctttaagacagtttatttgcttgcttgctagcttctctgtgtgtggtatcccatgataaaatttaaactatttaaaataagtcacctcccaccagaattccccatctttccccaaagacagtcacagttaacaatgtcttgtgtaccattctgtaactattttacgcaatcacaagcatccacaatgtttttactttgcacacatggcttcattatatttttttttccttttagttgcagattcctttccccaagcatcaaaagacaagtaattggtggtatatatttaatattgcaggtgaggagacaaggattgagaatgggaagcttattgtagtaacagactcttgtggaagagtagagtcatctgggaaaatatctgaacccatggaggctcataatgagggctctaacttggaaaggcatcaggccaagcccaaagagaagattgagtataaatgctcagaacgtgagcagagattcatccagcacttggacctgattgaacatgcgagtacacacacgggaaagaaactctgcgagtctgatgtgtgtcagagttccagtcttacaggacataagaaagtcctctctagagagaaaggtcatcagtgtcatgagtgtgggaaagcctttcagaggagttcacacctcgtcagacatcagaaaatccatcttggtgagaagccttatcagtgcaatgagtgtggcaaagtctttagccagaatgcaggccttttggaacatctcagaattcatactggagagaaaccttatctatgtatccattgtggaaaaaattttaggcgcagctctcaccttaatcgacatcagagaattcacagtcaggaggagccctgtgagtgcaaggagtgtggaaaaacctttagtcaggccttactcctcacccaccatcagagaatccatagtcactccaaaagccatcaatgtaacgagtgtggaaaagctttcagtttgacctcagaccttattcgacaccacagaattcatactggagaaaaacctttcaagtgtaacatatgccagaaagccttccgactaaactcacaccttgctcagcatgtaagaatccacaatgaagaaaaaccctatcagtgtagtgaatgtggagaagccttcaggcaaaggtcaggtctttttcaacatcagagatatcaccacaaagacaaactggcttgatgaggtgttctctccttgtagaacatcagagaaggcacattgactagcaaacagcactttaggaaaagtcaccgtagcccactgtggcatcagaaaattcttgggggctgagttggaggctccctgcctctattctctctcctttgctttccttgaagtcagctttggaccacaataatttcactgtagatgatatgctaggatcaaagttaaacagcattcttcactgcaggacatctcagagcatgtaacataactgcatgattatatactctaagcaatagagagcttcatgactgagtaagagttttgaagtcagcagtgaatcaagtgcccacagatttgcaggcttaagcagaacaagggaagattgatatttttggatatgctatagcagctttctcctatgaaataaaactgatgatgtttggaagtatactactctcaaaggtgtctttaaagtacaggttaatggtgaacattttcccccagtggcttcacctcattcctcccactggccttaccccttccttccccagtggaagcattttcaaaagcaaagataattttcgctggtgaacttcagaacttgccttcagggttagcttcatgtaattttaccatttcccatccccattccccaccacattatgtcaagattcaagttataaattaacgttttacttagactttgaaagagatttcatgagtaatttgaatgaaccttgctgaattaatctgaatagcaactgtctgacttgataactccagtgccagtatagtggctgctgcatagacactattcagtaaatgtctgatgaaagaaattggactttttccctttaatactgatgatgcaattttgaaatgttgcttgttctggaatacttcggaagttaaacaataaagtcagcttggagaggagatcatgatctttatactgtgaatagcagaatgtcacagatgaagaatattaaaattaggggcgtccactccaaaacatatcaccagagtgacaacttcagccctcagcctctgctttncatatatatcctggtcttgggagtccatagaatactgtttccttctaataaaggtttcaaacaaa

SEQ ID NO: 9386 - DNA, 1726 bp, Homo sapiens
gaagagctggagctggaggcatgcggcccacgaagggtagaagtaagttcatttctctggtagggcttaggggaggggtagtcacaggtagggcttgggatgtggggctgggatggctcctacagggccagaaggcaaagaaagggcagcagatgggcacagcagggacaagggtgtggtgaggaatctgactgctccagcccaagctggcatggcctctctgctctcgccttctgccctctttctgtaatctttcatctctgaggatgttgggccattcctgggtccctccttcttcctgcaattctctctacccttccaccctgttgccctctcccctccctcgcttcctattgtgtcctgcccactgccgattccatcctccttatctcatgtctatccatgattgacatgatggaaatggcacagtagagtccaatggtgataagcactctccgtgtttgcaggtaccagccatgaccaagagcccttcacatcatctggcaatccatccagaacccactgaatggaggacagcacagcgaggtctttctcattttgtaactgcaaaagctggaacaagagccagagaagccaaagaagcagtacaagtccaacagcttttagaataaccctgagaaaatggttgaattttgaccagttttgcaattggatactatgagaagagaccttccctcctgcactggatttcatcatcatacctggaggccattcctcatgggactttggccatctcatatccacctttaagcatgttattcccatttcagctgtggtagctctgggtatccttccctaggagaaaatattaatcttttctccctctgagttctggattaaactgtcttatctgaaactgggtcactttaggctagaagcaccactagacattcctgttctcagaagttgccaagttcatgtcatatctgtttcattgttaacgggatccacttctgcaagaggctgcctggccagatcagtgtgtctcctggtcagctccttgatgcccttctcctctcccctgcccaatcccagctgagacttgcactgtggtgactctgtcccctcctggtgctttgactggatgtgtgagagaaagtatggtctgtggcactgacatctttgtgtgtttggaggtgactggaacacggatccacccctggaggaaggtggccgtgaaggaggccagcctcagctcagcgttctactctcatcgctcttactcccgcctttttagtgcctgccctactccaggataattgtgcttttcttttttcagttaaatgttagcattgctatttttcattattgcaaagcagcacatgcttgttacaaaaactttggaagtgtagacaaataaaaagaagaaaaagctacttccaaatcctacttaccccaaagacaagatgatcatttagtcatatagtatcatacatatataatatgtacacatatattttaatgtaagtgtagtgtcacaatatcatgtatagtctttcataaaacacgttggcacttaatatcttatatgaacaactttctagagcaacaagcttagtttacagcaattgtaatgtaagagtactcatttacatagctacagcatccctttgtttacctcatctcttatggattgatgtttaggttgtttccaacttttctccacctaaacagcattaataaatgtggttttaggtttcctctt

SEQ ID NO: 9387 - DNA, 1721 bp, Homo sapiens
gaagagctggagctggaggcatgcggcccacgaagggtagaagtaagttcatttctctggtagggcttaggggaggggtagtcacaggtagggcttgggatgtggggctgggatggctcctacagggccagaaggcaaagaaagggcagcagatgggcacagcagggacaagggtgtggtgaggaatctgactgctccagcccaagctggcatggcctctctgctctcgccttctgccctctttctgtaatctttcatctctgaggatgttgggccattcctgggtccctccttcttcctgcaattctctctacccttccaccctgttgccctctcccctccctcgcttcctattgtgtcctgcccactgccgattccatcctccttatctcatgtctatccatgattgacatgatggaaatggcacagtagagtccaatggtgataagcactctccgtgtttgcaggtaccagccatgaccaagagcccttcacatcatctggcaatccatccagaacccactgaatggaggacagcacagcgaggtctttctcattttgtaactgcaaaagctggaacaagagccagagaagccaaagaagcagtacaagtccaacagcttttagaataaccctgagaaaatggttgaattttgaccagttttgcaattggatactatgagaagagaccttccctcctgcactggatttcatcatacctggaggccattcctcatgggactttggccatctcatatccacctttaagcatgttattcccatttcagctgtggtagctctgggtatccttccctaggagaaaatattaatcttttctccctctgagttctggattaaactgtcttatctgaaactgggtcactttaggctagaagcaccactagacattcctgttctcagaagttgccaagttcatgtcatatctgtttcattgttaacgggatccacttctgcaagaggctgcctggccagatcagtgtgtctcctggtcagctccttgatgcccttctcctctcccctgcccaatcccagctgagacttgcactgtggtgactctgtcccctcctggtgctttgactggatgtgtgagagaaagtatggtctgtggcactgacatctttgtgtgtttggaggtgactggaacacggatccacccctggaggaaggtggccgtgaaggaggccagcctcagctcagcgttctactctcatcgctcttactcccgcctttttagtgcctgccctactccaggataattgtgcttttcttttttcagttaaatgttagcattgctatttttcattattgcaaagcagcacatgcttgttacaaaaactttggaagtgtagacaaataaaaagaagaaaaagctacttccaaatcctacttaccccaaagacaagatgatcatttagtcatatagtatcatacatatataatatgtacacatatattttaatgtaagtgtagtgtcacaatatcatgtatagtctttcataaaacacgttggcacttaatatcttatatgaacaactttctagagcaacaagcttagtttacagcaattgtaatgtaagagtactcatttacatagctacagcatcctttgtttacctcatctcttatggtttgatgtttaggttgtttccaacttttctccacctaaacagcattaataaatgtggttttagtttcctctt

SEQ ID NO: 9388 - DNA, 117 bp, Homo sapiens
atagagatggggtttcaccatgttggccaggctggtcttgaactcctgacctcaggtgatccacctgcctcggcctcccaaagtgctgggattacaggtatgagccaccatacccag

SEQ ID NO: 9389 - DNA, 2355 bp, Homo sapiens
taatagcaacttatattattttactatttacagagagtgtccacatatgttaacttccttgatcctcacaaacaccctatcccttgggtattttctaccagccccatgaggctcagagagatttacatgactttttgagggtttgaacccaactctttggtctcaaaaacatctcattccagtacacctcattgcctcccaagccctgtatccaggaagacctgactcaccagcatgctttctgtgcgaaaggacaccagagctgagaagtaaatcgacaccacccccaatccctgcaacttcctcttctctgtcctgtcattgagaacaccagcctaagggcacgtttttctccttccacgttctattaaagctcagtagtctaactcctactattgaaaatgagagaaacaggaaggaaagtctcaaattccaactttggaaaccacgttgaaagaaggtgctctcatctggacatgatggttcacgcctgtaatcccagcactttgggaggccgaggctggcagatcacgaggtcaagagattgagaccatcctggctaacatggtgaaaccttgtctctactaaaaatacaaaaattagccaggtgtggtggcacgtgcctgtagacccagctacttgggagtctgaggcaggagaattgcttgaatccaggaggcagatgttgcagtgagccaacatcatgccactacacgccagcctggcaacagagcaagactctgtctcaaaaaaaaaaaaaaaaaaaaaaaaaaaaagaagaagaagaaggtgctctctcatcattcttctgtacattcatttgttcattagacagatatgtatagagaatctgctgtgtcccaagcactgttctaggtgctgcggttatagtggtagacagaaaggtaaagttcctgccctctcgaagctcacatcctactttcagggggtaatgagcaagtagatgatgaacaaatgttttatatagttctagggctataaggagtgtagagaaggctgatgagatgcagtgtaactggcaggaggggagtgagaactacttgggtagatgatcaggagatactctgcaagaggaaacatacagaaggagcctgacatgagaaaactggggcagcagttttccaggaagagggaccagcacaggtccaagttgaaactcagaatggaattttaggaaattatattcttcatgatggttagatcctgtgggctatcatcactgcagttcaacaatgtggtgcctagtaggaagagttctcccaggaaccctccacgtgtgctatgggatttctgagaaaaccagttctgagttctaggcagtggactcacagttgaacttggagggaaccaagaattgcttccatcatagccttactaagaaatgaccatggcatggcctgagtgcttcggcatggaggaccagaaggggaagccctaatttgccagttgcagactcttgagccttgtgactctaatgacgacaaaaattaggagattttctaggactccacgtttgcgattttgagagtagtgctgctggggttcctggtttgggttctattgattgtttcattgtttctgtgtgcaagttaccctctctaagcttagtttaattaatattatattaagtgaggtagttagattatatgaaccctaaggctccttttattcttaaccttaaaataaaaacattttgtaaacagtttttctttgtgtgtgtgtggtggccttttctgtgcctctgctttggatgaggttacagggctgagtgcaagtgagtcattagtggttcctttgatataagacaggtgatactattgaacactgttggtggtagaccagtggttctcaaagtgtggtctctggaccagcaatagctgggcttgggaacttgttagaaactctagctgtcagcctccaccccagacctactgattaaaaaaccgtaggagtgtaaccaaaactctgtgttttaacaaagtctacaaatgattctgatgcatgctaaagtttaggaaccactagagtagagtatgtgctttaagatttgggtctaccggccaggcgtggtgtctcatgcctgtaatcccagcactttaggaggccaaggtgggtggatcccaaggtcaggagtttgagaccagcctggccaacatggtgaaaccccatgtctactaaaaatacaaaaattagctgggcatggtggtgcatgcctgtagtcccagatactcgggagggtgaggcaggagaattgcttgaacccaggaggcagaggttgcagtgagccgagattgcgccattgcactccagcctgggcgacagggcaagacttgg

SEQ ID NO: 9390 - DNA, 972 bp, Homo sapiens
ctcagcttatagaaaatgacatttgcctaaggtcaataattgatagagctacaagtgaattcaggtctactgatttatgcctttattatcaaagacacactgaatggctaccttaggccataacctgtgcatttaactactagattttcctcataacaagtgggctttgttgaggagttggcatgcatctcaattctgataatgagagcaaaatatagtatgtggaaagtgtattttccaaagatggccacagcaatattttaggtcttacacgctctatagaaccactccccaaaacagattgagttcattttcatttcctcttgaattttggcaggcttgtgactattccaaagaatgaattacatggagtgatgcaatggaatgtctaagcctgagaatacagtgtctccctttttccaggagaagctcattttggaagctggccgccatgctttgaggaagcccaggccacataaaggtggccatgaacaagtgttttaggaagttgtcccagctaagattttagctgacagttgagatcaatcactagacagacaagtgagtgaatcttcagatggtcccagcttccagctgttgaatcttcctgctgagctccaaaccttgtgaacaggatgattaagttatctctgctatgctcatgagcgtaagaagtggttgttttcagcttactctaagttttgggggtgattcgttatataactgtattaaccacaacatcatgttccatttttaccttcgctgtcaggaaactcaaggtcaaatttattccttaaatacagcaactgcaatagccttaagtgttagaacaactactttttaattttataacactgagcatatatttctattttattaatcttattttgtctttcgttgaaaaaatatgaagtgtacataaacaacaaaatgacccctacctaccccctaataataaaagtatgaatttaa

SEQ ID NO: 9391 - DNA, 972 bp, Homo sapiens; identical to SEQ ID NO: 9390

SEQ ID NO: 9392 - DNA, 572 bp, Homo sapiens
gcacaaaaatcctccatgatttcagcactcaggtataggaaattgggagtagctcccaagcccattctgcccaagtggcttagcatccttgggccattgaatatgacttgaacagctgcatgcagctgctggtgacaaaactcccaggaaacctggtggaactaaaatcagaaatggtgatccaattaatgccgctgaacctcaaatgctgactccaaacttggggactctgcattagcattaataatgatttccttaaaatcattcagtggtttggatagctatctaaatctcattgagaagccaactctctttgcttagaaatgtgtacttacagcacttaggcaaatgatccatggcgagataaggcccttataccgggtgcttgaaagggcagtacccctcatagctaaaagatactccaaggacatttcatgtgagcaggataaatgagaatggcaagcattaagattaacttcatgaaagttaattcaagacagagtgacaatttcaagtcttttttaaacatatggttctttttaacaataagacattctacatgggtataggaa

SEQ ID NO: 9393 - DNA, 597 bp, Homo sapiens
gcacaaaaatcctccatgatttcagcactcaggtataggaaattgggagtagctcccaagcccattctgcccaagtggcttagcatccttgggccattgaatatgacttgaacagctgcatgcagctgctggtgacaaaactcccaggaaacctggtggaactaaaatcagaaatggtgatccaattaatgccgctgaacctcaaatgctgactccaaacttggggactctgcattagcattaataatgatttccttaaaatcattcagtggtttggatagctatctaaatctcattgagaagccaactctctttgcttagaaatgtgtacttacagcacttaggcaaatgatccatggcgagataaggcccttataccgggtgcttgaaagggcagtacccctcatagctaaaagatactccaaggacatttcatgtgagcaggataaatgagaatggcaagcattaagattaacttcatgaaagttaattcaagacagagtgacaatttcaagtcttttttaaacatatggttctttttaacaataagacattctacatgggtataggaatggaaattttaatttaaattttacc

SEQ ID NO: 9394 - DNA, 187 bp, Homo sapiens
gatgggattagtgtctttataaaagagacctaagagagacctctcaccccttcctccatgcatggacacaggaagaagatggctctctacaggaagagggacctcaccagacaccgaatctgccagcaccttgatcttggacttccagcctccagaactgtcagaaataaatttcttttgtttgtaa

SEQ ID NO: 9395 - DNA, 187 bp, Homo sapiens; identical to SEQ ID NO: 9394

SEQ ID NO: 9396 - DNA, 1027 bp, Homo sapiens
cagaatggtttgtttaacatgactctggtgtccccctcactgatcttatatttgaatgacacaagtgctcaggcttatcacagctggtattcccttcactataaaaggaggccttcccagggtcctgaccaggagagaagtctgtctgcctatcctgtgggagaagaggctgctgaggatgggagatcttcccatcaccgtcaccgcagaggtcaggaaactgtcagttctgaattgaagaagcccttgggcccagcttccttcaatctgagtgaatacttcagacaatttcttcttccccaaaatgagtgtgagctccatgactttagacttagctttagtcagctgaagtgggacaactggattgtggctccgcacaggtacaaccctcgatactgtaaaggggactgtcccaagggcagttggacatcggtatggctctccagttcacaccatggtacagaacatcatctatgagaagctggactcctcagtgccaagaccgtcatgtgtacctgccaaatacagccccttgagtgttttgaccattgagcccgatggctcaattgcctataaagagtacgaagatatgatagctacaaagtgcacctgtcgttaacaaatggtcctcttaaaaccttgagcctatttggcaaagtaactactgtgtgcctatgtgtgccttcaagagaaagcttcatatattaagtctctaaatgtagcatatgttatataaagaggagcctgtgtaggttagtaccttctatggcatctatcaggataaagggataacatcaattgttgctacagagcctttttttatttccaaatttaaatgaaatataattattgtggagaactttacatttttttccttgagtgattttttttcttttcataggagtcttattcttgatagggaaaaaaccttaattagcatcaatcctggatggacttgcagctataaataggcaattcagattgctgtagtcttaatagaagaataaatttctgtcaatggcataaa

SEQ ID NO: 9397 - DNA, 1004 bp, Homo sapiens
ctctggtgtccccctcactgatcttatatttgaatgacacaagtgctcaggcttatcacagctggtattcccttcactataaaaggaggccttcccagggtcctgaccaggagagaagtctgtctgcctatcctgtgggagaagaggctgctgaggatgggagatcttcccatcaccgtcaccgcagaggtcaggaaactgtcagttctgaattgaagaagcccttgggcccagcttccttcaatctgagtgaatacttcagacaatttcttcttccccaaaatgagtgtgagctccatgactttagacttagctttagtcagctgaagtgggacaactggattgtggctccgcacaggtacaaccctcgatactgtaaaggggactgtccaagggcagttggacatcggtatggctctccagttcacaccatggtacagaacatcatctatgagaagctggactcctcagtgccaagaccgtcatgtgtacctgccaaatacagccccttgagtgttttgaccattgagcccgatggctcaattgcctataaagagtacgaagatatgatagctacaaagtgcacctgtcgttaacaaatggtcctcttaaaaccttgagcctatttggcaaagtaactactgtgtgcctatgtgtgccttcaagagaaagcttcatatattaagtctctaaatgtagcatatgttatataaagaggagcctgtgtaggttagtaccttctatggcatctatcaggataaagggataacatcaattgttgctacagagcctttttttatttccaaatttaaatgaaatataattattgtggagaactttacatttttttccttgagtgattttttttcttttcataggagtcttattcttgatagggaaaaaaccttaattagcatcaatcctggatggacttgcagctataaataggcaattcagattgctgtagtcttaatagaagaataaatttctgtcaatggcataaa

SEQ ID NO: 9398 - DNA, 102 bp, Homo sapiens
tacctgtagtcccagctactcgggaggctgaggcaggagaatcgcttgaacccaggaggcagaggttgcagtgagccaagatcgcaccactgctctccagcc

SEQ ID NO: 9399 - DNA, 102 bp, Homo sapiens; identical to SEQ ID NO: 9398

SEQ ID NO: 9400 - DNA, 12553 bp, Homo sapiens
gcttcattttagtcatactgtagactcattaaaaccagggttcaaggactcacctaaggtatgataatattactgagttgtcaaatgctctttaacctaagagaaggatgaaataatagtctgggtgttgagtagaaaagctccttcttttgcccatgagggaaccagctatgtgtccccctttaaccttcctgatgataactacagcctgtagagtttaatataataatgataataataacaatagtaaagtttcttagattttattacctgctttattgccatctttactcaaacttttttgttcctttatggacggtgccctgtgttgagtttgccagttttgtctatgtggtgttagacttttctgtctagagtggggactgagaaaggaccctgatgcttggcatataattatgtactgggaaaacatggcctaatattgcccaatccacatgctctgggactatggtctctagttttttccagtagaaggattcattttgacatcaaaattatatagaactcctacatgaaaatagttctgtttgattacgattggttgagaaaatacataaatgcatatagactcacagaataccagcttcacggaacccaacttactactaaaagttcaaagtccatagtttaggaaccatttgctttagggaatgctttagggaatataggaatattgcctataatgtccataaattcttagccatctttcaaatgcaacaaagctgcagcttagcagaattgctaccactgagaagcaaattagtgtgtgaagtcagttcagtgaagggctgaggtatttgattaaatgaccacatgaaaaatggagatgtagaaaaaagtgtgaaagaaaagagaaacgattctgtaagtacaaaggcagcaataacactggaattattgccctgaataccccactaggatctctttatttatgaaaactgcctttgaattaaatcattaggaccaacaagtacacatgtattatgcagtaacttacaattctgcacacagactgcaactaaagttacagagtggtgaaattaatgtgctagcaaaaatccaaggaagaaaatgctttaaactaatttccttgtattcacagcccttttattcagaggcaaacaccttgctctctagatagttatcattctccaatggcaaaaatcaagcaatttaatacatcattctttgtttactgatgcttcagtgcagccaagctggaagaattcattccgagtttggtgtctaattctctcaaatcaaccagccagactctaactgtaccctcagcattgccaacaggctctacgggacaaagacgatggcatttcatcaggtaagtccatttggaagagtgatcaacaactttcttggcgtcctctgaatttcataccccaaaattgatgaagagtgagaagagtcacatgacatttatcattaagagattgactttgtgctaacttacagtttcagtgaaatggatttattgaaactctcatgtaaagttcccaaatatcacataaaaatgacttcttcaagatccctaatgctgtctaagaaccaaggtcagggatgaagcacaaaacaaagtaggtaagaatcatccctgtggaccagaagaaaaacaaaatcaatttttcatatctttttcagaggttcttaatagtggagtatcaagaagtagttgaaattacattggactgtgagccaagagacaggagttctgtttccatttagaatatataactttgggcaagtcacttctgtctttaaaatgagaggattaggcttagttctttgtagctccaatattctaacaccatttatgccctttcccaacaccatggtcctatgtagttttattgagtatttactctgtgccagtcattctgcttagctcattacaagcattatctcctataatcctcacactgtgctaagatattggtataaaatttccattaattctacagactgtgaagcagattctgaaaagtcaggctgataagggtcacagacatatttaaatggcaaaacctggatttaacccctatgcaaatctgtcttcctggttttaattgctacatcatcttgtgattgaggtgaaatgcaagcttttgtttgaccagggttatttaaatgctatctgggtgaagctggatgaaaacatgagtttctaatgttcttccctggcctggtagatcaggttatgtcttggataacctatgtgatgagcttctgatagtcagaatatttgcaacttggggtaggtattatagacattcagagagtattttcttttactgccctggaagcatatagggaacgatgtatggagagtgtctagagtggcagggattaacaatcacggtcctttgagctggtatgcccgctctcttgactttgccttctcaaaacagtgacccagatataacagtagacaaatgtggatttgggatgatcatgatgacatctgttccagaagtgagaaggtcctcattagcatcatgaagattgtcttgaactatgtcatgagagggaccttgttatttcaggattctggctgggaaaaagtccatctcctgggctatggagagttacttaaggttgtttcaaccacaattggatccagctcaggacaagattcattctgaggcccagattttgctcatagtatattgggggaacccgccctgataattcaatgtaggttcttttctgttttccctatgtgtcggctggtctgagaaataaagggaaagagtacaacagagagaaattttaaagctgggtgcccgggagagacatcacatgtcggcaggttccatgaagccccccaagccgcaaaaccagcaattttttattagtgattttcaaaggggagggagtgtacgaatagggtgtgggtcacagagatcacatgcttcacaaggcaataaaatatcacaaggcaaatgggggcagagcatcggggcaaaattaaaattgctaatgaagtttcgggcatgcattgtcattgataatatcttatcaggaggcagggtttgagagcagacaaccggtctgactaaaatttactagtcaggaatttcctcgtcctgataggcctgggagtgctacgggagaccggggcttatttcatcccttatctacaactgtataagacaggcattcccagagcagccatttcagagacctccccctaggaacgcattctctttctcagggctgttccttgctgagaaaaagaattcaacgatatttctcctatttgtttttgaaaagagaaatatggctctgttctgcctggctctcaggcagccagatctaatggttatctccctagttccctgaacatcgctgttatcctgttcttttttcaagttgcccagatttcatattgtttaaacacacatgctttacgaacaatttgtgcagttaacgcaatcatcacagggtcctgaggtgatatacatcctcagcttacgaagatgatgggattaagagattaaagaagacaggcatagaaaatcacaagagtattgattagggaagtgataaatgtccatgaaatcttcacaatttatgttcagagattgcaataaagacaggtgtaagaaattataaaagtattaatttgaggaactaataaatgcccatgaattcttcacaatttatgttcttctgtcacggcttcagcaggtcagtccctccgttcggggtccctgacttcccccaacattagttaagctttgtttttcttctacgctaggcacatcttccatatttcaaagtcttgtattgttctattcagttcatgttggggcattgagtcccactgggctgtggaggtatgctccttaggtctcaggaattgcatcatggtaaactcatttgggtccatgtagatatcactgttgtcttggcagaaagacaacggaaagtctccagttctatagaaatctagggccatgggtggtcataaattgttgctccagaatgctacacaggagggcctccggagtaaaaatttttggttaaaagaaagggtaagttctttatactgagtttgcacaccactttcacttagataatatgttataggtgaacgaaataataaattcttaagatatttttgttcacactttacataaatttgacagaaatgccaactatctacatcacagaatgtttttattattaattatatttatggcagcttgtgaggagattgatatatatcatgggagcaaccttctgttagacctcagaaaagcaagtcacttaaccactctgcttctcagttttcctgtctataatctgagagcagtaacttccatgtctactttgaagaggaaagagtaggaatagagtcagaaggtgctcatgtattgcaatttgtcattttgctttgaacactttaaaactaagaaagccaatcatatgacagaagtaacaacaaaacatttctgaacattccttttggaagggtttcagattttgttaaatttatttgttttattaaaaataagtacatatggatcctgtttcctctcagacttgtttatgggaactgcttttttctctgcattagaattttagaatacattgagctgtagatttttgttttccttacactgcttttgaattgttgttcaattatcatgtctttcatagcaatatttaagctgttctgagaaatggtatcaagccaggttgcaaactgtggattttgaacagtctacagaagaaacgaggaaaacgattaatgcttgggttgaaaataaaactaatggtaaggataagtcaatatgtgtctctaaactctgtgttgtgttgataagcaacctgagtccacttgctaaagaggaagctggctgaagtctgcacctgacataggcagatcagcaagaaaggaatggggccatattttggaataccccttacaatcagttgttctagaagctatacaaagtgactctgcgaatgaacaccatttctgtttcataaatgtgtggcacattctgcaattaaaattaattaaatttaaatttacttttcacaattaaaaacccatatatattgctaaacatttcttaaatgtttcttagaaacatttggttaaggaaaaatttaaggatatacaaaggtaaagagaatatataatgaaccctatttatccatcactcaattgcaacatttctcactaatggctggctttattcatgtaatctctcaccctttctccaacacttctttaagattatattgcagcaaattctagatattctatcattttccttcacatatttcactttgtttttctaaaaatatggacaattttaatacaaccgctacaattcattacttctgaaaaattaaaaataatcctttaatgttaaatattcagtgtgttttcatttttccccagttggctcttttttttttgtttgaatcaggaaccaaataacattgacatatcacaattagttaatacatcccttaaatcttgattttaaaaataaactttatgatttaaatatacatacatatagaaaagtaaattattgtatgtgtgctatttgataaattatcacaaagtgaatatactcatgactcaggtcagcaaaataagacattagttgttagaaagaggcactgcaaggtcccccttaaatcctcttctggaaataagccccttttttcccaaatgttaaggcttctctgacttctgttaccacttattagttctgcctgtttttaaatctcatgtaattggaatcataagttatgtgggttttttttaggtcaataatttgtgagagtcatccatgtagttacacattgcatggtttgttcatttttattaatatacatttcattctcagaatattccaaatatacttatccattttactgttagtaaatacttaggacatttttagtttggatctcttataaatagtgctgctgtgaatatttttgatacatatccctggtacacatatgtatgcacttttattgggtgtataccttggaatggaattgctagtcataaggcatatatacattcaattgtagtagatgccaagcaattttcttaagtggttgtgtcaatttatttgcccaaacaagaaatgagaatttcatttgtccctcctccttgccaacacttggtagtgtaaggcttgttaactttagccactgtagttattttaattttaatttgcatttccttcatgaattatatggttgaacaatttttcatatgctgcatatcctcctttgtgaagtttctgtttaaatcttttgcccacctgtaagaatggtttgtctgtttttttttctgataaatttttaggagttctttgcacatactggatacctacgttgcaagtaacttctactattttgcatcttatctttcccatctcttagtggtgtcttagatgaatggaagtttctaatttcaaaggaataaaatttatgatcttttcctttatagttagtgtctttgcacacattttttggacgattttaaagaaatcttgtcgtgaaagtattttctagtttgtgaaaatattttcgtatgttattttctagaagttttattgttttattaaagtcaggattcattttaaaattagtttcattccatgtggatgtctaattgctatggcactacttattgaacaaagaatcctttcattattgcactgcaatgtaaattttatcataaattagatgaccatatgtgtgtgaatctgctcctaggttttccattctctttcattcgtcaatttgtttattctcatgatgatgccacaattatagtagctttataataactcttggaagctggaagtgtaatccctccaatgttgatctcttctagggttgccttgccaaatcttgatcctttgtatttccatatacgttttaaaattagcttgttaacttccatagaatatatcagttgaaatgttaataggatttatatagaatctatagatttggagagaaaatacatctttattcaaattctaatccatgaccatgaaatttacctctatacaggtcttccttaattttttcttttgataacattttgtattttcctatgttgaagttttgtacattttttgataaactgatcctaggtggtatttgaggtgtttggtgaattttagctggtatctattattttggtttatttgttgttgatgtataagtatatactttacttttgtatattaacattgctgaattcacttaataattctagtttagctttatattattttagatttcttttagcataaggacaatgctttctaatatatttttctcccattatatcacttaacagtgatgagctctcaatagtatctttttgattgaggaactgacagatgtcaagtttagtaataggtgaccagattaaaatatatatccattatattatttgtattaagtcagaaaatgctttgaaaggtgtatttttttttcatatctgttaatttacttagcacagtggtgtaaaaatatgcctctctcttgtgctaactctaatccactggtagtgactgcttgggaaatctgtattgagagtctgaggcttaaacttaggttacttgaaaaagcccacaattgagccagtagacactaactctgtgacagtagagatttttgtctgtttagttttgtgttatagtctgaatttagtgctacagtgcctagaacagtgcccagcatttagaaaatgcctaaaattttttggcacgaatgaaaagatgattagtgttgtctgtcatgggtgtgcattagggatccacatgttatatatttatgtagaatattaatgttatttcatcttttgtttatatctttatttactgtttcatccaaaaatatacattgtatgcttaaggttaggtattgctatcacatgctaggattgtgttaggcctagaatttcaatgaaaattaaaaccttcatgaagcttaaagctgatgttcagatattcctatgtttcatattgtataacagattccattccaaaaaggttttataaattgcaatgtaccaaaatgcaccaagagggctggatgtttaattttgatcagttttatttacaaagcaattcctggcataattttatgaatcttgattttcagatatgtgtttacttcaagtgctttagtatatatatttgtaatacactaattctagtgcattgaaagaataaatattttaaaataatatatttgtgtgtagtgaactgctggtaagtataaagtcttgtaaatattaaaagtaagccacaagaaatgattacataatatctaaataagcagtgatgtataagaaattactcgatgtaactaggcataagacaaattgatccatcacgaatatgctggctacttcctgggtgccgtcttatgattaaataataaagcattaaatattccctgaaataaacttcatttgacaaagaaggctccatggccaggagatgaaaggagttcttctggtatctcaaatttacaattagtcttaaaaaagaaatggctctaaatttctcatgactcttcacctctctattatcaggagttcaaatccaaatataattatcttattttttatacaaggaaaagtcgcaaatctctttggaaagagcacaattgacccttcatctgtaatggtcctggtgaatgccatatatttcaaaggacaatggcaaaataaatttcaagtaagagagacagttaaaagtccttttcagctaagtgaggtaagtattttattttcagactcatgacaaatgttggaggatacaataatcatttaaggacaatttagaaagatgtagtgatttagtgaaaatattggtctaggtttctgttggttctttttattgtattttctacagattttcatttttcctttattaagtgacaataacttttatcacagagcacctaactggagacttgggatactaagattctctggcagaggagaaaacccattcttttcttaatgctctcttggcttattctttccatatatactgtggttatgttctccagcagcacactaaggctatctgtgttatttttttttctagagagtttcttgaggaaagattaaaaagaaaatgatttaatgatatatcctttttcttcccactaaaatcatgttagctaaaaatcctgactttgtttttggtagaccaagctatctctatatattattagaacaattcagtctctaaccatgacttattttaaattaaaaaaatggataacctttgcaaagggaagtaataaggaatctactttgtagtttctattttacccatgcctttagagtgttcatgcagatatccgtgttatgcaaggtaatcagtacacacacatgtgcactcacatatgtaagtatactataatctttttcttcttaacagggtaaaaatgtaactgtggaaatgatgtatcaaattggaacatttaaactggcctttgtaaaggagccgcagatgcaagttcttgagctgccctacgttaacaacaaattaagcatgattattctgcttccagtaggcatagctaatctgaaacaggtaaaattataagaatgctataatgcagttaaagcatgtgtgcatgttaacacacacacacacagacacactgtgtatctcatgacattagcgtagtcattgattcacaatctaagccttagtaggattgtcccgggggtgtgaaagtagcagggagacacatggcctctgcctttcaggacagtgtgtttatggagaacaagctattcttacatgagaaaggcacatggaagcagaagtgatattttgtacaaatacacacaagtactggttggttgatagtcgggggacatctttctatagtaatgaagttataatgctatttgggctcctagtgtgcagaaatctgattaagccattttactctgggggcagtatttctgagccaattgtactttcacaggctaaccatttttaacatctcagttttgtggagaaatgggcaccacacacattaagaagtggtcatggccgtgaaaggagtttggatccaaccccctttccccagctgcagccaaagctgcccagcatagagcaggctgtgcttctaacagctggacgtctggaagcctgcagaagctgacacacatatgggtgatatagcctaacagttaggggcttctaagccagggagtgctggcttgagatgaaaacactgtggcacaggtgagcaaggtgtgtgtgtgtgttgggtggtagggaaggaacactgtggcacaggtgagcaaagtgtgtgtgtgtcgggtggtagggaaggcttcttgaaagagcagggtcaggacgtacgcatttggattaagaagtgagacgggtgccaactgaaaaggagctgtagtcacagaagtgcagcggtggccataacaggtatgcttacggttgtggttaagtcagagggaatcaggtccctaagggcctgtggttgactggagtgaaagacatttggaggcataatgcagtttgggagcagtttagattctgcagaaagttttctggaagtagactatgggattagaatgaatgggtcagaaaggaattcctagtacagcaatttcagtccgagccttgctggatgaataggagaatcacaggggccctgctaaactgagcagagcaaagagcagtgcaaatgccttagaagcaaggcagcatgagctgtggcatgaagtcatagtctcttggatgtgggcagaaaatgacaaaaggaaaagatactttggaagaaaaaccacctttgctttttggtggcttttatattgtcatggtaggcagtagttgtcaaaactgttttaaattctcagattaaaaagatgggatgtgacacagcatggtggtttgcagctgtggacagggctggctggagagttcaatgcccgagggaggcgtttgaaaggtttacaaacaaatgatgaaactggatggagaatgagaagtcagtgtgctgaggctgctttgggaaagctgagcattgatgtgggagctgacatgctgggcagaggcacaggtggcccagagttcagcttcaggagcagctaccagaaacagtgacagagaagggcacgagaggatgaaagctatcagagtgcatggggatcctggcatcagggatgccaaacaagaatcacgctcataaaggagggtatcatgaaatgtttcagatatgagaacccagaagaaatggttgagtccatccacgaaacaggaccatgacaacttcacaggcgagagtgggagaagtgcagtgaagcatgtatgctgagggaattgagggaaaagactgtaggatacctacttgagaagcttaattatgaaatttagatgagaaacagacaacagaaaagggaaaatgtggctaatggtatgattttgttcccaggtaagtagactgtattaaaggtagaaaaagtgatgaagttgaaccactcacactgagaattataaaaacatatgatatttaatgtagaggtcgtgtgtttgactcatgtgggcttgtctgtgttttgtctcttagatagaaaagcagctgaattcggggacgtttcatgagtggacaagctcttctaacatgatggaaagagaagttgaagtacacctcccccgattcaaacttgaaactaagtatgagctaaattccctgttaaaatctctaggggtgacagatctcttcaaccaggtcaaagctgatctttctggaatgtcaccaaccaagggcctatatttatcaaaagccatccacaagtcatacctggatgtcagcgaagagggcacggaggcagcagcagccactggggacagcatcgctgtaaaaagcctaccaatgagagctcagttcaaggcgaaccaccccttccttttctttataaggcacactcataccaacacgatcctattctgtggcaagcttgcctctccctaatcagatggggttgagcaaggctcagagttgcagatgaggtgcagagacaatcctgtgactttcccacggccaaaaagctgttcacacctcacacacctctgtgcctcagtttgctcatctgcaaaataggtctaggatttcttccaaccatttcatgagttgtgaagctaaggctttgttaatcatggaaaaaggtagatttatgcagaaagcctttctggctttcttatctgtggtgtctcatttgagtgctgtccagtgacatgatcaagtcaatgagtaaaattttaagggattagattttcttgacttgtatgtatctgtgagatcttgaataagtgacctgacatctctgcttaaagaaaaccagctgaagggcttcaactttgcttggatttttaaatattttccttgcatatgtaaatagaatgtggtgagttttagttcaaaattctctgttgagaataataaatgcatgaaataccttaaa

SEQ ID NO: 9401 - DNA, 124 bp, Homo sapiens
gggttctctcagcacagctaacgttgaattttgccttgatgtgttcaaagagctgaacagtaacaacataggagataacatcttcttttcttcgctgagtctgctttatgctctaagcatggtc

SEQ ID NO: 9402 - DNA, 3145 bp, Homo sapiens
acaagcagggccttcagtaggcataaggtgatgaggttcatgccgttggatcccacgggtgccctggggaagagatggttgggaagtctgagaggaagcaggagagctttcggagcacatggatgccgtccagaatggagatggttgtggctcggaagaaaaagaaatcacccagctcggagtcaggatacatttggaggtccaggccgccgagtttgctggtggggaagataggcaccagaaaggaaagaggacatccagggcaatttcttctgccccccagccaatccgtacattgtccagaggtaggaagaagtagcctcattttatggtcaggatccttggggctcagatgcgttaagtaattggtcaaaatcttgcacaaatcctgcaagtacagaggtagaaaatgaatccaggtctttgattcccaaacgtaagctctttcgctgtgtcacttctcctcttcgttttcatgccagttccaagaattaacactgcagttagctttctgtttcctttcccaagatgtactatgtaacaatgaagaaaccttaagaaaaggatagcaatgtctaacatggatgcagggccagcctcattctctgtcaaagcgactagttcctacactctgggttccaatacaaagaatgcacatttatgcagcaggaatggcccaaggaccacacattgcacagctcttgggagcagagcagaaagctgcgccaggcctatctgatcagtcttcatggaaagggtcgcagatcccattcggcttggagattttgatgaattttcctttctgtgggttggatttaaaatgtaatattcttcccccagttgaaagtttaggactaaaagatgggaaatcttttacaagctacacttcttccccacccttacttcccctggagtttccatcagcaatcatctgagtgccccattaactccccaaaacccaaggtctgttggtggtggaatattgagctgaagagcagactgttgtagaagtcatcagttctctctgatcatagtgtccaaacaaaaacattatgggggaaactggccccatcacttaattatctcccaacaggtccttctcaaaacacatgggaattatgggagctacaattcaagatgatatttgggtgaggacacggccaaactgtatcaagtccccaattgagggcacctgctccctgtagataatggcatttcagatctacaatgtggcatttccagacaactcactcatttacgctgattggtgcaaattttattttagcctccaaacatttttcttccccagtctgttaaaagaaaacaaaaccaaaacacctctctctctctctctctctctatttatagatagaaacgcttacccatatcatagcatcagtattttgctgaagccctggagtgtcaggcaccgtgttaggaactgaatacaaaaataagatgtaaaccagtccctcaaggaatctatgggactggtaagattagctaaccgtgcacctggagggaatatacttagaaataactgcaaattctgcagaaatgctgaggggttcccaaactcgtttctgtgaggcctgttaattgctgagttgttttgtctctggtctgtggaaccccgatagtgtgccctaggtctttaatttcttcatctctaaagaatagtgtcaatggagtcattgcatgtgtttattcatacttctcaatgtggaagagaactctctagggtgtaaaaccctatccaggaagcacatgacaagttggaatcctcaatgacatggcattgctatagttgctatcggaacaatcttttcttttttttctttttttgaaacagggtcttgctctgtcatccaggctggcgcgatctcggctcactttgacctctgcctcctgggttcaagcgattctcctgtcacagcctcctgagcagctgggattacaggcaggcaccaccatgctgagctaatttttgtatttttagtagagaccaggtttcgccatgttgcccaggctactctcgaactcctggcctcatgtgatccgcccacctcagcctcccaaagtgctgggattacaggcgtgagccactgcaaccagctggaacaatcttgatattagggtgaacaagtgatttcatagctttctctgaaggaggaaacactgggagcatccacccgagaatcaacactgtggatcattctggggagttaatagttttgagatgtgtcccaagataattgttagcttgaattaccacgtggatggaaccatgctgatcctaagagccaggtaatggccaaaggtgccattcaggtgaaatccccaggtggaaaattcttccacttccaatgatagaattctattactctgcctatagtttggtgaaacaagactttacaaatagaggacaagatccattttgccaagaacaaccatatggatttaactgctgctaacaaccgttaggaaggaacatcaataaaaagcaagcctgtgagacaactccttccccaaggggcgcttgttacagagcgcgggccccagcaggcctggtccatcctccacattctttcctctctgacttatttttactttctgtttgaattggcttggttttattttgccctaaactgtgtctgtagtcatcccccgacagagttttgagagtgaaagtccgatctgcccacgcttcacagaactcaatgcggagccttctcaggagtcacttgacgtcaaggctgacttttaaatttgccaaaaaggcattctttggggagcggtcggcaccatcactttccctctttagagagctgctactggctgctggaattcaaaacccacaaattgcatttctaaacttaattcgatacatagatgagcggaaagatcagacattgatgctattgttttcaaccaagatgttttactatatcatttatattttgtttttttcttcccccagtttttaaactttttgtttgtttgttttacaggccaagcctactgctgttagaaaacatatttagaaatcacttggttcttccttgcctgaacatcatctatttagttagcttgtgttgtttagatgtgcttcagatctcaaaaaaataaattatgttatttgaaa

SEQ ID NO: 9403 - DNA, 424 bp, Homo sapiens
ggggcacaaggaggagtcaccaaaagggccgggtgggggtccagcttcttcgggaggagtggctgaagggatcgccaacggacgcctcgtcagcaccatggctcgtagcccagcagcttggacaagaggaaagagatatttagcaaagacacactgttcaaacctcttcacagcaccttgtctgtaaacagctatcacaagtcgagcctgtccctcctcaaatctcacccgaagacacctgctgacacattgccaggccgatgtgagaaactggaaccgtccctcggggacctcggcggcacaagccatgcctgcttcccagcgtcagcaggagtcaggagggaaccaggaagcctcttttgactattacaacgtctctgatgatgacgactctgaggaaggggcaaacaagaacacagaggag

SEQ ID NO: 9404 - DNA, 580 bp, Homo sapiens
gctaagataggggtccctgtagtgaaaatataatagcagatctcaaaacctctccaatggatctagaagcttgttgccatttggatcccactattctgtgcagcctgtccctctggctcacacaccttcctttcactgccaagaaatggaatatttcttccctcacagcgagggcaggggcctgtgctctgttagatcaaagcatgtgccatgtttatttctcctcctgcagaaatgacggagcccatttgggcagtctaattgtagttccttcttgttaataggtgttagttcagcaaagggttgacagtcaagagttagtggtgcccagtggtcatggccaaagctctagagttattcagggattcagaaagcaaacaagagtctgtgcaacttccttttttcttcttaactctttcttctcctcaaagagcaacatgggacctaattctctttctaacttctactccagattggtgactctgagatgcagaaatactactgagagattgacatttctcatcagctatgattcccaagattttataatacttataattttaacatggattcagatagg

SEQ ID NO: 9405 - DNA, 143 bp, Homo sapiens; identical to SEQ ID NO: 7702

SEQ ID NO: 9406 - DNA, 148 bp, Homo sapiens; identical to SEQ ID NO: 7489
  SITE (136): n equals a,t,g, or c

SEQ ID NO: 9407 - DNA, 116 bp, Homo sapiens; identical to SEQ ID NO: 7704

SEQ ID NO: 9408 - DNA, 151 bp, Homo sapiens; identical to SEQ ID NO: 7708

SEQ ID NO: 9409 - DNA, 125 bp, Homo sapiens
  SITE (33): n equals a,t,g, or c
  SITE (49): n equals a,t,g, or c
  SITE (61): n equals a,t,g, or c
  SITE (90): n equals a,t,g, or c
  SITE (91): n equals a,t,g, or c
  SITE (116): n equals a,t,g, or c
  SITE (117): n equals a,t,g, or c
gttgtggaaaaaaaaaaaaaaaaaaaaaaaaanaaaaaaaaaaaaaaanaaaaaaaaaaanaaaaaaaaaaaaaaaaaaaaaaaaaaaannaaaaaaaaaaaaaaaaaaaaaaaannaaaaaaaa

SEQ ID NO: 9410 - DNA, 152 bp, Homo sapiens
aaaaaaataaaaaaaaaaaaaaaaaaaaaaaaaataaaacaaaaaaaaaatataaaaaaaaaaaaaaaaaaaaaaaaaaaaaaaaaaaaaaaaaaaaaaacaaaaaaaaaaaaaaaaaatataaaaaaaaaaaaaaaaaaaaaattaaagag

SEQ ID NO: 9411 - DNA, 130 bp, Homo sapiens; identical to SEQ ID NO: 7709

SEQ ID NO: 9412 - DNA, 118 bp, Homo sapiens; identical to SEQ ID NO: 7711

SEQ ID NO: 9413 - DNA, 406 bp, Homo sapiens
gctgactctccagctgtccacctcatgatggaccatcctatgtgtaccttaaaaatgaaaatgaataataaattttcataaaagaaagtgctgaaatcaaagtggataaagtgattaacatggacagataaaaaattcagtcaccaagcacttgtacaaccactcacaagttgaagttgcagcaaataatttagatattgctggtcgaatgacatgattctagctgggctgaagctactctccatggagttctctgggtaccttccatgacacagtgataatgagccataagtgctttccttgaagaattcttaagaatcagaccatgctcctttagggaaatttacttgttttatattatcagattaataagtgtagagagggaaaccatttgcctgctaatcaa

SEQ ID NO: 9414 - DNA, 406 bp, Homo sapiens
gctgactctccagctgtccacctcatgatggaccatcctatgtgtaccttaaaaatgaaaatgaataataaattttcataaaagaaagtgctaaaatcaaagtggataaagtgattaacatggacagataaaaaattcagtcaccaagcacttgtacaaccactcacaagttgaagttgcagcaaataatttagatattgctggtcgaatgacatgattctagctgggctgaagctactctccatggagttctctgggtaccttccatgacacagtgataatgagccataagtgctttccttgaagaattcttaagaatcagaccatgctcctttagggaaatttacttgttttatattatcagattaataagtgtagagagggaaaccatttgcctgctaatcaa

SEQ ID NO: 9415 - DNA, 2749 bp, Homo sapiens
gagatggagtctcgctctgtcgcccaggctggagtgcggtggtgtgatctcagttcactgcaaccttcacctcccaggttcaagttattctcttgcctcagcctcccaagtagctgggattacagatgcctgccaccacacctggctaatttttcgtaaagatagggttttaccatattggccagactggtctcgaactcctgacctcagggtaatccacctgcctcagcctcccgaagtgctggtacaggcgtgagccactgtgcgtggtcctccctctctttttttgagacagcgtcttgctctgtcacccaagttgggagtgcgtggtgtatcacagctcactgcagctttgacctccagggctcatgttatcctcccacctcggccccccccccagctgggactacaggtacatgccaccacacccagttaatttttaagttttttgtagagacgaggtctagctgtgttgcccaggctggctcctgggctcaagggatccctctgcctcagcctcctaaagtgctggggttacaagtgtgagtcacctcgcccagcctcttgcttttcttataaggacactagtcctattggatgcaggcgccactccaacgacctcatttagcctatttacctccccaaaggccttgtctccacatatcatcagattgtgggttaaggcttcaacatatgacatttaattcagctcgtaccagaaggtgtttaagcattttcccattgaaatgtattcccatctttccaggtgtccatctctcatttgcttttcctacttacttagaacacagctaccttccgacaccctgtcctaaacccaccctgaactctacccctcttcactgccaacctgcctggggttttcccttgccccctagagagctctgtgtcctttcgcacacatcccatccctgccaactccactggacagacctgagccaccctctcctgcctcaccccacccatctttcttgctggtccacgttgccacactgttgttatgggagctgagacccactgcctcaaatgcctgaaccagcccagctgcccctgaggttaacaagtgggaatgtctagcttaataaaacatccatttgtgctccttacatcctgggcagggtggtagtggtaggagaacagcaaacaaatcctgaaatctcaatcagttcacttttggtagtggtttgggaaaggaaattctgaaactatattagagttattttaagattcatcaaattagtaaaatgctgaattttggggtgtcagggttctcagtgttaaagaagacacataaaaatatgggctggaggaagtcatgaattgagttggaggtcttactggatatgtacgtgtatgtgcacagacacacctttgtgtgtgacctgtgtgcaatcatatgcacatatatttcatagctcagcagaagacacctcaactggcaccctatcttggtctctaatgccattacccactaaaaggaaccagttcttcaaagacatggccaatttcagggctgaggaagggtagaaaggagatgggcttggaacatcctactacaccaaaaagcaaataagtgctaaaaaaaaaaaatggaggcatgtcacaaggatgcaggagtcaactgaagggagtctcactggcctcatctaggacaacttgagcaccaaaataagatcagcagcgagttataaaccactgaataaacagaaatcctgagtccattccaacaataaagacaaattcttggggagaaggaagagtgctggctggcagtaggatgctgagggcctgctggtcagcatggagggagggctggtgttggaaaatcaccaccctggtaatgatggattcaggcaagaatcataaatgaaagccaaatttagggggaagttttgatgaggagcaggatatttgcattatctttaatctttttgtgacaactgaagatcattgatacttgcatgatcttaaagtatcttcccaccgattcttattcgttaaaaggagaaaaagttaactatattctttttttgagacagggtcttgctctgtcacccaggctggagtgcagtggctcaatctcagctcactgcaaccttgacctcccagtttcaagccatcctcccacctcagcctcccaagtagctgggactacgggtgtgcaccaccgtgcccagcttcagcctcacaagtgctgagattacaggtgtaagcctctgcatctggcccagttagccatacagtggaaaaactgcactctaaccaggtgagcaaagagaacatcactgacaggaggaatgtggacaccgtgcaccctggatgggatgggggaaggcgcacacatgcaggccacaggtaagcagggtcgaatgttaataggtgggtctggatgagggtttgtggatgatctgtgcactattgtattttatttattgattttttttttgacacagagtctcgctctgtcacccaggctggagtgcagtggcgcgatctcagctcactgcaagctccgcctcccaggttcacgccattctcctccctcagcctcccgagtacctgggactataggtgcccaccaccacgcccggctagttttttttgtatttttttagtagagacggggtttcaccatgttagccaggatggtctcgatctcctgacctcatgatacgcccgcctcggcctcccaaagtgctgggattacaggcgtgagccaccgcgcccggcc

SEQ ID NO: 9416 - DNA, 2745 bp, Homo sapiens
gagatggagtctcgctctgtcgcccaggctggagtgcggtggtgtgatctcagttcactggcaaccttcacctcccaggttcaagttattctcttgcctcagcctcccaagtagctgggattacagatgcctgccaccacacctggctaatttttcgtagagatagggttttaccatattggccagactggtctcgaactcctgacctcaggtaatccacctgcctcagcctcccgaagtgctggtacaggcgtgagccactgtgcgtggtcctccctctctttttttgagacagcgtcttgctctgtcacccaggttggagtgcgtggtgtatcacagctcactgcagctttgacctccaggctcatgtcatcctcccacctcggccccccacgcagctgggactacaggtacatgccaccacacccagctaatttttaagttttttgtagagacgaggtctagctgtgttgcccaggctggctcctgggctcaagggatccctctgcctcagcctcctaaagtgctggggttacaagtgtgagtcacctcgcccagcctcttgcttttcttataaggacactagtcctattggatgcaggcgccactccaacgacctcatttagcctatttacctccccaaaggccttgtctccacatatcatcagattgtgggttaaggcttcaacatatgacatttaattcagctcgtaccagagggtgtttaagcattttcccattgaaatgtattcccatctttccaggtgtccatctctcatttgcttttcctacttacttagaacacagctaccttccgacaccctgtataaacccaccctgaactctacccctcttcactgccaacctgcctggggttttcccttgccccctagagagctctgtgtcctttcgcacacatcccatccctgccaactccactggacagacctgagccaccctctcctgcctcaccccacccatctttcttgctggtccacgttgccacactgttgtatgggagctgagacccactgcctcaaatgcctgaaccagcccagctgcccctgaggttaacaagtgggaatgtctagcttaataaaacatccatttgtgctccttacatcctgggcagggtggtagtggtaggagaacagcaaacaaatcctgaaatctcaatcagttcacttttggtagtggtttgggaaaggaaattctgaaactatattagagttattttaagattcatcaaattagtaaaatgctgaattttggggtgtcagggttctcagtgttaaagaagacacataaaaatatgggctggaggaagtcatgaattgagttggaggtcttactggatatgtacgtgtatgtgcacagacacacctttgtgtgtgacctgtgtgcaatcatatgcacatatatttcatagctcagcagaagacacctcaactggcaccctatcttggtctctaatgccattacccactaaaaggaaccagttcttcaaagacatggccaatttcagggctgaggaagggtagaaaggagatgggcttggaacatcctactacaccaaaaagcaaataagtgctaaaaaaaaaaaatggaggcatgtcacaaggatgcaggagtcaactgaagggagtctcactggcctcatctaggacaacttgagcaccaaaataagatcagcagcgagttataaaccactgaataaacagaaatcctgagtccattccaacaataaagacaaattcttggggagaaggaagagtgctggctggcagtaggatgctgagggcctgctggtcagcatggagggagggctggtgttggaaaatcaccaccctggtaatgatggattcaggcaagaatcataaatgaaagccaaatttagggggaagttttgatgaggagcaggatatttgcattatctttaatctttttgtgacaactgaagatcattgatacttgcatgatcttaaagtatcttcccaccgattcttattcgttaaaaggagaaaaagttaactatattctttttttgagacagggtcttgctctgtcacccaggctggagtgcagtggctcaatctcagctcactgcaaccttgacctcccagtttcaagccatcctcccacctcagcctcccaagtagctgggactacgggtgtgcaccaccgtgcccagcttcagcctcacaagtgctgagattacaggtgtaagcctctgcatctggcccagttagccatacagtggaaaaactgcactctaaccaggtgagcaaagagaacatcactgacaggaggaatgtggacaccgtgcaccctggatgggatgggggaaggcgcacacatgcaggccacaggtaagcagggtcgaatgttaataggtgggtctggatgagggtttgtggatgatctgtgcactattgtattttatttattgattttttttttgacacagagtctcgctctgtcacccaggctggagtgcagtggcgcgatctcagctcactgcaagctccgcctcccaggttcacgccattctcctccctcagcctcccgagtacctgggactataggtgcccaccaccacgcccggctagttttttttgtatttttttagtagagacggggtttcaccatgttagccaggatggtctcgatctcctgacctcatgatacgcccgcctcggcctcccaaagtgctgggattacaggcgtgagccaccgcgcccggcc

SEQ ID NO: 9417 - DNA, 577 bp, Homo sapiens
aagcgattcccctgcctcagcctcctgagtagctgaaatcacaggtgcctgccaccacgcctggctcattttttgtatttttagtagagatggagtttccccatgttggccaggctgcttttgaactcctgacctcaggtgatccacctgcctctgcctctcaaagtgctgggattacagggcgtgagccaccgtgcccagaccatcttcaccctttttcttaccagaaccacactcagcttggggcttaagatggataggctaagaggggaactaagcttgtaactgttgcggagacaggcactccaggtgacagttcacaggccctttcaagtgactggagccatgggatcatttctctccaaggatttgtgagtagaagtgatgtgtgtcatctcccaggtgaacaggttcggccttccctacatgctccaagggtacagtgaagagcagagctacaacagagatggggcctggatccctgaatcactgtatggagcagagtgcaaaccaatatataagcaacagcaacaccaacacaggacaatcgactgttagtaaaaatttttttttcttt

SEQ ID NO: 9418 - DNA, 575 bp, Homo sapiens
aagcgattcccctgcctcagcctcctgagtagctgaaatcacaggtgcctgccaccacgcctggctcattttttgtatttttagtagagatggagtttccccatgttggccaggctgcttttgaactcctgacctcaggtgatccacctgcctctgcctctcaaagtgctgggattacaggcgtgagccaccgtgcccagaccattttagcctttttcttaccagaaccacactcagcttggggcttaagatggataggctaagaggggaactaagcttgtaactgttgcggagacaggcactccaggtgacagttcacaggccctttcaagtgactggagccatgggatcatttctctccaaggatttgtgagtagaagtgatgtgtgtcatctcccaggtgaacaggttcggccttccctacatgctccaagggtacagtgaagagcagagctacaacagagatggggcctggatccctgaatcactgtatggagcagagtgcaaaccaatatataagcaacagcaacaccaacacaggacaatcgactgttagtaaataatttttttttctt

SEQ ID NO: 9419 - DNA, 589 bp, Homo sapiens
  SITE (427): n equals a,t,g, or c
attgaaggcagcagaaatagatgaagagcacgtggaggatgacgggctgtctttggacattcaggaaagtgagtacatgtgcaatgaagagacggagatcaaagaggcgcagagctaccagaattccccagtcagctctgcgactaaccaggacgccggctacgggtcgcccttcagtgagagcagcgaccagctagcccatttcaaaggctcttcctctcgagaagagaaggaggatccgcagtgtcccgacagcgtctcgtacccccaggacagcctggcacagatcaaagctgtgtatgcaaacttgttctccgagtcctgctggtccagcttagctctggatttaaagaagtcgggttccaccaccagcaccaacgatgccagccagaaggagaggttcggccccacccccacaccccccacntgccccgtcagcaccactggccccaccacgagcacgcccagcaccagctgcagctccagcaccagccacagcagtaccaccagtaccagcagcagctccgggtacgactggcaccaggctgcactggccaagacgctgcagcagacgtcctcgtatgggctg

SEQ ID NO: 9420 - DNA, 3604 bp, Homo sapiens
  SITE (3443): n equals a,t,g, or c
cactcctttgagtccttgcaggacctcagcgtccacatgatcaaaaccaagcattaccagaaagtgcctctgaaggagccagtgccagccatcaccaaactggtcccctccaccaaaaagcgggcgcttcaggacctggcgcccccctgctcccctgagccagcaggaatggccgcagaggtggccctgagtgagtcagccaaggatcagaaagcagcgaacccgtacgtcacgcccaataaccgctatggctaccagaatggcgccagctacacctggcagtttgaggcccgcaaggcgcagatcctcaagtgcatggagtgtggcagctcccacgacacgctgcagcagctcaccgcccacatgatggtcaccgggcacttcctgaaagtgaccacctcggcttctaagaagggcaagcagttggtgctggaccctgtggtggaagagaagatccagtccatcccactaccgcccaccacccacacgcggctgccggcctccagcatcaaaaagcagcccgactctcccgcggggtccacgacttctgaagaaaagaaagagccagagaaggagaagccgcctgtggctggcgacgcggagaagatcaaggaggagagtgaggacagcttggagaaatttgagcccagcaccctgtacccgtacctgcgtgaggaggacctggacgacagccccaagggagggctggacattctcaagtccctggagaataccgtctccacggccattagcaaagctcagaatggtgcgccctcatggggtggctaccccagcatccatgcagcctaccagctcccgggcaccgtgaagccactgccggcggccgtgcagagcgtgcaggtgcagccgtcctatgctggcggcgtgaagtcgctgtcttccgccgagcacaacgccctcctgcactccccagggagcctcacgcccccaccgcacaagagcaacgtgtctgccatggaggagctggtggagaaggtcacgggcaaggtcaacatcaagaaggaggagagaccccctgagaaggagaagagctccctggccaaggctgcgtcccccatagcaaaagagaataaagatttcccgaaaacggaggaagtcagcggcaaaccacagaagaagggccctgaggccgagactgggaaggccaaaaaggagggaccgctggacgttcacaccccaaatggcacagagcctctcaaagcaaaggtcaccaacggctgtaacaacctggggatcatcatggaccactcaccggagccttccttcatcaacccgctgagcgctttgcagtccatcatgaacacccacctgggcaaggtgtccaagcccgtgagtccctcgctggacccgctggcgatgctgtacaagatcagcaacagcatgctggacaagccggtgtaccccgccacccctgtgaagcaggccgatgccatcgaccgctactattatgaaaacagcgaccagcccattgacttaaccaagtccaagaacaagccgctggtgtccagcgtggctgattcggtggcatcacctctgcgggagagcgcactcatggacatctccgacatggtgaaaaacctcacaggccgcctgacgcccaagtcctccacgccctccacagtttcagagaagtccgatgctgatggcagcagctttgaggaggcgttggacgagctgtcaccggtccacaagaggaagggccggcagtccaactggaacccgcagcaccttctcatcctgcaggcccagttcgcctcgagcttgcgggagaccacagagggcaagtacatcatgtcggacttgggcccgcaggagagggtgcacatctcgaagtttactgggctctccatgaccaccatcagccactggctggccaatgtgaagtaccagttgaggaggacagggggaacgaaattcctaaagaacctggacacagggcatcctgttttcttttgcaacgattgtgcctctcagttcagaactgcttctacatacataagtcatttggagacacacttgggcttcagcctgaaggatctctccaagctgccactcaatcagattcaagaacagcagaatgtttcgaaagtcctcaccaacaaaactctgggcccactgggggccaccgaggaagacttgggctccacattccaatgtaagctctgcaaccggacttttgcgagcaagcacgcagtcaaactgcaccttagtaagacccacggcaagtctcccgaggaccacctgatctatgtgactgagttggagaaacagtagcgtccaggtatgcaagagaccgcggaacattgcactaaacgtcgtcgagctgcactaggcctggcctgagcctctgaaatcagtctttcctttgttgctggcccgcctctctggaccttggttttcttacacatattttgtatatttatatgctctctgtccgatctgtgcatgttatttttctttttccgtgagtcaaagtctgacctttattttcaacatctgttcttggtgttaagctatcttttgtaggaaatagtggggcacactactcagagacattatttagcagtaaagaaagacacaaataacaatgataaaaagacatcctaaaatggtgaagttgccatgacaataaaggtcatagaacctggtagtgtcaaatttaaccctttgaggactgtaattgcatttctgtgcctttcacttgaaaaaaaaaaaagaagaaaaaaaggcttaaaggcatttcattcagatcaaaagctgtgtcagacacaaaacttatttaataattaaaaaatgagcttttatatgcagaactggtttgtgaggaaacatgcatgcagctgtgggaagatagaaagctgtctaggactcacggggttcggaagccacacctctacatgtctaaaacaaaaaacaacaacaacagataccccactcgccactatgcccaaaccctctggatgctgaaaaatgccactttcggcaaaaaaaaaagtatgcaagctattatttaaaaatgtgtaaaaatgctatttcttttttcctgtaaaatattgcagtttatagttatttacaaatgtaagctttggtacaagctgacctttctatagcgtgctgcattggtaaatgaaaaaaaatggggcaaacgttggagtcctttccttgtaaattgccagcatcagcttaaaaactcctgtatgttacatatcgtaccattttaatctcttcaactttctttgtaccttctggctgtatgctttctcttttaactttttatattgtcattttatattaaatttctgtgtatataatgtaaaaccacaatttttgaataaaatttagttcctgcagcttgatttggggagaggacttttactggcacctgcatctctccagatgcatgtgctgagagggactgtcanacaaaaataaatacataaaaacaaagcaagcaatgcactattaattatacattttgatgttctatcattaatattgtacagtacattttggttcacacaattaaatccactgttttctcagatgtaaaataaacccacatgcagttcttgatttacacgga

SEQ ID NO: 9421 - DNA, 11076 bp, Homo sapiens
gattaaacacagtacttcatacgtttgatcatcctctgtggacactaatttcttttctaaatctaccatttctttttctttgttcaggaaagggggcatcaaaaaagcaagccaaaaggaatgctgctgagaaatttcttgccaaatttagtaatatttctccagagaaccacatttctttagtgagtaatgttgacagctatgatgttaatgtcattaagcatttcttgcagtaggaaactttccttgatttcttattctatagctacttcagagttgtgatttttagaaatctcttcattattcagttataccctaccccatttttagctgcttcctgtttgtgagtcaggatcacagaggcaattaggtaagagagcttgggagacacagtcaaattcagaataataggacgggatctaaagatgataggccagtagtgccatttttgccttcaaagtgacagcgcatttccatccctttgtttgttcattcattcacttagcaaacatttagtgagctcatactgtgtgctaagtgttgtgttgggtactggggtgcagtgaataagcagtccctgcctctaaggagtttatagactactgaaaggaaggaattctataggctagtccttacagagtgtgatgtgggaacatagaagaaggcatccaacaaaaacaggtttggagacagattccaggaagaagtaatgtctaagccaagacctgtagaatgggggaaaagaattccagagagaagaaaaagcgtgtgcaaaggccaggagtgaaacatcgtatgcagtctaggagccctaagtgatttgttgtgtgtagaacatagtgttggagggagggagtctcaatgaggccagcaaagtaaagagggattaaatcttaaagggacccctatataaggaaagtgaactttatcccaagggtagtacaaagtcattaaagaattttaatctgggaaggacaggatctagtctatacattacaaggaaatcacttggctgcattatggtaagtgagtgaaattaggatcaaagagacctgcgagagtgctgttacagaagacacgtgagacatgacagcttgaactaaggtagtggctgggaaaatggagagagatgggtagattttaaagttatttagaaaactgaggtaaaggggcatggtaattgattggatgtgggaagcaagggaaagggaggaaattactattttaaacttggcaatagcaagaggggagcagataatgaactaaatatattgaatttgaagtgcttatggaatagcttatggaatagctaagtgaatatatcgagtagctgaacaaataaattcagagcttaagagattggcctacacatgatatataacttcagattctgatattcacagataggtgtgtcatgtggtacattatctgagagtagtgtattaggtgggaaataaaaaagtacaactgtagcaacttcttcactgagcttatgataaaataagggctcattctttagaaaaaaatcaaagactatatacaaatgagtaatataatttgattttacatttttaatagaaaaatataaaacactgcatttactgcttttggaatttgagtcaacagtatcaccaaaattacaaagcacagacagatttacaggtgaaattggttaaatcttcaaagaagagatcattttcaatgctatttaaactcttttcaggcaatgtatagataacataaaggaaacttttaaatttattctccaaaaccaacataatacaccaaaacctgacaatagcaagttcaacagaaaaaaaaaaattacagatcaatatgccttatggtgaaacacctttgtaaaatgttcagtacaatattaaaataatgatatagcattgacaagtagggtttatttaactaagactatttcaaggttaataagttggttactttaattaaccacattaatgtgtcaaagagtaatatataatcctctcaatggatgccaaaaaaattttgataaaactcagcaatcattactgataaaaacttggaaaaaaaccaaaatcatggttatatatttatacattatactcattcccattaatatcagaaataaggacgcccaccaacaccacttttatttaaccttgttctagaagtacccaccaattaaaaacaaattagacaagagaaaacagtacgaagttggaaataagaggagataaaatggttactaactgcaaatggtatgattgtatccctttaaaaccctaaagaaaaactactagaaacaagagaattcatcaaggtaactgattatgaaattaatatacaaaatcaataacttttccatattgcccagagttatgtaggtaacaaccagaataattaaaaataaaaagctaaaaattattgtatctgggaaggggacctgaaggtggagaaggggcaaggcagaggttgttgcttttatacttctgtactatttgattttttgctgtatgtgtgtatcactttgacaaaacttacgaagcttcataacattggtcattttatagaaaaatagaaaatcctattctgagaaaatatactagaaaaaagtcagtagttttcttatttacaaataataactagaatatagaagatcccaatttaaattgtagacagggataggctatatgaaaataaacttagaaagaaatgcgtaggaccacgtgaggaaaagtctactaaagaatagagcagaaaacattgtaaatatatttaaatgtaatgtggtctcactcaaaacctaccagcgtttggccaggcacagtggctcacgcctgtaatcccagcactttgggaggccgaggtgggcggatcatgaggtcaggagatagaaaccattctggctaacgcggtgaaaccccgtctctactaaaaatacaaaaaaaaaaattagccgggcctggtggcgtgcgcctgtagtccccgctactccggaggctgagtcaggagaatggcatgaacccgggaggcggagcttgcagtgagcagagatccacgccactgcactccagcctaggcgacagagtgagaccccaactcgaaaaaaaaaaaaacctaccagcgttcattttggaccttgatacacgtttattgaagtttatctggaaaaaaaccctcaagaatagccaagaaaactgaaaaggaagagttgggagagcaagggtgtgctgctttactagagaacaaaacatactgtaaaactgaacttgtcagacaagttactgggccaggaatagtcagaggagcgaatagagaatccaggcgtagatgctaatccacataggaccatagtatatagcaacagtgagatttcagatcagtgggtgagaggatggattattcaataatgatgtagaaacagtttacatccacatttgggtgggggctatatatatatatttgttgatgtgtatgacatctatttagaatgcttccttattccttacaccaaagtgaatttcagatggatcaaagatttgaacataaaaatttgaaacagtataaatattaggaaacatggaagagtttttctttttaaaaatcttagcatggggaaagcattttaacttaaaacctaggttaaaagattaatacatttgacaacataaaacctactgcacagcaaaaaatctgtaaattaagacaataaaaaagtgggaagaaattattttcaacatagaactataaaggaactgttttcagtactacctttaaagctcttttgtacacatctgctgcacacagcagcacatgcctgtagtcccagctactcgggaggctaaggtgggaggactgctagagcccaagagtttgagagttaagccacacagcaagatcctaactcttaaaaaagagaaaatttaaaaagctcttatgcatcagttaaaaagacaacccagtagaagaaatgcaaacgattaagggaaaaaaagaaaaaatattcaactttattcatgcaagataaaatattttcaccttttagattggcaaaaactacaaaatttgataatagctggtattagtgagggtatgagaaaacaagccccctccaagacagttggtaggagtataaattggttcagaaatcagtttggaagtatttatcaaaattaaaagtgtacatgttctttgacttagcagttccacttctagaaataattctacagagaaactcattcaagtgcaaaagagtgtttattgctagtaaaagcaagaaactagaaacaacctaaagctcacagttggagatccgtaaggtaaatacagtgcatatatgtgcactgataaaagaaaaatgaacaagatgtagaggagtaagttatcatttgctttaaaagattgtgtgtgcttgcatatgcatagaacatttatgggaagatactgaaaaatgtttaacagtatgtctaagaaatagaacagaggtcttcagggaatgggtggtaaggaaaagagactgtactcttcattatatatttgttcttagtgcatgtatatttttaaccatgtaaatagtgttctttatttaaaaacagtattttaaagtttctataatgtaaatttttatttggtaaatctaataaattacttaattccatatcatgccatctctaaaatcttttggaaattgcctcccctctgtcgtgctcattaataaaacaatattaagagtagtaaccctacttacttcagaaagtagttgtttttattaatggcatatgaaagcaatttgagaaccataaactaatatggaaatataaggcattctaaggacagagatgaaaagggaaggatataggggaggataaaggaaagaggaaaagcagaaagaaaaaggaaaaaaatactcagttgggttctgggatagaagtctgataagaactttttgacatcctgtcatttatttgaatgacttgttcctcaaacccaacgcgcacatttcatgttttttttagtttttttttctgttttttttcctgtttgatagctgtcagttatagtgattggtatttaatacaaaaaaaaccaaagatatgaaaattgttctatattttaatctgcaaattgctccattaggcagatttaattatttgtggatttacttatggtgcttccagatatcttgtacctcttaatgtgaccatcagaaaacttgactgagaaacatttgtactatacaaaatacaaaatgctttcagtatattattgcaagtgcttcttaaaaacatatagtattgttaaatgtgtactttttaatgttgtcttgtttaaattggaaaattaaccaaatgttatccatttaaacatgctttataacatattaaatgtgagtgcttaataagtacttttaatgatactggtacgggtgttggaacccagtcctagtcaagagtctaaatcttcatctctgtttttcagacaaatgtagtaggacattctttaggatgtacttggcattccttgaggaattctcctggtgaaaagatcaacttactgaaaagaagcctccttagtattccaaatacagattacatccagctgcttagtgaaattgccaaggaacaaggttttaatataacatatttggatataggtatgatttttttttctttggctttcccaagacatgtttatttaaaaatgtgtttgaggaacaaaaatgtgtttgaggaataaaaatttctattacaatttattttattgatcagggattctaagtatatataattactaggccagtaatatatataattgatatgtcccattcttgtggatagtaataatagctaacatctatacagttataacaaaaacaacaatagcaaagatagagttttactgtgtgccagacactgttctaagattacacgtatctacttactgaatcctcagactaactctatgaagcaaattctgttatccttatttataagtaaaggaagaaaggcacagaaaggttgagaaacttgcccaagatcacatagctagtcagcggtagagcaagatttgggggaagagtcccagaagataccctggctgttaaactagccctgctgggcaaatgaaaaggcacctacatttctagcacaagtacaagtttgtggtgcccagaccttttctctctactttgtcactgtatgctgattctgggaggtaaatggaaccaagtcaatttatagttttatcccatctcagccatcatcatctgtattttctctagcccttaatcatttggatagacaaatatggacagatgggaaagcaagtcagtatggattttcttttaattcaatttatagagctaattagttgtgtgtgtttggtgtcttgattttttttttttttttttttttttgagacggagtattgtttctgttgcccaggctggagtacagtggcacaatctcaactcactgcaacctctgcctcctgggttcaagcgatcctcctgcttcagtctcccaagaagctgggaatacaggcatccaccaccaagcctggctaatttttttttttttccccaagatggagtcttgatctgttgccctggttggagtgcggtggcatgatctcagctcactgtaacctctgcctcccaggttcaagcaattctcctgcctcagcctcctgagtagctgggactactgctgtgtgccaccacacccacctaatttttgcatttttagtagagacggggtttcaccatgttggccaggctggtctcaaactcctgacctcatgatccacccacctcggcctcccaaagtttttttttttttagtagagatgggagtttcaccatgttgaccaggcttgtctcaaactcctgacctcaagtgatctgtacacctcagcctcccaaagtgctgggattacaggtgtgagccaccgtgcctggccaaagtatcttgatttaacatgtgtgagaaattttatatccctatccaaccacagaaagatgtggggaccttgcttgtcagggtcccctgaccctgggaaagtagggcacttaggggctcaaagaactcctgatattctgtgctactttgggattgaaggacgggtgaagtgcattgtctcagtaaaccaataatgatgcagaacctgggaagtcagtgcagacagatggttagaaaaggtggctgatgaaaaattagctgggtgtggtggcacatgcctgtagtccagtctactagggaggctgaggtggggacaatgacttgagcctctgaggttgaggcagcagtgagccatgatcatgccgctgctctccagcctgggtgacagagttagacttgtctcaaaaaaaaaaaagaaaagaggctggaggccaggtgcggtggctcacacctgtaatcccagcactttgggaggccaagtcgggcagatcacctgaggtcaggcgtttgagaccagcctgaccaacacggtgaaaccctgtctctactaaaaatacaaaaattagccagacaaggtggcgtgcacctgtaatcccagctactcgggaggctcaggtgggagaatcacttgaacccgggaggcagaggttgcagtgaaccgagatcgcgccactgcactccagcctgagtgacagagtgagactctgtctcaaaaaaaaaaaaagaaaaggtggctgatgagagaccattcatccaataaatatttattactgtctacagttcattgagggtttagaatacagagatgaacgacccatgtcatgaataggactatggaggatacagaatctgggggaaaaaaggaaacccaagataaatttttagattatgaattaatgatgcctctgaaacatttcttcccagttttgagaactaaatagttcttgtagatatggaaagccatctaaaaaccacagtctgttaatttggctagtttatatgcagctaccttcaaaagaacctagatattctccaaaggagatatacaaatgggctgggcaaagtggctcacacctgtaatcccacccctttgggagactgaggcatgagcatcgctggaacccaggagtttgagaccacctgggcaacatagtgagagcctgtctcaaaattttaaaattaaaaaagaaaaatgaccaaatgaccaaaaaatacatgaaaagatgctcgatatcattagtcaatagagaatgcaatcaaaaccacgataataaggtaccacttcaaatccactaggatggctatcattaatgaaatggaaaatagcaagtgttggtgatgatgtagataaactggaaccttacacgttgctggtgggaatataaaacagttcagcctccatggaataagcttctcagttcctcaaatgaattgccatatgacccagcaactccactcctaggagtataaataaaaaactggtatttaaacaaatgcctatacacacaggtatctgtatattcatagcagcaccattcacaaaagccaaaaggtagaaacagcccaaaacatccatcagtgaataagtggataaacaaattgtggactgtccttccaatgaaatattattcagctgtaaaaagaaacgaagttctgatacattctacaacatggatgagcctcaagcagaagctggagggtcaggagaaaagaacctagatactagaactagaaagcctctttactcattaaataatcccattgtatctggatattttccactaaatagagtatcaaaaataacatttttattatgcctacttcaaataaatcataccgcacacgtttctatttcttcctctttgccctcatttcagccatctttagtaagagtggctcatcagttgatgggaagaacgtttgtttcctgggtcaggtattgtttttaaaataccatgacccatttacagtataaataaagaactagactctgcacagacttaaaacctaggaacatgaatggacaacagcataaatacatacaattattatgtatcaattaaacatttttttttaatagaagacacaagggaggttttgccttgaccgaagttattcctggttcaaatgcctcctgaaaatgacttcctagtggaaaatacaatctctccagtcctctagcaaatggttctttcccttttgagaaagttactgtgtggttcagtaatttccaaatagtgttcaactaactatattagaattgccttgggagctgttatttttttaagtgtaggaatcagccacccccaactgtatatttctgattgagtgagctagagtgcagcctagatatctgtatgtctttaacactgtcagatcattatgaagtgtaatgtgtttgaaaactgctacagctgagcagttgtggttttttgtttgtacaagcaaaacaaagattgcgagtggtgtagtataccatggaggcttaaaaagaaagacaataataagaattgtattgtttttacaaagggatccactttatacatattggacattaatcgtcatccttgaatgtgtcattacagatgaactgagcgccaatggacaatatcaatgtcttgctgaactgtccaccagccccatcacagtctgtcatggctccggtatctcctgtggcaatgcacaaagtgatgcagctcacaatgctttgcagtatttaaagataatagcagaaagaaagtaaatctggagcaacttaaaaaatctttcagtagcacataaaaagttcccctctggccccttcccaagtaaaacttttaccgtagtgtttatgtcttgtttctaaatctcttcatagattccatcaacactccagatttaattatctcctcatagttgttattaagctctttttaatggcttcaactttgtatcagtatactgtatttataaactttgtaccacaagagagagtgtagcacccattttacagtgccatgcacatcagagaaagaaactgcatgtttgttgttgatgatgaaataaaaatgctagcgacagtctttcttactggtgcttaagctcttctttgcacaaagctttataaagggaattcaaaggaagccctttagaattagagtcttgagggacagcactaacaggcctttattaagtatgattgattgttaaatttcagggaacatgattggtctgctgtgtatttgaattcatgtaacaaagaactgttacgatgggattctgctcattttattaaaaagctactgacttgactgtcatcctgttcttgttagccattgtgaataagattttaatgttgataattctgttatttacatatctctaatttactttgaaattcaaaggtgaaaataaaaaatgatggcctaagtaaaatttacaaacatacatgtaatgggttacttccttactttctctaagcgtatgcaaccttgtatttttctttgacataaccatacacaggtgaattactagtttaaaaagcatttgaccatgcatgttggctcatgcctataatcccaactctttcggaggccaaggtgggaggatcccttgaggccaaaagtttgagaccagcctgggcaacatagtgagtccccatctctaccaaaaagaaaatcaggtgtggtggcacactttgagtcccagctactcaggaggctgaggtgggaggattgcttgggcccagaagatcaaagctgcagtgagctaggatcacagcactgcactccagcctgggtgacagagtgagaccctgtctcaaaaaaaaaaaaaaaaaaaaaaaaaaaaagcgttagtagaattacccaaaaaaccttcccagcttattcagttcagttgcaagaatgttccaaagtgatgagtgattaaaaggttaggaaataagtctaatgaacagattttaaccttaccttttgtgtttccatatataatcttgtaacatctcaagtcttccatctgtcagcgccggctcgtgctagctttctacattaggtggaagtctcagctctgtgtttggagtgcagggaaagcttcatagaggaaacatgaatgaaggtaggtctcatgtattcatacagaagga

SEQ ID NO: 9422 - DNA, 20444 bp, Homo sapiens
cgcaagcaggaggcgggggagtcggaggaggtggcggcgctggagctcctcccggggaccagcgacccggggagcgagcacgtcgctccgcaccgctcttcctccagccgctgagccgtcccttctcgccatgtcccagagcaggcaccgcgccgaggccccgccgctggagcgcgaggacagtgggaccttcaggtcagcgtgcgggcagtcagggccccagggccgggagcgttgggcggcagggccggggcgcggggagccggccctccagaggcattctgggtaaagccgtgcccggcgcccacgcctccgcggctgtgggtgctcggccccgccctctcggcggcgagggttggggtctgcggccgggccccgcccctctcgtggtccctggcggcgcgcggggcgggcggaggtgacgctcggtcggcgcgcccgggaagggatcgtcaggttttccctgagaggctgcggcgctgctgccagccctgttctgttgagaatctctcctacccgcattcaagtgctctctctaaagacctcgctcaccccgcctgctcctgcggagtgactgccgcagcggggccggaagacaggtgcgccccagcctcgccagctctggccctggcctccggggaactcggcgcctccctcgtcaccgtcggtggcggttaaaactggcctctacgcttctgcttcaatctccaatttggcatgcaaagcacacctttttgtggtttttgcagtttggggaagatgataacagctaagccagggaaaacaccgattcaggtattacacgaatacggcatgaagaccaagaacatcccagtttatgaatgtgaaagatctgatgtgcaaatacacgtgcccactttcaccttcagagtaaccgttggtgacataacctgcacaggtctgtatacacagttaacctggatgaccgagtgggttggcagtcaatacttggtgttgcttttcagttcggaaaagttctctttttgccagacagctgtgaggaacaggctctgaaactgagacctctcatctcaggtcgttagggcttttcagctgcatctgattctcttcctaattttctcttccccacataccaaggaagcttagaaactaaaaagttacccagccggatggctggatcctgcatggctcttctcataccctaggatcctcctagggttcttcttagaattagagggaagcaggaaaggttcttggagcagtcatagctgggtcagtaggtactgtgaagtttcatagattatagcggatgccaggaggcatgaccccagaattttctgagcgtctctcctctctgtatggactcatttggcactttaggtccattgtgctacttttgattctgtatccaaacaaaatgaggaaggggagaaggtcctcatatattacataataacttctagtttttgaaactgaacagatattttgtatattatccactttttaaacaagaagaaacaggttcagagagattataagtaacatgcgtatagcaatgaagtcacaaagcaatgaaattttaaagttcatgctttcttttggtctgtgagcttgagcaaatgataactaaagttgctcatttgtaaatgtggacattatttttcttatgtatctatttaattgcaaacacagaaaacattggatgctaaatttaatttggaagaatgccaagaaaaaaatttagtaggaaggctcaagttctaccatctggaaaatctgaagacagcatttgtttgtgtccctggaagtttggagtcttttattttaattgatgccactttaagaaaagtttaaaactttttgtgtgaggcagttagattgtaggtgctggccggaagggtccccatgggaaccatagagtcaacactgcattacttactttagctagtctatttctagataggaagaattcaagaaaagggagggtttttccctctcaatgtgttttagaccccaaattaacaacctatggcaaccgttctgcctacgccctcttctcacactaccatggcttcctgtgcaagcttatctgcctccatggcttctgatactgtctaaagactaatattctgaaatgtctgtctacatcccaagcccagttacagaatagtgtatcagtctgtgcttgctgagcatctttgcctggatgacacagaggcccctcaagcctctcattgtcccaaactgaatccatcttttccctcaaacccattcttcttgcattccctttctatgtaaaggctccacaatcacctagttcagtagaaatgtaggcttttgtcttcctaactacttcccgtctttctccctcttgtccagtctgttattaaactctatccattggcgtttaataatccactaactatccattgaatctgtcggcttctctcttctggccattgctactgcctaggccaccatcatctctcacttggattgtagctgcagtcttgtagctacacgtttaccttctagtcttgtgatgtccttttgtcacattacaaccagtgttcattcttttttttttgagacagggtctcactctgtcacccaggctagagtgcagtggcatgatcttggctcactgcaacctccgctacagcctgcacttaggcttgttgtaacatatcccattccatacttcaggtgcctattaacagacaaaaatcccacactactctgttggctcttgagggcagggaccctgtatgctatatccctaatacctgtgttagcagataaatatatggtttctgtgtcttcttacacttgagggccacacttgaaggccacacttgaaacttattccatgagggtatgggagtttgaacttaaaaggaaaaagatggaatttatcatttgccattgtgattgcttactgaaattagacatcagtcttatccccagtcccaacttagctacccatgcagaagatacagaccgtccagaagatacataacaagctgtcaccttattccataaaactctttcctgttgtacccaacacataatcatgactgctcagcctagcaaagcagtttgatacgttataggacaggctgtcagaataaaattatgcacattttgctatcaaacaattctgctgtaaatggttcctttaaaagaaacttcttgctgcagaagaatttcccctccaggaataaaggaagagtaaaatactaatctgcatttcttcagaggtgtgacacggtctactttattaccatgttatataataaacatatataatgtagaaataaggatttttatgcaggtatgcatagaattatatagaactttaaaaagttattttttaaaattttttcacatggtgaatattttattacagtatataaccatgtagtatataacatgtacatatttttatgtacagtatataacgtacatatttttattacctagtatgtgtatgtaaaatctatagtgactttgttttgtgtattgaaaacatctttgtaagctgcacatttttgtgggagataaagacttctttttttaaatcttaattcaggtgaaggtacaagtaagaagctggcgaaacatagagctgcagaggctgccataaacattttgaaagccaatgcaagtatttggtgagctaaatttctttgtattcagcagctcaaaaatatcatggctgaggtaagattaaaaatttgaacatgcttacaaaagcaacaaagtgaacagttgttagcatcctacctctcaaattctatttccttatgaaaacttatcatccattaaagaaaactttatccaatcaaatccagcaattagctattaaatgaaggtgctcatgaactaggctttactgtttttttttttttaatgggatacaacagtagaaaatcagtgcttcttgcaaatattaatattaacattttgtatttagactttgattatttctacattgaagaaaacaaagtgtgagatggagaaagatccactaaaagtactcttttgggaattctaattttgaagaagcaggcagaggttttcttttattatataatgtataccaaaagaagagaatgttaagtgggatattaattcttgacatatctttctaaagtaagatttttttttttttttttttttttttgagacggagtctcgctctgtcgcccagtctggagtgcagtggcgggatctcggctcactgcaagctccgcctcccgggttcacgccattctcctgcctcagcctcccaagtagctgggactacaggcgcccgccactacgcccagctaattttttgtatttttagtagagacggggtttcaccgttttagccgggatggtctcgatctcctgacctcgtgatccgccagcctcggcctcccaaagtgctgggatagattttttactactttaggtgtttctagatagaatattggtcctggagcatctcacatattaaagtagtgtccactgggtgcactctggagcttggcatgctttcaagttcttcttgtgcatacacttacatatgcctgaagtacgatctgtgtaatcagcttatagttgacagtagagacccagggaatttgggatgggttttttgttccctagtcatagaaaggcttttggattaggggtgtagttaggttctcatgtagtattcctctctttttgtaaatcattctaaaccgtttgggtagtttagaactaaccagtgacatggcaaccctctagataagcagctgcccaagacaagccttgcatttcacaagatgatgcttgattctctagggtcatgcattataattgatctatgccaggctgggcggggtggctcacgcctgtaatcccagcactttgggaggctgaggtgggtggatcacttgaggccaggagttcaagaccagcctggccaacatggcaaaaccctgtctctactaaaaatacaaaaattagccaggcatggtggcaggcgcctgtaatcccagctacttgggtggctgaggcacaaaaatcgcttgaacccgggaggcggagattgcagtaagctaagattgtgcccctgcactccagcctgtgaaaccctgcctcaaagaaaaacaaggccaggcatggtggctcacacctgtaatcccagcactttgggaggccaaggtgggcagatcacttgagtcaggagttcgagaccagcctggccaacatggtgaaacctcgtctctactaaaaatacaaaaaattagccgagtgtggtggcacgctcctgtaatcccagctgcttgggaggctgagacacgagaattccttggacccagtaggcagtggttgcagtgagctgggatcgcgccattgcactccagcctgggcgacagagcaagactctgtctccaaacaaacaaaaaaaagacatgccaaatgacatggcaggtattgggttctcccccactggtgatggccatgctgtttctgtatagcctgaaggtgaacccaaccattaagtacatttgtagaaatgaggggtatggagtgtcctttctgcatcttggcactttgtcagcaaaaaaagctaacaaactttactatatttgtgcttcttgacagataaaatgggaattactaagctgtaatcaggcctaaagtggcctgacttaatacagagactttctcacttctccatcacaattatttgggtagcttcggcatgcagcattgtaagtgaatactcatatctcatcagcctatgtaaagcttgaaattctcacagttggaaaaaaaaaaccttgaggaagtggcaataactaaacctcatttgtcatggaaaaatgactccagttgcctaggtggtactaaccttgaaatgccgcttattcagttttaagtactgacctgctaagtaactagtaattccagactccctagaagaggttgttctctttttccctaatcataatccccacttgctaaaaccaaattcatctaagccatctattttctgcaggatacatgtaaatcttagaggattatcccagcactgagcagatgatagatcaaacagatctctcttcatagttctgtggatgaaaaaacagtatttacacataatctgtattattcacattgccaggctaaattttctggatcattgttactcttctgttttttgtatagttgtaacagagtattctttaaatacatttttatggcatgcctattatgtacaaaacaccacaaagcttatgtaggtaagtgatacataggccctacctcaaggagcttactgtctgaacaggggagaggtgtggtgaaggatggacaaattatatgtatttgtaagagtatataatttatggtaaaacaatttcaagaaaggattaaaccatgtgttataatgtttcaaagaagggagagattataaaccactggggtaaaaggataggcttcttggaggaagtgacatttgagatatatcttggatgaccgatcagattcccatagaagaggtctgagaaaagggcattccatgtagaaggaatgacaagagcaaagacatagagagttaattagaaaatgcttgtcatttatttcataattcgggggaaattattttgttttataacacttttaaaaaatatttagctttgcagttcctgaccccttaatgcctgacccttccaagcaaccaaagaaccagcttaatcctattggttcattacaggtaagttgtacagttctttgcctactgatgaaatatataataagtttgtaatgtcagaggggctaacacaaggaattaatattttaaagacaagatagtgatatattttgttttccaacttacgatcattagattaacagagctaacttgaaattattttcctatttatgttctgggttttctttcatatacagtatttgcctttggcttatagaattctcatttaagatcaacaggccctcagtgcacatgggtaaagtgttttatactttaagaatagttcttgctactcttgtgacaaatctctttctacttctgttgagacagaagactttatagagagcctaaatcaaatcagtgaacctaactgaagaaaaggagtctatttgcttattctaccaaaaaaaaaaaattttatctatacacacacaaacacacacacatatattcagctttgaatttctatatgcagaatatccttcttgcagattatccatgtgctctgttaggccatttccctccccattattcagccagtcctttggtctccttttcctgcacagtgagcttttctatagttttcttcaccttctgtcccccactttatgcaagtctgttgtttgctgtccctactcctcatgtgttcttggccagctgtgggtttggaagtctatagctaggaggggagggactttaggaactgatggcagtgaaacctgtagatggtctcctctggtgttgccaaagagggcggtagtagcctgtttttctagttgatgtctgataccagctcactgtggtttaatgcaagaacaccattcgtagcacaaaactgcttcagttttggtattggggtataaaaatataaaatgcgggaatgtctttgagaaatagagggtcttccctcttttttctgttgcagaatatcactattcttttcaaacatatacatagaaatgggatcaaaattaagaaaacacttatgtgattgagccattgcataaaattactattaaagcctcatcttgattttataggaattggctattcatcatggctggagacttcctgaatataccctttcccaggagggaggacctgctcataagagagaatatactacaatttgcaggctagagtcatttatggaaactggtacttatttcttacaattaaaggcatttgaaatattttcagatgatgaatgactatcgaaatttctgtcgtaatgttttcaaatatttctatgcagaaaaattgatacactcctcttttattgtctctgactttctgaggttgaacttaagtataaatatttggcttaagatacttagtcttcttaatttgatatttttaaaaatcatagattattaatagaaagacaaactgttggctctgtactttaaacagtcttcattgataaattactgacttaaaaaacctcaatttggagaaaaagctatagtaaatctcttggattttaacagctattctatctagaaaataggactagaggaagattacacttgaaaattatatgattaataagagactacatggcaaataattgcagtgagataaaaatgaaaattatctttcttaattatagcaacttctatgttataaaggatataaactataagaaacgctgtcactttaaaaagtactagcgagaattcctgttaacttctctggcatgtttttgttattttcaaaagtggcttaaaatgggattttagcttagctagataatagtttcaagtaataagaaactatttgcctttgggaggtagtgtggccagtacagaaagcaccaggccaaaagcaggaacctcagcttccgtccttgatgcagtccttgattcgcgaagttaagcaaattacttaatttctctggacctcagttttttaatctataaaacaaaagcatggaggtagatatttatggtatctttcaactccaccatcccctgtgcctttcttattcctgttaaaaggaatttcatataatcgtcagtttagagaagatcataagcaggaaatagacattgagagagaggagttataattcagatgtattttaataaatctaaataattggtcagaattaaaccaaatatggttcagtaatgctagacataggaaaatacaattattatagaaaaacagaaagcataactattaaagaaaaacttaaaacaaatgtcttcaaaagtgtaagaattagtaactatacaggcctggcacagtggctcacactgataatcccagccctttgggaggctgaggtgggccgatcatatgaggtaaggagtttgagaccagcctggccaacatggcaaaaccctgtctgtactaaatacaaaaaatcagccaggtgtggtggtgggcacctgtaatcccatctacttgggaggctgaagcaggagaattgcttgaacccaggaggcggaggttgcagtgagccaagatggtgccactgcactccagcctggtgacaaagtgagggtccgtctcaaaaaaaaaaaaaaaaagaattaatagctatacaaacaaaatagcataacaaacaaagttatcaggtcagtaagaacatagtctagtatataataaaaaccgtgaggttctctgattaaacacagtacttcatacgtttgatcatcctctgtggacactaatttcttttctaaatctaccatttctttttctttgttcaggaaagggggcatcaaaaaagcaagccaaaaggaatgctgctgagaaatttcttgccaaatttagtaatatttctccagagaaccacatttctttagtgagtaatgttgacagctatgatgttaatgtcattaagcatttcttgcagtaggaaactttccttgatttcttattctatagctacttcagagttgtgatttttagaaatctcttcattattcagttataccctaccccatttttagctgcttcctgtttgtgagtcaggatcacagaggcaattaggtaagagagcttgggagacacagtcaaattcagaataataggacgggatctaaagatgataggccagtagtgccatttttgccttcaaagtgacagcgcatttccatccctttgtttgttcattcattcacttagcaaacatttagtgagctcatactgtgtgctaagtgttgtgttgggtactggggtgcagtgaataagcagtccctgcctctaaggagtttatagactactgaaaggaaggaattctataggctagtccttacagagtgtgatgtgggaacatagaagaaggcatccaacaaaaacaggtttggagacagattccaggaagaagtaatgtctaagccaagacctgtagaatgggggaaaagaattccagagagaagaaaaagcgtgtgcaaaggccaggagtgaaacatcgtatgcagtctaggagccctaagtgatttgttgtgtgtagaacatagtgttggagggagggagtctcaatgaggccagcaaagtaaagagggattaaatcttaaagggacccctatataaggaaagtgaactttatcccaagggtagtacaaagtcattaaagaattttaatctgggaaggacaggatctagtctatacattacaaggaaatcacttggctgcattatggtaagtgagtgaaattaggatcaaagagacctgcgagagtgctgttacagaagacacgtgagacatgacagcttgaactaaggtagtggctgggaaaatggagagagatgggtagattttaaagttatttagaaaactgaggtaaaggggcatggtaattgattggatgtgggaagcaagggaaagggaggaaattactattttaaacttggcaatagcaagaggggagcagataatgaactaaatatattgaatttgaagtgcttatggaatagcttatggaatagctaagtgaatatatcgagtagctgaacaaataaattcagagcttaagagattggcctacacatgatatataacttcagattctgatattcacagataggtgtgtcatgtggtacattatctgagagtagtgtattaggtgggaaataaaaaagtacaactgtagcaacttcttcactgagcttatgataaaataagggctcattctttagaaaaaaatcaaagactatatacaaatgagtaatataatttgattttacatttttaatagaaaaatataaaacactgcatttactgcttttggaatttgagtcaacagtatcaccaaaattacaaagcacagacagatttacaggtgaaattggttaaatcttcaaagaagagatcattttcaatgctatttaaactcttttcaggcaatgtatagataacataaaggaaacttttaaatttattctccaaaaccaacataatacaccaaaacctgacaatagcaagttcaacagaaaaaaaaaaattacagatcaatatgccttatggtgaaacacctttgtaaaatgttcagtacaatattaaaataatgatatagcattgacaagtagggtttatttaactaagactatttcaaggttaataagttggttactttaattaaccacattaatgtgtcaaagagtaatatataatcctctcaatggatgccaaaaaaattttgataaaactcagcaatcattactgataaaaacttggaaaaaaaccaaaatcatggttatatatttatacattatactcattcccattaatatcagaaataaggacgcccaccaacaccacttttatttaaccttgttctagaagtacccaccaattaaaaacaaattagacaagagaaaacagtacgaagttggaaataagaggagataaaatggttactaactgcaaatggtatgattgtatccctttaaaaccctaaagaaaaactactagaaacaagagaattcatcaaggtaactgattatgaaattaatatacaaaatcaataacttttccatattgcccagagttatgtaggtaacaaccagaataattaaaaataaaaagctaaaaattattgtatctgggaaggggacctgaaggtggagaaggggcaaggcagaggttgttgcttttatacttctgtactatttgattttttgctgtatgtgtgtatcactttgacaaaacttacgaagcttcataacattggtcattttatagaaaaatagaaaatcctattctgagaaaatatactagaaaaaagtcagtagttttcttatttacaaataataactagaatatagaagatcccaatttaaattgtagacagggataggctatatgaaaataaacttagaaagaaatgcgtaggaccacgtgaggaaaagtctactaaagaatagagcagaaaacattgtaaatatatttaaatgtaatgtggtctcactcaaaacctaccagcgtttggccaggcacagtggctcacgcctgtaatcccagcactttgggaggccgaggtgggcggatcatgaggtcaggagatagaaaccattctggctaacgcggtgaaaccccgtctctactaaaaatacaaaaaaaaaaattagccgggcctggtggcgtgcgcctgtagtccccgctactccggaggctgagtcaggagaatggcatgaacccgggaggcggagcttgcagtgagcagagatccacgccactgcactccagcctaggcgacagagtgagaccccaactcgaaaaaaaaaaaaacctaccagcgttcattttggaccttgatacacgtttattgaagtttatctggaaaaaaaccctcaagaatagccaagaaaactgaaaaggaagagttgggagagcaagggtgtgctgctttactagagaacaaaacatactgtaaaactgaacttgtcagacaagttactgggccaggaatagtcagaggagcgaatagagaatccaggcgtagatgctaatccacataggaccatagtatatagcaacagtgagatttcagatcagtgggtgagaggatggattattcaataatgatgtagaaacagtttacatccacatttgggtgggggctatatatatatatttgttgatgtgtatgacatctatttagaatgcttccttattccttacaccaaagtgaatttcagatggatcaaagatttgaacataaaaatttgaaacagtataaatattaggaaacatggaagagtttttctttttaaaaatcttagcatggggaaagcattttaacttaaaacctaggttaaaagattaatacatttgacaacataaaacctactgcacagcaaaaaatctgtaaattaagacaataaaaaagtgggaagaaattattttcaacatagaactataaaggaactgttttcagtactacctttaaagctcttttgtacacatctgctgcacacagcagcacatgcctgtagtcccagctactcgggaggctaaggtgggaggactgctagagcccaagagtttgagagttaagccacacagcaagatcctaactcttaaaaaagagaaaatttaaaaagctcttatgcatcagttaaaaagacaacccagtagaagaaatgcaaacgattaagggaaaaaaagaaaaaatattcaactttattcatgcaagataaaatattttcaccttttagattggcaaaaactacaaaatttgataatagctggtattagtgagggtatgagaaaacaagccccctccaagacagttggtaggagtataaattggttcagaaatcagtttggaagtatttatcaaaattaaaagtgtacatgttctttgacttagcagttccacttctagaaataattctacagagaaactcattcaagtgcaaaagagtgtttattgctagtaaaagcaagaaactagaaacaacctaaagctcacagttggagatccgtaaggtaaatacagtgcatatatgtgcactgataaaagaaaaatgaacaagatgtagaggagtaagttatcatttgctttaaaagattgtgtgtgcttgcatatgcatagaacatttatgggaagatactgaaaaatgtttaacagtatgtctaagaaatagaacagaggtcttcagggaatgggtggtaaggaaaagagactgtactcttcattatatatttgttcttagtgcatgtatatttttaaccatgtaaatagtgttctttatttaaaaacagtattttaaagtttctataatgtaaatttttatttggtaaatctaataaattacttaattccatatcatgccatctctaaaatcttttggaaattgcctcccctctgtcgtgctcattaataaaacaatattaagagtagtaaccctacttacttcagaaagtagttgtttttattaatggcatatgaaagcaatttgagaaccataaactaatatggaaatataaggcattctaaggacagagatgaaaagggaaggatataggggaggataaaggaaagaggaaaagcagaaagaaaaaggaaaaaaatactcagttgggttctgggatagaagtctgataagaactttttgacatcctgtcatttatttgaatgacttgttcctcaaacccaacgcgcacatttcatgttttttttagtttttttttctgttttttttcctgtttgatagctgtcagttatagtgattggtatttaatacaaaaaaaaccaaagatatgaaaattgttctatattttaatctgcaaattgctccattaggcagatttaattatttgtggatttacttatggtgcttccagatatcttgtacctcttaatgtgaccatcagaaaacttgactgagaaacatttgtactatacaaaatacaaaatgctttcagtatattattgcaagtgcttcttaaaaacatatagtattgttaaatgtgtactttttaatgttgtcttgtttaaattggaaaattaaccaaatgttatccatttaaacatgctttataacatattaaatgtgagtgcttaataagtacttttaatgatactggtacgggtgttggaacccagtcctagtcaagagtctaaatcttcatctctgtttttcagacaaatgtagtaggacattctttaggatgtacttggcattccttgaggaattctcctggtgaaaagatcaacttactgaaaagaagcctccttagtattccaaatacagattacatccagctgcttagtgaaattgccaaggaacaaggttttaatataacatatttggatataggtatgatttttttttctttggctttcccaagacatgtttatttaaaaatgtgtttgaggaacaaaaatgtgtttgaggaataaaaatttctattacaatttattttattgatcagggattctaagtatatataattactaggccagtaatatatataattgatatgtcccattcttgtggatagtaataatagctaacatctatacagttataacaaaaacaacaatagcaaagatagagttttactgtgtgccagacactgttctaagattacacgtatctacttactgaatcctcagactaactctatgaagcaaattctgttatccttatttataagtaaaggaagaaaggcacagaaaggttgagaaacttgcccaagatcacatagctagtcagcggtagagcaagatttggggaagagtcccagaagataccctggctgttaaactagccctgctgggcaaatgaaaaggcacctacatttctagcacaagtacaagtttgtggtgcccagaccttttctctctactttgtcactgtatgctgattctgggaggtaaatggaaccaagtcaatttatagttttatcccatctcagccatcatcatctgtattttctctagcccttaatcatttggatagacaaatatggacagatgggaaagcaagtcagtatggattttcttttaattcaatttatagagctaattagttgtgtgtgtttggtgtcttgattttttttttttttttttttttttgagacggagtattgtttctgttgcccaggctggagtacagtggcacaatctcaactcactgcaacctctgcctcctgggttcaagcgatcctcctgcttcagtctcccaagaagctgggaatacaggcatccaccaccaagcctggctaatttttttttttttccccaagatggagtcttgatctgttgccctggttggagtgcggtggcatgatctcagctcactgtaacctctgcctcccaggttcaagcaattctcctgcctcagcctcctgagtagctgggactactgctgtgtgccaccacacccacctaatttttgcatttttagtagagacggggtttcaccatgttggccaggctggtctcaaactcctgacctcatgatccacccacctcggcctcccaaagtttttttttttttagtagagatgggagtttcaccatgttgaccaggcttgtctcaaactcctgacctcaagtgatctgtacacctcagcctcccaaagtgctgggattacaggtgtgagccaccgtgcctggccaaagtatcttgatttaacatgtgtgagaaattttatatccctatccaaccacagaaagatgtggggaccttgcttgtcagggtcccctgaccctgggaaagtagggcacttaggggctcaaagaactcctgatattctgtgctactttgggattgaaggacgggtgaagtgcattgtctcagtaaaccaataatgatgcagaacctgggaagtcagtgcagacagatggttagaaaaggtggctgatgaaaaattagctgggtgtggtggcacatgcctgtagtccagtctactagggaggctgaggtggggacaatgacttgagcctctgaggttgaggcagcagtgagccatgatcatgccgctgctctccagcctgggtgacagagttagacttgtctcaaaaaaaaaaaagaaaagaggctggaggccaggtgcggtggctcacacctgtaatcccagcactttgggaggccaagtcgggcagatcacctgaggtcaggcgtttgagaccagcctgaccaacacggtgaaaccctgtctctactaaaaatacaaaaattagccagacaaggtggcgtgcacctgtaatcccagctactcgggaggctcaggtgggagaatcacttgaacccgggaggcagaggttgcagtgaaccgagatcgcgccactgcactccagcctgagtgacagagtgagactctgtctcaaaaaaaaaaaaagaaaaggtggctgatgagagaccattcatccaataaatatttattactgtctacagttcattgagggtttagaatacagagatgaacgacccatgtcatgaataggactatggaggatacagaatctgggggaaaaaaggaaacccaagataaatttttagattatgaattaatgatgcctctgaaacatttcttcccagttttgagaactaaatagttcttgtagatatggaaagccatctaaaaaccacagtctgttaatttggctagtttatatgcagctaccttcaaaagaacctagatattctccaaaggagatatacaaatgggctgggcaaagtggctcacacctgtaatcccacccctttgggagactgaggcatgagcatcgctggaacccaggagtttgagaccacctgggcaacatagtgagagcctgtctcaaaattttaaaattaaaaaagaaaaatgaccaaatgaccaaaaaatacatgaaaagatgctcgatatcattagtcaatagagaatgcaatcaaaaccacgataataaggtaccacttcaaatccactaggatggctatcattaatgaaatggaaaatagcaagtgttggtgatgatgtagataaactggaaccttacacgttgctggtgggaatataaaacagttcagcctccatggaataagcttctcagttcctcaaatgaattgccatatgacccagcaactccactcctaggagtataaataaaaaactggtatttaaacaaatgcctatacacacaggtatctgtatattcatagcagcaccattcacaaaagccaaaaggtagaaacagcccaaaacatccatcagtgaataagtggataaacaaattgtggactgtccttccaatgaaatattattcagctgtaaaaagaaacgaagttctgatacattctacaacatggatgagcctcaagcagaagctggagggtcaggagaaaagaacctagatactagaactagaaagcctctttactcattaaataatcccattgtatctggatattttccactaaatagagtatcaaaaataacatttttattatgcctacttcaaataaatcataccgcacacgtttctatttcttcctctttgccctcatttcagccatctttagtaagagtggctcatcagttgatgggaagaacgtttgtttcctgggtcaggtattgtttttaaaataccatgacccatttacagtataaataaagaactagactctgcacagacttaaaacctaggaacatgaatggacaacagcataaatacatacaattattatgtatcaattaaacatttttttttaatagaagacacaagggaggttttgccttgaccgaagttattcctggttcaaatgcctcctgaaaatgacttcctagtggaaaatacaatctctccagtcctctagcaaatggttctttcccttttgagaaagttactgtgtggttcagtaatttccaaatagtgttcaactaactatattagaattgccttgggagctgttatttttttaagtgtaggaatcagccacccccaactgtatatttctgattgagtgagctagagtgcagcctagatatctgtatgtctttaacactgtcagatcattatgaagtgtaatgtgtttgaaaactgctacagctgagcagttgtggttttttgtttgtacaagcaaaacaaagattgcgagtggtgtagtataccatggaggcttaaaaagaaagacaataataagaattgtattgtttttacaaagggatccactttatacatattggacattaatcgtcatccttgaatgtgtcattacagatgaactgagcgccaatggacaatatcaatgtcttgctgaactgtccaccagccccatcacagtctgtcatggctccggtatctcctgtggcaatgcacaaagtgatgcagctcacaatgctttgcagtatttaaagataatagcagaaagaaagtaaatctggagcaacttaaaaaatctttcagtagcacataaaaagttcccctctggccccttcccaagtaaaacttttaccgtagtgtttatgtcttgtttctaaatctcttcatagattccatcaacactccagatttaattatctcctcatagttgttattaagctctttttaatggcttcaactttgtatcagtatactgtatttataaactttgtaccacaagagagagtgtagcacccattttacagtgccatgcacatcagagaaagaaactgcatgtttgttgttgatgatgaaataaaaatgctagcgacagtctttcttactggtgcttaagctcttctttgcacaaagctttataaagggaattcaaaggaagccctttagaattagagtcttgagggacagcactaacaggcctttattaagtatgattgattgttaaatttcagggaacatgattggtctgctgtgtatttgaattcatgtaacaaagaactgttacgatgggattctgctcattttattaaaaagctactgacttgactgtcatcctgttcttgttagccattgtgaataagattttaatgttgataattctgttatttacatatctctaatttactttgaaattcaaaggtgaaaataaaaaatgatggcctaagtaaaatttacaaacatacatgtaatgggttacttccttactttctctaagcgtatgcaaccttgtatttttctttgacataaccatacacaggtgaattactagtttaaaaagcatttgaccatgcatgttggctcatgcctataatcccaactctttcggaggccaaggtgggaggatcccttgaggccaaaagtttgagaccagcctgggcaacatagtgagtccccatctctaccaaaaagaaaatcaggtgtggtggcacactttgagtcccagctactcaggaggctgaggtgggaggattgcttgggcccagaagatcaaagctgcagtgagctaggatcacagcactgcactccagcctgggtgacagagtgagaccctgtctcaaaaaaaaaaaaaaaaaaaaaaaaaaaaagcgttagtagaattacccaaaaaaccttcccagcttattcagttcagttgcaagaatgttccaaagtgatgagtgattaaaaggttaggaaataagtctaatgaacagattttaaccttaccttttgtgtttccatatataatcttgtaacatctcaagtcttccatctgtcagcgccggctcgtgctagctttctacattaggtggaagtctcagctctgtgtttggagtgcagggaaagcttcatagaggaaacatgaatgaaggtaggtctcatgtattcatacagaagga

SEQ ID NO: 9423 - DNA, 521 bp, Homo sapiens
ccattaagtgataagtgactttaaaagatgaggatggcaatagcacaatatgataatactaattcaataagttattgagcactaatgtgcccagcactatagcagcctctgggaatatgtgggcccatattgtgttatttgatgaagagccgctcccttgttctcggggtgtgctgtgatatgccacacagtccccttccctacagaggattttgttttctcgctctggcagtgtgcacccaacggccctcagctgtcagtagaattgccctcttaagtgaaaagagccacctcatctgaagtcacacttccttcttgggccaggctgcatgcaaagactagtcccattgccccatattagaacaatctgaaagaccatcctagcttcagagttccccttagtgtcagctaaggccacctttgagattgcatcatagtccatattcttcctccacccagtggagtttcctttctttccacaggtggcaatccaaatctcctacccactaatcttcatctca

SEQ ID NO: 9424 - DNA, 564 bp, Homo sapiens
aaattacttaatttctctggacctcagttttttaatctataaaacaaaagcatggaggtagatatttatggtatctttcaactccaccatcccctgtgcctttcttattcctgttaaaaggaatttcatataatcgtcagtttagagaagatcataagcaggaaatagacattgagagagaggagttataattcagatgtattttaataaatctaaataattggtcagaattaaaccaaatatggttcagtaatgctagacataggaaaatacaattattatagaaaaacagaaagcataactattaaagaaaaacttaaaacaaatgtcttcaaaagtgtaagaattagtaactatacaggcctggcacagtggctcacactgataatcccagccctttgggaggctgaggtgggccgatcatatgaggtaaggagtttgagaccagcctggccaacatggcaaaaccctgtctgtactaaatacaaaaaatcagccaggtgtggtggtgggcacctgtaatcccatctacttgggaggctgaagcaggagaattgcttgaac

SEQ ID NO: 9425 - DNA, 521 bp, Homo sapiens; identical to SEQ ID NO: 9423

SEQ ID NO: 9426 - DNA, 588 bp, Homo sapiens
gcgtgagccaccgcgcccgcccataaatcacttttaataatatcctttcgtacgaatagcattgtgcaagcaatcttccataacaccgagtaagcacaggggagcatttctgctagtgcctagcaagcccctggagaagcgacacgtcatctaatggcccaccaaaggtgctgcatcccaggcaaacgccattacaaccgactacccaggtccccggaaaggccttcgtttactcctaacgtgttttgctgggatgcactgacccagcgttccatctcgcgacgaaagcccagaagacaaaggagcccgcccggcgggagaggagcgggtgtttggacgtccccgcgtgttcctaaacacagggctcggggacccgaagagcgcaccgcagccccctggagcgtatatatccggggtctcaagcttcaggaccaggcccgggagactccctggaattctgccttcgtaattttagaatctttttcttaaagtgacccagcccccaatccgtcctccccacaaaggcttaactttaggcctcaacgaccctagacccacgccggacaatccctctaatccctctctccc

SEQ ID NO: 9427 - DNA, 5981 bp, Homo sapiens
ctctagactgggcaacaaagcaagactccatctcaaaaaataaaataaaataaataaataaattttatactttaagtatgtgcagcttaatttaccttattgaggtaaatgaagctactgaataatacctcaataatgccattttatgaaaatatgttttaaaaacataggatccactttcaacaagggcagcatgtcacacaaatacactctgttaaaattacaattttctattatttaccattgaataaaattaatgtcaagaaaaaataaaagagagtatcttaacggtataaagtattcaggataggctatgtgaataaggtcacatttacatggatttttaaggacagaaaaatattttgatgtgtgatacagaaagattaatctattaacatttttatttatccaactagcacttattagcacctgtgtactcaagcagcatgctcagcacagtgaagaccttttcaactgctgttagtaaatttccagactagacttaataaatttggtcatggccaaggaaattatactcaaaatttagctgccgttcacccagtcttcctacttaccagcttatttgcatacttattttcccattgtaggaataaggcattacatttaaaagcagcaaattatgcaatatatttaaatgtaaatcaacatgcagtttcatatatgtgatcagtatgcatttgttaagcatattatccattttgcaactgctatcttgagtacaaagtaaaactatgaaactttgattactctgagcaaataaacctcttaactacctcgggatcctattttctcttttgaacaattaaaagtagagtaaccatgtgatttactgtctaacttctgaaagtgatgggtgctattaattttttttttttttgagatggagtctcgctctatcaccaggctagagtgcagtggcacgatctcagctcactgcaacctccgcctccacctccccggttcaagcgattctcctgccttttttcaggtagctgggactacaggcgcacaccaccacgcccagctaatttttgtattttgtatttttagtagagacggggtttcaccatgttcgccaggatggtctcgatctcttgacctcgtgatccacccacctcggcctcccaaagtgctaggattccaggtgtgagccaccgcacccggcctgggtactattactattatgatgggtcaacagtagtaaacgagatcagtcccaggaaaactgggatgtatagtcatcccaggtacagggaggtttgttttgttgtaaagttacaagtataggtttctgaatgccactcagaactactgaatcagaatctctactgtgggatttgggaagccttatactgtaaagtgatatcattaaaggctcttccaattctaagttatacatttaatatggtaattttgaatatagactggatattgaatgatagggaattattattaatctttttttttcttttttgagacaaactctcactctgtcgcccaggctggagtacagtggcgcaatcttggctcactgcaaccccgacctcccagatgcaagcaattctcctgcctaaggtttcctgagtatctgagattacaggcatgtgccaccatgcctggataatttttgtatttttagtagagacaggatttctccatgttggccaggctggtctcaaactcctaacctcaggtgatccacctacctcagcctcccaaagtgctgggtttacaagcacgagccaccgtgcctggccagtattattaatcttatatgtaataatgatgtgattacataggagaatgttcttatttttaggaaacagacacagctgcatttaggagtgatgtgtcatgatatccgaatcctttcaactgatacagggaacacacacatacatacaatcaaagctgataatgggtatatacatgtccactatactattctttcaattttatgtatgcttgaaatttatcataataaaatattgagaagaagactgttagggaaaaacatttgtatgtataggtgagaacacattattgtcacaaatataacttaaaagaactatgaccaaaaaggtgtcaattcaagtaattactaaaaaagaatcaagcctgtaatttctcttcttggaattatttattttattttatttttttttttttttttgagacagagtcttgttctgtcgcccaggctggagtgcaatggtgcgatctcggctcactgcaacctctgcctccctggttcaaaagattctcctgcctcagcctccagctggaattacaggcacccgccaccatgcctggataattttttttttgtatttttagcagagacagggttttgccatgctggccaggctggtctcaaactcctgacctcaggtggtccgtctgcctcggcttcccaaagtgctgggattacaggcgtgagccagcgcgccagccggaattattttttaaagaataaaatttcaaagatattcactgcagaattgcttaaaatagtgttatttctgcaatactctgaatgtataacaataatggcatgaattatggtgcacgggtacattcaacgagggattattacacagccactaaaataattattattaggaatatattttaagactgggcaatgtggttcacacctgtaataccagtgctttggaaggttgaggtgggaggattgcaagaccagtctgggcaacatggtgagacccctgtctctacaaaaaaaatattttaaattagtcaggaatggtggcatgtacctgaagtcctagccactgaggaggctgagatgggaaggtcacttaaaccaaggagttcgaggctgcagtaagctatgatggtgccactgcactccagcctgggtgacagagcaagatcttgtctctaaatataaacaaccaaatattgacctatgctgctacatagatgcaaaaataatccaaatctatatgcttaactacataaccatttgtggagtcacgtggacagatctggaagtttacgtggaaaatgctacctatttgaaaagcagtttttcccctttatttcatttttttctttattttgaattctgccaatgattttgtgtaatagtatttttttaatggtatgggaagaaatcttttatcatgtgataccacataacagctgcctaaccacacaatgtagatatgaataaagatggctcagaaataagagtgtactagtattagtgactcaactagttaccattatgacaaatggaataaagttttgactgatttacaggagttttaaaatgcattttatattgagtagttatttcatgttttcttaaaacaattattgtactgaactaaaaataaactaggtagtttgttcacctaaccaatctacattcaaagacatgcttacaaattttccacttagttcatttttctgttctcagcattactacaaatgcctcattccgtcatcttgttgaattctttagcatcttctgtatcatttccaggggcatctctgggaagtagtgatgcctatcttccctcagaagcacactgataaccccaatatacccacaattcacacttattcccttctctgaggtgtgctgctttttggcacatcagaaaaaacacactactaggatttgaaaaactaagttctgggcctggttaggtcataaactacagaaaccttaggtcatatattctccccaggcgtttctccactacaaaaaaaaaattcattattcccttggtcttttgtagtcctttactatttcacttatcttcatgataacccttaaatttaagtaaggtagcattatgctcattttatagaagaaattcaatctcaaagaggacatagtctcccaaagatcccacaagtagtaatatattaggcagagctaaactcacacactcttactcaagatcctagtactggtacatgccgtgctaataagtttgctaaaatggataaagcagcaatttctcaggtcccttccaatgatcctgttctctgcttctacttgctattttttctctcttctctcaactagcattaacatccaaaactatatataatcaccaaatttcatttaccatggttttttaattattctttaaatttttctagttccatgttaaatccagagaaatgttactttttcgaaagtttctactactgcctctctctctgaaggccatgggacttaactatttgtcaaagcagaaattcccaacatttcgtaaacaccactaattactttttataactgtaaagacaattattccatacttaaaaccaattcaaaataaaataaatcctcaatacttcttattccctggggtagtaattttaattagattttattgattctttattttctcctatgtgcctttatttgggaaatactgttagtctaccttactatcgagtctctttccctagcaagaaaatgtcagtcttaagagtcaggaaagcttttactttcactatcacatatgaagaatgaactaaacacctaaattggataggaaaacttaaatgagggattcaggacacttcccaaggggtcatatgaccaatttaaaagttggtatgatgtgtctaaaataacaaattaactcttttacttataataaaggtacagatgtgctgattagtcatgctaacatgtacatatgaaatatgcctaaaccaaattaaaagaaaacaaaatacagtctatggcaatcttgaaaattcagggagctcaataaatattaagaggatgctctcacaatgagagcattaaacacttggtaattaacataatttaatatgcaaaaataagaaaatatacaggatgagggatgaggagtacacataggaaatttttgtgattttcttcattttgattgtattgctttcttgtcttcaggagggaagattttgacttcaaaagtaacaaaatatttaagaagggaattcacatctttctgttctaaatgatattcttgcgctattttctcagcagttcatgtttctggataaagtttatgattattgaaaagtgtcaatgcttctacagtggaaattttgcctttgggaatgctcttaatatttatcatatcaaagtgatggcctttcggcaatctgaatttctttggctcctgacgtgtttcagcagctttcagctgcacggaagacacaggatctttggaatcaacacacacatattttagaaatgacagcagcttgtcatctttacgagcaatctctcccttaatttctggatagagactaatctgctctggcaggaggctgctggtagaggggtgcctgggagcgagagagggcttcatgttgcggatttccctttccgctcggttctcttgaaattcctgatcccgcgagtcaccgcagcccccatctccttacaacatgatgccctcaggttcacagtaatgtattttttaaaaaccagtcgttgttaccttaatttggtcccaagggctgtaaaggtcagtttacaactcgttgaacaactgagtaagatttaaggcaactcaactgatagctgcatacctaatttaggatatccatagaattgttttgtcaactacaaatataacaagcattaagtgtaaactgtgttgctgaaaagtactccaagtatcttaggaacacccaccgcaatgtgtgggctaaatgcacacgtacaatgatagcagaaataatacctgtcatataggacgggcatgtcagccttttctccgcgaaaggcttctggtcctaagctgtcccttactttcaccggaatgagatgcgtccagagtcccaagcaagggaggagactgctcctttacccaggaggctggaaactgctcgatgcgagcgcagtttccgacgcccttcggctgagacctgcagcaccggacgatgtcccagttgccagctttagttgctaa

SEQ ID NO: 9428 - DNA, 5982 bp, Homo sapiens
ctctagactgggcaacaaagcaagactccatctcaaaaaataaaataaaataaataaataaattttatactttaagtatgtgcagcttaatttaccttattgaggtaaatgaagctactgaataatacctcaataatgccattttatgaaaatatgttttaaaaacataggatccactttcaacaagggcagcatgtcacacaaatacactctgttaaaattacaattttctattatttaccattgaataaaattaatgtcaagaaaaaataaaagagagtatcttaacggtataaagtattcaggataggctatgtgaataaggtcacatttacatggatttttaaggacagaaaaatattttgatgtgtgatacagaaagattaatctattaacatttttatttatccaactagcacttattagcacctgtgtactcaagcagcatgctcagcacagtgaagaccttttcaactgctgttagtaaatttccagactagacttaataaatttggtcatggccaaggaaattatactcaaaatttagctgccgttcacccagtcttcctacttaccagcttatttgcatacttattttcccattgtaggaataaggcattacatttaaaagcagcaaattatgcaatatatttaaatgtaaatcaacatgcagtttcatatatgtgatcagtatgcatttgttaagcatattatccattttgcaactgctatcttgagtacaaagtaaaactatgaaactttgattactctgagcaaataaacctcttaactacctcgggatcctattttctcttttgaacaattaaaagtagagtaaccatgtgatttactgtctaacttctgaaagtgatgggtgctattaattttttttttttttgagatggagtctcgctctatcaccaggctagagtgcagtggcacgatctcagctcactgcaacctccgcctccacctccccggttcaagcgattctcctgcctcagcatcaggtagctgggactacaggcgcacaccaccacgcccagctaatttttgtattttgtatttttagtagagacggggtttcaccatgttcgccaggatggtctcgatctcttgacctcgtgatccacccacctcggcctcccaaagtgctaggattccaggtgtgagccaccgcacccggcctgggtactattactattatgatgggtcaacagtagtaaacgagatcagtcccaggaaaactgggatgtatagtcatcccaggtacagggaggtttgttttgttgtaaagttacaagtataggtttctgaatgccactcagaactactgaatcagaatctctactgtgggatttgggaagccttatactgtaaagtgatatcattaaaggctcttccaattctaagttatacatttaatatggtaattttgaatatagactggatattgaatgatagggaattattattaatctttttttttcttttttgagacaaactctcactctgtcgcccaggctggagtacagtggcgcaatcttggctcactgcaaccccgacctcccagatgcaagcaattctcctgcctaaggtttcctgagtatctgagattacaggcatgtgccaccatgcctggataatttttgtatttttagtagagacaggatttctccatgttggccaggctggtctcaaactcctaacctcaggtgatccacctacctcagcctcccaaagtgctgggtttacaagcacgagccaccgtgcctggccagtattattaatcttatatgtaataatgatgtgattacataggagaatgttcttatttttaggaaacagacacagctgcatttaggagtgatgtgtcatgatatccgaatcctttcaactgatacagggaacacacacatacatacaatcaaagctgataatgggtatatacatgtccactatactattctttcaattttatgtatgcttgaaatttatcataataaaatattgagaagaagactgttagggaaaaacatttgtatgtataggtgagaacacattattgtcacaaatataacttaaaagaactatgaccaaaaaggtgtcaattcaagtaattactaaaaaagaatcaagcctgtaatttctcttcttggaattatttattttattttatttttttttttttttttgagacagagtcttgttctgtcgcccaggctggagtgcaatggtgcgatctcggctcactgcaacctctgcctccctggttcaaaagattctcctgcctcagcctccagctggaattacaggcacccgccaccatgcctggataattttttttttgtatttttagcagagacagggttttgccatgctggccaggctggtctcaaactcctgacctcaggtggtccgtctgcctcggcttcccaaagtgctgggattacaggcgtgagccagcgcgccagccggaattattttttaaagaataaaatttcaaagatattcactgcagaattgcttaaaatagtgttatttctgcaatactctgaatgtataacaataatggcatgaattatggtgcacgggtacattcaacgagggattattacacagccactaaaataattattattaggaatatattttaagactgggcaatgtggttcacacctgtaataccagtgctttggaaggttgaggtgggaggattgcaagaccagtctgggcaacatggtgagacccctgtctctacaaaaaaaatattttaaattagtcaggaatggtggcatgtacctgaagtcctagccactgaggaggctgagatgggaaggtcacttaaaccaaggagttcgaggctgcagtaagctatgatggtgccactgcactccagcctgggtgacagagcaagatcttgtctctaaatataaacaaccaaatattgacctatgctgctacatagatgcaaaaataatccaaatctatatgcttaactacataaccatttgtggagtcacgtggacagatctggaagtttacgtggaaaatgctacctatttgaaaagcagtttttcccctttatttcatttttttctttattttgaattctgccaatgattttgtgtaatagtatttttttaatggtatgggaagaaatcttttatcatgtgataccacataacagctgcctaaccacacaatgtagatatgaataaagatggctcagaaataagagtgtactagtattagtgactcaactagttaccattatgacaaatggaataaagttttgactgatttacaggagttttaaaatgcattttatattgagtagttatttcatgttttcttaaaacaattattgtactgaactaaaaataaactaggtagtttgttcacctaaccaatctacattcaaagacatgcttacaaattttccacttagttcatttttctgttctcagcattactacaaatgcctcattccgtcatcttgttgaattctttagcatcttctgtatcatttccaggggcatctctgggaagtagtgatgcctatcttccctcagaagcacactgataaccccaatatacccacaattcacacttattcccttctctgaggtgtgctgctttttggcacatcagaaaaaacacactactaggatttgaaaaactaagttctgggcctggttaggtcataaactacagaaaccttaggtcatatattctccccaggcgtttctccactacaaaaaaaaaattcattattcccttggtcttttgtagtcctttactatttcacttatcttcatgataacccttaaatttaagtaaggtagcattatgctcattttatagaagaaattcaatctcaaagaggacatagtctcccaaagatcccacaagtagtaatatattaggcagagctaaactcacacactcttactcaagatcctagtactggtacatgccgtgctaataagtttgctaaaatggataaagcagcaatttctcaggtcccttccaatgatcctgttctctgcttctacttgctattttttctctcttctctcaactagcattaacatccaaaactatatataatcaccaaatttcatttaccatggttttttaattattctttaaatttttctagttccatgttaaatccagagaaatgttactttttcgaaagtttctactactgcctctctctctgaaggccatgggacttaactatttgtcaaagcagaaattcccaacatttcgtaaacaccactaattactttttataactgtaaagacaattattccatacttaaaaccaattcaaaataaaataaatcctcaatacttcttattccctggggtagtaattttaattagattttattgattctttattttctcctatgtgcctttatttgggaaatactgttagtctaccttactatcgagtctctttccctagcaagaaaatgtcagtcttaagagtcaggaaagcttttactttcactatcacatatgaagaatgaactaaacacctaaattggataggaaaacttaaatgagggattcaggacacttcccaaggggtcatatgaccaatttaaaagttggtatgatgtgtctaaaataacaaattaactcttttacttataataaaggtacagatgtgctgattagtcatgctaacatgtacatatgaaatatgcctaaaccaaattaaaagaaaacaaaatacagtctatggcaatcttgaaaattcagggagctcaataaatattaagaggatgctctcacaatgagagcattaaacacttggtaattaacataatttaatatgcaaaaataagaaaatatacaggatgagggatgaggagtacacataggaaatttttgtgattttcttcattttgattgtattgctttcttgtcttcaggagggaagattttgacttcaaaagtaacaaaatatttaagaagggaattcacatctttctgttctaaatgatattcttgcgctattttctcagcagttcatgtttctggataaagtttatgattattgaaaagtgtcaatgcttctacagtggaaattttgcctttgggaatgctcttaatatttatcatatcaaagtgatggcctttcggcaatctgaatttctttggctcctgacgtgtttcagcagctttcagctgcacggaagacacaggatctttggaatcaacacacacatattttagaaatgacagcagcttgtcatctttacgagcaatctctcccttaatttctggatagagactaatctgctctggcaggaggctgctggtagaggggtgcctgggagcgagagagggcttcatgttgcggatttccctttccgctcggttctcttgaaattcctgatcccgcgagtcaccgcagcccccatctccttacaacatgatgccctcaggttcacagtaatgtattttttaaaaaccagtcgttgttaccttaatttggtcccaagggctgtaaaggtcagtttacaactcgttgaacaactgagtaagatttaaggcaactcaactgatagctgcatacctaatttaggatatccatagaattgttttgtcaactacaaatataacaagcattaagtgtaaactgtgttgctgaaaagtactccaagtatcttaggaacacccaccgcaatgtgtgggctaaatgcacacgtacaatgatagcagaaataatacctgtcatataggacgggcatgtcagccttttctccgcgaaaggcttctggtcctaagctgtcccttactttcaccggaatgagatgcgtccagagtcccaagcaagggaggagactgctcctttacccaggaggctggaaactgctcgatgcgagcgcagtttccgacgcccttcggctgagacctgcagcaccggacgatgtcccagttgccagctttagttgctaa

SEQ ID NO: 9429 - DNA, 808 bp, Homo sapiens
attaggcagagctaaactcacacactgtcactcaatttcctaatattggtacatgccatgctaataagtgtgctaaaatggatgaagcggcaatttctcaggtcccttccaatgatcctgtcctctgcttctacttgatattttttctctctttcaactagcattaacatccgaaactgtatatcatcaccacatttcatttaccatggttttttaatttaattattctttaaatttttctatttccatgttaaatccagagaaattgttactttttggaaagtttctactgctgcctgcctctgaaggccacgggacttacctgtttgtttgtcaaagcagaaatgcccaacattttgtaaacactaatttttttataactgtaaagatgattattccatacttaaaaccaattcaaaataaaataaatcctcaatacttcttattccctggggtagtaattttaattagattctattgattcattattttctcctgtgtgcctttatttgggaaatactgttagtttaccttgctatcgagtctctttccctaacaagaaaatgtcagccttacgagtcaggaaagcttttactttcactatcacatatgaagaatgaactaaacacctaacttggaaagtaaaacttaaatgagggattcaggacatttcccaaggggtcatctgaccaatttaagagttggtatgatgtgcctaaaatagcaaattaactcttctacttataataaaggtgcagatgtactgattagacatgctgacatgtacatataaaatatgcctaaacca

SEQ ID NO: 9430 - DNA, 192 bp, Homo sapiens
aaaaaatgagctgggtgtggtggcgggcgcctgtagtcccagctactcgggaggctgagacaggagaatggcgtgaacccagaaggcggagcttgcagtgagctgagatcacgccactgcactccagcctgggtgacagagtgagactccgtctcaaaaaaaaaaaaaaaaaaaaaaaaaagactatgctct

SEQ ID NO: 9431 - DNA, 691 bp, Homo sapiens
gcttaattaaaaaaaataaaaataggccaggcacggtggctcatgcctttaatcccagcactttgggaggccacggtgggtggatcacctgaggtgaggagtttgagaccagcctggccaacatggtgaaaccctgactctactaaaaatacaaaaaattagctgggcatggtggtgggaacctgtaatcccagctacttgggaggctgaggcaggagaatcacttgaacctgggaggcagaggttgcagtgatccgaggtcacgccattgcacccagcctaggcaacaagagcgaaactccgtctcaaaataaataaataaataaaaagtttgtgctgttaatttaatggggttgggagagtgaacaagttgttttcatcaaacaattctagagttttggagtggggtgcttaggaacgtcatgttttctgacattgtgacttactcctgttgagctgctcttcccgaagcactgaggcaggagtgctctccacccaacaaactgacctcccagttaacattccttagcaatgcgagtcaaagaagtgcttttaagtgtctctgatttttaacacatcactctgcaggtcagtgtctatctggaaatttctacgtgagaggtgatggaaccagagtttacttcttcacacaaggtatgaaacacccatctttttacactaaaagtcccca

SEQ ID NO: 9432 - DNA, 16225 bp, Homo sapiens
gaagctgagtctgatagaacttagcccgtgaccttaatgggtactcggcagatgcagctgcctggctgattagagaacaggacaggcatggaccctgctttcggagcagtgctgtggaatagaactttgtgcagtgacggaaatgttctgcatcttcactctcccttatgatggtcagtagccacgtgtgaaatgtatctaatgggactgagaaactaaatttttaatttaagtagccacaggtagctagtgattaccatagcaaatgctgcagttccccaggtttttagtcttgattatacctcccagaagtcgtctgctccaaaggtcaacagttcagcaggaagcagagcccatgcctttgagaggctggaggtattgcatactcccaaaaatcccaggggctcactcataatgagcccaacagtgcagaagagttctgggctgttgtttctaaaatgcaagcatacagccttcctcctctcccattttcatttagacctgtactaacagaattctggcattacaaattgttttgtattttgatgtcttcagaataaatatataatgtgcttcataattgaaagcaattttgatggttttaaaatcaacattttttgtgttgctaccttgtgctgagacttgtgctagatagtgaggataccaagaaaaataagcacagggattttgtgttgttcatctttatctcctcagcatctaagataatacccaatgcatagtgggctctcagtagtgtttggtgaactaataagcgaaagatataatcgccactgtcaaagcactcactcactatgtggtgggggccaacagacaggtacagatgtgttcctggtgtggagaaagtgccagggtggctcagcgaagaaaaaagaattcttgtggtgctatcaagcaaggcttcatttgagggaaaagtaggatttctgtaggtggaaaaagagaagacattgatttgaaactccctggttgttttataaacttcatattagctatgtccacagagcctccaaaaggatataattcaaaagggattttaaccaaaatgaaatatgttgtgactaatagatacagtttatttgaatgaatgatagtttttcccatttgatattttaactgtgctacacaagaatgagagtagacatagctcgatttgtagtctcattgttctgtcttttctgcccatttcagtgacccaggactctttgtttattgctgtgatttttcttccacagctatagaactggtccaggtgagtacaatgggaaattacctattggtaatttccactgattaaagggaaaaggttctcctaaaaatcaaggtctctggctgtgttcttatacagtctgtgttcttacggtctaaaagtaaaagatttactgataacgagcataccttgttttattgcagttcactttatcacactgtatagatgtcgtatctgttcatatattgaaagtttgtggcaaccctgcatcaagcaagcctaccggtgccatttctccaccaccatatgctcacttagtatctatgtgtcatgctttggtgattctcagaatatttcagacttttttactgttatgtatgttatagtgtgtgatgttactgttgtacttggtttggggttccacaaatcacatctgtgtaagacggtcaacttaataaatgcatgcgttgtgactgctccaccaacctgccattccatttctctccctctcctcaggtctccttgttctctaagacacaatattgcaattaggccacttcatactctacagtgtcctctgtgtgttcaagtgaaaggaagagtttcaccacgttgcccaggctggtctcgaatgatagcttacacttgtgttgtaattattaaatttaatacacaattgcataaactaatgaaatacgattgcatgctggtgcggtgactcatgcctgtaatcccagcactttgggaggccggggtgggcagatcacgaggtcaggagttcaagaccagcctgaccaagtgaaaccctgtctctactaaaaatacaaaaaaattagccgggctaaaaatacaaaaaatggcgcatacctgtaatttcagctactcaggaggctgaggcaggagaatcacttgaactcaggaggtggaggttgcagtgagctgagatcgcgccactgcactccagctagacaacagagtgagactccatctcaaaaaaataaaaatacattattggtcggccacaatggcttaatgcctgtcatcccaacactttgggaggctgaggcagacagatcacttgagatcaggagttcaagactggcctaggcaacatggtgaaaccccatctctactaaagaaaaatacaagaaattatccaggcatggtggtgggcacctgtagtcccagctactcaaaaggctgaagcaggagaatcgcttgaactggggaggcaaaggttgcagtcagccaagattgtgccactgcactccagtctgggcgacagtgagactccatctcaaaaaaaagagagagaaagaaaaaaaaatagtttattgctaaaacatgttaataatcatctaaaccttcagcaagttgtaatctttgctagtggacggtcttgccttgatattgatggctgctgactgatcagggtggtgattgccaagggttggggtggtcgttgctaagggctggggtgactggcaatttcttaaaataaggtaacagtgaagtttaccgtatcatttggctcttcctttcatgaaagatttctccgtagcatgcgatgctgataggattttgcccacagtagagcttctttcaaattgaagtccattctctcaaaccctgctgctgctttatcaactaagtttgatgccatttcaaaacaaaaaacctttcttgccatttctaaacaatgttcatagcatctttactggagtagatttgatctcaataaaccactttctttgcccaaccgtaagaagcaactccttatagataaggatgctggtttaaaaagaaagaaagaaagaaagaataagactaaaaaacaagcagcaacaagattgcagcaattcagtcacatcttcaggcttcactttttttttttttttttttttgagacagggtctcactgtgttgcccaggctgaagtagagtgacacaatcatagcccactgtagccttgaattttgggctcaggcgaacctgatgagatgattccattggggttctttgagttacaagtaacagaaacgtctagacaaactcaaagcaataaagtagaatgtcatagaacctaagggcacaaaatacagccccaagttcctggtatcttacctgtcattgtccagggcccatttgttttttccctctttgcataccagttttctctagtcagtatttcctaattttgcacgcggccccaacgtgcttgctcctcccagtcccttacaagctcaccctgttcaggggttcatggtgcctcactaaaatgattgtgtcccagttctgaagtccctggaaagtctagttaacacaacctagctgataaatacagcagccctgtttgaatcagctttggccaatgagaaacaaactcacatatttgcagaagacggacattgagggtagatgccttaaaatgtatctgttatggctggggtcagtggctcacacctgtcatcccagcactttgggaggccaaggccagcggatcacgaggtcaggagttcgataccatcctgaccaatatggtgaaaccccgtctctactaaaaatgtgaaatttagctgggtttggtggcacgcacctgttgtcccagctacttgggaggctgaagcagaagaatcgcttgaacccaggaggcggaggttgcagtgagccgagatcgcaccactgcactccagcctgggtgacagagcaagactccatctcaaaaaaaaaaaaatgtgtctgttacaattggccgggcatggtggccagcactttgggaggctgaggtgggcagatcacttgaggtcaggagttcaagaccagcctggccaacatggtgaaaccctgtctctactttaaaaaacacaaaaactaggccgggtgcagtggttcatgcctgtaatcccagcactttgggaggctaagacgggcagatcatctgaggtcaagagttccagatcagcctggccaatatggtgaaactccatctctactaaaaatacaaaaattagccaggtatggtggtaggtgcctgtagtcccagctactcgggaggctgaggcaggagaatcgcttgaatctgggaggcagaggttgtagtgagccaagatcacgccattgcactccagcctgggctacaagagtgaaactccatctcaaaaaaaaaaaaaaaaatacaaaaactggcaggacgtggtggcatgcacctgtaatcccagctactggggaggctgaggcaggagaattgcttgaacctgggaagcagaggttgcagtgagccgagatcgcaccactccagcctgggcaacagaacaagactctgtttcaaaaaaaaaaaaaaaaaagagtctgtcacaattatgtacaatgctgttagggcagattaggaattggtagtgccatgcttttagaattattattcagttaaagaccaaatgaatattgaagcctacctttacttcagtttttgataacaaagtaaattttctacatctacagaaatagattttcctgaagaattctatggtttgtgtaatattttctagttgggagttgttttaaatcgtgtgctttgttgtttgttttgagacagggtctcagtcactcaggctggagtgcggtggtacaatcaaactcactgtggccttgatctcctgggctcaagtgattctcccacctcctgtgtaactgggactatgggcacatgccaccacacttggctaatttttttttttttttttttttttgcgacggagtctagctctgtcgcccaggctggagtgcagtggcgtgatcttggctcactgcaacctccgcctcccaggttcaagcgattctcctgcctcagcctccagagtagctgggattacaggcgggtgccactgcacccagctaatttttttgtatttttagtagagacggggtttcactgtgttggccaggctggttttgaactcctgacctcaggtaatcctcccacctcgacctcccaaagtgctaggattacaggcatgcacccggcatttttttattttttgtagagatgaagtctcactatgttgcctagctggtctcaaactcctgggctcaagtgatcctcctgcctcagcctcccagggtgctgggattctaggcgtgagccaccgtgcctagcagatcgtgcttttggtttgtttgtttgtttgtttttgtttttgtttttgagacggagtctccctctgtcgcccaggctggagtgcagtggtgccatctcagcttactgaaagctccgcctcccgggttcacgccattctcctgcctcagcctcccgagtagctgggactacaggcacctgccaccacgcccggctaattttttgtatttttagtggagacggggtttcaccatgttagccaggatggtctccatctcctgacctcatgatccgcctgcctcggcctcccaaagtgctgggattacaggcgtgaaccaccgcgtgcttatttaaagtatgtgctgtctctctccttacgaatgtttttttttccctgttggtcactcattttcatgatcgttttccaattcttagatctgacttcatgcatgagaagtacagaaagtacacaagaataaagaataaaagtaggggagtcaggaatgttctattttaaaagcaactattagattcctcactgtctcccttcaattattcctgatctttactctttgagtcctccctgaaataacatgctattagattgatgcaaaagtaattgtcgtttttgccgttactttttttttttttttcttttttttagatggagtttcactcttgttgcccaggctggagtgcaatggtgcaatctcggctcactgcaacctctgcctcctgggttcaagcgattctcctgcctcagcctcccgagtagctgggattataggcatgtgccaccacacccagctaattttgtatttttagtagagatggggtttctccatgttggtcaggctggcctcgaactcctgatcttaggtgatcctcccgccttggcctcccaaagtgctgggattacaggcatgagtctccacatccttgccattactttcaatagcaaaaaccgcaattactttttcaccaatctatataatgattagaaatatatcccctactctggagggtgaggcaagtgatcctatcgcgtgaacccaagagtttgaggccagcctgggcaacatggggagattttgcctcaagaaaaaaaagaaaaaagaaatatatccctctttgtgaagtagcaacagttacatttaaaatttaaaacaagataatcttttctttaggctatgttaatattttctaacttacctgtgtcttccatctgtctgcagacaaattcagaatatgatccttctcggtgttttgcctttgttcacgacctgtgtgatgaagagaagagttacccagtgcccaagggcagtcttgatattatcattctcatatttgttctttcagcaattgttccagacaagtaagtttgggtcccttggctggtagtgtcacaaaaaggaagctttggtgagggacctttttttttaaaataggttcttgctctgtcagcccaggctggagtgcagtggcacgatcatggctcactgcagccttaacctcttgggcttaaatgatcctccctcctcagcttcccaagtaggtgggaccacaggcacgtgccaccagtcctggccaatttttgtgtttttagcagagatggggttttgccatgttgcccagactggtcttgaattcctgggctcaagcgatcctcccaccttggcctcccaaagtgctgggattataggtgtgagccaccatgcccagcctggcgagggaccttgatattagagttgggctcaaagtaaaaagagttttgtttatgttctgatagacacaaagaagccacaccatttgtagtgatgtgagcatctcagccattttcctaaatttgtcttgatgtccaacttctgttctggcctcgaaacttctgcagtagttggttcttcatttccttgttgtggctcaacattgggaaagaatgggaaatcagtctctaatgagtatgtggggaaattcctattgatagtctcatcacatgccgttttagaactgtgaactgtgggtgtcacagctcttaggtaatgtctcattattggatttttattttattttattttatttttttgagatggagtcttgccctgtcgcctgggctggaatgcaatggcgtgatctaggctcattgcaacctccacctccccggttcacacaattctcctgcctcaacctcccgagtagctgggattacaggcacctgctaccatgcccagctaatttttgtatttttagtagatgcggggtttcaccatgttggccaggctggtcttaaactcctgaccttgtaatctgcttgcctcaaccttgcaaaatgctgggattacaggcatgagccactatgctggccttttttttttttttgaagacggagtcttgctctgttgccccggctggggtgcagtgatgagatcttggctcactgcaacctccacctcccgggttcaaccaattctcctgcctcagcctcccaagcagctgggattacaggtgtacgccaccatgcctggctaatttttgtattttttttttttagtagagatggtgtttcaccatgttggccaggctggtctcaaactcctgacctcatgacctcatgatccgcccgccacggcctcccaaagtgctggaattacaggcgtgagccaccacgcccagcctattggccttttaaatgctttaaataaaacaaccttattagcaacatgaaatttacattgaaccttaactaaggtgttctctgatgcttacagtgttttaggaaagtgtgatacagaattctataaaatcagattcagattaaaggaaagtcaaatgctatatcctaaaatacaccattaaaacttcatatgcataggtaaccagtggtcctgtgacactaccttctcttttttttttctgagatggagtctcactctgttgcccaggctggagtgcagtggtgagatttcagttcactgcaacctctgcctccaaggttaaagcgattctcctgcctcagcctcccgagcagctgggattacagacaagcaccaccacacctggctaatattttttgtatttttagtagagacggggtttcactatgttggccaggctggtcttgaactccttacctcaagttatccacccacctcggcatcccaaagtgctgggattacaggcatgagccactgcaacctgaccaaaactaccttctcaaggaagcagagtcagatggtggctcagagattcagataccattgactaattccatggaagcccttggcactgccagagtgcagtgagtctggacaggctgggggttggcacatgttagggtaaactatacccatgaaatcatgagattagagacttcaaacatctcctcattctgtgtcatcagagtcctgcaaaggatgattaagtaagttagtgttaaaggtcaaggtaagctggtgttaggaagccagattacatgactagagactgcagggaccagtgattgagatcctggtttatctcccagagtccaaggacccctcactggctgcacaggataggagctttgggtgattgaccttcctctagaaggccacacttcctctagaagggtactgaagtcatccaacctgagaggatgagtgtgaaataaaggcatatgcaggataacccaaaaggcctaccatggttttaaactttaataattgcagaggttgaccaggcacagtggctcacgcctataatcccaccactttgggaggctgaggtgggaggagtgcttgaagccaggagctcaagaccagcttgggcaacaaagcaggaccgttatctctactaaaaataaaaataaaaaaatttagccaggtgcatatctgtagtcccagctactcagaaggctgaggcaggagtatggcttaagcccaggagtttgaggctgcagtgaagtgagctacgatcacaccactgcactgcagcctgggtgacagagtgagaccctgtctcaaaaaaaacctatgaccttagaagtttcaatgctacaaactttttaaaaattgacatggactaaaacaaattattaaaatttaaaattcaagccagacacagtggcacacacttttagtcccagctacctagagactgaggcaggaggatcacttgagcccaagagtccagccgaggcaacatagcatagcaggaccccagctgttttttgtttgtttgtttgttttctgagatggagtttcactcttgttgcccaggctggagtgcagtgctatggtcttggctcactgcaatctccgcctcccaggttcaagcgattctcctgcctcagcctcccaagtagctaggattacaggtgcctgccaccatccctggctaatttttttgtatttttagtagagacagggtttcaccatgttggccaggctggtctcgaactcctgacctcaggtgatctgcctgccttggccgtttttttgttttttggttttttttaagagggaaacattcattatgcaaaatttaaatagactttgaaatttttttggtgaagtttgtagcatttagacttctgaagttatgaaagcttcaacctgcaccaagacttttgaagaacactgcatatggaaaacacagacctaagtgtaaaaccctctgtctgttatactcatttgcatactgattgtattgtaagttcttgaggacaagtcttcatttaacaaacagaaagatacagcccctacattgaaagagctcaggtctaatgatgcaggcagataagtcacctagcagaacccactggatgctcaggattcagctcagccacaggcgcacagggcaaagatggctatctaggacagtggggaagtgagccagatagagagcagagaacttttgtttgtttgtttgttttttggagacaaagtctcagttactctgcggcccaggccggagggcagtggtgcaatcttggctcactgcaacctccacctcccaggttccagaaattctcctgcctcagcctcctgagtgtctgggattacaggcacacgccaccacacctggctactttttgtatttttagtagagatggggtttaaccattttggccaggctggtctcaaactcctgacctcatgtgatccacctgcctcagcctcccaaagtgctggtattacaagcatgagccaccgcacccggccaggagcagggaactttcttacggcagaagcgggctgtcctcgggccccttcaggctgaaggcagtggatcgaggccacagctgtgagcaggcagctaatgtccttcagttctaactgaagcaagagtagaggagcttagatctcagacttggtgtgtcagttgaggaagtccactggctttttgggatatgctacagggaaagagaaccccgtctttaaggagacctgattgaccgtcattccctgctgctccacaggatgcagaaggctatcaacaggctgagcaggcttctgaaacctggcgggatgatgcttctgcgagattacggccgctatgacatggctcagcttcggtttaaaaaaggtattttgaaagtgctgaatcctaaccactagagatcatgtcctttgcagggacatggatgaagctggaaatcatcattctcagcaaactaacacaagaacagaaaaccaaacaccactttttctcactcataagtgggagttgaacaatgagaacacatggacacggggcggggggcatcacacactggggtctgtctgggggtgagggggctgggagagggatagcattagcagaaatacctaatgtagatgacgggttgatgggtgcagcaaacctccatggcacatgtatacatatgtaataaacctgcacgttctgcacatgtaccccagaacttaaagtataattaaaaaaaaaaaaaggtatttggccactataatcaaaaaatggtgctgccatcagaatagaaactctagaattagaactccttatataaagccatttaatatgtgacagagtagtatattttttaagaaaactgaagaggcttgtataatctagatattgaggtctttttaagcaagacagctacctttagaagagcttttattagaaagacatttgaaagacagccgggcgcagtggctcatgcctgtaattccaacactttgggaggccgaggtgggtggatcgcctgagttcaagagttcaagaccagcctgaccaacatggagaaaccctgtctctactaaaaatacaaattagctgggcatggtggcgcatgcctgtaatcccagctactcgggaggctgaggcaggagaatcgcttgaacccaggaggcagaggttgcagtgagccaagatcacaccattgcactccagcctgggcaacgagtgaaactgtctcaagaaaaaaaaaaaaagatatttgaaagacataaataattttaaatgtggcatgacaaaagatgccattaaaaatgtaaaaggcaaatgacggagtaagaaggaatattttcagtgcatataatagataaagacttaatatctttgctcttcaaggagctctcatgaaactgataaggaaaagatcagtgacccacccaaaaaacaggcgaggagtatttagtcagttcacagaagaacatatctaaatggccagtaaacaacacttcaaggaaataaaaataacgagttagtacttcctattgctggccaattcaaagaaagaggtgcattccttcattactggtagaaaaagaaattgttacagcctttttttttgagatggagttttgccgttattgcccaggctggagtgcaatggcgtgatctcggctcactgcaacctctgcctcctgggtccacccgccttggcctcccaaaatgctgggattacaggtgtgagccactgtgcccagtgttacagcctttttttttttgagacggagtctcgctctgtctcccaggctggagtgcaatggcacgatctcggctcactgcaacctctgtctcttgggttcaagcaattctcctgcctcagcctcccgaatagccgagactacaggcatgtgccaccacgcctggctaatttttttgtatttttagtagagacagggtttcaccatgttggtcaggctggtctcgaactcctgaccttaggtgatccacccacctcagcctcccaaagtcctgggattacaggtgtgagccactgcgctcggcttacagcctttttttaagcacccaattattgttcaatccagtcattttttttgaatatagtcaagaactagcacataatacatgcaggagcaaaactttgtaaacaaagtgaatgcctctggatagggagatgttgtgcttgtcacctgaggtggaccccgtaccactgaacttggagggatttctgttctgtattcagtgagaggagagcaatgtgcaagggagtattttaaactccatccccctataccagtatctgcagggaaataagtacacacttgtgtgatgatttgggcattcaggaaggtctagaagtatgtgccaggccggtaaactgaggtaaggtcagggaggttagcagcagaagggaaagcatgttcatgatcaaaacaatatctgagttgtatttatgattctgtagacatgtgaagagacatgcaaaggacagtcaccaccaaaatggtaatgattgtctcaagtttccttaaactcagctatattgcttaattaaaaaaaataaaaataggccaggcacggtggctcatgcctttaatcccagcactttgggaggccacggtgggtggatcacctgaggtgaggagtttgagaccagcctggccaacatggtgaaaccctgactctactaaaaatacaaaaaattagctgggcatggtggtgggaacctgtaatcccagctacttgggaggctgaggcaggagaatcacttgaacctgggaggcagaggttgcagtgatccgaggtcacgccattgcacccagcctaggcaacaagagcgaaactccgtctcaaaataaataaataaataaaaagtttgtgctgttaatttaatggggttgggagagtgaacaagttgttttcatcaaacaattctagagttttggagtggggtgcttaggaacgtcatgttttctgacattgtgacttactcctgttgagctgctcttcccgaagcactgaggcaggagtgctctccacccaacaaactgacctcccagttaacattccttagcaatgcgagtcaaagaagtgcttttaagtgtctctgatttttaacacatcactctgcaggtcagtgtctatctggaaatttctacgtgagaggtgatggaaccagagtttacttcttcacacaaggtatgaaacacccatctttttacactaaaagtccccagtaccagatgagatggtcttcaaggcacgttcagaaggaaaactatctggtccctcctgccttttaggcaggctgtttcctgcggttccctgctgctcacaccctcttccaccctgggctaggctacccatggcagccaggcactggggcccccaggcagccctggcttgtccatgccttcagtcctgctctgctctccctgtctgccactgtccaaaatgggaagcctgcccactctgcaaggctcatctccagtccagcctgtttcaccctctacacggggttgtgctttggtgtgcccgggtcagggtgaaccctgggttctaggggtgctgggaactgctctcctctgcaactggcctatccacaggcttcatccttcacctgggccttccaaattctccgttcctgggcccttttcagggtcaccttctttgagcctttggttaagatgatgaaaccactttcctaaaacaattgctttgacatacatagatatttttgcataaattttaaggtgttcatagagcctaaaggccaaatataaaccaaaggtttttaaaaaagaaaaaaccgcggcccatacgcagtggcttcccctacctaaacatgaacttactgttaccaagccaccactgcatttataaccaaatggccatgtaaaaaacatgacagcaacttcccagagccccttttaacaaggacttagtagataaaaatgccttttcttgaggggaaaaatgcataaacatcttttattttccacactagaggaactggacacgcttttcaccactgctggactggaaaaagttcagaacctggtggatcgccgactgcaggtgaaccgaggaaagcaactgacaatgtaccgggtttggattcagtgcaaatactgcaagccccttctgtccagcaccagctgagaggcacctgctgccaacacgatgcaagcccattgtgtttccgggcttttttaaaaaaaaaattgtagcactgggcgtggtgcatgcctgtaatcccagccactcaggaggctgaggcggggaggatccattgagcccagcagtccaacctgggcaaaatagtgagagaccctgtatctgaaagtaataataaaaataaaaaatataaatgaggtctcgttgatgttggacaattcaagaattcagacttgaaccttaaacctaggaaaagttactttgtatcaggattctaacaattatgcttcatatttgtgaagtcctttaaaacataattttctcaagttctttctttgagatctcaatctgtcttagcattttgtaactaataactgaaattttattcaaaggaattgtaaaccttaaaccaccaatttatttccatgtgaaaaagtgttacatatgacaagtgttttttgactgtaattgcgttaaatcttttgagaatgtaaatgccgggctaggcaattgcagttaatacatacagaggttagtgaagggcttattaagttgtaggggaagcaagctgggaagaatcagatcagatattttcctgacaaaaaaaaatgaccctacagagagcatcaaaatgtggtgttcttgttaagtaattgatcgtggtcttcgctttaatcttagttccgccaggcacggtggctcacacctgtaatcccagcactttgggaggccaaggcgggcggatcagctgaggtcaggagttggagaccagcgtggccaacatggtgaaaccccgtctctactaaagataaaaaaattagctgagtgtgttggtgggtgcctgtaatccagctacttgggagactgaggcaggagaattgcttgaacccaggaggcagaggttgcagtgagctgagattgtgccactgcactccagcctgggcaacaaagcaagactctgtctcaaaaaaataaaaataaaaaaaaaatcttagttccatggaattttaagcattgttccccctctaacctgtgtctaaagaattaaaagaatttggccgggtgcggcagctcatgcctgtaatcccaacactttgggaggctgaggcaggcggatcacgaggtcaggagatcgagaccatcctggccaacacggtgaaacctcgtctccactaaaaataccaaaaaaattagctgggcatggtggcacacacctgtagtcccctgtagtcccagctactcgggaggctgaggcaggagaatcgtttgaacctgggaggtggaggttgcagtgagccaagatcatgtcactgcattccagcctgggcaacagaggaagactccgtctcaaaaaaaaaaaagaaaagaattttcactttttgcaaaattatcttttttaatgcacccttaagtgtttgacacaaaaggaattgagggaacttcttaattttaaccacatcatcacttcacttctgaatgtgatcattatcagtgttagatgc

SEQ ID NO: 9433 - DNA, 614 bp, Homo sapiens
gcttaattaaaaaaaataaaaataggccaggcacggtggctcatgcctttaatcccagcactttgggaggccacggtgggtggatcacctgaggtgaggagtttgagaccagcctggccaacatggtgaaaccctgactctactaaaaatacaaaaaattagctgggcatggtggtgggaacctgtaatcccagctacttgggaggctgaggcaggagaatcacttgaacctgggaggcagaggttgcagtgatccgaggtcacgccattgcacccagcctaggcaacaagagcgaaactccgtctcaaaataaataaataaataaaaagtttgtgctgttaatttaatggggttgggagagtgaacaagttgttttcatcaaacaattctagagttttggagtggggtgcttacgaacgtcatgttttctgacattgtgacttactcctgttgagctgctcttcccgaagcactgaggcaggagtgctctccacccaacaaactgaccttccaggtaacattccttatcaatgcgagtcaaaaaaatgcttttaaagggtctctgatgtttaacacataactctgcaagtcagtggtctatctggaaaattct

SEQ ID NO: 9434 - DNA, 687 bp, Homo sapiens
tcagtggtgcaatgatagctcattatcacctcaaacttctggctcaagccatccctccgcctcagcctcctgagtagctaggactgcaggtgggcaccatcatgcctagctaattgttagatcctttttttttatgttctgcattttttcagttatttttacatatttctctcttgatccatgcagttataggatatatccttaattttagaaagtaaggacttttcgaccaggcgtggcggctcatgcctataatcccagcactttgggaggccgaggtgggcagatcacttgaggtcaggagttccagtccagcctggctaacatagtgaaaccccgtctccactaaaaaataaaaaatcagcccggcatggctgtgggcgcctgtaatcccagctactcaggaggctgaagtagaattgcttgaacctgggaggcagaggttgcagtgagccgagatggtgccattgcactccagcctgggtgacaagagcgaaactgcatctcagaaacaaagatgcctagctttcaccttgttgatgtttttctaaattttggaataataaatttatataggaatactgcaagaatagtccatttttttctgatgtcccaacatcaccaaatgtatccatcacaagtaggaatacatggaaacattaatgccagccactaaccattcatgtt

SEQ ID NO: 9435 - DNA, 382 bp, Homo sapiens
cacaaggtcaggagatggagaccatcctggctaacacagtgaaaccccgtctccactcaaaatacaaaaaaaaattagccgggcatggtggcaggcacctgtagtcccagctacttgggaggctgaggcaggagaatggcgtgaacctgggaggcggagcttgcagtgagcggagattgcaccactacactccagcctgggtgacagagtgagactccgtctcaaaaaaaaaaaaattgccaagcatgctggcatgcacctgtagtctcagctactttggaggctgaggccagaggattggttggggctgcagtgagccatgatcacacacaccactgtactccaggtgacagagcaagaccctgtctcaaaaatcaatcaa

SEQ ID NO: 9436 - DNA, 439 bp, Homo sapiens
  SITE (343): n equals a,t,g, or c
  SITE (357): n equals a,t,g, or c
cctcagcgacccgcagccctcagggagcccctcccgcctcagcgcccaggagctgcggtccggagccggccccgagctgggcccaggtcgcaggctcctcaggccaaaggggtccccaggacggttaatgccccaggcctggagtcctcccccgcccggggctcagcctctcacctgccgccgccgccgccgccgctccacgctcctcccgggaggggccccgacccgacccggctgcggaccgctccgctctccccctgggcaggcccggggcggagccggggcctctcctgagcgccgcaaccccccgcccgggcagccgccgccggcgccgggctccacnaaagggcgggcggnggaggggggggcaccgaagccgcagatccccgggctcgcgtacagagccaggcgccgaacgcgggcccgggccccggcggcc

SEQ ID NO: 9437 - DNA, 6302 bp, Homo sapiens
agcaggtaggaaactatgtgaaagaatctcctgatgtcataatttccgggtgtcaccggaacatttgatcatcattcctttggcaattccagccttctgtggaaaggccagtagaaagcattgatttattcacctctacaggaatcagactcagcctcttttggtaagtctatttatccttgatcaaattagctaaatgttaatacctgcatagataggtagttatactaaaccacagagtttattatggtttcactaaatcatcattgagcgaaacacttttttcttgatattgagacagtctataaaagttatcatattcaaatttttaaaccttaatttagttttattattaacaccaataaacattcacttttaggcatagaatactgtactaggcataagaaatagttgcaccattttaaatttttcctaccctttgtgtactaatagttgaatacattgtatactaatagttgaatacattgtgtactaatagctgaaaacattgtgtactaatagctgaaaacattgtgtactaatagttgaaaacattgtgtactaatagttgaaaacattgtgtactaatagttgaatacattgtgtactaatagttgaaaacagtgtgtactaatagttgaaaacattgtgtactaatagttgaatacattgtgtactaatagttgaaaacattgtgtactaatagttgaatacattgtgtactaatagttgaatacatgcaagttatttcagggtagagctattaaatgtccactgtgtgacaagcactgttctaggtattaagtattcagggatgacaaagacagacttggaatgaggggggatattaaacatttacaaaaaatgagggtagtgtttctcaacagtgggcagttttgcctctctctcccaccaggggacatttgacaatgtctatagacattttgggctgtcacaattttgggagaggggtactctttgcatccagtgggtaaaggccttgaatgctgcgaaacatcctacagtgcacaggacagtatcctccctccccagctaagaactatctgatcccagctgtgaatagtgtcatggttgagaaaccctgaattagaaggataactgttacgaaggagaaataaaggttgctatgaaaacttagataatgggggttataaaagtaagttatagagtaagtaaaatgtaaattcagacttaatggattgcattggccatagcaagtgaagggtgggagcagggggtagggaagtgttccaaggtaggcagtaaggagttcatttatatgtgtttgtgtgtgtatttcataataaatttcatatctcaggtatacttgcagacatttatatatacttactaatgctcagtagtacctgctaaataataatagttaacatttactgagcacttactgtgtgttaggcactgcactttacgtgtattaccttacttaatcctcactattatcctagaagtagaaaatattatcaccaatgtacccttgagaaatatagataagtaccttgactgaagatcacatagttgggaagggccagagccagggactatactgtgactatagagaagcagtggggaaatgaataatcccctggaactgaaggattagctaaagatatcttggtgaatgtgaaactgtgctccaaaggaagagaagggcatagataggtagagaggtgcttgttgattgcaacaaccatttaaaggcatacagaattttgttttcacacggcagaaatggtcttcagttatgttaaccatagagtattttccttgcgttgcttggtggctattttgtattttttgcaagacttaaattgtacataagggatagttgtgaaatacagtattttaaacactatttttagctatttaaaaatagaataacattcagaatgtttctgtatgtctataacaaaatagtaatattaaaaattccaagggcaggcacgttgtgtgcacctgtagttccagttactcaggaggctgaggcaggaggatcacttaagcccagggtttcaaaattgtagtgcactatgattgcactggtgaataaccattgcactccagcctggccaacatagtgagactctgactctttaaaacattccatgcaagtctttgaagacaatctatctccacccccaatattttaattttctaatctaggttttcaatattttaactttccgatctaggttttcagtgaagtatgccttttcaatttggaacccagccaaggaggtttccagtggaaggaggagattcttcaattgagctggaacctgggctgagctccagtgctgcctgtaatgggaaggagatgtcaccaaccaggtaaagtcttctgtcctcacaagtgaggagatatgtattggctatcatcaatacaaccttcagctgatattcattattagcaagaaaaaactctcagcaattcaaaaacattgttgtttctaagttagcgtattaacagagcccagttttccttagtgtagagtctgtattttgtatttctgtaagtcttgatgatagagcaattcattctctgtctttctggtacatttttagctattaacaacaacaacaaaaacacaattacctttgcaccaacctaatagattgttttgttgatagcttcacgattagataacattcaattaaacaaacaaaacttcagtgctagtatgcacagggcactgtgctaggcataaggctaaaaatatgaaaaagacttagacctcagagttaatgtcactttggctttgattagtatcactttggctttgctgcgacctttggcagaaagagtgatatagaatctgaagattctgtgagacaaagtgtttttgcagaatgattagttccatttctctgatgtttaccatagcaaaaccttaaatactacattgttagattctcatggcttggaaattttgggaacacagatttaagtttaacaggtgtaggtatttaaaaatcggagttagtcaaggataaaatgggctgctttgggaagtagtgagctcccgatctttagaaatgctaaaggctgaatgactatttggtgggaatgttggaaaggaaattcatatattcgatgtatttttgaactaggtgtcatttaagggccatttcaaatctgagattctatcaacatttgaacagtatgtggaatactatgttcagttttgtattttaccacaaacattcttgttttgaaatcactcaactaaggtgatttagggtgcaaatgcacatgaattgccacggtattgtcacttatgtttgtaactatgcacttttgttttgccatttagcaatcattgcatacctttcaaaatcaacatccggaggattatctttgaatatatgaatttcctgtgattaaatatgtacgtcagaggccacaatttctttgttatatccatctaaaatgggtgcctcgtcagcatcaccatgttgtactcattgtatgacattcagagatttcaaagtgatttaaaacagttaaatatacaatcaaactttggtgctctgaaaaaaaatatttcctctttttagtatctaactacatgtcatctgcttttttattcaggcaactccggaggtgccctggaagtcattgcctgacaataactgatgttcccgtcactgtttatgcaacaacgagaaagccacctgcacaaagcagcaaggaaatgcatcctaaatagcaccattaagtcttttgtcaaggtctgactaggtcaagggtaatggaccagtatcatctggtgatctggtaaacaaataaaagtggtggcacctttagatgatgacaacagttgagctctttacttttagtaagaccgacagaaatgtagtcagtaaagcacatgtagtgataggctatcagttatgtctgatacataagacagaataatatttcacaattagaaagtaccttagagatcatcttgctcacagtagatcattaatatcaataattaaagatgaagcttaatccaccatggtcatcagtcaggtggggcttattctaaatgcttaatgtgtcttaagctcatttccttgttcatatttgggttgctacttggctaaatcctttcaccttagtaccctaagccagtttcctggcttgatactatttgataatgctctgctcaggaatgattatattgggtgagaaatggagccctggggttgtgtgttttggaacagtattcaagatcaaagaaagttcttagtccatggttaatctgcaaggcatttaagccacttccatagaggagcccagattgttggttaaatatattgataatgaagtcaaagctgtggttccaaccccgatttttccaagaaaaatgacgtctggttatcactttgtacacgaagtgctaaccaggtatcttgataaattgtttacagtaggtattgagaaacctcatgtggattttttaatttggttagatgtgggatcacttttgaggatgaggccagctctctatgttctctttttcttcttgcagtagtccccagaaactcagtctgctttccttttctctcgatggctgtcagcacccatctaatgaaattgtcttctccaaaagactgactttaggatcagatacaattttcaccagtgttttttgtctaccttgctgcttctgaaaatatacatataagccttttaaaatgaaaagtttattaacttataattaaatagacgtagatgcatatgtgttgcattaggtgaaaagaaaaactgccagggagttataagaggaaaaactctcagagctcacactgagctgggagaagtttgaatgccaaccagttaaagtggaaagatcttgaacatgtggggcattgagtagagactcagaaaggttgtactttcataagagatccaaactggagctagactaaaggctaatgtataccaattttaagaaagcttaaaaataagccttgagagactcaagatgatctctaagtaacctcattttatctgccaaataaaaatagaacattccttaaaggaagaaaacaaaatcgaggcaggaaattgcctgaggctggagaaaaaatgacaggaaggagaaaggagtgatgaaaaattcctcagagggctgggcttggtggctcatgcctgtaatcctggcactttgggaggccgaagtggatggattatctgaggtcaggcattcgaagccagcctggccaacatggtgaaaccccgactctactaaaaatacaaaaattagtcgggtatgatgggcaggtgcctgtaattccagctacttgggaggctgaggcaggaaaatagcttgaacccaggaggcagaggttgcagtgagctgagattgcatcactgtgctccagcctaggcaacagagtgagactttgtctcaaaaaaaaagaaaaacaaagaaaaattcctcagagctcatacaaggctgggtagaatatgtgtttcaacaatagtggatcttttaatatagtacatggatcattgagtagagtcttcagcaaaatattggcaaagtagggttagggttaggttagggagatgggaatagactgaagactactctggacttgccctaacagagtttaagagcaacatttgaaaggatcaaactgatttcaagtaacttgagtgcatccaaggggagaaaacccatcaaaataaaaataaaaactacaataaaatccagcaccaaaagtgtaacattcacaatgattagcatctaataaaaagttaccaggcatgaaaaaaaaaaggaaaaggcaatccacagtcaagagaatctttagtcaatggtaatagactgagaatgacagatgatggcattagtaaatgatatggtttggctctgcgtcccaacgcaaatctcatgttgaattgtaacccccagtgttgggggagggacctgataggaggtgactggattatggtgaacacctatatggatatgaatatggagtattctccatggatatggagaacaccccttggtgttctcataatagtgaatgagttctcatgagatctggttgtttaaaagcgtgtagcacttccttcttttccctctgtgtctcctgctccaccatggtaagatgtgcttgcttccctttgccttctgccattgtaagtttcctgaggcctcctagccatgcttcctgttaagcctgtggaactgcatcatttaaacctcctttcttcctaaattacacagtctcaggtagttctttatagcagtgtg

SEQ ID NO: 9438 - DNA, 282 bp, Homo sapiens
ggccgggcgcggtggctcacgcctgtaatcccagcactttgggaggccgaggcgggcggatcacgaggtcaggagatcgagaccatcctggctaacacggtgaaaccccatctctactaaaaatagaaaaaattagccgggtgtggtggcgggtgcctgtagtcccagctacttgggaggctgaggcaggagagtggtgtgaacaggtgaggcagagcttgcagtgagccaagatagcaccactgcactccagcctgggtgacagagcgagactctgtctca

SEQ ID NO: 9439 - DNA, 110 bp, Homo sapiens
agaaacatctcaaggcaatgatctaagcttctaccttaagaaaacagaaaaaaatgagcaaactaaatccaaaataagcagaaagaaagaagtaataaagagcagaaaca

SEQ ID NO: 9440 - DNA, 537 bp, Homo sapiens
ctcttgatgcacgaataaatatctctacatctagcctttgttaaaaataaaaattaatattctacaaacacctacatatactagagaggggtgaaacactgcagctaattcctttataatactttcagatgattgcattaagcctttcatgttatgtggcattgttaatttttcctagatacccatccacttaagggccagagaaatccttattcatttaactctggtgggcatttatgtaacatacccaaataaaaacgttattaaacagccacaatcgcattcagtcaacttggcactgaatgtagcttctaaaatcagttctctaccctacgaatggaatgttctaccaagaaagagaagcatcaccatgtcatcttgtgttctacaccactatagagagttacagttgcccccaaacacgaatgctattcccaaataaaatagaatcatgctttgggaggccaaggcgggccgatcacgaggtcaggagatcgagaccatcctggctaacacggtgaaaccccgtctctacta

SEQ ID NO: 9441 - DNA, 536 bp, Homo sapiens
ctcttgatgcacgaataaatatctctacatctagcctttgttaaaaataaaaattaatattctacaaacacctacatatactagagaggggtgaaacactgcagctaattcctttataatactttcagatgattgcattaagcctttcatgttatgtggcattgttaatttttcctagatacccatccacttaagggccagagaaatccttattcatttaactctggtgggcatttatgtaacatacccaaataaaaacgttattaaacagccacaatcgcattcagtcaacttggcactgaatgtagcttctaaaatcagttctctaccctacgaatggaatgttctaccaagaaagagaagcatcaccatgtcatcttgtgttctacaccactatagagagttacagttgcccccaaacacgaatgctattcccaaataaaatagaatcatgctttgggaggccaaggcgggccgatcacgaggtcaggagatcgagaccatcctggctaacacggtgaaaccccgtctctact

SEQ ID NO: 9442 - DNA, 299 bp, Homo sapiens
  SITE (18): n equals a,t,g, or c
tttttttctttttttttntttgagacggagtctggctctgtcacccaggctggagtgcaatggcacgatctcctctcactgcaagctccgcctcccaggttcacgccattctcctgtctcagcctcccgagtagctgggactacaggcgcctgccaccacgcccggctaatttttttgtatttttagtagagatggagtttcacagtgttagccaggatggcctcgatctcctgacctcgtgatccacccgcctcggcctcccaaagtgctgggattacaggcgtgagccaccgtgccc

SEQ ID NO: 9443 - DNA, 147 bp, Homo sapiens
gcgggcgcctgtagtcccagctactcaggaggctgaggcaggagaatggcgtgaacccgggaagcggagctttcagtgagccgagatagcgccactgcagtccggcctgggcgaaagagcgagactccgtctcaaaaaaaaaaaaaa

SEQ ID NO: 9444 - DNA, 303 bp, Homo sapiens
tttttttcttttttttttttttgagacggagtctggctctgtcacccaggctggagtgcaatggcacgatctcctctcactgcaagctccgcctcccaggttcacgccattctcctgtctcagcctcccgagtagctgggactacaggcgcctgccaccacgcccggctaatttttttgtatttttagtagagatggagtttcacagtgttagccaggatggcctcgatctcctgacctcgtgatccacccgcctcggcctcccaaagtgctgggattacaggcgtgagccaccgtgccccgc

SEQ ID NO: 9445 - DNA, 193 bp, Homo sapiens
aaaaatacaaaaaattagcctggctcagtggcgggcgcctgtagtcccagctactcaggaggctgaggcaggagaatggcgtgaacccgggaagcggagctttcagtgagccgagatagcgccactgcagtccggcctgggcgaaagagcgagactccgtctcaaaaaaaaaaaaaaaaaaataggatcatgg

SEQ ID NO: 9446 - DNA, 21936 bp, Homo sapiens
taatgtggacacaacatgatattaggctttatttgaatttaaaatcttgattccatccagggacattttttaccgaagcgtctcagagactggctcagggtatttcttgacaagactgtacagggcttctcatcatacacaaaccctccacagcccacggctccaacccacagcacctcctgcagtcctggagggaaaagggacagtaacatgaagtgtctgaagatccatttcacctcttttccatgtgaatcatgacgctttcaatgcatttcttgacaggattctattttgaaagaatgatgctcaatctgtaccttttatgcttcttgtttcttctccatcaataatatgtcagtcaactgcttgtcagagacacttagctgctgacaggtcctcataacctgactcaggtaaactgccaagagatgcttgcactggaatataaaacacacacacctattagaaacaggcagggccagggctggccagtctaaccaagatttctcattaccatcttatttggcaggagaagactagagcatacagattacggggtctctaactgattgtctaaaaagtgcagatgggccgggcatggtggctcacacctgtcatcccagcactttgggaggctgaggcggatggatcacttgagatcaggagttcgagaccagtctggctgatatggcaaaaccctgtctccactaaaaatacaaaaattagctgggtgtggcggtacatgcctgtaattccagctactcaggaggctgagccatgagaatcgcttgaacccaggaggtggaggttgcagtgagccgagatcacgccactgcactacagcctgggtgacagagccagactgtctcaaaaaataaataaataaaaactgcagataaagatgatgagacaggagtattctctttagaaatcagagtggacacagacttactttgcctgctgctttgggaaatggcttagatccatcaggcacaaggtatgtaacccatggtgaaaacccagactacctgcactcctcacgttagtcctaagttatatttcttccttgccttcagaaagctgtcacagcaatggttaacattccttgaggcactaggctgtgaagtgcttctcatagattatctcactgaaatctgacagctccctaggaagacaggtattgtaaccacatgctcatcagagtctctaggctactctctcttttttttttttttaattttaattttaatttttgttttatttatttatttatttatttttattgatcattcttgggtgtttctcacagagggggatttggcagggtcataggacaatagtggagggaaggtcagcagataaacaagtgaacaaaggtctctggttttcctaggcagaggaccctgcggccttccgcagtgtttgtgtccctgggtacttgagattagggagtggtgatgactcttaacgagcatgctgccttcaagcatctgtttatcaaagcacatcttgcaccgcccttaatccatttaaccctgagtggacacagcacatgtttcagagagcacagggttgggggtaaggtcacagatcaacaggatcccaaggcagaagaatttttcttagtacagaacaaaatggaaagtctcccatgtctacttctttccacacagacacagcaaccatccaatttctcaatcttttccctacctttccctgctttctattccacaaaaccgccattgtcatcatggcccgctctcaatgagctgttgggtacacctcccagacggggtggtggccgggcagaggggctcctcacttcccagtaggggtggccgggcagaggcgcccctcacctcccggacgaggcggctggccaggcggggggctgacccccccacctccctcccggacggggcggctggctgggcggaggactgaccccccccacctccctcccgaatggggcggctggccgggcagaggggctcctcacttcccagtaggggcggctgggcagaggcgcccctcacctcccggatggggcggctggccgggcggggggctgacccccccacctccctcccggacggggggctgacccccccacctccctcccggacggggcggctggccgggcggggggctgacccccccacctccctcccggacggggggctgaaccccccacctccctcccggacggggcggctggccgggcagaggggctcctcacttcccagtaggggcagccgggcagaggtgcccctcatctcccggacgaggcggctggccgggcggggggctgacccccccacctccctcccggacggggcggctggccgggcagaggggctcctcacttcccagtaggggcggccgggcagaggcgcccctcacctcccggacgaggcggctggtctaggctactctcttaactactgtgttatacttctggggttggggggcggggagtagtggcaaaactcttgcatatattggcctgtacacacctctggggagatgattgcgttgaatctgatgtcagagaacacagctttagatcttgaaggggttttggttcaatcctgtctcttgcagttgagatacacttagggcacatcagttacgaatgtggcctcttggacaatgctatacccaacttgccagccaggtcccaagatgtttaagaagttaacagtgtaaaagaaagggaaagaatggagtggacatcattattttcttctttcgcaagacttagaaaacagctgcctgctttcaggaaggtagtgttttttcctttggaataaggtgtgtgtgagtatgtcctgtttctgcttcatggtctggactctgatgaaattggcaaaggcttaaaggaataggtgaaggtactcatgccccatgtgaaggtcaagtgtggtgtcaggctgtctcacaggtagtgcaaagatataccacatggctgaaagtaggatatgcaaagttgtcaacatcgaatttagttcatatttttatggggccatctaattccccagtgcccacttctgggattccctttttttccttctcaaagcttcactcatgatcttttacataaaaattcaggaaattgatgcagttctaaaaatgacattgcattttgagaggctaaacccctaagaggtgactaactgaagacaaagacaaaaaactaccatttgtttcaacatataataagattcccattttgtagaatagttaaaccacaaagtaagggcaatttctctctacattcaactacagtgggaagagtcttccccatcctcaccaggatgctgtcactcttccgtagcactgagaatgcaaatgcaggacatgaacagtaatgacaagaagccaaacatgtgtatgttttactggaacttccaaggacctacaaagaaaggatagatgggatcagacctcagatgtgctggaaaaaccacctctttccctttttatttatgtagactcagagttgctctgcaaattgcaccgagaagaactgcagtaatgttttacataaaagaggaaacaacttctcttcctccagtgtacagactctcccttcctcacctctcagtgctcacctttaggacagcatataaaggaactgaagagtttcagattagttcaaccaaccacataaaccattctgttcctacgcctagtgattcatggggcccactctatgggctgactgtaataagaaggaagtggggggggggaatctctcatctacattttattgtgggggttcttaacctttggtatttcacagcaggtgtataaatttctaaagcttcctacatacctaaagagagagtaaaaacaggcaaagggtcagtagcagggcaggagtaagataagtctcaggccgggtgtggtggctcaaagcctgtaatcccagcactttgggaggtcgaggtgggaggatcacttgaccccccccagagttcaagaccagcatgggcaacatggtgagacctcgtttctatagaaaaaaaaatttttttaaagtcaggtatggtggcacatgccagtagtcccagctactcaggaggctgagaagggaggactgcttgagcctgggaggtcaaggctgcagtgagctgtgactgcaccactgcactgcagcctgggtgacaaagatcccatctctaaaataaagataggtcacagaagaacaaaagaagaaactgggaagaggcttttgaaaagcatttgagagcagagagaataaataaagcaaagacccttgcgaaaggaatgactcagctgttcaggatggaggtctcaggaaaagaggcaggcccagatctgcctactcatctagcaggatggaaggaggacactgatacatagtgggttgataagaggcacagtctaacagtcttggtggtggtcaagagggacaaaaaggagaggtacaggagaaacaagacacatctgtagtatgatcgcacaaatttgctggagaaatcctttgtttaagtctctctaccaccaagcagccaaaaactttttgttgaggtcttcattcctagagttaacttcccacctggaggcgtaagattattattagtatctgagggaagcagaaatgtcctgagggtgattttataatgaactgccacttaggaatttgccacacagccttcaaagcacttttaggctctcagatggcaatctaaatgaaaaagcaaggacttttaaattttttttgaattacaatgttagcactcctaggattctttaatctttcttacccacagagaataaagctacaggtatggtttgactgcaagaacaaacagcaggttccactgctgtgcttttgtcacattttcagtggttcatataatgcagttatcccagtacagcttttattaacatttttttttaatttttgttttttggagacaggatgttgttctgtcatccaggctggagtacagtggcagatcatagctcattgcagtcttgaatccctcggctaaagtgatcctcccacttcagtctcctgaggaggtaggagtactggtgtgcgccaccaccctatgctaattttaaaattttttttgtagagatggggtcttgctatgttgtccaggctggtctttaactgctgggcttaagtgatcctcccaccttggcctcccaaagcactgggattacaggcatgagctaccacacccagcctcagtatggttttttgacgcagtcagaattcctcgggagattttaggttaccagaaatagccaatgattgggtaagaagatgcctactgaacacattcaagatttcagttcaggccgggcatagtggctcacgtctgtaatcccagcactttgggaggctgaggcgggtggatcatgaggtcaggagttcaagaccagcctggtcaatatggtgaaaccccatctctactaaaaatacaaaaattagccaggtgtggtggcgggtgcctgtaatcccagctactcaggaggctgaggcaggagaatcacttgaacccgggagacagaggtggcagtgggccaagactgcatcactgtactccagcctgggtgacagggcaagactctgtctcaaaaaaaaaaaaaaaaaaaaaaaagatttccacccagttacaaattaggtgttgaaaaagcacaccttgcatattacctactgcaaggctctgatgtgttatgaacatatcaccgagaccattcagtatcaatggagagatttccccagcatgtgtggaagcttacactgaaggaagagcattaaagcagattgttttctacttaatcctaaagaaaaaacccacaacatccagcagtgacatgtataattcttttttttgagacagagtttcattttgttgcccaggctggagtgcaatgatgcaatcttggctcactgcaacctccacctcctgggttcaagccattctcctgcctcagccgcctgattagctgggattacaggcatgtgccaccatgcctggctaacttttgtatttttagtagagatggggttttgccatgttggccaggctggtcttgaactcctgacctgaggtgatccacccgcctcagcctcccaaactgctaggattccaagcatgaaccaccactcccggcctataattcttgggtgtctaaactattaccaatgaatacaactttaggtttcttctccctttagttatctcgtctcttctctctagatttaaacttaagcaagcagaagcctctgggattctgtactgactagaataattcactgcttccttcttattgcgagtccccgtccatcataatcctccctggatcatgctgaataaacagctggtgacttgagatggggagaaattctacagagtttccttgcctgagcctttcaagggctaagactcaaaatgttcaactgcctaaagcaataaacaccaaaagaggttaaatttcgaatttgcttttcgcttatctagcagtggacaactaatgaacccaacaatcaggcaaaatctgagttagaaacatttagaactggaaattgaccttaaggataacataattcaattccttcacccttcagtgaaaaaacaacttcctcttacaggaattgctcctagttttcccgcttatagtctggaatgtttatccccagaaggagagagctttttaaaaaaggaacatgctggaaagaggatactcagaccatggctgacagaacttgtaggaacctcacttggaggtggtttctactgtggttctactgtggtttcagttaggtcgcaaggagaggtgacccatctacatggtcatccattcatgggtacagttttattttatgaccgctccaagcctcttaggacactccacagtgtctttgttattgttccttgtgtttggtgcttctctctgaaaacaggattatacattcctggcctgttaaatacaggctggccatgtgacctgctttagtaaaatctgagtagccaagcgaaaaatgttaaaaattgtgtaccatgttttcctttttctctttgagattcacagtgttccagatatgggctgctttgcccactgggatccctgcatgaagctgttttggaacagagctacagctggctcctggtggatacacagcatgaatgagatctaaaactttgtttttgtaagcctttcagatttggggtcattgataccacagcataacttagcctctcctgactgaaacatcctccttattaagtgaatcaaaaaagtataaaaagtggccaggagtgcaggctcacgcctgtaatcccagcactttggaaagcaaaggtggtggatcacctgaggtcaggagtttgagaccagcctggacaacatggtgaaaccccatctctactaaaaatacaaaaactagccaggcgtggtggtacacacctgtaatcccagctactcaggaggctgaggcagaagaatcacttgaacccaggaggcagaggttgcagtgagctaagatcatgccaatgcactccagcctgggcaacagagcgagactctgccttaaaaaaaaaaaaaaaaaattatagaaaacaactcaggtgtcagcaacataacaatgactttagaattatttcacattacatctggagaacaataatattagagttgacctatgggatgaagaatgacctatgaaaagataactagctgggcactaaggcagtatgtgactcaacttttatcatctcatacaactcctgaattcagccaaattcttactatattaccatacaatgcaaccattaaggttaatttgagggtgtataagatttctacagcctcatttaattcaaagtccaagatgacagccacaattcttggaagttagtattttataattaataaagcaatgtaatatataccagatgtgaacgacaaaaactaaaccagtgacttaagttactgttgaccaatgggaggaacaaaaagtcaacagtaattaaactatttcaaacaaaagtctacttgccaggtcaagtattgtgcccataatggaatcaagaccaaatatcccaaactaaaagcaatgggaaaaacttgaaggtccctctagtttcgggtattttagctacctaaaaaccaaaaataaaaacaccaggaaagaggacagacacacctcctcaggtacaaactgcaagttcagtgactttgattattcctaagttctccatgagaaaattcatctaataattggcagtctcttttgagtaggacaataccatccaagtttttttttgtgtttttgtttgtttgtttgttttgagacagagttctgctcgtcactcaggctggagtgcaatggtgcgatctccgctcactgcaacctccttctcctgggttcaagcaattcttctgcctcaacctcccgagtagctggaattacaggcacctgccaccacacccagctaatttttgtatttttagtagacacggggtttcaccacgttggccaggctggtcttgaactcctgacctcaggtgatccacctgcctcggcctcccaaagtgctgggattacaggcgtgagccaccacgcctggccatcttattttagttacaaaaatttctggaggattttgttaagtgaaactatgctaagtgaaataagccaggtacagaatgacaaataccacatgatctcacttatatgtggaatctaaaaaaagttgaactcataggctgggtgcaatggctcatgcctgtaatcctagcactttgggaggctgaagggggaggactgcttgaggccaggagttcaagaccagcttgggcaacatagcaagaccctgtctttatttaaaacaaaaaaaaaagttgaactcatagaaaaagaaatagtggttaccaggggccttggggtgggggaggaagaggaagataaggagatattggtcaaagggtacaaaatttcagttaggagaaataagttcagggtatctatggtacaacatggtgaatatatttaataacaaagtattggcggggatggtgctcatacctgtaatcccaatattgtgagaggccaaggtgggaggatcgcttgaacctaggagtttgagaccagcctgggcaacatagtgagaccctgtctctataaaaaccaagaaaaagactgaagtactgtatatttgaagattgctaagataatggattttaagtgatctcaccacaaaaaaagaagtatataaggtattagatatgttaattagcttgatttagttattctacaaggtatccatatatcaaaacatcatgttatataccatgaatatagacagtttctgtcagttaaaagtaaataaaaattttaaaaaattatcaattcgttaattttaccaagttggggcaaaagccttttaacagtccaggaaatatttaaagctagtcaacagcttctacagagatgaagaacattttgtcctaaggggtttctgtagggatcacccccatctctagacttctacctggtaaacacgccttccactgggtgatgagattaaggtgatggactgtcgatcaactaggtccaaggcctgggtggctgatgagccaaagagaaacttcagcctgtgaaataaaaacacttcagattagaaggcctgattctcaaagtcacctcagtaacttgcccaaaggatcactagacttagtattttttaaaaattcattttaattttgaaaaaaggaaaataatacagcaaaacccatggacccattcactccccagaattaatgttaatatcttgtgtacttatttcagatcttcttgtattatgtatatatgtgtgtgtgtatatatatttatttattattattattattttttgagatggagtttttcttttgctgcccaggctggagtgcaatggcgcaatcttggctcaccgtaacctctgcctcccgagttcaagcgattctcctgcctcagcctcccaagtagctgggattgcaggcatgtgccaccacacccggctaattttgtatttttagtagaaacagggtttctccatgttggtcaggctgctctcaaactccagacctcaggtgatccacctgcctcggcctcccaaagtgctgggattacaggtgtgagccactgcgcctggcctgtattatatttttaataaagggagtaaactgttagtgataaagaagccctctttatacttctctgtagtgcatccttcttcctaccttccccttatccctgaggcaagcacatgcatttgttggtttccttcctgttaatgtgttcatattaaatattatatatagaacatatgtatgcacacatacataacaaacacacgtgcatagatgtatgcatatacatatatagtattgttttaaaacataaaaggtatattgtaggcttctttttgctgttcctgaaatagctcatgaaaaataaaagaaaatataaaatatcgtagacttcttttggcaacttgcatttttttactcaatgcatttttgaaaatgaggcatgttgacggacatttatttttactttacctttgaataatattccattatatgtatacactgaattttatttaagtactctatgtatggacattgtttccattttatactattataaataatattcaattatccccatacatgtcccttggcatacatctctgaaaatccccctttagtttatgtaactaaagcatatgttcattttcaactttaatagatattgccaatagctctccaaagtggaaacaggagtggtggctcatgcctgtaatcccagcattttggaaggctgaggcaagaggatcacttgagtccaggagttcaagaccagcctgagcaatgtagtgacaccccatctctaaagaaaaaagaaaaaaaaaaactaaaacacacaaaaaagtgaaaacagcactcccaccagcactgtataagacttctattttctcaggccgggcgcggtggctcatacctgtaatcctagcactttgggaggccgaggcaggcagatcaccagaggtcaggagatcgagaccatcctggctaacatggtgaaaccccgtctctactaaaaatacaaaaaattagccgggcgtggtggcacacgcctgtagtcccagctactcaggaggctgaggcaggagaatcgcttgaatccgggaggtggaggttgcggtgagccaagatcgcgccactacactctggcccaggtaacagggagactccgtctcaaaaaaaaaataaatgaaacaaacaaacagaaaaaccaacttctactttctccatgtccccactaacaccagtattatcaggcttttttatgttgcccatctgaagataataaatgtgtactttttggattagtaataaggctatccaactgttaaatgatatacaggaaaaaactttgatatgtgagaaaattcttataatattaggtgagaaaggttgaagacaaaattatattttaggaactctcaagcatgttaacttttttaaaggaaacctacaattatgtcaaaattaaaagtttaattttttttttttttgagatggagtctcactctggtgtccaggctggagagcagtggcacaatctcggctcactgcaacttctgcctccggggttcaagagattctccggcccagcctcctgagtagctgggattataggtgcaggccaccatgcccaggtaatttttgtattttttagtagagatgggcttttgccatgttggtcagggtggtcttgaactcctgacctgaggtgatccccccgccttggcctctcaaagtgctggggttacaggtgtgagccagcgtgtctggcctttttgtttgtttgttttttgttttttgagacaaagtctctctctgtcacccaggcaggctggattccagtggtgcaatcatggctcactgcagcctgaaccccctgggctcaagtgatcctcccaccacctcagcctccctagcagccgggactacaggtatataccaccacatccagttaattttttgattttgtggagacagggtctccctgtgctgcctaagctggtctcaaactcccagccccaagcgatcctcatattacaggcgtgatccaccatgcctggccaaaatttaattttttgaaaaggcaataaaccggccaggcgcggtggctcacacctgtaatcccagcactttgggaggccgaggaaggtggctcacgaggtcagcagatcgagaccatcctggctaacacggtgaaaccccgtctctactaaaaatacaaaaaattagctgggcacggtagcaggcacctgtagtcccagctacttgggagaccgaggcaggagaatggtgtgaacccgggaggcggagcttgcagtgagccgggatcgcgccactgcactctagcctgggtgacagagcgaaactctgtctcaaaaaaaaaaaaaaaaaagcaataaaccaaaatttaagagtgattattactgggtggtatgattattgatgctttttataggttttattttccaataaaagttttttataagtgtgggttattattattattattattattactgagttggagtctcactgtgttgcccaggttggagtgcagtggcacgacctctgctcactgcaacctccacctcccagattcaagtgattctcctgctttagcctcccgagtagctgggattacaggcgcatcccacctcccaaggtgctgggattacaggcatgagctaccacacccggcctaagtgtgggttatttttataaactagaaaataaaatggcagggttaaactcaaactgaaaagttaatgttttaaagaacttatatgacttaacacagagtaagacaaacctagtaaggcttcaaaattaaaatgttcaacttcttacttcattttccaacaaaccagccacatatacaacaaattattgggggaaatagaaaagagtgctttgaatttttatattaaacatatgaagatttagtctataaaataacaaaatacaaaaaacaatgaaataaaatttgtcgggaaccttaccaatcaatctcaacagttacctttaagaatttttttaaggccaggtgtggtggctcatgcctgtaatcccagcaccttgggaggccaaggcaggcggaactcctgacctcatcatccacctgcctcggtgtgtgccacctgtagtcccagctactcaggaggctgaggcaggagaatcactggaacctgggaggcagaggctgcagtgagttgagatcgcgccactgtactccagcctcagtgacagagtgagacactgtctgaaaaaaaaaagaatttttttaacctgctctgtccactttaatacctactgtgaacatctcttgaatgcattaaaaatttttccatatcacttttaatggttacaaataattctactgtaaagatgaatcatttttattctcctcaaactccatgaattgttagattgtttctatgttttattgctaccataaacaatactggatattcatcacactgagaatatcctcactgtaaaatctttacaaacatctataattacttcctgggtatatgttcttttatgtggaatttctgggtcaaagaatatgtatgttttaaagttcctattgcctgttaccctgcaatttacattcctgttataaatgacccctttccccatatttgtgtcaacttcttttctgtggtcactaattttctagatgaaaagttatgttatgttaatttgtatttttgtggtcactagtaagatttgtctttttcctcccaaaggattcggctatttacatcttttattctttgcccttttgtttttaaagtagtacatttttttccagtaatatttaattcttattaaaaatttaagaaatacagtaaaggttaaggccgttccctcaattctacctccttccttgccccaaagaaaaaacactggtagagcttggtatatattcttcagaacttttatttttttagagacaaggtctcacatcacccaggctggagtgtagtggcacaatcatagctcactgcagcctggaacttcagggctcaaacagtcctcctgggacaggttttgtttttttttgtttgttttgttttgttttgttttttttttgagacagagtcttgcctctgtcacccaggctggagtgcaatggcatgatctcagctcactgcaacctctgtctcctgggttcaagcgattctcctgcctcagccccccgaatagctgggattacaggtgcctgccaccatgcccggctaatttttgtatttttagtagagacggggtttcaccatgttggtcaggctggtctcgaactcctgacctcaggtgatccacccgcctcagcctcccaaagcgttgggattacaggcgtgagccaccgcacctggccaggatttttaaatgtaagtgtgtatcagtaattaagtattacttatacctaggtagcttttacttttttggtctctgcatttttaaaataactgaccactctatattattctcatttaagtagttgtatcaactgcaaataatgataattgtctttccttgcagataggtacatttgtaatttctttttcatgtgttagttgaacagctacgctttttttttttttttttgagatagagtttcgcttttattgcccaggctggagtgcaatggcatgatcttggctcacagcaacctctgcctcccaggttcaagcaattctcctgactcagcctcccgaatagctgggattacaggaatgcaccaccatgcttggctaattttgtatttttaatagtgacagggtttctccatgttggtcaggctggtcttgtattcctgacctcaggtgattcgcccgtctcggcctcccaaaatgctgcgattacaggcgtgagccattgcgcccggccaacagccacaatttttaaaacaatgttaaataagagtggcaaatatgacaatactggatatggtgttggctattcaattgagacaaatttttaagaatcatgtcaagaaaatattattcctagtttctaagagtattttttattttttattttttttgagatggaattttgctcgttacttaggctggagtgcaatggcacaatcgcagcgagatatgcaaccacaacctcccgggttcaagcaattctcctgccttagcctcccaagtagctgagattacaggtgtgtgccaccacatcccactacttttgtatttttagtagagacagggtttcaccatgttggtcaggctggtcttgaactcctgacctcaagtgatccacccacctcagtctctcaaagtgctgggattgcaggtgtgagccacggtgcctggccttttattctatttttaaaattattttcgtagagatggggggtctccctattttgctagagctggtctcgaactcctgggctcaagcaatcctcctgcctttgcctcccaaagtgctgagattacatgtgtgagtcacagtgcctggtagtaagaatatttttattttttattttatttatttatttatttatttatttatttatttttgagacagagtctcactctgtccccaggctgaagtgcagtggcatgatcttggctcactgcaacctccacctcccaggttcaagtgattctcctgccttagcctcctgagtagctgggactacaggtgcccaccaccacgtccagctaattttttgtattttcagtagagatggggtttcaccatgttggccaggatggtcttgatctcctgacttcatgatccactcaccttggcctcccaaagtgctgggattataggcgtgagccactgcgcccggtcaagagtatttttaaaaatcaagagttgatgttgaaaggattttaacattaatggttaaaaaaaaatcaaatacaacagtatatgtacttacgataacagatattcatcaggaactgtaaaatgagaatggaaaaaaaaagttaatcatattaagcagtgaccattgacataaaaatcttaaaaaacactgtaactaaaaacacttccgtgtgtgatggtcaactgaacctatgcatctggttttactccttccccaaaccccactaaaaccataataaaaggatttcctttttctttttttgagacggagtcttgtcctgtcacccaggctggagtgcaatggtgcaatctcagctcactgcaacctccgcctcccgggtttaaaccattctcttgcctcagcctcccaggtagctgggactacaggcatgcactaccatgcccagctaattttttttggtatgtttagtagagatggggtttcaccatgctggccatgctggtcttgaactcctcacctcaagtgatccactggccttggcctcccaaagtgctgggattatagacatgagccaccgtgcccggccagatttgtttttaaaagtatgaattccaaaggatgagaaagacagggagaaacaacagccatgatacattggaagctgatagaagagtggaaaatgatttataagacctaagaaaactgaatcctaggccagcaatggggagagtcaagcaccagcctgagttacactccaaaatccacctctccccttccccaaaccctaacgaattggtggcaccaaatagcttcattaggggtgaaacagggatatgaaaataagactcttttcgagtacgtttgagaagtagtgggaccccagttccctccacagctttaggtgactgcctttccctcattctggcaagagactaggtttattttctggagaggttcaaacacaggctatttggactagggaaaaatactaggtacagtgaaagtcagggtgtcacactgaaaacaggatctcctgctctcttccctaacatggctcccataacacaagcaatcaggccttcacacttcagccaggagactggaagtcttccctaggtataccccaagagaagtgggaatgacactgaaatggtttccccaactaaatagcctactgagaacaactatagtgacgttcatattccgtaagcccctctaccacccagagcttccaatatactttttagtcttccactctgaaatatgactagacagccaagggttaccagacaacaaaggaaaaaggaaatagaataaaacaaacagaagaaagttagaggaaaaactgcagaaaggagaaaattttaaacatctattactaatattttatcatcagaaaaaagttaatgcaatcataaaacaggcacaaaaacaggcagaaggcataataagaagaaaaagggaatcttctgaaaaaaagttataaattaaaaatacatggtatgtctctgtagtttcagttacttgggaagctgaggcaggaagattgcttgaaaccaggagtctgaggccagcctgggcaacacagtaagaccccgtctctcttttttttttttttgagacggagtttcgctcttgttgcccaggctggagtacaatgacgcaatctcggcttaccgcaacctccacttcccgggttcaagcaattctcctgcctcagcctacagagtagctgggattacaggcatgcaccaccacgcccagctaatttttttagtagagacggggtttctccatgttgatcaggctggtctcgaactcccgacttcagatgatctgcccaccttggcctcccaaagtgctgggattacaggcatgagccactgtggccggcaagaccctgtctcttaaaaaaaaaaaaaaaaaaaaaagacagcagaaattcaacagaaaatctggaagataaagttcaagaaagttcccaggaagtagagaaaatataaaagcaacacagaagccacagtaagtcaaccagaaggacaacagaggacatccagtaacttaattacagaaataccggaaagaacagagaaaacagatggagggaattcatcaatcaaataattcaaaattccccacagctgaaggacatgaatttctagcttgaaagggcccactgtgtgcccacactgtgaagtgaaaaaaaaaaaactttatcagaagattcagaacactggttatgaagaaaacataattcaaacttccagagaaaaaaaaggtcacatacaaaaatcaggagtaacactagaagctaagatgtagtggaaaaatgttttcagatgtctgaagaaatattatttccaacaaataattcaatacctagacaaacaatcacttaagtgtaagggcagaaaaagaactttttcagccgggcgcgatggtcagcctgactaacatttagtatctctactaaaaatagaaaaactattagccgggcatggtggcgcatgcctgtaatcccagctactcgagagactgaggcaggagaatcccttgaacccaggaggcagagggtgcggtgagcagagattgcaccattgcactccagcctgggcaacaagagcgaaactccgtctcaaaaaaaacccaaaaaaacaaaaaaaccccacaactttttcagacataagcctcaaacaggggccggtgtgggggctcacaactataatcccagcactttgggaggccaaggcagaaggatcgcctgagcccaggagttccagagtagcctgggcaacaaaggaagacccgtctctacagaaaataaaataatcagctgggcatgaggtgtgattgcgcaactgtactctagcctggggaacagagtgagacccggtctcaaaaaatagaaaagaaagcctcaaaaggtacatctcatgcccccttcttcaggaagctggcagagtctgtgtgccataatataaggtagtaagcctgggcaacacagtgaaaccccgtctctacaaacaatacaaaaactagctgggcatggtggtgcacacctgtggtaccagttactcaggaggctgagacaagaggatctcttgagcctgggaggttgagggagcagtgacctatgattgtgccactgcactccagcctgggtgacagagcaagaccttgtctcgaaaaaaaaaaaaaaaattttacatgggccgggtgcggtggctcatgcctgtaatcctggcactttgggaagccaaggcaggtggacctcttgagctccagacttcgagtccagcctaggcaacatagtgagaccttgtctctacaaaaaatacaaaaaactagccagctgtggtattgtgtgcctgcagtcccagatactcacttgggaggctgaggtgggaggatcatctgagcctaggaggtcaaagctacagtgagctttgatcatgctattgcacatcagcctgggtgacagactgtctcaaaaaaaaaaaaaagaggtagtaaactgagaaaaagaaaactgtaggatatactaaacataggacccaacaaagatacagagaattcccagataataatggttaagagagatctcagcaaacagccgagagatcagccagtccatattaagcaagtccgaaggctctagagatgtcttcaggaaggtgaaactgataacatacttcgttcatctgaacatcttgaggggagattgagaacactagtaaaggatgtgaggttaaagtaggaataaatatgtaaaaaactaaataagcacataaacaaaaccaagatagttgtaactccagggaaatccaaaagttacaaagaaaacaaaaagtaatcatagcttcctacatggttccactgtgactagtttatatatcatcatacaaataaaacttggaatcttgatctaaaaaaattaccactgaagaatgggggttaggaagggtgcataactatatattaatagaaaaaagattttgaaaaagacagaaaacagggcttctgaaaataaacatgaatcaacagcattggttcctgtgtctgaaccatgggtgtcaggggcaatgattatgcccccttcaggactgtcaatgtgtcttgtgaaccttcttgttggagggaaaaaacccaaaactggctgggcacggtggctcacgcctgtaatcccagcattttgggaggctgaggtgtccgtatcacaaggtcaggagtttgagaccagcctggccaatatggtgaaaccccgtctcttctaaaaatacacaaattagccgggtgtggtggcatgcgcctgtagtcacagctacttgggaggctgaggcaggagaatcacttgaacttgggaagcggaggttgcactgagctgagatcgcccattgcactccagcctgggagacagagcaagactctgtctaaaaaaaaaaaacaaaccaacccaaactactgtcagtgtatggattaacctattcagacacagaacagttctggcgattattgtttaaagtgacagcattccaaaccctcaggccatcaaatctgagagcccagaacaattgtataagctaacatcagttggcttttttcccatcctttttggaaacaagtatgtttgaatacttggctgcactaatctttcaagcacatatacttaagtctccttaattttgactgagatgaggaaacaaagttggcttatttttctcagttccttaaaaacagtaactcaagataaaccctttcaaaatgcagtacagtacttttaaaacaaaagccatccaagttgaataagcgatggcagtttgggggcctgatatggctgttatttataaggtggccatttttacatcctaagagtagttcattagtcaatgcattttgagtatatcaaatttgatttgatcttatcctagcatactctgaacacatcttgagatcaacccttctcaagtgattttggtgagcatagccaaagagtaccctctgctggtcagaaaaaaaatggtgctttcacaatacccagatttactccaacgattgcatatgcatttaggttttgtggctcttaaaatgcttttttttttttttttgagatggaatttcgctcttgttgcccaggctggagtgcaatggcgcgatctcggctcacggcaacctccgcctcccgggttcaagcgattctcctgcctcagcctcctgagtagctggaattacaggcgcccgccaccacgcccagctaattttttgtatttttagtagagacgaagtttcaccatgttggccaggctggtctcgaactcctgaccttaggtaatccaactgcctcggcctcccaaagtgctgggattacgggagtgagccactgcgctgggcctactttttaaagtgtatggaagcattaactttaatgttaacatcagaatttgagaaaaagaagtttaataattcaaaatttcgtgtaaaataatcaagaactccacgtttctatcactcactgtaggctcccgtcccttccacccccgggcggggacccctcccagcgacccggccagctctcagcacttcggtccccactggcctactcgctccgacggaggggctcctgcaactgcgctgtaccgtaaatatttgctgaatcgatttgacttttacttgttccaatttcgcttttttgttgttttgtttttttgtctttttacgaacaagaggtttagagaaccacatggaaaaaaggcagggccaggcccggacaccccgcctcctgcctcccggcccggcggtgcccggatgccccgcccgcgcccatggcgcagccacacacgacctcggtcccgtacttcgcgcgctctcctgcaccgccgccgccatctcgctcaggagctcctccacaaccgccggcaacactacggccatcgcgccgcaggacacgccctccacgaccggcggaccgccgcgacgctccagctgactgcgcctacctg

SEQ ID NO: 9447 - DNA, 323 bp, Homo sapiens
attccaaccttttaaaaattactagtaattcagttagttacttaagactaaatagggtcaggcgcagtggctcatgcatgtaattccagcactttgggaggtcgaggcgggcagaccactaggtcaggagatggagaccatcctggctaacacggtgaaaccccatctctactaaaaaaaaaatacaaaaatttagccgggcatggtggcgggtacctgtagtcccagctactcgggaggctgaggcaggagaatggcgtgaacccgggaggcggagcttgcagtgagctgagatcacgccactgcaccccagcctgggcgac

SEQ ID NO: 9448 - DNA, 7444 bp, Homo sapiens
gtcctgctcagtcgtcagggcccggccaatccggagggcgctcggcgcgtggtcgggggccaggagcgcgtctggcctgcagtgcgcagaggacgcggcgggagcatgttccggctcctgagctggagcctgggccgaggcttcctgcgggccgcggggcggcggtgccggggctgctccgcgcgcctgctcccggggctggcaggaggtccggggcccgaggtgcaggtgccgccatcccgagtcgcgccgcacggccggggcccaggcctgctgccgctgctggcaggtgaggggcgcgggccgggcggggccggccgggcggggacaggggcgcgggccgggcccgatgacctcagagccccttcccgcagcgctcgcctggttctcgaggcccgctgcggcagaggaggaggagcagcagggagccgacggggccgctgccgaggacggggcggacgaggccgaggcagagatcatccagctgctgaagcgagccaaggtgaggcggctccgggccctgcgcccggccgagcgcggtagcctttgtgagcggggtcttggcgttgctgcgcattactctctccgcctcgccgaagagtggatggaggctccgcgggtaaaattgccgagaatgaggtgggtcatccgagaggggattggaatccatccaggcttttccgactctaaggcctgcagtaaaacctctgcagtgtcaagtgcaaatggagatggcgccctaggcatcacgctttatgcaaacgaaatatcgggaacgttttgtagtggttttatcaattaaccagcctatctgaaatgacataatttcgcacgtatatagcggcctgaaaatggcaacttagtgttggttatgcggttcggttctcctcctgaattcttccttttctccacatccttttctatttttttttcctcctcttttcccaagttatctcatctcttccattgagctaaatacctactcgatgccaacaacgtccaaatttgtatttccattctgtagtgtgctactgacatgccatttgcactttaggaccatacctacctctcagatttaacatgcccaaaactaaacgatctttaatgcctcctcaacatacgctttcgccatctctttactaccatcagtttttcagcctaaaaacctcatagtcattcttaaaacttgtggtaccttaccattgccttccaatacacttacagtccagcaacaagtcctgttgccaacaaatgcaaaatatttctcaaatctttccccttttgtctatctcccttgctgtcaccctagtgcaaaccatcattgccaccaactatgctccagtagtctttcctggcctcctggcctcttgcaatctattctccatgcagaaaccaaagcgaccaaaaaaaaaaagagtaaattggattatgtcatctccttgtcagaaagctctgaatggctacccactgcatttatgataaaatacaaactccttgccttggcttgcaacaccccacatgatctaaaccagcatataccttgcccacccatttggcagtaatcctctggctcaccatcctcccttcacatctatttctttgcatttcttcctcaaaaccattctcttcagcttgtagggacttcactcattctctaccctctgtttgagtcattgttctccccaggtccttatttggttgactcattctcatccttactacctcagtttagctgtcacttccttggaaggcttccctaagtcctatttagaggagaccccttatcattcctttctgtcatctttatagctcttatcattagttgtaattaagcttacttgtcctatatggtcacctccagcctgcaagaaattagaaagaggatggaggacaagcagcttccttataaaatatgttgtaagatcacattccttctgcctgtgtctcttggccaaaacttcatcagatggccacacctagctgcaagggaggctgacctccctgtcatctctgtagacaatgctttgtacatagtaggaattcagtaaatgtctgatgaatgagttagcttccttctatcagttgggatgtacagttgcatacacttctgtctcttagcatatgcatctactatatgtttcattttctattattttgtcttcccttttcagttgagcattatgaaagatgagccagaagaggctgagttaattttgcatgacgctcttcgtctcgcctatcagactgataacaagaaggccatcacttacacttatgatttggtaactcttataaccagtctgaaccactgatgaggaaggttggatgggagggaagggtagttagttcttctgatttatattcctgactttcacgatgttctaaaactccttttctttttactgagttttcttttggcttcagtttcattttttgttttgttttgtttttttgagatggagcctcactctgttgcccaggctgcagtgcagtggcacaatcttggctcactgcagcctccgcctcatgagttcagacgattcttttgcctcaccctcccgagtagctggattacaggcatgcatcactatgcctggctaaattttgtattgtagtagagacgaggtttcaccatattggccaggctggtctcgaactcctgatctcaggtgatccacctgccttggcctcccaaagtgctgagatttcaggcatgagccaccacgcccggccacagcttcagtttttttacccttggggtgacataagacctctcaattccagaccaaaaaaaaccagtatcattagcatgtttttttaatgatgagtggacctagatttggtttgttaacaacaaagtatgtgcaagtatttaattctcacatgattgctgtcctgtgcttcttcttgcagattaattggtgatgtgcttttcattttcaactattttttaaattttgagggtgaaagcaaaagggaattttaaagttttgaaataagtaggaacacagtattctaaactgaaaaacaatttgtaatttgctttcagatggccaacttagcatttatacggggtcagcttgaaaatgtaagtaaattgctttgtaatatcttgaatttatgaaggagtagcttcaagggaactgtaatagtaagagtacaggctaagctgctataacaaagagaccctagaatatagtgactcaaacaagataaaagtgtatttctctttattgtgttagtccagagataggctaaagactgaaggcagacagacataggcacctttgctctctgatccagaagtccaggtttcttctaagataagccctcctctgcctaggtgagctgactcacctccagtctgcaggaagggggagaagatggactgtgagcagcttccttataaaacatgattagaagttcacgttctttctgcctgcatcccttggcctaaattttatcatatgaccatatctaacttaagggtgtccaatctgctaaaattgactgaattttttttttaagataaggtcttgctctgttgcccaggttggagtgcggtggcttaatcatggctgactgcaacctcgacctgccaggctcagttgatcctctcacctcagcctcctgagtagctgggattccaggcgtgtgccacaacacttggctaattttcttatttatttatttatttatttatttatttattgtagagacgggatttcaccatatttcccaggctaaatcgaggggactctgtaatcaaaaagatggagaagagaatgactattaggagacagtttgtagtctctgccacagtgggtttggataagaacttaatctctgaggttgttttctactcatcagagagtagtttaaggtacacagaggatgttgagggtcctgatattttgatctgttttcgcttcaaaagggtacttttctgtgtgtgagtgtgcgtgtgtgtgggtatatgggttttacaaggaatgttgcatcagactggcacttagaatccagggtcatatatatatatataaaatggggcccaattaaaagaaaaatcttttccttatgcttttaggctgaacaactttttaaagcaacaatgagttacctccttggagggggcatgaagcaggtaaggacattgcctagtattggcccctcactgaagcagttttcaaaacagtcttgtctcctgaaaactcctcctagccccaccacatgctttggtcaggaaaggtggagtttcccttctgagatctctatacaaattgccattctttcactaaatgcaacagcatgcttgccaaggaattcacagttggctcatcactctaaaagaataaagactgtggctttgaggccaccgtcagtctggaagttgatctgaaatatgccatgaaaaaatttacttgttatgagttcccttcattctctttctctcacaggaggacaatgcaataattgaaatttccctaaagctggccagtatctatgctgcgcagaacaggtaagtacagcagccagggagtaggactgtgggcaggaaactttgactctgggatgttacataatattcattgtctactggtcatctgggtctcccagaaattgggtgtcacactcaaagtgttccatccctcatctttgaaattgtcagtctttttccagtttgcccctactgtttccatcagcctgcctagtggggcacacaacatctctggctgccctgtgacaaaactaactaagttttctgttgctgcttgaagtgggaagggaagttagagttagaactttagtttaacttttcctagaagaggaaagagcagtgtgaaagctgctggggataatatattaatactctgaagaagccattttgctggtataaatagagttcaaagatgaagcatctaggttgtaagcagagaactcctctagagagttgtatttgggatgaatttagggagagacctaagactagcttcccttcaggttttagtggtgcagaagttggtgcgagaggtttggagtgacatggagcctgatgctgtagaaagggtgctcactgaggccaggccctggcactgttccctactgtcctactcaccagctcctttgttctcatcaggacctgcatagtctccttgcattttgattggacactagataggctagagcttcctggagcctttgacttcaagtcttttgaggagctttgagcttggcccatgccagggaacactgcagcttggtcaatctttcttggagttgtaacaaacatgcctagttcttgattgggtatgaatccctagggtaagaagaagcccagagcctaataaacattgttgagtaagacaaattcatagtcttctagaggtgaaagctagtaacaattagcctctgagttacatggtactctgtacttttcattttgttttattaagagaagcatgagactagaaaagacatggccagatctgaggcttcgaaaggctgatataggttatgaggggaattgtttgtagacctcttgctccgactgggagcgtcttctgggcagtgtccacttgccctgtgttatggctagagagggccctcttgccaagttttgagcgtagggaaggaaggggatgcttctgttcttctgagaacagagcagaacagtagggtcataagttctcccctggcaaagcactagagaacaggtgagctttttagtgccacttctgtaagaaactagagccaaaactgaagaaaagaaccaaagctgagctcctaaatggagaagggatttctgtcacatttcctctgcatctctgtaaaaagcagcagtcagtcggcctgcttgggttgactcaaccctctccagttgattgagggtccagggctacagagttgggttaaatgacttctattgccatagctaggagtcccatttctgcaaaagaaacttttatcagagacttatagcttgaaagaaatataaaatgactaaagctcctcagaagctgtatgaggtcaacagttggaatcctcactgtagggcggcctgaactgtttagggtagtattactttgaacaggggtaaggctttcacacatggagaagttgattcactggaggccatctgttagtgggagatgatgaatactgctggctatgtcagttattaaaattagggcagcattcctagctttttgtgtcctaagttatattaaatggatgacttaaaaaaactgctttgagaaatggcagatttgacactacttagactttaagcaaagttccctcttcccattttacacttcctttactgataatgtttaaactgagctggaaaaatgaagataaaaagaatttgtgaaaaggtaaatgggccgggcgcagtggctcacgcctgtaatcccaccactttgggaggccgaggtgggtggatcacttaaggtcaggagttccagaccagcctggccaacatggtgaaactctgtctttaccaaaaatacaaaaattagctgggcatagtggcgggcacctgtaatcccagctattcgagaggctaaggcaggagaatcgcttgaaccccggaggtggaggttgctctgagccgaggtcacgccattgcactccagcctgggcaacaagagcgaaactccatctcaacagaaggaagaaaaaaaaaagaagaaaaggtaaatggctgattattgattttgctttacagacaggaatttgctgttgctggctatgaattctgcatttcaactctagaggaaaaaattgaaagagaaaaggaattagcagaagacattatgtcaggtaggaaacccattatctgggcattgccttttctccacaaaaggctttactttacacttttgagaaatggaaagagatctaaattgggaagagggaaagttacctattttgcaaaataagtgtctgtctttaaggtatcagcagaagttttggaataagatgttttatttaaaatatttgactgctgttttggtggtggttttttttttaacccccttggtaacatggtcataatttatttgttaacttttagttacatataacttaaggaaaattggggagcagaaggagaaggtgtttctcgtatctcttagttcagctaccaatcaaaatgcttattacgttttagccctagatatacagcaaattaagaaagaagagaaaaaaagctcatgtttttacaatccatcctcactcattctggaggctaggaatagaactggatgagcaggaagctctctagctctccaccattttgggtttcttaatttgggttgaagtattgagaattttcagatttgacatttattcaatacctactctataccaagagctaccgagatggtagggatacagcagtcaactcttctgtacctagtggtcttctaactctctcttg

SEQ ID NO: 9449 - DNA, 21441 bp, Homo sapiens
ggaaatagggtccaatagctgcgaggcgtgagttcatgtggttttcagtctcgcagtgtgtgatcatttgccgtagccaccttgggagactaacaaacctgcagttcctgaaggattcaccatccttctgttgaggaggagcatttgttggcttctgtctcacaagaaggatctgtctcttcataattccacgatttcgctcctaggtggtctgttccagagttctctgcatgcttagtgcgtgcattgaatgcctgcacgggatcctggagcacagtacctgcccactgaatatcagcttccatcttcggtactatgaggagaaaatacctgctctcttaggattgggtttaatatcaagttgagcatatggctctttgtttgtagaaggcttgtatattcgatgctaacgttgtcactgttctcttttgaaggctctctatgagaacatgctggtggagctgccctttgcaggcttctttctttccaagttgcttggaaccagtgccgacgtggacattcaccacctcgcctccctagaccctgaggtgtataagaatttgctctttctgaagagctacgaagacgatgtggaggagcttgggctgaacttcactgtggtgaacaatgacctgggagaggcgcaggtgaggggtcaggaggaggattcacatacctgtatagcaagtagcagcatctccttgtgtgtggaagtccatttgtgttacagcgtttgacttccgcacattttagttagaatgactgtggctgtgagttagacgtcgaagcatatagctccaaagcaccttagccctggcgtctgagctgagtgcagttcctgctcccacgcatgaagcctgttcctgcccggcagcccctcctgcggagctccactctcgaggctgcggcccaggcttgctgcttgtctggctcttcccggtgctgggggtggccgttcagcagcttcccggcaggaccccttgcttagtcctcactccttgcccgctcagagccacctcagctgctccagcactgtctagggggtgtgttcattacccatctggttacttttgttacttatatcctttttaaaaaagaaaaaagaaaggtctatattagagattcaaactgattttcttaataacagctttatcaacatgtaactcacataccataaaatctgccctttttagtacatgattgagtggtttttagtatattcgtagaggtgtgcagccatcatcaccctagccaatgttagcacattttcctcggtctacagagcaaccgtgcacccattagcaggctcccccacctcccgcaggcagccaccagtccactctgtctctgcatgggcctgctgtggacacttcacatcgatagagtcttttttttttttgagatggagtttcactcttgttgcccaggctggagtgcagtggcgcaatctcggctcaccacaacctccacctcccgggttcaagtgattctcctgccccagcttcccgagtagctgggattacaatgcgccaccacgcccagctaatttttgtatttttagtagagatggggtttctccatgttggtcaggctggtctcgaactcccgacctcaggtgatctgcctgccttggcctcctgaagtgctgggattacaggcgtgagccaccgtggccggcacgacagagccttttacgtggtcttccttcacttgtagttgcatggatcaggacttcattccttttctggccaaatgatattccattatatggatataccacaaggtctttactggttgatggacatttgggttgttcctatgtttgggctaataagaatattactgttataaacatccacatacagcatactaaaataattattaatgagttagtaacatctgggatttgcttcaaatacactctgtgcatccataatctgaaaatccaaaatgttccaaaatccaaaactttctgagtgccaacatgaagctcaaaggaaatgctgattggaccatttcaggtttttggattaaggactcttactgataagtataatgcaaatattccaaaatttggggggaaaaaatacaaatccaaacacttctggcccaagtatttcactcagataagggatactgaccctgtgtggtgagaacaggggcaggaagtggggctatcagttccagagactggccgggaggtgtgatgcctgatgaactggctgtgtggggttgggagctcatacactgttctgtctactttagcatatggggctttgttgttgttgttgtattgttttgagacggggtttcactctgtcacccaggctggaggagtctagtgatggcatctcggttcactgcaccctcagcctcctgagtagctgggattacaggcgtacaccaccaaacctggctaatttttgtgttttttgtagagatagtgttgccctgtgttacccaggttgatctcaaattcctgagctcaagcgatcctcctgcctcaacctcccaaagtgctgggattacaggcatgagccaccattcctggctaatttttgtgttttttatagacatgggtgtctccctatgttgtccaggctggtctcaaagtcctgggctcaagtgatcctcctgcctcagcctcccaaagtgctgggattacagatgcaagccaccatgcctgtccaagagccatatttatttggttacaacttatttagttgcttttgtttctgcatatttttccataccatagagctgaattttcaccaatgcaaaatttagataatttggcgggggggctgttactgtcattaggaagtactcgacatccagtgatgtcgcttgctgctaggtcttgcaccacctagtggcctgatttctaaatggcataaaagccttcggacggtgagtgttgtggtgacctgcctgaggcctttgctaatgcgagtatttcccatttttccttctgaaataaatgttaatagtgaaacgtcgcatatgcaagaattccattaaagcactgccgataatactggaatctgttaaaagcaaaagtgtgaagttaagatgttccagttattcatagagattcccactgagttaaaaaattatagataatgtatgagaataattatactaaagagcctaatgagaaaaattaagaaattcactagtgaagcacctaatttagagggagatcttaaggatttctgtagaaataaataggtagtcctccttacaagtttttaagtttataaagtatgatttaaagacttgtaatatgcaaatactttattgtgtcagcaggttatgttaattaatcatcccttttaaaatatggtgctgctctcaaatttgtttttttcagtgtaatcaatttggctgttaatctgtttaatagtgaccatgaaattttagacgactaatttacatagaactctttctagcagaaaatgctaagggtttaagaaggacccacaaataatcatctgttaggtagaaaagattggacttgagtcacgacaccttggttcaggtcctggtttggccgcttttctgtgaggcttaaggaagtcacaagaccccttcctcatctcagacgggtgtgagtgccggaggatgaaatgagctaatggaagtaggtcatgtatggtggtgtcttgtggggctttatggattccaagtgaaaatagactttctggaggagcagaaaggacagctcttggtatcttgctgtcctgagaactgctccagttaaatatatttgtatttagaggaaattttaaatatgtccctcagatctgaaatttagcacttatgtgacatgatttttaagtacacatagttgtttaggcttagcctgagagagaattttaaattaaaagtagtgtaaccgtttaaaagttattagaggggctgggcgcagtggctcacggctgtaatcccagcactttgggaggccaaggcaggcagatcatttgaggtcaggagttcagaccagcctggccaacatggtgaaaccctgtctctactaaaaatacaaaaaactgagccgggcgtggtgatgtgcacctgtaatcccagctactcgggaggctgaagcacaagaatctcttgaacccagatggtggaggttgcactgagccaagattgctccactgcactccagtgtgggtgacagagtgagaccttgtctcaaaaaaaaaaaaagttatagaaatgtcagttttctctgatcaggcaaggtaattgggagccttggaagttcctttaactgataacttcactggtcctttgtcttccaaatcatacaagtacatcatcatttattacctgcctctaatccatttaaaggaaggggtggtattttatacattgaaatataatagctagcctcctgaggcttggttaacagatggactgtcagctgagtacaagcaaaggaattaagataatgaacacaatctttaatcagaatgaagacaatggaattgaaagcccattcttaggcttgatggttccaaaccttaggaagtgaattattgagaataattgtatcatcctttaaaatgtgaaacgttaaaagaagcagatctggtaagttgaacgttcaagttcaatttgaacattctgtataaaatgagaaccagcaaacgagtctcctataaccatcagctgtaggatgacttaagtcaggctctctagcacatttgtgaaacaatctttctgtaaatggtaagagactgggacatcagtgccattgcccagaggcagcagtcttgtctgttactctgggaatattaaagctaccaggaaaactgaaggctgtgaaaagaaaagaatggaaaggtagggaagttgaaatgtctttgttcatttattttgggcttattttatattttcattgtccacagtataggttgccctcatctaaccccaggaatgcagttggggtgtttttgttgtttttttgttttgttttagaaatacaggtgggggtcttgctttatctcaaactcctgggcttaagggatcctcttgccttggcctcccacagtgctgggattagaggcgtgagccactatacccggcctgtttttttggttttcttaataaatactttttaaaaatttttttatttaaaatacactctttataaattatgattacatgtttatattgtattttgctcgtgtactgttttgtatttatgaattcatataatcatgtaatcacagcaattccaagtcagacaaacaaatatcaccattttattaatggccaaaagtttcaaggtgtaaagtgacttgtctgtcatacaagtgggggacagtaagacccaggtctgtgtttccgctgtgttgcttttctcatgagcactcttgtggtgtttatgggagctccacgttatacctgcaaattctgtgagtatagccacgtactaataaaaagtgttcttactcactctgtttatatacataagaaattggctgatctgttatcactgatcgttaccaccaccctttgtatcgtaattaaagtgctttatagtaatggcattgtggaagcacacaggtaagtgtgtgctgcttatatggatgaaaatgagaaatcactttactacagcctttgcgtttcctccagaatgagtcgctttttctcttctgacttaacggtgattgtttgcttcatgtctttgccctctgtgatttctcatttttgtttaagtaaaattgccatggtgacattgctgcacaattccctagtgcttcggaggaaacatggatggttagtgatcttaaagacagagtaaggtgctgggcttcggagactcttcctggaggtgcatcttggcatctgcacaatgctgtgcatactcgggtactatttcgtatttagattcttgttcacaaagcatcaagtcctatttccttaaaacatttgtttcttgcttttttttttaacctattatcatactttgaggattttgagatccttacgttttgtattcccaggtagttgaactaaaattcggtgggaaagacatccctgtcaccagcgccaaccggattgcgtacatccacttggtggcagactacaggctgaacaggcagatccgccagcactgcctggctttccgccagggccttgccaatgtcgtcagcctcgagtggctccgaatgtttgatcagcaagaaattcaggtaccctacctgctgactttctgggacacgcttgtcacaggaaatgaacaggctttcttaaaatttacctcaaatgttattatttgaacttttttccttaggtattaatttctggtgcacaagttcccataagcctagaggacctaaaatcctttacaaactattcaggtatgttatcactgctagttattgtttctgaaaatgttgcaggtggtcatatttccaaagtaatttttattttattttaattaatttatttattttttttttttcagactgagtttcactcttgtcgcccaggctggagtgcagtggcgcgatcccagctcactgaaacctttgcctcccgggttcaagcaattctcctgcctcagcctcccgaatagctgggattacaggcacctgccaccaggcccaactaatttttgtactttgagtagagacagggttttgccatgttggccaggctggtttcaaactcctgagctcaagtgatccacccccctcagcctccccaaagtgccaggattatgggcgtgagccaccatgcctggcctcaaagtaatttttattgtactcttttgtaggggtaatgtacatggttcaaaaaccagatggctgagtgcagtggctcacgcctgtaatcccagcctttgggaggccggggcaggtggatcacttgagctcaggagtttgaaaccagcctgggcaatgtggcgaaatcccatctctactaaaaattagctgggcgtggtggcatacacctgcagtcccagcgtggtggcgtacacctgcagtcccggcgtggtggcgtacacctgcagtcccggcgtggtggcgtacacctgcagtcccatctacgtcgggtgctgaggcaggagaatcactggaggtgggagacggaggtcgtgagatctcagtgagccgagatcatgccactgcactccagcctgggcgacaggagtgaaaccctgtctctaaatagataaatatatacatacacaacgtacatgggcaaaaaaaaccagatgtttaacatagaagatagataaatggccagtaagcaaataagcacacaataacgatgttcagcatcattagtcattatagaaaaatgccacttacatccaaatgagataaccccacatacccactagctgtctactggtgcaagtgagagctttttgaggaaatggaaatgttctaaaactggattgtgctgatggttgcaaaactctaaacttacaaaaaatcatttttacatataacctgtgtgtatccatgcgtatgtatctcttatctgtagtttgcattgtcctacatctgaagtctaatctttatgtaaaagcaaataatgcctaaggtcacgttgtccccatgatcgggtcataagtttaaggaaatgaaatcagtctgacctttcctttgccaagagattgtcttcggttgttttcattacccatctgcactgagggcttgcacctttaataatctcagctatgccagtaaataggtttaaaatattatattcattttggtgccaattaatgcacttaagacattttattggtgttatttctgtagtatattaacaatgagggaacaatatacagcaattattttaggtttagggagcactttactagattaaaagctgtaagtggcagacattacatttcagaatagtggtctcatcatatagtgagattggttgttagccatggtattaatatcagaatgataataagttagaaggaaagatgataaaattaatttagccaccaaatcatgctgggaaaacacccagctgtgttagtactagacacccattgtctgtcatgttagatctgtggccacgtgcaagccccttctctgccgtctgttcagcggcggctttgaactgcagcacggttcttcaaaataaggctcctctgcagtagttcttggtgcctgcattcatctttatagttacagggtgatccttattctagctttttatgtatttatttatttattttgagggcgaatctcaccctgtcacccaggctggagtgcagtgatgcaatctcagctcactgcagcctctgccttctgggttcaagcaattctcccacctcagcctcccaagaagctgagattatgggtgcgcgccacaacatccagcgaatttttgtacatttggtagagacagggtttcaccatgttggccaggctgctctcgaactcccgacctcaagtgatccgccagcccgggcctcccaaagtgctgggattacaggtgtgagccactgtgcctggccctgctttgaccctccttaagttgctctccccttctcgtactttgcccatcgcctccacataattggcggtgggtggggtgggggcggggggaggcagagaattccgcttttgcatttacaatcggtccttcatatctgtgggttctgtccacatccatggcttcaaccaattgcagattttaaatatttgaggaaaaagcaatggttgtgtctgcactgaatgtgtgctaagcaatatagtgtcacagccatttacacagcctcggcatgagatgggattgtaccagtgctctagagatcatggaagtgcacagcacgtacacaggtgatacacacatgccacgccgttttagagaagggacttgaggatccatggactttagtttccgtgggtgtctggaccaatccctgtgggtcctgaagggtgggtgtgctttgcatttcataaagcatgtgttcattttgccataggaggctattctgcagaccatcctgttattaaggtcttctggagagttgtggaagggttcactgatgaagaaaagcgcaaactgctgaagtttgtaacaagctgctctcgaccccctctcttggggtttaaggtacacaactttcatgacatttgctttaaagaccacttcataataagaaaggcagcagaacattcagtagggttaaatgaagtccttttacatacacttttgtttttatcttcagctagatttttaattaagtactggttatgatgtatatattttggtgctagttttatttggggttgctttttttgtttgttcacaataacctagtcatatgatagttacacattgtggttatgattgcctgtgaacaaaccgtacatttggagggactatttgcaatattaataatgtctcataaatctgtaacacatcttgggctttttgctactgaactgaagcaggtacaacgtagagatgttgatggagtgtatatgctactgagccttattttaccacttctggaaattaatgttgatcttacgtaatttggcttatttttagcaattaaaattgcctcaggcagatggatcatttgaagtcaggagttcgagaccagcctggtcaacatgatgaaaccctgtctttgctaaaaatacagaaaaatgagccaggcatggtgccctgtgcctgtaatcccagttacttgggaggctgaggcacgagaattgcttgaacccaggaggtggaggttgcagtgagccgagatcgcgccactgcactgcactccagcctgggtgacagagtgagaccctgtctccaaaaaaaaaaaaaaaaaaaaattgcctcaggaacgtctaatcataattcctgtattcactgtaaattaaaataaagccatattaacatttaaaaatgcacacagtggtatatatattatagaataatatataattagataagtactgtatgtgatttgtgcttatgaaacttcataggcattcactttcttttttccttttttctttttttttttttttaagtaagatgagcactcgctgtatcacccaggctggagtgcagtggtgtgatcacggctcactgcagccgcagccacccaggctgaagcaatctgcccacctcagcctcccaagtagctgtgactacaggcatgtaccaccatgcctggctgacattttgattttttgtagagaagggtttcactgtattccccaggctggcctccaactcctgggcccaagaaatcctctcacttcagcctcccaaggtgctgggatgacaggtgtgagccaccacaccatgcccagctggcattcaccttcaaataaccttcaatcagaaagagttcctgcacactcatgtagtcccagctactcttgaggctgaggtaggaggattagttgagcccaggagtttaagaccaacctgggcaatgtagtagcgagatcctgtctcaagggggaaaaagtaatgttaaggttttttgctttgttgttgttgttgctgttttgtttgtttctttgtttttgagacggagttttactctgtcgcccaggctggagtgcagagggcaatggcgtgatttccgctcactgcaacctctgcctcacagggtcaagcaattctcctgcctcagcctcctgaatagctgtgattacaggcgtgcgcctccatgcccggctaatttttgtatttttagtagagacggggtttcaccatgttggccaggctggtctcaaactcctgacctcaggtgatccacctacctcagcctcccaaagtgctgggattacaggtatgagccatcatgcccggccccccaagtatttttttatatttctgagtgaagctattctttaactttttacttcgaaactattttaaatgtatagaaaagttgtgagaattgaccaaataacttctaaacccgcactgaccaattgttaacattttgctacatttactttatcattcttttcatgcatttctttcctgaatcatttgagaataggttgaagacatgaggtcttccctaaatatctcagcacatacttcctaagaacagagacagttttgaaacggccacaattaaattattacaagtcaggaaattgaactctgacatacggcacttaccttatcgaatccactggctgcacagtgtggtcctgggaccagcagctgcagcatcacttgagcacatgttaaaaatgaacattttcaggccccactcagacctgagtcagcgctcagtgggagcggagccccgcagtcacgttgtgaccagctcttcaggtgttaggccggttgtcccttcgcgtccttcatagaatctgatccaggaccacacgttgcatttaattggcgtgctctttagtttcctttcttctgtacccccattttcaaggggtgcaggcaagttatcttgagaatgttcgtcaatgtgatgtcgcagccccaccgttgggagtgtacagatggcaacatattttcacacagtgtgtttatgaatgttcagagcaagccttcataatggccaaaaacgaaataattcacagtacatgaactgctagtaaatactatagattaagagatatttagaatttaaaaggaataaatgatatctactacactgtgtatgaacattgaaaacactgtgctaagtgaacgaagcaagacacaagactacgtattattatatgtaattccactcggataaactgtcctttgaaaggcacatttagagacacagagcgggtcaggggctgcacagggctggaggtggcagcgggagcttcggagaagtggagcgacccaaaaccggattgtgggggtcgctgcggaactctgtaaatttgctaaaatcattggattgtacatttaaagggataatcttatagtaagtcaagtacacctcaattaagctgttcttaaaaattgactataaactaacacagcatctcagttagtgccctcagaactggagttgggacccagtagagaggtggaaagaagtgaggcctaagtgcagtgagtttgtttcaaataggtcaatcatcgacgccgttatgttctggaagtaatgaataataaagacgtataaacttaaacgtgttagtgaataccatcactcaatgatatcagtagaaatgataatcttccaaattgttggagagaaaaaataaccatgcaaataaaacaggacaaacagaaccaactctgtttaccagatatggggggtgggggtgggaagtaacattcagaatcgtaaaatagaaaacatagaatgagagaagcctgaatgttacaacagtgagtgcggagaaactgacgtaatgaaagaaaaagactttgagacagggccaggaaaacgctgccgcctacaagcaacacacctaaacggagtgacccagaagggtttagtggcacgtccaggttcgtgtgtgaagaaatagatgggtccccttcagagtttgaagcatgacccatgtgaccagataggagaatctctcgagcgcagggaaagctgggtgctgcctgtgtggtggcagagtctggagggcttgctgtgctggggactaaagagcaggaggactgcaggtgaggcgtgcagacgactttttatcggtaaagattttaatgccatttggtaattttgtcattaacatttattatgatagacaaggcttctagtatctttgtttcaaaactggtttgttccaaagctagagataagaaaattatgcatctcatctagtttcataaaaggaagtttggaggacctgctcccatcaaaacactggaagatgcagagacttttgtcagctcctggctaattagataatgctaatcatgtgagtagcaataaaaattcgaagtcctgccagacgtaggttctagacattctgacagccaactaaagagccagcaataacgtgtgcctaggagtgcgagagccttctccacctccgtgatgcctccgggttcgtgcatggccacttgtgctgcgtgagcgtcgtaggtttaggggaacagaagtagagggatttacatgagcttttaaaatcccaaatagactggccaggtgcggtggctcacacctgtaatcccagcactttgggaggccaaggcgggtggatcccctgaggccaggagttcaagacgaacctgaccaacatgatgaaaccccgcctctactaaatacaaaaaaaaaatcagccgggcatggtggtgcatgcctgtagtcccagctacttgggaggctgaggcaggagaatggcttgaacccggaaggtggaggttgcagtgaaccaagattgcaccattgcactccagcctgggcaacaagagcaaaactctgtctgaaaaaaaaaaaaaaaaaaaaaaaaaaaaaaaaatcccaaatagactaaaagggaaaatcctaccccagtcaagaccccgcacaatcataattgagttataccgtggaaaacactttgagcatccatgagacggtcttactgttttttttatttttctcaatgttctaacatatgtgaaatttaattgatttttccatgataagtgtttttgaagttgttatatgttagacatccagtttggaaaaatcatcttaatatttaggctttccggttagcttagtatgcctggatttgccagggctgcagaattaatgtagacttaaaggaagagaatgtctttcagttgaagtactataaatagcaaaggcaggcaggcataattttaaagttatgaaactccttagtgccagattattggagaagaataacatctgctaaagctaattaaagtttaatatgtttaataaatgtgattgttacagacaaaaaatcattaaagtgctgtagaaaattgttaagttaccatcaggccacataataaattaatgatttttctcactctgaattaatgcaaattcccgttgtactgtatttaattatgcacaaaatggtgcccttgactcagatttcagtgaagaacttcatttttttacttttaagtctccaagtaggaaattcaattagcgttatgaaagaaacactaaaatgtggcatttaattgcaaaatatattttaagcttttcatttatccagtgactttgccagcagtcactgaccccttcattcagagatccttttctgtttcaaaaatgcaatgcttcctttttagtatattcaagcatttgtgaaaattattgccctcatgtactcagaatgctgaataataagtgtaataaatgttatttctggttctcctttggttctcattctaacatttttatgagagatttaaaggagcaaataaactataattagaaaaaaaaagacaatggattttagcacatattatatgccacatatatattttttaatgaagtttacatttaacagtaaagagacctacaaagatcagtaataagaatcatgtaagtctcttcataggctttttttttttttttttttttttttttgagatagagtttcgctcctgttgcccaggctggagtacaatggcccatctcagctcgctgcaacctctgcctcctgggttcaagtgattctcctgccgcagcctcccgagtaggtgggattacaggcacctaccaccacccccagctaatttttttgcatttttagtagaggcaggatttcaccatgttggccaggctggtctcgaactcctgacctccggtgatccacccacctcagcctcccaaagtgctgggattacaggcatgagccaccgcgcccatcctcttcatagcattttgtgggctgtgctcttactagttttacccttaacataaattatatgctaaactcaacatataattgaaacaaaatccaactgaaatgtgggtgtggccagttgggtgcctgttgtgctttgtgacagcttcagtgcttccaaaggttcctgcagaatgggacattgctctagtttgattcacatttgactacaatggttagaaggtaattaccttttctattttttaaatttttttgaacataaactcaagattgtattgtcttcataataaaacaaaagatgacacttagaattggatgtcttggcccttcctcctcttctgtcctcccagttcagaatgctcacatctctttatatccagcatcctcttacatctgcacctatgctcaacgcactcaagcctcagcacaagcttcttcgtagttctagccttttcccggaaaatcagcttagtctgcccaccgtagccgctatgcttcgtgtcctaacaccaccttccccgggcacctgtcctaacgccaccttcccaggcacctgtcgtaacgccaccttccccgggcgcctgtcctaacgccaccttcccgggcatacagagaatccgtgcccttttgtgccgtgtcgctttgtgggcttgccacacttacagaaagtcgaacgggggccgggtgtggtggctcacgcactttgggaggctgaggcgggcggatcacctgagttcaggagttctcgaccagcctggccaacatggcgaaaccccatctctactaaaaatacaaaaattagctaggtgtgatgatgggcacatatagtcccagctactcgggaggttgaggcaagagaattgcttgaacctgggaggcagaggttgcagtgagccgagattgtgccattgtacaccagccttgttgagagagcaagacgccaactcaaaaaaaaaaaaaaaagtctagcaagtattaggaacattcactttgtgggagcgctgttggcaccgaaagcactttttttatattggattttttttttttttttttacctttcagtaaaagtaatgttttcattatagaaaattggaaattgtgatcaagtataagaaacctatatttcctcccattctaaccattatttttttatgtttccttcctttaattagtatgtgttttatctacctacatgagtgtgtgttaatgtagatatgcataattttttctgtttttggtagaggtagggtcttgctctgttgcccaggctgtcagaaactcctggccttgagtgatctcccacaccagcctcccaaagcactggtactacaggtgtgagccaacatgctcggcctgttacacacacacacacctggtattacaggtgtgagccaacatgctcagcctgttacgtgcacacacacacacctggtattacaggtgtgagccaacatgttcggcctgttaagcacagagacacacacctggtattacaggggtgcgccaacatgctcggcctgttacacacacacacacacacacctggtactacaggtgtaagccaacatgcttggcctgttacacacacacacacacacacacctggtattacaggtgtgagccaacatgctcggcctgttacacacacacacctggtactacaggtgtgagtcaacatgctcggcctgttacacacacacacacacacctggtactacaggtgtgagccaacatgctcggcctgttacacacacacacacacctggtactacaggtgtgcgccaacatgctcggcctgttacacacacacacacacacctggtattacaggtgtgagccaacatgctcagcctgttacacacacacaaacatatatatttttaagacagagtttcactcttattgcccaggctggagtgcaatgcgtgatctcgtctcactgcagcctgcaacctctgcctcctgcctcagcctcccgagtaattggaattattacaggcatgcaccactacagccggctaattttttatttttagtagagatggggtttcgccatgttggtcaggctggtctcagaaatcctgacctcaggtgatccacccgttgtggcctcccaaaatgctgggattacagtcatgagccactgctcctggtcacgtaatttttaaatataattttagctgtatcttgtgttcagttttctaggctacctttttcactcaacattacatcaggatcatttttcctcatgttattctttgagatatttttaatgggcttgtagtgtcccatcatgtgatttaccagtttactttctgttttttagttgtttacagctcttccttcgttgtgatgctgtgaacctcttgtgcataaattatcatgtgcatctctaattatttcttagagtacagtcccaggagttgtgaatgtgggtgaagcccctgctcctgctgccaggcccacctctcagagagtttcgtgtacacgtgtgcagggaagggctgacctagctaggtctctgaaacccgtgccagatactaaatctgcacaggctgcgacagtgagcagactgagggcgatctgtgccttattgtcttcctgttggaagagaacacataaatcacgtatctcaaatgtgaggcaaatagctaatggtgtttgtgtatacgaggaaggtggagtcaccggttcttcgtggccatcagaggaccgacacgcccataggtctcatgcattaagtctgcgttgagcaatccctaacacggtttttgcctacagatacatttgcacaactgtgaaaaccaggtacgtattcattgcatcattttttgtaaaaagctgagagaagtgcccagcaacacgtcgtgccgcgcgtgtgcatggaacaccatatagcctcaccattaataggcaagatgagcgagacccattatcagatgagaaaagcacggcacggaatactgtgtccaatgtgctcaccgtctcaattttaaacctaaaggagggagaacattttctcatgcgtgcatttcatctctgggagcacttaagacgctgaagcgttggttgccagtgggaatgggaactgggtatctgtgatacagggatgagaattttcacactgtacctttaaataccagaacgtcatgaacacatctgaaaaacaatattcaaatttccctgatcatctttcttttttgttaacaattatttaaattctggcacaagcaagccacttttcatcatgcatttggtctatagatgttctacctccctcaatttcgtcttgtaatttaatgaataggggaactggggccgggcacggtggctcacgcctgtaatcccagcactttgggaggctgaggcgggtggatcacgaggtcaggagatcgagatcatcctggctaacatggtgaaaccccgtctctactaaaaatacaaaaaattagccgggcgtggtggcgggagcctgtagtccaagctatgcgggaggctgaggcaggagaatggcgtgaacccgggaggcggatgttgcagtaagccgagattgcaccactgcactccagcctgggtgacagagcaagactccgtctcaaaaaaataaataaataaaaataatagggtaactgggttgcttctttgtatctcttgaaaactgatagaggtctcatcagattctaaatttgaatttttctttttttggcaataacatcacataggtaatgtcgtatgcttcccattcccttaatcatcgtggagatccacttctcgtgagtcatctccccacaatgctgggatcgatctctgcgtcagaattcctcttgattttagtggtcacttatcactgcctagatccattgtttaatgtgcttctaaaacagccgtgttctaattacataattgtataatttattagctggaattttctatttaaaaacagctttgtttcttctcaccaatgatttggttaacccgagtaatagcttgtacaggaaagatagaataaatcttgatcctttttaaaaaatttttatagacagggtctcactgtgtgttgcccaggctggagtgcagtggtgtgatcatacctcactaacctcgacctcctgggctcaagacatcttttcacctcagcctcccaagtagctgggagtataggggcagaccaccacacctggctaattgttttgatttttatttttagtggaaatgaggtctcgttatgttgcccaggctggtctcgaactcctaagctcaagccatcccccagctaggcctcccaaagtgctgggactacaggtgtgagctatgcgcctggcctggaatgttatttatccctttttatgcctgaagcacagtgcataatcttttatgtaagttagaactaagccatcaatgtaattttttaaaaaagcaaatgtgggccaggcacggtggctcacgcctgtaatcccagcactttgggaggcagaggtgggcagatcacaaagtcaggagttcaagaccatcctggccaacgtggtgaaaccccttatctaggaaaaatccaaaaattagccaggcatggtggcaggcacctgtaatcccagctacttgggagactgaggcaggagaatcgcttgaacctgggaggcagaggttgcagtgagctgagatggcgccattgccctccagcctgggcgacagagctagactccatctcaaagaaaacaaacaacaacaacaaagcaaatgtggtttcgggaaaatgtgactgcaatggtaactttactgattggagcaggcacattttgtgtactttgtattaaaactcatgtaatgccatgcttgttacagtgacatcttgcacacatgctgtttttcaggagttgtatcccgcattttgtattcacaacggaggctccgaccttgagcggctccccacagccagcacctgcatgaacctgctgaagctccccgagttctatgacgagacacttttgcgaagtaaacttctctatgcgattgaatgtgccgctggctttgagctgagctgaagctgatgctggggtcagacccctacagagaaccagtgcttccttcgtcagcagcgcctccccagacccacgaggatactcacactgcacgcctgaggctctcctaagctccttctttcattctgccattcctccctcccttccttttttaaatgatttttattacggtgtggtcacttatttagatggacattgcttttcaaataacttaaaataacacgttatgtgccatgtggctactttagtaatattgccaagaagagcacagtttttacactagtggcatctcagtgaaattaaccaaagatgaagctttggctttgctggtgagatcagagccctcctgagcaggcagcgccactccagggttcagacagggctgcacaggcggcagagatacagggtctgagggctgagacgccatggggccgctgctgcttatgtggttggattgtttacaagcctcattattaaaactgaaggcattttttttttctgctgcctttcccaaagtggttaggtttggaaaagagatgatgatggtaatattttatttgtgctttttaagccatttccccaaatgggactagcatgcttgttttcagtataccgtggcctgcctcatgatggtttggagatactgtctgtggatgtgaggtggggacttcattcattgtcctatttctatctccactttgtgcctggagagctttcaggggaggtggaggaggagggtctgccaagctactgcaacatctgtcacccactatacccagttacttgggggaggacagacactgtggtgtcattaaagttgtttgaaccaaagtggcggctgcatctttgtcccgatgctagccgtgccggtctcccatcatccgctcgccctcctttcccctgggctgcgcccacttgtcttcctggatatttgggggtgactcgccatgcttggcaccctctgcttcctggtgctgctctgactcgaagacgggacagtccctggtgcacatccagggaagaggagtgtcggtagttcttgcagtaggcactttatcaggacctgacctgttgctgggtgattttagtctctacaaacagaaagcgtttcaaagcgtcagctgtgggagcagagtgaccctttgctgatgctggggggaggggatctaaatcctcatttatctcttctatgtctcgtattttactgtcactggaggctctgtgggctgtcatagttaattgaccataattagcaatatacttttaaagtgggaaagctgaatgacacttttaagacaatgaacattatcaaaacaaaatgtataatttcttaatttgaataataaattaagcgtttaaatgctatttgtagtcttgatatacagaaataaaataattagggttggtcttttttattttaggttgttttatgttgaatgttctatatcttattagttaatttgtatattttattagtattttggaaatagcatatctgagactgaagagaaattgacaattcacttatttgtggtttttttctcagctattctgagcttatttatttatttgtatgttctaatggctaaacatttacattaaatgttttttttcccaagatt

SEQ ID NO: 9450 - DNA, 2508 bp, Homo sapiens
aatatggttaaaatttgacaagataatcctgaagtttgtaatgacaagtctggagacaatataaatgcctttcagtggggaggatgattttaagtttatttatatgtttactattgaatatgtgcagtctgaaatgaatggtgcatctccatttgtttttcaagatagattaaaaatccaaggacagaagaacattgtgaataataagctcccatttgttggcgatagtaggtggagtgatagaagaggctgtgggtacataaacaggtgatactagtcaagagcaggtcaaatggaaagaatgaagacatgtttggaggctactggaataattccaagtaaaagttgctaaaggacatgtactaggataatgacataatgctttgtaaaaaacaaatctgaaaaaattataggtgaatgtaatgtacacaaagctatctgaacattgcagattatgggaagagaggagtcaaagatgatgattccaggtttcaaatctggtgacaatatgtggttcatttctcatctgccctcccctcctatgtgtactttgctgttccttctcttataagtggggtaatgctaaagttttcttcatcccttgctttccccactctctttcttccacattctctttcttcttcgtggtttcagctgtcatctctttttggatgactcccacatttttacctctggttctgatctctttctcagcctctggtccttcatatcccttgcttgcttgggatgttatcatgttacgatcatggtcttagtgtaatcagacatctgttcaattccagccactgttgggagatatatgtcaccttggaaaagttccttaacttctataagggtcaatgaccccatttataaatgggcatatgaatactacttatctttcaagggtgttaagagcactgaatgaataatgatcttctaaaaacagtacataaactgggctcattctccttggtatgaggtgaaatgaaagaaatttagataatattatatctattcacctatcttctgtctttcttgtttttggcatataatctattatgaaccatcatttattggaaaggactgtctgaagtatagctcagaaggacacatcagaaggtgtggggctcgtccttatggatggagaagtggggctatattggtgtggggaatgaaaggatgagccaggacaaaatgtagaaatagattaaatatgagagtcaaggaagcattaaattatgacttagctgatgtatagaataatatgttaccctttagagatacaggattttttgtagaagtttttgcagaaaagtgaaggaattgatatttattacgttgactgtaccttgtgtggtgcatttgttgcaactgatgaaacgatactgatacatttttatattaatactaaaatacatagtttgcattagggttcatactttgtggtgtacattctgcgggttttgacgaaggtatggtggcatatattcattgttactgtatcatgtagaatagttttagtgccctaaaaatcccctttgcgtcacctctttcattttcccctctccctgaacaccaggcaatcactaatctttttctgtgtccacatttttgccttttccagaatgtcatgtagttagaatcatctagtgtgcggtcttttcagagtggcttctttcacttagtaatatccttttaagattcctcaagtctttccatggcttgatagctaatttctttttattactgaatgatattcctttgtatgacgtaccacaattcatttatccattctcctgctgaaggtcagattgcttctaagttttcatagttatgaaaacttgtattttaagattaaaatctggaagtttttattgatattaggcattcgtttcttagggctgctataataacagagtaccacaaactgggtagcttaaaacaacagaaatttattctttcatagttctggagcctagacatcagaaatcaaggtattagcagggttggcacctgccaaccaagagagctttgagggagaatctattccatacctttctcctagctgctcatgagggttagccatctttgatgttccttggattgtaaatgcatcagtccaatctctgcttccctcttcatggggcattctccctgtttcttcacattgctgtcttcttgtgaggataccagtcatattgaattaggggcccaccctacaccagtatgacctcatcttaactaattatatctgcaacaaccctatttccaaattaggtcacattctaaggcactggtggttagacttcaacaacgttattagagggcacagttcaacccatagcatgaagtgatgctttctagaccattcttctttagatagtcatcctttttgttattgttgaatcatggatggtgatgtaacgttttccagctttggctagttgtggtttcagctgaaaaaccaaaatgtccctgactgtgttatataaaaaaaaaaaaaaa

SEQ ID NO: 9451 - DNA, 1082 bp, Homo sapiens
tcatgttatgatcatggtcttagtgtaatcagacatctgttcaattccagccactgtgggagatatatgtcaccttggaaaagttccttaacttctataagggtcaatgaccccatttataaatgggcatatgaatactacttatctttcaagggtgttaagagcactgaatgaataatgatcttctaaaaacagtacataaactgggctcattctccttggtatgaggtgaaatgaaagaaatttagataatattatatctattcacctatcttctgtctttcttgtttttggcatataatctattatgaaccatcatttattggaaaggactgtctgaagtatagctcagaaggacacatcagaaggtgtggggctcgtccttatggatggagaagtggggctatattggtgtggggaatgaaaggatgagacaggacaaaatgtagaaatagattaaatatgagagtcaaggaagcattaaattatgacttagctgatgtatagaataatatgttaccctttagagatacaggattttttgtagaagtttttgcagaaaagtgaaggaattgatatttattacgttgactgtaccttgtgtggtgcatttgttgcaactgatgaaacgatactgatacatttttatattaatactaaaatacatagtttgcattagggttcatactttgtggtgtacattctgcgggttttgacgaaggtatggtggcatatattcattgttactgtatcatgtagaatagttttagtgccctaaaaatcccctttgcgtcacctctttcattttcccctctccctgaacaccaggcaatcactaatctttttctgtgtccacatttttgccttttccagaatgtcatgtagttagaatcatctagtgtgcggtcttttcagagtggcttctttcacttagtaatatccttttaagattcctcaagtctttccatggcttgatagctaatttctttttattactgaatgatattcctttgtatgacgtaccacaattcatttatccattctcctgctgaaggtcagattgcttctaagttttcatagtt

SEQ ID NO: 9452 - DNA, 2508 bp, Homo sapiens
aatatggttaaaatttgacaagataatcctgaagtttgtaatgacaagtctggagacaatataaatgcctttcagtggggaggatgattttaagtttatttatatgtttactattgaatatgtgcagtctgaaatgaatggtgcatctccatttgtttttcaagatagattaaaaatccaaggacagaagaacattgtgaataataagctcccatttgttggcgatagtaggtggagtgatagaagaggctgtgggtacataaacaggtgatactagtcaagagcaggtcaaatggaaagaatgaagacatgtttggaggctactggaataattccaagtaaaagttgctaaaggacatgtactaggataatgacataatgctttgtaaaaaacaaatctgaaaaaattataggtgaatgtaatgtacacaaagctatctgaacattgcagattatgggaagagaggagtcaaagatgatgattccaggtttcaaatctggtgacaatatgtggttcatttctcatctgccctcccctcctatgtgtactttgctgttccttctcttataagtggggtaatgctaaagttttcttcatcccttgctttccccactctctttcttccacattctctttcttcttcgtggtttcagctgtcatctctttttggatgactcccacatttttacctctggttctgatctctttctcagcctctggtccttcatatcccttgcttgcttgggatgttatcatgttatgatcatggtcttagtgtaatcagacatctgttcaattccagccactgttgggagatatatgtcaccttggaaaagttccttaacttctataagggtcaatgaccccatttataaatgggcatatgaatactacttatctttcaagggtgttaagagcactgaatgaataatgatcttctaaaaacagtacataaactgggctcattctccttggtatgaggtgaaatgaaagaaatttagataatattatatctattcacctatcttctgtctttcttgtttttggcatataatctattatgaaccatcatttattggaaaggactgtctgaagtatagctcagaaggacacatcagaaggtgtggggctcgtccttatggatggagaagtggggctatattggtgtggggaatgaaaggatgagacaggacaaaatgtagaaatagattaaatatgagagtcaaggaagcattaaattatgacttagctgatatatagaataatatgttaccctttagagatacaggattttttgtagaagtttttgcagaaaagtgaaggaattgatatttattacgttgactgtaccttgtgtggtgcatttgttgcaactgatgaaacgatactgatacatttttatattaatactaaaatacatagtttgcattagggttcatactttgtggtgtacattctgcgggttttgacgaaggtatggtggcatatattcattgttactgtatcatgtagaatagttttagtgccctaaaaatcccctttgcgtcacctctttcattttcccctctccctgaacaccaggcaatcactaatctttttctgtgtccacatttttgccttttccagaatgtcatgtagttagaatcatctagtgtgcggtcttttcagagtggcttctttcacttagtaatatccttttaagattcctcaagtctttccatggcttgatagctaatttctttttattactgaatgatattcctttgtatgacgtaccacaattcatttatccattctcctgctgaaggtcagattgcttctaagttttcatagttatgaaaacttgtattttaagattaaaatctggaagtttttattgatattaggcattcgtttcttagggctgctataataacagagtaccacaaactgggtagcttaaaacaacagaaatttattctttcatagttctggagcctagacatcagaaatcaaggtgttagcagggttggcacctgccaaccaagagagctttgagggagaatctattccatacctttctcctagctgctcatgagggttagccatctttgatgttccttggattgtaaatgcatcagtccaatctctgcttccctcttcatggggcattctccctgtttcttcacattgctgtcttcttgtgaggataccagtcatattgaattaggggcccaccctacaccagtatgacctcatcttaactaattatatctgcaacaaccctatttccaaattaggtcacattctaaggcactggtggttagacttcaacaacgttattagagggcacagttcaacccatagcatgaagtgatgctttctagaccattcttctttagatagtcatcctttttgttattgttgaatcatggatggtgatgtaacgttttccagctttggctagttgtggtttcagctgaaaaaccaaaatgtccctgactgtgttatataaaaaaaaaaaaaaa

SEQ ID NO: 9453 - DNA, 364 bp, Homo sapiens
attaaaaacagaagaaatccgaaaaaaaaactgagatctacaatctcacaaagaaataaaagaatatgaaattgctactattcaacgattagttttaccttaaaaacggcagctttatatggctaatcttaatgaattaaaacaactttgagatattatttttatcctttcatactggcaaagattaaaaaggtttgttaacatcttgaatcagcaaaactctggagaaacaggcacattaagggcagaagacaaacttgtaccatccctatgaaaggtgattttggcaattaactgttaaatgacaaatctaaataccctttggcctagctattccactgctagaagtttattctacagatat

SEQ ID NO: 9454 - DNA, 105 bp, Homo sapiens
aggctgagacacgagaattacttgaactcaggaggtggaggttgcagtgagccaagatggcaccactgcactccagcctggacaacagagcaagactctgtctca

SEQ ID NO: 9455 - DNA, 210 bp, Homo sapiens
atgtgaaaaagcagtgagtcctgtggaacattgggatatgtgacatagggaggactggaggggacttggcctctgggggcctctgtttctccaatgagagacaatttgagctgttatctgaacagtcagtcaatactaatcaacttttttaaatgcacacatcttttaacccaacagttctacttttaggagcttattcaacagttacac

SEQ ID NO: 9456 - DNA, 308 bp, Homo sapiens
tggaagcaggaaaacttgcctttcttgtgggaagcaagtaaaactccaaaaaaaaaaaaaataaataagagggagttgtacagcaaaataaactttagatctcaaccaaactttgggagagcagggattctctggaaggagtgctcccaggcctcagcaaactattcataaagttagcttatgctgataccaaacaccagtaaaagatttgtcaaagttcaagtgttcctccatgcagagtccctctgtggttaccaaaatgttaaccccagtaatttgagacaagtcttagttaatttagaaaattt

SEQ ID NO: 9457 - DNA, 247 bp, Homo sapiens
tgagagtacaggaggatgtttattttaaggtgtgcaccggctgagtggattcaaatccaaaaagctgagcattaaacaaagacagagcagggtttttataagtggacttacaaagtaaaacaaagcagttaatcatatagtgcataacttgtggccttgcatagctggtggccttggagctgtgtcaaaagaaaatcaagaactggctaaatacagacatttgtaaaacataatcatgcttaagaag

SEQ ID NO: 9458 - DNA, 374 bp, Homo sapiens
ctaatataaatcctaagaactcagacacagtcgattgagaacagagcaattcccttttccctcgttttaaagaatcatgtacataaaaggtttgaacactttgaactttgaataagtttgaacacttcatgccttttggccactagcatgctgttattttatgtcgcaagacgagcaacaatgaggcatccacagctcccaggcgtcaagactgaaggacactctgcctctcccttagggtttgagatctctgagtcagggaacactgagtgaaagcaaagctgaaatattactggggatcttcagtcttggggaaaagagttataggtgttggattaacatcgagtgaaagcaagctgaaatattactgggga

SEQ ID NO: 9459 - DNA, 352 bp, Homo sapiens
catgtacctgtgacaatatagtttcttgaccacatttatttatcgtgagttattatgtagtgacagatattaacttaaggaatgacatgcttaatatgtttgccacaattccatacattgatgaggatgctgcttttctgactaaggagaatttttgttcatctaagaacatctcccctggagagtgagagcccaagtcggctctgccttaaattcatgatctgattttatgagggtcacccagaacccactgtgcccttaacactgaagcctaggagaagcctgggctccttcaaggggaagaaagatgggcctgaccatcctatggtgggtgataacaataaagtgctca

SEQ ID NO: 9460 - DNA, 518 bp, Homo sapiens
aacatatgttgggaatttggatggggaaggatgtagaacagattgctttgagacagaaaataatgcaaaaagatgaagggaagtgaatacacagtaaaaatatgttagacaccaaagattagcttcacttacactgcagtttttgtgggcactttgacacttagaactcacctggctgttgctgtacagcaagagaccatgtgaactgaagcattggttagacctatacatttctacaaaccgctctagccctagttgaacttgggaaaataaatatctgtatgaaaaagttgtctagatctgttacacaattactatcttgtttaattgtagaatgcatgaaattggttgtaaaatggcctggttaagagtctcatgtcagggccaggcatagtggctcatgcctgtcatcccagcactttgagaggctgagatgggaggatgagatgggagaggctgagatgggaggccaggagttcaagaccagcccaggcaacaaggcaagaccccagctctac

SEQ ID NO: 9461 - DNA, 396 bp, Homo sapiens
aaattatcagaaagaatctatggaggttgaaaaatgtaactaatagtgtctcattctctattagtaatgtgttattctcatttatactgttgaaaaccgtttacagaaatatttaatatgattctctgcctagagaatgagaagcttgcatctttagatcaaagatgaagcaaacaagagtttcctattgtgtgcagttttagaatttcttgcctcatggcttcatggcaggttgcagtttttcaatccttgtttgcaaaatcttgaacccatcatagtgtacttggaaataatatgcatacatcgtaattttcctgtatataattagaatttttactggggtagaacttttcaagtacctcctttgagaatttccaggaatgattattaaccttt

SEQ ID NO: 9462 - DNA, 667 bp, Homo sapiens
cagaatccacagaaaggaaccacaggactggccacagcagtacagggaggcaatggaagatgaggccaatagagctgatgttgggcacaggcaaatctttgttcacaacttcaggtagaggaatgcatggcagtcagaggggccttgcaaggaggggcctttgagcctcagttctcatgtattggggggtgggggtgggtacatattgtatttggtatttgtgttccagttatatttatgtcttttcatatttagttctggtgtggtgtctggaaatgtttcaactgttttaatatattgtctgattgggtaaatgtgattgaccacttgctgtctctgttgtattttggtatgagttttgatagctctataaaatgttttggaaatctttccatcttgttgcattatctagaaaagaatatagcatatagctatagatataggcttttccttgaaagcttgaaaaaaattcgccagtaaaataatctagcttaaagtgataaactaacaaacaaatataacaacaactgaaaaggcactctaaattgtggctggcttccctttctgtctgctattgtatgaagaatactgatgtttacctgtatttgctttgctgtactaaaatgtaatgaaaaataaaagattaataaatgaaacataatgctaa

SEQ ID NO: 9463 - DNA, 139 bp, Homo sapiens
ttttttttttttgagacagagtctcgctctgttgcccaggctagagtgcagtggcatgatctcagctcactgcaacctctgcctcctgggttcaagaaattctcctgcctcagcctccagagtagctgggactacaggc

SEQ ID NO: 9464 - DNA, 1322 bp, Homo sapiens
gaggtcctgagagactgtgagagccccaactccattagtattatgggcctcaatacttcccgggttgcaattaccctgaagccccaagaccctatggaacagaacgtagctgagctgttgcagttcctgctggtgaaggatcagagcaagtaccctatccgggagtctgaaatgcgggaatatattgttaaagaatatcgcaaccagtttcctgagatactcaggcgagcagcagcccacctggagtgcatttttaggtttgaattgagagaacttgaccctgaggcacacacctacattctgttaaacaaactgggacctgtgccctttgaagggttagaagagagcccaaatgggccaaagatgggcctcctgatgatgattctaggccaaatattcctgaatggcaaccaagccaaggaggctgagatttgggaaatgctctggaggatgggggtgcagcgggaaaggaggctttccatttttgggaacccaaagagacttctgtctgtggagtttgtatggcagcgttacttagactacaggccagtaactgactgtaaaccagtggagtatgagtttttctggggcccaagatcccacctagaaaccaccaagatgaaaattctgaagttcatggcgaaaatatataacaaagatcctatggattggccagagaaatacaacgaagctctggaagaagatgctgccagagcctttgctgagggttggcaggctctccctcactttaggaggcccttttttgaggaagctgctgcagaggtaccatcccctgattcagaggtttccagctattcctcaaaatatgccccacattcatggcctgagtcaagattggagagcaaggcaaggaagctggtgcagttatttctgcttatggattcaactaagctgcctataccaaagaaaggaattctgtactacattggccgagagtgcagcaaagtgttccctgacctcctgaatcgtgctgcccgcaccctgaaccatgtctatgggacagaactagtggtacttgatcccaggaatcactcctatactctgtacaaccgaagggagatggaagaaactgaggagatcgtagacagtccaaacaggcctggcaacaactttttgatgcaggtcctaagcttcatctttattatgggcaaccatgccagggagtctgcagtctgggcctttctgcggggcttaggggttcaagctgggagaaagcatgtgattacctgcagatacttgagtcagcgctatatagacagtttacgggttcctgacagtgatccagtgcaatatgagtttgt

SEQ ID NO: 9465 - DNA, 493 bp, Homo sapiens; identical to SEQ ID NO: 2243

SEQ ID NO: 9466 - DNA, 493 bp, Homo sapiens; identical to SEQ ID NO: 2243

SEQ ID NO: 9467 - DNA, 493 bp, Homo sapiens; identical to SEQ ID NO: 2243

SEQ ID NO: 9468 - DNA, 480 bp, Homo sapiens
gtatataagatgtaacaccctcagaagggttaagttttcacctgagttttcatcttcaaccaagtcattgggatggtgatctagaaggacctctaagatctagaaggataaagatctggtccaaggagtacaaatatgtaatggatctaccaccagtgtcccctgctgtactcttggcagacatcactaatccatcacagcatgccttcccactgatcacagatgtagcttcagggcattcgagttaccacttaagatggatatgagtgaccctcccttatctcactcttctcctttcacagaagcaggatctgaggcccagagagggaagctataataaactcccctaagtcaggtcccttctaagaggcagaggtaggtttagaactcaggcctcagaaacttccagaagccaagccatttgggctgtagttggtggacagtctatcagcgctctgcagatgtttcttctcagttagg

SEQ ID NO: 9469 - DNA, 480 bp, Homo sapiens; identical to SEQ ID NO: 9468

SEQ ID NO: 9470 - DNA, 480 bp, Homo sapiens; identical to SEQ ID NO: 9468

SEQ ID NO: 9471 - DNA, 593 bp, Homo sapiens
gcctatcagcctcctgtgtcttaagcagagtggagacgggggtggatccaggcgcaccagtaagttgtactggagttaagcagtaagctttctgggcagaggaaagtgcgggcgtaaaggtccaaggcttgaaaaggcgcagcagcacctttttctctttggggaaagaagcggtggctgcggggaataaaccaactctgtagaggggcggggccgtgggaaagcggtggaacggggcaggaaggctgggcgtcatttgggaggcaaggaacttttctgtaaggcatagcgccctttctgcacgggacctgtccaggttccacgccacaggcttctgcagttcctgcaaactgttcccatcccgccccgcgttgcacgtcgggatttggagttcgcgatgctgagagctgtttccacgtggcgattccgacttgacccgtcgtgctccggcgcccgcctagggggaccgaggagtttgtcatttcttgcctcgttagggtgcggaacgaaaaccatttgatttatcctagaaaaggaaaggctgaagccaactaagtaaaagttttccattaaatgaatgcacgttgtagaaa

SEQ ID NO: 9472 - DNA, 593 bp, Homo sapiens; identical to SEQ ID NO: 9471

SEQ ID NO: 9473 - DNA, 593 bp, Homo sapiens; identical to SEQ ID NO: 9471

SEQ ID NO: 9474 - DNA, 572 bp, Homo sapiens
ctaaatttatatgtctagaactagagctagagtgtatgcctacatacacacacacacacacccatacatatatattcaaacataatatatgtatatccacatgtattcaaacacagaattatgtttagataattatggttatatgctggtatgccagagccagactgcctggcttcggttccaggccctagttggatagctttgggctactcagcctctttatgcctggacttcttcatctttgaaatgggataataataatacttatcccataaagttattgtgagaattaaatgaaataatatatgaaaagcccttagaacaggcattgacacattgtgaaggtaatgtattagctattttgatgattatgcattttgtctgcaacttgatttttatttaacatatgtgggaaagtagacaaacatagccattttcaatgattccataatattccatagcacgagtataccattgtttatcgaaccatttctctcttgagaaacattgcagattttttttgcagtttctacgattacaaataatgctgcaataaacatctttctacatat

SEQ ID NO: 9475 - DNA, 2898 bp, Homo sapiens
taaagagctcacctgaggagaacagatgctgatatgacaatccagtaaatcatatcgaacctccactccatcactactgccctgaaacaggctctgtggggagaagttacaaggactttaatttgtttctcccactgaagcctgtcacttccccatctcaaaggaccccagatatccacacaccagaggaaatgcaaaacgccggagaccctgggtcttctgaaaatggagaaccctgtttgtggtactatccacagccactaccacattgtcttcgtggcaacgagttgggtggctgggggatgactccttgaagatcatcgtcatcacagaaacatttttttctagcttccgtctcaacctataaaggacaggagggacagaactgcaaaaaagcagtctcagggctctgctggtctttaacccttgttcctgtcattttcccatcctgacctgtgttcctcaagggctctggtgatattgatgtttgagatgacatccccatacaccagaagaaagtcagagcgcaccaaagccttggcatcaacatcacggaggacatctcccagtgatcgatagagctctgatgtaattattcgaaccacattgagagatgtagggcggcaccactttgacttcctaaaggaagggagggtgaggggaatgagtgtatcaagcataaagatcatttgagccttccccatttttcaccccctttcagcactcacagtccttctcgatggcttttttgggttcttgccagcgtcttcaacttcaaagagtattatgaactataatgaatgctttcagcatcctgtgtcaccagtcttgttttatgggttaggaaacatggttatttcctctccataccttgaccccttgtccctaaacatcaatttgaactcaaaatcctgctgaagcctagggtacacaaagtagcctgggaacacgcttcacgtcagctttccccttctgcaatccatataacatttaggaactgtctgatggagaccatgctaatgtcctagtctttacatcctggacttccataagcaatgcgattccctagttttcaagatttcaacaaacatgtaagtgctcactatatgcttgggactgagctaggcagtgggaatacaaagatgacaaggagctcatttatatccttgaaggtgagaacaaacaagatttagaaactcagtgggaaaacaaagatgttatcattgtaacttccatactgaagccattaaataaaagcaaagtccactggcaccaaactttataatgagattcagaaaaaacccaagtttattctttaatctttgtcacagaaaacccaagacagacagatacaaagtttcagctgctcacctcctgataagtgtagaaaatacccttagaacttacaatgacatctaagtagacacatttttcccctctcacatttccccttagttacattcatcctgaaaaaactggaaaaagatggcgaaacatggaaagaaaagttgcagggccttacagtaaatgttctttgatttgagcagctttccagcaacaaaagacaaatgtttcctgtacacctgtggcagtcaggaattccagagtgtagtcaattaatgccacattggccaggggcaagaggacctgaaggatacaagatgaaaaaaaacttgaggtctcgaatccctttgggtaccccactgcaacaattttcactcctctattcgtatttccaaacagtgtaattttgctgtatctttccaattcaaagataaacaggttcctgcctttgatgttcatgccatgctctaagcctgagtctgagacattgcaatttggggatggtaagtacagaatctatgtgccttgtatcagacacagagctgtgacagaatggcagttcactgctggcaaaggataatactggaaatcaatcatatttccataaatttaagcattgctaaggccttcttccccataagatttccttccttgatccctttctaagtgtcagaggttagccatctcccgtcacttgtcaaaaatgaacagccattaggctttttcgagggaattagagaggattttccttaaatccaatgcagttccctctttctgaactgactgctgaacgacccagctgagtccaataccccattgtctagacaactcgggggctgatggcaatcaaccactaaacccattttgtcctttcgacagatagcaccggctatcattagaacctggaaggaaaaaaaaaatacactgcctgagatctagcccgctctttttaaggcatattaccgccctttcagaggcaaaaggtcgtttcttttcacctaagcaaccgtcatcggcaaggttaaaagcggcgcagcctcttctaggggcactgaatccccgcgtgaaggcttctctcaagcgctgtttctacatttagctctcttcattcctttcaaacccgaggtggacagcattacgaatgcccaaatctgccggccactaacttggtcagcagtcatcagggtttagacagtccctctgcatccggttttaggataacagcatagacgcaggtccttcaagggcatgctgttgtagttagccgaaatgagaacttgctccagccctgccacccttcctgccctctggctgctcgcgtgcgcggcgctcacccgaggctggtccttggagatggggaagaagcggcgatcgaagctatcggccaccagaactgcttgtaggggcggcggcggttcctcctccgcccctctggctcccccgccaccgctgcctcccggccccgcgccgctgcgcttgttagcccgactaaccaccacaccaggcggcgccactacaggggccgccatcttcttctctcacggtcaccacttc

SEQ ID NO: 9476 - DNA, 2898 bp, Homo sapiens; identical to SEQ ID NO: 9475

SEQ ID NO: 9477 - DNA, 453 bp, Homo sapiens
ctaaatttatatgtctagaactagagctagagtgtatgcctacatacacacacacacacacccatacatatatattcaaacataatatatgtatatccacatgtattcaaacacagaattatgtttagataattatggttatatgctggtatgccagagccagactgcctggcttcggttccaggccctagttggatagctttgggctactcagcctctttatgcctggacttcttcatctttgaaatgggataataataatacttatcccataaagttattgtgagaattaaatgaaataatatatgaaaagcccttagaacaggcattgacacattgtgaaggtaatgtattagctattttgatgattatgcattttgtctgcaacttgatttttatttaacatatgtgggaaagtagacaaacatagccattttcaatgattccataata

SEQ ID NO: 9478 - DNA, 572 bp, Homo sapiens; identical to SEQ ID NO: 9474

SEQ ID NO: 9479 - DNA, 31140 bp, Homo sapiens
ggtgctcgtggtggcaaagaagtctcttgcagaggagcagtatcaggactttgaagtaagttgttctgggacctttccattgcctttgcagccccacctgcctcccagtcactccttccaccatccctcatcctatgcgagccattctgatgtcatttctgggcacactgggttcactgttgttgaaggcctttgcacttgccgttctgtctgcctggaactctcttcacccacagagccccatggcccatttcctcgcttcttttgggtctcagctcaaaagccacgtcctccaagaagtcttcctggaccacctgtctaaggctccttctcactttccatccatcataccatttcactttgttcattgcatttgtcactgtcatcgcgtgctaccatttggggccaaaaaatatgtctaggagttgaatctggagaggccagaagaatataaacttgaccctgttcatatatttttttttaacattcatcttatccatctcctttcgggaataaaatatttttgaagacagggactttacaagtctggtttgttcttcttattcttgttcttcttcttcttttttttttttttttgagacagagtttcgctcttgtcgcccaggctggagtgcagtggtgtgatcttggctcactgtaacctccgcctcccaggttcaagggatccttctgcctcggcctctggagtagctgggattacagttgcccgtcaccatgcccggctaatttttgtatttttaatagagatggggtttcaccatattggccaggctggtctcgaactcctgacctcaggtgatccaccagccttggcctcccaaagtgcagggattacaggtgtgagccactgtgcctggcctggtttattcttatatccttagtagttaaagatagtccttggcatatggtatgccttcgggaaaatttggcataaatcattctcttggagccctaatttcttttctctttttttttttgcacatttattctgagacggggtctcgctatgctgcccaggctggtctcaaactcctggcctcaagccatcctcctgcctcaacctccttgtagctgggattacaagtgtgagccaccgcatctggttcggctccctaatttcttttcttttttttttttttatttgtgacagagctttactcttgttgcccagactgtagtgccaatggcacgatctctgctcactgcaacctctgcctcctggattcaagcgattctcctccctcaagcccccaagtagctgggattacaggcatgtgccaccatgcctggctaatttttgtatttttagtagagacacggttttgccatgttggccaggctggtctcaaactcctgacctcaggtgatctgcctgcctcggtcttctagagtgctgggattacaggcatgaaccaccacacccggcctccctaatttctttaagctgtaaaaatgttggggttgaaccagattattgacttgcttattgtcatcccatcccatagattgtgtgttccctgaggggagggtcctcgtcttgtttactgccgtgtctctggtgcctggcctaaatccagcgtgcaggaatgcaagggagggaggcgggacacgcttcgtggggccctgccctgctccatgcggggaaactgcctggatctctctttaatatatttgagttctttgtaagccattatttaacaagcattttagccccgatcaatgctacctgccttttaattttaaaagcatgtgcttcaagcgggcccattagatgactggttttcctccaggtttttgctaacatgataaagagaagaagcggcagtttgggttgatggtcttcagaagctcgacttggtctttagaaaacctggtgacccacagtttggcttacaaagtgcatgttgtgtatgggagaacttactgtttttttgagatcttggttgtgcccgtccctgagacaacccaatgaggttggtgctgttattgccatttcgtggccacggctcagagaggttaagtgacttgctggaagtctcccagcaggtgagtgtggagtgtagggtgggactcaggtctgtgcagtgtctacatggaggacttgtgaggaagctggaagcctatgtcacccctgtggggtccagctcacctgctggggtcccccaccccgtgtggtggggatcgggtgtggcccttccactcttggcactggccagtcagcctggcctctcctcaccctaagcagtgactgcatctgctggtgtgtcccaggcccgctacgtccaggccaagctgagtgtgcacgaccgctccctcaaagtggccacggtgatcgagagcctggagatggagatggaactgctgtgcctgacgggcgtggaggaccagctgcaggcagatgtgcggcccacgctggagaccctgaggaatgctggcatcaaggtagggcgggctgcccgcagggaagggcactccagggcaatgccagttatccctcagcagtgcagggagatcacagggggaaagggtgggaggagcagcagaggacaccaggagtgccttatctgcaatgggccacaggcactgtttctgcccctccaactgtgattttttttttttttttttttttgagacggggtctcgctgtgtcgcccaggctggagtgcagtggcatgatcttggttaactgcaacctctgcttcctggattcaagcaattcttgtgcctcatcctccctagtagctgggattacaggcacgtaccaccacgcctggctaatttttatatttttgtagatagagggtttcaccatgttggccaggctggttttgaactcctgacctcaggtgatctgtctgtctcagtctccgaagtgctaggattacaggtgtgagccactgtgcctggccctccagccctgattttggaagacatcttgtgtagcgtttgcctttactgtaccgatgactcccctgactccactgggctccctggtgctcaaggccgagcagtgtccagcgtgcatggctgctgattaaattctagttgagtgatcagcacgccggtctgtctgccgtgtggccaagtgagtgagtgaccacccagcagagtgaccgtcagcgccatcacactgtcgtattagcattttgcactctaccagtggcgacccaaaaaaaaatactaggagttgaatctggaggggccagcagagggcgcgtgaggacctggtcctcagtggaccaagggaggtgtgaacaaccaaactcattggcctggagctcctggaaacgtgtgcctgccaccggcctccactcaaaagtggctctctgctgcatcctggggcctgtcctttcagcagggccatggcaggaggacaggttagatgccaggcaacattcaggcccactggggactcccacccctgcgtgcctgtttccttgtaaacccaattctgtcgcttgcatttggctcacaggcctggttcgtcataaggaaatcaccaacgggaccttgcttccggaagtctggccgctggaggcccatttctgcttcatcgtggggtctgcagtggggccctggccattcctaagacttctggagtttccattttctgcttccatctttgtcctggggtttttctccttctcaaaactatgttagcccaagacgagatattttattcacagagtgtgcatgtgacttaccattctagtttcctgttagatgacaggaggaggggagtgcctgggatggggcaggttagttggtaattaaagtctaagatacgatcttgcacaggaaattttcttttcttttctttctttctttctttttttttttttttttgagacagagtttcactctgtcgcccaggctggagtgcagtggtgcgatctcggttcactgcaacctccacttcctgggttcaagagattctcctgcctcagcctcccaagtagctgggattataggtatgtgccaccatacctggataattttgtatatttagatatttagtagagatgggttttctccatgttggtcaggctggtctcgaactcctgacctcaagtggtccacctgcctcggcctcccaaagtgttgggattataggcgtaagccaccgcgcctggctgcacaggatattttctaaatcagccccttgtatggatgtagaaactgaggctaagtgaggcgtctccattccccaggttctcacattgggaagcagcagagccgggactggagctggggtcttggacccttcctgtagtaccttgccttcatcacagcatgggacattagccatgtcgtgcacctgatcgttcttttcatgcttttctggaacttgaacttcccaattccttccccagtgtttgttctcttacctcaaaccctgagaactatgactaaacgaagctcaccaaaaagaatattatttttaggacaggcgggatattgagggaaaacagacccagctaggggagagggcccgggaggctcagccctgagaggtgcccggtgccttccttctgcccgtctcactgcctgggtttccatcctacctctccctttacttcttctgtgacccttggcaaatgactgaagctcttagcgcttccatttccagcctccagaagctgtcatgaaggtaacagagagctcagcgtgggtgctgggcacgtagtggacactcaggagacaattgtcatgatcttctttcctatactttccctcctatccagattttctttgaccgatagccccaagactgctcccagctgggagcaaagagaacaaaagggttaatgaggtaaaatcacagagcaggaagcacattccatgaggactctaaagacccggattctgggcctggttaggacaagaggtagctgtgtggtttggggcaagtcatctaccctctctgagcccacagcagagaaatgcagtgtgagctaatgcacgatacggaagaacctgactcatttacggtcagcgttttataagctgagttaaaccccagaagggtctgtcttgctcatccaactacatagaaagtccacagcgtcaaaaatgagtgtttcctgtaggacagggaagtgccccctcacctgtacagcctttcccttcttttaggatatttatcactttaagaaaaatcctcagaaggggaattatgcggtccaaggaccgagcttcatagtacctcctgtagtgtgtggccaaatggccctttctagaagcatctgccagtttttgctgctaccagcagtggttgcttggagtcccagagcccttcagccagggcgcttgctgtgttgtgttggggacagcatgagtcggcaggaggtaaacggaacataccaagttcagctccatgttgttggaaactcagctgttgcagatgacaggccggcctcaaaaactaataaacaggacctctgtcacgccatgatttcaggtttggatgctgacaggggacaagctggagacagctacgtgcacagcgaagaatgcacatctggtgaccagaaaccaagacatccacgtttttcggctggtaaagtgtcctctgcgttagggccatgtggggatgatgttcgatttgtcctataacctcctaaccttgagtgggccccttaagaagggaggggcagcatgtgaattacctagggtggggagcatcaaccacggttgctttggatgggatgattaatgacccaggcgccggctggagagtttcttccagtagtggtttgggagtacctccttctagccctgtgctaatgccatgctcttaaccttttgggggtcgtggtccctttgagaagctgatgaaagtcaggcactccccccgaaagatgcagatccactcatacacatgaaattatgcatgggattcctgggatttcacggaacccctgaaagtcaagtccttggataagaaagaaattccaggccacagatactggtccatctgccctcctgagaggggaagcatttaggaccattgaggagccttttgaaggaggtgaactggatgggcaaatgagaaatcgcccgcccttgtggcagacattgaccaagacaatgtgcacatcaggaactgctgccagtgaggactgtgctaggctttattgcattggggaggtagggggaccgggtcctctttggggcaggatatagtaatcccactgatctgaaaccagagccacgatggcaaaccactggagggtctctagatgtttgggggtctcgccctcaccccgcctttggtccatagcacacagaagcttcaaaaaatccagggatttttgaaatagcatagtattgtatagaggcaggtacagtcagttctcatcattcacagattctttgtgaattctcctcctcccaaaatttatctgtgacctccaaatcagtactcttgatattttcactgtcatacgtagagtggcttaaatctctccttttttttttttttttgagatggggccttgctcttatcacccaggctggggtgcagtggtgcaatcttggctcactgcaacctccgcctcctgggttcaagcaattcttctgcctcagcctcccaagtagctgggattacaggcgcctgccaccacacctggctaatttttgtgtttttagtagagacgggtttcaccattttggccaggctggtctcgaacccctgacctcaggtgattctcccacttcagcctcccaaagtgctgggattacaggcgtgagccaccgcgcctggcctagagtggcttaaaattttagctgcctgagacacacattcccacctgaggctgaacaagctcacgcactcccccctcctttcagccccgtgtgacgaaccagtgtcgtttttgcagtccatcgagtatccggttttttgcatttttatgctttttgttggcagtttgtcgtttaaaatggccgcacacagcgcttctttgctggcttgttttctggaacttgaacttcccaacatccataagtcacatcaacaggaaggctgttgatgtgacttatggagcgaatgcgtgtgttagatgagcttcctgcaggcatgagttacagaactggtggctgtgagctcaatgttaatgaatccaggtgtctttaagtagaaacgcacataaaataaggttatatatttatgaagatattgcaaccaggggcaaaaacctaaccctgtatttcccctacaggtgatggtttagtatttgctaattcagtgttcacagtgactttagaaaacatagctactatgaataatgagaattgactgtctgttctagaattcagggattgcaaactaatgacctatgtgctagccacctgtttttctaaacagcaggtattttgttttattggagtgtagacagaccggctcgtttgcatatggtgtacgactgcttttggattacaacggcagagctgagtggttgtgatggagaccatgtggtcctcaaagcctacaatagttaacatctggtcctttacagaaaagtggcccagtccctgctaggtgcctggctctgcatacctgggctacagcatactagccatgtgcctttagtcaggttagcagatgtcaccatgcttcagtttccttaggtgcaaaatagagcttcttctttttggcacctcatagagccgttgtgagaaataaatgagaaaaatccaccgaatgcatcatccaacacctggccgaaaatgaaagtacaggctttttttttttttttttttgagacagagttttgctcttgttgcccaggctggagtgcaatggcatgatctcggctcaccgcaacctccacctcccaggttcaagcgattctcctgcctcagccttcccaagtagctgggattataggcatgtgccaccaagcccggctaattttgtatttttagtagagatggggtttctccatgtgggtcaggctggtcttgaactcctgacctcaggtgatccgcccacctcagcctcccaaggtgctgagattacaggtgtgagccaccgtacctggccccccccccccttttttttttttaaaagacgagtcttgctctgttgcccatactgccagtgcagtggcatgatctcggctcactgcagcctctgcctcctgggttcaagtgattctcctgcctcagcctcccaagtagctagaattacaggcacccaccaccatgcccagctaattttctatttttagtagagagtgggtttcaccatgttggcaaggctggtctcaaactcctgacttcaagtgatctgcccgcctcagcctcccaaagtgctgggattacaggcatgagccactgcgcttggccagtacaggcatttttagtcctgggggaaattgtaggtggtggttggcacatgggctctcttgattcctgcagagtcaaccaataggattccatttggtgctgcctctggtggcaggggaggggagggacccttggctggggtggccgttgtcttcatgtgggctcctggaagccactgtttgttgttctatcatgtccggagagcaatgcctccttccccatctctgttcccttccaggtgaccaaccgcggggaggctcacctcgagctgaacgccttccgcaggaagcatgattgtgccctggtcatctcgggagactccctggaggtgagcttggggacccctgagagccagtcctcccagcagcctgggtcttacccggcttcggcaggggcactgcaggctcggcagcgacctccaccaacgcaccacctctccctccaccaacgcaccacctctccctccaccctgcaggtttgcctcaagtactatgagtacgagttcatggagctggcctgccagtgcccggccgtagtctgctgccgatgtgcccccacccagaaggcccagatcgtgcgcctgcttcaggagcgcacgggcaagctcacctgtgcagtaggtaggcgaggctcaggctgtgctgctggccctggcctgccggtgcaccaggctccctttccctaaggatatttggacactgctgctctttcttcaaattccccaggcccctttgttcaggtcatgatttttctccacctctcagactttggctctttttgttattatttttaatatttcccttggagagtagataagcacgtgccaggcctctactcctttgccagtggctcaagagtgcagccttccagggggtggagaccacacactgtggggttggatctgggttcaaatctttccactggcctttgccagtgggtgccccaggtggcttctttcacccatctgagcctcggtttgcttatggtagaatgggaataataattgtggcttccttaaatggtgtcatgaagactaaaaggggtcacctttttttttttttttaagacggagtcacactctgttgcccagcgggagtgcaatgacacaatctcagctcattgcaacctccgtctcccgggttcaagtgattctcctgcctcagcctcccgagttgctgggactgcaggcgtgcaccaccacgtgtggctaatttttgtatttttagtagaaacggggtttctccatgttggccaggctggtctcgaactcctgacctcaggtgatctgcctgcctcagcctcctaaagtgctgagattatagtcgtgagccactgctcagcctaaaaaggatcacctttaaaatgtgcttgccacgctgcatggaaagcgtccagtaagagcactacaagttgctgctgatggtaatcctggggtatcccggcctccgaggaggacaggtggtggtaaatgcctatgtggacacagtcccactgctgctgctcagtgccgggacccttggcaagccgcctgggctctctgacactcagccactctgcctgtgaaacaggatcttggtagtcaaggggttggagagatggaatggacggggcaggccaggcactcagcaagcgctccgtgaaagacgagagtgcggtaaagacaagcatacattcttggttaaggtaagaatgaaacatcttttctctctggtctgtgtggctcgcaggggacggaggcaatgacgtcagcatgattcaggaatctgactgcggcgtgggagtggaaggaaaggtgagagtgtttccctctgctcggctccacttgctgtagtttcttggttctttttccctcaaagacacagctttaagccttctggaaattccagataaagaatgataaaacataaggaatcatgtgtcacagttaccttgtgtcactgggaagatagaggtctgtattgctacatcttacagacagatgaatgttggctttttgtttgccacgacctgaatttaaaaaaagaaaaagtgtttctaggcccggtgtggtggctcacgcctgtaatcccagcactttgggaggctgaggtgggtggatcatcacttgaggtcaggagtttgaggccagcctggccaacttagagaaaccctgtctctactgaaaatacaaaaattagctgggcatggtggtgggtgcctgtaatcacagctacttgggaggctgagataggagaatcgcctgaacccgggaggcagaggttgcagtaagccgagattgcgccactgcactccagcctgggcaacagaacaagactctgtctcaaaaaaaaaaaaaaaaaaagtttctctatattcttagggtatggtaagtatacttcagacttctctgggacagtcagcgttgtcagtaaaagcattagttatcctgctctgtgctgatctcttgggcgctatggaagagtgtggcttagttcacttctcaccaaaaggccttggcaggtataatttttaaaagttggtgtgttaggaaatattttttctgtctttttctccttgccaattgtgcgcttgcctcttacagtttactcggccctaatttgtgacctctaaatgacaagaggcaagaagatgggtcaccgagtttgttaggactgtgtgtgaagggctggaagcggtggctcacgcctgtaatcccagcagtttgggaggctgaggcgggaggatcacttgagctcaggagttcgagaccagcctggcaaacatggtgaaaccccgtctctactaaaaatacaaaaattagtgagatgtggtggcacatgcctgtaatcccagctactcaggaggctgaggcaggagaatcacttgaacccaggaggtggaggttgcagtgaatcgagattgagccactgtactcttgcctaggtgaaagagcaaaactccatctcaaaaaaaaagaaaagaagtgtgtttgaagtataggagtgccaaggcccggagggggcagcagagatgctcccctgtccatcctgttgcatagcttcatgactttggctgacccatagggctttttttccccctctttaccaccctttctggttctctggttctcagcaagatgacgatgatttaaagttgtagagtgaaatgatttttgaatgagatatatcagaagtctgtatagattccctgaatacagtttttaagaagcatgtttttgagtttaatggcattctctaccagttcttaaaaaattaaagcattttcccttctattaaaaatggtattctggttcctttgtttcttgggatataaaatagtgctcactataaaaaattaaaagaatctaggccaggttcagtggctcacacctgtattcccagcacattgggaggccgaggtgggcagattacctgaggtcaggagttcaagaccagcctggccaacatggtgagaccccgtctctactaaaaatacaaaaattagccaggcatggcagtgggtgcctgtaattctagctactcgggaggctgaggcaggagaattgcttgaacccgggaggcagaggttgcagtgagcggagattgtgccactgcactctgggtgacagagtgagactgtctcaaaaatatatataacataaaataaaagaatctagaagtaaaacgcatcttttcttttaggtaactgcatcaaatgagtaacactggttattctctcaacattttttctgtgtgtatattactggttatgagtgtgtatatatttgctatctatacaaatatcttacacatgtatatatatgtaattttcatgtatttttttaaattgaaaacacactgtacattttgttgtgcagcttacttaaatctgctacatcatggatttgttcctacatgagagcatacagagccatcacttcttactctgactctacctttttattttgaaaaatgtcaaaagttgaaatacaacaatggaaaagttgaaatagaacagtgagcattcatctacccttcactttggccaattgttactatttgctacattatctttctttctttgaatcagtagaaagtaaattgtatgtaatgttacccctaaatatttcagctggatctctttagaacaaggacattctcccacacaaagaaagtaacatcataaccacgccccaccccccgccccgcccccccaggcacccccaccccatgtaacatcgatacaatgctactatataatattcatgctcaaccccgtgttaacattgatatataatggtactggataatattcatgctcaaattcccccatctgtcctctgagtgtcttcacagcttaagtaataaaagctccaggaaggattgcaaatcacatttattagcatgtcctcatgtttctgatcttctttattgtagaacacgtttctctctttttgtttggtttggttagcgggtgttttgtttttcatgtcagtgacatttttgaagcattcaggacagttgtagtgtctcacggcacacagttcttgaacccatcagattgattcggttccaattctggtttggcatgagcactgtacaaggggaattggtgttcttcctgttgtgtcgtatccagaggctctcatgtccctctgtccctttattgctggctgtcactgccttttaaaatgagagaattcggccaggtgcagctgctcatgcctggaatcccagcactttgggaggctgaggtgggcggatggcttgagctcaggagtttgagaccaaactcggcaacatggagaaaccccatctctaccaaaaataactaaattagtcaggtgtggtggtgcatgtctgtgctcccagctgctcaggaggctgaggtgggaggatggcttgaacctgggaggcagaagttgctgtaagccaagatcacaccactgtactccagcctgcgtgacagagtgggacccagtctcaagaaaaaataaaaattaaaaaatacaaaatgagagaattccattatatggttgcactgcaagttattcccacttctgtgagtgtgcagagctgtgtattcaggaatatcctatctaatattgttagtagctctgggtttttgcctcttgtttaattagctcttaagggaactgaatgttttaaaatatctatttttaaatgattctttgctacttatggggtgggctgaactcccaaagtattagatccacttgacgtccaaattataactatatgtgattcggaatggtttttatttaaataaattccccttttaaaatcaaatttagacttggaccaccaactgcatatagcttgaaaccaaagaatttctttcttgaagttcttcaaagatttcctacaatgtcttgctttttcagtgaaagaaaatgtgtttgccctgacctcttgtgcttctgatggtgcctaattttattggattttaggaaggaaaacaggcttcgttggctgcagacttctccatcactcaatttaagcatcttggccggttgcttatggtgcatggccggaacagctacaagcggtcagccgccctcagccagttcgtgattcacaggagcctctgtatcagcaccatgcaggtgagtggacagctggcccctctgcacatgtgcctgtggctataccatgtaggtgggtgggcagctgctccctctgcacatgtacatgtggctatgtaattatcatggaaaaagcctgggaattagattatgctttggagctgtcacccctacctcgccagtttaaatcccccacctggctgcattccagctgatagaccttgagccagtccctgaacttcttggtgctcaagattcctcccctgttaagcggtgctggtcattcctgccatgtggtgaggatgtgtgcgttagcagtggtgacatccagtgcctggcatggggcaagtggagtgtacatgagttattttaattgtgggtacgttgttataatttgtttgctggagtgaaagacgcagagttaaatgctgaatgactattcaggccctggtttttcaccttttgcagaggtaagggccatcagagaacaaccactaaagaagaatgtactttgcttgtgtgcctcctgtaccttaggcatcaggctaagtgttgacaatgcagtgtctcacataagcctcacaatagcctgagcccattttacggatggggaggctgaggctgaatatggatgagaaatttgtggtgtcccgcagggattcagtcagctcaggcaggtggacctcaaagcctgcagtcacaatctgagtaccttcttgatacactcgtcatggagggcctgggaccgtgtccacttgcaggggtcagcatgacacttggcactgagattgactcagcatcacggttctgtcttccagcagagcctagtaggggaactgagtttaattattatgatcacgaatacccttggaagttaacatcttgttcccatcttgctttttcataaaaggattctagagtatatattttctcaccttctctctcacaaacttcttcaaaatctgtcatcataggccaggcgcagtggctcatgcctgtaatcccagcacattgggaggccgaggtgggcagatcgcctcaggccaggagttcaagaccagtctggtgaacgtggtgaaatcctgtctctactaaaaatacaaaaattagctggacatggtggcatgcacctataatcccagctacttgggaggctaaggcacgagaatcacttgaatctgggaagtggaggttgcagtgagctgagattgcgccactgcactccagcctgggcaacagagtgagactccatctcaaaaacaacaacaacaaaatttgccatcagtctgtagcaattaagtgtggagtagaaaggaggccaaaggagggaaagaaaatatttttggtattaaaaagctattgattgtcaatcttcctttttgggcattgaggtgaaaatgctcccagttgagtggtgagaatgtaggtacagtagatcctggaactcacgtctccttctggccataccattaaggatctgtgagaccttgagcaaataactttactactctaggcctcggtcttcccacctggaaaacggggatgatgagaccctccttgccctcggacagggccactgtgaaaaacagagacgtttttaaggcatcagtgctaaggcatccttaccgtgattagtagaagtgaaataaggtaatatgtaaacatcaggtgatattttaatttgtgagaatgtttaatcatacttgaaaggcggtctgccttgtacaatgtatcaggtagtgctgctttgggtacatgagaattttccgtccactggctacaccccagttttttgggggtgattttatgttttaaatatctattgcaattgtgagtaggggagcctgaaagtgactttcatcaaaatgatctaaacccaaacagctgctgtggttcaccagaccacatctgtacttttatgttaactcaccaattgaacaggataatgctgtggctttaatgattgggagattaatcagcccgtccttggactcatacacaaaagctggccgggatgagctgacttcttcaaaaactggatgttactgttaacattgatgtagaaaaagaattccaggatgaggcattgttctttgtgctaaagaaaatgcctttaacccctgtccactgtgctgaaaatggccgagagcaagtcccagttagaattgcaccgggacatgagtctgtcagagaacacagtgtttttatttttcccaaagtgctcttgtcgagatgaagactttgtggttaggatgacccttttagaggaaggggctcctgatactggtctggaaaataaacaacagattcttgacatttttacaaccatccttcctaagcagcggcacagcctgggtgaaaagtcactggaaaagtggcttttccggcgcagccagggcgaactggggcttcctgtggccatggcgctcaggatcacctgcgctctgagctctgtgccgagaaagcacgtgtttcttacatgctttctctctgtgtccattgaaggtgctctggggagctagccctggtctgatgctatttctaatgactagggtatctctgccttgctttcttctgctttctaaaagctttcaggcagcatttgtctctggccttccttcagctttatatgaatggatatcagcttggagaccgtgtttcctctgttagcccatagaggtccagagatggagctaacagagcttcaagcctgattggatctccccagcctattcatcattaccagcagctaatattttccaaagcaggaagcagacatttccgcgagggtttgtaaatatcttcattgcttttgtctaattgcaaaaataatctgtcaccatgctcttttcaaaaatttccccaaataccgaaacatgtaatataagaagtgaagccttttctgccatcccagcccccgtagacacttcagaggctctttttctgtatgtgtttccatacctacggcactttggttagcagcgtgcatgcctacagaggtgaggattccgagctgtttagaagtgtggccacagagctgtggccacagctgggcttgagtcccatagggctgtttacctgctcagcctccccttctgtaaagtgtgggtgatagtagggcttgatcctgtgggctgctctggagatcagctgtgctcatgtacaaagcattcctgggtcctggaacttaataaatattcacaacaggctgagtagaccctggagctgtgatacatcaccctacccgggaatgattcctagatttgctgcttaggaactgtgtgggcttgggcaagccacgtaccctctctatgcctcactttctgctttgcataatgaggatgatgagaatcgtacctacttcatagggttgttgttgatgttgtgagaatgaaatgagcaaatccatgtaaagtaccttacagcagtgccggcgcgggtgttatgtaagtatcaggtgttatttttattctgtaaatgtaagggattttgtcatgacttttggtgacatcctcctctctccttggcacaggctgtcttttcctccgtgttttactttgcctccgtccctctctatcaaggattcctcatcattgggtaaggaaatcctgccaaggaattaattgtttacaaaaccttcttcaaatgctgcaacagagagaagaaacgtggtggaaaaattcttgggttcccaagccacattggattcccagccccagcgaatgcaggcccagcaccatggtttagaacctccttcaattaacaaggttttgagctgttaagcccttaaccagatggaggaagtggagttggagatgtgtgtggtgtgttgcactttgccatttgtacctggtcttgaaaaaatactccagagttatcagttgattgaggagagcaaggtggaaggtttgcagacttggtgatttcactggggtcttaataaaaaggggtgggggatctgaaaaatgccctcctggcctgaactgagcccagtagaagtcccatccttggagctccagggagggccagagtccactgcctcggggatgtgcaagtaacagagcttggctgctgtgccacagtgacagagatggtgtcacttgggcctttgcagcctgcaaacccacccccattactgacctggaacttcaggatgatccttctgaccttttcagagaatgtgctcagtctctgaatcacccaggtaggtggagtttggttaccgagtgccctagatacagacacatgcagctgaggccacttctggttatgaggagacggcgggtgcgggaaggtcagctgcgctctggagagtctcacagagtccgctttccatcctactgtgttggctgatgagttcagcctgagaggaggcactagaattctgcctgcttctaactggaaaagcgggctgtctttcgtcgggttctggaagagtacaagaacattacagaatatagtcaggggttccctgagctgtgcgccgtgcgaccttccgtggtctggtcccatctttcccgtgggtcctcatttcctcttccgtcgccctcagccccagccccactggccttatggctgttcttcagacatgacagccactcccgcctcagtgcctttgcactggtggttccttctccctggaatgctcttcctcctgggattggcttggctggccctcaccttttgtgggtgttcactcaaatgttctgttcctcagcctctaaaattgtaccatcaccccctacacacacacacacacacacacacacacacacgtcttatttcctctaccccattatatttttctctttagcacttctctaacacacatagagtttacctaatttatttgtttattgactcgctgaccgggatgaaagctcttcagggcagacatttttgtccatttttgctcatgggtttctggtgcttacagccagccccggagcataatagacaagcagtaaatatttgttagaggcatggttgggacttgggtgccggaggctggcacagcacatagctcctatcgcgtcagccaggtcttacctatggcggttttctctcccaggtactccacaatttacaccatgtttcctgtgttttctctggtcctggacaaagatgtcaaatcggaagttgccatgctgtatcctgagctctacaaggatcttctcaaggttctgttagcttttcagtccctccttcctcctttcctcctttgcttttcccttccttccctccctccctgctttttttctttgaatttatttcacacagaccctccaattctgatttgaacacacttgaactggtagcttttttacttttggggggaaggtgtgggagtttacattttttcttaaagcagtaatatattcactggtataaagaacgtgaaaaagtacagtaatagataaactgaaaacaagccaactcacgacttgcaaaaagcccctgacagttccgctttgcagttgcaacttaacgtttgctcccagagatgttcttgtgtacagttccaaaaagtgtgtgtggtggcgtgtgcctaggcaggtgtataattttatttgtcttcagggttttttacccaagggaaggtttattcccatgtaatgttaattttaatgttaattctttttttttttttttttgagactaattctcactttgtcacccacgctggagtgtagtggctcgatctcggctcactacaacatccacctcctgggttcaagcgattctcctgcttcagcctcccgagtagctgggattacaggcgtgcaccaccatgcctggctaatttttgtatttttagtaaagaggaggtttcaccatgttggccaggctggtctcaaactcctgacctcaagtgatccacttgcctcagccttccaaagtgctgggattacaggtgtgagccaccatgcctggccaattctttttttaaagaaataattcctccaatgtgttcagatgtgtgcgagccactttattgatgaagacagatgggttgccttatctcgttagcgggagaataacgtgaaagctgatggcatgctgcgtgagccccccgcgaaaccggctctaacctttctctgtctctcattcagggacggccgttgtcctacaagacattcttaatatgggttttgattagcatctatcaaggtaaggatgagtggagacacctgtttgtcttgtgctctggtactgactcagggtgtccccttcttgcctgtagaacaagaagagaagaaacgaatctgaaatagcaggaaggagggtggcagtgggacccaggggagaccctgctcaccctgtataaggacttgaacatcagacatgcacagtgctgctgtgtgagaaatgaggtagtgaagccagaggaaggcagtggacagtaatcaaagcctgtggggctgctccactcatgaggcaaaaagcagatgctttctgggatgttctgaaaccttttctgagagtcaggtcaagtcgtagttttggaaaaacatgtttacctcagtggcctccagaggggggtcttcccagactgtggaggcgttgtaagatgacctgttggaatataagaagaaaatagcaaaacttctgtttgtatttatttttcctaactcttttaaatttacatatatatatttatttatttatatatttttgagacacagggcaaagccaccatgcccagaatccttttttagtatttctatttttatgtatgttttgtagtgcacataatagattttatatacttataaaatatattttatataatatgtagaaacagagtgagaccctgggtggcggagggtctcactctgttgcccaggctggagttcagtggagcaatcacggctcgccgtagcctcgacctccccaggctcaggtgatccccctacctcagccttctgagtctgggaccacaggtgtacaccaccaccaaatcagtttccaaatcagttcatttcttcccaatggactgtgagccacgagtccctgcaggtccagcaagatgacctcatgctgtgctgtggatcctgtcgggtgctgacacaggctttaattcctgtctagaaacctgtttctagttcagcatcttagactacaggtgtacaccaccacacccggctaatttttgtattttttgtagagatgaggtctcaccatgttgtgcaggctgatctcaaactcctggactcaagcaattctcttgcctcagcctcacaaagtgttgggattacaggcatgagccactgtgcccggaatcctcactcttttttagtatttccatttttatgtatgttttgtagtacatataatatacatgtgaaatgatcctaatatttctatatatctggacaggtacacatatataacttacaaataaacatgtgtatttggggattattattattactattctgagatggagttttgctcttttgtccaggctggagtgcagtggcgccattttggctcactgcaacctccgccttatggtttcaagcgattctccggcctcagcctcccgaataactgggattacaggcgcccacctaattttagtatttttagtagaggcgggggtttcaccatgttggccaggctggtctcgaactcctgaccttgtgatccgcccaccttggcctcccaaagtgttgggattacaggcgtaagccaccgcgactggctggggtttattatttttttaaaaaataaatttactgttcatgtctcctattggggtttattcttttttttttttttgtaacagagtcttgctgtatcacccaggctggagtgcagtggcacgatctcggcttactgcaacttccacctcccaggtttaagaaattctcgtgcctcagcctcccgagtagctgggactacaggcatgcgcttccacgtccagctaatttttgtatttctagtagagacagggtttcgccatggtggctagtctggtcttgaactcctggcctccagtgatccgcccgcctcagcctcccaaagtgctgattacaggtgtgagtcacgacatcattttattttttatttttttgagacaggggctcactctgtcacccaggctggagtgcagtggtacaatctcagctcactgtaacctccatctcccaggctcaagtgatcctcccacctcagcctcctgagtagctgggactacaggtgcatgccaccatgcctggctaatttttgtattttttgtagagacgggctttcaccttgttgcccaagctggtctcagactcctgagctcaagcaatccacccaccttggcctcccaaattgtgggttttcaggcctgagcccccgcgcctggccgcgactccatcattttaaatattatatttaactttctatttctttcatcaactctagatactcccctccctgccttacttccttttttctccctttttctcactttgtagttaaagattatttatcctacaaggtcaaagaggaaaatcagaaaaccataggttcagacctgcataaagcaccagtcattaacctcatgtaacaagtgatgcctttcatgtctaaatgaaaactgcggaaaggagccaggtgtaggcgagcagcgcacggctttcgcagggagggtgaggggaatacccttctctggtgtttgcagggagcaccatcatgtacggggcgctgctgctgtttgagtcggagttcgtgcacatcgtggccatctccttcacctcgctgatcctcaccgagctgctcatggtggcgctgaccatccagacctggcactggctcatgacagtggcggagctgctcagcctggcctgctacatcgcctccctggtgttcttacacgagttcatcggtaagacccctgaatgcttaaaccccgtccgtcacccccagtgaatctggcccagaggtctcactgccgtatgaaggaaggggggttcccagcgctcggcctgggctcttcctccagcagtccttcccgctcagctgtccacgttttcttaacaggtgttctctagggacaggtggtagttgtgcctcagggtgtgaaattgaggacagagggcgtgattgcagtagacagtgtttttgtttttctttttgagtcggagtcttgctctgtcaccttttttgggccacaaaatctttttgttcccatgaaatcttaatctgaagtccaatctatgaaactgataaaaggggacttgtgatagcaaagtggcagtgctgggaggtgccgagccccagaaccttgcccgtgcagccctgccttgctgctgtgtcctgatagagctcctgagggactccagggatctcagaatacaatctgctgctcctcacagcaaaccaagtgctgaaggtactcgccagttccgtagacgtgggagcacctgccgtgtgccaggattatggtggcagatgaggtggacgggctcgccagggagctgcccttctcgttgggaacacacgataaacacacattaagtgagtgtgagcacaggaatatcagatgtgatcaaagttaccaagaaagaaaaatggggtgaggtgctagacgcccaggcacaccccaaataaaaaatgttatggaggccgggcacaatggctcacacctgtaatcccagcattttgggaggcagaggcgggtggatcacgaggtcaggagtttgagaccggtctggtcaacatggtgaaaccccatctctactaaaaatacaaaaatcagcagggcgtggtggcacacacctgtagtcccagctacttgggtggctgaggcagaagaatcgcctgaacccgggaggcgaaggttgcagtgagctgagatcacgccactgcactctagcctgggcgacagagtaagactccatttctaaataaataaataaataaataaataataaaaaatgttatgggaatgtagagatgggggagtgtcagcaccatcctaatgtggggtggtggcagatttctctgacctcagtagtgattccaggtactcttgggcttgtccagcgtcagccactgtctctagatggacaagcctggtttcatcactcttccatgctgacctcacttgctttgccatatcagttaatttcttcccaattgattgagccacaagtccctgcagggccaccaagatgaccccatgctatgctacggaccccatcgggtgctgacacgggctttaattcctgtctagaaacctgtttctagttcaactagaacttgcaacacgggcacggttcagatgatccagcattttctgtgttgtgctgtggatagattctgaactctaatcttggtttcccccgcacggggcaaactcaagccgctatggctttggaacctcagggccaggggtcatcctgaaagtctagctggtttagcagacagtcctctttacacctctttcctcctcagtaggagcatttaattttctgtctgtgttattcaaacaaaaaaccctcaagagtgatactgtttctcctttatcagctgggggagcagggcccggaggctgcttctctgctaagaagctcatgtgtgttcaggattgcaggatagactctctctgggggaaactttcagttaatgacaaccccctcacgccccatcctccgtgggaaacctgcagggcccaggctctctagcaatggcccatcccttgctcctttacctcaggccttctcagtgggggtggtgtggaccccaccgcctggggaacaaacagtggtctttggtggggtgtgaacaaaccctaaccttttacgtataaaggagatgtatatataatattataaacagatacacagtatacctgtgacattaacatgtcatggaggtggtcaattaggagaagaagaaaagtctaaaaatgttccttaaggggcaataacaacaaaaaggcagagaaactcgaccttaccctggaagcatctttgatcgcggctcttttgccagcttccaaagctccttaggaaggttttagtaaaggtaaaagaaacatcccctgaaaagtaaaggtttcacagttgcagccccagtttctagaaaggatttgtgagcatttactgtgcgctccaggaactaaaggagcatccctgtgaacagtggagttttaaagcagtttcacccttgtcactagtctctagaaagcgttttgtgagacctagtatgtgctcaaaggcttgggcctgaggtggtcacagagatgtggcccctgctcaggaagctcagcttgtttgtgatagggacacaccacaggaccgggtcagaggtgtaggaaaaccacagggtgagttgagccttgggcctggcacttagtaggtgctgcctcagtggcagctgcatttcagcatcctgtgctcagaaagtggagaaggggcttattctggcttctgctatattgaaagccacaaactgtcactcctctcttaagaaaacctcataaccgggtttataatcctgcagcaggaaaggcagtacgcccgccccccccaccttccatcagagtccctgagggtcagcttaagcctttctctgacaagggggtctgaacactttgcaccatgacccagactcatcctgtggctttctgcgaccatcactggaagcagagggtgcatttgaatgtcattttctgctcgccagtggccgggacttagaaagactctccaactgttagacaacaccaaatcaaaagcatctctgagttttcttcccctgtaattttctttccttctttttttctcttttttttgagacagtgtcttattctgttgcccagggtggagtgcggtggtgcaatgttggctcactgcagtctcaagctccccgggctcagatgatcctcccacctcagcctcctgaacagctgggactataggcatgtaccaccatgcctggctagtttttgtattttttgtagagacagggttttgctgtgttgcccaagctggtctcaaactcctgggttcaattcttctgcccgccttggcctcccagagtgctgggattaaggcatgagccactgcatctggtggcccccatagttttcttctcctgggtgttaaaagtagcatttcactgtcaggaagctacagaagagagagcgaggaaaatcaagctgcggcgctgtgtgctcttagccatggtaccttcccttacagtccatggagaaagagggccaatgccaggaggctgtgggtttgtgacgggagatgactttccctttgatagttgtgacgcctgtttctggaccccatgcaccttccggaatattcctgcctgctcactgccgtcttcccctttccttgcagatgtgtacttcatcgccaccttgtcattcttgtggaaagtctccgtcatcactctggtcagctgcctccccctctatgtcctcaagtacctgcgaagacggttctctccccccagctactcaaagctcacatcataggccgtgcgttcgctggagggggccctggtcttggcgcttccctgatggacagagctcaagttccatttatattaaccgccacctgtggattttgcagtaattgctaacacatgcagttttaatgggaagtggctctgcgcctaaacggagtcctaacgctgcatcaacgggagggagggtcctgaaagagacccatctgggcctgtctgaacccctcgttcttcatgtttaggtgaatatgaatatgttaaagctggtggctcagctgggagatttatatgggtcactgtgcgagcttccttatgacttgaattttgttgtcacatgataaaagtttctgtgtagctgaaggttgtagaaggcttgtgtgtgtgtgtgtgtgtgtgtgtgtgtgtgtgtgtgtttttaaagagtcctaatgtgtatgtactctttatgtctttcttgctcttacaaagaggtgtcagaaaaatagaaagctcttggtgtcggtttgggaggaaaagacagtgacatttggtaaaaagttatccacacaataatctccattcggaaatgctcagtatcgtctccagccagccctgcttatccaggttacactggattcctgggatcgtaaccagtaaatgagaggagagggagagagagtgtcctaagtccaatctgttatccttgatctgattcagcatccatagtgtgtgagttaacttcacctgccacctcgtaaaagaatttcagaggtgtgatcccgctttattgggacctggtaacaatcacaaagccagtggctgtttgagaaggacctcagacattttcagcagagttgttttagcaggaaacgtgccactgaatggcccctaaatgtgtcgacagtgtgataagagactcaactaattctttaggcaacatggcagatgtgactcagatcctccaagaccaaagcggaaaggtcagggggctgggactcttctcttccatagaagcctgtttcctgttaggaggcataatggaagatgaccccacaaaggcagaggcatctttcggaacaacactggtggcagctttcagaacaaggaacccctggtgggaggacgcccaagctacagcgttgggatctgggatctgttccactgccggcagatttcaaggggaacttgctgaaaggcagccagtggtgaagatttctcccctcccaggatggactacatgccggcatgtttcttataaagctgtggctgcttgtttcagaggaagggagtttgcagtcgcgggacgtggtagagcaaggcattcttgggttttcaagttgcttcttgcagaagccacatatgcatgccataagggttaagttggtggatctttaagagccaagtgtggttgagatcttggatttgcgtttacttcttgatgaatacatatccttcaaaccctctgcctggcgctacttctgtgtgcttcagagatgtacatcacagcctggtttctgatgcctactaactcctgctcttggagagctggagacacgaggatcagatagtcccttgcctttggagcactcttgataagcttttgtattttgtgttgtccttttaaaatgttctagaatgactttacgttgcaggtactggttaattggctgttgacaccacatctattttgtcttatgattctgcagttttgcagtacttttctctatctgattcagccatttctgccagagggaaaaggtcggcagaaaagatgtattgagtgaatagttaaggataggatctttgtccaaaaatttcagaaagattgagcaaatctgacgtattcattgagtgagtttctgtgttttcaaaggtggaggagaaatttgtgctggaagtttttaagcctccgttttcttggaaatcagtctgtaacactggcaagtcttaagatagtcccatttagactttgcagatgctgaacctggctctgtaacgctgggaagtcttaagatagtcctgtttagactttgcaaaccctgtacctggctttgctcggagattcgggatgctggctcctgcaggcagggcgtgtgggagcctcgtcagaaagttttagaggtttccagcagaagcagaatgaagatggtctccctggccttttccttaattctcaattttgattgaggtgcacaagttgacttttaaagccaacgcttaagatactgattgacatcttcaagggagaatgctcccaggaggggctgaagaagccatagttggaagtggaaggtactcgtcagtgttctccacaaacctttttactctgttgtctcagccgcactggggcggaggcggtcaagggtgagaagtaccgacactcaagtgcaaactgccacgtcgttggcccatcccatcagtgggcagctggctgacgccattcactggacggtccctgaacacctaggaatgcacacaccgtgcttctcagacactggagacgcaaaggcaggaggatgcagtccggtgagaggacacgatctttacctgcacaatcagactgtaagcccagcagagaaccccaggggcgcctgggtacttctcggaggtcatcttagttgtggtggggaagacaaagaaataagcaaacaagaaactagagttactatacaagaaactctcctgagtttgtaaaccttaagcataaggattcagttgacctttttcttggttcatcaatctggaaagaacttacataaagcgccattgacactgtcacctgggagctccatgggccgtaagtctttgacagccaatttaatttgaggtcagagggccttgaggtacacagtcagcactgtttgaacacttttcctgaaagcaaaactcacagctccctgcgccctctgacaacactagctatttctgccagagtaagaacttctattactattttattattgttcatatgtcttttgatgatggttgtgtgacagggggaagcaggatctatttggtttcttcccctccccccaccccttcctttttgtctctctttttttttctctaagaaaatcaccagactagtttttccatcttgagtaatttcttatgtgggacagttttgatcctcattttgaaagcatgcgtgtgcacatgtgtgttgcctgtggtgccaggtgagacaggtggcactaactccagctgcttggaaggcatcccaagggcgcatcttaaagttggagcagacctcccttttccagcccctggggccattagaccacgtgctggaactagcattgtaaaattcccatcccagttccactcccctgaagtgaaacccttttttttttgtgacagtaaatcttaaaaatcattgtctctttatgaacatttcctcagtttcttctctgctgaaaatgtaagccatgctactttttaatgtattttgaattttgtgctcattggaaattgatatgctaatgcctcccccaccccccgccagacttttctttttatactttgtcttgtttttactggggtaggctgggcatgcgtgcgtgcctttagggcagcattttaaacctttgccaaaattgcaaatgggacatgtacattcttctgctccatcctacttaaacacctatcagctatttttatctttaaccttttctgtatgtttgaagtgtgtggggggtgtgtgtgtgtgtgaaagagcgagagaatgatgtcatctaaagttttttgaagaattatttggttttcattgcattaaaattctatcactcccagctttgttttcatttaaaaaaatatacaaagagctttgtaaatacaacacattttatttctcccccttcttttaatgtacagcttttttgccacttatatatacttaaaatattcccatgaattatgtccagttcttcttggaaaaaaatttggttttgaatgaacctgcaaagcatcctgcagcgtgagcagctcctccacctggagctccgaagcatcttctcaggccaaagcggcattacccgtgaatctgtcttctccgccacagcatggtttgaggcgcagtctgttaatatagctgggccatgtcagtgactgttgtgtttgtggggtcaggtggggggcatggtatttgcaaaaaaaacaaattatggctaatttattattttgttgcagtggggttaactgtaaactcatgtaagagtctgtgatttcctcattggttgatctctctctctgtaatcctcattgcaaattttcaccaggacagcgttttttgattagaggggagctctggcacagtatgctttaatttagcaggaacttccagatgatttaaattctcgatgctgtgatgacacacatatgatctttcgtgtttctgagcgactctactttcattgtttgccagcgtggctcgttgctgttgcccaataaagcttgtgtacgttctgccttgggggattattttaatttgtacagaaacatgaattctggtatcaaaatgaggactttttattataacgctcctattttttctttatttcatggtacatgaaatgtaaagaaaactctttccagttcagaaaattattttgattttggcaaaaaaaaccccaaatcaatgcatgttatttattattttgtactattgtccatcccagacgtgtcagaatttcaaaaggtgatagatataaatggaaaataagatgaaa

SEQ ID NO: 9480 - DNA, 573 bp, Homo sapiens
atttgctaaagtctagagacattctggttgtcaccatggagggtgtatgactggcatctagtgcgtaggggccagggatgctgctcaacattgtacagtgcacaggaggggccctgcagagcaaagagttatctggccccaaatgttcacagtgacgaggttgagactccctgttctagtccttatcttccctattctttcagtggaccacagtttgatgatatctgcagtcccaagtgtaaatctaaaatcatagcatgtgagtctattccagttgaaatagtaataactttcaaaacaaaggtcttaaatccatttgatctttctttcatcattgaaaatcttccaagtgctttgagttttccttttactttctgtagcctttgcccctaaatgaggccccttctcgcttttcatcttcagccaactgaaaaaacattggtgtctgttaagtgcactttgtacactgtctgtcatgggaagcgggctttgccgctgaaagagggtgttcctttcagtttctcattccttccggcctccctctctaggatgaatcaactggagaaattacgt

SEQ ID NO: 9481 - DNA, 498 bp, Homo sapiens
atttgtctgtctgtatttgtaaaagggcccggaggtataagctcgtgtgtctcaggaagcaagttatgcctccgcctactataccaaatactataccaaatggtgtaattagtggctgtctgcagtgtgagctgctggttccctctttttggttctcaatggaaagggccatcctcagtatatagattagaaagataattgtaacttagttgtgttatctcatgacagcagcaaaaggaaggtatgtggtttcaaaggtagggaccgaccatgctttcccttaaacgtgtgctatccctgcacgaccttaagcctctgcatttgcctgcagtgaacttccgtccatgtgcggacactcctccgccggagccgctagggggaacttgaggactgaaagacattgctgtttcctgttttccacaaccagccggaccccacgtgcccaactgccctgagtttcaagactgtgctttcatagcttcagaatttatttcatgg

SEQ ID NO: 9482 - DNA, 935 bp, Homo sapiens
cagcatgaatgctcggcaggcagctcccaagaccacccgcccccaggtgcagccacctacaccccggggaagggggaagagcaggagctccactatgcctccctcagcttccagggcctgaggctctgggagcctgcggaccaggaggcccccagcaccaccgagtactcggagatcaagatccacacaggacagcccctgaggggcccaggctttgggcttcaattggagagggagatgtcagggatggttccaaagtgaagaggtctccatggcaacaggacaccagcaagtgtgtgggagtcgcactggtgtgacggccagaactggactcagatttcagccccatccccaatgaagagcttgagtttgaagattatactttttttgagacagggtctgactctgtcctccaggccagagtccagtggtgcaatctcagctcactgtagcctcaacctgccaggttgaagtgagcctcccatttcagcctcccaagtagctgggactacaattgtgagccaccatgccaggctcattgttatatttttagtagagacagggttttgccatgtttccctggctggtctcagactcctgggctcaagcaatctgcccgcctctgcctcccaaagtgctgggattacagacgtgagccaccacagctggctgaagattatactttcaattcagagcgagtttgaagatgacactttgaggcatcgtgtctatggttcattactacagaagcttctctggatgtgtaaagcacaggaaaccaggcagaggaggcacagggtgctctccagaacgagaagccagctcctggagttgtttgctgcaactgccattccccgttgatgaccatgctcttccttcagaagagggagagtgagaggaccaagtccaagtggttcccatttgaacatttaaaa

SEQ ID NO: 9483 - DNA, 934 bp, Homo sapiens
cagcatgaatgctcggcaggcagctcccaagaccacccgcccccaggtgcagccacctacaccccggggaagggggaagagcaggagctccactatgcctccctcagcttccagggcctgaggctctgggagctgcggaccaggaggcccccagcaccaccgagtactcggagatcaagatccacacaggacagcccctgaggggcccaggctttgggcttcaattggagagggagatgtcagggatggttccaaagtgaagaggtctccatggcaacaggacaccagcaagtgtgtgggagtcgcactggtgtgacggccagaactggactcagatttcagccccatccccaatgaagagcttgagtttgaagattatactttttttgagacagggtctgactctgtcctccaggccagagtccagtggtgcaatctcagctcactgtagcctcaacctgccaggttgaagtgagcctcccatttcagcctcccaagtagctgggactacaattgtgagccaccatgccaggctcattgttatatttttagtagagacagggttttgccatgtttccctggctggtctcagactcctgggctcaagcaatctgcccgcctctgcctcccaaagtgctgggattacagacgtgagccaccacagctggctgaagattatactttcaattcagagcgagtttgaagatgacactttgaggcatcgtgtctatggttcattactacagaagcttctctggatgtgtaaagcacaggaaaccaggcagaggaggcacagggtgctctccagaacgagaagccagctcctggagttgtttgctgcaactgccattccccgttgatgaccatgctcttccttcagaagagggagagtgagaggaccaagtccaagtggttcccatttgaacatttaaaa

SEQ ID NO: 9484 - DNA, 101 bp, Homo sapiens
gcttgaacccaagaggcagaggttgcagtgagccgagattgcaccactgcactccagcctgggcaacagagtgaggctctatctcaaaaataaataaataa

SEQ ID NO: 9485 - DNA, 429 bp, Homo sapiens
cctcaggtccaggagctgaagtgagcatcactcagttgacagaaagcatctagaatgtgtcagcgaaaggcactggaattatcattccttcttgagaaggaaagaagaagaaagaagaaggaggaggaggagcaggaggaagaggagcaggaggagcaggacaaggaggaggaagtcttcttcccttgaggaattcttagtctcctgggaaagatagctctttatactgataatatgccacattttcttatgggtcttgatggacatgcacaaagtttaaaaatatcacaaaaaggagagatgattgagagtagctgatagagggtgaaagcagactttacagggtactggatgccgtaatagagctgtgagcactaaactggaatgtgccaaacacaagagagaatcgtggtgcccttcctggtagag

SEQ ID NO: 9486 - DNA, 429 bp, Homo sapiens; identical to SEQ ID NO: 9485

SEQ ID NO: 9487 - DNA, 429 bp, Homo sapiens; identical to SEQ ID NO: 9485

SEQ ID NO: 9488 - DNA, 487 bp, Homo sapiens
gagactcatgcaggtttgacgctgagcagcaccatgtggttgggcctggcaggcactcgaggctttaggtcttggtttgaatccagactagaaaatcattacttattaaaagccttgaggatatgggtctaggaaagtctatgtgaagagataatagtttggaaaaagttttgcagaactaaagaaaagtttccacagttccttttctgtcctaatgtagagcatctttgttaactaggtcttggatcaatccaagctgtgtctgagaataaccatttataatttctcactggccagcactaacaccctttagaaaaggaactcaaagcagccctagcagccagagtcatgcgatcatggtgggagtacagctcctcaccaaggtcagctcctcagtgaaatccatgccttctggaggactgcttgtaaataaatattaagcacaaccattaaaaaataatttggctgtgaccatcaaatagtgaaa

SEQ ID NO: 9489 - DNA, 7458 bp, Homo sapiens
agaccaagccctgagacacagtgttgagagccaagacataaagttgtgaagattcagacccagagcccagcagggcacaggctggaggggtgatgtgagtgatcagtaacaccatgaagactctgctcctgggtcaggaatgcttttttgtccctgtttttggattttccaccatgatcaggtatgtttgctcacctcagctgggagcctgagtgggagttgggggactatggatgttctctgccactgactggaggggagcacagccaagaatcatgagcacttttgccttcatgactgtattttcttatggttagaaacaaaactaaacaatttaaataactctgcttaatggaagtcaggaaagagaaaaggcagctatgaagtgttgttgttacagactgtgcatggaccctaatggtcacctaaatgtgagaggaggctaggcactgagaatgccatgtgcaaggaaataataaaagcaagtcctccaagaacatttcccacagactcaaatattttcgaagtaacaaaaataagaagagtgccctttttgagtcacaaaattggcatgaagtgaactggttctatgcttgctgtaattggtggtcaaggaggcaggggggaagccattgaatgtgttcagtgagctagaaaggtaactttctttcctggaagaaaatgatcaagggtgagaagtcaggaggaaagagatgtttttgaccaggtctcattcttctccctctgtgtctgaccttgaaaaggagagattgcagaataggaaaaaaaaaaaaaagtttgaaccttcccaagagatgggtaaacagctctccttcagaagaggatgagctgtcaaggatactggctgtgtgacatctcacaaaggtagaaacactattaggccatcactgggattttagtttacaggactctattctccttccctcaaaactttgacaagatgcaacttctttcctgagctaaactgttgtgttggttgtagtatcttgtcttatgcctcattactcactatcagagctcagtgatgaaatgatagaaaacttgagtcagtgatggggactacttgagactgaacgggcaacaaaatgaaaccttcagaagccttctggaaagagggacaggagaggaagcagtggaggaaatttcatgcagggctcctggaggtgccataaacaggataaagatctgggacttgtctgtaatcaaaaagcacaggggataactcaaaagtgctcaaggaggggaaagaaagcagacttggtcttcttgcagtagcactggctggtaatggttgaaatgtgaatgatcacattctagttaggcacatttcttcaactttcattccatattgtgttgtaccttatatatctgaaaaatttaatatgaaaatgaaattgctttttgattttttttattttaaagagcataatcaactgtgttcctgcttcctccagtttctcctaatgaaggaaagcctgtctgcagacctctgtacttgtagctgatacctgtgtatacacagtggggtacattataatttcagagttagtgcactttcataaattatttaacaaataatcagcctccataagattggtcttgaatatccatacctgttaagtgatggcaactctcaaaccctaggaataacaaatacccactcagttcatcaagaaataattaatgtaagtttgggagcagagagatgtgtgggctcaaatcccagttgcagagaaaccaccgtgtcacctgtaacctctgagagcttagttttcccattcatattaactataatttctaagaagctatactgttgtaggaattacatatgatgtatgctaagtgctagcacagtgacatacagagctttggagcctcagttaatgctcattactgtcattacagcataccatgagaccattcctatttttagaaatataggtactagatacatgggggatcttaaatctagttgttttaaagtcccattggtcatctaaatataaagtcatagcattcttgaaagtggttttcagaaataccaagaactacaagatttctacttaaactagaaatagttttggtctcacataaggtgaccaactggggctcccaaggtgaggtccccggaccagaagcattagctttacctggaagtttaggaatgcaaatccgtgtctcccagcccagacctaatgagtcacaaactctggctggagcacgaagtatgtgtttgaataaattctccaggtgattttgatgcacgcagcatgctaacatttaagaaatcctggtctataatgtttcacttatgccaaactaagacattttacagaggggaaaagaaaaaaaaaagcaataagcctgtttcaatttctctaggacacatgcgtcagtacttttatagctgatagtctgtccccatcactaaaatgactcaagttttctatcatttcatcactgagctctgacagtgagtaataaggcataagataaaatgctacaaccaacacaacagattagctcagcaaggaagttccatcttgtcaaagttttgaggaaacgagttttgaggaaaggagaatagagtcctgtaaaccaaaacgcctaatagtgatggcctaatagcgttcctacctttgtgagatggctcacagtcagtatccccaatagggactagagtaggaagtatatgggtagggtcagataatatttctgaaaggaaacacccaggagtatcccaagttaatgacattttagaccctccaacaaccacacaagtcagctccttggaaagactctggttacttttacaaagcaaaccaggagaattttcataatacctgataactatgtaagacttggaatatttgaatttctaggacatgggattgtgcaaccattcattttatcccataatattgaaatctccctcagataagcctctcggcacctaatagagttttcttagtgaagggctacctttctgtgggtaacagggaagggcaaaataaacaaccaaataatatcataatcacgagtgtcaatgattgctggaacaggtgggggttggtcattaaattctagttgtttccactattccagtaggagttgtgtgaatgttagcaaaagaccagggtgttacgatctgactgtgtttcatcaattgccttgacttttggatgaaatgcgatttgaggacatatcattattagatttgccacagattccaatttttttctctaatatgaggctaaccatgatgtcctttcccaggaaggacaatctctcctttatcagggaaaaatcagtaggggcttcctcaattttctccttcatccccaccacagagtcatagaggtcaagtccttttcttgtgaaacctaaaaaatgcaaattccaaggttgctgctatggtgtactaattttgtcacagtgacatgccctgtcacagggcgtatgtgttctgttatacagttgaaatattggttatactattgaaatgtttttgtactattgaaatcccaaataaacttaattctaaaagaagcatgacctcaacagcctcacacctacttatatcttgtagttctttctgtctaatgctggcaatctaagcatgttccaggcaagcaacattcaatagcgttttactgctccaataagttggttcaattagcaatgtcaaaggcagtcactaaatagatagtgtataaccttcatacaatctcgtattattttccactaattactatagaaaaatcgatgaagtttcattacaatggaataacttcaatcacacttcaaaaactacatacggaagatagccacaacttgctgctctcaaaaaacacagagatggcatctttactttgtttcaaatccccaaccctggtggcggtccaaagttatggcagttataaccccttatgtcattataaggaggaagggtaaatattaagtcaacatcctttaaagctaagagtatgactacagtggggtggaatttgggacttcatgcccactccctgtttctgttctattttacctttcctgacctctaagccaacaggagagggggaagggccacacttttgtgacccttgttaaagaattgtgagtttaggaaacaaagatggacttctgagggggtagttgaggatgggctgaaggcacagaagaaaccagctggtgtgcccctctccccactagcagacccttcttcctcattggttcagggcaaacaatcccccaaaaattcaagaaaactaacttagagttattttctgttatttctcttttccttgatctggagccaatgcagaaagaaatctaaaggtgaaggaaaggcagcgttcagcactgagcaagtccatgttggagaaaggtaatatcatcattgcctatacccaagagaagggaccaagatgccctggatgatgctcagcatcacctgggactatgactgtcccctgtcatcattagcattgctgagctcaagctttgagccaggaattaggccaaaatctccatggatctgtctaacttagcctttgcctccatgacagcttgttacatcccgaggtagaatctttgtaaaccctgtgttcaaagggccctgttaaggcacatcttctgccttggaccagaaaattgcttaagcacagagcctaaaggcagagctgccatgatctgctcatggggattgactacttattgaaggcaatgtcacacacctgtttgtcattttcacttccaaatgaagagtcatgctgcacatcagtgagaaatgttcagctctcacctgtcagctgtttgtttgtttttgctctctttctatgtgagaagacatttaatcatggacctattgggcaagcaacattgtgtggcctctgaaggctgagcttttagttctcatcagaacaaatgtaaaataattgaataacgaaatctgaaagattgttgtttcaagtctaaaaatattttatccctttcttaccttctctaaatagtattgtacattgaaggcaaaataataacttcagatactaaaaagtttaacattgtttacatgttcaaatttctattttgtagttcctttaaagggcctaattactacaaccaaatcatacaattaaaaagtttttatgctgctgaaataatcacatcagatgtattgcttccaataggataaatattctcaaagattcaagctatgaagaccaaatctacagaagatagcaactcagtaagacttatttatacaagtttagttttattgccaatatccatgagatattttaaaatcaacttaaatatttgtaataaaggattacagactaggaaatatatttctttaataaaaataactcacgaaagttgaattgtgactaagaggaagagaaaagaaggaaataaactaacaattgttaaatacttattaggtgcagagatttatatactttacatcatttaactgttaaaagagtcctgtgaagtgggtgttatgactatgctttgaagtggagggaattgaagctcagagaatttgagtaactgaaccaaagtcatatagctagtaagtgaagaactaggattcaaatctagatctgtatgcttccaaaattcactctcactctttgtatgagaggccaattaaaaaccccctacgtccctctgaatttgaactcaattgagaaataaaacagagagatgcagatcaaagcactcattttctcactaataaaaatgactggaaaatgtggctttcgatgtgtgactaatttgcttgctgtagttcacagggaattggaaatccttgtcttcgtggttcctggctcagcaggacccctgtggggcctctccctctcttgggaaagagattgctctagaaggtttactacaccagtgaggagaagatgagcgcaagggggattggccggctgagggcgaaatcaagactggagccaagtgcgctgagctctcacatgaggtcctttgctcctgttccctggaggcataagtggctggggtagagagaagcaggggtatttcttctgtcctttcttgcttagggattgggggtggaaatctccccgcatctaaggaaatttgaaaagacaaactatggctgcttcttcaagcaaaccacctcaccacactatccaggggataaaacccgcttgctgctgctaaattatgccaagagagaacattctgatatttctcctcaattctaggcatgacagcgtgacttggtgcttaaaggcatggagttttgagttgcagacctaggtttgagtgctgaatctactagcttcagggtgttaaaaaagtttcttaatctctctaaaccttatttttctcaaagataaaaaactgggtgtagttgtgagtatagtgaatgcacatagtatgtgcctttggcatgttaattcactattattctggacataatttctcctaagaaaaaggatgaactaattgcagggcctagcctaagctctgagaagtcattcgttatagcatttcagtccatagtaaacaagaagaaatgaggtaaagagtttaaaccagggaaggcatagctgtggtcaccaaacaacctgttaaaggcgagctgtaggcaccaaaaaacctattatggactgaattgggttcctcaaattcatatgttgaagtgctaaccccaagtaccaaatgtgactgcatttggggatagggtccctgaagaagtcactcagctggaaggagtcatattggattagggtgttgggaattgggctggcccagggagaaatcaaggctggaaccaagtgctgaacttctcacataaagtcctttgctcctgttccctggcaccctaatccaatatgaactggcatctttatatgaagaggaagaggccccagaggggtacacacgcagagaaaaggccatgtgtggacacagtaagatgacggacatctgtaagccaaggagggaaccttcagaagaaaccagccttgcctgcaccttgatcttggaggtccagtctccagaactgtgaaaaaaatgaactggtgttgtttaaatcccccagtcgtggtattttgtcatggtggccctagaagacaatatacaacccaaaggaatattctttccactttctccctcttccactttatagttttttctccttcgtttctttctttttctcttttactttccttttcttctcttctctttcctctggtttttaattttaattttaatttttggccttcctatacctccatttgcctctccaggaagctgaattccagacaattaatcattcatctcatcagttcagcaaagcaaatgccctcaatggtttcttttgtgattcgattattatgggatcagaatgtatcttattcctctgggaaaaatgaaacataaaaatttcagaaataa

SEQ ID NO: 9490 - DNA, 1405 bp, Homo sapiens
aaccaattgtattataaccccctcccaaacacttagtgcatcctcccactcatgtaatttgtttaccttgttttctatttatttcttttgagatggggtctctgtcagccaggctggagtgctgttgcatgatctcaggtcactgcaacctctgcttcttgggctcaagtgatcctcttgcctcagcctcctgagtagctgggaccataggcacacaccatcatgcccagctaattttttgcatttttgttagaaacggtttcaccaggtttcccaggcttgtcttgaactcctgagtcaagtgatccgtgtgcctcagcttcccaaagtgctgggattacagatgtaagccaccgtgcttggccttaccttattttctaagaactgatgaccataagtaagttttggcacacaccactttgtatgcttcgtctctcatcccacatgtccgtggagataaacctcattgacatggaacctcagaggcagcttgcagaaggaataatacatcacaacaagatggcaacactctttaagagctgcatttccagtcctctggctttgtttcagtggggctgcttttaggttgattgaataactagcagcaacgatagcacctaaattattagttaatgaaagtctgtaatttgctaggcatgtgctaaccagtttacataaatcatctgaaagcctcacaataactttgaaaggctaggttttccctttcacagatgaagaagttgaatatttgatttatttattcattaaggaagagatttttaaataaaaataatttttttgtagagatggggattccctatgttccccagactggtctcgaactcctgggctcaagctatcctcctgcctcagccgccaaaaatgctgagattacaggtgtgagccaccatgcccaactaaggaacaaattttaatgggtgcttcttatgtgaaaaacatgggattagacactggggatagaaaaccgaatgacacatagtccttgctgttaggaaatatatggtctgttgggaaatctggcagatccacagacaattacaatcctgaggtaaaccttgggaagggttagaaaatacagaagatgggctgggtgcagtggctcacacctgtaatcctagcactttgagaggccaaggcaggcatattgcctgagctcaggagttcaaaaccagcctaggcaacacggtgaaaccctgtctctactaaaatacaaaaaattagccaggcgtggcagtgtgcacctgtagtcccagctactcaggaggctgaggcaggagaatcgcttgaaccctgaaggtggaggttgcagtgagccaagataacgccactgcattccagcctggatggcagagcaagactccatctccaaaaaaaaaaaaaaaaa

SEQ ID NO: 9491 - DNA, 2131 bp, Homo sapiens
atgaattgtaaattatgtgcatgttatttaggcatgttttatgttttataggcatcaaatgggtacttttcatcttatttaaaataagtaaaatgaaaagtaattgttctccagcaaaatatataaattacatttctctctgagttcctgattcaagatctctgtagaagaagaataacaaagaacacctaggaatgatacaaatgatactttcaattttggcacttgtctgccctactgccatgtcctcatgagagtatccctgaactcagttctcgttggtcatttgacgtttgctgggagcgtactatgggcgaggtcttatgctgagggtgagcctagtggtgtctcacttcttgtagcttgggtcaggaaatggagatcagctactgtatcccagaaccttcttgccttcccagtcccaaggcaggtgctgtgggaagagtgtgtataaggtctgatggggacagacctggggtgaatctcagtggcacttctcaacagctatagatccctaagtaagttatctaatcatcatccccacagtgttctcagatgaaaatggggggtaataccccatctcataggagtttaaaaggattaaatagggaatgtagctatcatcttgtgcctggaattctgcaaagcatatgaaggtgcccttggaacttccttcccatttttcatatttgctctgccacctctacacccagccccgctttctgcaaccaattgtattataaccccctcccaaacacttagtgcatcctcccactcatgtaatttgtttaccttgttttctatttatttcttttgagatggggtctctgtcagccaggctggagtgctgttgcatgatctcaggtcactgcaacctctgcttcttgggctcaagtgatcctcttgcctcagcctcctgagtagctgggaccataggcacacaccatcatgcccagctaattttttgcatttttgttagaaacggtttcaccaggtttcccaggcttgtcttgaactcctgagtcaagtgattcgtgtgcctcagcttcccaaagtgctgggattacagatgtaagccaccgtgcttggccttaccttattttctaagaactgatgaccataagtaagttttggcacacaccactttgtatgcttcgtctctcatcccacatgtccgtggagataaacctcattgacatggaacctcagaggcagcttgcagaaggaataatacatcacaacaagatggcaacactctttaagagctgcatttccagtcctctggctttgtttcagtggggctgcttttaggttgattgaataactagcagcaacgatagcacctaaattattagttaatgaaagtctgtaatttgctaggcatgtgctaaccagtttacataaatcatctgaaagcctcacaataactttgaaaggctaggttttccctttcacagatgaagaagttgaatatttgatttatttattcattaaggaagagatttttaaataaaaataatttttttgtagagatggggattccctatgttccccagactggtctcgaactcctgggctcaagctatcctcctgcctcagccgccaaaaatgctgagattacaggtgtgagccaccatgcccaactaaggaacaaattttaatgggtgcttcttatgtgaaaaacatgggattagacactggggatagaaaaccgaatgacacatagtccttgctgttaggaaatatatggtctgttgggaaatctggcagatccacagacaattacaatcctgaggtaaaccttgggaagggttagaaaatacagaagatgggctgggtgcagtggctcacacctgtaatcctagcactttgagaggccaaggcaggcatattgcctgagctcaggagttcaaaaccagcctaggcaacacggtgaaaccctgtctctactaaaatacaaaaaattagccaggcgtggcagtgtgcacctgtagtcccagctactcaggaggctgaggcaggagaatcgcttgaaccctgaaggtggaggttgcagtgagccaagataacgccactgcattccagcctggatggcagagcaagactccatctccaaaaaaaaaaaaaaaaa

SEQ ID NO: 9492 - DNA, 203 bp, Homo sapiens
ggtttaggttaagtataacctaaaggaaggcctgtaacgaaaagactcaggctgaatgctaaccagtggggaaaacactgggggcagtagttccttgatgtccctcaatcctctccactaagcagtgacatgggcttaaatctggggcctactttccctaagctcagggaagcactgcctgacagtggatgtgggggtggggg

SEQ ID NO: 9493 - DNA, 5377 bp, Homo sapiens
cgtcgtgctctgaggaggccaggagatttctggcggcgccggcgccattttgctggagcctgcgaccgagtgggagtggagtggagcggctgtggttgccgactctttcctcttccccacggtccagtcagcgggttaattaggccatcggccctcgagccgagacttgtctcttatttagttctggggagcgcctcgtcgacatgagtgatgtggaggaaaacaacttcgagggcagagtgagtacaaagccgcgggagccgtctaggcggcggcccaatgctcggggtttcacgggaacaagcgcggtcgggcggggttgcgggtagtcccgcgaggagcaacctctggagccatcgcgattgattcctcccatcccaagatggcttctgggttccactccttccccaaacaccacggataacacccctcccccttttttggaggctgactgatacctggacttctgggtcctcttccctccccgcccccgcattgcttcctcccttctccccacccctgaggcttccttatgtctgctccgaggtgtgggtccccgtcgcggttgggcgggaggaggcggcagggagctcccctccgtccggatagtggtaggtgcttcctgcggtggcatttctggcgaccccgagcatcgtagagggtctcgggatcgaaagtgcgcggggctgctttccgggcggggagaagctggcgtgggactagctggggcctgtgtctccttggctctctatttcagtgagcggccgcgtctctgttggaaccggcggcgttgcgtctaaaaaggcgaaagccttgaggttgaaggtgggacgagcctaatgaagtggttagtcaacgaccgcaccgacccttaagcgttcttaagacgagagctgtgaggggaaactacgcaaggagcccttttcccttaatgtcccttcgactttcctttcacttcgaaatgaatgtggaaatgctgtcacgccttatttttctaattcctcgatgttgggttttttctcttctttatatctcaacttttaatgctcttcttcctatgacctttcatctaaaaactgaccactcctttacaggtttttacggtaaaaaaaaaaaaatctgtctttctttaatcttacatagctgaacgaattcattggctcagtatttttaagataactagtcagtatatactgttctgtaacttaaaagatgacctgaaaattaacaggccctctcccatttctcttctcactctatcccccaccgaagagggctcagaaaaaagtttttattaatatatttggggtcggagaaatacaaacatcacaaagaatacgatatccccagcttaaatgtactggaacgtttgtcagtgagtttcatttccaaagtttaccctacatagggaattgtagaagtgagttagtagaagtgagttcgtgtgaaaccctggaaagaaaacaaaagccccatgcaacacgttccgggctgttgtgtagatgtttattctagtcactaggggaagcacataaaaacacctgaggtgtgtgtgctgaagggcgaattttgtccttttggggagttcatgatataaacatctagaaccaaaaagtcaaatcagaaggtcagtttaggctttagttctctttgaggaaagatttaaagcaatagactataatagttacccggtagactaaaaaatttgcctttaattcttttgattggaatttttttttacaaagtttggagcatggaaacaaatgaaaattgaacctgcttattttttaggatggtgtattgatggccccaacagaactttctaaaatcatgcgataaacatatatgatagtagttgtaaaatgcttcttgttttgaaaatgttgagtaattatcgatagaaattttgctgtccattcatacattccttcaattaactttcattgttaaaaaattgggggattgatgtttggtttggtttgtggggagtgaagaggactactggagggaccttgtttgcttgctttttttctttttttaatttatcatcaagtctaggaaaggagtaagttgccgacaattgtcacttttccctcctaagaaagtaacatgttaagattcccacctaccagcctgggtgacagtgagactcccgtctcaaaaaaaaaaaaaaagattcccacccacttttaagctaaagtatatgtaggcattaaagatttatttaatagaaataaagggccctcttacggccctttgtggtcataggaaatatttttttcacaagtggtacccaagtgtattttagtgtaaatcaactagtgcttgtaggctcacctgttgtatctttttatttttcgtcttttagtttttataggatgagataattgtctttatttgtaattggttaaagaattagaacaatgcgagaagcttgtctggagatgccctttttaaaatcgtttctggccgggcgcagtggctcacgcctgtaatccaacaatttttgggaggctgaggcgggtggattacttgaggttaggagttcgagactagcctgcccaacgtggtgaaaccctgtctctactaaaaatacaaaattagccgggcgtggtggcgtgcgcctgtgatcacagctacttaggaggctgaggcaggagaattacttgaacctgggaggcggaattgcgccacgacactccagtctaggcaacagaatgagactcttgtctcaaaaataagtaaatacgtaggtccataaaagcaattttaagtggagatgtcctttggagctgggagtgaaggtagcacttaagcggtggctttgcatgtcttgataaaagtaatgagttgtttgcctcaatacagcttcaactaaaattcggattttgagctcaaaaaatgttaatgcccttcatagaaattaaggggaatggaaatcttttcttaacattttacacctctacccctaaaattttaagaactgtactttataaaaatgtgcaattttcatacagcatcccagtgttgatcatggaggttaatgattctttattgttagggacctatcttgtaattccagagttatttatgttttctacagttgaagaggaaaaataccgcttcttattgcctccttttcaggatttcttctggcttcttgagtagctggagtatttttgagagactcctacaggccctgcggggtggcacatgcctgtaatcctagctacttaggaggctgaggtgggagaattgcttaaacccgggaggcagaggttgcagtgagccgagatcgcatcactgcactccagcctgggcgacagagcaagactctgtctcgaaaaaaaaaaaggcaaacaaatttatctgtatcaatttggaattaaaagatttgtgtgtatagattttttgttaaaaatagaagaaatagggggagggtccttttctgaaatctgagaatgatagggatgatgactatcaaaacccaggcctgtgactggcttgtttaaaaacaaaacaaggccggcccggtggctcacgcctgtaatcccagcgctttgggaggctgaggcgggcggatcacaaggtcaagagatggagaccatcctggccaatatggtgaaatacagtctctactaaaaatacaaaaattagctgggcgtggtggcgcgcgtctgtagtcccagctactcgggagggtgaggcagagaatcacttgaacccgggaggcggaggttgcagtgagccgaggtcggccactgcactccagcctggcaatagagcgagactcgtctcaaaaacaaaacaaaaaaaaacacagaacttttaaattgggcttaaaatttttttgtgtatgaagttttaagataaatgtgagagatgtcatagcattttgcttattcagcgtctttagcaatttaattccatatatcatcaaattgaccttacataagggtaaagctttctttcttatagtagggatagtgttaacctaagagagtcttgggtttaatctattttcctaaatttaagtactatcatttatctgattttaatgctttcagttgttctcctctccccttccatttaagcaaagaatttgtaaacttaaaaaaaattaaaatctcaaatttttatatttgaggttctttcactgaaggatgttgatctgctcaatataagtagagggcaagattttgaaaaggagcagtgcaagtaattatacccacagcgcataactaattttacagatctgtcatagaggcttatactttgtaccactcattaaatggaatatagaaccttgagatctgaaagaatgtccagggatttaaatatttagggatgtgtggtttggaaaacactttgtctgtgggcttaattttgtaaatcaaccaaactctaacctacgatgtagcatgtgtattataagaagtgtgaaatgtcatcaataatcagcatagtagtttcctagaacttgactggcagaaaactttctttgatagtatcagtgggtgctcacccattagataactaaaagatgtgtattcacgtgctaatgaattaaaactgattgctatttgttcatatgtcctcacaaatttagcaagacaggcatggaggtgaaaaaaatagtaacaactagatgagggaaagattgtatacactgaagaaaagttgagaggagaatactaaagggaaatatggtttcccttccctccttttaagttacttatatatatagttatatataatccttactgtcccatgactttcaccaaagatggagtgactaggcctgactgatatgtagaagaaaagttgtgatctttccttgaaaccaggaccctatcatctgacttaccaagattcataaatactgtataactccagaagattagaacataatgttaaatcacattagtccttacaaacttgttttttctacctttgaaattgccacttatacattagttttttgaacattacaattgatcaggatatataagctatgagacttatgaaccacgtttaaaatttgtacaaaagattataaattttacaggtgatttcacaattatggcatgagtttaaatttgattatatgtgggtgtcagttactaaatcatgtatttatgataagacttctaaattttagagaataaggaaacatacagaattagaatatgtttgagtctttgcagataaagaccacattgacttcagaatgcagcatataggcatgctgcatttaaaagaagggaaattattatttcaatttaatatgagcagtcgctatcttctttttaagggatttgttctaatagcagttacggtttaagaagataatggaagtgttgctttaacttcatag

SEQ ID NO: 9494 - DNA, 2384 bp, Homo sapiens
aatttcggtacatttcccttctttttgggtacttgtgattttcctcaatgcactagtgtgtatctatggaaatagagcgccagtgtcataaagtagcaggaaaatacatttttagtaagtctgttttacaagcttatactcatagacttggacttgagtaaatttggccctattaaatggcatagaatttgcctggccttaatgttagagtaagttacagtatagcatttaatagtttatttattttaatggatagcacatatatatattgtgttggaatttctttttatagtatgacacaggctatattaaaagactgcagttattgcttgctgtaggaattgttcatgttccgcaacattgtgtacatgtatataataacccttttcctgattaaaagaatagtacatggttattgtggttattcacagtgtgtaaaatacaactctattttaacacagaaagacaattcttaaccagcttgtattggttacactataacactttcttagtgttttagttagttccctccttttaatttttggccatttccttcaaccaacagcagggtcatcttgataataaagaatagtttaaacaagcaggccgggtgcagtggctcatgcctgtaatcccagcactttgcgaggctgaggcgggtggatcacttgaggtcaggagttcgaggccagcctggccaatgtggtgaaaccccgtctctactaaaataaaatacaaaagttagccaggtgcgatggcgggtgcctgtaatcccagctacccaggaagctgaggcagaattgcttgaacccaggagttggaggttgcaatgagaagattgtgccactgcactccagcctgggtgacagaaaaaccaaacaagcaaataaacatcaaaacaaaaacctgttaaagcaggttgtgctgtgagaagaacttttctgcctggcttctgctttatagcctataagatagactggaggcctatttaagacttttgttaaaattcatgatacgagttgagttattaatctgcccatttaaaccgggcagtgtatttttaatggttattggatgcaggagccagattactgaggaaatggtaggattccttgactggacagctttaagaacaagtagtctagtgaaacagggcagataccacccattcccagcaatcttttttgtttgcaatttcaattcattttccaaattgtggatagttttatgaatttctttgagaaaaagttgaaattatttcataatgaagacgagtcagagagaaaaggattagcctagcatttgtcctctttatataaaggacttcttatagcctgattcctaatgcagagttcagtgaaagtgacatttatttggtaacagcttttgagaaatgttactttatttctaaataattatatacttggcagtttattcttccagttaagtttactaatagttactgatttgttaatataagtttgtaagttgtttttgaaagttaaaatgaagctgggtgtggtggctcacacctgtaatcccagcgctttgggaggccaaggcgggcagatcaaggagtcaggagatggagaccagcctggccaacatagggaaaccctatctctactaaaaacacaaaaattagctgggtgtgatggcgtgcacctgtaagctgagctactcaggaggctaaggcaggagaatcgcttgaatccgggaggcggaggttgcagtgagctgagatcaggtgccactgtactccagcctgagctacagagcaagactccatctcaaaaaaaaaaaaaatagttaaaatcatagtgacaactttgtagctaggagttagagacagctaagaggactgtttttagcttagatgtttccatgaagaaatttgtgcagactgagatttcctctgagataaaaagaaagaagggcagacaacaaaggaggttaggtatttgtgacacctttgataataaaaagcaaagcttcttttaaaataaatctgatgttggccgggcgcggtggctcacacctgtaatcccagcactttgggaggctgaggcgggcagatcactagaggtcaggagtttgagaccagcctggccaacatgggaaaaccccatctctattaaaaatacaaaaattagccaggcaaggtggtgcatgcctgtaatcccagctgctcaggaggctgaggcaggagaatcacttgaacccaggaggtggaggttgcagtgagcctagatcgcaccattacactccagcctgggtgacagaatgagactcctccttcttaaaataaataagctaacatctcttaaaaagacattctatcataccataatgctttgttgctactccaaaactgggatttaaaa

SEQ ID NO: 9495 - DNA, 33 bp, Homo sapiens
tgccactgcactccagcctgggcaacagagcga

SEQ ID NO: 9496 - DNA, 1132 bp, Homo sapiens
gcccacctcagcctcccaaagtgctaggattatgtttctgtaattgtaatacatttattgtttttagaaactgtctttgctttagtggtaattttcaataaaaatagaaatagcagtggagttattaaaagagcattagttacatttttccctttttcattatcttcaaatattatatatagtaagtttgacctttttaaaatgtatacttgtatcagttttaacacatacatagattcctgtaactgtcaccactataagggtaaagaacagttagttccttcacctttgaagtcaaaccccacctctatcccaacacttggcaaccgctgatctttctccgtctcaatagctttgccttttctctttttttttcttatttttttttttgagacagcgtcttgctctgtcgcccgagctggagtgcagtgaggcaatctcggctcactgcaacctccgcctcctgggttcaagcagttctcctgccttagcctccctagtagctgggattataggcacgcaccaccacacccggctgatttttttgtatttttagtagaaatggggtttcaccatgttggccaggctggtctcaaactcttgacctcaagtgatccacctgcctcggcctcccaaagtgctgggattacaggcgtgagccactgtgcccaatcaggactttttttttttaaatttacattcaacttgtcatttttttcttgtatggattgtgccttcagagtcacacctaagagccctttgcctaagcaaaggtcatgaagattttctcatatgtttccttttaaaagtattgtggttggccaggtgccatggcttatgcctgtaatctcagcactttgagaagctgaggtgggcagattacgaggtcaggagatcgagaccatcctggctaatgcggtgaaaccccatctctactaaaaatacaaaaaaaaaaaaaaaattagccgggcgtggtggcgggcgcctgtagtcccagctacttgagaggttgaggcaggagaatagtgtgaacccgggaggtggagcttgcagtgagccgagatcgcgccactgcactccagcctgggcaacacagtgagactccatctcaaaaaaaaaaaaaaaagtatta

SEQ ID NO: 9497 - DNA, 5088 bp, Homo sapiens
  SITE (197): n equals a,t,g, or c
  SITE (198): n equals a,t,g, or c
  SITE (199): n equals a,t,g, or c
  SITE (200): n equals a,t,g, or c
  SITE (201): n equals a,t,g, or c
  SITE (202): n equals a,t,g, or c
  SITE (203): n equals a,t,g, or c
  SITE (204): n equals a,t,g, or c
  SITE (205): n equals a,t,g, or c
  SITE (206): n equals a,t,g, or c
  SITE (207): n equals a,t,g, or c
  SITE (208): n equals a,t,g, or c
  SITE (209): n equals a,t,g, or c
  SITE (210): n equals a,t,g, or c
  SITE (211): n equals a,t,g, or c
  SITE (212): n equals a,t,g, or c
  SITE (213): n equals a,t,g, or c
  SITE (214): n equals a,t,g, or c
  SITE (215): n equals a,t,g, or c
  SITE (216): n equals a,t,g, or c
  SITE (217): n equals a,t,g, or c
  SITE (218): n equals a,t,g, or c
  SITE (219): n equals a,t,g, or c
  SITE (220): n equals a,t,g, or c
  SITE (221): n equals a,t,g, or c
  SITE (222): n equals a,t,g, or c
  SITE (223): n equals a,t,g, or c
  SITE (224): n equals a,t,g, or c
  SITE (225): n equals a,t,g, or c
  SITE (226): n equals a,t,g, or c
  SITE (227): n equals a,t,g, or c
  SITE (228): n equals a,t,g, or c
  SITE (229): n equals a,t,g, or c
  SITE (230): n equals a,t,g, or c
  SITE (231): n equals a,t,g, or c
  SITE (232): n equals a,t,g, or c
  SITE (233): n equals a,t,g, or c
  SITE (234): n equals a,t,g, or c
  SITE (235): n equals a,t,g, or c
  SITE (236): n equals a,t,g, or c
  SITE (237): n equals a,t,g, or c
  SITE (238): n equals a,t,g, or c
  SITE (239): n equals a,t,g, or c
  SITE (240): n equals a,t,g, or c
  SITE (241): n equals a,t,g, or c
  SITE (242): n equals a,t,g, or c
  SITE (243): n equals a,t,g, or c
  SITE (244): n equals a,t,g, or c
  SITE (245): n equals a,t,g, or c
  SITE (246): n equals a,t,g, or c
  SITE (247): n equals a,t,g, or c
  SITE (248): n equals a,t,g, or c
  SITE (249): n equals a,t,g, or c
  SITE (250): n equals a,t,g, or c
  SITE (251): n equals a,t,g, or c
  SITE (252): n equals a,t,g, or c
  SITE (253): n equals a,t,g, or c
  SITE (254): n equals a,t,g, or c
  SITE (255): n equals a,t,g, or c
  SITE (256): n equals a,t,g, or c
  SITE (257): n equals a,t,g, or c
  SITE (258): n equals a,t,g, or c
  SITE (259): n equals a,t,g, or c
  SITE (260): n equals a,t,g, or c
  SITE (261): n equals a,t,g, or c
  SITE (262): n equals a,t,g, or c
  SITE (263): n equals a,t,g, or c
  SITE (264): n equals a,t,g, or c
  SITE (265): n equals a,t,g, or c
  SITE (266): n equals a,t,g, or c
  SITE (267): n equals a,t,g, or c
  SITE (268): n equals a,t,g, or c
  SITE (269): n equals a,t,g, or c
  SITE (270): n equals a,t,g, or c
  SITE (271): n equals a,t,g, or c
  SITE (272): n equals a,t,g, or c
  SITE (273): n equals a,t,g, or c
  SITE (274): n equals a,t,g, or c
  SITE (275): n equals a,t,g, or c
  SITE (276): n equals a,t,g, or c
  SITE (277): n equals a,t,g, or c
  SITE (278): n equals a,t,g, or c
  SITE (279): n equals a,t,g, or c
  SITE (280): n equals a,t,g, or c
  SITE (281): n equals a,t,g, or c
  SITE (282): n equals a,t,g, or c
  SITE (283): n equals a,t,g, or c
  SITE (284): n equals a,t,g, or c
  SITE (285): n equals a,t,g, or c
  SITE (286): n equals a,t,g, or c
  SITE (287): n equals a,t,g, or c
  SITE (288): n equals a,t,g, or c
  SITE (289): n equals a,t,g, or c
  SITE (290): n equals a,t,g, or c
  SITE (291): n equals a,t,g, or c
  SITE (292): n equals a,t,g, or c
  SITE (293): n equals a,t,g, or c
  SITE (294): n equals a,t,g, or c
  SITE (295): n equals a,t,g, or c
  SITE (296): n equals a,t,g, or c
  SITE (297): n equals a,t,g, or c
  SITE (298): n equals a,t,g, or c
  SITE (299): n equals a,t,g, or c
  SITE (300): n equals a,t,g, or c
  SITE (301): n equals a,t,g, or c
  SITE (302): n equals a,t,g, or c
  SITE (303): n equals a,t,g, or c
  SITE (304): n equals a,t,g, or c
  SITE (305): n equals a,t,g, or c
  SITE (306): n equals a,t,g, or c
  SITE (307): n equals a,t,g, or c
  SITE (308): n equals a,t,g, or c
  SITE (309): n equals a,t,g, or c
  SITE (310): n equals a,t,g, or c
  SITE (311): n equals a,t,g, or c
  SITE (312): n equals a,t,g, or c
  SITE (313): n equals a,t,g, or c
  SITE (314): n equals a,t,g, or c
  SITE (315): n equals a,t,g, or c
  SITE (316): n equals a,t,g, or c
  SITE (317): n equals a,t,g, or c
  SITE (318): n equals a,t,g, or c
  SITE (319): n equals a,t,g, or c
  SITE (320): n equals a,t,g, or c
  SITE (321): n equals a,t,g, or c
  SITE (322): n equals a,t,g, or c
  SITE (323): n equals a,t,g, or c
  SITE (324): n equals a,t,g, or c
  SITE (325): n equals a,t,g, or c
  SITE (326): n equals a,t,g, or c
  SITE (327): n equals a,t,g, or c
  SITE (328): n equals a,t,g, or c
  SITE (329): n equals a,t,g, or c
  SITE (330): n equals a,t,g, or c
  SITE (331): n equals a,t,g, or c
  SITE (332): n equals a,t,g, or c
  SITE (333): n equals a,t,g, or c
  SITE (334): n equals a,t,g, or c
  SITE (335): n equals a,t,g, or c
  SITE (336): n equals a,t,g, or c
  SITE (337): n equals a,t,g, or c
  SITE (338): n equals a,t,g, or c
  SITE (339): n equals a,t,g, or c
  SITE (340): n equals a,t,g, or c
  SITE (341): n equals a,t,g, or c
  SITE (342): n equals a,t,g, or c
  SITE (343): n equals a,t,g, or c
  SITE (344): n equals a,t,g, or c
  SITE (345): n equals a,t,g, or c
  SITE (346): n equals a,t,g, or c
  SITE (347): n equals a,t,g, or c
  SITE (348): n equals a,t,g, or c
  SITE (349): n equals a,t,g, or c
  SITE (350): n equals a,t,g, or c
  SITE (351): n equals a,t,g, or c
  SITE (352): n equals a,t,g, or c
  SITE (353): n equals a,t,g, or c
  SITE (354): n equals a,t,g, or c
  SITE (355): n equals a,t,g, or c
  SITE (356): n equals a,t,g, or c
  SITE (357): n equals a,t,g, or c
  SITE (358): n equals a,t,g, or c
  SITE (359): n equals a,t,g, or c
  SITE (360): n equals a,t,g, or c
  SITE (361): n equals a,t,g, or c
  SITE (362): n equals a,t,g, or c
  SITE (363): n equals a,t,g, or c
  SITE (364): n equals a,t,g, or c
  SITE (365): n equals a,t,g, or c
  SITE (366): n equals a,t,g, or c
  SITE (367): n equals a,t,g, or c
  SITE (368): n equals a,t,g, or c
  SITE (369): n equals a,t,g, or c
  SITE (370): n equals a,t,g, or c
  SITE (371): n equals a,t,g, or c
  SITE (372): n equals a,t,g, or c
  SITE (373): n equals a,t,g, or c
  SITE (374): n equals a,t,g, or c
  SITE (375): n equals a,t,g, or c
  SITE (376): n equals a,t,g, or c
  SITE (377): n equals a,t,g, or c
  SITE (378): n equals a,t,g, or c
  SITE (379): n equals a,t,g, or c
  SITE (380): n equals a,t,g, or c
  SITE (381): n equals a,t,g, or c
  SITE (382): n equals a,t,g, or c
  SITE (383): n equals a,t,g, or c
  SITE (384): n equals a,t,g, or c
  SITE (385): n equals a,t,g, or c
  SITE (386): n equals a,t,g, or c
  SITE (387): n equals a,t,g, or c
  SITE (388): n equals a,t,g, or c
  SITE (389): n equals a,t,g, or c
  SITE (390): n equals a,t,g, or c
  SITE (391): n equals a,t,g, or c
  SITE (392): n equals a,t,g, or c
  SITE (393): n equals a,t,g, or c
  SITE (394): n equals a,t,g, or c
  SITE (395): n equals a,t,g, or c
  SITE (396): n equals a,t,g, or c
  SITE (397): n equals a,t,g, or c
  SITE (398): n equals a,t,g, or c
  SITE (399): n equals a,t,g, or c
  SITE (400): n equals a,t,g, or c
  SITE (401): n equals a,t,g, or c
  SITE (402): n equals a,t,g, or c
  SITE (403): n equals a,t,g, or c
  SITE (404): n equals a,t,g, or c
  SITE (405): n equals a,t,g, or c
  SITE (406): n equals a,t,g, or c
  SITE (407): n equals a,t,g, or c
  SITE (408): n equals a,t,g, or c
  SITE (409): n equals a,t,g, or c
  SITE (410): n equals a,t,g, or c
  SITE (411): n equals a,t,g, or c
  SITE (412): n equals a,t,g, or c
  SITE (413): n equals a,t,g, or c
  SITE (414): n equals a,t,g, or c
  SITE (415): n equals a,t,g, or c
  SITE (416): n equals a,t,g, or c
  SITE (417): n equals a,t,g, or c
  SITE (418): n equals a,t,g, or c
  SITE (419): n equals a,t,g, or c
  SITE (420): n equals a,t,g, or c
  SITE (421): n equals a,t,g, or c
  SITE (422): n equals a,t,g, or c
  SITE (423): n equals a,t,g, or c
  SITE (424): n equals a,t,g, or c
  SITE (425): n equals a,t,g, or c
  SITE (426): n equals a,t,g, or c
  SITE (427): n equals a,t,g, or c
  SITE (428): n equals a,t,g, or c
  SITE (429): n equals a,t,g, or c
  SITE (430): n equals a,t,g, or c
  SITE (431): n equals a,t,g, or c
  SITE (432): n equals a,t,g, or c
  SITE (433): n equals a,t,g, or c
  SITE (434): n equals a,t,g, or c
  SITE (435): n equals a,t,g, or c
  SITE (436): n equals a,t,g, or c
  SITE (437): n equals a,t,g, or c
  SITE (438): n equals a,t,g, or c
  SITE (439): n equals a,t,g, or c
  SITE (440): n equals a,t,g, or c
  SITE (441): n equals a,t,g, or c
  SITE (442): n equals a,t,g, or c
  SITE (443): n equals a,t,g, or c
  SITE (444): n equals a,t,g, or c
  SITE (445): n equals a,t,g, or c
  SITE (446): n equals a,t,g, or c
  SITE (447): n equals a,t,g, or c
  SITE (448): n equals a,t,g, or c
  SITE (449): n equals a,t,g, or c
  SITE (450): n equals a,t,g, or c
  SITE (451): n equals a,t,g, or c
  SITE (452): n equals a,t,g, or c
  SITE (453): n equals a,t,g, or c
  SITE (454): n equals a,t,g, or c
  SITE (455): n equals a,t,g, or c
  SITE (456): n equals a,t,g, or c
  SITE (457): n equals a,t,g, or c
  SITE (458): n equals a,t,g, or c
  SITE (459): n equals a,t,g, or c
  SITE (460): n equals a,t,g, or c
  SITE (461): n equals a,t,g, or c
  SITE (462): n equals a,t,g, or c
  SITE (463): n equals a,t,g, or c
  SITE (464): n equals a,t,g, or c
  SITE (465): n equals a,t,g, or c
  SITE (466): n equals a,t,g, or c
  SITE (467): n equals a,t,g, or c
  SITE (468): n equals a,t,g, or c
  SITE (469): n equals a,t,g, or c
  SITE (470): n equals a,t,g, or c
  SITE (471): n equals a,t,g, or c
  SITE (472): n equals a,t,g, or c
  SITE (473): n equals a,t,g, or c
  SITE (474): n equals a,t,g, or c
  SITE (475): n equals a,t,g, or c
  SITE (476): n equals a,t,g, or c
  SITE (477): n equals a,t,g, or c
  SITE (478): n equals a,t,g, or c
  SITE (479): n equals a,t,g, or c
  SITE (480): n equals a,t,g, or c
  SITE (481): n equals a,t,g, or c
  SITE (482): n equals a,t,g, or c
  SITE (483): n equals a,t,g, or c
  SITE (484): n equals a,t,g, or c
  SITE (485): n equals a,t,g, or c
  SITE (486): n equals a,t,g, or c
  SITE (487): n equals a,t,g, or c
  SITE (488): n equals a,t,g, or c
  SITE (489): n equals a,t,g, or c
  SITE (490): n equals a,t,g, or c
  SITE (491): n equals a,t,g, or c
  SITE (492): n equals a,t,g, or c
  SITE (493): n equals a,t,g, or c
  SITE (494): n equals a,t,g, or c
  SITE (495): n equals a,t,g, or c
  SITE (496): n equals a,t,g, or c
  SITE (497): n equals a,t,g, or c
  SITE (498): n equals a,t,g, or c
  SITE (499): n equals a,t,g, or c
  SITE (500): n equals a,t,g, or c
  SITE (501): n equals a,t,g, or c
  SITE (502): n equals a,t,g, or c
  SITE (503): n equals a,t,g, or c
  SITE (504): n equals a,t,g, or c
  SITE (505): n equals a,t,g, or c
  SITE (506): n equals a,t,g, or c
  SITE (507): n equals a,t,g, or c
  SITE (508): n equals a,t,g, or c
  SITE (509): n equals a,t,g, or c
  SITE (510): n equals a,t,g, or c
  SITE (511): n equals a,t,g, or c
  SITE (512): n equals a,t,g, or c
  SITE (513): n equals a,t,g, or c
  SITE (514): n equals a,t,g, or c
  SITE (515): n equals a,t,g, or c
  SITE (516): n equals a,t,g, or c
  SITE (517): n equals a,t,g, or c
  SITE (518): n equals a,t,g, or c
  SITE (519): n equals a,t,g, or c
  SITE (520): n equals a,t,g, or c
  SITE (521): n equals a,t,g, or c
  SITE (522): n equals a,t,g, or c
  SITE (523): n equals a,t,g, or c
  SITE (524): n equals a,t,g, or c
  SITE (525): n equals a,t,g, or c
  SITE (526): n equals a,t,g, or c
  SITE (527): n equals a,t,g, or c
  SITE (528): n equals a,t,g, or c
  SITE (529): n equals a,t,g, or c
  SITE (530): n equals a,t,g, or c
  SITE (531): n equals a,t,g, or c
  SITE (532): n equals a,t,g, or c
  SITE (533): n equals a,t,g, or c
  SITE (534): n equals a,t,g, or c
  SITE (535): n equals a,t,g, or c
  SITE (536): n equals a,t,g, or c
  SITE (537): n equals a,t,g, or c
  SITE (538): n equals a,t,g, or c
  SITE (539): n equals a,t,g, or c
  SITE (540): n equals a,t,g, or c
  SITE (541): n equals a,t,g, or c
  SITE (542): n equals a,t,g, or c
  SITE (543): n equals a,t,g, or c
  SITE (544): n equals a,t,g, or c
  SITE (545): n equals a,t,g, or c
  SITE (546): n equals a,t,g, or c
  SITE (547): n equals a,t,g, or c
  SITE (548): n equals a,t,g, or c
  SITE (549): n equals a,t,g, or c
  SITE (550): n equals a,t,g, or c
  SITE (551): n equals a,t,g, or c
  SITE (552): n equals a,t,g, or c
  SITE (553): n equals a,t,g, or c
  SITE (554): n equals a,t,g, or c
  SITE (555): n equals a,t,g, or c
  SITE (556): n equals a,t,g, or c
  SITE (557): n equals a,t,g, or c
  SITE (558): n equals a,t,g, or c
  SITE (559): n equals a,t,g, or c
  SITE (560): n equals a,t,g, or c
  SITE (561): n equals a,t,g, or c
  SITE (562): n equals a,t,g, or c
  SITE (563): n equals a,t,g, or c
  SITE (564): n equals a,t,g, or c
  SITE (565): n equals a,t,g, or c
  SITE (566): n equals a,t,g, or c
  SITE (567): n equals a,t,g, or c
  SITE (568): n equals a,t,g, or c
  SITE (569): n equals a,t,g, or c
  SITE (570): n equals a,t,g, or c
  SITE (571): n equals a,t,g, or c
  SITE (572): n equals a,t,g, or c
  SITE (573): n equals a,t,g, or c
  SITE (574): n equals a,t,g, or c
  SITE (575): n equals a,t,g, or c
  SITE (576): n equals a,t,g, or c
  SITE (577): n equals a,t,g, or c
  SITE (578): n equals a,t,g, or c
  SITE (579): n equals a,t,g, or c
  SITE (580): n equals a,t,g, or c
  SITE (581): n equals a,t,g, or c
  SITE (582): n equals a,t,g, or c
  SITE (583): n equals a,t,g, or c
  SITE (584): n equals a,t,g, or c
  SITE (585): n equals a,t,g, or c
  SITE (586): n equals a,t,g, or c
  SITE (587): n equals a,t,g, or c
  SITE (588): n equals a,t,g, or c
  SITE (589): n equals a,t,g, or c
  SITE (590): n equals a,t,g, or c
  SITE (591): n equals a,t,g, or c
  SITE (592): n equals a,t,g, or c
  SITE (593): n equals a,t,g, or c
  SITE (594): n equals a,t,g, or c
  SITE (595): n equals a,t,g, or c
  SITE (596): n equals a,t,g, or c
  SITE (597): n equals a,t,g, or c
  SITE (598): n equals a,t,g, or c
  SITE (599): n equals a,t,g, or c
  SITE (600): n equals a,t,g, or c
  SITE (601): n equals a,t,g, or c
  SITE (602): n equals a,t,g, or c
  SITE (603): n equals a,t,g, or c
  SITE (604): n equals a,t,g, or c
  SITE (605): n equals a,t,g, or c
  SITE (606): n equals a,t,g, or c
  SITE (607): n equals a,t,g, or c
  SITE (608): n equals a,t,g, or c
  SITE (609): n equals a,t,g, or c
  SITE (610): n equals a,t,g, or c
  SITE (611): n equals a,t,g, or c
  SITE (612): n equals a,t,g, or c
  SITE (613): n equals a,t,g, or c
  SITE (614): n equals a,t,g, or c
  SITE (615): n equals a,t,g, or c
  SITE (616): n equals a,t,g, or c
  SITE (617): n equals a,t,g, or c
  SITE (618): n equals a,t,g, or c
  SITE (619): n equals a,t,g, or c
  SITE (620): n equals a,t,g, or c
  SITE (621): n equals a,t,g, or c
  SITE (622): n equals a,t,g, or c
  SITE (623): n equals a,t,g, or c
  SITE (624): n equals a,t,g, or c
  SITE (625): n equals a,t,g, or c
  SITE (626): n equals a,t,g, or c
  SITE (627): n equals a,t,g, or c
  SITE (628): n equals a,t,g, or c
  SITE (629): n equals a,t,g, or c
  SITE (630): n equals a,t,g, or c
  SITE (631): n equals a,t,g, or c
  SITE (632): n equals a,t,g, or c
  SITE (633): n equals a,t,g, or c
  SITE (634): n equals a,t,g, or c
  SITE (635): n equals a,t,g, or c
  SITE (636): n equals a,t,g, or c
  SITE (637): n equals a,t,g, or c
  SITE (638): n equals a,t,g, or c
  SITE (639): n equals a,t,g, or c
  SITE (640): n equals a,t,g, or c
  SITE (641): n equals a,t,g, or c
  SITE (642): n equals a,t,g, or c
  SITE (643): n equals a,t,g, or c
  SITE (644): n equals a,t,g, or c
  SITE (645): n equals a,t,g, or c
  SITE (646): n equals a,t,g, or c
  SITE (647): n equals a,t,g, or c
  SITE (648): n equals a,t,g, or c
  SITE (649): n equals a,t,g, or c
  SITE (650): n equals a,t,g, or c
  SITE (651): n equals a,t,g, or c
  SITE (652): n equals a,t,g, or c
  SITE (653): n equals a,t,g, or c
  SITE (654): n equals a,t,g, or c
  SITE (655): n equals a,t,g, or c
  SITE (656): n equals a,t,g, or c
  SITE (657): n equals a,t,g, or c
  SITE (658): n equals a,t,g, or c
  SITE (659): n equals a,t,g, or c
  SITE (660): n equals a,t,g, or c
  SITE (661): n equals a,t,g, or c
  SITE (662): n equals a,t,g, or c
  SITE (663): n equals a,t,g, or c
  SITE (664): n equals a,t,g, or c
  SITE (665): n equals a,t,g, or c
  SITE (666): n equals a,t,g, or c
  SITE (667): n equals a,t,g, or c
  SITE (668): n equals a,t,g, or c
  SITE (669): n equals a,t,g, or c
  SITE (670): n equals a,t,g, or c
  SITE (671): n equals a,t,g, or c
  SITE (672): n equals a,t,g, or c
  SITE (673): n equals a,t,g, or c
  SITE (674): n equals a,t,g, or c
  SITE (675): n equals a,t,g, or c
  SITE (676): n equals a,t,g, or c
  SITE (677): n equals a,t,g, or c
  SITE (678): n equals a,t,g, or c
  SITE (679): n equals a,t,g, or c
  SITE (680): n equals a,t,g, or c
  SITE (681): n equals a,t,g, or c
  SITE (682): n equals a,t,g, or c
  SITE (683): n equals a,t,g, or c
  SITE (684): n equals a,t,g, or c
  SITE (685): n equals a,t,g, or c
  SITE (686): n equals a,t,g, or c
  SITE (687): n equals a,t,g, or c
  SITE (688): n equals a,t,g, or c
  SITE (689): n equals a,t,g, or c
  SITE (690): n equals a,t,g, or c
  SITE (691): n equals a,t,g, or c
  SITE (692): n equals a,t,g, or c
  SITE (693): n equals a,t,g, or c
  SITE (694): n equals a,t,g, or c
  SITE (695): n equals a,t,g, or c
  SITE (696): n equals a,t,g, or c
  SITE (697): n equals a,t,g, or c
  SITE (698): n equals a,t,g, or c
  SITE (699): n equals a,t,g, or c
  SITE (700): n equals a,t,g, or c
  SITE (701): n equals a,t,g, or c
  SITE (702): n equals a,t,g, or c
  SITE (703): n equals a,t,g, or c
  SITE (704): n equals a,t,g, or c
  SITE (705): n equals a,t,g, or c
  SITE (706): n equals a,t,g, or c
  SITE (707): n equals a,t,g, or c
  SITE (708): n equals a,t,g, or c
  SITE (709): n equals a,t,g, or c
  SITE (710): n equals a,t,g, or c
  SITE (711): n equals a,t,g, or c
  SITE (712): n equals a,t,g, or c
  SITE (713): n equals a,t,g, or c
  SITE (714): n equals a,t,g, or c
  SITE (715): n equals a,t,g, or c
  SITE (716): n equals a,t,g, or c
  SITE (717): n equals a,t,g, or c
  SITE (718): n equals a,t,g, or c
  SITE (719): n equals a,t,g, or c
  SITE (720): n equals a,t,g, or c
  SITE (721): n equals a,t,g, or c
  SITE (722): n equals a,t,g, or c
  SITE (723): n equals a,t,g, or c
  SITE (724): n equals a,t,g, or c
  SITE (725): n equals a,t,g, or c
  SITE (726): n equals a,t,g, or c
  SITE (727): n equals a,t,g, or c
  SITE (728): n equals a,t,g, or c
  SITE (729): n equals a,t,g, or c
  SITE (730): n equals a,t,g, or c
  SITE (731): n equals a,t,g, or c
  SITE (732): n equals a,t,g, or c
  SITE (733): n equals a,t,g, or c
  SITE (734): n equals a,t,g, or c
  SITE (735): n equals a,t,g, or c
  SITE (736): n equals a,t,g, or c
  SITE (737): n equals a,t,g, or c
  SITE (738): n equals a,t,g, or c
  SITE (739): n equals a,t,g, or c
  SITE (740): n equals a,t,g, or c
  SITE (741): n equals a,t,g, or c
  SITE (742): n equals a,t,g, or c
  SITE (743): n equals a,t,g, or c
  SITE (744): n equals a,t,g, or c
  SITE (745): n equals a,t,g, or c
  SITE (746): n equals a,t,g, or c
  SITE (747): n equals a,t,g, or c
  SITE (748): n equals a,t,g, or c
  SITE (749): n equals a,t,g, or c
  SITE (750): n equals a,t,g, or c
  SITE (751): n equals a,t,g, or c
  SITE (752): n equals a,t,g, or c
  SITE (753): n equals a,t,g, or c
  SITE (754): n equals a,t,g, or c
  SITE (755): n equals a,t,g, or c
  SITE (756): n equals a,t,g, or c
  SITE (757): n equals a,t,g, or c
  SITE (758): n equals a,t,g, or c
  SITE (759): n equals a,t,g, or c
  SITE (760): n equals a,t,g, or c
  SITE (761): n equals a,t,g, or c
  SITE (762): n equals a,t,g, or c
  SITE (763): n equals a,t,g, or c
  SITE (764): n equals a,t,g, or c
  SITE (765): n equals a,t,g, or c
  SITE (766): n equals a,t,g, or c
  SITE (767): n equals a,t,g, or c
  SITE (768): n equals a,t,g, or c
  SITE (769): n equals a,t,g, or c
  SITE (770): n equals a,t,g, or c
  SITE (771): n equals a,t,g, or c
  SITE (772): n equals a,t,g, or c
  SITE (773): n equals a,t,g, or c
  SITE (774): n equals a,t,g, or c
  SITE (775): n equals a,t,g, or c
  SITE (776): n equals a,t,g, or c
  SITE (777): n equals a,t,g, or c
  SITE (778): n equals a,t,g, or c
  SITE (779): n equals a,t,g, or c
  SITE (780): n equals a,t,g, or c
  SITE (781): n equals a,t,g, or c
  SITE (782): n equals a,t,g, or c
  SITE (783): n equals a,t,g, or c
  SITE (784): n equals a,t,g, or c
  SITE (785): n equals a,t,g, or c
  SITE (786): n equals a,t,g, or c
  SITE (787): n equals a,t,g, or c
  SITE (788): n equals a,t,g, or c
  SITE (789): n equals a,t,g, or c
  SITE (790): n equals a,t,g, or c
  SITE (791): n equals a,t,g, or c
  SITE (792): n equals a,t,g, or c
  SITE (793): n equals a,t,g, or c
  SITE (794): n equals a,t,g, or c
  SITE (795): n equals a,t,g, or c
  SITE (796): n equals a,t,g, or c
  SITE (797): n equals a,t,g, or c
  SITE (798): n equals a,t,g, or c
  SITE (799): n equals a,t,g, or c
  SITE (800): n equals a,t,g, or c
  SITE (801): n equals a,t,g, or c
  SITE (802): n equals a,t,g, or c
  SITE (803): n equals a,t,g, or c
  SITE (804): n equals a,t,g, or c
  SITE (805): n equals a,t,g, or c
  SITE (806): n equals a,t,g, or c
  SITE (807): n equals a,t,g, or c
  SITE (808): n equals a,t,g, or c
  SITE (809): n equals a,t,g, or c
  SITE (810): n equals a,t,g, or c
  SITE (811): n equals a,t,g, or c
  SITE (812): n equals a,t,g, or c
  SITE (813): n equals a,t,g, or c
  SITE (814): n equals a,t,g, or c
  SITE (815): n equals a,t,g, or c
  SITE (816): n equals a,t,g, or c
  SITE (817): n equals a,t,g, or c
  SITE (818): n equals a,t,g, or c
  SITE (819): n equals a,t,g, or c
  SITE (820): n equals a,t,g, or c
  SITE (821): n equals a,t,g, or c
  SITE (822): n equals a,t,g, or c
  SITE (823): n equals a,t,g, or c
  SITE (824): n equals a,t,g, or c
  SITE (825): n equals a,t,g, or c
  SITE (826): n equals a,t,g, or c
  SITE (827): n equals a,t,g, or c
  SITE (828): n equals a,t,g, or c
  SITE (829): n equals a,t,g, or c
  SITE (830): n equals a,t,g, or c
  SITE (831): n equals a,t,g, or c
  SITE (832): n equals a,t,g, or c
  SITE (833): n equals a,t,g, or c
  SITE (834): n equals a,t,g, or c
  SITE (835): n equals a,t,g, or c
  SITE (836): n equals a,t,g, or c
  SITE (837): n equals a,t,g, or c
  SITE (838): n equals a,t,g, or c
  SITE (839): n equals a,t,g, or c
  SITE (840): n equals a,t,g, or c
  SITE (841): n equals a,t,g, or c
  SITE (842): n equals a,t,g, or c
  SITE (843): n equals a,t,g, or c
  SITE (844): n equals a,t,g, or c
  SITE (845): n equals a,t,g, or c
  SITE (846): n equals a,t,g, or c
  SITE (847): n equals a,t,g, or c
  SITE (848): n equals a,t,g, or c
  SITE (849): n equals a,t,g, or c
  SITE (850): n equals a,t,g, or c
  SITE (851): n equals a,t,g, or c
  SITE (852): n equals a,t,g, or c
  SITE (853): n equals a,t,g, or c
  SITE (854): n equals a,t,g, or c
  SITE (855): n equals a,t,g, or c
  SITE (856): n equals a,t,g, or c
  SITE (857): n equals a,t,g, or c
  SITE (858): n equals a,t,g, or c
  SITE (859): n equals a,t,g, or c
  SITE (860): n equals a,t,g, or c
  SITE (861): n equals a,t,g, or c
  SITE (862): n equals a,t,g, or c
  SITE (863): n equals a,t,g, or c
  SITE (864): n equals a,t,g, or c
  SITE (865): n equals a,t,g, or c
  SITE (866): n equals a,t,g, or c
  SITE (867): n equals a,t,g, or c
  SITE (868): n equals a,t,g, or c
  SITE (869): n equals a,t,g, or c
  SITE (870): n equals a,t,g, or c
  SITE (871): n equals a,t,g, or c
  SITE (872): n equals a,t,g, or c
  SITE (873): n equals a,t,g, or c
  SITE (874): n equals a,t,g, or c
  SITE (875): n equals a,t,g, or c
  SITE (876): n equals a,t,g, or c
  SITE (877): n equals a,t,g, or c
  SITE (878): n equals a,t,g, or c
  SITE (879): n equals a,t,g, or c
  SITE (880): n equals a,t,g, or c
  SITE (881): n equals a,t,g, or c
  SITE (882): n equals a,t,g, or c
  SITE (883): n equals a,t,g, or c
  SITE (884): n equals a,t,g, or c
  SITE (885): n equals a,t,g, or c
  SITE (886): n equals a,t,g, or c
  SITE (887): n equals a,t,g, or c
  SITE (888): n equals a,t,g, or c
  SITE (889): n equals a,t,g, or c
  SITE (890): n equals a,t,g, or c
  SITE (891): n equals a,t,g, or c
  SITE (892): n equals a,t,g, or c
  SITE (893): n equals a,t,g, or c
  SITE (894): n equals a,t,g, or c
  SITE (895): n equals a,t,g, or c
  SITE (896): n equals a,t,g, or c
  SITE (897): n equals a,t,g, or c
  SITE (898): n equals a,t,g, or c
  SITE (899): n equals a,t,g, or c
  SITE (900): n equals a,t,g, or c
  SITE (901): n equals a,t,g, or c
  SITE (902): n equals a,t,g, or c
  SITE (903): n equals a,t,g, or c
  SITE (904): n equals a,t,g, or c
  SITE (905): n equals a,t,g, or c
  SITE (906): n equals a,t,g, or c
  SITE (907): n equals a,t,g, or c
  SITE (908): n equals a,t,g, or c
  SITE (909): n equals a,t,g, or c
  SITE (910): n equals a,t,g, or c
  SITE (911): n equals a,t,g, or c
  SITE (912): n equals a,t,g, or c
  SITE (913): n equals a,t,g, or c
  SITE (914): n equals a,t,g, or c
  SITE (915): n equals a,t,g, or c
  SITE (916): n equals a,t,g, or c
  SITE (917): n equals a,t,g, or c
  SITE (918): n equals a,t,g, or c
  SITE (919): n equals a,t,g, or c
  SITE (920): n equals a,t,g, or c
  SITE (921): n equals a,t,g, or c
  SITE (922): n equals a,t,g, or c
  SITE (923): n equals a,t,g, or c
  SITE (924): n equals a,t,g, or c
  SITE (925): n equals a,t,g, or c
  SITE (926): n equals a,t,g, or c
  SITE (927): n equals a,t,g, or c
  SITE (928): n equals a,t,g, or c
  SITE (929): n equals a,t,g, or c
  SITE (930): n equals a,t,g, or c
  SITE (931): n equals a,t,g, or c
  SITE (932): n equals a,t,g, or c
  SITE (933): n equals a,t,g, or c
  SITE (934): n equals a,t,g, or c
  SITE (935): n equals a,t,g, or c
  SITE (936): n equals a,t,g, or c
  SITE (937): n equals a,t,g, or c
  SITE (938): n equals a,t,g, or c
  SITE (939): n equals a,t,g, or c
  SITE (940): n equals a,t,g, or c
  SITE (941): n equals a,t,g, or c
  SITE (942): n equals a,t,g, or c
  SITE (943): n equals a,t,g, or c
  SITE (944): n equals a,t,g, or c
  SITE (945): n equals a,t,g, or c
  SITE (946): n equals a,t,g, or c
  SITE (947): n equals a,t,g, or c
  SITE (948): n equals a,t,g, or c
  SITE (949): n equals a,t,g, or c
  SITE (950): n equals a,t,g, or c
  SITE (951): n equals a,t,g, or c
  SITE (952): n equals a,t,g, or c
  SITE (953): n equals a,t,g, or c
  SITE (954): n equals a,t,g, or c
  SITE (955): n equals a,t,g, or c
  SITE (956): n equals a,t,g, or c
  SITE (957): n equals a,t,g, or c
  SITE (958): n equals a,t,g, or c
  SITE (959): n equals a,t,g, or c
  SITE (960): n equals a,t,g, or c
  SITE (961): n equals a,t,g, or c
  SITE (962): n equals a,t,g, or c
  SITE (963): n equals a,t,g, or c
  SITE (964): n equals a,t,g, or c
  SITE (965): n equals a,t,g, or c
  SITE (966): n equals a,t,g, or c
  SITE (967): n equals a,t,g, or c
  SITE (968): n equals a,t,g, or c
  SITE (969): n equals a,t,g, or c
  SITE (970): n equals a,t,g, or c
  SITE (971): n equals a,t,g, or c
  SITE (972): n equals a,t,g, or c
  SITE (973): n equals a,t,g, or c
  SITE (974): n equals a,t,g, or c
  SITE (975): n equals a,t,g, or c
  SITE (976): n equals a,t,g, or c
  SITE (977): n equals a,t,g, or c
  SITE (978): n equals a,t,g, or c
  SITE (979): n equals a,t,g, or c
  SITE (980): n equals a,t,g, or c
  SITE (981): n equals a,t,g, or c
  SITE (982): n equals a,t,g, or c
  SITE (983): n equals a,t,g, or c
  SITE (984): n equals a,t,g, or c
  SITE (985): n equals a,t,g, or c
  SITE (986): n equals a,t,g, or c
  SITE (987): n equals a,t,g, or c
  SITE (988): n equals a,t,g, or c
  SITE (989): n equals a,t,g, or c
  SITE (990): n equals a,t,g, or c
  SITE (991): n equals a,t,g, or c
  SITE (992): n equals a,t,g, or c
  SITE (993): n equals a,t,g, or c
  SITE (994): n equals a,t,g, or c
  SITE (995): n equals a,t,g, or c
  SITE (996): n equals a,t,g, or c
  SITE (997): n equals a,t,g, or c
  SITE (998): n equals a,t,g, or c
  SITE (999): n equals a,t,g, or c
  SITE (1000): n equals a,t,g, or c
  SITE (1001): n equals a,t,g, or c
  SITE (1002): n equals a,t,g, or c
  SITE (1003): n equals a,t,g, or c
  SITE (1004): n equals a,t,g, or c
  SITE (1005): n equals a,t,g, or c
  SITE (1006): n equals a,t,g, or c
  SITE (1007): n equals a,t,g, or c
  SITE (1008): n equals a,t,g, or c
  SITE (1009): n equals a,t,g, or c
  SITE (1010): n equals a,t,g, or c
  SITE (1011): n equals a,t,g, or c
  SITE (1012): n equals a,t,g, or c
  SITE (1013): n equals a,t,g, or c
  SITE (1014): n equals a,t,g, or c
  SITE (1015): n equals a,t,g, or c
  SITE (1016): n equals a,t,g, or c
  SITE (1017): n equals a,t,g, or c
  SITE (1018): n equals a,t,g, or c
  SITE (1019): n equals a,t,g, or c
  SITE (1020): n equals a,t,g, or c
  SITE (1021): n equals a,t,g, or c
  SITE (1022): n equals a,t,g, or c
  SITE (1023): n equals a,t,g, or c
  SITE (1024): n equals a,t,g, or c
  SITE (1025): n equals a,t,g, or c
  SITE (1026): n equals a,t,g, or c
  SITE (1027): n equals a,t,g, or c
  SITE (1028): n equals a,t,g, or c
  SITE (1029): n equals a,t,g, or c
  SITE (1030): n equals a,t,g, or c
  SITE (1031): n equals a,t,g, or c
  SITE (1032): n equals a,t,g, or c
  SITE (1033): n equals a,t,g, or c
  SITE (1034): n equals a,t,g, or c
  SITE (1035): n equals a,t,g, or c
  SITE (1036): n equals a,t,g, or c
  SITE (1037): n equals a,t,g, or c
  SITE (1038): n equals a,t,g, or c
  SITE (1039): n equals a,t,g, or c
  SITE (1040): n equals a,t,g, or c
  SITE (1041): n equals a,t,g, or c
  SITE (1042): n equals a,t,g, or c
  SITE (1043): n equals a,t,g, or c
  SITE (1044): n equals a,t,g, or c
  SITE (1045): n equals a,t,g, or c
  SITE (1046): n equals a,t,g, or c
  SITE (1047): n equals a,t,g, or c
  SITE (1048): n equals a,t,g, or c
  SITE (1049): n equals a,t,g, or c
  SITE (1050): n equals a,t,g, or c
  SITE (1051): n equals a,t,g, or c
  SITE (1052): n equals a,t,g, or c
  SITE (1053): n equals a,t,g, or c
  SITE (1054): n equals a,t,g, or c
  SITE (1055): n equals a,t,g, or c
  SITE (1056): n equals a,t,g, or c
  SITE (1057): n equals a,t,g, or c
  SITE (1058): n equals a,t,g, or c
  SITE (1059): n equals a,t,g, or c
  SITE (1060): n equals a,t,g, or c
  SITE (1061): n equals a,t,g, or c
  SITE (1062): n equals a,t,g, or c
  SITE (1063): n equals a,t,g, or c
  SITE (1064): n equals a,t,g, or c
  SITE (1065): n equals a,t,g, or c
  SITE (1066): n equals a,t,g, or c
  SITE (1067): n equals a,t,g, or c
  SITE (1068): n equals a,t,g, or c
  SITE (1069): n equals a,t,g, or c
  SITE (1070): n equals a,t,g, or c
  SITE (1071): n equals a,t,g, or c
  SITE (1072): n equals a,t,g, or c
  SITE (1073): n equals a,t,g, or c
  SITE (1074): n equals a,t,g, or c
  SITE (1075): n equals a,t,g, or c
  SITE (1076): n equals a,t,g, or c
  SITE (1077): n equals a,t,g, or c
  SITE (1078): n equals a,t,g, or c
  SITE (1079): n equals a,t,g, or c
  SITE (1080): n equals a,t,g, or c
  SITE (1081): n equals a,t,g, or c
  SITE (1082): n equals a,t,g, or c
  SITE (1083): n equals a,t,g, or c
  SITE (1084): n equals a,t,g, or c
  SITE (1085): n equals a,t,g, or c
  SITE (1086): n equals a,t,g, or c
  SITE (1087): n equals a,t,g, or c
  SITE (1088): n equals a,t,g, or c
  SITE (1089): n equals a,t,g, or c
  SITE (1090): n equals a,t,g, or c
  SITE (1091): n equals a,t,g, or c
  SITE (1092): n equals a,t,g, or c
  SITE (1093): n equals a,t,g, or c
  SITE (1094): n equals a,t,g, or c
  SITE (1095): n equals a,t,g, or c
  SITE (1096): n equals a,t,g, or c
  SITE (1097): n equals a,t,g, or c
  SITE (1098): n equals a,t,g, or c
  SITE (1099): n equals a,t,g, or c
  SITE (1100): n equals a,t,g, or c
  SITE (1101): n equals a,t,g, or c
  SITE (1102): n equals a,t,g, or c
  SITE (1103): n equals a,t,g, or c
  SITE (1104): n equals a,t,g, or c
  SITE (1105): n equals a,t,g, or c
  SITE (1106): n equals a,t,g, or c
  SITE (1107): n equals a,t,g, or c
  SITE (1108): n equals a,t,g, or c
  SITE (1109): n equals a,t,g, or c
  SITE (1110): n equals a,t,g, or c
  SITE (1111): n equals a,t,g, or c
  SITE (1112): n equals a,t,g, or c
  SITE (1113): n equals a,t,g, or c
  SITE (1114): n equals a,t,g, or c
  SITE (1115): n equals a,t,g, or c
  SITE (1116): n equals a,t,g, or c
  SITE (1117): n equals a,t,g, or c
  SITE (1118): n equals a,t,g, or c
  SITE (1119): n equals a,t,g, or c
  SITE (1120): n equals a,t,g, or c
  SITE (1121): n equals a,t,g, or c
  SITE (1122): n equals a,t,g, or c
  SITE (1123): n equals a,t,g, or c
  SITE (1124): n equals a,t,g, or c
  SITE (1125): n equals a,t,g, or c
  SITE (1126): n equals a,t,g, or c
  SITE (1127): n equals a,t,g, or c
  SITE (1128): n equals a,t,g, or c
  SITE (1129): n equals a,t,g, or c
  SITE (1130): n equals a,t,g, or c
  SITE (1131): n equals a,t,g, or c
  SITE (1132): n equals a,t,g, or c
  SITE (1133): n equals a,t,g, or c
  SITE (1134): n equals a,t,g, or c
  SITE (1135): n equals a,t,g, or c
  SITE (1136): n equals a,t,g, or c
  SITE (1137): n equals a,t,g, or c
  SITE (1138): n equals a,t,g, or c
  SITE (1139): n equals a,t,g, or c
  SITE (1140): n equals a,t,g, or c
  SITE (1141): n equals a,t,g, or c
  SITE (1142): n equals a,t,g, or c
  SITE (1143): n equals a,t,g, or c
  SITE (1144): n equals a,t,g, or c
  SITE (1145): n equals a,t,g, or c
  SITE (1146): n equals a,t,g, or c
  SITE (4785): n equals a,t,g, or c
  SITE (4786): n equals a,t,g, or c
  SITE (4787): n equals a,t,g, or c
  SITE (4788): n equals a,t,g, or c
  SITE (4789): n equals a,t,g, or c
  SITE (4790): n equals a,t,g, or c
  SITE (4791): n equals a,t,g, or c
  SITE (4792): n equals a,t,g, or c
  SITE (4793): n equals a,t,g, or c
  SITE (4794): n equals a,t,g, or c
  SITE (4795): n equals a,t,g, or c
  SITE (4796): n equals a,t,g, or c
  SITE (4797): n equals a,t,g, or c
  SITE (4798): n equals a,t,g, or c
  SITE (4799): n equals a,t,g, or c
  SITE (4800): n equals a,t,g, or c
  SITE (4801): n equals a,t,g, or c
  SITE (4802): n equals a,t,g, or c
  SITE (4803): n equals a,t,g, or c
  SITE (4804): n equals a,t,g, or c
  SITE (4805): n equals a,t,g, or c
  SITE (4806): n equals a,t,g, or c
  SITE (4807): n equals a,t,g, or c
  SITE (4808): n equals a,t,g, or c
  SITE (4809): n equals a,t,g, or c
  SITE (4810): n equals a,t,g, or c
  SITE (4811): n equals a,t,g, or c
  SITE (4812): n equals a,t,g, or c
  SITE (4813): n equals a,t,g, or c
  SITE (4814): n equals a,t,g, or c
  SITE (4815): n equals a,t,g, or c
  SITE (4816): n equals a,t,g, or c
  SITE (4817): n equals a,t,g, or c
  SITE (4818): n equals a,t,g, or c
  SITE (4819): n equals a,t,g, or c
  SITE (4820): n equals a,t,g, or c
  SITE (4821): n equals a,t,g, or c
  SITE (4822): n equals a,t,g, or c
  SITE (4823): n equals a,t,g, or c
  SITE (4824): n equals a,t,g, or c
  SITE (4825): n equals a,t,g, or c
  SITE (4826): n equals a,t,g, or c
  SITE (4827): n equals a,t,g, or c
  SITE (4828): n equals a,t,g, or c
  SITE (4829): n equals a,t,g, or c
  SITE (4830): n equals a,t,g, or c
  SITE (4831): n equals a,t,g, or c
  SITE (4832): n equals a,t,g, or c
  SITE (4833): n equals a,t,g, or c
  SITE (4834): n equals a,t,g, or c
  SITE (4835): n equals a,t,g, or c
  SITE (4836): n equals a,t,g, or c
  SITE (4837): n equals a,t,g, or c
  SITE (4838): n equals a,t,g, or c
  SITE (4839): n equals a,t,g, or c
  SITE (4840): n equals a,t,g, or c
  SITE (4841): n equals a,t,g, or c
  SITE (4842): n equals a,t,g, or c
  SITE (4843): n equals a,t,g, or c
  SITE (4844): n equals a,t,g, or c
  SITE (4845): n equals a,t,g, or c
  SITE (4846): n equals a,t,g, or c
  SITE (4847): n equals a,t,g, or c
  SITE (4848): n equals a,t,g, or c
  SITE (4849): n equals a,t,g, or c
  SITE (4850): n equals a,t,g, or c
  SITE (4851): n equals a,t,g, or c
  SITE (4852): n equals a,t,g, or c
  SITE (4853): n equals a,t,g, or c
  SITE (4854): n equals a,t,g, or c
  SITE (4855): n equals a,t,g, or c
  SITE (4856): n equals a,t,g, or c
  SITE (4857): n equals a,t,g, or c
  SITE (4858): n equals a,t,g, or c
  SITE (4859): n equals a,t,g, or c
  SITE (4860): n equals a,t,g, or c
  SITE (4861): n equals a,t,g, or c
  SITE (4862): n equals a,t,g, or c
  SITE (4863): n equals a,t,g, or c
  SITE (4864): n equals a,t,g, or c
  SITE (4865): n equals a,t,g, or c
  SITE (4866): n equals a,t,g, or c
  SITE (4867): n equals a,t,g, or c
  SITE (4868): n equals a,t,g, or c
  SITE (4869): n equals a,t,g, or c
  SITE (4870): n equals a,t,g, or c
  SITE (4871): n equals a,t,g, or c
  SITE (4872): n equals a,t,g, or c
  SITE (4873): n equals a,t,g, or c
  SITE (4874): n equals a,t,g, or c
  SITE (4875): n equals a,t,g, or c
  SITE (4876): n equals a,t,g, or c
  SITE (4877): n equals a,t,g, or c
  SITE (4878): n equals a,t,g, or c
  SITE (4879): n equals a,t,g, or c
  SITE (4880): n equals a,t,g, or c
  SITE (4881): n equals a,t,g, or c
  SITE (4882): n equals a,t,g, or c
  SITE (4883): n equals a,t,g, or c
  SITE (4884): n equals a,t,g, or c
  SITE (4885): n equals a,t,g, or c
  SITE (4886): n equals a,t,g, or c
  SITE (4887): n equals a,t,g, or c
  SITE (4888): n equals a,t,g, or c
  SITE (4889): n equals a,t,g, or c
  SITE (4890): n equals a,t,g, or c
  SITE (4891): n equals a,t,g, or c
  SITE (4892): n equals a,t,g, or c
  SITE (4893): n equals a,t,g, or c
  SITE (4894): n equals a,t,g, or c
  SITE (4895): n equals a,t,g, or c
  SITE (4896): n equals a,t,g, or c
  SITE (4897): n equals a,t,g, or c
  SITE (4898): n equals a,t,g, or c
  SITE (4899): n equals a,t,g, or c
  SITE (4900): n equals a,t,g, or c
  SITE (4901): n equals a,t,g, or c
  SITE (4902): n equals a,t,g, or c
  SITE (4903): n equals a,t,g, or c
  SITE (4904): n equals a,t,g, or c
  SITE (4905): n equals a,t,g, or c
  SITE (4906): n equals a,t,g, or c
  SITE (4907): n equals a,t,g, or c
  SITE (4908): n equals a,t,g, or c
  SITE (4909): n equals a,t,g, or c
  SITE (4910): n equals a,t,g, or c
  SITE (4911): n equals a,t,g, or c
  SITE (4912): n equals a,t,g, or c
  SITE (4913): n equals a,t,g, or c
  SITE (4914): n equals a,t,g, or c
  SITE (4915): n equals a,t,g, or c
  SITE (4916): n equals a,t,g, or c
  SITE (4917): n equals a,t,g, or c
  SITE (4918): n equals a,t,g, or c
  SITE (4919): n equals a,t,g, or c
  SITE (4920): n equals a,t,g, or c
  SITE (4921): n equals a,t,g, or c
  SITE (4922): n equals a,t,g, or c
  SITE (4923): n equals a,t,g, or c
  SITE (4924): n equals a,t,g, or c
  SITE (4925): n equals a,t,g, or c
  SITE (4926): n equals a,t,g, or c
  SITE (4927): n equals a,t,g, or c
  SITE (4928): n equals a,t,g, or c
  SITE (4929): n equals a,t,g, or c
  SITE (4930): n equals a,t,g, or c
  SITE (4931): n equals a,t,g, or c
  SITE (4932): n equals a,t,g, or c
  SITE (4933): n equals a,t,g, or c
  SITE (4934): n equals a,t,g, or c
  SITE (4935): n equals a,t,g, or c
  SITE (4936): n equals a,t,g, or c
  SITE (4937): n equals a,t,g, or c
  SITE (4938): n equals a,t,g, or c
  SITE (4939): n equals a,t,g, or c
  SITE (4940): n equals a,t,g, or c
  SITE (4941): n equals a,t,g, or c
  SITE (4942): n equals a,t,g, or c
  SITE (4943): n equals a,t,g, or c
  SITE (4944): n equals a,t,g, or c
  SITE (4945): n equals a,t,g, or c
  SITE (4946): n equals a,t,g, or c
  SITE (4947): n equals a,t,g, or c
  SITE (4948): n equals a,t,g, or c
  SITE (4949): n equals a,t,g, or c
  SITE (4950): n equals a,t,g, or c
  SITE (4951): n equals a,t,g, or c
  SITE (4952): n equals a,t,g, or c
  SITE (4953): n equals a,t,g, or c
  SITE (4954): n equals a,t,g, or c
  SITE (4955): n equals a,t,g, or c
  SITE (4956): n equals a,t,g, or c
  SITE (4957): n equals a,t,g, or c
  SITE (4958): n equals a,t,g, or c
  SITE (4959): n equals a,t,g, or c
  SITE (4960): n equals a,t,g, or c
  SITE (4961): n equals a,t,g, or c
  SITE (4962): n equals a,t,g, or c
  SITE (4963): n equals a,t,g, or c
  SITE (4964): n equals a,t,g, or c
  SITE (4965): n equals a,t,g, or c
  SITE (4966): n equals a,t,g, or c
  SITE (4967): n equals a,t,g, or c
  SITE (4968): n equals a,t,g, or c
  SITE (4969): n equals a,t,g, or c
  SITE (4970): n equals a,t,g, or c
  SITE (4971): n equals a,t,g, or c
  SITE (4972): n equals a,t,g, or c
  SITE (4973): n equals a,t,g, or c
  SITE (4974): n equals a,t,g, or c
  SITE (4975): n equals a,t,g, or c
  SITE (4976): n equals a,t,g, or c
  SITE (4977): n equals a,t,g, or c
  SITE (4978): n equals a,t,g, or c
  SITE (4979): n equals a,t,g, or c
  SITE (4980): n equals a,t,g, or c
  SITE (4981): n equals a,t,g, or c
  SITE (4982): n equals a,t,g, or c
  SITE (4983): n equals a,t,g, or c
  SITE (4984): n equals a,t,g, or c
  SITE (4985): n equals a,t,g, or c
  SITE (4986): n equals a,t,g, or c
  SITE (4987): n equals a,t,g, or c
  SITE (4988): n equals a,t,g, or c
  SITE (4989): n equals a,t,g, or c
  SITE (4990): n equals a,t,g, or c
  SITE (4991): n equals a,t,g, or c
  SITE (4992): n equals a,t,g, or c
  SITE (4993): n equals a,t,g, or c
  SITE (4994): n equals a,t,g, or c
  SITE (4995): n equals a,t,g, or c
  SITE (4996): n equals a,t,g, or c
  SITE (4997): n equals a,t,g, or c
  SITE (4998): n equals a,t,g, or c
  SITE (4999): n equals a,t,g, or c
  SITE (5000): n equals a,t,g, or c
  SITE (5001): n equals a,t,g, or c
  SITE (5002): n equals a,t,g, or c
  SITE (5003): n equals a,t,g, or c
  SITE (5004): n equals a,t,g, or c
  SITE (5005): n equals a,t,g, or c
  SITE (5006): n equals a,t,g, or c
  SITE (5007): n equals a,t,g, or c
  SITE (5008): n equals a,t,g, or c
  SITE (5009): n equals a,t,g, or c
  SITE (5010): n equals a,t,g, or c
  SITE (5011): n equals a,t,g, or c
  SITE (5012): n equals a,t,g, or c
  SITE (5013): n equals a,t,g, or c
  SITE (5014): n equals a,t,g, or c
  SITE (5015): n equals a,t,g, or c
  SITE (5016): n equals a,t,g, or c
  SITE (5017): n equals a,t,g, or c
  SITE (5018): n equals a,t,g, or c
  SITE (5019): n equals a,t,g, or c
  SITE (5020): n equals a,t,g, or c
  SITE (5021): n equals a,t,g, or c
  SITE (5022): n equals a,t,g, or c
  SITE (5023): n equals a,t,g, or c
  SITE (5024): n equals a,t,g, or c
  SITE (5025): n equals a,t,g, or c
  SITE (5026): n equals a,t,g, or c
  SITE (5027): n equals a,t,g, or c
  SITE (5028): n equals a,t,g, or c
  SITE (5029): n equals a,t,g, or c
  SITE (5030): n equals a,t,g, or c
  SITE (5031): n equals a,t,g, or c
  SITE (5032): n equals a,t,g, or c
  SITE (5033): n equals a,t,g, or c
  SITE (5034): n equals a,t,g, or c
  SITE (5035): n equals a,t,g, or c
  SITE (5036): n equals a,t,g, or c
  SITE (5037): n equals a,t,g, or c
  SITE (5038): n equals a,t,g, or c
  SITE (5039): n equals a,t,g, or c
  SITE (5040): n equals a,t,g, or c
  SITE (5041): n equals a,t,g, or c
  SITE (5042): n equals a,t,g, or c
  SITE (5043): n equals a,t,g, or c
  SITE (5044): n equals a,t,g, or c
  SITE (5045): n equals a,t,g, or c
  SITE (5046): n equals a,t,g, or c
  SITE (5047): n equals a,t,g, or c
  SITE (5048): n equals a,t,g, or c
  SITE (5049): n equals a,t,g, or c
  SITE (5050): n equals a,t,g, or c
  SITE (5051): n equals a,t,g, or c
  SITE (5052): n equals a,t,g, or c
  SITE (5053): n equals a,t,g, or c
  SITE (5054): n equals a,t,g, or c
  SITE (5055): n equals a,t,g, or c
  SITE (5056): n equals a,t,g, or c
  SITE (5057): n equals a,t,g, or c
  SITE (5058): n equals a,t,g, or c
  SITE (5059): n equals a,t,g, or c
  SITE (5060): n equals a,t,g, or c
  SITE (5061): n equals a,t,g, or c
  SITE (5062): n equals a,t,g, or c
  SITE (5063): n equals a,t,g, or c
  SITE (5064): n equals a,t,g, or c
  SITE (5065): n equals a,t,g, or c
  SITE (5066): n equals a,t,g, or c
  SITE (5067): n equals a,t,g, or c
  SITE (5068): n equals a,t,g, or c
  SITE (5069): n equals a,t,g, or c
  SITE (5070): n equals a,t,g, or c
  SITE (5071): n equals a,t,g, or c
  SITE (5072): n equals a,t,g, or c
  SITE (5073): n equals a,t,g, or c
  SITE (5074): n equals a,t,g, or c
  SITE (5075): n equals a,t,g, or c
  SITE (5076): n equals a,t,g, or c
  SITE (5077): n equals a,t,g, or c
  SITE (5078): n equals a,t,g, or c
  SITE (5079): n equals a,t,g, or c
  SITE (5080): n equals a,t,g, or c
  SITE (5081): n equals a,t,g, or c
  SITE (5082): n equals a,t,g, or c
  SITE (5083): n equals a,t,g, or c
  SITE (5084): n equals a,t,g, or c
tattattagtgatactcttttttttcttttcttttttgagatgaagtctcactctgttgcccaggctggagtgcaggggcatgatcttggctcactgcaacctccaccacccaggttcaagggattatcctgcctccgcctccctagtagctgggactacaggtgcgtgccgccatgcccagctaattttttttttnnnnnnnnnnnnnnnnnnnnnnnnnnnnnnnnnnnnnnnnnnnnnnnnnnnnnnnnnnnnnnnnnnnnnnnnnnnnnnnnnnnnnnnnnnnnnnnnnnnnnnnnnnnnnnnnnnnnnnnnnnnnnnnnnnnnnnnnnnnnnnnnnnnnnnnnnnnnnnnnnnnnnnnnnnnnnnnnnnnnnnnnnnnnnnnnnnnnnnnnnnnnnnnnnnnnnnnnnnnnnnnnnnnnnnnnnnnnnnnnnnnnnnnnnnnnnnnnnnnnnnnnnnnnnnnnnnnnnnnnnnnnnnnnnnnnnnnnnnnnnnnnnnnnnnnnnnnnnnnnnnnnnnnnnnnnnnnnnnnnnnnnnnnnnnnnnnnnnnnnnnnnnnnnnnnnnnnnnnnnnnnnnnnnnnnnnnnnnnnnnnnnnnnnnnnnnnnnnnnnnnnnnnnnnnnnnnnnnnnnnnnnnnnnnnnnnnnnnnnnnnnnnnnnnnnnnnnnnnnnnnnnnnnnnnnnnnnnnnnnnnnnnnnnnnnnnnnnnnnnnnnnnnnnnnnnnnnnnnnnnnnnnnnnnnnnnnnnnnnnnnnnnnnnnnnnnnnnnnnnnnnnnnnnnnnnnnnnnnnnnnnnnnnnnnnnnnnnnnnnnnnnnnnnnnnnnnnnnnnnnnnnnnnnnnnnnnnnnnnnnnnnnnnnnnnnnnnnnnnnnnnnnnnnnnnnnnnnnnnnnnnnnnnnnnnnnnnnnnnnnnnnnnnnnnnnnnnnnnnnnnnnnnnnnnnnnnnnnnnnnnnnnnnnnnnnnnnnnnnnnnnnnnnnnnnnnnnnnnnnnnnnnnnnnnnnnnnnnnnnnnnnnnnnnnnnnnnnnnnnnnnnnnnnnnnnnnnnnnnnnnnnnnnnnnnnnnnnnnnnnnnnnnnnnnnnnnnnnnnnnnnnnnnnnnnnnnnnnnnnnnnnnnnnnnnnnnnnnnnnnnnnnnnnnnagttcgagaccagtccggtcaccatggtgaataccccgtctctcctaaaaatacaaaaaaattagccgggcatggtggtgtgcgcctgtaatcccagctaccttgaaccggggaggtggaggttatagtgagccgagtttgagccactgcactccagcctgggcgacagagcaagactccgtctgaatacttcagagaaaacccacccaggtaaactcctggcatttcaggtctattatccattgtctttgaatatggaacttgtatttaattttataatgctggtttcatagtatttttagacttttgtaacagaaggaaattcttttttatctgttatagtaatactttaataccttaaattaataatgctttgtccttttaaaagctatttatttatttattttgagcagagtcttgctctgtcacccaggctggagtgcagtggcacgatctcggctccctgcaacctctgcctcccgggttcaagcgattctcctgcttcagcctcccaaatagcttggactacaggcgcctgccatcacgcctggctaatttttgtatttttagtagagatggggtttcaccatgttgaccaggttggtctcgaactcttgacctcaggtgatcctcccgctttggcctcccaaagtgccaggattataggcgtgagccgcagtgcccagcctaaaagctctttagtgtacatttttatgtgattatcataggcataacggggttggttggggttgtttgggggaaagagttgggactttagagtcaaacagaactaaatgaatcctggcttccccattcactacctgtatgcctttttataaattacaaaaattccctgagcctcagccttctcatctgtaaaataggcgtgataatattctcataatgggccaggtgcagtggctcacgcctgtaatcccagcactttgggaggctgaggcgggtggatcacctgaagtcgggagctcgagaccagcctgaccaacatgaagaaaccccatctctattaaaaatacaaaattagccaggcatggtggcgcatgcctgtaattccagctactcaggaggctgagcaggagaatcacttgaacctgggaggtggaggttgcggtgagccgagatcatgccattgcactgcagcctgagtggtggctcacacctgtaatcccagcactttgggaggctgaggcgtgcggctcacaaggtcaggagttccaggccagcctggccaatatggtgaaaccccgtctctactgaaaaaatacaaaattagccgggcgtggtggcaggtgcctgtagtcccagctactcgggaggctgaggcaggagaatcgcttgaacctgggaggcggaggttgcagtgagccgagatcatgccaccgcactcgagcctgggcgacggagcgagactctgtctcaaaacaaacaaaaaattctcatagtgttgctgatgtaaggattaaatgagctaatgtatataaggcacctaacatagtagtatatggtacataaaaggtgcttaaaagctagtaacttattactattatcatcctcatcttacagtgattcattcaacaaatacttcttaagcatctgctgtgttccaggcactgtattagatgctaggaatatagtggtaaagagaaaagccaccatccctaccttcatgaagcttacagtctagtaggaggcacagacaagttgataagtaattataatatattgtgaaaagtgctgtcatagggaaataatagtgcctttgatctctaaaagggacagataaccaaagttggaggccaaaatgattaagtaactggctcaaggctacacagatagtaagtggaggtgccaaaacaaaaacccaccccttcagaactccaagtccagcataatgttcactttaccacgttgcctctgttatagtccataaattgtgtctgggtgggatactgctttccttttacagcactgtcctttatttcaggaattctatgtaacacatgaaatactgaagaaagtggcccccttagaggctaagcttattaaggatcctactatgcagtgtaaaattagattcaggtaatgtatctatgctgatttatttcaagaagtacttagttaatatgaggaaatcttagatatggattttttaaattcttgtaacttctcagaacttaattacaaagtaaatgtgttattcttatttacatttgttatgtaaagaaaccgaggcatgactctgtggctaaaagttgccatgagagtagctctcatctcccattctgtattcagtcttacacaggtatgagaatagttgtgagtacaccaaagtgtgggtcttacatcctatgtgatccatttcattaccagttctttacatgctctgacatagcctttaccctgtatgcaagaaactatatgaactatcttaagtataagggggaaaagcaactgagcccaaaacctgatgccaaataactaaatttttatctttatttcagatttagaggtgaaacgtttccacctttcatcgtgtttaaaatttttcttcatactgatggccatggttacaagtattttagtggaaaaaatgtattaatgccgtcaagtaaggtgacgtttcatgatgtacattttatgttaacttagctttttaacatctacatagtatctgaattgcattcaaattatacagaataagttatttcaccatgaaacagcccaccaggtaggtagtgtgtttttttttaagcaccatgtttcaaagtgtctccacttactagctaaaaaaaaaaaaaaaaaagacatttggagtgaattacttaattaaggctctagaaaatatccatccatttttatgtattaaaatttttatttgttaataatagactaggccaggcgcagtgactcatgcctgtaatgccagcactttgggaggccgaggcgggcagatcacctgaggtcaagagtttgagaccagcctggccaacatggtgaaaccccatctctactaaagatataaaaattagccaggtatggtggcacatgcctgtaatcccagctgctcgggaggttgaggcaggagaatcacttgaacccaggaggtggaggctgcagtgagccaagatcgtaccactgcactccagcctgggcgacacagtgagactctgtctcaaaaaaaaaaaaaagactaaaattggtcagggctcttaaattatgcagaacatttaatttaatgccattttatttgttttaatggaatgttattatttctttgattctggtagcacatttagaaaaaaaatggtctggactatgctattgaaaatgaactttcagccaggcacggtggctcatgcctgtaatcccagcactttgggaggccaaggcgggcgaatcacctgaggtcaggagttcaagaccagcctggccaacatggtgaaaccccgtctctactaaaaatacaaaaattagccaagcgtagtggtgcatgcctgtaatcccagatactcaggaggctgaggcaggagaattgcttgaaccctggaggcagaggttgtggggagctgagatcgcaccactgcaccccagcctgggcaacagagtgagattctatctcannnnnnnnnnnnnnnnnnnnnnnnnnnnnnnnnnnnnnnnnnnnnnnnnnnnnnnnnnnnnnnnnnnnnnnnnnnnnnnnnnnnnnnnnnnnnnnnnnnnnnnnnnnnnnnnnnnnnnnnnnnnnnnnnnnnnnnnnnnnnnnnnnnnnnnnnnnnnnnnnnnnnnnnnnnnnnnnnnnnnnnnnnnnnnnnnnnnnnnnnnnnnnnnnnnnnnnnnnnnnnnnnnnnnnnnnnnnnnnnnnnnnnnnnnnnnnnnnnnnnnnnnnnnnnnnnnnnnnnnnnnnnnnnnnnnnnnnnnnnaata

SEQ ID NO: 9498 - DNA, 1130 bp, Homo sapiens
gcccacctcagcctcccaaagtgctaggattatgtttctgtaattgtaatacatttattgtttttagaaactgtctttgctttagtggtaattttcaataaaaatagaaatagcagtggagttattaaaagagcattagttacatttttccctttttcattatcttcaaatattatatatagtaagtttgacctttttaaaatgtatacttgtatcagttttaacacatacatagattcctgtaactgtcaccactataagggtaaagaacagttagttccttcacctttgaagtcaagccccacctctatcccaacacttggcaaccgctgatctttctccgtctcaatagctttgccttttctctttttttttcttatttttttttttgagacagcgtcttgctctgtcgcccgagctggagtgcagtgaggcaatctcggctcactgcaacctccgcctcctgggttcaagcagttctcctgccttagcctccctagtagctgggattataggcacgcaccaccacacccggctgatttttttgtatttttagtagaaatggggtttcaccatgttggccaggctggtctcaaactcttgacctcaagtgatccacctgcctcggcctcccaaagtgctgggattacaggcgtgagccactgtgcccaatcaggactttttttttttaaatttacattcaacttgtcatttttttcttgtatggattgtgccttcagagtcacacctaagagccctttgcctaagcaaaggtcatgaagattttctcatatgtttccttttaaaagtattgtggttggccaggtgccatggcttatgcctgtaatctcagcactttgagaagctgaggtgggcagattacgaggtcaggagatcgagaccatcctggctaatgcggtgaaaccccatctctactaaaaatacaaaaaaaaaaaaaaattagccgggcgtggtggcgggcacctgtagtcccagctacttgagaggttgaggcaggagaatagtgtgaacccgggaggtggagcttgcagtgagccgagatcgcgccactgcactccagcctgggcaacacagtgagactccatctcaaaaaaaaaaaaaaagtatta

SEQ ID NO: 9499 - DNA, 228 bp, Homo sapiens
tttttttgagacggagtctcgctctgtcgcccaggctggagtgcagtggcatgatcttggctcactacaagctccgcctcccaggttcacgccattctcctgcctcaacctcccgagtagctgggactacaggctcccgccaccacgcccggctaattttttttgtatttttagtagagatggggtttcaccatgttagccaggatggtctcaatctcctgacctcga

SEQ ID NO: 9500 - DNA, 887 bp, Homo sapiens
gacggcatgttattttcatcgcaaagttactgtaagctgggagaagtggcacacacttgtactcccagctactcaggaagcttaaggtgagaagattgcttgagcccaggagttttgagaccaacctgggcaacacagcaagaccccagctcaaacaaagaaaaaaagttattgaattttttatttctatggatcattttttgtagtttcttattcctttcacccttcattcccacttttgatcccatcttttatttatttagttttattaaatgtatatttgtctgataattctgctatctacagttttttgtggacctgactcagcatttctttgtttcttcggattcagactgttggtggcttgtgattttagtgatttttggccgtgaacatgtttcttggacttttgtctgtgggaattctctgtgtactctgtataaattaagttacttcaggtgttttgcattttcttttgccatgcacctggggcctgggtcactacccttctggtaccacttaaaactgaatttttgtcttgggtgctcgtactgatcctgtatgagtacaggtttatacttactgtagaaatatggtgtttgattatggggtattgtcccagatggtgctggagtattaatatgctctctgttaaacttaatgtgttgtccctgtaaaactccaaaattctgaattccagaatactactggccccaaatgtttaagataagggcactgcctgtatttgtttctgcctcccactattttccttagtttaacacaaactcacctttttaaaaaacattttgagagaattcagtattgggaagagtttctaacctgtttctggaaatggaagtccaaagtctgtttctgtaattgttttt

SEQ ID NO: 9501 - DNA, 192 bp, Homo sapiens
caagcaattggagacttttttcctgttatttttctaccatttatttctcatttcattatattatggtcagagaatatattttgaatgatttcatttattaatttttaaaaataacattaaaaaattttttaaaatgtgaatataccacatacagtataaagattgtacattctgtttttggacagttttcta

SEQ ID NO: 9502 - DNA, 749 bp, Homo sapiens
tctcgccaagacggcgattactctccagacaactcagcccagccgggggacagggtcatttgcttacaggtacttggagcttctgaaattgaggccagaggtggggaaaactgggaagaatgtgtgggttgggagggctgaaagcacatggcagacattcatgatgaaactgagatgaccttttggaaaaagattctgggattgttttaaaaactaacaggagattcatgaggtttagtcttcaggcaactggctttagcctggggcttccacttctgttttccttgcatggcttatgaattaacttggggtttgggctggcaaacctgctccttcttagagcacagatgtcattatctctctggaagtatggccttcttggaaactttgtggttcccatacatataacaagacaagcgtgaaaaaaaaaaagactttaagtgtggttttacttcgtttcttgtttactttattatcttttcttttttatggctttttttttgagaccgagtctcactctgtcactcaggctggagtgcagtggcgaaatctcagctcactgcaacctctgcctcctgggttcaagtgattctcctgcctcagcctcccgagtagctgggactacaggcacgtgccaccacgcccagctaatttttgtatttttagtagagacagggtttcaccatgttggccagcctggtctcaaactcctgacctcaagtgatcctcccacctcagcctcccaaagt

SEQ ID NO: 9503 - DNA, 749 bp, Homo sapiens; identical to SEQ ID NO: 9502

SEQ ID NO: 9504 - DNA, 158 bp, Homo sapiens
ttgtggtggcgggcgcctgtagtcccagctactcgggaggctgaggcaggagaatggcgtgaaccccggaggcggagcttgcagtgagccgagattgcgccaccgcactcccgcctgggcaacagagcgagactccgtctcaaaaaaaaacaaaaaaa

SEQ ID NO: 9505 - DNA, 158 bp, Homo sapiens; identical to SEQ ID NO: 9504

SEQ ID NO: 9506 - DNA, 1999 bp, Homo sapiens; identical to SEQ ID NO: 9269

SEQ ID NO: 9507 - DNA, 1999 bp, Homo sapiens; identical to SEQ ID NO: 9269

SEQ ID NO: 9508 - DNA, 511 bp, Homo sapiens; identical to SEQ ID NO: 9271

SEQ ID NO: 9509 - DNA, 511 bp, Homo sapiens; identical to SEQ ID NO: 9271

SEQ ID NO: 9510 - DNA, 210 bp, Homo sapiens; identical to SEQ ID NO: 9273

SEQ ID NO: 9511 - DNA, 210 bp, Homo sapiens; identical to SEQ ID NO: 9273

SEQ ID NO: 9512 - DNA, 736 bp, Homo sapiens
atttaatgagcattcaggcccagactgtgaagactctggaaatgagaattttgtttcctatctcctgtgctgtaacaaaagcagcttaaaaattgcagtgtatagacctcaccttttatcatttttttttcagatttttaaatattaatattaagggtctttatctcagatgtttgttgtttaccaggtcatcagtatctggacgctggcagggtccttagcaatggagggagggagagggggtccagcctgcatgattggatcagtgttgaacctgtcccacctgtggggaagaggcagcatgcggagcagacaggtgcctgctgcaggtcaggagagctggccccaagtcctgacttggagggaaatggtacatattaatatcctttagtgccaggtactggcgtagctagtttatatgcatcacttgagcccccttgcatcactggcatcacttcaagatagacaacaaggggaatgcacatcatatccctgttcactggcgttcactggtagggaaactgaggcttaataatgtgcccaggtacacacagctgataagtaaccctgcaccctcgatctcacagcatgacattggaatccacctcattagacagagctcagctgcctattctgtcaaaaatgttgagttgtatcagctgcagtgtctgtagtattcctagacatttctgtgattctcataagtatctttgaaagggggccatttagtttattt

SEQ ID NO: 9513 - DNA, 736 bp, Homo sapiens; identical to SEQ ID NO: 9512

SEQ ID NO: 9514 - DNA, 222 bp, Homo sapiens
tctttctttttttttttttttttttttttgagacagagtctcgctctgtcacccaggctggagtgcagtggcgtgatctggggtcactgcaagctccacctcctgggttcacgccattctcctgcctcagcctcccgagtagctgggactacaggcacccgccaccacgcccggctaatttttttttattttttgtagagacgggatttcactgtgttagcc

SEQ ID NO: 9515 - DNA, 831 bp, Homo sapiens
gtgctaggttgtctcacatctaggaaagagaatgttcatattatatagaaatgggcattttccctgtggcctgatatgaggtatccagaatattcctttaggtattattaagtcataggtttctgttttgatagaaacagcaggtggttcagttagtatttttgttgttgtaatagtagcttagatctcttgtttttgttttctttggccaagacagaaaacattctgccacacacattacttcatgactctggttatatattgagagcagcattaaaaaaaaaaaaaagtccaatttagtccattaggccattcttgcattggtataaagaaacacctgagactaggtaatttataaagaaaagaagtttaattggttcttggctctgcacgctgtactggatgatacaggatgcatgatgctgacatctgctcggctactggggaggcctcaggaagcttctaatcatggtggaagatgaagggggagcaggcatctcacgtggccagagcaggagcaaggggttgggtcacacacttttaaacaaccagatctcatgagaactcaccattgccagaacagcaccaagccatgagggatccacccccatgacccaaacacttcccaccaagccccacctccaacaccggggattattgtcaacatgagatttcggggacaaacatccacactatgtcgtagccttaaggggatcttacctctttgaagcattgtagagttcagagagtaggacattttgtctactgtattttaaaatactaaatgttctgattatgaaagtcagtcctggaaaaaaaaaacaaacaaac

SEQ ID NO: 9516 - DNA, 831 bp, Homo sapiens; identical to SEQ ID NO: 9515

SEQ ID NO: 9517 - DNA, 229 bp, Homo sapiens
aaatttttttttttttttttttttttttttttttgagacagagtctcgctctgtcacccaggctggagtgcagtggcgtgatctggggtcactgcaagctccacctcctgggttcacgccattctcctgcctcagcctcccgagtagctgggactacaggcacccgccaccacgcccggctaattttttttttattttttgtagagacgggatttcactgtgttagccc

SEQ ID NO: 9518 - DNA, 2844 bp, Homo sapiens
ttcccaatgttggtgaggctgatctcaaactcttgacctcaggtgatgcacctgcctcagcctcccaaagtgctgggattacaggtgtgagtgactgcgcctggcctgtaaaatatatcttgacctagatcacagatgcaatgattactctcatacctcacagtatttaataggagagatgctctctcttgctctcgctctcttttttctttttttttttttttgagacagttttgttcttgttacccaggctgcagtgcaatggcgtgatctctgcccaccacaacctctgcctcccaggttcaagcgattctcctgcctcagcctcccacgtagctgagattacaggcatgtgccaccacgcccagctaattttgtatttttagtagagatggggtttctctatgttggttaggctggtctcgaactcccaacctcaggtgatctgcccacctcggccttccaaagtgctggggttacaggcatgaaccactgtgcccagcccaagatgctgtctcttaacagctaggcctagagtcatgaatatgattctgggtctccttgtacaaaggtcatgaagaattgccactttcttgcatactgtataaatctcttgtggtacagagagtgtcattacagggttcagcatacagatgagattgtttctcatatacactccccaccaactgttagaattgtcaccctcacacatggacagagcccactggtgaggccctgaatctcacacacacacacagtctacagttaaaattgtgactgtcatatgtgaacatctggctagagttgaaataatgacttatttctaaatccagttcataggtgagaattctacctgtctaagcctaggtaggatagtcaacatgtccctaattggctgggggacatgttgactctcctacctgggcttagggccaaacagttcatggaagggatgaaggctctcagctctcatgcacagatccagttggtgagattgtcactagcatacttagacccaacatactctgatacctagaactgggacatgtgcaggatttttaattactggaccttcctgcaggtgtgattgtgacatatgtctttgttacacacctgagtggtttgatgttcctgccttggttcaacccaaagtgaagattgtgatgtgtcactggacccagcatctcagtgatgtgactcttctttttggacaccacaaattttgggtattgtcaaatattgctggatcctgtacccatgttatgtgactctccaacctatgtcctgcatgttgtgccatattgcagcacaatgtgtcacattagacatcattacatattgctgggctcaacacccaagtgatgtaacattttcctgggccttgactacagggggctttgtgacataactgaatgcccataaccatggtaatgttactcttctcctgcctggtctctgctcacagggaaattgtgacataccattggcctagcatcttggtgatgtgactctcctctttttctcaggccccacatatttgggtattgtgacatacccaaatgtgacactgggctcaacacctaagggacgggagttctctacctggccccttcctgaagggggcattgtgacatacttctgcacaggtatgtcacagttattacctaggagatgtgactctcctcttttgccagcaccctgcttacagggaaaattgtggcacatttctgtggccagcaaccaggtgatgtgtttctcctgcttgggtctttattacagaaaagatggttgacatatcactaggcccagcatctaggcgatgtgactgtcttcttctgcctggtccctgcttacaggaacattgtagcatattgctatgcccagcacttttctcttcttttaggttttgcctgcaggagactttgtgacattgctgggccctgcactgacattatctgactcttctgtctctgcctacttgggccattgtgacatattgctgggtccaacatccaggtgatgtaacttttatgcctgggtcctggcaccagaggacattgtctttgcaccactcacacaggtgatgtgattttcttctgttacctggtctctgctcacaggaagaattgtgaccttggccaggctcggtggctcacacctgtaatcatagcactttgggaggccgaggcgagtggatacctgaggtcaggagttcgagaccagcctggccaacatggtgaaacccccatcttacttaaaacacaaaaattagctgggcgtggtggcaggcgcctgtagttccagccacccacgaggctgaggcaggagaatcgcttgaaccaggtaggcggagattgcagtgagccgagattgcgccactgcactccagcctgggtgacagggagactccatctcaaagaaaaaaaaagtgaccttttgcagcacatagctgatttgactgctttgtggagtacaccaagcaggttgtcaaactggtggtccctttactgaaattttatttccacaatggtgttggaggggcagcagcagaatccgtgccttttcttctggagtgtgtgagagtccgtggtcctgagtatctcacacagatgtggcaatttatgtgatgttctgattaagaccattggtacagaaacagattcagatgtcctcagaaataatgcattgtttagcaaagtgcattgaagttatgggagatggatgccttaataatgaacactttgaagaacacctttgccacatgtcctcaggaccttctgagggctgtgtcatggggcatggtcactcatatttgactcaataaatttcttcaaatattttaaa

SEQ ID NO: 9519 - DNA, 3083 bp, Homo sapiens
cctggctaaaaacccagatgatgtgactctcctctctccctattcataggcaggattgtaaaatatatctttttttttttgagacagtttcattttgtcacccaggctggagtgcagtggcatgatcttggctcactgcaacctccgcttcctgggttcaagcaattctcttgcctcagcctccttagtagctagccaccacacctggctaatttttgtatttctattagagatagggtttcccaatgttggtgaggctgatctcaaactcttgacctcaggtgatgcacctgcctcagcctcccaaagtgctgggattacaggtgtgagtgactgcgcctggcctgtaaaatatatcttgacctagatcacagatgcaatgattactctcatacctcacagtatttaataggagagatgctctctcttgctctcgctctcttttttctttttttttttttttgagacagttttgttcttgttacccaggctgcagtgcaatggcgtgatctctgcccaccacaacctctgcctcccaggttcaagcgattctcctgcctcagcctcccacgtagctgagattacaggcatgtgccaccacgcccagctaattttgtatttttagtagagatggggtttctctatgttggttaggctggtctcgaactcccaacctcaggtgatctgcccacctcggccttccaaagtgctggggttacaggcatgaaccactgtgcccagcccaagatgctgtctcttaacagctaggcctagagtcatgaatatgattctgggtctccttgtacaaaggtcatgaagaattgccactttcttgcatactgtataaatctcttgtggtacagagagtgtcattacagggttcagcatacagatgagattgtttctcatatacactccccaccaactgttagaattgtcaccctcacacatggacagagcccactggtgaggccctgaatctcacacacacacacagtctacagttaaaattgtgactgtcatatgtgaacatctggctagagttgaaataatgacttatttctaaatccagttcataggtgagaattctacctgtctaagcctaggtaggatagtcaacatgtccctaattggctgggggacatgttgactctctttcctgggcttagggccaaacagttcatggaagggatgaaggctctcagctctcatgcacagatccagttggtgagattgtcactagcatacttagacccaacatactctgatacctagaactgggacatgtgcaggatttttaattactggaccttcctgcaggtgtgattgtgacatatgtctttgttacacacctgagtggtttgatgttcctgccttggttcaacccaaagtgaagattgtgatgtgtcactggacccagcatctcagtgatgtgactcttctttttggacaccacaaattttgggtattgtcaaatattgctggatcctgtacccatgttatgtgactctccaacctatgtcctgcatgttgtgccatattgcagcacaatgtgtcacattagacatcattacatattgctgggctcaacacccaagtgatgtaacattttcctgggccttgactacagggggctttgtgacataactgaatgcccataaccatggtaatgttactcttctcctgcctggtctctgctcacagggaaattgtgacataccattggcctagcatcttggtgatgtgactctcctctttttctcaggccccacatatttgggtattgtgacatacccaaatgtgacactgggctcaacacctaagggacgggagttctctacctggccccttcctgaagggggcattgtgacatacttctgcacaggtatgtcacagttattacctaggagatgtgactctcctcttttgccagcaccctgcttacagggaaaattgtggcacatttctgtggccagcaaccaggtgatgtgtttctcctgcttgggtctttattacagaaaagatggttgacatatcactaggcccagcatctaggcgatgtgactgtcttcttctgcctggtccctgcttacaggaacattgtagcatattgctatgcccagcacttttctcttcttttaggttttgcctgcaggagactttgtgacattgctgggccctgcactgacattatctgactcttctgtctctgcctacttgggccattgtgacatattgctgggtccaacatccaggtgatgtaacttttatgcctgggtcctggcaccagaggacattgtctttgcaccactcacacaggtgatgtgattttcttctgttacctggtctctgctcacaggaagaattgtgaccttggccaggctcggtggctcacacctgtaatcatagcactttgggaggccgaggcgagtggatacctgaggtcaggagttcgagaccagcctggccaacatggtgaaacccccatcttacttaaaacacaaaaattagctgggcgtggtggcaggcgcctgtagttccagccacccacgaggctgaggcaggagaatcgcttgaaccaggtaggcggagattgcagtgagccgagattgcgccactgcactccagcctgggtgacagggagactccatctcaaagaaaaaaaaagtgaccttttgcagcacatagctgatttgactgctttgtggagtacaccaagcaggttgtcaaactggtggtccctttactgaaattttatttccacaatggtgttggaggggcagcagcagaatccgtgccttttcttctggagtgtgtgagagtccgtggtcctgagtatctcacacagatgtggcaatttatgtgatgttctgattaagaccattggtacagaaacagattcagatgtcctcagaaataatgcattgtttagcaaagtgcattgaagttatgggagatggatgccttaataatgaacactttgaagaacacctttgccacatgtcctcaggaccttctgagggctgtgtcatggggcatggtcactcatatttgactcaataaatttcttcaaatattttaaa

SEQ ID NO: 9520 - DNA, 8191 bp, Homo sapiens
tgtcatcataggacccagcaaacaggttaaatcatgtttcatgtaagcgctccctgacaatttttagaattgtcatcgtcacacatggtgaaagtccactgatgaggtcataattctcatgcacagatgcagtccacagttaaaattgtaactatcatatgtaaacgtggccacagttgagatggtgactcatttctaaacccagctcataggtgagtgaggactctcctctctggacccagccaattgaagagatgttgacccatacctagacttaggaccacataagatcatgggtccaaagcagcgcaaagttctcagagtaggttgcaactcatacagtcctcaagagagtgcccttacagggccaagcacacaggtgagattgtcaaacttacattcacacccagtcaatagcaaagattgtcatttacttaaacacaccctacttttgaggttctgaatctcacttttggaggcagttgaatgttggaaaattgactctcatttgtgtggattttgtccacatttgggtgactctttaatcaaaattcagcacacctttgtgactgtaacttcactaaggagctttatttatttagagatgaagtttcattcttgtaacccaggctggagtgcggtggcgtgatctccgctcactgcaacctctgcctactgggttcaagcgattctcctgcctgattctcccaagtagctgggattacaggtgctcactaccatgttggctaattttttgtatttttagtagagatggggctttaccatgttggtcaggctggtcttgaactcctgacctcaagtgatccgcccacctcggcctcccaaaatgctgagattacaggtgtgagccaccgtgcccagtctaaggcacacaatttgcaaaggaaattgaggctctcgcacaaatccagtccaccctgtacttacacccaacatgcaggaggtgttgactctcatcccttgactcaggacatgtgtgtaattgttaatgtcatcgcaaggccttttgacaagtgtaattgtgacatataccttggcctagcatctgagttatttgttgtttcctgggtccagctcacagtgccatatcactggatccagacccttggtaatgtgattctattctgccttgatacagcccacaggggtcattgtgacatcgctgggcattgcacctaggtgatttgagtctcctcttctgccttggtgctgcccacaggtgtattgtgacatattgctgggcgtatgttatgtgactcttgcttgtgccctaaacacataggccattgtaacattgctgagtgcaacacccaggtgatgtaacgcttcaccctggacctgtctacagagggcattgtaatatatgtcttcaccaatcacccaggaaatgtgactttttattcctccctgttctgtactcacagggggtattgggacatattgggcccagcacctagctgatgtgacttttctttattctaggttctgacaacaaaggagattgtgacatattgctgggcctaacactaaggtgatgttagttatttgctttggctgtgcccttggaaggcattgagacatactgctgtgcccagcaccaagatgatgtgagttccctgcctgaaccctgatcacaggaagcattgtgacctatctgttgacccactgcaatctctcctgtgggaaaagcacagataaatgccctcttttacctacgtgatttgacactcctctactgcctgggccgtgcccacagaatagagagtgacttatcactggaccaagcacaccagtgatgtaattattctgcttggtccttgcacacacaagtcactgtgatatatgtttgggcccatcacctagatgatgtgactcctcttctggggtccacagtgggaattgtgatacatcgcttgacgtagctcttatgtgatgtgacttttctttcatgcttgggcccttcctactgggatgattgtaacataaagctgagcccagcacctacattatgtgactctcctcttgtttatgagccctacccgcaggaggcattgtgacatatctttaggcctctcacttaggtaatgtgacttctttgcctaggccctcccctccagaaatatcatgaaatatttctggaccaagaacctaggtgatatgactctcctcttctgcttgggacctgcatacattgtgtgttgcaacatgtctctgggtccaacaccaaggtgatgtgactgtcctgcatggatgctcccacggaaataacacatctctttattcattatctaggtaacgtgactcttctgcttcaggcctgccaaaagaaaagattgtgacagatcactggacccagcacctaggtgatatgactctcctcatttgcctgagacctgcatattttagacattgtgatatacaactggaacaaacacctaggggttggaaggctcctgcctgagtccctcccacaggaggccttgtgatgtttttttgtttgttttttgttttctttgagatggagttttgttattgttgcccagactggcatgcggtggcgcaaccttggctcaccgcaacctccgcctcccgggttcaagcagttctcctgcctcaacctcccgagtagctgggattacaggcatctgccaccatgcccggctaattttctatttttaatagagacggggtttctccatgttggtcaggctggtctcaaactcctgaaatcaggtgatccacctgcctcggcctcccaaaatgctgggattacagttgtgagccactgcacccagctttgtgatgtatttctgcatccatcatgcaggagataaaactctgtatttttgcctgcattctgcccacagggaagattttgacatattgttgggcccagcaaccagtcgttttgtctgtcatatctgggcccagcacccaagggatctcactcttctacctgtgccctgctttcaggagggattgtaacatccctggtcaagcccccagtgatgtgattctcctgtttgatgcctgccctcagggaggattgtgacatagccctggcccaacacacagttcatgtaactcttgaatttgctctttacatacaggtaggattgtgacatatatctggccaagcgtacagatgtaatgatgactgtcataccttgaagaagccaatagcagagagaatgttgctctcaggcttaggaaaatgaggaagtctttctgtacaaaagtcataaagaattactactctctcacatatattacgccctagtgtgttacagagaatgtcataacagggcccagcacacaagtgagattgtgtttgtcctatgcacactacaccaacctttacagttgtcaccctgacccattgacagagtctgctagtgaggttctgaattacatgtgaacacagtccgcagttggaattgtgactgtcatatgtgaacatctggctacagttgggatggtgactcatttctaaatccagcttataggaaggtgaagactctcctatctggactcagttggtgagagagatgttgactctcatatctgggcttagaaccacaggaaagattctggagctccttgtgcaaaggtcatagaggattatcaatcttgcatattgtataaagtcctcaggtgacacagagtgtctcgaatgcacacccaggcaacagtaaagattgtcattctcccacataaacacatcccactgttgaagttctgaatttcacagaggctgtcaaaagttggataattgcctctcatgtgtggatctggtccacaggtgggttagtgacttccagaccaaggttcagcgcacatgtaaggctgtgactacactaagaagatacagtctgcagaagaaactgtggctcttttgcacacattctgtcaatcattgtgattgcgactcatgtacttagacccaacatacaggaggtgttgactttcatacctttagaacctggacatgtttggaatttctaatctaatccctggactttcctgcaggtgtgattgtgtgcattgcaaagcaccttagtgatttgactctcctgccttggccaagcacgcaaatgagattgtgacatatggcttgactctgaacctccaagatgtgactcttttttccagccttggagctgcccacatgttgcattgtgacatattcctaagccctgcactcaggttatgtgactctccttttttgcttaggccctgaatatttttcatgttaagacatattactaggtccaacacctataaaatgggagactaccacctgggctctttctacagagggccttgtgacatacctctgcatcaataacctaggagatgtgatgctccatttttgcctgtacgtgccccacagaaaaaattgtggctggcccaggtaccaggtgatgtgtctctgctgcctgggcctggaccacagagagcattgttactgattgctgggctcagcacccaggtgatgtgactctgctgcctgtgtgctgctttcaggagaaggttgtaacttattcctggctgagtatgcagtcacactcctgactgatctctgccctcagaaaaggttgtgtcaagccgggcccggtggctcatgccagtaatccccagcacttagggagaccgaggtgggtggatcgcctgaggagtttgagaccagatggccaacatggtgaaaccccgtctctactaaaaatacaaaaattaatcgggtgtggtggcgggcacctgtaaactcagctattcgggagcctgaggcaggagaattgcttgaacccgggaggtggaggttgcagtgagccaagatcatgccactgcactccagcctgggcagcagagcaagattccatcttgggaaaaaaattacaaaaattagccaggcgtggtggtatgcacctgtagtcccagctacttgagaggctgaggcacagcagtcacttgaacttaggaggcggaggttgcagtgagccaagactgtgccattgcactccagcctgggcaacaagagcaaaactccatctcaaaaaaaaaaaaaaaaaaaaaaaggttgtgtcatattcctggctaaaaacccagatgatgtgactctcctctctccctattcataggcaggattgtaaaatatatcttttttttttttgagacagtttcattttgtcacccaggctggagtgcagtggcatgatcttggctcactgcaaccttcacttcctgggttcaagcaattctcttgcctcagcctccttagtagctagccaccacacctggctaatttttgtatttctattagagatagggtttcccaatgttggtgaggctgatctcaaactcttgacctcaggtgatgcacctgcctcagcctcccaaagtgctgggattacaggtgtgagtgactgcgcctggcctgtaaaatatatcttgacctagatcacagatgcaatgattactctcatacctcacagtatttaataggagagatgctctctcttgctctcgctctcttttttcttttttttttttttttgagacagtttgttcttgttacccaggctgcagtgcaatggcgtgatctctgcccaccacaacctctgcctcccaggttcaagcgattctcctgcctcagcctcccacgtagctgagattacaggcatgtgccaccacgcccagctaattttgtatttttagtagagatggggtttctctatgttggttaggctggtctcgaactcccaacctcaggtgatctgcccacctcggccttccaaagtgctggggttacaggcatgaaccactgtgcccagcccaagatgctgtctcttaacagctaggcctagagtcatgaatatgattctgggtctccttgtacaaaggtcatgaagaattgccactttcttgcatactgtataaatctcttgtggtacagagagtgtcattacagggttcagcatacagatgagattgtttctcatatacactccccaccaactgttagaattgtcaccctcacacatggacagagcccactggtgaggccctgaatctcacacacacacacagtctacagttaaaattgtgactgtcatatgtgaacatctggctagagttgaaataatgacttatttctaaatccagttcataggtgagaattctacctgtctaagcctaggtaggatagtcaacatgtccctaattggctgggggacatgttgactctcctacctgggcttagggccaaacagttcatggaagggatgaaggctctcagctctcatgcacagatccagttggtgagattgtcactagcatacttagacccaacatactctgatacctagaactgggacatgtgcaggatttttaattactggaccttcctgcaggtgtgattgtgacatatgtctttgttacacacctgagtggtttgatgttcctgccttggttcaacccaaagtgaagattgtgatgtgtcactggacccagcatctcagtgatgtgactcttctttttggacaccacaaattttgggtattgtcaaatattgctggatcctgtacccatgttatgtgactctccaacctatgtcctgcatgttgtgccatattgcagcacaatgtgtcacattagacatcattacatattgctgggctcaacacccaagtgatgtaacattttcctgggccttgactacagggggctttgtgacataactgaatgcccataaccatggtaatgttactcttctcctgcctggtctctgctcacagggaaattgtgacataccattggcctagcatcttggtgatgtgactctcctctttttctcaggccccacatatttgggtattgtgacatacccaaatgtgacactgggctcaacacctaagggacgggagttctctacctggccccttcctgaagggggcattgtgacatacttctgcacaggtatgtcacagttattacctaggagatgtgactctcctcttttgccagcaccctgcttacagggaaaattgtggcacatttctgtggccagcaaccaggtgatgtgtttctcctgcttgggtctttattacagaaaagatggttgacatatcactaggcccagcatctaggcgatgtgactgtcttctgcctggtccctgcttacaggaacgttgtagcatattgctatgcccagcacttttctcttcttttaggttttgcctgcaggagactttgtgacattgctgggccctgcactgacattatctgactcttctgtctctgcctacttgggccattgtgacatattgctgggtccaacatccaggtgatgtaacttttatgcctgggtcctggcaccagaggacattgtctttgcaccactcacacaggtgatgtgattttcttctgttacctggtctctgctcacaggaagaattgtgaccttggccaggctcggtggctcacacctgtaatcatagcactttgggaggccgaggcgagtggatacctgaggtcaggagttcgagaccagcctggccaacatggtgaaacccccatcttacttaaaacacaaaaattagctgggcgtggtggcaggcgcctgtagttccagccacccacgaggctgaggcaggagaatcgcttgaaccaggtaggcggagattgcagtgagccgagattgcgccactgcactccagcctgggtgacagggagactccatctcaaagaaaaaaaaagtgaccttttgcagcacatagctgatttgactgctttgtggagtacaccaagcaggttgtcaaactggtggtccctttactgaaattttatttccacaatggtgttggaggggcagcagcagaatccgtgccttttcttctggagtgtgtgagagtccgtggtcctgagtatctcacacagatgtggcaatttatgtgatgttctgattaagaccattggtacagaaacagtttcagatgtcctcagaaataatgcattgtttagcaaagtgcattgaagttatgggagatggatgccttaataatgaacactttgaagaacacctttgccacatgtcctcaggaccttctgagggctgtgtcatggggcatggtcactcatatttgactcaataaatttcttcaaatattttaaa

SEQ ID NO: 9521 - DNA, 399 bp, Homo sapiens
caacccacagaggtcattgcaacatatctctgagcccctaatttacgtagtttgactcctgcctgggccctcccttcagtgatttttgtgacatattttttgactcagcacctaggtaatgtgactcttctccactgcttggactctgtcacagaaggtattgtgatgtatcactgggcctgacacctaggtgaaggtactgtcttctcctgcctgggccctgcataaattgtgtattttgacatgtcactgggttcaacacatgggtgattcaactctctcacatggaccttgagcatggggttattaggacatttatttttgttcatctcagtgatatgactcctttcctccctgaaccctgtcaaaaagaaagattgtgacatatcacttaaacca

SEQ ID NO: 9522 - DNA, 663 bp, Homo sapiens
gctgattgcaagtggcagtaaatgtcagtgggacatttgcctttctcccttaatgttgggagaggtggagattgaccagcataggtaccttagacatgcagctgttgaaagtcttcatgttcaccagccaaattacaattttatttctgaattttatgtaatgaatagactgttatcaaaactaatgtactaacattcctgtttgtttaattaatactttaaaagttaactatgaataatagaaaaatatattaatagaaaaaattttttaagttatatgtgttatttgtaggagagaagtatggctacctttcacttccaaagccaatggtaagtagaagaattatgtacattgcagaatgtttttattcagaattcaaattatgctcttgttgcctgttgctgctcccctctaccacaaataattgacatgacagaaaaaagttaggatattaatgttgacttcagagttgttattctgggtagcaatctagttgtggcttacactctgaatatttgttttaggtttgggggtttgagagaataggtaacataatttgtgattaataaaaagccatatcccagtaatagcatcataaaaataaataaataagccatatctgaagtcagaagttgttttgttcttccaatcttggatctact

SEQ ID NO: 9523 - DNA, 663 bp, Homo sapiens; identical to SEQ ID NO: 9522

SEQ ID NO: 9524 - DNA, 663 bp, Homo sapiens; identical to SEQ ID NO: 9522

SEQ ID NO: 9525 - DNA, 431 bp, Homo sapiens
tcataaagctattcccaagtaccattaactcactcttagtaacagttcttcttctagatcagcactgtccaagagaaacagaacgtgacacacatatataatttgaaatttcctaggctaggcacagtggctcatgcctgtaatttcagcactttggcaggccaaggcgggaagatcacttgagcccaaggagtttgagaccatcctgggcaacacagtgagacctcatctcttaaaaaaaatacaaataaattagctggtgtcacatgcctgtggtcccagctactcaggaggtggaaggtgggaggaccaccggagcccaggaggttgaggctgcagtaagcctgtgatctccaccactacactccagcctgggtgacagagcaagaccctgtctcaaaaaaaaaaaaaaaaaaaattctaacaggcac

SEQ ID NO: 9526 - DNA, 117 bp, Homo sapiens
ctgggcacggtgtcttatgcctgtaatcccagcactttgggaggccgaggtgggtggattacctgaggtcaagagtttgagaccagcctggccaacatggtgaaaccgtgtctctac

SEQ ID NO: 9527 - DNA, 117 bp, Homo sapiens
ctgggcacggtgtcttatgcctgtaatcccagcactttgggaggccgaggcgggtggattacctgaggtcaagagtttgagaccagcctggccaacatggtgaaaccgtgtctctac

SEQ ID NO: 9528 - DNA, 117 bp, Homo sapiens; identical to SEQ ID NO: 9526

SEQ ID NO: 9529 - DNA, 431 bp, Homo sapiens; identical to SEQ ID NO: 9525

SEQ ID NO: 9530 - DNA, 443 bp, Homo sapiens
gtagagctctgtagttagactgctttagaatcccagctctaacacttacgaactctgaccttgaacaaatgacttacctaagagctttcttcatctttaagttggtgataataatagtacctatctcacacggctattgaggttaaatgatgtaatgcatgaaaaacatagcttggtacaaactaggtacttactcagtaaacagctgttaataattattttctccctgcctccaggattttgattttctaagcttgatgtttttggaagtcttcttgattagaaagatgttactatatttgaaaagggaatagagtcaactagagtcatattgcaaattttatgtgtctgagagtgtaatgagaatttgcagcatatgtaaacaagtagatttatttttctgaggtaggtccatggattgttaacagtggtttagggaaggt

SEQ ID NO: 9531 - DNA, 4005 bp, Homo sapiens
caacctctgcctcctgggttcaagcgattctcatgcctcagcctcctgagtagctgggaccacaggcatgagccaccacgcattgctaatttttgtatttttttagtagagacaaggttttgccattatggccaggctggtcttgagctactggcctccagtgacccgcctgcttcgtcttcccaaagtgctgggattataggcatgagccactgtgcccagcttctgaaggttattcttctacctgtatattggccccttgtgtattatgctgttttcccattagtgtttcatgtcctcattcccattttgggggtatctgtcactcttctggctttggggtcatgctcagagaaacttgctcttcctcaaactataaattggcagtgtttaaacttcttgctctcaggactccttagtactcttaaaaactattgagaacctctggtcaggcacagtggctcatgtctgtataccagcactttgggaggccaaggtggggcaatcacttgaggtcaggagttcgagaccagcctggccaacatggtgaaaccccgtctctacgaaaaatacaaaaattagctgggtgtggtggtgcacgcctgtaatcccagctacgtgggaggctgaggcaggagaatcacttgaacctggaaggtggaggttgcagtcagccaagatcgtactagtgcatctccagcctggacaacagatcgagactgtgtctcaaaaaacaaaactattgagaacctcaaagacttttgtttactccatctcaaaaaacgaaactgttgagaacctcaaagacatctgtagatctttgccatcttagaaattaaaagagacatttaaaaaatactactttattaagatatagtaagccatttacatgttaacatttttaatgaaaattacattttccagaataaaaattaccaagaaatttttcatttttgccagtctgttgcttaatagaagatacctggattctgtatatgcctctgcatttaatctgttgcagtatcacatgatgtgtaccctctggaaaagttgattgtataatcaggagagaatgagaattaaaaaggcaaatgatgttattatgaaaatggttttggctttgtgggcttctgaatgggttcaaagatcccaagactacagtttgagaaccactgatgtaaataatcacttatatattttccttttgtgtttttatggctgaatttaaattccgaataaattctagtggaaattttctaatttctcccctctcctgcctaccctctccaattggctaatattctttgttgaaagatccattttcatgtaaataattgactgactaggatgaaacagtagacatatctgctttttcccagttgttactgagaagctcactgttcattgaaaacagtagtctttgcagtctttccttaatgttgtatctctattttggtatattcccttattttcttgatgtgttctcccctcctcactctaactcccagttttacaacaaattgccctaaaatcttaaagatttttcattcatactgattgtggcattttgctctaaatattgtttcctccctgatttagaaagtaatttaaaatgtacatagaaacataaaccaaaaaagaatattttgtcgctttgaatatgaaaagtgatattgatatactattattgctgtactgtgatggagtatatcacaggttatggaggttatttcaatattgaaaaaatgctagttgagtatacatacattcctgcaccattgttaataaattatattctttttgatgtgttgcttagcttcttgggaccctttactcactagacttttattgacagctgtgttccaaaatacagttagataaaaagaacaagacacatttttttttctaactttgcaggttggtagagaaatacacatgttctgtgataagtattattatagccacaaacaattaagaatattatgggagggcctaggcaagatatcgttaagaagtgagggaggaatgaaggaaagggaattgatttgaaaagattaaggttgtacaatcttcctttagtagttgatgatttctttaggtgtctgagtccaaaggagagagaaaggaggagtcaagaaagacacccagatatttgtctgggaagaccagatggataccagtgtttatcaaaatgtggaataagccctacttccaacaaaacaaaactcattacatgtgctacactttcaaagacactgtgttattgttttccaagatgagttcaattgtgggcatgttagtttgaggggcctagggtggagatttgtggaagccatttggagagctatcaggagacttgtatgagctgatgagcagtgtagcataagtaggtgaaggaaatgcttaagatcatcctttgagaatttttagtaggagaagagaagatggtcagagaccctctgataattgagggacaggcagagggaaataaattaagcaaaacataaaaaagaaaaaagggtcaggttgtgttgaaggcaagtgaccagtttaaagaaaaaaggttaggggagagagggatctgaaatgttaaatcctgcctaaaggacaaataaaatctgaaaagtgtttattagatttaggaataagaaggcattgatgactttggaaaaagcaactaaactgggaagttgggtgtagaagctggagaagtggaggatatagaggtgaggaagtggaagacagtgagtattgactaccgtttgaaaagtttgcctatgaagctggtggagtacaggttaaaagtgagcaagcagggatttgaaagtgttaatgttctagggaaggagagagaggagggaatgagagattgaactaaggataaaataccatcatcttgaactttctagagaaatgttttttatgcttcttgtttgctctttttgtaaaaattgttctaaggtattttttagataatgctgaatatcttttttgatacctttatgatatttcagctaccatgaatatcagttattgtactgccggtatcaaagaatatattaatagcaacagccctgttctaaaatacaacagttcagggctgtattagttcattttcatgctgctgataaagacatacgcgagactggatacttcatacaggaaagaggtttaatggactcacagttccacgtgactggaaggcctcgcaatcatggtggatagcaaggaggagcaagtcacggcttacatggatggcagcaggcaaagagagagcttgtgcagggaaactcccccttataaaaccatcagatctcataagacttattcactatcataagaacagtatgggaaagatgtgccccatgatacaatgtgggtccctcccacaacacgtaggaattttggcagctacaattcaaaatgagatttgggtgggacacagccaaaccattcaggggccgtttaatgtaattatatagtagctttttaatagccagttttatcttttccttgtgggtgcacatgtgttttgcccactaactcattgatgtggttggtcctagcaatagtagtccctattactacaaatgtgctaagtaactgtgaatgggaaatccacattaccaaattgttagaattgttctttgaatgaaattactgattttaatcattagattgtaaggaaggtctggggattacatctgtaaagtgtactctgtgatagatgtagttttctttttcttttgagccagtgtctcactctgtcgcccaggctggagtgtagtggcgcgatctgggctcaccacaacttccgcctcccagatttgagtgattcttctgcctcagcctcccgagtagctgggattacaggctcccgcaacacacccggctaatttttgtatttttagtagagaagaggtttcaccatgttggccaggctggtctcgaactcctgacctcaggtgatccacccacctcggcctcccaaagtgctgagattac

SEQ ID NO: 9532 - DNA, 3387 bp, Homo sapiens
agggagggcctgaccataactacaccaaggagaagatcaagatcgtagagggaatctgcctcctgtctggggatgatgctgagtgggatgacctcaagcaactgcgaagctcacgggggggcctcctccgggatcatgtatgcatgaagacagacacggtgtccatccaggccagctctggctccctggatgacacagagacggagcagctgttacaggaagagcagtctgagtgtagcagcgtccatactgcagccactccagaaagacgaggctctctgccagacacgggctggaaacatgaacgcaagctctcctcagagagccaggtctaaatgcccacattctcttccctgcctgcctgttccttctcctttatggacgtctagtccttgtgctcgcttacaccgcaggccccgcttctgtgtgcttgtcctcctcctcctcccaccccataactgttcctaagccttcaccggagctgtttaccacgtgagtccataactacctgtgcacaagaaatgatggcacatcacgagaatttagacctggattttaccatgaacctcacatcttgtactccatcctgggccccctgaaactgcttattcgtgattcctcaccagcgtagagctccacctcccctttccccagtaccctcagtgcctgcttctcagtgctgatgcagctgatgacccaggactgcgctctgccccatcacagccagcatgactgcttctctgagagaacttgcccatcaggggctgggacatgggggtgtgggtaaagacagggatgaaggatagaggctgagagaagaaggaagaatcagcccagcaggtatgggcatctgggaaacctccagcctcaagtgtgttagtaacatgaaaaagctttggggggtagttggatctgggtgtctggtccattgctggcagtggacattattcttgccctaagagacactgccttttcagcagcagatactggtgagatgggggtggctcaggctgttcttcctcctcctagaatgtctggagctgtttctacattcagataactgggtcccctatcacaaggctactggctaataggaattccctcctggtgccaccactggccagtacctttcctaagtctttgctcaaattaaccaggttgtgagccagtggcttgagtgaatgttaggccttgggggctgagtctctgaaaagtctaagaagctctgcctagaccaaatatggtatacctcctgacccctctctccctcatgtcctgggattctggggaagagacctagaaacaagctttcaaagaaaaaccagaagttgtcataaatggtcagaaagaacgatcaggttggagacttgggaaacccagggcctaaagagaagtatccatgagggtcaaacttcctgttgaacttcctatgttctttctcaagtgctcagggatctaagttagtggacagcaagcctgtggctacggggtggtgatgttcctcttccagctgtcccctcagctaaggggcttagtttccatgtgggatgccatcacttggttcatgctcattcacacaaagggcacgtgtctcagcctggtatcagggaaattgagacttatttttgccctaaaacgtctccctagctgttcttcgtggggtttttttgtttgtttttttgcctaatttgctttttctgaccaagccttgtggcaccagcaatctccaaagtcctgtggtgggagggctgaataaataaaaatacaaagaggtgggtaaggagtaggaaggtagagagcaccactgatgaggccctcctagcccatggcagacccagacctcttctcccccaggaattagaagtggcaggagagaacaacaggggctgggaatggaggggagaatttctaggggaagtttcctgagttgaaacttctcctgtggttactggtattgagaaatcagctaccaaagtgaaaaaggacaagatcaattcttttctagtcagttctaagactgctagagagagataccaggcccttagccttgctctcagtagcgtcagccccagttctgagcctccccacattacacttaacaagcagtaaaggagtgagcactttgggtccttagactcacgtctggggaggaagagcaagtagaaaagtggcattttcttgattggaaagggggaaggatcttattgcacttgggctgttcagaatgtagaaaggacatatttgaggaagtatctatttgagcactgatttactctgtaaaaagcaaaatctctctgtcctaaactaatggaagcgattctcccatgctcatgtgtaatggttttaacgttactcactggagagattggactttctggagttatttaaccactatgttcagtattttaggactttatgataatttaatataaatttagcttttcttaatcaccttgcctggcttggagtcatgactaatcctgcacctgctctgtctggcagacccatgctgtggaaaacctgcttacagacatcacttttaagtcctttgtggatgtgggcacagtgaagagcaataaagagtgtgaggttcctgctggagttttcagctcatctggagaagacaggtcgaggccagagttccttgactgatgaaacctttatttcctctggaagaggaatggtagatgggtttcctcttgagtgctgactctgactggttggtagtggctgcctgagggcctattcgcacccaatgggaagaatgtcatatggctagtgacatctcttctgtgcactggaaggaaatgtcatggcatgtataccatgtatcttctatttctgttctaggtctttgttacagaactttactttgccttgcagtgatggtcactggcaagactatctcatgtagtaagaaaagtactggagctggggacatggagggctaattccagtcccagatctgccactagctctgtttgatcttagtcaactttcatagttagtctgagagtggatcaaattatcactaggatttcatttatttttaaaagctgtcttttcatagctcatccactacttctcaaggctagaacaaggagctagggatcccttctcaggttctctggatgtgatatccctcagtgaaaactgggaatcatgttaatctcaacgcccgatgtagaatttcatgtcaagtctcaatagttgattttctaaaccacacaccatctataggataatatccccattcattcattcattcattcattcattcatctgctatgggctaggcactgcccatgcctaaacaaagacataatcttacagagcttagagtctagcaacaccattaccaccaccatcccaaaaaaagacaaaaaa

SEQ ID NO: 9533 - DNA, 602 bp, Homo sapiens
aactagggtcaggcacagtggctacaccaaagtaatctcaccactttgggaggccaagacagaagtaaggagtattgcttgaggcctggagttcacgatcagcctgggcaacatgacaggaccatatctctacaaaaaaatttaaaaatattagtcaggtgtggtagctcatgcctgtagtcccagctgcttgggaggctgaggcaggaggattgcttgagcccaggagttcaaggttacagtgagctatgatcacgccactgcattccatcctgggtaacagagcaaaaccttgtcactaaaaaaacaaaacaaaaaaaccctgaaactgataagtgagcagatggtgggtcaagttctaacaaactggccatatttttgcaaactcactcaaaatacagtcacggtctgtctatggtgtatgaacaaactgtggaatctaaaatgaaaggatctctggcccatagaaaggactctggataaactgaagctgtcaccaaacgtaggcctaaattcaatgcataggaactcagaggcagcatctacaaaagctgagggtgcacaggtttctaagtgggttctaagagggttctaagaggacc

SEQ ID NO: 9534 - DNA, 717 bp, Homo sapiens
  SITE (202): n equals a,t,g, or c
  SITE (209): n equals a,t,g, or c
ccccatatacatcccccactatatccacacatatagtatatgtgatatgtatagtatacatcacacataccctatatacactatatgtgtatatacccttatatgtatatagtgtgtgtgtgtgtgtgtgtgtgtgttaaggtggaatataaccagttcctatgtatgtgttttttggggggaatatgttgtatcaaaatanagtagantttaaagagaagtcaacaattggatgaaaatggaaaggagatcacacttctatcatttaaaacaaaacaaaacaagaacattacacaaaatgatgagctgtaagactgtaaaaatacattgtatctgactaggagtgctaactctgtggaggaaaataagtaagtatagatatcacaagcaaagaattacaatgcagaaaagatattgaagtaatattacaattaaaaaactgaatagtcaaaagagcaataatacaaacatcaaaagctattgtaaacaaaacatgccaggatgagaaactcatgaaaaaaactttttaacataaaaaggagaaatatttggcaacatctaacaaagctataagtatatatcagctatgactaagcaattctacgtctacatacagaatgaccatgaagtctaaaaacagactttaagagagggagatactgaactgccttgattacctattaaatccatccacagtattttcctgtaaatcagaaa

SEQ ID NO: 9535 - DNA, 2096 bp, Homo sapiens
ggcatttttttttttttttttttttgagacagggtctagctctatggcccaggctggagtgcagtggcacaatcatagctcactgcagcctcaactttctgtgctcgagtgattctcctgcctcagtctcctgagtagctgggaccacagacgtgcactaccacacttggctaattttattttttcagagatcacatgtggtttgagggaggatagagaggacagggtgtcaagaacagcatttttaccaagttgatataaaaatgaaacaggatccaggcatgggtctttacactgatagttacagtaagttttaaaatctgagcagcaatttgaatcacttgttgaaaaacacacaaaatatattttttgtagaggtgggggtcttgctctgttgcccaggctggtcttgaactcgagattctcctgctttggcctcccacaagtgctgggattacaggcgtgagctactgcacccggcctgctttctttttagtgaaaaggatctgtgggagcttttattcccatggctgccttcctcaagtcaacctctttccccggaaatggcatcatctctggactgttgtttctccttcttccttctcctccttctcctcctcctcctcctccaccatgcccggctgatttttgtatttttagtagagacagggtttcactatatgggccaggcagatctcgaactccaaacctcgtgatccacctaccttggcctctgaaagtgctgggataccgtggcctctgaaagtgctgggattacaggcatgagccaccgcgcccggccccgttgtttcccttctaagaaacgcagtggtctctgaagcctgcaggggcaggccagccctgcactgaacgcctgttcttgccaggtggcagaaggttgctgctcatttgagcagtacctgtcacccctcctcccactgctgcggctgttaactcatcttcaggtctcacaccttctgcacataaataagctatttttaaaagttattatttttttactctttcttttctttggagagggtaccaaaggatagctgttctgtttaagtagggacctctcatggcctacaggctttgacatctgagaatcaaactggagaacattccgaagccgttcttataagtgtctccatctctacctgggctgaaatggaatgtgcaaatgtagcccagcctggtccttgggtgttgccagttgattgatgactgggagccaaagtggcatctcctttgacctaaacgggcgatgatgaaataaaactcaacagcctttctctcatcttgcattgtgagatgcgaaatagagcgtgtctctctgcctctcattttaggctgaggccgtccaaagcggccatgccccatgtttccactagatggcgctgacacttcaggcatcaaccctcatggcctctcagccttgcaaaggcagccacttaaagtcggtgtcctgtgtggggcaccaagctgagctgcagacacccagtaggcgcgaggcaaatgcgtcccattttaagaggcttgtatttatgagctctttgcttcctccctcccactaactttaaagaattgctctccatctcctttggcaaagttcctttgccctttgtcttatttttgtgaaaccctccaaggtatttccagtccatttgcatccaatctggcatctttacggagagcggtctcatatgctattgttgttaacgtggactagtatttatgtgttgagaacactggctgtttgtcaggaaaagtgtgccaaaacaaagagtacggccggccctggaaatgcatcagcaaaacccatttcccccgtgcactcattctgagcttccttccttcatttctgtcattactgctgagaactggactgtgcccagctgacctttcccttccttgccctcatcttgctgccagggtctgcaggtttgccaccgtcccggccccagtctgaaacatgggattatttcagaattggaggtggcagcttcagaaaaaaatccttctcgtgtgttgactgctgagatccaggaactgggaaatcaacccccagtttgtagattgctctctttggaaat

SEQ ID NO: 9536 - DNA, 3205 bp, Homo sapiens
ctgagtagctgggattacaggcgtgcgtgcgccaccacgcctggctaatttttgtatttttagtacagacgaggtttcaccatgttgaccaggctggtcttgaactcctgatcttaagtgatctgcccgccttggcctcccaaagtgctgggattacgggtgggaatcaccatgcccagcctcctttccatcttttctttccttctctggtcttcatactaccaaccaagcaagggaggaggagtaaaaggtaaaatcacaaaatactctggatcggcatttttttttttttttttttttgagacagggtctagctctatggcccaggctggagtgcagtggcacaatcatagctcactgcagcctcaactttctgtgctcgagtgattctcctgcctcagtctcctgagtagctgggaccacagacgtgcactaccacacttggctaattttattttttcagagatcacatgtggtttgagggaggatagagaggacagggtgtcaagaacagcatttttaccaagttgatataaaaatgaaacaggatccaggcatgggtctttacactgatagttacagtaagttttaaaatctgagcagcaatttgaatcacttgttgaaaaacacacaaaatatattttttgtagaggtgggggtcttgctctgttgcccaggctggtcttgaactcgagattctcctgctttggcctcccacaagtgctgggattacaggcgtgagctactgcacccggcctgctttctttttagtgaaaaggatctgtgggagcttttattcccatggctgccttcctcaagtcaacctctttccccggaaatggcatcatctctggactgttgtttctccttcttccttctcctccttctcctcctcctcctcctccaccatgcccggctgatttttgtatttttagtagagacagggtttcactatatgggccaggcagatctcgaactccaaacctcgtgatccacctaccttggcctctgaaagtgctgggataccgtggcctctgaaagtgctgggattacaggcatgagccaccgcgcccggccccgttgtttcccttctaagaaacgcagtggtctctgaagcctgcaggggcaggccagccctgcactgaacgcctgttcttgccaggtggcagaaggttgctgctcatttgagcagtacctgtcacccctcctcccactgctgcggctgttaactcatcttcaggtctcacaccttctgcacataaataagctatttttaaaagttattatttttttactctttcttttctttggagagggtaccaaaggatagctgttctgtttaagtagggacctctcatggcctacaggctttgacatctgagaatcaaactggagaacattccgaagccgttcttataagtgtctccatctctacctgggctgaaatggaatgtgcaaatgtagcccagcctggtccttgggtgttgccagttgattgatgactgggagccaaagtggcatctcctttgacctaaacgggcgatgatgaaataaaactcaacagcctttctctcatcttgcattgtgagatgcgaaatagagcgtgtctctctgcctctcattttaggctgaggccgtccaaagcggccatgccccatgtttccactagatggcgctgacacttcaggcatcaaccctcatggcctctcagccttgcaaaggcagccacttaaagtcggtgtcctgtgtggggcaccaagctgagctgcagacacccagtaggcgcgaggcaaatgcgtcccattttaagaggcttgtatttatgagctctttgcttcctccctcccactaactttaaagaattgctctccatctcctttggcaaagttcctttgccctttgtcttatttttgtgaaaccctccaaggtatttccagtccatttgcatccaatctggcatctttacggagagcggtctcatatgctattgttgttaacgtggactagtatttatgtgttgagaacactggctgtttgtcaggaaaagtgtgccaaaacaaagagtacggccggccctggaaatgcatcagcaaaacccatttcccccgtgcactcattctgagcttccttccttcatttctgtcattactgctgagaactggactgtgcccagctgacctttcccttccttgccctcatcttgctgccagggtctgcaggtttgccaccgtcccggccccagtctgaaacatgggattatttcagaattggaggtggcagcttcagaaaaaaatccttctcgtgtgttgactgctgagatccaggaactgggaaatcaacccccagtttgtagattgctctctttggaaattctgtggcccaacctcgtggctgttttctggaattccttctatcggggcagacagtgctgtgcctttcttgacttcaggatgttccaaggatgctgctggatctgtgtgtgtgtgtgtgtgtgtgtgtgtgtgtgtgtgtgtgcgtgcgtgcgtgtatgtgcgcctgaccctgatttctgcaacctccagatttctttcttgacccttcaaagtggaacagtccagtgccaaaaattttagagtttgagaaggtcacagaaatcctctagttggtgcctccacagtcttcattttacagaggaactcagggctaatggagttaatgcaactagatcagggttttgggtctgtgttctttctaccgtcagcacctgtgtggtcaattctggacacttcccagagaagtctttgagtagagaatcctactcaaatttcactgtatattttaagcattcctctcctttccctttgcctcccctgttgccttttcttcccctgatttctcctctggtcatctcctctcccttctgcgtgtaagccatgggaaagggatgagggaggacagcttctggttaaacacaggtccctcttccacatcaaatgaacattggcttcctgggacagaaggccttcaaaggagggattgcaaagcaaggcaaagcgttctgtcttcattttccccatccccatgagacaagactgatggaaagggtggtggggcaacactgcttaatggatgccttttcacatcatttcagtttttagccctcatgactgtattttctaatcagagacaataacattttaaataaaacaacgacaaagaagtctga

SEQ ID NO: 9537 - DNA, 168 bp, Homo sapiens
actcctgatcttaagtgatctgcccgccttggcctcccaaagtgctgggattacgggtgggaatcaccatgcccagcctcctttccatcttttctttccttctctggtcttcatactaccaaccaagcaagggaggaggagtaaaaggtaaaatcacaaaatactctg

SEQ ID NO: 9538 - DNA, 776 bp, Homo sapiens
ctgagagcttcatgttggagctgaagttcaaggttcacttcctttgggtttgtacttgacccttcttcatgtgtctctcccgttccctctaaaacaagtgtgtttcccctcatttttgaggctgtcaatggtgtgagagccaggatcatcacggggcctgaggttttactccagaaaagcagaggagtggcaaccttggcttggggtttggcagcccaggaaaggcagggaggagagctcaaagccggtttcatgtttcacccaaggtctaattgtgggagaggacaaatccagatcccctgtttgacagaattagttcacaaatgtctcttggcaaaaacatgtgacacctaaccatgataattgacttaatccaagaaagagctctgtagggcagagcaataggaaatctctctttcgttatggaaaaaaaataatccctctacatagaaactgagtgacatgtaaaaatgtgtagctaagtcagggagttacttcctaagagcctgacgctctgcttttcatcaaaaggaaaaaccagcgtgaggcagaggcgagggaggtggaggtgagtggatgatgtgctgagttagggatgtttatatgccgcaaaggtttggttggtaggcttcgcgctaagattagcctggctttgtactgaaaagggggaaggacacatagtgacacagatccttctggtctttcccaggaggtgtgacctaatgaggtttgttgtgagaataaagcaatgtggtttcacatatattatctatcat

SEQ ID NO: 9539 - DNA, 936 bp, Homo sapiens
ctctgatccttcttgaaaatgtatgcaaaagttttgttactttgtgcctatatacatttttggaggaagaggtctttagctttcctcagattcttcagaggtcctcccatcccctgggctttctggtagttcttgtgtttttagtctcttgctccttactctctctatattaaaaaacccagagcctggagtctacaggcgtgtgttaaggggcctgcaacactctggtaaaatccagcttttcctgggctgtccattatgcttgcagatttgaggacaggaataatactgagataaatacagctgtgtcgtgcgatacagtacaacattagcatgcacaaagaaatcggggggcctgtggccttcccttgtggggctgtccgtgtaatgttatttggagtactttggcagaaaacttgggactgtcttaattgtaaaaacatatagctacattttactgtttttctcacttctcttgacagttgaaacttgtaactgctcccttcttgaaacttgcctggctcttgtgatgccacagcctcctactgcttgtctggcctttctggccatttctcagcaggttggttttcctcacctgccggttgaatgttttcagtcttgaagggactgttggagttctcttttcactcttccattccccctggacatcctcacggacttaactagtttgagcacctatgcagtgtcggttcccaggtgtgtaccttagctctggttccacctgcttgctgggcaacaccttccttggctgtcccatgggccccttggattccgcatgcccacagcagtccttgtttcttcccctctcccgagcccccttgttcttctgttgctcaagtcggaaacctcaaagtcctccagaagtctgcttgcataccccatgttcagccaatcaccgggtcttctaaaactggg

SEQ ID NO: 9540 - DNA, 556 bp, Homo sapiens
ccgtgtaatgttatttggagtactttggcagaaaacttgggactgtcttaattgtaaaaacatatagctacattttactgtttttctcacttctcttgacagttgaaacttgtaactgctcccttcttgaaacttgcctggctcttgtgatgccacagcctcctactgcttgtctggcctttctggccatttctcagcaggttggttttcctcacctgccggttgaatgttttcagtcttgaagggactgttggagttctcttttcactcttccattccccctggacatcctcacggacttaactagtttgagcacctatgcagtgtcggttcccaggtgtgtaccttagctctggttccacctgcttgctgggcaacaccttccttggctgtcccatgggccccttggattccgcatgcccacagcagtccttgtttcttcccctctcccgagcccccttgttcttctgttgctcaagtcggaaacctcaaagtcctccagaagtctgcttgcataccccatgttcagccaatcaccgggtcttctaaaactggg

SEQ ID NO: 9541 - DNA, 572 bp, Homo sapiens
cattccttctgctcctgccttcatcatcttcagctgatctccctgtcttttgtcttgcccactgccccaaaaatatccactcccctcactgttgccagaatacagtcatgttgtgaagcctttaacttactgtgatgggtccagttccctactgtggtagatgaggccctgcaggatgaggctccagccacttcagagctgttttccagcagctgtgtcgagctatttgcagttccttgaatgtgtcacgcagtttcacatctctctcttgttcttccttctgcctagaatatccacttcgtaaccccactcccacccctggcacgcagggtcctgttctccctctaagacccaccttagtcaccacctcctatgttctggggcgctttttccagcctcccttatccatgatatgaggcatctcttctgggttagcatgccagggtccaggctttagagccactgcctgggtctgtatctcagctttctcattcattgatagtatgacatcgggcggatgacttaactgtgccatgtctcagtttcctcacttgtagatggagataatagta

SEQ ID NO: 9542 - DNA, 572 bp, Homo sapiens; identical to SEQ ID NO: 9541

SEQ ID NO: 9543 - DNA, 786 bp, Homo sapiens
tttgtgaatcttggcttcaaggaccaggtgtacctgtatctcaggtgggaagattgaggctggagcaatgcctttataggaccatcagagaactcttctgtgaacagatttctgttgtgcatgatgtaccttttacatcatgcagggcattgtagcagatataggagttatgctttatttggtccccagcttcaggtgactaacagtccaatcagaatccatgcacacagagatcagcatgacacaacatgagaaaagaaatgttatgtggggaagtgtagcaaatggaacggccaggtgagaggccagagagatctaagaatgtcctgaaggaggtgagatttgcccttgaccttgatggagtggtcagacttgggaaagaagatgaataaagcctatataaactgagagttaagagtgaagactggagacagatggctttggcttaaatcgcagttctgctgcttgctatctgtgtgaccttgggtaagttacttaacctcagtttcccagttatgacatgggaatgataacaatggtgtcggtctcttgggttgctttgaggttatttgaaataatacctgtaaagcccacagctaaaaaggaggaatgatggtggtgatgcagggagaccaaagagtgaaacagtctagagtgaagcgaatgtgttaaaatccagaggcgatcaagtgaagccagcctttggaggcccgtagaagtcatttggaggaatttggacttcgtgcagtaggaaagagggaaaactgtttttagaaaaaaaaaaaa

SEQ ID NO: 9544 - DNA, 389 bp, Homo sapiens
tcatgtttgggcaggtggacgtgttcaggctgccaagtgttcattttatggtctctaaaatggtgtgctaatgtttcaaggacagctctgaaacagctagggtaaagtggaggagagcggggagcagtccagcctcgactagaactctaagtggcatgtcgaggggctgctctcagaagaaaacagcttctttggtctgtgcattccttttgggaccaggtaaatattgtttaagatgagtttgggaatttccaggttgcctgagacactgtctgagaaccttcttagtacttggttctgacagcaagtgctgaagcggaaaaaatatttccatccatctgcactaatctcttgtttctctagcagttagaaagtggggaggggaaatg

SEQ ID NO: 9545 - DNA, 3110 bp, Homo sapiens
tttttttttttttttttttgccctgaaacgaataaaacaaataggcgtctggtatttgttttgtataacacaatccccataaaatgaagagtaataaaacataattatctgtaaaggcttgttttataagcctgagaatgggcttgtttctaccaggtttttatgttcattcataggagaaagaatctctttgtacattaatatgtaacaacaataagaacaaatgcttcccaattacatgcatgaatcaaacttatcttttattaaaaaattttttttctgttgtagtaaaagtttgtcattaaattctttctgtgtaaacacattagattgaaggaaaatgttttccttcaatattctgttcaactggcataactttatgatttttttctccccagcataattaaagaaacaactttatggttggttattgacttttttaggtcagagagcactctgtggattctaaaaccgccttccagaaaagtacacatcaaacttctacgtacgtttttatagggtttgtagagctctgatccttggttaaagatccctgacaatgtctaatagctgttttgaaaactgtacctccaatctgaagctaaggttttagttttagttttagtatgtgaatatctgatgaaacgattcaatggttttgtagcattggattcaatttcagggttgggctcctttctaggaatagaggaatattcttatctcaggaaaaaaaattcagagtgtgggaagtacgaaaattattaattcaaaggtgtatttgctgtcagattggatggcagtacccacatccctaggggctcctgttcccaagactgttttcattgtttctatccagcgctgggcacgagccttgaagtggcgaattcatcctctgaagttgtgtgtccattgctgcaagaataaaagaagcagtaacagaatcatgcagcgcagtatttcatggtgacagttttatgtggttgtgtgatgttgcagagtcttgtaggtgatatctacccttttcttttgaatcaaaacacggggttttactggaggagggaagtttcagaaacaacctagtctaacacaaaattaagctcctaaatagttatcccattctgtctactacaaaactaattgcttacaggaagtagaagtacacatatctaatatttatatcctgtttgagtagtggtttctaattttagatttctaacccctttttacattatctttttgcattgaaattatactgaaacattcatattattatgaatgcaagctgaattaaatagaccaagattctcggtttctcccttcatgttgtcatctactagagaatgaacagcttaaaataagtgcatcagttcctcatccaaagggaagctgaatattccaattcaagatcactttgcgtgcttactggaaataccatttttgaacgtacttggcaacttaaagtgcccaattaaaagctctgttgaaagaggaagtctgtggatgtgcaattagtccttaggattcagagcatttcctttatgtgtggaaggccataatatgaaatcactggtcacaatagctttatgccaggtgcttagactagaaggcattttcaggatggattatttctgtactcttgctcctaaaatggtttacctaaagaggctcccaagtccataaaaatactggtgatgtcaagaaattttggaggtggcctttcacaaattttaggcagtcaataaatataactagccatgtacgtgataggcaatacacaagacttgcttatattcctagactttctattttatctgattgacagtgttcctcttcccacctttttattcatttatttatttttaaaagatgaggattgggtaccagaaaattagccagtattgtgtgcttttccttactaaaaaaatgaggcctcgctgagtagggccagatgagctgtatattctgagattatttatagtgtttatgatagagagaccaaaaacagtaagcacttaatagctttccttatttacaagtcagattcatctaagggatatttttcttttatttttctggtgcttgaaatgttcctttaaaatagattatcagaggatacacagtgacacaaaatttgttgcttgtgaaaatgcagagtggattaagcttttctttttcaaggctctgcaacaaaacaggtacatttttatttcagtaaaaacactgctttttttttttgcctccgtcacacacacgagtaacataggatagatatgtgtatgtgaacatgtggctcttgttcccagttgtgtaatggatgcattcccttaaagtttgcagtaaagtgaatgtttattaagcaaattgtttttccccagtgacttctactgtaaaaatggcattgtctttcagtaggctctgaatatagtatgttcccatattctttggtaagatgaccaatcaaccaaaaaaaaaaaaaaaacaaaaacagccccaataacaaacaaacaaaacaaccctttaggtaccataaatctataggaaatactaaccttctgatgaagctggcccgatgccacttattgttgtcccccacgcctaagctatggtatatggctttaataacaaaatggcaacacacaatagtaccacaacctggagggtgttactctttcttctgctcacccttcctcccattgttcccatgggagagaggacagacaccaaggctgtagcaaataggttattttaataacctcagcatccttgtttctatatgatatacatttgatagccaagttgaatttacccacctctctctaaacactttttcctaaccctttgtcaatttgtcacaccatctttggatgaagagtggtacctgatggtgtatgatgcttaacaatcgaaacatctgtaccttgttagccataaaggctcatcccatttccttccataaacatctattgtaatacaatatggattgtgtaaggcactgggctttaggcccccagcccgaatatctgtcatctattaagtacttactgtggataaagaaggcagtatacttaacatgcactatttcatctaatttttgcaaaagctctttgagt

SEQ ID NO: 9546 - DNA, 318 bp, Homo sapiens
ataacatgcccagcttggtttcttgcttggttgttgaattgctgcatgaaaatctgatccctgcagtctttgagcctgcagcccagtgaaagagatggatgtgcacacaaccaagcatgaacaagatgcattatgacaagtactatggtagtacagactttgtgctctgtgataattcctatgacacgacttgcagttgatcccaggaggtagcatctgggacatagtcactttagcaagtcctatttattctagcttgggagagttccttgcatcttaactctgtatactctgtgatcaccagacagtcttggtcta

SEQ ID NO: 9547 - DNA, 320 bp, Homo sapiens
tccttctgtggtggctgcagattaagtctgaaccgtgccagaaatctcgttgcattttttgatgtagcagaaatgaacctggttcattccatcttaacagctttagccaaatggctcagaagggatctacccgatttcataaagaagagttaatgtgcagtctggtttaatacaggtgcccttaaaatacatttttgttttgttttgttttctcacttccaagtttaacatgtccatggacattggctttagtttccccaagatgagtccatgaatgaccttgttccagtatcccttgctgatttgagttcccaagtaat

SEQ ID NO: 9548 - DNA, 718 bp, Homo sapiens
agtggaagggagaacctagtatgagactcaggtctccaccctgcacttgactaggatgctgatttgcactcaggacatgcagcccttcaaggcatctcaaattacagacatgaaacaacagatgcctggatgaattttacaagcagggcaacagtgaggaagaaggctgtgtagcaaaatatacacttagactccagacctatggctttatcttgtcaatatcattaatattcacgggacccaagctaaggctgaagttagtgagccagctctgggtctggcaatgtactctagtgagaagatcaccggccttgaagtcaggcttgtgtctgaatcacagctctgcattttaactagctgtgtgacctcaggtgatcaccatacttctgagcctcaatttccctatctgttaatttaaataagggtgttggtatgtcaccaaaatcccttctagctctaagattttaattaatttgttaaccaatggaattgttgagttccccccaatgtttttgcataatctttgttataactgtgttttgtttacattagaatagtagaacaacaacatcaacaaaaaacccaaatcatccccaacttgatataattgcttctctaccccagctgttgtgactttgtgtcacttagctgttgtcaccctgctgagctagagttttccttggtaaaagaaaatgaatgacagtttatgttttaaagg

SEQ ID NO: 9549 - DNA, 718 bp, Homo sapiens
agtggaagggagaacctagtatgagactcaggtctccaccctgcacttgactaggatgctgatttgcactcaggacatgcagcccttcaaggcatctcaaattacagacatgaaacaacagatgcctggatgaattttacaagcagggcaacagtgaggaagaaggctgtgtagcaaaatatacacttagactccagacctatggctttatcttgtcaatatcattaatattcacgggacccaagctaaggctgaagttagtgagccagctctgggtctggcaatgtactctagtgagaagatcaccggccttgaagtcaggcttgtgtctgaatcacagctctgcattttaactagctgtgtgacctcaggtgatcaccatacctctgagcctcaatttccctatctgttaatttaaataagggtgttggtatgtcaccaaaatcccttctagctctaagattttaattaatttgttaaccaatggaattgttgagttccccccaatgtttttgcataatctttgttataactgtgttttgtttacattagaatagtagaacaacaacatcaacaaaaaacccaaatcatccccaacttgatataattgcttctctaccccagctgttgtgactttgtgtcacttagctgttgtcaccctgctgagctagagttttccttggtaaaagaaaatgaatgacagtttatgttttaaagg

SEQ ID NO: 9550 - DNA, 779 bp, Homo sapiens
tggggaatcactgattgacattgtctcagaaatacattttctgtcctttaaaaattctgaaataatatcaaatttttctcccctcagaagcctacgccaaataagtgctgtaatcttagtacaactttgtagtacagtcagactcatttgttgatgtctgactggctgagtttttaaaacctattattcccccttccgccccatatctggacatgccagtaagaaagctcaaatgcttccacctttgtgcctggtggaagttcaaaccacctaagaatcctcactgcagccctacctccaagccactaggaaaagccaggctcctctactttccctgctcaagccatttctggacctgcttgagaactcgctgctctctgtaaaagcctcgtgtgagtgataaaccttttcatatctatttggtcctaatgtaacatcagtcctaacacctaaaccaagttttgggtaaggggttcaacctctcctctgtgggatgactaaacactttatgcaacaagcagagggtctaggagatgaccactaccactgcagggctctcctcttgctttagtttgctaactgactcttgctggctagaattttttttttttttttttttttgtcactgctggcaagctcatgctttgtgctgtgctgctttgtactgcgttcactgagccttaccaagcttctgttatagatgtgctcagctaagttggaatttttgataattggcatttaagaacaagaataaagtggcatttaagaacaagattaaa

SEQ ID NO: 9551 - DNA, 940 bp, Homo sapiens
caatgattcattcaatatttattaactacctactgtgggccagtgtacactccggacttgagtctgtagaggggcactcttattccaatcagtagaataaacgtggcgtgagctttacagtgttcctctgggtaaggcaagtaatgcttaagtagttgtacttttaatctagtgctaattaatggcctcttaaaagtgcagtgttgggtcaaatggtatttctagttctagatccctgaggaatcgccacactgacttccacaatggttgaactagtttacagtcccaccaacagtgtaaaagtgttcctatttctccacatcctctccagcacctgttgtttcctgactttttaatgattgccattctaactggtgtgagatggtatctcatagtggttttgattcgcatttctctgatggccagtgatgatgagcattttttcatgtattttttggctgcataaatgtcttcttttgagaagtgtctgttcatgtccttcgcccactttttgatggggttgtttgtttttttcttgtaaatttgtttgagttcattgtagattctggatattagccctttgtcagatgagtaggttgcgaaaattttctcccatgttgtagggacatggatgaaattggaaaccatcattctcagtaaactatcgcaagaacaaaaaaccaaacaccgcatattctcactcataggtgggaattgaacaatgagatcacatggtcacaggaaggggaatatcacactctggggactgtggtggggtggggggagtggggaggggtagcattgggagatatacctaatgctagatgacgagttagtgggtgcagcgcaccagcatggcacatgtatacgtatgtaactaacctgcacaatgtgcacatgtaccctaaaactttaagtataataataaaaaaaaaaaaaa

SEQ ID NO: 9552 - DNA, 24165 bp, Homo sapiens
tgccctcaccacaccacacctattccaaaattgaccacatagttggaagtaaaactctcctcagcaaatgtaaaagaacagaaattataactgtctctcagaacacagtgcaatcaaacttgaactcaggattaagaaactcactcaaaaccgctcaactacatggaaactgaacaacctgctcctgaatgactactgggtacataacgaaatgaaggcagaaataaagatgttctttgaaaccaatgagaacaaagacacaacataccagaatctctgggacacattcaaagcagtgtgtagagggaaatttatagcaataaatgcccataagagaaagcaggaaagatctaaaattgacaccctaacatcacaattaaaagaactaaaaaagcaagagcaaacacattcaaaagctagcagaaggcaagaaataactaaaatcagagcagaagtgaaggaaatagagacacaaaaaacccttcaaaaaattaatgaatccaggagctggttttttgaaaggatcaacaaaattgatagaccactagcaagactcataaagaagaaaagagagaagaatcaaatagacgcaataaaaaatgataaaggggatatcaccaccgatcccacggaaatacaaactaccatcagagaatactacaaacacctctacgcaaataaactagaaaatctagaagaaatggataaattcctggacacatacaccatcccaagactaaaccaggaagaagttgaatctctgaatagaccaataacaggatctgaaattgtggcaataatcaatagcttaccaaccaaaaagagtccaggaccagatggattcacagccgaattctaccaggggtacaaggaggaactggtatcattccttctgaaactattccaatcaacagaaaaagagggaatcctccctaactcattttatgaggccagcatcatcctgataccaaagccgggcagagacacaaccaaaaaggagaattttagatcaatatccttgataaacattgatgcaaaaatcctcaataaaatactggcaaaccgaatccagcagcacatcaaaaagcgtatccaccatgatcaagtgggcttcatccctgggatgcaaggctggttcaatatatgcaaatcaataaatgcaatccagcatataaacagaaccaaagacaaaaatcacatgattatctcaatagatgcagaaaaggcctttgacaaaattcaacaaccttcatgctaaaaactctcaataaattaggtattgatgggacgtatttgaaaataacaagagctatctatgacaaacccacagccaatatcatactgaatagacaaaaactggaagcattccctttgaaaactggcacaagacagggatgccctctctcaccactcctattcaacatagtgttggaagttctggccagggcaattaggcaggagaaggaaataaagggtattcaattaggaaaagaggaagtcaaattgcccctagttgcagatgacataattgtatatctagaaaaccccattgtctcagcccaaaatctccttaagctgataagcaacttcagcaaagtctcaggatacaaaatcaatgtacaaaaatcacaagcattcttatataccaataacagacaaacggagagccaaatcataagtgaactcccattcacaattgcttcaaagtgaataaaatacctaagaatccaacttacaagggacgtgaaggacctcttcaaggagaactacaaaccactgctcaatgaaataaaagaggatacaaacaaatggaagaacattccatgctcattggtaggaagaattaatatcgtgaaaatggccatactgcccaaggtaatttacagattcaatgccatccccatcaagctaccaatgactttcttcatagaattggaaaaaactactttaaggttcatatggaaccaaaaaagagcctgcattgccaagtcaatcctaagccaaaagaacaaagctggaagcatcacgctacctgacttcaaactatactacaaggctacagtaaccaaaacagcatggtactggtaccaaaacagagatatagatcaatggaacagaacagagccctcagaaataacaccgcatatctacaactatctgatctttgacaaaactgagaataacaagcaatggggaaaggattccctatttaataaatggtgctgggaaaactggctagccatatgtagaaagctgaaactggatcccttccttacaccttatacaaaaattaattcaagatggattaaagacttaaacgttagacctaaaaccataaaaaccctagaagaaaacctaggcattaccattcaggacataggcatgggcaaggacttcatgtctaaaacatcaaaagcaatggcaacaaaagccaaaattgacaaatgggatctaattaaactaaagagcttctgcacagcaaaagaaactaccatcagagtgaacaggcaacctacaaaatgggagaaaattttcgcaacctacttatctgacaaagggctaatatccagaatctacaatgaactcaaacaaatttacaagaaaaaaacaaacaaccccatcaaaaagtggacgaaggacatgagcagacacttctcaaaagaagacatttatgcagccaaaaaacacatgaaaaaatgctcaccatcactggccatcagagaaatgcaaatcaaaaccacaatgagataccatctcacaccagttagaatggcaatcattaaaaaggcaggaaacaacaagtgctggagaggatgtggagaaatagcaacacttttacactgttggtgggactgtaaactggttcaaacattgtggaagtcagtgtggcaattcctcagggatctagaactagaaataccatttgacccagccatcccattactgggtatatacccaaaggactataaatcatgctgctataaagacgcattcacacgtatgtttactgtggcactattcacaatagcaaagacttggaaccaacccaaatgtccaacaatgatagactggattaagaaaatgtggcacatatacaccatggaatactatgcagccataaaaaatgatgagttcatgtcctttgtagagacatggatgaaattggaaatcatcattctcagtaaactatcgtaagaacaaaaaaccaaacaccgcatattctcactcataggtgggaattgaacaatgagaacacatggacacaggaaggggaacatcacactctggggactgttgtggggtggagggagaggggagggatagcattaggagacatacctaatgctaaatgacgagttaatgggtgcagcacaccagcatggcacatgtatacataggtaactaacctgcacattgtgcacatgtaccctaaaacttaaagtataataataataaaataaaataaaaaataaaaaataaattaaaaaaaaaagtgtggctgccctaaaatgtttttgtcatccatatacaattgttgtctcgctttggtcctctttaacggatggttttataatcagctataaaatttaacaggccctcttaaatgcaggtttctgattaaaaactctggagactgtgatattagaatcgaggaaaaactttcaaattgaagagtgaatagtgtttggttttctttggactatatttgtataaatatgttattagtatgtgttccagaaattatgggaaacttctataattctgatatgatttagagtacattattaataattataattgttatataaaagtgttgtatgccacagaagtaaccaagattcctagtcaattgcagctttaatagtagctatagacttttgtcatccatagacattttgtcttgcttttgtccttttcaaaaggcagtttataatcagatatcacactctgagtgcaggtctcagataactttaaaaattgttttattggaatagaggaaaaaatgaaacttctaggcttctcacagatagctgatgtgttaagcattgctaatcctctcattttcagagtcaagatagcatatttctttagagttatttgcaacttttaacaaatgagtaaaaaatacttccatgaaaaaaatttagagcatatttgtttctctctacctgatttctcctgaatatggaaactatttgtaagtattctcaatttatgccagtatacttaattgcataagtgcagtaagaatctgtttttgtcttgtaacaggacacaactggagaaattgattattttaccaaggcttttactggaatggcatgcttccttcaaagaatcaaaattaatgtatagagccaattaaagccccctggggaatctaacctcagaccttgtctatagtccctgtacaaggttctgtcatacagtccctgtacaaggttcctgacctgtggtaagtaaagaatgtcactttctaacaggcccaggaaccccaagttattttgggaccttgagaagagaggaatttacccaactcataggtatttgaggatacaaacccatggctgagcttggcttttaaaaactcttatctgagattcctcatggaacagagttccatcaaagctaatttaaacaaaaaagaccctaagtgaaaaataattattcttgctgcactttatgcaaataatcaggccaagtatagtaagactaaagtacatttctgtaaacaaatcagttctatcatgatttgtttttaataaaaatggggtctggagagagagaaattatgcttcaagaggaaacctattgttagctgttgttagctgtccttgagttttttctacaattttgactaaatcctaaattatttgtgggttggaagtcgccagactaatgctttcaaatctttgcttttaaaattgagtattgtactcctcatcctaggactcattatttaccttatagtaggctgttcacctaaatactgtactaaaactatagatgagagtactaatgtttttgccatgcaagccttagaagcccagccagacctgcatgagtcgctcagacacttgaaagtggtcccactcttctcaccttggggttgactcccattcccactacgtcccctgtcagcaagaagaacccagagcaatcgacagccttttcccatcttcataccctacactttaagattaaggtgttacaaaacccaaagtgatggactgaaactgcctttgcaaaattatgattgagacagtaaaagagatctaacttaactgactccatcttgcttctaacttccaagctgtccttgttcattcctgggcataggctgaactaactttgggagaaatttagtctgtagttcatagtttaaacaaagacagtaacaaccctatcccaaagcagacctccttgcctgggtactagattgcctttgtaggactaacattagccacaagattagaaattgcggtttaggagtcatgcagctggaggttacaagatgctgagcctccctaaaatgcttctgagatcagtgcttgagatattttgcagaccctgcacttgatggatcagctggcaccacccagatcaataaactcactcatctgatcttgtggcccccccactcaggaactgactcactgcaaggagacagcttcgactccctatgatttcatccctgaccaacagcgctcctggctcactggcttcccccaacccaccaagttatccttaaaatctctgttccccaaatgctcagggagatgacttgagtaatcataaaactccagtctcccgcacagctgactctgcgtgaattactctttaactattgcaattcccctgtcttgatgaatcagctctgtctaggcagtgggcaaggtaaactcctcaggtggttccactgatataggtgatttaagtgttaaataaaaatctgttacattaaaatgctgaataaagagtgtttaaagcactccacaaagattattttttaaatgcctctgtgtaagaggaattctaatattgtgccaggatatgtcaagctataagataaaaattgagtgcatttcctagaatgcttattctactctaagattttgtgagaggtataataattcatttaactggtaataaacattaaagaagagtcaaacactgatttttgttttaagggagaagagagatttttttttttcaagacacttgcttgagctagatccccaggagtatttttaacactcctctgtaattagggaaacatcagtatgtctgtattgatacatatacacacatatataatatgtatatatgtaagactatgaacagtcctaaatttatactttgggctgataactgtggttttcaggaaaaaaaaaaattttaaacgggtgcaaagtctccccaactggtctaagtgagaaatcatttggcattacctctcccttatcccctacctgctaattacaatttttcaaatatagttatcattaagtgcaaactaccataatcttggcttatcttcatggcaaacttcaattagaaatttagaaaatggggagaaagagtaaacaaggttaagagagtgggttctcagatagaattgggtacaaatttgggctccaacacttaggtatatgtggccttgtgtaaccacctaggttacacaacaggtgtaggttaaccatcagctgccttatctcattaggtccttatgaggatttagtgagctatgcacctgaagtcctcagctgtagccagacagcaagtgttcaaagatgttagtcattgtttttgtttattgttttatcattgtgcagggtcacatagctaaggggaatttcaaatccaagtccatcctacttcaaactcctttgtgctcctaagctgtacagtatagtcaccttggagagtaggtgattggccccaaactacttcagggactgcaggtcgtggccagccagtcctgtatcagacctcgtccttgccagatgcctagtgccccagattccctcaaatctcaggccagatcacctcccacctggtaagattcctccaccttcacccgagcaaaactacacttggtttgggttcccgggtaccttcagtctgcagggacaggggctgcagagtgtactccccaagtctgcctctgctgtcggcctcccagctgagtaggcaaaacattcctttacagagcaatgtgttcatggataaacttgtctctagtgcagctctctgtcagagcacagaacatgaggccaaagcactgcccttcctagggagtcccggttctcgacttccccagaatggaagtttgatttttccgttggcccatttctcagatggaaaaacagattcagtaaggtgccaacgctttgctgaggactaccctggaggctaccgttttgtgaaggggtagacattgagactggagtcagatacgcattctggcttatctcctgacttactgagtgaacttgagcaggtccctttcgcccatgggcgtcggtttcttcatctgcaccaaggagacggaaaactggattacgtgtcgctaaggccccgggttctcagaggaaagctcacccctgcagggccgccttgccccgcgcgcttggggccagctgcacgacaagccccagcatgctggggaggcggggctcagtgacggacagggagctctgcgaattggcgcccggcaaggggtgctcaacggcgcgtgcgcagagggaggcaggcgggtgggctgccggcggtggactcgtcggagccgcgggcggtcaggtagggggcgggaaggagggttggggactggggaccgcggccggagtcgtgggccgtggctcagcggccaggcgggggaacgtgccggcgtgcagcggccgcgcccgaatggcagggtgtggggaccggatctggggggggcaggactagggtgggggtggggctgcgaggggcaggctcgggagggattcgtggggctgaggagatccgaggagatgcagctgggggaggggagcgaggggctctgaagagatttgcggttgcagcatctcgggaggtatgaggtaatgtcggggccctgaggaggaacggggtgtagcatgtgggagatgggagggaatcagggccctggagggacctgggtgcagaatttcagaaatatgaaggaactggggggccccgatgagatttgaggaaatctgggggcgctaggcatctggcaaggacagggtctgagatgataggagcaaggtctagggcgatcctaagtgctattgagaaagggttttcggagtgggctgagggtgagattgagggggtggggtgagttcttgagggactctatcttgttagcagaaagaagggagctggctgaggtgtgaaggcagcacatgacattcagtgcataagaggaaggagcagggtatgagggcagcacagtgcccgatggaatgcaggagatgggggctcagattgagggagagcagaaatctggggtgaggaattggggcgttgaactgaggtgcggggctgagtgtggcagagatttggaaatagggattaaacgatctgagtccgagggatttggggcatatgagtgaggaattgacgagggttgcaatatacagccccaaagattggaatttggaattgtaagagggttggggacagggtttggagaggattgaatcgtggggtggagatgtcctaactgggctataaaatcaaaggaccctgagtagatttgtggattggtgtcttgggctgctaaagagattttccttaaatcgctgcatgggagacagagggagttcaggggacccaaggacctaaaagtaatgtatgaaactggatgagtatatgaagatgagcagagttcaggtgctgaggaacaaagtgataaatcttcagttcagataatcctgaaggagtgtggtaatccctgtgaagggcagaatcttcttcatttattaaacaaagatccgttatcatgaggcaggtatggtattgccactaactccattctgaccaccggtcccccggcccactgaaagtggtaggctttggggaagaagaagtggaactattcaaggtcatctgcctaagccctttttccctgtacccccaagctacgatagcagatagaaagtgagacctccaggggaatgagtggaataatttatcctatataagatccattacagcttgaaggggcagtggctctgtgagtgaggtgtttgggctcggagacagacaaaacaacaacaacaaccaccagaaaaaaaaaagggaacccttaggtattgagcatttagtcctgtgctagactgtaaagcagtggttcttaaccaagtctggctttgtctcctaggagacattaggcaatgtctggagatgttttttggttgtcacagggtgggggatactactggcctcaagtgggtagattaaacattaaacataatgttttatgttaaacatttgacaatgtgtgggatacgcccttcccccccgcagtaaggaattatcctgcctaaaatgtcagtaatgccaaagttgaggcactctgacctagagtcagataccctgggttcaagtcctagctctatctcttcctgactttaagtcctagctctatctcttcctgactttgtggccttgaatgagttacttaaccacccagtgccttggctcttcatctgtaaaatggggttatgataacaagaccaatgtcacagaattgttgtgaggatttagtgaagtaaactagcatgcctaggatctggcacatagtaagttctcaaaatctagtaatttttagtcttgtatctacttctttactcagttttcatgacagtccttctaagtaggctctactgtattcagttttacacatgaggaaactaaggcttaggaagtgacttgcctaagtttccatagctaggaatgacacagttaagctcatacccagatctctgtaactccgtatattcccgctttccttgcttcttccttgctagggcctgcttagtcttattttctcagcccattcccctctaatgaaaaagaggattgccagtgagtatcactgactatcagattgaactctaaagttggggggtaaatctctctgattaggtagggaggagccctggactttgttcttggtttgcccttagaccaagacctggggctagataaggagaggagcctgaggttatcaggcaggatgaggtgcaacggactatagggtgaggtatggaggccattggcttgaaaaaacacctcatagcagggactgaggctgaaggcagtcatactctgaaggagagtaactactgttctgtatggtctcttttggtctgcttttccctggaacagaatttggctctatcatttccaggactagctacagggttgctgaagccagttcagaaacaaagctagactgtgtctgacagcaagacttagctggaatatctgtgcacatccctaaaagaaaatatgtcatgggaattaaatcagccctgtctaaactccttactctaatttcctatgttaccttgtcagtagctacggcacttgtcctgtcagcctcaatctattaaaaatgcaaatgattataatttgttgagtgcttattatgtgcattatcttagtgaattcaatcctgctaacagtctaggttttattccttgtttacagataagaaaaataacaggttaaatgacttacccagggctacagagcaagtagctaggttgggatacaaacccagttctgtcttacacctatgttacattatagtagttttattagaagccttttccaacccttcagagcccctatgtttatgtctggagaatagttggaagccagaagtttataaggcccttaaagtagatcattgtctatgcacactgatgtgtaacctttgtgacattccctccatcttgtctttctggtaaaacaatcaaatttaaaaatcatttctaggtgcccttaccaacctctcagccagactttgtctaaagctagggaactatgaaacatcctttaagttagtaattttatggctgggagttgatactgggatttgaatccttgctctattacttattggttttgagaccttggacaggctactttctctgagcattggtttccttatttttgaagaggaatcacacttactttacatggttattatgagactatgagaacatataaaaaaatgcctgacaataaatagtagttgctttaagagtgttagcaattatgagaggaaggcagtgctggaagagaactaagtgttgctttgtcatatttatttatttatacagggtcttgctgtgtcacccaggctggagtgcagtggtgcaatcacagttcactgcagcctcaacctcctaggctcaagtgatcctcccatctcagcctcccaagtagctgggaccacaagtgcatgccaccacacctgattatcttttaaatttattgtagagatggtgtttcactctgttgctcaggctctttgccagattttgataaccctaagtagtctctgctagtctccccaaaattctcatcccattttgtatatttcctaggatctccttgatcctttaatcataatctcatgattaaatgaacagatgttatatgcagagaaaggaattgaaagagagagagggttgaggttagttggaggtccctgagaaggggctattgatttttcctttgtcttatattccttgagtcatactggcagcgtaggtactactcaaatgtttgtgaaagatgcaagggagtctttctaggtcctgcagttttagaggaagacagagacaacaggcaagcatgttttccaggaaaccctattattcatttagcctgcccttgacatagtttagctatgtttaacttagtaatttagctaaagttttctttctctacaaacatacttccttctggatcgttttgtttgccccagactggtacaacttcaggagcatgcctgtgtttccctataagcccctacttgttgagtttatcttagttgtctgcaggtgccttaaatgccctgagtaatctaaacttcatcagaatcctctcccacacacaggagtggatgtcaggtgatgacctcactgaattcgttaaagtcagtcctgctaacgagtggcctttggtggcacagtgatagttttgcacttgattagcattctgttagaatgcatgaggaataaagtttagaaagctgacataaaaggaaatgagataaaccttgcaaaaaacccagtcaaaccaggggagcgtgtcaatagtaggatggacctttatgtcttgtgaaaggaaatgcaatattttacatgttgtctagtttttaggggaaagcactgtttatgtctggtttttgctcaaaattgtatcaccagtaccgttcacagggccagacacatagtaggtgcttagtaaagatttgttttgttaattgcttaaagttctccagttttgctcatggcctaagccaccaaaggctgatataggtaaaggaaatggagatatctagagaaccaccccatggtggcaattcaagcattaggtgaagatttgaaaccttagatcatctctaatctttagattctgggatcaggtaaaacaatttctaggagggcttagaatttttattatttaggtttatgtatctggggccttgggtacagtctgctgaaaagtgcctattcatttcttctaataggttgggtggtggcagcagcagttgctgctactgctaataataataaaaactattatttatgtatagttaattgcatgcctggcttggtactgtacttagtgctttacacacataatctcatttaatctttgcaataactttgtgaggaagatactattttaaagtccctttccatagataaactgagaactacagaagtattaataacttgctcacgtctccacaataagtagtagagcttgaattcaaatccaggaaagcctgatccctcaggcctgcttccttaatctatataatactgtccactcctagttcgtgtcttttagtcctagttctgttgtgtgatttgtggtcttaatttccctctcctggtcttagttttctcatctattttacaacttgagattactaccttttcttccccttttgcccaggctgaagtacagtagcatcatcacagctcactgcaacctccacttcctggtctcaagtaaggagattgctacgaattctagcatttcatacttagtctctgcttgaaggagctacagcagctcattttctgggcaagacaagttgtaaattcatttacccatcagtttttagcctgtatgtctggcattctcaatcaaaactcttcaaaactgaccagcccttttattaatctttatatgcctttatatgccatgaaaggaaaggttgttcatgctttcaaaatgtagtttgtaaactgaatgcgttattaatactagtactagttattgttaatgctgtttctggttattatttatttagcatccttttattgtacacctaagggtatcaggctaagtactttatatgcattttccatagtcattacagtactctttttataaactaagaaaacaggtttagacaggttaaataaattgcctgcttccccacaacttgtgacagtgctaagatatgatctcagtcctatataactttaaggttcattcttttgttttgtttgctttttctactaccttggttactcatttcatggaatggggaaaacccagtggtgctagaagaggcgagattaatatggaatataattatgtaatttttctgagtcttagggcagccagagtagacacagcttaagggacagattctcatcgggagctgaagagatgtgctagtacagtatggtatgggatgtacagtattaatcattaggtcaagggatgtgggaagatggtaggctgatgttagatgaggtgggaggtcaagaattaatggcacaaagtgcacaacaggaaacagacattcaagggatcatgaagggagccaagatgatacatagcatgttggatactcattctgattggttgtacagttgatagctggcagaaaatgggcagcttacttaaagatttggaatgataagacaattccttttatttgtgtagtcttttggggaaactgaagtcaaattgaccttctatctgagtcattctcagtattacagtaatgaccagatgtgcccttctggaggagacgggctctatctgcctgtctcttagctccatttcaggctaagatccttcacaaagcagtgttttcaagtcatggaagtgggaaaagtggttctggctttttccaggtttgagactatttccgtgcctcatgctttagtgaggggaacacaggttttcctggcaaagcatggcagctttggggcaggaattcttgacatcctcagagagcttggtgaagctgtagtcagctgagataatttggggatgtgggcatagtaaattcatttttttaaacctgatgtcttagacagagaggtaggaagcttttcaattgaaggagggatatgatattccagaaagcttgggaaataatttgctgctatttttacaagttggcagccttgtttaataaactgatctgcactgccagctctgggaagaacacagatgtccctgtgcattgtaaggtaacgttctagattcaaactccaaatgtcctcagtctgttgtcccagatgatagaagagagaactgtagctattgatttagaattgagaagggttgcatggatcctgagttgtaatttctcttttttttttttttttttttgagatggagtctcgctctgtcacccagtctggagtgcagtggcgcgtctcggctcactgcaagctccgcctcccaggttcatgccattgtcctgcctcagcctcccgagtagctgggactacaggcgcctgccaccacgcccagctaatttttttttttttttttgtatttttagtagagacggagtttcaccgtcttagccaggatggtctcgatctcctgacctcatgattcgcccacctcagcctcccaaagtgctgggattacaggcatgagccaccacgcctggccctgagttgtaatttctatcagtatgtctatgctattgcccctagacacttggcatttaagaatttaccattcatagtttcagatatccacatcagacctcatacgctcatgatatatggtaaatattattttgctgaggtatggatttgagtcataatgggttgcaagcttgctgtgtgagagtaggtcactcagctaataaatcaatctatcccactctatagcagcagaatctcataactatattagtgttccttctgtgttatggagaaaatgcgtatgctataaggcagcattccccagagcgtggtcaagggaacattagttaatcattgttatgtgacagtaaaaaatagcttgaaataatgttgggttaaataaagtaaaaatatctgtacttcaaggttccactatgtttgagctgtgtgaccttgagcaagtttttctgagcattcgtttcctcatctgtaaaataggataataaaaatattaccacttcatagtgtcatcatgaagattaaaagagattaagcatataaagtatctgtcatagtaactagcatataataggcactagatgcatagtttcccttgcagtacaaaggaagtgggatatcagggaggaaggattaactttagataattgtgcatgtctgctgctatatatttgtcagattgcattccaaagctaatatggtagaaatttgttgtaatgtatatctctacattaactccccttcttctctatgcctggagaaagagttgatgtcatgtgcaaagtgttcttgagctaaatgcattgtccttaaaatcaaacgaacttgccctccacttcctccttctcctgggtggttgaccatctgcagatcacaagactgcacagatacagctgtaggatttgcgtttatgaaatgctgactttatcatatgcctcaacttgctagacctattcattctgatttggggtatacgttgacagtgacctaaggctacagagcactgagatctctctgggtcaacttcataagtatatgtatatcaagagggttggagtgttcatggtttgtattgggtgacgcagagggtactctaagccagaaataaactgtcttgataaggcactgctattttttaaatcatctaggcttgagtctttggctatctctgctcttcaccactcccccaccataatccactcacctttcaaatcttactgactatacttctggatattgctcaaatgaatctttccatttccaccacctgctccctagttcagactccccattatccccgtcttctctgatgtttccccactccattcctgctttgatcatatcatcttcctgcttcaaaacattcatcacctcaccatgcccttgaaaatgacgctcaaaaatctcattttggctctgaagaccttttataattattcccccaatttacctttccaagtctgttactctattccccatatatactcccacagttttaatctaaggataataaaaaagagaactaaaattcattaaaggcttttttggtgcagagccaaatcttagcattctatacactctatatattatttcattcttacattaactctgtaaagacagtatttttccattttaaaggtggagaaaataaaatgcatagagtttaagtattctctgttttctttctaatacatgaaacttcttgtcctttcctttgccttttatactttgttaaggttgtgccttttgcccacttctttcttccctctccatgtatttatgcatctttccaggccaatataaaatgtcatcttccctttgaaaattctgtatcccttcagattggaatgactcctcaacccccatcaaacttagtttttatttcgtttatagtaccactttctgccttcattattatttacctacatgtcttgtcttttataaagtttgaatatctgaagagcaggatctgtatcctaaagacctcttgtatctagtacagaacaagatacctaaacttagatgggtggataggtgagtaagtaggaggatagatgcgtggaaaatgtgtattttctgatctgatgttttgcagatcacctaaaactaatcatcacaattttctgcttctgtggatgattcctaggcccccaaacatgacacaataaactctgtgacatgattaaaaaaaaaaaaaaaagcctccacacttttgcttacatggttttctttgcttaaagtacctttatcctcattccttcatttctttcaagacatatcttaggagtgaaactgcttttgggaagccttccccaagtctgttaggtagaatccatcattccatccactgtactccagcagaacattatgtggacttgcatgttatacttattccttttactgtgcataattctcctgtgcttttctcttagtgtaaatcagaagttgtaaaattcaccaaatatgaaaataatcattagctcattagcatttattacaagtatactacttccctggtgctatactaagcacatcatatttatcttgttacttagcccttataataaccatataaggcagacaccattattacttctattttacagatgagtgatggggaaagagcttttggaagtttgagttaattccttatggtcatgcagctaagtaagtgtctgagactacagaatctgaattatttcccactatgcagtgttttgtctggtttgtttccctatctgtcaccctcacgtgacatataatagacctcaataaaatagttgttaagtaagggaatgactgaatgactggtcatagctattctctaaatgtttcttgagtgaatttatttatatagtcagaggaaaatgaataatggtttctttttctctttagcaggaatttgaccctctagggcatgaatactgtgctgttcagttctgagctgtgctagcaatacccttcaaaggaagagcaatggctgcagcagcagcttctcacctgaacctggatgccctccgggaagtgctagaatgccccatctgcatggagtccttcacagaagagcagctgcgtcccaagcttctgcactgtggccataccatctgccgccagtgcctggagaagctattggccagtagcatcaatggtgtccgctgtcccttttgcagcaagattacccgcataaccagcttgacccagctgacagacaatctgacagtgctaaagatcattgatacagctgggctcagcgaggctgtggggctgctcatgtgtcggtcctgtgggcggcgtctgccccggcaattctgccggagctgtggtttggtgttatgtgagccctgccgggaggcagaccatcagcctcctggccactgtacactccctgtcaaagaagcagctgaggagcggcgtcgggactttggagagaagttaactcgtctgcgggaacttatgggggagctgcagcggcggaaggcagccttggaaggtgtctccaaggaccttcaggcaaggtataaagcagttctccaggagtatgggcatgaggagcgcagggtccaggatgagctggctcgctctcggaagttcttcacaggctctttggctgaagttgagaagtccaatagtcaagtggtagaggagcagagttacctgcttaacattgcagaggtgcaggctgtgtctcgctgtgactacttcctggccaagatcaagcaggcagatgtagcactactggaggagacagctgatgaggaggagccagagctcactgccagcttgcctcgggagctcaccctgcaagatgtggagctccttaaggtaggtcatgttggccccctccaaattggacaagctgttaagaagccccggacagttaacgtggaagattcctgggccatggaggccacagcgtctgctgcctctacctctgttacttttagagagatggacatgagcccggaggaagtggttgccagccctagggcctcacctgctaaacagcggggtcctgaggcagcctccaatatccagcagtgcctctttctcaagaagatgggggccaaaggcagcactccaggaatgttcaatcttccagtcagtctctacgtgaccagtcaaggtgaagtactagtcgctgaccgtggtaactatcgtatacaagtctttacccgcaaaggctttttgaaggaaatccgccgcagccccagtggcattgatagctttgtgctaagcttccttggggcagatctacccaacctcactcctctctcagtggcaatgaactgccaggggctgattggtgtgactgacagctatgataactccctcaaggtatataccttggatggccactgcgtggcctgtcacaggagccagctgagcaaaccatggggtatcacagccttgccatctggccagtttgtagtaaccgatgtggaaggtggaaagctttggtgtttcacagttgatcgaggatcaggggtggtcaaatacagctgcctatgtagtgctgtgcggcccaaatttgtcacctgtgatgctgagggcaccgtctacttcacccagggcttaggcctcaatctggagaatcggcagaatgagcaccacctggagggtggcttttccattggctctgtaggccctgatgggcagctgggtcgccagattagccacttcttctcggagaatgaggatttccgctgcattgctggcatgtgtgtggatgctcgtggtgatctcatcgtggctgacagtagtcgcaaggaaattctccattttcctaagggtgggggctatagtgtccttattcgagagggacttacctgtccggtgggcatagccctaactcctaaggggcagctgctggtcttggactgttgggatcattgcatcaagatctacagctaccatctgagaagatattccaccccataggggatgagaaattatcagtttcttctgctcccaagccaacttcccttcccttagttcttggttgttagtggcacatgcagaatagactcagcctatgtcctgattccagctgggtagttctagaacttcagaagctccatcttttaatgtttttatttgttatgtccccctccccgcttcccacctaaatttagagctttaaaagatgcactgcccaaataggacacacgatggtgttagctgaagtttgattagcaattaggcacttccaaggctttagtagagagagccactttagccctttgtgccatgtttgaaatttgcccttgtattaaatccttgattttttcccatttggctttgatgcccttgatccattgtttccttcctactataatgtgcttcatctgtgacactttctcttgaactctgattggattcactgtgcatgcttcagtgggatctgctccacctttcagtgacatttaagacatcatattcccgtaacattatgtctcagtctgatcgtctttaccagtatgaaagtcattcatttagtgctaccaaaggggatacacaagccctttaggaagcagtacctctcgcctggaggatctgtgccatcttggattgagaattgcagatgtgacagaatggattgaccctagttggttggtattgatgacttcagcctggaaattgcttgccttttaaagaagcatatatgggttggaattatgccaaagcataggaagctgggaataagcaaacaaatgctgatatagtcagcaaatttggatagtctctagggctcatcatttttcatactacctctctcttctggcctgtgtctaaggaattgtacaacataggccagggccaacaaagtggagaggtggacacattttcatgttcattactaaaacaaacagcaaaactattggtttgttattctgtgttttcctcaagtcagtacatactatttggtttcaggatttctttccatttctctatcaagcattaaataattgagaactgtttcttcatctctggtgttcatgtcttttaattaaatacggaattttggagatgataagagggataacctgcgctatgccattttgcttccttatctcactgtgttctttcagagtgtagatatctacccaggtcaaaattcagccaaaagcactattatgtaaagataataatccaaatctttctcccaaatacatgtgtacagaatcatcccccaaggtttagagtcaccaataccctattctgagcttctgctgtatgttttatgtttataattacagttcacaaaaaggaagttagtcttgtttttaagatcagaagtgggtgagaggacctgtgatgaggttcctgagggtttggtgtttactaagtaatatatcttactctaggtgcagggctgatggcaagccaaagagcaactgccttactttgatgtaaacaaaatttgctaaactgagctgctcaaaattgtttttatggtagtagtgtttctttggattgtatcataatagctgccaaaggataggtaaagaggtcattaaaatgatgttgaactagtttgtcttgttcttttcatctggagaaagccccatattctgattatgaaattgcatccgattttcaaagattgggtaattgagaggaaattgatccaattgaaagtgcatcacaaatgactccactagttattagagccactttatctgtgggggcacccagcagcaggagatctgtctttgctgtcagtgggggacttgctgaggcaataacagtggctcaggcctttggcacacagtttgcagtggagagagaaatataatattgtgggcaggctgaaggtaaatgaggccaggaatcctccagctgtctgtgcttttgaaagaggtgccatcactgagtgacattcagcatttagatctctacccatctaaaccagtcatgccttttccctcaagtaaagcagttatctgttggctcaaaatggaagtgtgatctgagtctttttcctttttcccctttgatgtgaatattttaggctgtgcttagtacagtcgatgtttaattatctgctgtgttgactaaattgcagactagggccccaagaaactaatttgttcaattacagcagttttttgggttttttttttttttttgctttgttttttaaagcagcagtacccttgtccaaataaagtcttatatggaagtctatcatgtaaaatagatcaaagagcagctgctctggttgaagcaggtttgtgccgctgaagaatatgctgtttcctccctttaccttacctcctgtgctaccattgcaaaacttgtgaatctacagaatacttttctgaaaaccactgaactacagcattgcttaccttatagttctgtcttattagtcatgtggccttgggcaagtcatttaactcttcctcttctggaaaataacaaaaatgatccctgcctcctagaagggtatgagataacatgtgaaaataacctggtttcattcctggaatattccataaatgatggctgttactcttttatctagttgctcaaaagagcacctgatggtgggaagtggtccaaccatgctaaacagttcctttcttcttgcttaacaggtttctatttggtgattaaaacctttctcaggcatttctttcccctcacaagtctccaaatatatcaagttcatctcttcctttctactgtctatttcacattcctattatataaatcactgtgttgcaattatctgtccatatatttgagctttattgagggctaactaatctagctaccagcatgtaacatggtgcctagtatagaatatgttatcagttatttaattggttcaggtatttacctgacttaatgggactccagtaacccgagtcttcctagtgtagcccccttagattagataaaaaaggatactcagacaagcccttttataaggtgtttaaaagctagtggcaaacaattgacttagaggttggttaagcccctcctccctttatcattctgagtggttacatagaatttaagattttggagcaatgattcattcaatatttattaactacctactgtgggccagtgtacactccggacttgagtctgtagaggggcactcttattccaatcagtagaataaacgtggcgtgagctttacagtgttcctctgggtaaggcaagtaatgcttaagtagttgtacttttaatctagtgctaattaatggcctcttaaaagtgcagtgttgggtcaaatggtatttctagttctagatccctgaggaatcgccacactgacttccacaatggttgaactagtttacagtcccaccaacagtgtaaaagtgttcctatttctccacatcctctccagcacctgttgtttcctgactttttaatgattgccattctaactggtgtgagatggtatctcatagtggttttgattcgcatttctctgatggccagtgatgatgagcattttttcatgtattttttggctgcataaatgtcttcttttgagaagtgtctgttcatgtccttcgcccactttttgatggggttgtttgtttttttcttgtaaatttgtttgagttcattgcagattctggatattagccctttgtcagatgagtaggttgcgaaaattttctcccatgttgtagggacatggatgaaattggaaaccatcattctcagtaaactatcgcaagaacaaaaaaccaaacaccgcatattctcactcataggtgggaattgaacaatgagatcacatggtcacaggaaggggaatatcacactctggggactgtggtggggtggggggagtggggaggggtagcattgggagatatacctaatgctagatgacgagttagtgggtgcagcgcaccagcatggcacatgtatacgtatgtaactaacctgcacaatgtgcacatgtaccctaaaacttaaagtataataataaaaaaaaaaaaag

SEQ ID NO: 9553 - DNA, 782 bp, Homo sapiens
tggggaatcactgattgacattgtctcagaaatacattttctgtcctttaaaaattctgaaataatatcaaatttttctcccctcagaagcctacgccaaataagtgctgtaatcttagtacaactttgtagtacagtcagactcatttgttgatgtctgactggctgagtttttaaaacctattattcccccttccgccccatatctggacatgccagtaagaaagctcaaatgcttccacctttgtgcctggtggaagttcaaaccacctaagaatcctcactgcagccctacctccaagccactaggaaaagccaggctcctctactttccctgctcaagccatttctggacctgcttgagaactcgctgctctctgtaaaagcctcgtgtgagtgataaaccttttcatatctatttggtcctaatgtaacatcagtcctaacacctaaaccaagttttgggtaaggggttcaacctctcctctgtgggatgactaaacactttatgcaacaagcagagggtctaggagatgaccactaccactgcagggctctcctcttgctttagtttgctaactgactcttgctggctagaatttttttttttttttttttttttttgtcactgctggcaagctcatgctttgtgctgtgctgctttgtactgcgttcactgagccttaccaagcttctgttatagatgtgctcagctaagttggaatttttgataattggcatttaagaacaagaataaagtggcatttaagaacaagattaaa

SEQ ID NO: 9554 - DNA, 7499 bp, Homo sapiens
tttggctgcaagggtgtctggtgtttaatctcaggttgctgccgcccgaagagcggtggccaggaaggggaagggttccagtccagctcgctcccgtttctagatgctcctgccgccgccgcagcctcatccaccaagattctccactctctgcccacagatttgctgggctgccggcctcagggttcacagtgagggctgtaggggcaactagggcgggtctcgggaggcaaggtaggcagccagggtcaccagggcagccgcatacgtgcacacgcccagcccgacggcgaggacccccagcaggaaggcacggcgggaggcggcccctgccccctggatgtcccccttggcccaagccttgttggtctgtagaggcagtgggcagcagtgacccaggcatcccctcagtcccagacccttcccctggtccctcccccacccaacatacccattcattcattcatgcatgtattccaaaagcagatacgtagcacctactataggtcaggcactggggatgctgagtggttaataaaaacattaaaatggtaaaaaataataataataataaattttaaaaaataaataaaaacattaaaatggtatatgccactattctaactcatttgattctcacattgacccagaggtagcaattattcccactttacagatgaggaaagtgaggcacagggaagttaagtgacttgcccaaaatcttgcagagagctgggcaccgtggctcacgcctgtaatcccagcactttgggaggccaagatgggaggatcacttgaggtcaggagttcgagaccagcgtggccaacgtggtgaaaccccgtctttattaaaaattcaaaaattagccaggcatggtagcgcgcgcctctaatcccagctactcaggaggctggggcaggagaatcacttgaacccaagaggcagagattgcagtgagccgagattgtaccactgcactccagcctgggcgacaaagtgagactcaaaaaaaatcttgcagagagtggcagactcaggatttgagttcaggttctctgggctaccttccaccttcccgcctcaggtatatggctctttgtttttgtggtgcatttttctcttttatgcccagtcccctccaagtcccacacacagactgaccttctgggctagacagaaggcagcgatgccaacgggccagaaacaacacagcatggagaagacagccaagccgaggtggtcgtggggtagaaatggtgaaagacggctgcctccatcccagtccgagtcactgtcactggatgacatgtcctacggacaggaaagtgcccaggtgggcatctccatccacctttcctgccccattgctctgctctccatagccctcaaaggccaatacctgcccctagggcttccccagagatacaaagagaaaaaagtgttcagagatgggctttcggtgtttgtttgagacggagttttgctctgtcacccaggctggggtacaatggcacagtctcggctcactgcctcccgggttcaaatgattctcctgcctcagcttcccgagtagctgggattacaggcacacgccatcacacctggctaattttgtatttttagtagagatggggtttcaccatgttggccaggatggtcttgaactcctgacctcaggtgatccacccgtcttggcctcccaaagtgccaggattacaggcatgagccaccacacctggccagagatgggcttttgacatttgtatcctggagccctttgaagggaagttgtggatcaggtctccagagaagagccccacccacacccagagttttcagttcattttcaaggggttgacggatccaatcatggacgctacaattgcttacaatctctgagtgaaaagcccccgcatggccgggcgtggtagcttgcacctgtaatcccagcactttgggagaccgaggtgggtggatcacctgaggtcgagagttgggagaccagcctggccaacatggtgaaacctcatctccactaaaaatacaaaaattagccaggcgtggtggtatgcccctgtaatcccagctacttaggaggttgaggcaggagaatcacttgaacccaggatgtggaggttgcagtgagctgagatcgagccacagcactccagcctgggcaatagagtgagactccatctcaaaaaaagaaaagcccctgagcagggacaaacaccactgaaacaaggaacctgcaaaaagatggagattattggccgggcacagtggctcacacctgtcatcccaacacttagggaggccaaggcgggaggatcatttgaagccaggagtttgagaccagcctgggcaatacagcaagaccccatctctacaaaaaaaaatttaaaattagctaggcatgggccaggctcagtggctcacgcctgtaagcccagcactttgggaggccaaggcaggcggatcatgaggtcaggagatcgagaccgtcctggctaacacagtgaaacctcgtctctactaaaaatacaaaaacaaaattagccgggtgtggtggcacacacctgtagtcccagctactctggaggctgaggcagaagaatggcatgaacccgggaggcagagcttgcagtgagccgagattgcgctactgccctccagcctgggcgacagagtgagactccatctcaaaaaaaaaaaaaaaaaaaattagctaggcatggtgtcttgtgcctgtagtctcagctactttgggaggctgaggcaggaggatggcttgagcccagcagtttgagactccagtgagctatgatcacatgtctgccccccagcctgagcaacggagcaagaagaccctgtcactaataaataaataaataaaagatggagattataaaatgctccagtggcctaaatgattagggcaaacctgcctgctgaaaactctagagtttagatttttaagctttttttttttttttttttttttttgagacagagtcttgcccaggctggagggcagtggctcaatctcagctcactgcaacctccatctcccaagttcaagcaattctcctgcctcagcctcccaaaagcggggattacaggcacccaccaccacggccagctaatttttttttttttttttttttttgagacagagtttcactctgttgcccaggctggagtgcaatggcgtgatctcggctcactgcaacctccgcctcccaggtttaagtgattctcctgcctcagcctcccgaatagctgggattacaggtgtgcaccactacacctggctaatttttgtattttttctttagtagaaactgggtttcaccatgttggccaggctggtctcgaactcctgacctcgtgatccgcccgtctcagcctcccaaagtgctgggattacaggcgtgagccaccgcgcctggcctaatttttgtatttttagtagagacgggctttccctacattggtcaggctggtcttgaactcctgacctcaagcaattaacttgtcttggcctcccaaagtgctgggattacaggcatgagccacagcgcccggccccacatgcttttcttaccatgtgactttgatatccttcccatcaagggatgagttctgtgtcccctccccttgaatttgagcaggctcatgactcacttgtaattaatagaatgtggtggaagtcatgttacgtgacttccaaagcgaaatcagaaaaggtgaggcagcttctgctttgctgcaatattcatgctgtaggctggaggtacataagctgcctgactgccctgaagccgttatgctgtaaggaatcccaaggcagcaaacatggagagaccacatagaagccctaagactcggctgggcacggtggctcacgcctgtaatctggcactctgggaggctgaggtgggtggatcacctgaggtcaggagtttgagaccaacctgaccaacatagtgaaaccctgtctctactaaaaatacaaaattagctgggcatggtgacacatgcctgtaaatccagctactcaggaggctgaggcaggggaatttgcttgaacccaggaggcggaggttgcagtgagctgagattgcaccattgtactccagcctgggcaacaagggtgaaactccatctcaaaaaaaaaaaaaaaaaaaaaaaggaagccctaagacaccatgaagagagagaaaagtgcccagccagcccctgactgttctagttccacccaccagctgaatgcaacctcaagaaagatccagaggcagaaccatgcaactaagtcccaaattcctgaccaacagaaaccgtaagagttcatcatgattgttgcctgcctgccttcctttctttctgctttctccttccttccttccctccttcctttccttgtttccttcattccttctttcttccttccttctttctctctttctctctctcttttctttctttccttcctccctccctccctctctctttctctctctctctctctcccccctctccctctctttttctttctttctgtctgtcttgctctgttgtccaggctggagtaaggtggtatgatcacagctcattgcagcctgggctcaagcgatcctcccacctcagcctcccaagtagctggtactacaggaacacgccatcacacctggctaatttttttttttttttttaagatggggtctttctaattttcggaggacaaaatgaaaaattaaataaaaataaagatggagtctcactaagttgcccaggctagcctagaactcctgggcgaggcagtcctcctgcctcgccttctcaaagtgctgggattaccagtgtgagccactgtgcctggcctggaatgagaaattataaaaagtgacaacagtaacttaaaaaaaaaaaaaaaaaaaaaaaaggaaggctgggcatggtggctcacacctttaatcctagcactttgggaggccaagacaggcagattgcttgagctcaggagtttgagaccagcctgggcaacatgacaaaacctcttctctacaaaaaacaccaaaaaattagccaggcatggtggcacatgcctgtggtcccagctactcaggaggctgaggtgggaggattgcttaagcccgggaggtcaaggttgcagtaaactatgatcgctccactgcactccagcctgggcaacagagcgagaccctgtctctctctctctctctctctctctctctcacacacacacacaaagagggagacagcagggtggacaaaagccagaggtgcatgcactctgaagacaccaaccagcggagtctgagatcagagggaagacagagccaaaagccaggcaacaaagatgagagacataaaacaagaagaaccgtaactggaaatctcagaagcccacacacagctgggaagtgagactccaggcctaaggcagatcggcacagctgtcaacctgccagatgctggccttagtggggctcaccccagccccctcccgtgccttccactaaggcctgctgtttcctacctcaacatcagggggccttggttcccccaggccagcgctcacggagggaagaggcggtgacaggaactgcaaacccctcagggactcggcaaaggctatctctcttaagggggaccccagctcatgcctgccaggcttctgggcaggggtctcacattctgtgccctccagcagaggctgttgaagctcacgaagactagggctgtccatggctttggggaaactccaggaggggtttcctaggggtagggggaagaaaaagacaagttgtaaaagtctcacttcactcaacctctgaccccttgctttagagagactcaggcagagactagttagtgcagtggtcctcagacccattttacagatacagaagctgaggcccagagagaaaaaaagattggcctcaggttatgaagagaactcaggggtctggacattcaattttgggcatttctctctctctctcttttttttttttttttttgagacaaagtctccatctgttgcccaggcagatccaccactgcagatccgctagagtgcagtggcatgatctcagcacactgcagcctccacctcccgggttcaaaccattctgcctcagcctcccgagtagctgggattacaggcgcccaccaccatgcccggctaatttttttttttgtatttttagtaaagatagggtttcactgtgttaaccaggctggtcccgaactcctgaccttaggggatccaccagccttggcctcccaaagtgctgggattacaggcgtgagccaccgcacccagccaaattctgggcatttctctcaggcaaaagccacatacccatcacacttaccccaataagttgcagcacctgttgcaccatgccttacacacttacctgccccacaaacacccccaatatccatcccaggttcataccgcgtgaccacctatccaggcccaggcacccctcccagtcacacacacacccatcccctacccccagtgctgcctggaactgcactctagtctacattccccatcctctgtcccctagacctgccccccgaagtcccctgccacacagccccatctaggcaagcccagcctccacctccacacattcatctcccaaaggactccttgaatatttgccccaaaacatcagctcccagaaaacacccctttcaggtccccaaccttcttacacatttatcccaattgactccgtgcacaaccctactccccactgcatcacaaaccacagacacctgtgcacacacgcacacatgcaccccggcactctctcctattctcatgacctctggcatgcctgccccactcatcaggcccaggcacccctgccctactccacccacacacctatgactccacacaactcccacacatgcaccagctctccagaatcctttgcacacctcgcccccataaacaccctcaaccccagcacacacatacacgtacacacgcaacacaaccagaaagaatattcttcttctcgtcctacgatccccctggaaggtccccaagcctcctgcctgctcattccaaaccttgactgagccgatttcctcgccaaagctttgccctctcatccccaactccaggacccagggaagggactgtgacccccacccacctacgtccctcactcaccgctcacgatcacaggccggggcttcctgaaccctcgcaatgacacttgcccggaccctgccaccgaggatccaaggggcgctgggaccttgcgctttgctctacgcgggtctcagcgccccgggcccgctgcgcgcgggggcggggacggggcggggcgacggcttcccaggctctgtccctccgcggcgtccggcgagggatccctgaaagccgacgtcagcgtccaggaacgggttcctacgactcccgggggtctgggagcaggcg

SEQ ID NO: 9555 - DNA, 133 bp, Homo sapiens
ccagctactcaggaggctgaggcaggagaatctcttgaacctggaaggcagaggctgcagtgagttgagattgcaccattgcactccagcctggcaacagagcgagactccatctcaaaaaaaaaaaaaaaaa

SEQ ID NO: 9556 - DNA, 31304 bp, Homo sapiens
tgggagactgacatttaaatggtttatctgcatgattaaattaatcacatttccaacagtgcatcaagcatctgagaataacattattttgagtaaaaacagaaactcttcgggagagaccccctccccacaggtcaggctgctcaaatgtccaccatgtctagcagcgcagagagatggagctcagaggcaacttcctcttcccttgaactccggatcagcctttccaggtgctttagtcgttcgcctagacacgttcctgtcgcctctgacagctgcagttgctccctcatcatgtcactctatttgaataaaaaagaaactgaacagttttgggatgtcaataaaccacgacctatctctgggaaggtactagatctggatcatgttagaaacctcatctgagtagtcatttatttttacagagggaaaaaaattatcctttgtatatccttccagcctcatttagctcgtacattcagctggtatctgtatatagactgtttgcctttgtattctatcatgaacaatttccagtgtcagtcatttttcacccaggctggaacgcagtggtatgatcggagcttactgcagcctcaaactcctgggctcaagtgatcctaccagctcagcctcctgagtagctgggacaacaggcatgtagcaccatgcctggctaattatgtactgtagagatgagatctctttatgttgcccaggctggactcaagctcctggacttaagcgatcctccctcatcagcctcccaaagtgctgggattacaggcatgagccaccacgcccagccagtcatttttagaaaatatcatcgtcaagggctgtgaattattctatcacatgaatgtgttataattgtttaatcagactcccatcttcggatatttattctgtttcgactttcatacaataatgctacagtaaacatttttatacattaatttttggggaatatctggtaggtcagaattctttaggttagaattggtaattcaaagggtatgaatatttttaaagtatttgccaaactgatgaatggaaacagtacatcattttaatttgcttttctcctctattgaaggacttcctaaagccagtccaggagcacagtttttacctgttcagtggcacatatctgtgattgaaactctgtttttgcatctttaaccactgaaggaagaatggtaaggtaaaaagaccttaggctttggagccagttggatctggctttgaaaagcaacctgaccactcactacttgaacactcttgggtgaggctcttgacttctgggagcttaccttcctcattcattagttttcctcaggaaaaattaatcccagaagagaggtctgggtaatgccaaagctcagacaatatgtgctccaacagaagctgctgtcatcaccttaatgcccttaattacacatcagcacacagttacaggtcttattcagttcttaagaatatttcaattctattcttcatttatttcgtaggcagaaactcaaaatcagttgggtctctttaacaatgatatggataaagtttaagaaaaggtctaatttgagctaataatttgtcggtcatcaaaacatcataggataaatcgtgatattacttttttccccagccattctctcaatctttaattcttatgtaaatgccaaatgtatacgttcttctcacctgtgggctagtagttacagatgttttcatcacaggttcaatagtgtgagaaagagacactagagtctgaggaagatagaggggaagggaagttaaatccgtaaatgctcctgagtcttcagacaaccattgctgaagctgatcttcaaacctgaaacaatatgtaataaattcaaaaatatttgagcattaggaagttaactattgttcattaatcttctatatatacttaaaaactttttaagcctttgcttttttaaaattttatataatttttttttttttttttttgagacagagtctcactctgttgcccaggctggagtgcagtggcataatctcgggtcagtgcaacctctgcctcccaggttcaagtgattctcctgcgtcagcctcctgagtagctgggattataggcaagtgccactgtgcccagctaattttttgtacttttagtagagatggggtttcaccatattgcccaagctggtcttgaactcctgacctcaggtgatccacccacctcggcctcccaaagtgctgggattacaggagtgagccactgtgcttggccaattttattattatttttttttgacaaggtctcgctctgttggccaggccggagtgcagtgttacaatcttggctcactgcaaccttgacctcccaagctcaaatgatctcacctcagcctcccaaatacctgggactagaggcgcatgccacccagctaatttttgtatttttttgtagaaacgggattttgctgtattgtcaggctagtctacaactcctgaactcaagtgatgtgcacacctcagcctcccaaagtgctgggattataggcatgagtcaccacacccagccttaagcctttgctttttactaagaatataactaagttatgacatcaactgagaagcagaaatgtacttattaaaaatttaacaacttcctatgataaagcttaatttaaaaaaaaaaactaggctgggctcggtggctcatgcctgtaatcccaacactttgggaggccgaggcgggcagatcacctgaggtcaggagttcaagatcagcctgatcaacatggtgaaaccccgtctctactaaaaatacaaaaattagccaggcatggtgacacgtgcctgtaatcccagctacttgggaggctgaggcaggagaactgcctgaacccgggaggcggaggttgcagtgagccagatcacgccattgcactccagccagggcaacaagagcaaaactccatctcaaaaaaaaaaaaaaaaaaattagagaaaccacttccctttaatttataaatccaattccaatttatatttaatgaaaaaggtggtattaatccaaaaacaactgcttcgatgtgttacttaacattacttgtaattgtcttgtttggcttatcttatttaatttactttggttttatgcatctataattaattcttctgacattttccaaatgagtggattgctgcttatagcttaaaattaactcaaaataatatcccactgccacctaacatactctagagctgtctacttccatataccggtcttttcaagaaaaacaatcttggccaggtgcagtggctcatgcctgtaatcccagcactttgggaggccaaggcaggtggatcacctgaggtcaggagttcaagaccagcctggccaacatggtgaaactgcgtctctactaaaaatacaaaaatcagccaggcatggtgatgggtacctgtagtcccagctacttgggaggctggggcaggagaactgcttgaacctgggaggtggaggttgcagtgagtcgagattgtgccactgcactctagcctgggcaacagagcgagactctatctaataaaaaggaaaaaaaaatctcatcccaaaccacttaaattatagagactgattttagtaatcggacacattcattcacccttccaaaacatattcattaagcctcctccagatgctaggcatcattctaggtacaaggaatattgcactgaaacaaaacagaggccctgccctaagcaatttatactttagtgaggagagacagacaaggaacacataacaagagaaacatggtttgaagatgagaaagacaaagcagagccatggaaacaagaaggtcggagatgggcaagcagggcctaacagaagcagacatttgagtagagatctgaagtgagtacaagatcagccatggggatgctggggagaatggaggggctggacagtcctaggcaaaaggaacagcaaactcagaggcccaactgtgaactgcctaccatgctcaaggaaggagcggaggtcagagaggaaatggggggcagatcactcagggccctggccacccctgcaaagtttgcctttgattgcaggtgaaagagggaaaccactgagaggctgtaagcaagcaagtgacacgacctccatcttaactcacttgaaaggcacccaccaggtctaccaagactaaactgcagcctactgtaataatccagaaggaagatgatagtggcttgagccacgtggtggccatggaagtcataacaagtggtccaattctgaatgtattttcaatagagccaataggatatgtgaatgggctgatgtgaggggatgattccaaggcacctgatctaggcagctggaaggatggagccgccatcaacagagatgaccaccaaaggaaggggttggttggaagaaagccgggaactggatttgggatatgttaactttgcagtggctaccagacatccaataggtgtctaatgaagatttcaaggaagcagtagcatgttcaagtgtggagttcagaggtttgagatacaaatttggagctgtcagaatagtgatgttacttaaaaatccatgaaactggatgaaatttctgaggagtaggtacagacgatgcagaggagaggttgagagaatgaatccagggggcagctgggggatgaggaggaaccagcagggcaggagggggaccacggacatcctaggagcaaggaggggaggatcaagtatgggatgctaccaaggactgggattcacggtcatgttcaaccctgggccttcatccccatgggaaagaaggctgaagaagtgagtatcacaagcgtttttgaggagttttaccattaagagggcagaaacatgaagtggtggctaaagagggaagtgggaccaagacagggaggcatgtttcatgtctgtgtgctgctgatgggcaccacctaatatggggaggggtggtagcacgagagagatactcattgaatgaatgtccttgggtaggtgggagatgagatcccagcccagggaagggctgactgactacgagctgcatggttcgtttccagcaacaagaggcgtcaggaaggggatatagggaggatgctggatgtggctgggagggcagggaaggcagaggacaacctgtggaaggtcccttattcctgattctactcagtaaaatggtaaacatggccatcaaatgaaagcaaaggaaaggtatgcatgggagggagggaagtgggcaatgtagaggaggggcagccccagctcctgtccattcacagcatgggatgatccaccaatgcctcaggctcccaagggcagggtgcctgtggccagccatagtgttcagcactcaccatcttctgagcagacttaaccacatgaatttcccagaaaaacttaacactgactttcaataataaataataaatgaaattcacttcaatataaacagttagaaacatactatctagggcactgcttctgtcttcaaagagcttttaaatagttacatcactaaaactgttgctaataatccacctgcccttctccatcctggctgtcttatattaatcaagcaataaccagtctcccctcacagcataaagcagactaaacacacatgaattagaaggaagtgggcttcacctcttgttctcttctttctccagcagcagactgctcgacaaacactgcgccaagagctcctcagcagaagctcctcgcatcagatcctctgtgctgggaatcctcccctcttgagcacactctgtgctcctcttccagttacggtgcatgtgaagcaatggtatgggaaaattgtttgcagaaggatgaaaaggctttattgccaaactgtaagtacatgatttgaaatgtttatggtcaagagaaaatatttctacagcatcatgtaaagcatgtagatacatttgcacatgtgcattaacatgtaagaacatgtgcctcagacacatgtgccctcctggaacagctcatgctggccccatgcctgcttccaagcttccatcaagtcagggagtggagcaaagagggaaggcagcccctgcactgtagggacccttatgcacagaggcattgagactgcctgttcctcttggaagcttctgctctcaagaggcagctaggtttttggagcttctctgcttcatgtcttgcttcccaccctagggttccagattctgttcttccctagtattggcaaggttttttatagatagctcttggatacatttggaagtaatgtttacaaatggtgagagagaaggcatctgacatttttttctaaacacatgccaatgtttgtcttttccccactaatttcaataatttggcctaacacttttgtcacatattctgactctttattctgatccatttatctactctggcatccccacatggttttaagtactggagctttactgtatgtcttggtatcaggccaagcaaaccatgttagtcttatttaaaactttctcagcaattgatgcatatttgtttatcctgatgaattttagaacttaccagtactgacatcttcacagcattgtatcctgtcaacaacctagtctgaacctcaatggttcaggtttcctttgcacatacaggccctgagaactcatatgttaatgagaaagacattccgggaaaccaggaggtgaggagaccaaggattaggctccactcctattatgaagatgaacagtttttagagtatcatggagttggagaaggtacttcaaggatctctatggggaacaagaaggaacagcaaagttccaccatcctgtgccctttctgttcaggtttattgttgtgaatgagaatttttttttttttaacatgttgtggatctatctatctgatcaccttattgaactgagaatggttctatggacttgacttttcttggactgacaactgtactgtctggaaatgacagtttctccttcctttcagtatttgtgcctgtctatcccacatccctgtactggtcaggatttccaggacaatagtgaataatagtcgggacaacaggctggttctgattccactgttcctaacattctaccaagaagcatgttttttttctattttggtagttttatgttaggtagccttatcaagttaggactttttttttttttaacccaagctaaagaaagtacccaaaataaagaaattttatcaggaacaggtataaattttaagaaacgtatttcaacgcctgctaaaattaccacttatttttctattatggcaacaaattacattaatagattttcactgttattgtttatcctgggagaaagcatacttgtgaacttttttaggtactgtgctttggaaccaaatttggaagtgagatgaaatgtcagctgtactctcctggttaggtatgatttcagggtcaggtatgcctgataaatgaagtgagatgctttaactttgttctagaatagtttctactgcatgggaatgatctgttccttgaggatttgtcacagtctgcccacagtggactggatttggcatgtaggatgttaatttctatttactttgcaagaaaaatacagtttagcaagcaacagaaacatactgaacatgaacctcaccgtccctctctcagctgtagctccttctgcgtctgcaacctggcttgttcccacgacaaaggaacatcatattttttcaaatcgtttttaaaaaaatacacacatatctgaccatcttcactcagcgcctctgagaaaacaatacaaaaacagataaagaggccagcctggccaaccctgtctcaaaaaaaaaaaaaacacacacaaaaaaacaaaaacaggtacaaataatatttaaacagcgacaggtggcatgtgcttaaattcactgatttaagtgcaagacctttgattaaagtcacacaattatgtgacttccacacttgggttaaataggctcccagggtccatgcatcactcaaagtccagacaagcttacatcgagactggcagggccagtaatgactactcaaaagccacaaaatcctctctaagagccatcctagggggcctgtttcagggaggtgagttcaggctctaccagaaacttcctagcctgtctcaatgtttttaagtcactcacttgaagagggaagtcctaaggaaaggaaggatagagacccaaaagaaaagcagcaacatcaactaaacatcttcctttgcagaaactggaccaggaaagtctcgtgaggagctgatcccattgcatcaagctctaattacctgatgtaacaggaagccgggggggcgtccagtctctcagcttgtggttgatacacaaggcgataagatcatcccatgggatctccatgaccgaggggcctgccccatggactggggagggactcttgctcttccacctacagtaggttctgtggagcaggttctccacctgggactggaggacaggctgtgtctggcgtgagctggggatctgggaggcgtactggacaaccatggagcacacggggagccagggggctggggagaaagtgcctcattagttacaggtttggccaaaatacaggtgaaaatgtacatgaaaacattttctcaggagaaggcaactgtgaagttgagaagtctgctttctaaacacagcagaaccacagttgttgagggggaagagcagcttgctcccagggtctaggtgagggatgcagacagtcccccttaacagtgttgctagccaagttctacccagaagttctgactgtacaggcctgtggttgtgcctaggaaatctgtattttaacaagcacccagatgagtctggtataagcagtcttagcttattttggggaaccccaacctaaccagagcaccgagggcttgtgctgagtggtttgcttccctttgggttccttcaataatgagcatgagttagacctactacagaccacacaccacaatttagaagggcgcctgaggcccaaaggggagtgtctgtgctaatgccacaacttctgccagataagcagctcattcccttctgagtgcataggaaggagcagccccatgccatactgggcttgagccagccagatggcctgtcggatctgtgtcaaaacagcccaaagacctcagccaggaacaggggcacagccagagccatagaagaaggcctctttgacaaagaaagaatgttaaatcagcactgagtgccatggctgcggcttggggacagggctacatggtccccatgctctttgccccttgtctgttctgaaaacagggaccctgtgggcaggcaggacaggatcagggttggtgttcctcccagtaccacttgtcacttttctcctgaagctgagtgaactcccatggactgccttgctggtcaggaaaggctaacagcccccactccacaaaacccagcttgttctggctcatgaacccaaaggaccaaaggaaggtgcaggcgagcacagcatggagacacacggaggtggacgtgcagccctcacactggtgcccaacacctgccagacggttactacagtgagaaggaagcctgagacttggctgcagccacccaccagacctccccaggtcaagcacgtaccccccaggggtggaaggtccatctgcggaagctggaacccgagcacagcctgcttcagccaggccaggtgctctggggcattccagtgcaggtgaggaagcagccggctgccccctgcctcagcaaactcagtgacaggccaggacaggtcacacagctgttcagaggacaccacagaagccaggaactgcagcacactgttaaacagctcaatgatggcgccaggctcctgagaagcaagaccgcccagacgcctctctcttctgtcatggaaaaagcggccactaaactcatggccaatcccgtcttcgacgtactgaatgagagtctggcagcagaggtcaagggaatgggggcagtgggaaaccagccactgcactgcttgcaaaacctgagaagaaagaagagacttggttgaacaattcacactgtttttcaaaaacagctttctgaaagggcttgatcccccaaggttgcccacagcaggtaataccagagtactgggctctcaactgtggtaggaaggggaacagaagtgtcctatgcagttgagtttagccttctagggctctggagacatgtccagtaggggcactaaagagagcccccagatcccacctggcctgaggaggagtgtgacctgcatggttgccccatggaaaggcccaggccctcaggaaaccagccctgaacatccccttcaccatgcacagaaatggagtcttctcctttttggaaggactaacagcttcactatgtgccaaggtgccttcacaccctatggttatcttacttcctatagttattttaattcctggcacctctttctctaaattgttagcaaagactccccctgccctattttttttgtttttgagaagggggtcttgctatgttggccaggctggtctcaaactcctgagctcaagcagtcctcctgcttcagcctccgagtagcagagactacaggtgcgaggagccaccacgcccagcttcagacttcctttttaaaggaaacatcaaataacattatttcttcatatattcagaggacaattaccctagaaaaataacttctgtatctgaccttcagatataagacatgttcatattttaaattcatagaaacaaaaacactaaaaaattttacatgaacaatttaatttgcagatagcaggactgtgggcaaattttatcttttattttgatttctgcttatgtttttagaaagttatctgtataaaacatacaactgctgccaggcgcagtggcacaccacagtagtcccatatacttgggagactgaagtgggaagattgcatgagccctgtagtttgaggttgcagggagctatcatcatgccactatactgggtgacaataaaaccctgtctcttaagaaaaagacaatgcaaacgctaatatacactcaattcaagatacagcaaaaggggaaaaaacaaaatatcttgacagaccattaaaaatgatgaaaccttaccttagttgaaccttgtagatcattaatggtatcagggatctcggtaacagtgtaatctgaaatcagcttagctgaaaccaagtcctgtagcatcagacctttaagacagacatagatgaaggtcacttgcattctgctgtcagcacacctgctaacatatctcactgtgctgaccccacccagtcctgcagtggacagtcaccacaggggttgctgtctcagtgattcctgaccccaacactactggaccatcctcagacccagggcctccacccatttattaaacaatgctgcttcataaacgagacttccttcacaaaccatcttctacttccttctcaacggcgtcccctcctgggctaggcacaagaaccaccagaggaagcgcaggctggaagggcttagcctgcaggagctgcttgagctgcagcaaggccgacagccagtacacgtcctcctctgccatgtcctcactcttcattttggggggaagcagcagcatgagcccactggctcccaggaggtccttctgtgtctccacagcatcaatggcaccatcactgagggcgccatgggccacctgcaacagcatcaagatcatcaggagagatgcaccatgggacgcatcagcagtgactgatctgccccagagcaagtgcagccaaagctctccgtgcactaaatactgactgtactccagacaggcctccaagggcacagctgggcataccctgtagttatcttacttcctgtagttattttaattcctggcccctctttccctaaatccaattgttagcaaagactcccctcaacctttttttttttttgagaagggggtcttattatgttgcccaggctggtcttgaattgctgggctcgagcagtcctcctggttcagcctcctgagtagctgagattacaggttcgaggagccaccatgcctagcttcagacttcctttttaaagaaaacgtcaaataacattgtttcttcatatattcagaggacaatcaccctagaaaaataatttctatatctgcccttcagatataaggcatgttcatattttattttatttttatttatttattttttgagatggagtctcactctgtcgcccaggctggattgcagtggcacgatctcagctccctgcaatttctgcctcctggatagtagctgggattacaggtgcccaccaccacacccagctaatttttgtatttttaatggagacagggtttcaccatgttggccaggctggtctcgaactcctgacctcaagtgatcagcctgcctcggcctcccaaagtgctgggattacaggtgtgagccaccgcgcccacccatgttcatattttaaatttatagaaacaaaaatgagaataaatgcaacagaattagtgcaagaaacagccaggtcaacaggtaatttagcctccagctagaattgtgtttgaccatattactataactttaattaaccttaaacaggtataaaaaagttaaagctaggcacagtggctcatgactgtaatcccagcacttggggaggccaaggcaggagaactgtttgaggccaggagccaggaattcaagaccagcctgggcaacatagcaagaccccatctctacaaaaataaacaaaaatataagcccataataatagaaagagggaaggcaagccagcagcagatgagggattctgatacatttctagaaagcagcaaataggtgtgaccaatccctgggttagggaagcagaggatgccatacctaaaggctgcagatgtgggtgtgtaaggagtcaggttgactgagcctgcaaaagccctgtatacccaggcgctgcagacaccaggagccaaaggtgaagttcagagcctgaccctattggcggcacccaccactgcaggcaacctctatgcaaaaccagtccccctgggcccctgaacaggagtcctgagaggatccagatgcagggccatggtcaggcacagtggaagggactcagcgccaaaccactcccaaccctaccctgagaataccagcagctccccagaaagcagatggcacaagtcctttccagaaaaactgaacagtctagggaacagccatccagatccagacatttgggagtccctccaaaaagcctggcttgccatttagctaccatccaccccaccccaaacacagaacttcttggctagccttttagggcctcactcagatatagacagatagccttgggtaaggcatctgaggagggcctccaacataaaagagataaactggagtaacagagaggaaaaaaaaaaaaaagaggaaccagataatacgtgaaccaaagaaaacttagaccccaaaaaccctaatttccttggaaagataagatgatgcatccaaaaaataagatgctatgaaaaagtcatgataaaaagaaagaggaaataagtaatatatatggaataaaaaattcagtaggacaattggaaaataaagtcaaggaactctttcagaacacagtaggaagagatgagattgaaaataggatagaaaataggataagaaactcagaggatcaattgatgaggcctaacatctatctaatagaagttcaagagagaacagaaaaaagacagagtgtcataaagacatgaaaatgtcccagaagtgaaataggagtctctagcctgaaaggacctgctaagccctgcacagtgagtgaagctagtccagtgccagtgtaacaaagtgaatttttaggacgccatgaacagagagaaaaggcttccacagagaaaaccaggccacacagaaaggaacaggaatggtacagcaacaatggatgctaggtgacagtggagcaaaactggaaggcaaataattttctttcttttgagacggggtcttcctctgtcaacaccggagtgcagtggtgcgatcacggctcactgcagcctcgaactcccaggttcaagcaatcttcccacctcagcttcccaagctactagaactacaggcacacaccaccatgcccagctaatttttgtattttttatagagacagggtttcaccgcgttgcccaggctggtctcgaactcctgcactcaaaacaatccgctcacttcggcctcccaaagtgctgggattacaggcataagccactatgcgcggccaggaaaataattttctacctataattttacaaacgtagctaaactatgaagcaaatgtcagaatgaaataaatgcattttctttttctttcccccagcttaaggtattttgttaataaaatcattttcataatggaaaagactcagaaaattcccctcgcatgacatataacatccaacaaggggctgaaccaagaaaaaatactgcagctgctgctaatggcaacactgagcaagcacctggcctgtgccaggcactgtcctgtgcagtctgtgtttgcactcattttatcctcaagagccagatgagcatctccaccagacagcacctgcagaggcttgggcagtttattttaccgtctctgagtaaaatagggataataagtaacagtacccatacacaggtggcagagacgctagggaacttgcccaaggtcacagagcttccaagtggaggagcagggacacatatgctcacaatgatggcactaaggcacatgttgcctggatggagaccagcccacagatgagagttccaggacagagggaacatggatggatcaagtgaagtgacagaacatttggaaaactctaccgagatatatacggccccccagtaaaattaaagagataaagagaactacattaagtgagacaataaggcaactctatttcttgcaggaaaaaaataattgtggttatagaacactactggttctgaggtgaatagcagtcacagagccatcaaaatatgaccccactcactgaagtaatacaaagtgctagtgtagctatcccgggaagacgtggaaggccgagcaaggaccatggcacaagaggccacgctgtacctagtatggtatgcagtggccaagaggacccccctgattccacctagtgttcatgcccacgtgtgatctcctgccccgtgagctgggcctagccactcacttctgacagacagaagccaacaaaagcaacaggatgtcacttctaagtttaggttataaacacactcagacttccatctaggctcacctcttgctcactctgatgaaagccagctgccatgctgtcagctggggagaggcccatgtggcaggaactgaggaagtctttggccacagcctgcaaggaagtgaatcctgacacaagctcactagagtgagctgggaagtagatacccttcagtcaagctttcagatgaggccacaatcctagccaacattttcatttccacccatgagaaaccttgagccagaagacccaagctaagctacacctggattcctgacccacagataccatgataacagacattattttaagctgctatgttaggagtaattagttatttaggaataaggtaactaatacatttatattaatgggaagtcagcagagaacatttaaatggataaactgagaaatggctgtgtaagtgtgtgatctggaaacaggagaaaaatgcagccctgaagaaaggagttaagagaggaaggaggagctactatgtctcattttaaatcacgtgggtggcattatttgacttctttttaagtacacggaagtgttactttcttaaatgaaaatgaaggtaacagcagcagtaaactaatttccagtagatgaaatgtgactttgtaatcccaggaaaagggaagaatttgcaccaagaagttactgttacctcagaatggcaagagcatggatggctcttatcatcatctttatacttcttttacatttcctcattttttaaaagttttgtgtacatattacatttaggaaatccaatatatagtattaaaacagaaaaagtaaagaagcaggctgggcttggtgcccactactcaatttgactggcttaaaaaaattttttaaacgacatgtacggacagacataatacttgcttctgagcctcccagtctttcaaaaccacattagggaataagcagtatttgcatggttccagtgatatctgggagtaagtgaaagtaatgaaaacacagaagtaaacacaaagtaattatagttcacctttatacacacgttaacagaaatcatctgatcccctttgctgctaagtgagttgaaaagcgaaagcgtctgaatcccaccagcatcgctggatgtgtcatccactgagccttcatctcccatgaacttgacttttaaccaatttgctagaattctacagatttaaaaaaaacaaaaaacaaaaaaaacacttgaagaatctaattctatatttgaattataaagactttcaggaaaagaagaaagaaaaatatcacacagacctaggtccacaaataccacatcttactatgaagctgatctgcacaaaacaggctgttgttttaaaatggagcaacgatctgtactcgttcttttttttttttttttttttttgagccagggtctcgctctgtcgcccaagctagagtgcaatggcacaaacttggctcaccgcagcaagcaaacctgcctcagtagctgagactacaggcacgggccaccatgcccagctaatctttccattttttttgtagagtgtcactcaaagggtctcactatgttgctcatgctggcctcaaactcctgggctcaagcaatcctccctccacagcctccccagttgctgggattacaggcatgagccactgctcccggcttctacttgttcttaattgggcaggaggagggggcactccattccattagaatggaactggctcattctaatgtgacttaaaattctgaagcattaagattttcagcaatagaaaacatccctagagtttgaaatacatgttttttacagatcaaatttctcatacctgagaccttaagaattcttaagtgacatacgaacttagcaaatgagaagacagctattttaagaaatgactcaccagctgggcgtagtggctcacgcctgtaatcccagcaccttgggaggccaaggcaggtggatcgcttgagcccagtttgagaccagcctgggcaacatcacaaaaccctgtctctacaaaatatatacaaaactaagctgggcgtggtggtgtgcgcctgtaatcccagctacttgggaggctgaggcaggaaaattgcttgaacctgagaggtggaggttgcagtgaacaaagtgtaccacacgccagcctgggcgacagagtgagactccatctaaaaaaaaaaaaaagaatacaggctttctaagtgaaaaggtgttctggaattattaacagtgatggttgcaaaaccctgtgaatatatctaaaaatcactgaaatgtacactttaaatgggtgaagtttatggtatgtgaataacatttcaataaagctattttaaaaataaactgtaagccgggtgtggtggctcacgcctgtaatcccaaaactttggtagactgaagcatgcagattgcttgagcccaggagttcaagaccagcttgggcaacatagtgaaaccccatctttaaaaaaaaaacattaaccaggcatggtggcacacgcctgtagttccagctactcaggaggctgaggtgagaagatcagttgagcccaggaggtcaaggctgcggtgagctgttatcacaccactgccctctagcctgggtgacaacaaagcaagaccctgtctcaaaaaaacacagagactgtagttgctttaaaaatatgacttctgtatgctatgtggttacagaaaataagatcatgtcaattttttcttttttaaaatgccaaaagtttctttaaggggaaaaaaatggaactatagtaaacagactataaactatcttactgaagagtctaaaatgaagcaggtctatcaatgtaccttaacacagcttgaaataacaatcaactcttaaatgcttttggtctaagactgttgccaagtaatatggtttggatttgtgtccctacccaaatctcatgttgaactgtaatccccaatgttggaggaggggcctggtgggaagtgattgtatcatgggggtggaatccccctggctgttctcatgatagtgagctctcacgagatctggttaagtgtgtgacaactccccctcactgttctcatgatagtgagctctcacgagatctggttaagtgtgtgacaactccccttcgctgttgtcatgatagtgagctctcacgagatgtggttgtgtgacaactccccctcactgttctcatgatagtgagctctcaacaagatctggttaagtgtgtggcaactcaccctcgctgttctcatgatagtgagctctcaggagatctggttaagtgtgtggaaactcccccttgctgttctcatgaaagtgagcctcgcgagacctggttaagtgtgcagcacctcccccttgctgttctcattacagtgagctgtcacgagatctggttgtttagaagtgtgtggcacctcccactttgctgttctcatgatagtgagctctcacgagatctggttaagcatgtggcatctcccccttctctctctcttcctcctgctttggccatgtaagacatgcctccctccccttagccttccaccatgattgtgggtttcctgaggcctccccagccatgcttcctgtacagccgagccaattaaacctctttataaagtacccagtctcagatatttctttaaagcagtgtgagaacggactaatacaccaagtttatggaataaaaattgaaataatcaaatctaaagtttcaacttaaaatcatgagcaaaacagactgtaaatccaagcattaaaacataaacctacacttccgagttcccatcacacataagaggaatacccggccctggcccacaaccctgccctgcccactccacctcttggaaaccccacaggggaaaacccttcctgacctgccacaactctctggggactgctcctctacatccggcaacaccagcaccagcttccaaaacacatgctcctgcctcccagggaggtgctcagccacgagggatggcaggtccagagacgcccatgccacatcactgggaggaacagaccaccgtggattagccagtgtgtgagacccttgcaggagcagcacacacatcctatgagcaggaaggggcaggttggaggaaaatcaggttcagagattgaactgcaaactagaaaccaagtctggagctcatcgaagagacctcagttggagatgcatgaagggggctgccagtgtgacagattggggaacggggatcaccagggggtgcgcagaagggtgcagcatgacagacctcagcagctgctggtagaagtgctgaaccttcatctggtgagctgtcttgtttctgagccgccttaacctgcaaaggaaagcagaatgacagtgtccccgcaggagcttagtgagaagtactggctagtgtcccctggggaatactcaggagactgaaaaacacattttctgccaatgaaacgggttagaggattccttcattccacaaatatcatgttaagtatccactgtgtgctggctatgggagattcagcaataaacagacaaaatcctgccctttgagaacataggctctaatggggagagaacagcatctctaagtggctggcctggcatgtgtgaggtgtcggcactgtgggcaaatgctgccaggtggggctggagccaggcagggtgcgtgttgcagtctcactcagggtggtcaggtgatatgtgagcaaagacctgaaggaaacagggggagccagcgtgacaacttctggaaacagcagagggcatggctatgccaggccatagctggacctggtgtgtttggggagagcagtgagggcagcgagggaggggttgggtccacaatgcagagactcggggagcgctagggacgccgccgagaggcaacgccacctggctgagctgttggaggatccctctgttgtggtgctgaggacacgattggggcccagggtggaagctggcagacaggtgctgcagcaacattccagtgaggtggagagaactgccatgccctcggtgctgggtctgagagagatgcaagcccaggtttgtgccctaagcgcaggaggacaggacggcatcctatgagcaggaaggggcagggtggggaaaaatcaggtttagaggttgaactgccaactggaaaccaagtctggaactcagggaagaggcctcagttggagatgcatgatgggggctgtcagtgacagacaggggtgacagggctatcaccagggggtgcgcagaagggcagagggcagaggtctgggctgagggggcagggtggagggctcagacaaggagactgaggctgacaagggcagctacggaggggggacacaagaagccatgactccaggagaaggccaggtcactatgtgaaggcagccatgggtcagaggagccaggcccagccctggcctcacagcatgcctccaacaggctgggactgccaccccactgccggcgcagaacctgatggggctaaatgaaacccacaagacagttttcagagggaacatccagtgatgaccaggaggaggacaagacatgacatgaggccccagcggtgtgcctgctaggccctccaggctgcctccccagtccccacccactgggaggccagggagccctgaggccaggcaagaggtggcacctacatgggttctaaataaaggccaagcccagcatggccaggaatgcaggctgaggggggtcctggcatggccctgaggagccggttctgctcggggtaaccaggaggagtggcagggaggaccagggccacaccaaggggcctcaagagggaaataatggagggtggaggtggagtctggaagatgctgccacagaaagggggcagtgtgtgaaggagacggcgggaggaacagagggatggggcggggatgggatcggaagacacaggccagcgtggacctccggctcctccaacaaggatggaagtggcaggtacttaaactgggacgagcaggaaaagaacacgtgatgcagagtcagactcaggcaccaggacgctgagtctttcaaggtgaactcagagctctgctttgccagtggaacaagtcacatgtccacaactgtgggagacaaccttcaaaatgcaaccctgtgcctgtcctcgcctccaggcttcacctatcttcgcctccaggcttcacctatcttcaccctccaaacacacacattaattccgctcctggtaaaaccaagtgggggcaggggagccctgacgaggcaggcgacagctgatgctgacctggtgcaggagatgcccaatctccctgcatggcccaggtccaggaggcccctggccaggttctcttcagcaatggggcactctgcgctgggcgccagcgccctcagccggtcgctcacgtccacgcagcagggcgcagcagggaaagcccgcatttggcgcctcagtttcttgcgggctgtgacagcttccctccacctggggacatgaaaatgtatcatcacagagtgttttcagggtcttcaaactgagaaacacattgcagtcagaactcaggcatggggaaggaaggacatcaaatgagtgtggtgagcaatgaaactaccgaacgttaacagttaatactgaatgagctttggaggctgacttggcaatatggatacagatttaagatacatatacccagctgggtgcagtggctcacgcctgtaatcccagcactttgggaggccaaggcgggcggactgcctgagctcaagagttcaagaccagcctgcgcaacacagtgaaacccaatctctactaaaatacaaaaaattagccgggcatggtggtgggcgactgtggtcccagctacttgggaggctgaggcaggagaatcccttgaacccaggaggtggaggttgcagtgagccgagatcacaccactgcactccaggctgtgtgtaccagcaaggctccgtctcaaaaaaaaaaaaaaaaaaaaaaaaagatacatatatcccttgacccacagccaccactgataggaatttatctccacacacgtgcctgtgtgcaaacgggtgagatgtctgtctgtacaacaacagtcactgcaacagtctttaccagagctaaaaagagctacgtccaggctcggtggctcacgcctgtaatcccagcactttgggaggccgaggcgggcggatcacgaggtcaggagttcgagagcagcctggccaatatggtgaaaccccatctctactaaaaataaaaaaaacaaaattagccgagcatggtggcgcacgcctgtagtcccagctactcaggaggctgaggcagaagaatcacttgaacctgggaggtggaggttgcagtgagctgtgattgcgccactgcactccagcctgggcgacagagtgagactccatctcaaaaaaaaaaaaaaaaagagccacatgaaagtccatcaacagaagaccaggaaggtcatttatggtacattatcgcactgacctcaagaccactggcaacggggacagctcagcatgctgctacagccaagcctccacctcatatcagatggagcaaaggaaggctcagagcaaagcagggatcatgagcccatctgtgccaagagccacaagaaaggacagaaagtctctggatggtttcgcaagcagctgctgctcgcacaatggacaggggtctgttgtagaaggaagactcacttctccccatactcccttttatactgttccaactaccaaggacactattactgattttaaattttattatgaaatgaatcatacaacatacgtaacacatatatgcccagttataagattaataaatcatcaagcacctgtgcacttacacccagttgagaagttgtggccatgagaggcaccacctcccattcccaaaagtaaccactatgctgagattatgatcattattttccttcttttctttagggttataccactatatataaatctgaaacaacctatttagtttgaatatacactatttgtatattccctattaattgctttttctccactacttatattttgagaattcacccttattggtgcatgcagccataatctggcttgttcatagctgtctcccagcacctagtgcagtgggcaaatggcaggcaccctataaatatcagttgacatacagagtagccaccacgtcccaatctaactcctgacttttccccttatattgtatgtgtgtgtgtgtgtgtgtgtaatcaagtatttctgaaatgcagtataatccaattagtctattttaggtattcattgctataacattttccctcatccttttaccactgaatacagaaactaatagctcatatattttgaatttgttaaaagactcttccccgtgtgtgtggattttgcctgtaggaacacaggactcaccgctgtagatacttgcagaagcactgaagctcctggagggtctcctttgcagtctggaagatttcctccacgagaaacaagtccactaagtgggcacagacatcctcacagcaacgggccacacggaccctctggtctgtctctactgcattcctagaaacagggcaatcagcatggaagacactgcacttggggcccacagacactgagggcttgcttgaaaagtgcaagagtcagtcaggcgcggtggctcacgcctgtaatcccagcactttggaaggccgaagcgggtggatcatgaggtcaagagatccagaccatcctggctaacatggtgaaaccctgtctctactaaaaatacaaaaaaattagcctggtgtggtggcgggcgcctgtagtcccagctactcgggaggctgaagcaggagaatgacgtgaagccgggaggcagagcttgcagtgagcagagatcgcgccactgcactccagcctggacgacagagcgagactccgtctcaaaaaaaaaaaaaaaagaaaagtgcaagagtcggccaggcacagtggcttacacctgtaatcctagctctttgcgaggccaaagcaggcaaatcacttcaggtcaggagttcgaaaccagcttggccatcatggtagaaccccgtctctactaaaaatacaaaaaattagctggcggccaggcacggtggctcatgcctgtaatcccagcactttgggaggccagggcaggcggatcacgaggtcaggagatcgagactatcctggctaacacggtgaaaccccgtctctactaaaaatatgaaaaattagccaggcatattggcaggctcctgtagtcccagctactcaggaggctgagaatggcgtgaacccgggaggcggagcttgcagtgagccgagatggcaccactgcactccagcttgggtaacagagtaaaactccatttcaaaaaaaaaaaaaaaaaaaaaattagctgggcatggcggtgcatgcctgtaattccagctacttgggaggctgagctaggagaatcgcttgaacccaggaggcagaggttgcagtgaacccagatcacgccactgcactccagtgtgggcgacagagcaagactccgtctttaaaaaaaaaaagtgcaagagtctgcatcctcagtattaaaatgtaattctatcttcattgtaaaagaagctttaatacttaaactacagacacctagaaagacagggtaaaaagaattaagtggaacagggtgccaaattataggtccataggggccctcgtaacagttaagaaataaacctttatcttaataaaatagtcagaatttttaattattttagagacagggtctcactatgttgcccaggctggagtacagtggccaccacaggtgcagtcatagcacactacctggaacttctgagcttaagtgatctttgcacctcagtctcttgagttgctgggactacaggtgcctggcgtagaatttgtaaattaccatgcagacaaccacaaaatcttctcatcagcaacatctgacttgtgcaatcaattggaagtgtctcaaatatatgataaatgccagtggctaataaggatggctgactatgatcatgtggtggcagccctcatataaaagagaattttttataataaaattctattagccaagggagcacagaggactgcatcaaatacatttggtcacaaaatcaaagtagcttagacaggcaagatccatttccaatagcccatcctcagtggtgcaagacacagcctagggcagagccaaagctcactctcctggcacagcaagacaccagcgtttcacttacttcaactcctgggagcaggtttccctcacaaactccatcatcacgcgttccatcagctccacggccaggccctggctcagctcacttaacaccagctctctctcttgtttcaacctacagggaagagaaaaaatacacaagggtaatgtttaagaataaaaataagtgctgtttgttttactccctggccacgcagacagggattgaggtgtgctgcctgagtcggtaggccacccctactccagctcccctgacaccacctcccttcccctgcctttcctggctgggaagggccactgctcacgggtaggtgtggcctgaggagctccatccaccccctgggctgaagcataggagggcatgagtgggtcagcaggggtggaatggtagcacagtggacaatagcaggagcatcgtggctagggtcagttcttgcctgtgtccacactgagctccttattcggctgcatggacaagacacacttacctttcctcttcagcccgctgcctctcctgctcccttcgctctctttccttagacacttcttcagctgcaatgtgcctcaaaatgcccgtggttgcagctgttaacaaatcctccatagcagcattagaaacactaaacggagcaaaggggatagcattcaaaatcagagtcaaggccgggtgcggtggctcacgcctgtaatcccagcactttgggaggctgaggtgggcggatcacaaggtcagaagatcaagaccattctggccaacacagtgaaaccccatctctactaaaaatacaaaaattagccaggcgcggcagcacacgcctgtagccccagctactcaggaggctgaggcagaagaattgctcggacctgggagcgggagactgcagtgagccaagattgcgtcactgtactccagcctgggcgacacagcgagactctgtctcaaaaaaaaaaaaaaaaagaaagaaaaatatcagaaaaaagccaagtcattgacaagggaaaaaaaacacacaggttgagtgtccctaatccaaaaatctgaaatccaaaatgctccaaaatctcaaactttttgagcacaacatgtcatgcttttcaaaggaaatgctcattggagcattttagaattcagattttcagatttttaggtaagagatactcaactggtacatataatacaaatattccaaaatccaaaaatatctgtcatctaaaacccttgtggttccaagcgttttgaagaagggatatgcaacctgtacttgtttggctgccagcagaaaaattaagcccactgttagaaacacaccatctaccaaaactgactcatgaagaaacagaaaaatgtgagtagacctataactagtaaggagacttccaaacaaagaaaggtatgagaccagaaggtttcactggtaaattctattaaacactaacgaaaaactaaccaccaatctttttcaaatcctttcaaaaaactgaagaggagggaatatttactaactcattttatgaggctagcattgctctaataccaaagacagaccaaagacactataggaaaactacagactgagcaggcacagtggctcatgcctgtcatcccagcatttcaggaggctgaggtgggagcactgcttgagcccaggagttcaagactaacctgggcaacatagagagaccccatctctacaaaaaattaaaaaattagccgggtatggtagcatgcgcctgtggtcctagctacttgggaggctgaggtgagaggatggcttgagcctagaagatcaaggctgtggttagctgtgattgtgcttctgcactcgggtctaggtgacaaagtaagaccctgtctcaaaaaagaaaaaaaaaaggaataaagaaataaaaaggaggccgggcgcggtggctcacgcctgtaatcccagcactttgggaggccgaggcgggtggatcaggaggtcaggagattgagaccatcctggctaacacagtgaaaccctgtctctactaaaaatacaaaaaattagccgggcgaggtagcgggcacctgtagtcccagctactcgggaggctgaggcaggagaatggcgtgaaccccggggggcggagcctgcagtgagccgagatcacgccactgcactccagcctgggcgacagggagactccgtctcaaaaaaaaaaaaaaaaaaaaaaagaaatggaaaactacagaccaatatccctcatgaatatggatataaaaatcctcaacaaggccaggtgcggtggctcacacctgtaatcccagcagtttaggaggccaaggcgggcggatcacgaggtcaggagatcgagaccatcctggctaataatggtgaaaccctgtctctactaaaaatacaaaaaattagccaggcttggtgacaggtgcctgtaatcccagctactcgggaggctgaggcaggggaatcgcttgaatccgggaggtgggggttgcagtgagccaagattgtgccactgcactccagcctgggcgacagagcgagactccgtctcaaaaacaaaacaaaacaaacaaacaaaaaaacaatttaacctaggaggcaaaaactttatacgttgaaaactacaaagcattgtcgaaagaaattaagaatgacctaaataaatggaaagacatcccacattctcagattagaagatttaatattgttaagatgacaatactggccaggtgcagtggctcatgcctgtaatcccagtactttaggaggctgaggcaggtggatcacttgaggccaggagttcgagaccatccctggacaacatggcgaaaagcatctccacaaaaaataaaaaaattagccaggctggtgcccacctgtaatctcagctactcgggaagctgaggcagaagaattgcttgaacccaggaggtggaggttacagtgaggctgagatggagccactgcactccagcctgagcaacagagcaagactccatctcaaaaaaaaaaaaaaaaaaaaaaaaaaaaaaagatgacagtaccacccagaacaatctacagattcaacgcaatccctatcaaaatcccaacagcactttctgcagaaacagaaaaactcatcctaaaattcgcatggtatctcaggagaccccaaatagcaaaaccatcttgaaaaagaagaatgtaggggaaaatcttcctgacactgtatctggcaataacttattggattatgactccaaaaacgcaggcaactttatgagaggaaacttctggaggactgggtgcagctccccgcagcacgtagcaggaggggagcacgagatgccactcaccccagggcggcagctgcgtaggcagcacccgcagagccaacttcctcacagtccctctgcagggcctcctggatgagctcgtccaccacctgcgccaggtcctgtggagagaccagcatggggtgtaatggaacgtcccacccagggcagaaatgctgggtaacatgttgtcaccggacagtctgcaggcgtctcgtgacagaagcacaacccctgacacggggtcggctaggctgttgcaggaaaggtgtcccctagcgaatggaaaggtgccatctggagaggaaggcgccctgcggatggccacacagcgccctggcctagccatctccagtctacgtcaagcagcctctgtttctgtgaccactctatgctccccctaagcactccctgatccccagatgggctggtgcccagtgcctgccccgaagcagccagagtggcacaatccagtctcacaaccatggagtcgacaggctctactcaatatcaaggcacctgtcgggaccatgcccaccctgaggccacaaccatcaaggggcacatccacccccaggccaggctggtcaaggggctcacccacccccaggccatgcccatcagggtgcacagccagagaccacacacaccagaggggacacgaccaccccgaggccacgcctatcagggggcacagccaccccagccatgcccatcagggggcacacccgccaggggacacgcccatcccaggtcacacccatcagtggggacacccaaccccaggacatgcccttcaggggacacacccacactcagtccatgcatattggggtcccatcagggggacatgcccactccaggccacacccaaggggacacacccacccaggccacacccaccaggcggacacgccaccccaggtcacacccatcagggggcgcacaatgctgccaatgatcccgtcaggaatagacgggtgttgagttcagacacacgggctcaggccggtgctgtgacaggaagctcctgagatgaagacggactccagaatgagcctgaataggtgggccctacctgaggctgagtgactctaggcaggacccctctctggactctcctgagagaccaggcgccacagccccacctcatggggtgatgactaaggacgtttgcgcacaatgggcttcccagagtccagacctagaaaaaaagagtccctacctcgtcagagtacatgggcacgggctctggaggcggtggttcaggctgcacagacagctggaagaggctgggcgccacagacggggtcagtgccaggacaggaggcagaggcactggtgagggcgcaggggctggtagagactgtgggagactggacaggggtgcatccggctctacaccacactcctctcctctccctccgcctggaaggaaacatacaggacaaaacatagctgcagacacagggtgcctggcaccacggggaccgaggtctgtgcagggacagccccaggccacccacagtgaccctgaggactggcctgccctccaggagaccagctacgtgggacaacatacgctttgcatgaaaaacaagccccaggatgtcagggagccaggaggagggcttcaaagccctcagtccactcccagtgagaaccatctgagcatgaggaagagccacacccctgggccccaagacaagacaggtgctcaggctcctgggaggcgtcctggcgagaaaatgcagatgcccaggctcctgggaggcgttctggtgggaaaatgcagctagtcccctcactacgactgcagcttcactcacccactgtgtcggagccgggtctctgggtgctgacgggcagctccgcggccaggctctccccgatgtacttgttctgggagttgaagctgcacacaggggtatgacgagggacggggggcaatggccctccgttcacaatttccccgactgacaccgtcagcttcctagtaataaacaccgacttcctggtcttggataatccctctggttccaggaatgcagaccggttcagctccacacagctacccagaccacaaaagacccccgaggggtgtcaccaggggagaagacagcttcgccctcagtgccctgccgagtactgcaagccccttgggtgtcaccacagccatgtgtaaataacagaaagcacaggcgccaggtcccactgccgcccaccctggagcctctgtaggtccctagaaccactaagcccagcgtgttaacagacgcacgctgactcactcctgcctccttgctggctcacccaaaaccgtctaattttct

SEQ ID NO: 9557 - DNA, 465 bp, Homo sapiens
atgtaggattacagtcaggagatgctgagtgccagtttaagattggtggtcatacgcaacatcaccaagtctattaatacctctttctgtatatggctcaaattttatcccctctcttcacaccaattgctaacaaactcacgcttattccctttgaatttcacctggatggctgcagcacccacctctcaagattcctgccctacatgccattcttaaaagaaaatgtgaccagatcacttctctgcctaatcttcaacaacgggttctcacagctctcagaagaaggtgacaagaatctctgacctcaccctgctggcctgttcccctcacctggccacacaaccaagctggtacctccacgctttcatcatgtcctctcaagtacactgtctccagctacacccctgcactcctctccgggaattctgtttctcctctacccaaccagaccctgttccatcc

SEQ ID NO: 9558 - DNA, 470 bp, Homo sapiens
ggtgaggagttagaggagacagggtggggaactaggcaccgggtgttgagtgtaagctgccagtttctgagagagcgtctgtgagtctcaccactctgactggtaagtaccggagaagactccggctggcctgcgggtgcctccatcccagccgtcagaggttgtccgtcattggctggcaaaggcagtcaagggaaagaataaagaaggccctaacttttatctttaggtttgtcagcaagtcatgaaaaggactgattttggagtcacaaagaacttggtctgagccctcaatgtgctgacagccaggatgtgaccttgggaacacccccagccattctgagtctcgtgtgttcacctgcatggcagagggaatgcaccttcttcaagtcaggcaagcagccagcccttcacagcccttcatcagaattaacaagaaaaaaggagacaggggccccacagttccattc

SEQ ID NO: 9559 - DNA, 555 bp, Homo sapiens
aaactagaggtcagcaaattctttcttaaagaagtgtcatataataaatatttttgacttgtgagccatataggttctgttttgactgttgtagttagaaagcagctatagatactatgtaaatgaatggcttggctttgtctcaatggaaaactgtgtttactagaagaggcagccagcccacaggctgaagtttcccagtcgctgatagaaacaattgaatatgccatttaggctaataaatggatttaacctttggcatctcatgaacaatgtcttctgacttacagaacagaaagaataaaaataccaatgcaaggttaacagtgctttgatctttgttccttagttacctattcagttttcatgagtaaatgattataaacaagagttctcttatttggaatatcgtatttcagagctctccacctcactagatggcaattcccgtggtataatttctctcggccaaatacactagagtctttatttatggttcttttctccctcagagcctgtaaacaatatgctagtaaattcttttcatcctgtctt

SEQ ID NO: 9560 - DNA, 555 bp, Homo sapiens; identical to SEQ ID NO: 9559

SEQ ID NO: 9561 - DNA, 555 bp, Homo sapiens; identical to SEQ ID NO: 9559

SEQ ID NO: 9562 - DNA, 303 bp, Homo sapiens
agctggaactacaggcacacaccaccatacccggcttaatttttttatttcttttagagatgaggttttgctgtgtttcccaggctggtatcaaactcctgagctcaagtgatcatcctgcctcggtctcccaaagtgctgggattacaggtgtgggccactgtgcccagcccatcctaaatccttgaataactttttcttatatcttctaatgcatatgtagaaagacatgctactaatctgaattctggcaagatattcttggtcacttggctgttaaaagatgctttgcaatgaagaatt

SEQ ID NO: 9563 - DNA, 303 bp, Homo sapiens; identical to SEQ ID NO: 9562

SEQ ID NO: 9564 - DNA, 303 bp, Homo sapiens; identical to SEQ ID NO: 9562

SEQ ID NO: 9565 - DNA, 539 bp, Homo sapiens
tctgcttaagtacaagttgtctgcagcgaaggaagaatttgattgtagtatcaacagaaccagacagaactctttgaatataattatatatcttggaaactgactcatcaaagctattagattacatagcatcatttaagcatcattgggctctgtacttttcattatctgtacttttcattatggagtataataggctttatttggtacagaaattgggtctaagatggaaacaacttgtgatttttgaataaacttttggggattagttactttgatgttgtcaagatagcagcatagtaagtcctctgcctttccttttgatttatttataatttagaatcagtttatgattttaaaaaatgtgacagacacagtggcatgcaccagtagtaccagccacatgggaaactgaggcagaaggatcacttgatcccagaagatagagaccaccctgggcaacatagtgagagccccatctcaaaaaaaaaaaatcaattcccaataccattccagaacacttttaatataaccagatg

SEQ ID NO: 9566 - DNA, 1196 bp, Homo sapiens
atcccggatctgaaagaaagagccacagtgactccaagagtggagccagggcatgctggacactgcatagctatggccaagtgtgtcacctctgagggagatgtgagagaaacgcagagggatcgcttgtgactgtgccttctcgatgtatgatggactgttctgctcaaatagtaagtgtgaccaaggagccggtgaacataggaaacaaagaatatttcatttgacattataaggaatgcgacaattctagtcacttgaaagtgaactatatctgtcgagaattcctagttttaattgggaagaaatgcgcttctcttcttgaaaagccacaggttattgctgttatgtctaatatcagtcctctctggatttctcaaaagattttctgtatatcctaccattttccttctgttgctgcagtttggaagtagtttgttatcaggattatcaaagcatcattgctatttatgacaatgactttaagaaatgcaagaatatttggaacactgtagaaaaaatattttagcctggaaggcaaatactaatttcaggaaccattgatctgttataaaacaggaccactcagacatttagctctaagactttcacatatccgttgttagaggcgtatagtggggggcatgactcagcttctgcttaagtacaaggtgttgtctgcagcgaaggaagaatttgattgtagtatcaacagaaccagacagaactctttgaatataattatatatcttggaaactgactcatcaaagctattagattacatggcatcatttaagcatcactgggctctgtacttttcattatctgtactcttcattatggagtataataggctttatttggtacagaaattgggtctaagatgaaacaacttgtgatttttgaataaacttttggggattagttactttgatgttgtcaagatagcaccatagtaagtcctctgtctttcctcttgatttatttataatttagaatcagtttatgattttaaaaaatgtgacagacacagtggcatgcaccagtagtaccagccacatgggaaactgaggcagaaggatcacttgatcccagaagatagagaccaccctgggcaacatagtgagagccccatctcaaaaaaaaaaaatcagttcccaataccattccagaacacttttaatataaccagatg

SEQ ID NO: 9567 - DNA, 1199 bp, Homo sapiens
atcccggatctgaaagaaagagccacagtgactccaagagtggagcaagggcatgctggacactgcatagctatggccacatgtgtcacctccgagggagatgtgagagaaacgcagagggatcgcttgtgactgtgccttctcgatgtatgttggactgttctgctcaaatagtaagtgtgaccaaggagccggtgaacataggaaacaaagaatatttcatttgatattataaggaatgcgacaattctagtcacttgaaagtgaactatatctgttgagaattcctagttttaattgggaagaaatgtgcttctcttcttgaaaagccacaggttattgcttttatgtctagtatcagtcctctctggatttctcaaaagattttctgtatatcctaccactttccttctgttgctgcagtttggaagtagtttgttatcaggattatcaaagcatcattgctatttatgacaatgactttaagaaatgcaagaatatttggaacactgtagaaaaaatattttagcctggaaggcaaatactaatttcaggaactattgatctgttataaaacaggaccactcagacatttagctctaagacttttgcatatctgttgttagaggcgtatagtggggggcatgactcagcttctgcttaagtacaagttgttgtctgcagcgaaggaagaatttgattgtagtatcaacagaaccagacagaactctttgaatataattatatatcttggaaactgactcatcaaagctattagattacatagcatcatttaagcatcattgggctctgtacttttcattatctgtacttttcattatggagtaaaataggctttatttggtacagaaattgggtctaagatggaaacaacttgtgatttttgaataaacttttggggattaattactttgatgttgtcaagatagcagcatagtaagtcctctgcctttcctcttgatttatttataatttagaatcagtttatgattttaaaaaatgtgacagacacagtggcatgcaccagtagtaccagctacatgggaaactgaggcagaaggatcacttgatcccagaagatagagaccaccctgggcaacatagtgagagccccatctcaaaaaaagaaaaaatcaattcccaataccattccagaacacttttaatataaccagatg

SEQ ID NO: 9568 - DNA, 428 bp, Homo sapiens
atcccggatctgaaagaaagagccacagtgactccaagagtggagccagggcatgctggacactgcatagctatggccacgtgtgtcgcctcccaggtagatgtgagataaacacagagggatcgcttgtgactgtgccttctccatgtatgatggactgttctgctcaaatagtaagtgtgaacaaggagccggtgaacataggaaacaaagaatatttcatttgacattataaggaatgagacaattctagtcacttgaaagtgaactatatctgtcgagaattcctagttttaattgcgaagaaatgtgcttctctttttgaaaagccacaggttattgcttttatatctaatatcagtcctctctggatctctcaaaggattttgtgtatatcctaccattttccttctgttgctgcagtttgg

SEQ ID NO: 9569 - DNA, 494 bp, Homo sapiens
cgacctagaggaagttggaaatcccactatcctggcttcctgctgagcaatatctgcttctctttctgactcaggctgatgcatctgtatacttagcttcacttctccagtaaataagggagagctttattataaaagacaacttctattgattttcaagggggtgggtggttgtcaagctcactcctttctatgcactgagggaaaattattgtaagcgatctgtaaaacaatagatgaaaaaagaggagataaaaattaaataaaatttaaataaaaactaggatcctaagtggaaaaatagctttaaattagaaattgataccaaaaaataatgatatgtaatctaaggtgaaaatattttgaagactatcacgatatctcccttaaatgttatttagttctgaaaaatatgtattgaagaactgttatattttactttatgtcatattaagtgtggtaaaattaaagagaaacaagtagataaaagtaaa

SEQ ID NO: 9570 - DNA, 494 bp, Homo sapiens
cgacctagaggaagttggaaatcccactatcctggcttcctgctgaacaatatctgcttctctttctgactcaggctgatgcatctgtatacttagcttcacttctccagtaaataagggagagctttattataaaagacaacttctattgattttcaagggggtgggtggttgtcaagctcactcctttctatgcactgagggaaaattattgtaagcgatctgtaaaacaatagatgaaaaaagaggagataaaaattaaataaaatttaaataaaaactaggatcctaagtggaaaaatagctttaaattagaaattaataccaaaaaataatgatatgtaatctaaggtgaaaatattttgaagactatcaggatatctcccttaaatgttatttagttctgaaaaatatgtattgaagaactgttatattttactttacgtcatattaaatgtgctaaaattaaagagaaacaagtagataaaagtaaa

SEQ ID NO: 9571 - DNA, 489 bp, Homo sapiens
gtttttagaattttcattgaagatcaagaaacattttattcactcaacagtcatgttttaaccaccagctgcatgtccaccactgtactagatgctaagaagtatcttctattttgtaaataaagtcctaaattgattataattaaaagttggaggcaagggttatatgagaagtctctgtaagttgtgctcaatttttctgtgaatctaaaactgttctaaaaaataaatccttaaaaaggaaaaaaaagttggagaaaaaataaaacatatacagaaacaattgaagaccaattgcaaaccagtaagattttgtgccagaaatgttttaaaaatctacatatgaatactgaagagctatggagtataggaatgatcaacaacagaagaattaatctgattaagcttcttttaggagttgatggaccaaaaattgaaaggcagattataaggacattccacataggggaaacagcatgagaaaaggta

SEQ ID NO: 9572 - DNA, 518 bp, Homo sapiens
ttacattcctagttggggccaacagtgtatcagcagactagccagaaatctatcagggagatttgggaaaatggcacagtgatagggagccttgataaactcaccaaaacacttcaaacacaagcaggagatatcaaagagggctcaagctacctatacaccctggatgactgtgaaatctgcacatatgcagagaagatgcaaaaaggcctggcagaaagtaaatgccagggcagacttgaaaactgcctgagtttttaatgggctcccccaacccaaccacagacccatgggcagagggtaaaagctttactagcttagggtatttgagcataaccaccgactaattactggctgaccactaagctatgcagacatgggagtgacccctaagaatcaggcttaaaaataaaaacaaaaataagttttaaaaaattaagtagagagataagcagcgatgcaccatgaaggagatggattccacagatttagtttaggcaacttaataaacaaaaaaa

SEQ ID NO: 9573 - DNA, 1647 bp, Homo sapiens
ttttttatattcttgtgtgcctctgagagtccagcaccactgcccttgagatctagatccccctgcaagttaaggcaacctttggcttttctttttgaaagtcataatcttagtgtcttggtggctgaaccatcagtcagttccaaagttccctttatcatttctcacaaggaatttagggctcctacaggtaagacatttgttgatcagtcccaacagcctagaattccctaaatgaatgtacatattaggtacttatccaaactctttccatctgaataaaataaaacgtggtgtctgaggttcattttttgttttatatctctccttgttgatttatatgtttagaaactagatatgtatatttgtctgtatgaatagctgtatatgctctatattgtattatactaaacatgtgtctccattaagtctaagctttcttttcctcatcacttcgttctcagaactcccgttctgacttatatttagcctggcaataggctgaagcatgtctcagatgcgagtacttacaccttttaacatagttagaattgggaatcccactcatcattcctgtttttatttgctctctcagaatggtcattgtgtatttccttgttgcatatgtggttactggccttgaactctggatgtagtggttatcaagaactgcagattgatctcttctgtattttcttcctgtccttgaaaatactaccaacttctgttgttccttttgacataaaaccaaataatcaatgttatgtttttgtgcttgttccccacttgattcatctgcagaagtcctacgtaggagagtttctgtatagccatatttttatttaggaatctaagtacagcaaatcaactttggactaagcattaggaaatctgtgtttttggcttggttgggttgttgaattgctttgtaaactctgtgcttgcttagactgcttgcctaatcagtttggttctgttccataatgccactactagatagttcagtatctgaagcatctaggttgcttctagtcaccatggagacctaacagaaggcttggtgtaaataagggtagcacctgtgaaggtagcacaggtgaaacagtacctgtgtaatgcaggtgttggagatgcatggggataggtattgcttgtaaaacaagaaagcctgaagtcgggtataggtgaacatattgtttctactggtaacagtgccatggacccatttctttcttctttaacagtgactctggacttctaaaacttcaacttattatccatctcttttgcctctctcctctccctttaaccatggttagacctcttcttgcttcacctctgttagagattgagcagaggcaggaagaatgaaacccagaaaagtcaactgaatttttagcaataccctcaaaagatttcgagtgggacgaaggttttaactattcatattacctatgtcttattctttgtgtaattgaaaatttgtcagtttcttcttacaaatacatttttattaaaatatgttttcatttaaccagtcttcacctatatcacatagttatcccagtggccccaaacttaaccaaatggatgattaaagggtgactgattctaaaattatgatctagagccaattaatttgttcac

SEQ ID NO: 9574 - DNA, 935 bp, Homo sapiens
gcggccgcgccaggccaggtgtgccctagaaggggtctgcggccgggaaagttctgtccgggtccttgcaccgccctcggaaggtcttaggttagcgggcatctcccacgtctcggagcccaaacgtgagaagcacacggctgatttcttaattatattcatgccaaggtgactttttttgttctgtattttaagcaaacttgagccatagaaacctgttaacttgccctgcaagtagatttttcacagacagctgacggtgtggtagtgaccatgaagttcagtagttttgcccagtacagaaatatttaacactccataaaatgttgcatctgaacttttcctgaactgaaacttatgccaaaaaaattactagatgagaaaatgtgtacttatgaatcctacattcaatgaccagttttaaacgtattgttacaatgttacagtttctataagctgtaggtttttattctcattttaaaagaatttttaaaacttgcatttgtattcatattgcagttacagattagttttaaatgaaaaaaggttttgagatggatgtcttcttgaatatagagtgaacccaacgttttaattctcaagctgtaaacagcaactgaaccataactccattaaatttcttccaactaaaaaattacttctgttgtccaaaaggggctgtgttagccgttatttcctgaagttcatgcaaataactaagttgtgaggctgattacatcattgattgtacttgagtactgaaattttaaaactacttaaggggcataaagttgatcagatgcgattctaattgatttgctgattcccagaactggacgtaggttctatttgaagcagtctatatttttggaaaattacagacggtcttgtttggtctttttcaattaaccacttaaaaattctcaaccatactt

SEQ ID NO: 9575 - DNA, 527 bp, Homo sapiens
aaaaacccaactacattgggttttatgataggagttaaataacagaggtttttttctcacatcgtagtaagtcctgaagtacaggttgctgatgttgtttcagtggctcaatgatgtcaaggtgagcatctttgtgcttctcttgtctcctcatgctcacaatgtaagtgctgaaattgtagctcttacttttgcttttgaggcaggaagaagaaacttggaagtgcttaccagttgcaggtgtccctttttatcaaagaggcaagcttcccctgaattccctccagtgaatctctgcttacatctgggctggggggtaaaaggaagctaagagagtatatatctgactctatagcccctgtggttggaggcatcatgatagaggagggttggaaatagctttgagtagcccaagcaacagtgtcatttaacaatagggagccacaggatacccagggggagacagtagttctcaaggagagaaaagcattgaaccacttggtagtggtgatggcaagccatgacca

SEQ ID NO: 9576 - DNA, 527 bp, Homo sapiens; identical to SEQ ID NO: 9575

SEQ ID NO: 9577 - DNA, 598 bp, Homo sapiens
gaaaatattaaaacttttattgtttcaatctaacaaatgaaatttaccttaattaacatttaatcaatggatcaacactgacatcctcacttggtctgggtgtcagactgttgggtatcagttatagtgcatgaggaaagcatgcaggggttgacagaggccccttgcttgttattttcaacatactgggatgaattataagtctgcatatatctagttaggtggatttatggatttaacaaaatcaaagttcacaaaacagataaatggcaagaaagattcctgcaaagaaactaaattgtgtgcaatactaataatgagagtggaagtgagccacacacatgtataggtcagagcggatgcttctcctatgagacattaatgttgaagtaaaaatcaacaacaatctaatctcagctgagaagatgtccagaaaaagtgaaattataagcaagacaatttgatagatggaattgtatccactattgttaacaaagaaacactttctgatattttattcccttgaaatactggctaacaatagtaggaagccatcataattaatgaacatgtgggacaggaagttaaactgacaaaa

SEQ ID NO: 9578 - DNA, 232 bp, Homo sapiens
gtttttttaaatgaaaagacaagagatgtcaaatttgctgacccttttttgtatgacaagtgactatgtaatctgcattgcagattaaacaccaagcaaccaaccaatcaatgcaacactgttacttcatttcttcaaggtaaaggtaatgttttaacaaggagtgaaaatgtaactgccttttctaaaggctgggataaaaacacagaatgtttttaaaatcactgtttgg

SEQ ID NO: 9579 - DNA, 553 bp, Homo sapiens
cagtcacactttttacttatgtatttacaagtaaaagaatatgtaaagacaattgagtattgtgcaacattgatgtgtatttataaaatagctttattttataataaagtaatatgtgtagatagtgtcatgaaggaaatattctccccataatatagtttcccttcttcatttcagcacatgaaattaaacaaacagaggaaacttcatctcaaacccatctaacctagtcagtaccatagtaagctgctttaaatcatatttaaaacaaggtagagtacaaataaatacatgcatgtaagacccaaattaaagcccctcaaaaatctattacttttaatttcataaataaattttttattgggcttaatttactccccgtataaaataataatatgttttaagactaaatttttttgtttcctgtcaaagtaaattttttgatgttgttgaaattaaccattgtaacatcattaaaaatatagcctactgtgtgcttaataccataaaatataaaaatgacagtaatattaagtctagaatttgccaaaaa

SEQ ID NO: 9580 - DNA, 122 bp, Homo sapiens
cacgcctgtaatcccagcactttgggaggccgaggcaggcagatcacgaggtcaggagataaagaccatcctggctaacacggtgaaaccctgtctctactaaaaatacagaaagttagccg

SEQ ID NO: 9581 - DNA, 2586 bp, Homo sapiens
ggctgaaagcacgttaccagacaatgagcatcttgcccatggagctatataaagagtttgcagagtatgtcaccaaccattatcggatgctgtgtgcagtcttggagcccgccctgaatgtcaaaggcaaggaggaggttgccagtgcactagttcacatcctgcagagtacaggcaaggccaaggtgagtgttgtgccctcagggaaaggtgacttgggaatgggcacttgcttgggggttagtgaggacagggcaaattcacgagattgggttgtgcagaggctgacacttggattttcctgggcctcaggacttcctttcagacatggccatgtctgaggtagaccggttcatggaacgggagcacctcatattccgcgagaacacgcttgccactaaagccatagaagagtatatgagactgattggtcagaaatacctcaaggatgccattggtatggcccacactcaggccctcttcttcccaaacctgccagatgtccaccccagaccccaagtccacccttccacagcttgatacttcctaacccagagtcctaggactccagcctccaacacctgattctgaaatttccccaaccctggccacccccttccctgcccttggaaagtgtgaccacaccctcttgtgcccccaccccccaggagaattcatccgtgctctgtatgaatctgaggaaaactgcgaggtagaccctatcaagtgcacagcatccagtttggcagagcaccaggccaacctgcgaatgtgctgtgagttggccctgtgcaaggtggtcaactcccactggtgagactgggaacgctgggctggggggccagggtcgggggaattatgtgttcatctgttcatctatctgtccatcctcaaagaggactgagcaccatttatgggcaaagcattgttctaggcgctatagagcaaacaggtgaaagaggcctggtccctgccctcagagggcctccaccagaatggggacaaattagaagaaaaaaaaaaaaagccacagagccataatggtgtgtaagtgctgagtaagggtccccccaacctctgtgtgacataaggtcagagagaaggcagagctttgagataagtggggaagaggtgcccccttgggtaggctttgaagactggtttaggttctgatatatggacatagttggcaagaaagacatttcagaagaaggctgtgagaaaggcacatgtgtgatggtgaaaaggcccaggagttttcaggggacattaaagtaggttagtagcaattacatcaggtttagtggagcatgtgcctcataatggggagtggcgggagagatgtctgggcaggaagattagctttagaaactggaaggcctcaaggagtctgaggtcattggtaggccttgggatgccattaaaggtgtcagaaatattgtgatttagaagattaatccataggctgggcacggtggctcacacctgtaataccagcactttgggaggctgaggcgggcagaccacctgaggtcaggagtttgagaccaggctgaccaacatggagaaaccctgtctctactaaaaatacaaaattagccagatgtggtggcacatgcctgtaatcccagctattcgggaggctaaggcaggagaatcacttgaatctgggaggtggaggttgtagtgagccgagatcacacgattgcactctagcctgggcaacaagagtgaaactccatctcaaaaaaaaaaaattaatccataagtagagtgtatgtagtagagtagagggatgtatgttgggggatgactggaatagagccagctgggggctcggaggcatgaaagtcagatcctgaatcagaacagtgacagaagttaggaaggagctactggaaggaccctctcgggaaaggatcagtaggaattgtcagcttattggaaaggagggagcatgtctgtggggagtcacggatgactcaagaggccatgaggctggtggttgggagaccggtggcctcattgacaaccaggaaagtcaggaggaggagccagttggaggtgtgggggcgatggtgagctctgctttacaccagccgagtttaaggtgtcagtgggacattgaagtggaactgggaggtgcggggagtgagctctgagccattccagggactggggatcatgcctggggcacctccatccccatttccctggaatccagaagagttggggggtccgagctccctgtacctcaagtgaccctccatctctctcccatctctgtctctccctggtgtctgtttttcttctcctcctctccttgtctctctcccacacccctccatctctctcccacgtgtctctcccctcaccttctctccccctccatttctctctccctaatctgtctgttccctctgccatggcccccttcttcaagcagcctcccatcttgctcctgcggtccctccttccctgtctctctcacccctgtttccacaccctcacctcctaccacccccctcagcatgttccctggaagctgagggtctctggggctcagtcccggtctctctctttctc

SEQ ID NO: 9582 - DNA, 2587 bp, Homo sapiens
ggctgaaagcacgttaccagacaatgagcatcttgcccatggagctatataaagagtttgcagagtatgtcaccaaccattatcggatgctgtgtgcagtcttggagcccgccctgaatgtcaaaggcaaggaggaggttgccagtgcactagttcacatcctgcagagtacaggcaaggccaaggtgagtgttgtgccctcagggaaaggtgacttgggaatgggcacttgcttgggggttagtgaggacagggcaaattcacgagattgggttgtgcagaggctgacacttggattttcctgggcctcaggacttcctttcagacatggccatgtctgaggtagaccggttcatggaacgggagcacctcatattccgcgagaacacgcttgccactaaagccatagaagagtatatgagactgattggtcagaaatacctcaaggatgccattggtatggcccacactcaggccctcttcttcccaaacctgccagatgtccaccccagaccccaagtccacccttccacagcttgatacttcctaacccagagtcctaggactccagcctccaacacctgattctgaaatttccccaaccctggccacccccttccctgcccttggaaagtgtgaccacaccctcttgtgcccccaccccccaggagaattcatccgtgctctgtatgaatctgaggaaaactgcgaggtagaccctatcaagtgcacagcatccagtttggcagagcaccaggccaacctgcgaatgtgctgtgagttggccctgtgcaaggtggtcaactcccactggtgagactgggaacgctgggctggggggccagggtcgggggaattatgtgttcatctgttcatctatctgtccatcctcaaagaggactgagcaccatttatgggcaaagcattgttctaggcgctatagagcaaacaggtgaaagaggcctggtccctgccctcagagggcctccaccagaatggggacaaattagaagaaaaaaaaaaaaaagccacagagccataatggtgtgtaagtgctgagtaagggtccccccaacctctgtgtgacataaggtcagagagaaggcagagctttgagataagtggggaagaggtgcccccttgggtaggctttgaagactggtttaggttctgatatatggacatagttggcaagaaagacatttcagaagaaggctgtgagaaaggcacatgtgtgatggtgaaaaggcccaggagttttcaggggacattaaagtaggttagtagcaattacatcaggtttagtggagcatgtgcctcataatggggagtggcgggagagatgtctgggcaggaagattagctttagaaactggaaggcctcaaggagtctgaggtcattggtaggccttgggatgccattaaaggtgtcagaaatattgtgatttagaagattaatccataggctgggcacggtggctcacacctgtaataccagcactttgggaggctgaggcgggcagaccacctgaggtcaggagtttgagaccaggctgaccaacatggagaaaccctgtctctactaaaaatacaaaattagccagatgtggtggcacatgcctgtaatcccagctattcgggaggctaaggcaggagaatcacttgaatctgggaggtggaggttgtagtgagccgagatcacaccattgcactctagcctgggcaacaagagtgaaactccgtctcaaaaaaaaaaaattaatccataagtagagtgtatgtagtagagtagagggatgtatgttgggggatgactggaatagagccagctgggggctcggaggcatgaaagtcagatcctgaatcagaacagtgacagaagttaggaaggagctactggaaggaccctctcgggaaaggatcagtaggaattgtcagcttattggaaaggagggagcatgtctgtggggagtcacggatgactcaagaggccatgaggctggtggttgggagaccggtggcctcattgacaaccaggaaagtcaggaggaggagccagttggaggtgtgggggcgatggtgagctctgctttacaccagccgagtttaaggtgtcagtgggacattgaagtggaactgggaggtgcggggagtgagctctgagccattccagggactggggatcatgcctggggcacctccatccccatttccctggaatccagaagagttggggggtccgagctccctgtaccttaagtgaccctccatctctctcccatctctgtctctccctggtgtctgtttttcttctcctcctctccttgtctctctcccacacccctccatctctctcccacgtgtctctcccctcaccttctctccccctccatttctctctccctaatctgtctgttccctctgccatggcccccttcttcaagcagcctcccatcttgctcctgcggtccctccttccctgtctctctcacccctgtttccacaccctcacctcctaccacccccctcagcatgttccctggaagctgagggtctctggggctcagtcccggtctctctctttctc

SEQ ID NO: 9583 - DNA, 89 bp, Homo sapiens
ttttttttttttttgagacagagtctcactctgtcacccaggctggagtgcagtggcgtgatcttggctcactgcaacctccgcctcct

SEQ ID NO: 9584 - DNA, 1880 bp, Homo sapiens
cccagagttgcacatctggaagagaagaagatagcaactgaaaagaaaatagaatggtattgacaaagagaaaagatggcgtcattaggacaattactttttatttttggaacaactcgaggctttacacccattcttttcccacatttattttttctatcagaattcttaaatctaagaaacaaataatatggaggttctttatattaacacattgctttaaattaggaagaaaactgtgtataggctgcagcagactttaaaagcattgtaagactttagatttggaaatcaactttaataacatggaaactttagatttaagagatcatttaatacagctactttgatttggcttttaagagaactgaggcccaggtagcccagaccaaggatcttttgcaaggtcgtgctactgggttctttagcgtcaagactgtaacctacatctttaggttcctaaatttttatcatgccttcttgttacctaactgttgattgttgaactttcttttttcttttttgagacagggtcttgctctgttgcacaggctggagtgcagtggcgcagtcatggctcactgcagcctgaaacttgagctcaagcaatcctcccatgtcagcctctcaagtagctgggactactggcatgtgccatcacacctggataatttttaaaaattatttgtagacacagggtctccctgtgttgtgtgggctggtctcaaactactgggctcaagctgtcctcctgcctcagcctcacaaagtgctgggatttgaattttcttaaacctaaatcaatattataggcctcaccttaggagaactttccaaaatattgttagtgttgaccaccttagcattacatttgctaacgacagtcatccaggtttactgaaccaggaaaccaactttcaggttaataagacagtttcgtctatgtgccatccttatccttgtctggacatatccatagagcacgcattttaaatctgaaagaatatatgtagtctcccctaccccagctttttttaagtagcaagggctattgaaaaaaatcagaaccctccgcttacgctcgcatacatgtagcttaaaatatatgttgcttattgaaagcattgtttaagttgaactcacgagatatactacatcatgtaatatgtctgcatttgtccatgcattcttttcggaaacctgatcttacttatgtctgcatttaacagataggctaggttaagttatgttaaaacatgttgtactgaggttggattcaccgtgtcacagcctggctttcttccttgattagctttaatcaaactctctgcattccgtgaccttaataaagctatttttcctgacaactgaagactgtcttaacaagcatagttcatctgtgctgaaactaaggctgagttaagatggggtttaggtcctcattaaagtccacagcatggagtgtaagaagaaatgatgaaatggtgctccctgaaacatctcttctttaaatttaattagacaaattatacgcaaactagtagatgccctgggaaggcaatcaacattagggctaataaaaagcttgagtagtataaaaaggctgggggaggtgctgtggagcctttctaacgcctatgagaggcaaattaaaaccaattgcgaaacatggaaactggatgaatttcaatattgatttagaaattaattttattatgttgttctaaatataaaaataaaggctatacttattaatcttccagaatttgacatgttaacacctatgcacaaagcattttatggatctttatatgctgggagacacaattatgggctgacttggaagttttggcagacctgggttcaaattctagcaactt

SEQ ID NO: 9585 - DNA, 1880 bp, Homo sapiens
cccagagttgcacatctggaagagaagaagatagcaactgaaaagaaaatagaatggtattgacaaagagaaaagatggcgtcattaggacaattactttttatttttggaacaactcgaggctttacacccattcttttcccacatttattttttctatcagaattcttaaatctaagaaacaaataatatggaggttctttatattaacacattgctttaaattaggaagaaaactgtgtataggctgcagcagactttaaaagcattgtaagactttagatttggaaatcaactttaataacatggaaactttagatttaagagatcatttaatacagctactttgatttggcttttaagagaactgaggcccaggtagcccagaccaaggatcttttgcaaggtcgtgctactgggttctttagcgtcaagactgtaacctacatctttaggttcctaaatttttatcatgccttcttgttacctaactgttgattgttgaactttcttttttcttttttgagacagggtcttgctctgttgcacaggctggagtgcagtggcgcagtcatggctcactgcagcctgaaacttgagctcaagcaatcctcccatgtcagcctctcaagtagctgggactactggcatgtgccatcacacctggataatttttaaaaattatttgtagacacagggtctccctgtgttgtgtgggctggtctcaaactactgggctcaagctgtcctcctgcctcagcctcacaaagtgctgggatttgaattttcttaaacctaaatcaatattataggcctcaccttaggagaactttccaaaatattgttagtgttgaccaccttagcattacatttgctaacgacagtcatccaggtttactgaaccaggaaaccaactttcaggttaataagacagtttcgtctatgtgccatccttatccttgtctggacatatccatagagcacgcattttaaatctgaaagaatatatgtagtctcccctaccccagctttttttaagtagcaagggctattgaaaaaaatcagaaccctccgcttacgctcgcatacatgtagcttaaaatatatgttgcttattgaaagcattgtttaagttgaactcacgagatatactacatcatgtaatatgtctgcatttgtccatgcattcttttcggaaacctgatcttacttatgtctgcatttaacagataggctaggttaagttatgttaaaacatgttgtactgaggttggattcaccgtgtcacagcctggctttcttccttgattagctttaatcaaactctctgcattccgtgaccttaataaagctatttttcctgacaactgaagactgtcttaacaagcatagttcatctgtgctgaaactaaggctgagttaagatggggtttaggtcctcattaaagtccacagcatggagtgtaagaagaaatgatgaaatggtgctccctgaaacatctcttctttaaatttaattagacaaattatacgcaaactagtagatgccctgggaaggcaatcaacattagggctaataaaaagcttgagtagtataaaaaggctgggggaggtgctgtggagcctttctaacgcctatgagaggcaaattaaaaccaattgcgaaacatggaaactggatgaatttcaatattgatttagaaattaattttattatgttgttctaaatataaaaataaaggctatacttattaatcttccagaatttggcatgttaacacctatgcacaaagcattttatggatctttatatgctgggagacacaattatgggctgacttggaagttttggcagacctgggttcaaattctagcaactt

SEQ ID NO: 9586 - DNA, 504 bp, Homo sapiens
acatttgttaagtgctgcatgccaaacatcctgtataccttaccatctcatttaatattgataacaactccacaaggtagttattactgacctaattttgcagataaaaaaaaaagagattcagaaaggctacgtgaattgcattttagcatagaagagtcaggactggaactcagtgttggcctagttcttgggggtggttggatggcaaactagtgcaggtatgttcataacttgtaagatcaaatttgtcatataaattacggggatatgtaatctctctcccttctggctcttttcatccttgggtgagttctaaataaaactattttgtgttatttttttaaccctcattccattgctttcagactctggttctcaaccttggctgcccatttagaatcacctggagtgggatctgggcgttagcattttttaaagctcctctagtgattccaggtaggcaacctgcactaaagacctctgctttaaaatctctctacc

SEQ ID NO: 9587 - DNA, 504 bp, Homo sapiens
acatttgttaagtgctgcatgccaaacatcctgtataccttaccatctcatttaatattgataacaactccacaaggtagttattactgacctaattttgcagataaggaaaaaagagattcagaaaggctacgtgaattgcattttagcatagaagagtcaggactggaactcagtgttggcctagttcttgggggtggttggatggcaaactagtgcaggtatgttcataacttgtaagatcaaatttgtcatataaattacggggatatgtaatctctctcccttctggctcttttcatccttgggtgagttctaaataaaactattttgtgttatttttttaaccctcattccattgctttcagactctggttctcaaccttggctgcccatttagaatcacctggagtgggatctgggcgttagcattttttaaagctcctctagtgattccaggtaggcaacctgcactaaagacctctgctttaaaatctctctacc

SEQ ID NO: 9588 - DNA, 336 bp, Homo sapiens
ctccagcctgggtgacggtgcaagactctgtctcaaaaacaaaaaacaaaaagaggaataatagtatctgctctccttgccttttgtgggtttttttgatgattaaatgatatctgagggatacaaaaatgctttggaaactacagggtgctttacagactgtgtgtgtgagtgtgtgtgtgtgtgtgtgtgtgtgtgtgtgtgtgtgtgtgtacagaaaatcctttatctctttgcttctcaatttcttttcttaggaaaatcagattatttaaatcccattatgcacagctctcctctgttcttactaagcctctgtattccattacctccagt

SEQ ID NO: 9589 - DNA, 1184 bp, Homo sapiens
attatgtcacatacttttttgtggtgagaacacttgaaatctactctcttaagcagttttcaagtgtataatacattgtgatgaacagtagtcaccatgttgtatagtaagtctcttgaacttaaaaaaggaaagaaattatgagtctcttcacatactggtattaagcaatatttgtttacagtgctggaaaggagcttccttacttattaggaacctcaggtggacctctcatggttgcagatggcttctcacttacaaaggagattgtgaccagctgttgagaactgtttggctttacttccttcagagaccagacttggttgtatgtcagagtagtcccccccttatcctcaggggatatgagcccagaccccccaatggatgcctgaaatcacagatagtaccaaaccctatatatgctatgtttttttcctatacatgcatacttgcgataaagtttaatttataaattaggcacaggaagagattaacaacaactataataaaacagaacagttataaaaatacagtgtaataaaagttatgtgaagatgatctctctttctcaaagtatgttatcgtatgtaatattttcagattgcagttgatatggatagctttaaacctcagaaagggaatcgcaaataaggagggattaccatatatcctcgctaagagtcctctgactctttttctctcctcagactcaccccacacagaccgcgtttctctccagtgtcgacctacacactcactgctcttaccagatgatgttgccagagtcagtagccattgtttgctcccccaagttccaggagtgagtatagagggcatggttctgggtgtttcaagggggtagtagggaagaaagcctcaggggaaaaggtctctattcttgtggacttgtcctttgtaaaatacatagattataatgtaagttggttattctaaagggcttccttttaagccccatatcatgatttatctatcatgcttgttcaaaaagatatccaagtaacaacttagttgcttttctaagaaaagtctacaagaaatttgaagtgtttgacttgaagcgataggaatgtcaagagttttatgttggattagaaagtttcaaaatcataaaatataaaaaaataaaaaataaaaaataaaaaaatataataaaaaaataaaaa

SEQ ID NO: 9590 - DNA, 100 bp, Homo sapiens
tttttctttttttttgagatggagtctcgctctgtcacccaggctggagtgcagtggcgcgatctcggctcactgcaagctccacctcccgggttcatgc

SEQ ID NO: 9591 - DNA, 432 bp, Homo sapiens
cagcactacgcttaggggccattttaaacagcaaagtcaccagaaaaagcacaaaaatggaaaacatgtggcactgaatagaccatgaaaaggacacttgtttgcagtgcgagagcttaaaaaaaaaaaaaggcagagcaacaccttgttcaacctcaactagaaacatgctcgtcaggcaagtcaaatttttcaccaccctgagcatgtccagaaatgaccaaaaggctctgagagtactgtttgggggattacaaataaagcaagtacgcagttcacaaatacagaatccaagaataatgaggatggactgtacttaggtacacagtcctaagttaaacagacataaataaaaccgccaatgtatataaagcctaacttatacaagcagagccattaagttgaatataagtgttaaaaacagctatattt

SEQ ID NO: 9592 - DNA, 663 bp, Homo sapiens
tttttttccagctttgtttctgtcaacagtgagtgaactacaatactcatatatttacaagcatttctgcttgttttccaaattaccagaagagtaaaatcacagaattaaaagttccaaatatttttcagtttcaactactattaacaaaatatcccctagaaagcctggaccacttcacacaccccaccagcaatctgaataactgttaacaaaccaacatctttgccacttgctaaaatgtggaattctttcttgagctaaaaacaaacgaaatcacaaaattggctaagtattgaaaaggaaaaattattatttccttattttattatccatgaggttaaacccttcttccagtttttatttcttcttttgaaaacttgcatttcttcctctgaaaatctgtcttggatacataaacatttttaagagtgataatatatatattgccaagctgcctttctgaaactctaggttgttgcatttaacattttacacaccaatcagcaacatacaaattttgcccactgacaaacaagccattcccacaggatcttaaggtttggttacagcagaaatgttatcaagtaggaaagaaagtaataaaatatgtttccaacaggtttttaaatagatttgtaagtaatttaactatgtatgtgc

SEQ ID NO: 9593 - DNA, 624 bp, Homo sapiens
atgaccattttgctggtagagtagggattgtattggtagttgtgtgagattgacagggaaacctgtttgacagctatggcagtggtttgggtgaacagtgctacaggtgtgaaccaggccagggcactggggatgaaaaactggtcgaaagaagaggtgtttagaaggtagagcagaacaagaggcactctagacctagatggagtggccagggaaataggaggaaaatccgttgccaacagagaaaatgcaaagaaggaaatattcataaggcctgaaaaatacccctgggtttgcaagttacgggtttgccaattgtgaggcttctgtaaccctgcccttggggagaacagttttgaagcatccactggtggattggagaaacagactgcagtggttggagagaggatggaagagaagacgctaagatagggctcaactataaggaatgaattgtagaattaagccacctgcctataatcagtagggctttccttttttatctcttttgctcattattatcacaccatatccctgagggtgaagaacaactttgaagaggcaatgcctgataaatctggaataggggagaataattgggaaattcattaatgatcactccat

SEQ ID NO: 9594 - DNA, 205 bp, Homo sapiens
agcaaagggaggttggttcaaaatgcctctaacgtgctctctggctgtaacattcaaccaacttcttcctcctgtggttgcctttgcctctggccccaggaatccagcaaatgtgctttagcccaagctgagagtgaccagtgggaatgaagatatcagtcttccagactggggaagcagacggtgaatttcaagtgcaccagag

SEQ ID NO: 9595 - DNA, 782 bp, Homo sapiens
tgaaagactctttttctgagtagcatgacatttctgcaggcaaaggaagtgagtatagactcccaattctcttcttttccaggatgtacactagaatctgaagcatcctcttcaccctcgctccccttcaagtttccgaagccactaagttggcaatgaaattattttgtttatgcaaggagcaaaatcacatgtcaagctgataaataatgtatgaaatatcatttagttaatttcaaaggcgccaagactatgacaccattgcatccattcagatgaaaccttggttctccctgtgttaggggagagatctaaatgaagtatgtcctttatatttagatgactagatctgtggccctcctggcttgtttttcagggcccttaatactgatcagagaaatttgctatcacaaaatagctttcaaaacagaacagagctttttcttattgttttcattccaaattacctgaacctcagctttgtctgatcttttcaggagcaagaggttcacacattgcattcacagtatgcctacaaagagctactgagttgtttttaatgcattttatgctacagccaccagtggccaaattataagccagaattctgttagtagcatggcaaaaatctctcattgcaatgtaatttgttatgagtagataatacaataaaactgaagtagttcttcagtgttgaaattactgagtttcttttaaagtgtgtgtgcacatgtgcatgtactaaggttatggctagatgtgatgtgctaacatcccaaaaa

SEQ ID NO: 9596 - DNA, 782 bp, Homo sapiens; identical to SEQ ID NO: 9595

SEQ ID NO: 9597 - DNA, 782 bp, Homo sapiens; identical to SEQ ID NO: 9595

SEQ ID NO: 9598 - DNA, 453 bp, Homo sapiens
atcacaaatgcctactggaagacttatcaattatctcagacactgagattgatcatggttttagcaattgtggattttcccacctgcttttatgcagggccaaagcatcaacttggctttctgctctttgggagcacactcagcttgttctggattgtctacacttttctcaacaaataccactaccaaaagttaataaactgtttttttaaccatagattacaactggggtaggaagagtactgcatattacatatatcttaatcttttcaatctaatccagcttgcaaatttcagaccttaaaataatcaatagatttgtagtacggtactttcaattcacatttgaaataggatctgattctgagaaaataatgctgctctaactataataaaaattattgtagccatatcctaatagggggcacattgatggtttgaaatacttaagaa

SEQ ID NO: 9599 - DNA, 453 bp, Homo sapiens; identical to SEQ ID NO: 9598

SEQ ID NO: 9600 - DNA, 453 bp, Homo sapiens; identical to SEQ ID NO: 9598

SEQ ID NO: 9601 - DNA, 13409 bp, Homo sapiens
ttattgtgcttctgctggaagggtctcttgtatgggcgccccgtgaggacccagtccttctccagggcattcgagtctccattgcacaatggccagccctggtgagtggcttttactgggtgggaacatgtctgagctttactcctataatataactatgacatgttagggacagagtatgtgtaagaactacatactttgtccttaacgtacatttattctgaagttactaatgcaaaaattaggagcagtcttttctcctttgtcctccaaaatgttttatattaggtgatatttgatatgaaagaatttttttggccagacgcggtggctcacgccttgtaatcccagcactttgggaggctgaagcaggaagatcccttaagctcaggagtttgagatcaccctgggtaacatgccaaaaccccatctctacaaaaaatacaaaaattagctaggtctggtggcacatgtctgtggtcccacctacttgtggggctgaggtgggaggatggcttgagcccaggaggttgaggctacagtgagccgtgattgtgccactgcatccagcctgggggacagagtgagacccctgtctcaaaaacaaaaaaaacaacaatgaaaagaattttttcacctttagtcttttctcagagcaaggttttgaaacattatttgtaacctttaaagtttttttttcaattatggagtgaaaatagcattataaaatttattttattttttgagacagggtctggctctgtcactcaggctggaatgcagtggtgcaatcagagctcggtgcaatcagagctcaccgcaacctctgacccccaggcttaagccatcctcccacctcagcctcccaagtagctgggactacagacgcacagcacggcacccagcctaatttttgtatttttttgtagggatggttgctcatcatgttgcctaggctggtcttgaactcctggtctcaagcagtccacctgcttcagcctcccaaagtgctgggattataggcatgagccactgtgcctggctgtgtgttataaaatttaattgtgagagtatccatttgtttctgtctgtcttattagcaaagtataggtataaatggtaacttctaaaaaatcctgattttcatgtggctaaccaaattaaataaataatattcaaaacaatttttttaactgattgatggtatatgtcatcacttactaaactgtcttttctttttctttttgtcttttgttttttgtttttttcttgagacaaagtctcaccctgtcacccaggctggagtgcagtggcacgatctaggctcactgcaacctctgcttcccaggttcaagcgattctcttgcctcagcctcccatgtagctgggattacaggcatgcgccaccatgcccagctaatttttgtatttttagtagagacagggtttcaccatgttgtccaggctggtcttgaactcctaacctcaggtgagccactacgcccagccgtttcatttgtttttgttgttgttgttgttaagatggagtttcgttcttgttgctcaggctggagtgcaatggctcgatctcggctcaccaccccgcctcccaggttcaagcaattctcctgcctcagcctcccgagtaactgggattacaggcgcccaccaccactcccggcttattttttgtatttttagtagagacagggtttcactgcattagccaagatggtctcgatctcctgacctcgtgatccacccgcctcggcctcccaaagtgctgggattacaggcatagccactgcgcccggcttctcatttgtttttaaggccactttccagttgaacttttaggagaagctcttgtataataagtgcatgtgaggtctcttcatgacttttttataggctatttatttatgaaatggtaatatgaattaaccatgcatatttatgctgttaattattttataaatttcacaaagatttcaagagttctgagatgataacagtataactctttattctgggaatttactataatttagctcccttgaagcctaataagattagcctgatccctaggcagaattaggagaatttctgattcctcttgtcctttttagccaataagagtattgagctgactttctgcattagttagcttcccatgactatttgaggggtagatgctaggttgggaatgtttccaaggacttatgctttagcttatctgtatttactgggatgaaagatataataattatttctttgaagttagagatttgtttgaattgctgtttttttattcccaagttctaatcaatttcttgtcattgtacttcacagacttttactccccttgtagataaactgggtttgggttctgtggttccagtggaatatcttctggatcgagagcttcggttcctgtcagatgccaatgggttgcatctgtttcaggtatttaacacttgctttagtcttgagcctattatttttttcgctgctaatttctttgttgatataaacataggtgtttctccttttactgggtgggaacatattagcatttcttttattacttcctccaataaatatgctgtgccttttttattttattttattttatttatttatttatttttttttgagacagagtctcgatatgtcccccaagctggagtgcagtggtgcgatctcaactcactgcaacctccgcctccccggttcactccattctcctgcctcagcctcccgagtagctgggactacaggcgcctgccacaaagcccggcttatttttttgtatttttggtagagatggggtttcaccatgttagccaggatggtcttgatctcctgacctcgtgatccgcccgcctcggcctcccaaagtgctgggattacaggcgtgagccaccacgcccagcctattttatttttttgagacagagagttttgctcttgttgcccaggctggagtgcaatggtgtgatcttggctcactgaaacctctgcctcctggattcaagcaattctcctgcctcagcctcccaagtagctgggattataggcatgtgccaccacacccagataatttttgtattattagtagagatggggtttcaccatgttggtcaggctagtctcgaactcctgacttcaggtgatccacctgccttggcctcccaaagtgctgggattacaggtgtgatcaaccacgcctggcatttttaaatttttatttatttatttattttgagaaagccaccttggctggagtgcagtggctccatctcgcctcactgcaacgtccacctcccggtttcaagtgattcttgtgcctcagcctcccaactagcttgggatcaaaggcacatgctatcacatctggctaatctttgtagtcttagtagagacggggttttgccatgttgcccaggctggtctcaaactcctggcctcaagtgatccacctgctttgccctcccaaagtgctgggattacaggcgtgagccaccatacccaacctccctgtgcattttaaagtttttctgctcccttgcaaagtacttttggtggctgaggcttctttcttctacacagccccaccctaccttaaaaccgcccaagatttaagaacacaattctgagtcccttcagaagaggtggcttcggccaggcgcggtggctcacgcctgtaatctcagcactttgggaggccgagacgggcggatcatgaggtcaggggatcgagaccatcctggctaaaacagtgaaaccccatctctactaaaatacaaaaaaattagctgggtgtcgtggtggacgcctgtagtcccagctactcgggaggctgaggcaggagaatggcgtgaacctgggaggcagagcttgcagtgagccaggatcgtgccactgcactccagcctgggcgactgagtgagactccatctcaagaaaaaaagaaaaaaaaaaaaaaaggcagaggtggcttctccgaggtggctgtttgtgtaacttgagtccaagggggcctattcattattgacatccaggagtttggactggttccaagcagcatgaagtatcatagttacaaagaaaagggacaagttaatagttaaaacaaaccagcgtctgagttatagtttcagaatttagggaaatgtatttatttttcacttgtaagggttgctgtctgcaggaagaaaattaggagactcctgagttttactgtcttactgagacagaccagagcagttatttcctaaactgtcttctgtgagatgttaattatgatttctttgttgatatgtcttccccgctcgttaggttaatgatgatttctttgttgatatgtcttcctcgctcgttaggcctcattccctctcagcaaccttgctttattcatatttataatcctagtgctttatgagatagcacttagtaaatgttggataaatactgaaataagcaaaaagatttgcgaggaatacaatgttttatggtcagataagtatgagaaacactggcctaaataagtttctttcctgtgtgacttctcagagcctttaatagcctattgtatgtagaaagatacataatatttcctaatcctaattgatcctagcattcttaatttttgcagaacatctcatgagaatagagttctctttttttgttgttcacaagagacagggtcttgttctgtcacctaggctggaatgcaatggcgcagccatacctcactgcagcctcaaactcctgggttcaagcgatcctcctgccttggcctcccaaagtactaagattacaggcatgatcaccacgcctagcctgagactaaggttctatagatattgtttggcaaatgttgatatacagctccttaggatatgatttttctcagctgattagatgtttgctattcattttaacattcagttgttttcttcttttatctttaccagatgggaacagatagccaaaaccagattcttttggaacatgctgcactgagagaaacagttaatgctttgatcagtgaccaaaagctacaagagatattcagccgaggtaagaacggatagtcttctgtccctgaactctgattcaggtgaatgatcactgttgagtgatagtatggaatcccatgcaaccttaaacatttgtacttatctcctttttgtgggcagagtcagatgccacatgaaagataataattattatttattaaaaaataaaaataaagagtatcttcagttagctggatctctaaaatagagatctcattctctctccatcactcactcgtcttatggaggtgtctgtaacagaggtgagactgtgttattctgtctaaggtccatccatccccttaaagatgctcttagaacaaaaacaggatctcattcagaccaatgtttctggttcattctgcatttcataatatacagttttattgtgagttgagttttagttttttttatttcttaaatattgccatgtactagacagtgttaaggcattggggatatagcaattaattagaaaatctttgcttttttaacttaaaatctgcaagtttcttaagaactaaaaacttaacaccaacaaataacaccttggagtgcaaggtataaagtaatgtgttcacagactcattcacattaaaagcttgttgtttttaataatgaaaaaaattattagctttcaagttcagatacaagttttgcccaagattctacacaaaaggtaaactattggcttcatttatgtcgtacattcactccccttcctttcttgatctcatgataatcattattttcagggaaatagtttccttgtttctcttttgtcaaaataaacctaaacaggtaaaggtagaaaaactgacctattggggaaggaaggtgtcaggataaaatgatgttaaataatcaaggaaagatacggcagaagaaagaatatgaggaaaattggtagcagaaaagaaaattgagtggacaggagaggtagggagatacatatatatatagattatatatatcatgatatatatatatagatatatatagatataatgtatagaaaagttacggaagcttaattttagctctgatagagaataatctaaaattggtaatgatttagctatatagtctcaaatgtacaaggatatgtgggagagagaaactgtccttagaggatagcttaaattgcagggtaacattacctgctgataaagtaatatatttgaaactctgcgttcctaggaagacaggtgctatatttatatttgttcagcctattattagtgcagaaggctggaaacttcataaattgaactcttcacccactgttattgaaagtcagataccagaatgtaaatggtcatatataaacataacataacataacagcactttcaacttagtggcctcccacttttttcatgtacatgtagttagatacatgtcaggtatctacctacattttcatactactgtagttttttatttggaagtttcctttcccttcctataatacttgcagaactggaagattgaggcaagggggagttggagggctgggaaattctaaggaatttccaaataaatgaagaatttacaaagaccactggaagaaaccattcaggttttgtttttaaattgctcagtatggtaaatctggaattgctcatttgttcagttctataaaagaggaccaaaagtgccaaatatttacattatctaattttcctttggcttttaggaacaattatgaaatatagcttagccaaaaatactcaatactgactgatctcccttttaggtccctacagtgttcaaggtcacagggtcaaaatatatcagccagagggggaagaagggtggctctatggtgttgtgagccatcaggactccatcactcgtcttatggaggtgtctgtaactgaggtgagactctgtgttattctgtctaaggtccatccatccccttaaagaggatggtttagataggcgagcacttcattatgtgtaagatgacttgggtttcatccctggctctattacttaatagttgtataacccctagaaaggctattgaattttcttaacttcactgttctcatctataaactagaagtaaatatgtaaacccccactgaccttacaacactgttttgggtcctgagataaagtatctgaaagtgctttgaaatctgtaaaacaatatataaatgtatgacagtagtagtattatattcataaaggttagtagttggagtgcagtggtgcgatcacagctcactgcaacatttgcctctcgggctcaagcagttctcccacctcaccctctggagtagctggcactacaggcgtgtgccaccacacctagctaatttttctattttttgtagagaaggagtcttgctatgttgcctggctggtctcaaactcctgagctcaagtgatccgcccacctcagcctcccaaagtgttgggattacaggcatgaaccactgcacccggccagaatattattatattatatttatttatatgatatatatgagttatatgatatataatttatatgatatatataatttatatgctctataattatataagtcacactttagtaacaaataagatcatatagtacatatagttatataatttaccttttttacttaattgtatatagtgagcatttttgtatgtaaatgtaaagatctgtctcatcctttaaaatagatgcgttcttttccactacatggatatatcatgactaatctaaaattgatagacatttaaatcattgccaatattttcactaatatgtcacagtgaacatccttgaacattttttacattatttattggaataaatttatatgtataattgctaggtcaaagaatatgcacaataaatttgaaattttctatcaaattgccccccactgagtttttattctttaatagtagaatgattcttttttaaacagagtctcactgtgttgcccaggctggtctcgaactcctggtcctcctgcctcagcctcccaaagtgctggggttacaggcatgatccaccatgcccagcctggagtgatttttttttttttttctttttgagacagagatttgcttttgttgcccaagctggagtgcaatggcacgatctcggctcactgcaacctccgcctcccaggttcaagcaattctcctgcctcagcctcctgattcgctgagattacagacacgccaccacacccagctaattttttgtatttttagtagaaacagggtttcaccatgttggccaggctggtcttgaactgctgacctcaggtgatccacccaccttggcctcccaaaatgctgagattacagatgtgaaccaccgcacccagccctagagtgattcttttaatgattattggttctgaaggttttttgtttcatactatacagaataggacagttttagagatacaggattcagaattaacatcgctaaaagacacagttggacatgaattcacttctttcattcattcacttaaatatttgaatgcttaccatattctagacctgttgtagcagtaaatgagacagtagagatctctgctctcatggagctttcattctagtaggtgagttgaatcaataaagagataattacattgattaggaaattatataattatgtctttatggacaaggcattaaatatctttttcccctcctactgtagagtggtgaaatcaagtcggtagatcccagactaatccatgtgatgctgatggataattcaacgcctcaaagcgaggtacagtaatggactgcattcctgagcagactcatgagcttgcattatcttgctgtgtgtagatcccttatatatgtgttttccatggatgccttttgagttgttcagctttagccactgtacatttttttgctctctccacagtctgtctaattaaggggggatattctcaagaaagagacctagtttgagcaaacccttttaagcatgactatgttccctagttcttctaaagtgcaaggctggtttcttcctatattctgtcaggacaggtatatttgaaagatatagtagtcagttaaaagtgcaataagcagtagtaatactcgtgatctaccaagtaacaagaagtgaaggataaactacgtccacttttttttttttccattcggtggcagtgagctccaacggagtctgaaattctgtattcccaagtagaatcaattcaagctggtacctagttcagtgctcagcccccagtgcattggttactccataattgttatgaaccagcccaactcttggtttattcagaattaatatagccccaaaaaagatacattaaagctctctgggccaggtgcagtggctcacgcctgtaatcccagcactttgggaggccgaggcaggcggatcacctgaggtcaggaattcaagaccagcctgaccaacgtggtgaaacgctgtctctacaaaaatacaaaaaaaaaaatagccaggcctgatggtgggtgcctgtaatcccagctactcgggaggccgaggtgggagaatcgctagaacctgggacgtggaggttgcaatgagctgagatcgcaccattgcactccagcctgggtgatagagcaagactccgtctcaaaaaaaaaagtaaataaataaaaatctctgcctgaaccaatcgagtaattctgtgtgaatttccttcagttgaccagctgtccacatattcctcacagtatcttggcacctctgtaatattgctgtcgttgccactcctgctaagtatatagtctttcctcatctttatccagtcattcttgacttcctaaaacaagatcagaataggaaaagaaaaaaaattttttttttttgaggcagggtctcgctatcttgcccagtctggtctcaaactctcacctaagcctcccaaagtgctgggatgacaggcatgagccactgcacctggccagggttaaatttaagaactgtttactacatgtaatattaccacaaacagggtaagtctcttgactgtgtttgcatgccaaaaacacctgctactttgatcgtgtattggtccccttttttgttcctttccttatttcattccttcattaagcatatattgtatgccaggtactgttcagctggccaaatagaactggggagtactggtctcaatgttgtaggctgcttactcacgtatgagtagctcactgtaagtaggacttacatataagttgtttagggactggtagtatgttgctgtgagccaggctctgcaagttggctggatgacttataggtgggatgtttgtttttgtttttttctttttttttttgagatggagtcttgctctgtcacccatgctggagtgcagtggggtgatcttggctcactgcaacctccgcctcccgggttcaagtgattcttctgtctcagcctcctgagtagctgggactacaggcgcacaccaccatgcccagctaatttttgtatttttagtagagacagggtttcaccatattgaccaggctggtgtcaaactcctgacctcgtgatccgcccaccttggcctcccaaagttctgggtttacaggcgcgaacgaaccaccacgcctggtgatctttggtttttagcagcagatgttggttcttccttttttggtattaacatgatattactgttttctttgctagcagagtccaattattttttatagttctgccaagttttatagtaaccctttttagagatccatgatcacctcatctcctttaagtatgggtgaatgaacaagaaagaacagagttcactgattgtgatctgcaacagtgaaaactgggtggtgatagagattgagaaagaatttaaaagcttttaaaaatcaaaagaggccgaggcaggtggatcacctgaggtcagagtttgagaacagcctggccaacatgatgaaaccctgtctctactaaaaaacacaaaaattagctgggcgtagtggcgggcacctgtaatcccagctacttgggaggctgaggcaagaaaatcgcttgaacacaggaggcggaggttgcagtgagctgagattgtgctattgcactccagcctgggtggcaagagcaaaactccgtctcaaaaaaaaagaagaaaaaaatcaaggccaggcgcggtggctcacgcctgtaatcccaacactttgggaggccgaggcggctggatcacgaggtcaggagatcgagaccatggtgaagccccatctctactaaaaatacaaaaaaaattagccgggcgcggtggcgggcacctgtagtcccagctactctggaggctgaggtaggagaatggcgtgaacctgggaggtggagcttgcagtgagccgagatcgtgccactgcactccagcctgggtgacagagcaagactccgacttaaaaaaaaaaaaaaaagtcaaaagaaaacaacacttagcaaacagataaagttcttgaatgaaaggtttagaggctgggcgtggtggctcatacctgtaatcccagcactttgggaggccgaggtgggcagatcacctgaggtccggagttcgagaccagcctggccaacatggcgaaacctcatctctactaaaaaaatacaaaaattaggccaggtgcagtggctcacacttgtaattccagcactttgggaggctgaggtgggtagattacctgaggtcaggagttcaagaccaacctggccagcatggtgaaaccctgtctctactaaaaatacaaaaaattagctgggcatggtggcaggcgcctgtagtcccagctacttgggaggctgaggcaggagattcgcttgagcctaggaggcggaggttgtcatgagctgaaatcacaccatcgcactccagcctgcacgacaagagcgaaactcttgtctcaaaaaaaaaaaaaaaaaaaaaaaattagccggatgtggtggcacacacctgtagtcccagctcctggggaggctgaggcaagacagtcacttgaacccgttaggtggaggttgcagtgagccaagattgtgccactgcactccagcctgggcaacagagcaagactccatctcaggaaaaaaaaaaaaaaggaaagaaaggtttagaaacttagataatattaccaaaagtataggcaaacaaaagttaatcttgagctttgcataacagttttttgttttgttttgttttgttttttgataaggagtttccctcttgtcgcccaggctggagtgcagtggcgcaatctcggctcactgcaaccttcccctcccgggttcaagtgattctcctgcatcagcctccccaatagctgggattacagaaatgcaccaccatgcctggctgattttgtatttttagtagagacagggtttcaccatgttgcccaggctggtctcaaactcctgacctcaggtagatccacccacctcagcctcccaaagtgttgggattacaggcatgagccaacacgccaggcctcctgggttcaagcgattcccttgcctcagcctcccaagttgctgggactacaggcatacgccaccacacccagctaattttttatattttagtagagatggggtttcaccatgttggccaggatggtctcaatctcctgaccttgtgatctgcccgccttggcctcccaaactgctgggattacaggcgtgagccactgtgcccagcccaggttcacttttcctttggtcacagactcacaaacgttggtttagtgacttctggttagagaagatgtcctatttcagtacttaaaatgcaagtttctttcaagcaaggaggtaaatatgtaataaagtgagttatttcatcaaggggtaaatgagctcccaccctagctttagcactctattttgtaaaagaaactcaacaaattgttaaaaccctcaaagaagtccatttaaggcagtgtaatgttttatttaagagaaagtttgccaagtgagttaacctctagtaactattatcttgaatgtgtgtgtataaattgagtcacacaaagattagagcttttaacaaaggggatgttttagaactggcattggaacttggcagtctatgcctgctttgtctgcttctagagatgggaaagagctaatggtgtgtggtattcacaggatgaaagtttccttgtaatcttttttgaattttgttttgtaggggggtacgttaaaagcagtaaaatcttccaaaggaaagaagaagagagaaagcatagaggggaaagatggccggaggaggaaaagtgcttcggactctgggtgtgaccctgcatcaaagaaattaaaa

SEQ ID NO: 9602 - DNA, 274 bp, Homo sapiens
gctcacacctgtaatcccagcactttgggaggccaaggcgggcggatcacaaggtcaggagatcaagaccatcctggctaacacggtgaaaccccatctctactaaaaatacaaaaaattagccgggcgtggcggcgtgcacctgtagtcccagctactcgggaggctgaggcaggaggatggcgtgaacctgggaggtggagcttgcagtgagccgagattgtgccactgcactccagcctgggcgacagagcaagactatgtctcaaaaaaa

SEQ ID NO: 9603 - DNA, 489 bp, Homo sapiens
agatgaatttttaattgtcagcaacaatctaattagtcctgaccagagcctgttctttctttcagcctatttgcttttgccttcagggttagtagctggcaactaatatccactagaactgaatcacccgaattatcatagggctgagctaatatcctgctgtagatgctatcataggcagaaagaaaattgaaaggcaagttctaccatggcctggctgtaagcagccactgttaggtccagactccatgctttaaagttagcctcagagattcctggaaatttttacttaggctaaactagggaccccccaaaggtgtcccagttatttttagtatccctttgttgcaagatagtataggatatggggcaaaactagatctcatgctttcagtagttaataaccttaacagttgtcatttatttaaggcctgtgctgaatgctttatatagtttttctcatttattccccaaaacaattattgtaaa

SEQ ID NO: 9604 - DNA, 489 bp, Homo sapiens
agatgaatttttaattgtcagcaacaatctaattagtcctgaccagagcctgttctttctttcagcctatttgcttttgccttcagggttagtagctggcaactaatatccactagaactgaatcacccgaattatcatagggctgagctaatatcctgctgtagatgctatcataggcagaaagaaaattgaaaggcaagttctaccatggcctggctgtaagcagccactgttaggtccagactccatgctttaaagttagcctcaagattcctggaaatttttacttaggctaaactagggaccccccaaaaggtgtcccagttatttttagtatccctttgttgcaagatagtataggatatggggcaaaactagatctcatgctttcagtagttaataaccttaacagttgtcatttatttaaggcctgtgctgaatgctttatatagtttttctcatttattccccaaaacaattattgtaaa

SEQ ID NO: 9605 - DNA, 489 bp, Homo sapiens; identical to SEQ ID NO: 9604

SEQ ID NO: 9606 - DNA, 489 bp, Homo sapiens; identical to SEQ ID NO: 9604

SEQ ID NO: 9607 - DNA, 331 bp, Homo sapiens
agctaaaacagattcaaaccttgaagcagatgaacgagcaactgcaggctgagaacagggccctgacccgagtggtggccagactctcggagtccatcgagtcctcggacacccaggagctctagttcttgcccctactctccaactcacttccctcctccactactccaggcaggttcagtcttcttgttagtcccagaagctctgtgctcatcccctccatccgagcctccatatgcaggttcctgcaaagcttggttatctgcagatggaagcagccaggactgagatcatagaatgggacataccagcctaggtcaagggaggcagt

SEQ ID NO: 9608 - DNA, 331 bp, Homo sapiens; identical to SEQ ID NO: 9607

SEQ ID NO: 9609 - DNA, 331 bp, Homo sapiens; identical to SEQ ID NO: 9607

SEQ ID NO: 9610 - DNA, 331 bp, Homo sapiens; identical to SEQ ID NO: 9607

SEQ ID NO: 9611 - DNA, 3589 bp, Homo sapiens
atgctaatgagttgacttatggctgacatcccctagtttcagaatggagggctggtcacctgaaagaccaaggcccgattaaagggttgggacttttcagccctacccctaattcctggtaccaattgtctatcttagtccattttctgttacttatagcagaataactgaaacaggggcctttatgaagaaaaggaattcatttcttacacctttgaaggtgcacctggttgagagggagggggtgaggttaagttgatcaccaatagccaatggtttaattaatcagatctgtgcaatgaagcctccataaaaccggaaaggatagagtttagaaggcttttcaggttgctgagcaggtggaggttcctagagggtggcgtacccagggagggcatggaaatgctgtgccccttctcatgtgaccttgccttctacatctcttgaactgaatccttggtaatatactttataataaactgataaggtgtttccctgagttctgtgagctgctctaacacgacaaaccaaaggagcgggacatgggaatcccagtttacagctggtcggtcggaagcacaggtaaaataacctgggacttggtgttggcatcagaagtggggggcagtctcggctgggcgcagtggctcacgcctgtaatcccagcactttgggaggccgaggtgggtggatcacgaggtcaggagatcgagaccatcctggctaacatggtgaaaccctgtctctactaaaaatacaaaaaattagccaggcgtggtggtgggcacccggtagttccagctactcaggaggctgaggcaggagaatggcgtgaacctgggaggcggagctcgcagtgagccaagatggtgccactgcactccagcctgggtgacagagtgagactcagcctcaaaaaaaaaaaaaaaaaaaagtgggggcagtcttgcaggactgagccctaaactgatgagatctgacactatcttcatatagatagtcttggaattaaaatgaattagaggacacccacctggtgtgtacactgcagaactgattgcttgttatgtggggtgagacacccacacatctggtgtcagaagtgtgagaaagtttattcctacattctcagaattgtttatataaaaatgttattttttatataattacatttacctctaatgttttactttttgtttttatgtctcgtctttttattcctttcttattccttagtggggtttattttgcataaatgagtattttctaatgtagcattttaatttctctttgttttttctgtttttaatttctttaacgatattttcactgtattttttgtaacttcatggaagcacaaattctttttaaaagtattttttatattaaactatcagtgatggaggctggcagagatcttggggcgagaatttattctctcagagaaatggtagtgatggaccatggaaacttgtctatggtaatctgtgttagaatatattcttgaaagttctaagaatacattatatccacaagtagattatgccatcctagagactgcagctgacccttgaacaatgtgagtttgacccatgtggatccacatacacatggatttgacttttttttttttaagagatgaggtcactctctgttgcccaggctggagtgcagtgtacagtcatagcacattacagcctcaaacatctgggctcaaacagtcctcccatctctgcctcctgagtatctgggactgcatccacacactaccttgtctggctacacttggagtttcttctgcatctgccactctactgccaccctaagtcgtaatccctatgttgttcaagggtcgattgtattttcctttcacagtctatttgtgtagctagtaggcaatcttccaaaaacttcaatttaggtcgttccggagtgcttttcgagttttcagttttcttctatgccagtgaaggagagggatggaggaaaaaaaaaaaaccaaattaacataaagatagtttcccttcctacccatatgctctgtattaattgctagggctgtgtttgagataggaaaaccaaaacttcttcacacaactgaccacttcatctctggtcaccagaatgtatttggatttcttcccatccgcaaactgttttccagctgacaacaactgggtgtcctacaattcaattacatgttggcatcatctacctggagaaagcttcagatcccacaggttgaggactcagtcccacaagactgcccctgacttcgccagacctgtacttttgaccaacctgttacaaagaggggattgtcaagactccctccgtggatttgattaatttgctagagctcacagaactcagggaaatagtttacttattataaagcctattagatgaagagccaggtggaagagatgcatgggggaatgcatatgtgagcgcttccatgccctctccaggtgctgccccaccctacggtcacctctatgttaccagacactcctgttactcaggagattacaaaggtctcaggagctctgtgtcaggaaccgggttcaaagaccacgtattagtgcaaaagattgtataccccaatctacaagagttttaggtgccccgtgtctggaatcatgggcagagaccaagtatgtatttcttatcgtgggctactatgacagtaatgccacagactgggtggagaaatttatttctcccagttccggcggctagaagtccagggtcaatatgtttgatttctgttctcttgaagcttctctctcagtggcttgcaggtgactgtcttcttgctgtgtcctaacgtggtccttcctctgtgggccgacatcgctggtgtccctcttcctatgggggatactagtcggattagagccccactctaatgacctcacttaaccaattatctccttaaaggccctatctccaaatacactgagggtcagggctttcacttatgaattttggggagggtacaattcagttcatgagactctctcctccaagttgacgtaaaagccaggggacagtgagggggacgggcagttatgaagcatcattaattctccttagaagtgctgcttttcttctgtcagtgaacactgtgacccattctgcttccaaccttgtggactagtcaaagtagtgagaggaacagagtcctaacgcctgagagttgtaaaatgagtgtcagcatgtggtggctgccttttttttttttttttaacggatagactttattttctagaagagttttaggtttaaagaaaattgaggtcaggcatggtggttcacgcctgtaatcccagcactttgggaggccaaggcaggcagatcatgaggtcaggagtttgagaccatcttggccaacatggtgaaaccccatctctagcaaaaatataaaaaatgagtcaggcatggtggcgcgcgcctgtagtcccagctactcgggaggctgaggcaggagaattgcttgaacccgggaggtggaggttgcagatcgtgccactgcactccagcctgggcgacagagcgagactccatctgaaaaaaaaagaaaaag

SEQ ID NO: 9612 - DNA, 6198 bp, Homo sapiens
gggaaagcctttaagcagtcctcaactcttactaagcattaaatattggccgggtgcggtggcttatgcaaaatggctcccagcattttgggaggctgaggtgggtggatcacaaggtcaagagatcgagaccatcctggccaacatggtgaaaccctgtctctactaaaaatacaaaaattatctgggtgtggtggcacgtgcctgtattcccatctactcgggaggcttaggcaggataatcacttgaacctgggaggtggaagttgcagtgagccaagattgtaccactgcactccagtttggcaacagagtgagactccgtctcaaaaaaaatttatactgtacaaaaaccccacaagtgtgaaaaacatggcaaagccttttaagaagccctcaattcttaacagacataagataatttatactggagagaaactctacaaatcagaaagatgtgactacttttgacaacgcctcaaacttttctaaccataaaagtaattatactggtgagaaatcctagaaatctgaagagtgagataaagcctttaaatggttgtcacacttcattgtaggtaagataattcatactggagaaaacgcctacatgtgtgaacaatatggcaaaacttaatgctcacactttattgctaggaaagcatttatacttgagataaattatacaaatataaagactgtgaaaaagccatcattatctgctcacattttactcaacaccagagagttcctgcttaataaaagcattataagtgcaattactgtcaaaagatctttcagaaaatataagcttttttagtgaagagtatttattttgaagttgaacatcacaaatataaaaagggttgtagtgcctttacttgtatcacagatctttttgtagacattttcttctagaggaaaactctgaagcagttgatcaaactttgttcaacatcagggaatttatattgaaaaattgtgcaaatataataaatttggaaaaacaatttttcaaaaactacagcttagaaatcaacagttatactagaatatattttttccagatgcagtaaaagtaaaatatttaatccataattaagtctatgcaaatatcagagaatttatggtagaaatatataaggtactgacacttcagatatactaaatcagagtgctaagtatagaaaatctgaaactaaagttggtagaaaagttatttgtatagaactttaagaggatcagaaggttttttgcagagttataattacattcaaagtatactttatttcttgaaaaatattacagattttttgaaaattgaataatgtcatcattcaactctgaaattatttcctgttgtttcttcattcctattggattcacatgtgaaagcatggggttaattgttgctacatcaaagagagagattcttttgtttgtttgttcgtttgttttttgagactgagtttcactctttcgcccaggctggagtgcattggcatgatctcagctcactacaacctctgccttctggtttcaagcaactcttctgcctcagcatcccaagtagctgggataacaggtgccagccaccatgcccagctaatttgtgtatttctagtagagatggggtttcaccatattggccaagctggtcttgaactcctgacctcatgtgatccgcccgcctcagcctcccaaagtgctgggattacaggcttgagccaccacgcccagcctgtagcatattttaataggagaatacaatatataatagtagcagggttaagtaaggcatccatcatctgtagcatttctcctttgttttacaaacaatccaattctacactttaaaaaaaaatttttaaatgtacaattaaatttttatttaccacagtgttatttttatcgtcataataaaaattatatacgagtataaatgaaattcatttctaaattcttaataaatattttctcatgccaggtgtggtggctcacgtctgtaatcccagcactttgacaggctgagcgagggagtggatcttgaggtcagcagttcgagaccagcatggccaatatggagaaatcccgtctctactaaaaatacaaaaattagccaggcgtggtggcatgtgcctgtaatcccagctactcaggaggctgaggcaggagaatcgcttgaacctgggaggtggaggttgcaatgagccaagatcaccccactgcactccagcctgggcaacagagcgagactccatctcaaaaagtaaaatatattttcaaattttctatatatttttctttgaacatgtggcctgtctgcctgcaaacatatacagacttttagttttgattcatatagagttaaatacatgttagtctaaagacaaatcttaggtgtaagaaaattatggagttaagtatgtgtgtgtgagtatgagtttgtacatattttcagaaggaaagaatgatacgggaacaaaaatcattttaatatggtgactactataaaactaaaaacctaaaaaatgctgaaagcaaatgtatactttttggtttgtattgaatttattactgtacagtctatgacttagagttctgaatcttcccaagcaaattctctgtatatacttgcctggtactcatgctagacccatactttttttgtttcttacattttttttgttttatattttatgaagtattcattatgtgagctggtctgcgattataagaatttttatgaaatttagtgcacacaaaataatctttagatgtaattccaaaagtagtgtattaagttacattttatttagttagagcactccattttgttcttttaagaggagaacaatatataggttttctttagtgatttgttcctttcactttttataattgacataagcatatttattgagtcaatttgttcagctaagtactagggaggcttcattagtcatgaggatgtttttatatataaatgtagcaaacatatattacagttttcactgtgtaatagattatccataataattcataaatattcctgctgaagttagtttgtaacttcaagtcaaagatgaaaaatatcaatggtgaagattgattgttcatatagagaggacattttttttccagactgtaaaactgaatcttgttgaatttaaagagaaattctggcagaggcagatgaatcacctgaggtcaggagtttgagaccagcctgatgaatatggtgaaacccagtctctactaaaactacaaaaatagccaggcatggtggtgggtgcctgtaatcccactcgggaggctgagtcaggagaattgcttgaacccggaggtgaagattggagtaagccaagattgtgccgttgcactacagcctgggcgacagagcgagactccatataaaaaaaaaaaaaaaaaaaagctgggcgtggtggctcacgcctgtaatcccagcactttgggaggccaaggtgggcgaatcacttgaggtcgggagtttgagaccaggtgaccaacatggagaaactccatctctactaaaaaatacaaaattagcccggtgtggtggcgcatgcctgtaatcccagctactcgggagactgaggcaggagaatcgcttgaacacgacaggtggaggttgcagtgtggcgagattgcaccattgcactccagtctgggcgacaagagggaaactccatctgaaaaaaaagagaaattcttttattttctacttctcttcagatttgtcttatgcattttccaactatgtatgcatcacagctattctttttctgagttatagctacagttttcttactgttgtcttcatgccatttcatttcacatggtactttgtagattttgatgaggaagttggtatttttagtgcacacaaaaattggttttaactgtagagtttgcttatcagaacagttaaaaggcagccaggtgtggctcacgcctgtaatcccagcactgagataggccaaggagggtggatcacttgaggtcaggagtttgagaccagcctgaccaacatggtgaaaccctgtgtctactaaaaatacaaatttagccacgcgtggtgacgcacgcctgtaatcccagctactcggaaggccgagggagcagaatcgcttgaacctgggaggtagaggttgtggtgagccgagactgggccactgcacttcagcctgggcaacaagagcgaaattctgtctaaaaaaaaaaaaaaaagataaaaggtgcaatactgtccacaggtaagataattaaattagtcagctttgtttttaaaagaaaaatcttactagattcttatacaaagtgtggcaaatataaaacttgcttgaaaatacagaaattaaatttttaagagagttaatggtaagtaaacaattttaaagttaattttctatgatatacttacagcacaacttatatttccatgcagaatcttttatttttaagtgtgagtgttaaaggttacaaaataatgaaatgacttcagtggatttaaaattttgaaaaataatgtcttttctatattgattttacaatttggagaaatttttcactcattttttatatattttttagtgggagaggtttagtctacagtttttatttttagtcaccaaactgtagccaactcttgggtcattttctctgaaaaacatttggagatcatgacagcgtttggattaaaacatttctgttactttgcatgcaaactagtttactgtgttcacagagtggccagtcatgggaccataagcaacacctgctctttgagtgtctttcataccgttaccatcagcaccagaaactccaggtgccccaagcttaaagtaaaaatcctaaagtacgttggctcctcccatgcaatgtgctgggtccaaaccatgctgttaaatatcagaagtttctatggttatgattaaaaaattaaatgacaataatagccccaaaactatatatttttgatactatttaaccaagattatcacaaagacacagtatttgacacattgttattcttctatgttttataaatattttaatgtgacaggtagaatctgtactttttctgtagaacgtaatattttgaagtatatatatagttaaattattatttctaggtaattaataatttatctcacattggtcagacatgatggctcatgcttgtaatcccagcaatttgggaggccgaggcaggcagatcacatgaggtcaggagttcgggaccagcctggcgaccatggggaaaccctgtctctactaaaaatacaaaataagcagcgtgtggtgacacatgcctgtaatccagctaccctggaggctaaggcaggaaaatggctcaaatctgggaggtggttgttgcagggagccgagattgcaccactgcactccagactgggggacagagtgactatcaaaaaaaaaaaaaactttacctcatatggtgaacatttttgttttgagaccacatgacactgtcatcatttttcaaaaatccaaatacattattatgaactatagtcaccatgttgtacaataaatctcttgaacttatttcttccatttgactataattatgtattatttcacaaacatgtttccagccttccatttcttataaataacttgcatctgatggtcaccattttactctctacatcaatgggattaagttttttggaatccatgtgtaagtgaaattatgagacactaatctttctgtgccttgcttatcccaactaatacaatgtcctccaacttcatccatgtgattgagaataatagtttttgttttttttttaaggccaggagtggtggctcacacctgtaatcccagctctgggaggccaaggccagtggattgcttgagcccaggagtttgagaccagcctggacaacgtggaaaaaccccatctctactaaaaatacaaaaacaacaaaacaaaaacaaaaaacacctcagctgggtgtggtggtgcaggcctgtaatctcagctactccagaggctgaggcatgagaatcccttgaaccacagatgcagaggttgcagtgaactgagatcatgccactgcactccatcctgggcaacagagtgagactcggtctcaagagggaaaataaggcatttttctcatttaaataataaatagtattccatt

SEQ ID NO: 9613 - DNA, 32216 bp, Homo sapiens
cagccaccttttagtttttttctggtcgtgggtttcagtgctgtctggggatgaactaagatatccaccgtggttatgtcagctaaagtgcctagtgaatatcagcttctggtttattttcttccataggacgacttgaaatatggagtgtatcctctcaaggaagcaagtggatgccctggggctgagaggaatcttctagtttactcttattttgaaaaggtaacctcttgagacattaaaattgtctacgcccaacccagctttcatttcttggggacacattgctggtcagccagtccgatgctggcactgatgggaaaacacagaaataatgtatgccccctggattgtcttagggggcagaaagataatgaaataaatatagtggaagaaaaatagtgttaaaaagtgaaaaatttgtgacagataaaatagtatcccaaaagaccagaaaaaaacaaaaacaaaaacaaaaaaacctgactctagtgagatggtgtaagaacttgcaaagtaaaatgcacctggagcagtcaccgagaaatactgcagtgtctcctgtatgggtggttcatgagcacataagtgagcaggagtgggtggaagaatctcccaagtgattgaatggcctgacttgaaacatgagtcagacacacatttgttttttaatcagcactgccactccctgggtttgtcaccttgaaaatatttgtttacttattttgacctcacttttttagctgtaaattgcattatattagtagggcttgaaaggtaggaatttttttttttttttgaaacaagtttcactcttgctgcccaggctgcagaaggattgatcttggctcactacaacctctgtctcccaggttcaagcaattctcctacctcagcctcctaagtagctgagattacaggcacacaccaccacacccagctaattttttgtatttttttttagtagagacagggtttcatcatgttggccaggctggtctcgaactcctgacctcagatgatctgcctgcctcagcctcctaaagtgctgggattgcaggcatgagccactgtgcctggcaggtaggaaaatatttacaaagggcataaaagaggtgggttttagaaaaaaaattaatatctaattatgtatcccatttgttaaaaattctcatttacctttttctttcccagagtgagtttacaagtttcctcaggtgtgttttttttatggctgggtgcattcaaacagaattccaaggcttagcttttagaatgctagctaccaaggaaaagaatagggaaaaatctctattcattctggctgtacagaatgaatacatttccatgagataatgtggtagataattggtgagttacatagattcatgaaaacatcagttgctctttttgcagggtgaatttgtgactaaatatctctgttcaaatcctgttatcttgatttctgagtttcatgctacattttatgagatgaaacttggtatcacctagaagtattcccatataactgtttactacatggtttttaatgaaaacaataaaataatagatatgttgtctgaaaggaatggatacttttgcttctcttatttaggtacaaaatgtaagtacctttgagtaattttgctggatttttcaaacacatagtttcgaaaaccaagtgagtaactctaacatggaaattaaagcttgagcccagtgactaagagctaaggctaatattgagcctacaaaaggaggttatgaaaggcccacctatgcggtggctcatgcctgtaatcccagcactttgggaggccaaggtgggtggatcacgaggtcaggagatcgagaccatcctggctaacacggtgaaagcccgtctctactaaaaatacaaaaaaattagccaggcgtagtggtgggcgcctgtagtcccagcttactcgggaggctgaggcaggagaatggcatgaacccgagaggcggagcttacagtgagccaagatcgcgccactgcactccagcctgggcgacagagcgagactccatctcaaaaagaaacaaagaaacaaataaaagcccagctagtttttttctggggatcctcccctgcagatgtcccagtctgctcaacccagccatggaagaagcctttctgctgacacagccctggaaagctggggacccacaggcaaatgcagttaggattaagatgaaaggggactgagaggatcttactgatgatgttgttattgttttgaggcagtttctaggctttggaatatcaaagttagatttatgtaaaaaaaaattccgaaagagtattgcaacaggaagaagtaccaattataaaaactgtaagtattggaaagtttaggctgacaagggctttctttcctagggaggagcaaacaggattagaaagaaggtgggaggggaatggcaaatgaaccgtgaaaaatcagattttagatcagagaatgttttaccatgaagtcagcatgttcttagacgagacataaaataaggttgtatgttgaatcagactgaggatagttcaaagttctggagcctgtgaaaaattttatttagaccactgaagacaaatgcagctgattcttttaattggaaaaataagaaaatgtgcagagttctaccagaaagaggtcccaatccaagccccaaaagagggttcttggattttgctcaagaaaaaattcagggtgagtccatacagtaaagtaaaaggaagtattaagaaaatatcacaaggtcaggagtttgagaccagcctgatcaacatggtgaaaccccgtctctactaaaaacataaaaattagccaggcttggtggtgcacacctgtaatcccagctactcaggagactgaggcaaaagaatcacttgaacccaggaggcagaggttgtagtgagccgagaccgtgccactgcactccagcctgggtgacagagtgacactctgtctgaaaaaaaaaaaaaaaaaagaagaagaaagaaagtaaaggaataaaagaatggcttactccataggcagagcagcccaagggttgctgtttgcacatttttatggttatttcttgattatatgctaaacaagggatggattatttatgcctcccaattttagacaatataggatagcttcctaatgtttccatatttgtaagctgtcatgacacttgtgggagtgtagcagtgagggcaatcagaggtcactctcgtcacatcttggttttggtaggttttatttgacttctttattgcaacctgttttgtccacaaggtctttatgacttgtatcttgtgctgaccttctttcctaccctgttacttagaatgcctaaccatccaggaatgcagcccagtcagtctcagtcctattttacccagcccctattcaaaatagatgtgctctggttcctctgacatctcccccatctttttcacaagggcacacttaatcctgagggttgtagagggatgaagatccattttctgtaactacttcatgctgaataggggtgatgatatttttgcctaactattcagttttcttgaccctgaaacaaaggatcagtgacattttatgtgaagtcaaaaagtattactttcatcttccattagttcagtcccttcagttaattcctgttctgtttgattgtcatgaacattccagttctccatgtatactgaatgttttttctctattctaatgtcacaatttctaaagttatcacaaacttgcatttaagaacatctgttgctgggcacagtggctcctgcctgtaatctcagccctttgggaggccaaggcaggtggattatctgacgtcaggagttcaagaccagcctgatcaacatggtgaaaccctgtctctactaaaaatacaaaaaaaatagctggatgtgctggtggacgcctgtaatcccagcctagttgggaggctgaggcaagagaattactcgaacctgggaggcagaggttgcagtgagctgagattgcatcattacactccagctccagcctgggcaacagagtaagactccatctcaaaagaaaaaaaaaatagaacatctgtcaaagttaactataaatcatcttttgaagagtaccaacacaagatgattgtctggatggcaaagtcttagggcagtcacagtgaaaaaaaaaaaaaaccatgattgacaaggaaatttggttagctctgtgtcatataataattttatgtaacgattgtgattattaatgatgttttaccatgaagtcagcatgttcttagaagagacataaaataaggttgcatgttgactcagactgaggatagttatattatcatattagttacattagtcatattagaattacaggagtttcccttaattttggaacacataccaataacatatttacacaaatatagtccaaaaatagtcaaacatgatttcacagttgacagccttttctgtgtgattttaatactaaatgagccaaatttttactattttatatttgtgtatgatttatgtcaaacccaattcttagtgaattttttttaatttttttttttttgagacagagtctcgccccgttgcctaggctggagtgctatggcaggatctcagctcactggaacctctgcctcctgggttcaagtgattctcctgcctcagcctcttgagtagctggattacaggtgcacaccaccatacctggctaatttttttgtatctttagtagagactggttttcatcatgttggccaggctggtctcgaactcctgaccttgtgatcggcccgccttggcctcccaaagtgctgagattacagacatgagccaccatgcccggcctcttaatgaatctttatagacaaatctatccaattttaatgtttgaccataaggtagtattctcataaaccttttataactcttcacaaagtccttgttgttagagtagatcagtgctttaagagaagtctgtcatttttatctcaatgttcaatttctagaaaaaataatacctatttaactttagtcagtatgttgacacacagaatctcttttgcaattaaattttagcaaatcttccacaatttgtttaaaccttcagttttattctatctaatctaaaacattcctttaaccttttaatctaggcaaaaaaatccacatttccatgtcttcttatataaccttttatcaaaaacatatttcactttctctgaattccttgcatgtaaaactgttttttagtagtcaaaattagatgttacaatgttaactcttagcaacttttacttttgatgaaaaccttggtaagtaaggaattttaattacatactaggagtgaagtctaggacacagacacaagtgtatataaggtctgactccagtgtattaatagttagggggtgtggctaacttgatgtgtcccaggccttacttagctgtaaaacaggcaagttgtacagtgaacagtcatagtggcattttgagaagtcttaatttaagaggcctaatgacctttaaattgtacaacatttcttgcataaatttccttcagtgaattatttcatgacttatacagaccatctacaatatgtttgggctttctgatttgtcctaaacatccctctttttaaataaccagtcattttactttaggataagaatttactatacaacatcttttcttatataaagtctcttttctttataacctttgtatatgtaggggacatggctaattccatatgtctcaaggccttatttagaatctactggcttcaagataggtaaattgaacaatttttaaaagtcaaagagccaatttatgaccttgaaatatttggtaaatctaatatgtgacctatataacttagatcaaatgtttatattttgaagactttttattttcccaatgatctttaaaactgtttttatttccaaaagattacttgtcacatgaactaaaaggtgttacacttttaacttttctgacaaaatatttgatttacgctcttactatttttaaaccaattaatcagagttctttcatatcacacacacaacacatgtaaatacaaagacagaagattcagtagttgtaaggtttttctttgtcaatttctttcttttttttgaaggaaagtttgtattattttaattatttttatgtatagaaaactcaacagtgtacatttaacccagtttagtggcaagttctttagtctttgcctttttgagcttggcgatctgagccacagacttgagacccagggccttccctccccagtgatggcggatctcatcctgtcattgtagttggtcctgatagcttcccccagcttagccaaagcacctttgtcttctgagttaacctgtgtgaagacgacagtggtgcaggtcttcctgtggactagacgtcctagtcttaccttccccttgataatgcagtaagggactccccttttatgacacagggcaggcaagaagacaaccagcttgatgggatccacatcatgcgcaatcaccaccagctgaactttctttttctccaccaaggtggtgacagtgttaattcctgctcgaaggacacgtggtctcttaataaggatgtcccctttgtcagcagctttcttctcggcccgggccaacagcctctgcttctcctcttgctttgtctctggtctgtacttgtaggctagcttaagcagctgagtagctgtttggtggtccaggccctgggtgaactggttaatcacagaaaaacactttcagccgcctatagaggatggctctttgctgctgcaacctgatatagtggggccatttcgggtgaggtcccttttgggctggatgtcctgcccagtgccacaattcttaggccttttctcaaacaggaaattcaccactttcttggcctcctgcttcttcacaacagcaggggttggagccaccttcttcccctaggccttctttccttttggcatcttgggtcgggggaggagagcttctttgtcagtttcttaactggattactagtttcagcgtggagcccagggccaggaaagcatgtcgtttttatggcctaaaaagtaaacagagctggaaaacaaaacagatcctcctaaattaagggtaccatttttaaatcagatcttggatctaaaaaggagagaattagttaatcccaagggaagtcttatttctcagtaggggttggggatacctccatatttcctaggtggtcaagattatgtttctctgatccaaatatgaagaactgagtatttccccataattgccattagccattccaaaagtatagttctcacctagttattacatgccaagtttcttttataatgtgaagtaatttctgataccccccaaagtcaaaaacatcagataacgcattgcaaaacgaacagaaccttagattttgagaaggctctatccaccttcaatttttggagtttcatgaggaaaaagtgtttctcaaaagagggcctgcggcacctcttctgtttttcccaaggtgtcccaggctgttagagcttgaatatctgctgtacttaagctgacttttaaccacagtgctttttttttctttttttttttggaatggagtctcgctctgtcgcccaggctggaatgcagtggcgctcgctatcttggctcactgtaatatctgcctcccaggttcaagtgattctcgtgcctcagcctcctgagttgctgggactacaggcgagtaccaccacaccaggctaattttttgtatttttagtacagatggggtttcaccatgttaaccagaatggttctatctcctgaccttgtgatcagcccaccttggactcctaaagtgctgggattacaggtgtgagccaatgaccacagtgatcagtgctcttttaaaaagtccttttaaatttcttattaccagactttattcaggtcaaacagccaatatctctggcttttgaattttaccaaaagtaacttcacaggtgttctgaaaagaaaattcaaggtggttcctggaggggaagagaatcaacaaatggtaaagctcacccaaatatcaaataagaaagtactcattccctaagccgggaattgaatcctgaacctgggccaccattatgatggtggagaccaagagaaaatactgtcatgtggtcacaaggtggagcttccaaggccatgactgagcacttttctgagccatcttgaacagcagccttaaggggtcctaggcctgcattctatcctaaggtacccctcttaatgacagaagaatacagaaagacaaatttattagctcaaagtacaacagatttgttacagcttaagactaacctcacaaatgcattcccatattaattagaactttacatagaagataaacagtattttttttcaccattcattcaatcagtttgcatagagaggctagaagtctcgtcagaaatttgtacacttttgccagcatgccaggcttctgggttccatttccccgagtggccctagtgatgtggctggctgcaccacagccccgtgggccaagccacaacaaaaagaaaaattatctttttctggccagatcaaaatatatgtgacaacatagaccttagccactcttcttaacaaccaatatgaaactggcaagacttaaacttggccccagttgggccctgtcattgttaattcaacttaataatcaggagttttatcttttggtctctaggcaagatggttactctgagtaatataaaataagaaagagaaaagagagaaaaagcattgtctgtggcagggtaggaaggcaaagagctgaggggtccagagaaagacctactcattgcagcgataataaaaagttcaggtggccgcttcttggtaggaaagagatttttttcccaacagtcccattaacacttaagttttcccttttggacaagaaaaagatccccatgtcccatggtcctgtagatgcctaattctgtcacccatagccatcagcaaagagtgcaagacagattaatccaaaaagaatagcaatgaatgtcccatagtgtcaaaccagttcttagctgagacggattttactgagaggggtctgtaactttctgaatcttaggaaggaatataacctttctaagctcggcctcaaatccaagttcagtcaagcatccttgtcttttattaagaggagcctttaacccactgtgtcttaggagagactctaattctcctaagttgtgcctctaacccaatcccatcctttactcaggcatatgcacaccactcacccaaagtcagccgattggtgcacacagatgattttcctttgggtcagaggtctcttaagtatagtccctttgtggttaccagaaagatgttaccggaaagaagttctgatccagaccccaagagagggttcttagatctcgctcaagaaagaattgagggcgagtccgtaaagtgatagcaagttaatgaagaaagtaagtaaatagaagaatggctttctctataggcagagcagtggctgctagttgcacatttttatggttatttcttgattatatgctaaacaaggggtggaatatttatgcctctcctttttcaactattttaagataacttccagacattgccatggcatttataaactatcatagcactggtgggagtgtagcagagaggacaaccacatgtcactctcatcgccatgttaattttggtgggttttatccagcttctatactgcaaactgtgttatcagccaggtctttatgacctgtatcttatgctgacctcctatctcatcttgtgagttagaatgtctaaccatctgggaattcagcccagtgggtctcagcgttatttttactcagcctctattcaaaatagaggctgctctggttcagtacacctctgacagagtctgtgtctggctatgtgataaataagaaaagagagcaccatctaagtcataatgggaagggtgtttctttccataaactatttctagagaacacaaaggatgaagaattttattaatcacagctatttacccagattatgtatgtgcttcattgttccccacctcttttctttgtcatatacatttcttccatttgacttttcctgggttgtactttttataataaactagtaaacataactacagtgttttgctgagttctgtgagtagcttgatctaattattgaacttgaggaaggctgtgggagtccccattttttttcttttttgagacaaagtttcgctcttgttgtccagtttggagtgcagtgccgtgatcttggctcaccgcaacctctgccttccgagttcaagcgattctcctgcctcagcctccctagtagctgggattacaggcgcccaccaccatgcccgtctaattttgtatttttagtagagacggggtttcttcatgttggtcaggctggtctcaaacgcccgacctcagttgagccacctgccttggcctcccaaagtactgggattacaggcatgagccgccgcacccattgggagtccccaattttttttttattatactttaagttttatggtacatgtgcacaacgtgcaggttagttatatagtatacatgtgccatgttggtgtgctgcacccattaactcgtcatttaacattaggtatatctcctaatgctatccctcccccctccaccccacaacaggccccagtgtgtgatgttccccttcctgtgtccatgtgttctcattgttcaattcccacctgtgagtgagaacatgcggtgtttggttttttgtccttgcgatagtttgctgagaatgatggtttccaacttcatccatgtccctacaaaggacatggactcatcattttttatggctgcatagtattccatggtgtatatgtgccacattttcttaatccagtctatcattgttggacatttggcttggttccaagtctttgctattgtgaatagtgctgcaataaacatatgtgtgcatgtgtctttatagcagcatgatttataaacttttgggtatatacccagtaatgggattgctgggtcaaatggtatttctagttctagatccctgaggaatcgccacactgacttccacaatggttgaactagtttacagtcccaccaacagtgtaaaagtgttcctatttctccacatcctctccagcacctgttgtttcctgactttttaatgatcgccattctaactggtgtgagatggtatctcattgtggttttgatttgcatttctctgatggccagtgatgatgagcattttttcatgtatctgttggctgcataaatgccttcttttgagaagtgtctgttcatatcctttgcccacttgttgatggggttgtttgtttttttcttataaatttgtctgagttcattgctgattctggatattagccctttgtcagatgagtagattgcaaaaattttctcccattctgtaagttgcctgttcactctgatggtggtttcttttgctgtgcagaagctcttgagtttaattagatcccatttgtcaattttggcttttgttgccgttgcttttggtgttttagacatgaagtccttgcccatgcctatgtcctgaatgatattgcctagattttcttctagggtttttatggttttaggtctaacatttaagtctttaatccatcttgaattaatttttgtataaggtgtaaggaaaggatccagtttcagctttctacatatggttagccagttttcccagcaccatttattaaatagggaatcgtttccccatttcttgtttttgtcaggtttgtcaaagatcagatggttgtagatatgcagcattatttctgagggctctgttctgttccattggtctaggtctctgttttggtaccagtaccatgctgttttggttactgtagccttgttgtatagtttgaagtcaggtagcatgatgcctccagctttgttcttttggcttaggattgacttggcaatgtgggctcctttttggttccatatgaactttaaagtagttttttccaattctgtgaagaaagtcattggtagcttgatggggatggcattgaatctataaattaccttgcggagtccccaatttttaaacagtagctcagaagcatagatgagcctatggggtttgtcactggcatctggaatgaggacaatgttgtgggactgagatctgaatcagggtctatgctgactctgggtggtgtcagaattgaaatgttagacactgagttgctgtttgagaattgcttggtgttcagcaaactctacagatttggtggcagaaggaagatatcccagagccctgtcctggtataaaatgagtgtctgcaaatgggaggctcttctctcctgcacacaggctttcacactacctattgtcttgggatcccagggctcctgccaggattgaagaggatgaaaacttcaaggaaaggagctctgatgacagacccccttttcacaaagctgccaccacaggattcccacccacacccaaatatgcccactagacattgatgtatccacacctctcccagcactaggcaccaccctcaggaatttcactatagcattgttgattttagtgtttcttgacaaaaacccacaaaagtgtctacaagtctcctggcatatccccacatgcagacgctgaatctgccacagcaacctgttttccccaccaagctagggttctgggccacctgttcataatctcatctgcctacaggcacacagaaataaatcagagtccagccccacctgggccaccatctgtagaacaaacaactccttgcacctacattgcactcttccccacgcatggattttttttttcttttaacttttctttttggttaaggggtccatgtgcagctttgttatataggtaaaattgtgtcatgggagtttggtgtagattgttttgtcactgaggtactaagcgtaaaaccgaacaggtatttttttctgatcctttttgtcctttcgttctgcattctcaactaggcctcagtgtctgtcgttcccttctttgtgtccatgtgttattattatttagctcttataaatgatagcatgcatttggttttgtttcactttagctttctaaggataatggtctccagcatcatctatgttgctgcaaataacttaatcttgttttttttttttaatggccacataatcttccatgatgtttatgtaccgtactttgttttttattaaatcttctattttatttaattaatttatttggagactgtgtttcactctgtcacaaaggctgaagtgcagtggtgcaatcttgactcacttcagcctcaaccttccaggctcaaggcaccctcttacttcagcccccaaagtagctgggactacatccatgcaccaccatgcccagctaacttctttttctatcttttgtagagatgagttttgccatgttgcccagggtggtcttgaatgcttgagctaaggcaatccacctgcctcggcctcccaaagtgctgagattacaagtgtgaaccacctcacccaaccataccatattattttaatctagtctaccattaataggcagttaggtttgttttgttttatgtctttgtttgtttgtttgagatggagtcttactctgtcacccagactagagtgcagtggtaccgtctcacctcactgcaacctctgcctcctgggttcaagcaattctcctgcttcagcctcccatgtagctgggactgcaggcatgtgccatcacgcccggctaatttttgtatttttagtagagacagagttttgccatgggattattgtatgcagcctattattgactttctaattacagccattctgattggtgtgaggtggtatctcattgtggtctttttttgcttgttttttgcatttctctagtgattagtggtgagcatttgttgcacatgcttgttagccacgtttgtcttcttttgaaaagcatctgttcatgttttttgcctacttttttttctttttttttagacagagtcttgctctgtcccaggctggagtgtagtggtgggaccttggctcactgcaacctctgcctcctaggttcaagctattctcctgcctcagcctcccgagtagctgggattacaggtgtgcgccaccacgcctggctaatttttttggatttttttagtagagacggggtttcaccatgttggccaggtttcaaacccgaccccatgatccgcccgcctcggcctcccaaagtgctgggattacaggcgtgagccaccgcacccggccatttgtctactttttaatgaattttttttttttttttgctctgtattctgctgccttgttctgcgagtctgtttttgtaccaataccgttctgcttttgttaccgtagccctctagtgagtgtggtttgaagtggggtaatgtaatgcctccagctttgttctttttgcttaaaattgccttggcaattcaggctcattttggttccatataaattttaaaatagttattttttagttaacagcgttttggtagtttgatacaaatagcattaaattggtaaatgtctttgggcagtttggccattttaataatattgatcttttctatctgtgagcataacatgtttttttaatttgtttgtgtcatctctgacttttgttgttcttgagacagagtcttgctctgtcacccaggctggagtgcaatggtgcgatctcagcttactgcaacctctgcctccctggttcaagctattctcctgcctcagcttcccaagtagctgggattacagtcacatgccaccatgcctggctaattttttttgtattttaatggagacagggtttcaccatgttggtcaggctggtctcgaactcctgacctcatgatccgcccacctcggcctcccaaagtgctgggatacaggtgtgagctactgggcctggccatctctgacttctttaagcagtattttgtcattcttgttatagagatctttcacctccctggttagctgtattcctagatattccattctttttgtggcagttgtgaatgggattatgtttttgatttggcttttggcttggatgttgttgatgtaaacggatgccattgatttagtaccctgaaactttgctggagttgtttatcagtttaaacagctttttgctgagactgtagggttttgaagatatagaatcttgtcatctggacataaggatagtttgacttcctctcttcttttttggatgtcttttattttaatctttttcctgattgctttggccaggacttccaattctgtgttgaataggagttttgagggaaggcattcttgtcttgtgccagttttcaaggaggaatgcatccagcttgtgtccattcagtatgttggctgtaagtttgtcatagatgactcattattttgaagtatgtaccttcaatgcctagtttgttgagggttttaagcatgaaggatgttaaattatattgaaagtgtttttagcatctattgagataatcttgtgggttttgtctttagttctgtttatgtgatgaataatattcattaattgttgtatgttgaaaaaaccttgcataccagagatacagcctacttgatcacactggattaacttgatgttctcctggatttggtttgccagtattttgttgagaaagttttcttcagtgttcatcaaggatattggactgaagttttctattttttgttttatctctgccaggttttggtatcagaattctatatagaattatgatatatatatatagtatacaaaaagagtatactattctttttgttgttgttgttgttgttggaggcggagtctcactctgttgccaggctggagtgcagtggcgcgatcttggcttaccacaacctccacctcccgagctcaagtgattcgcctgcctcagcctcacgagtagctgggactacaggcctgggccaccacacccaggtaatttttgtatttctcgtaaagacgggttttcaccatgttggccaggatcgtcttgatctcttgacctcatgatctgcccacctcagcctttcaaagtgctgggattacaggcatgagccactgcacctggctgatgctattcttatataatgagttgaaaaggagtcccttttactcagtattttaaaataattttggtagaattgataccagctctttgtacatcaggtagaattcacctgcaaatttgtctggtcctgttctttttttggttattaggctatttattactaattcaattttggaacttgttggcctattcagggattctgttttgttgctgttgttattgttcagtctttggaggatgtatctttgctccaaggttgcagtcctaaacttggcccaaatgaactctctacttatattcatgttgcctcagcctttttttttttttttttaggtagacatattacttagagtatgctagaacagcctctatgaggagatttttcctttgattgtactttacttgatgtaacacccaaggatgcaagccaggttgatcccacctagaatctgcacataacatcttgcttctgcctgggattcacaagacagggccagactttggattgagaatatacagaaaaccaataggaggcattttctgcattgtgagatgtcaacatagacatctgaaaccccgctttgagaatgtggctttttaagctttttagatcttgttcaatgacctgttacagttatgtaagaggctccaggtgtaaatagagtctgatgacagaatctttaagtttaaacaagcatcttaagagtgagagatcaaggccacaaaatatccagagccatgacaaccacaactatacctacgtgtaaaatgtcatgctggagcagagtattcttgtccttcctcttacccaaaagtgaatgaatcaggataggtgatccaggttctggagctccaccagagcagttccattttctatttagaatcagcctgagtctctccatcctggcttatcagtgggccctcagccgtggatcactaagaaccgtctcacaatcacctaggcatctttgagacatttgaggatgtccagggcagaactgtgtcaggctgacaagagtgattaattctgcttctctcagtataagagaaagaagtaatcctgtgttttttactcccttcatataagaggtcactttagttggtaccaagatgagagtttctccagtttcctagtacttaggtgaaagacaaagaggaggtcttgtgactcaaataaactaattgcttccatttcatatggtcattcaaaacatagatgaaccaggtgcggtggatcatgcctgtaatcccagcactttgggaggccaaggtgggtggatcacgaggtcaaaacatcaagactatcctggccaacatggtgaaaccccatctctgctaaaaatacaaaaattagctgggcttggtggcacgtgcctgtaatcccagctactcaggaggctgaggcaggagaatctcttgaacctgggaggtggaggttgcagtgagctgagatcatgccactgaactccagcctggtgacagagcaaagttccatctctaaataaataaataaataaataaataaagcagtcatgatccctaccatccaggaacttttagtctagactagcaactgggtacatggttgaattaagtattgtatggttagtacaatgaatagatgtgtacaaaaaaacttgagctttatttgggccactttttttgtattgttgtgacttctgatatcatctgaagggatatttatggacaggagaattttattattattcgtgtttcttttaccttgctaagaatacatatatatcatctgataaaattatcctagaaaaccttgagagatttgtttaagttgcttattattatatgttataacattgaaagggcagattaaagttacataaactctgggattttagtttctcttaggtaaacttaggaaaaactgaactggaaataccccagtggcatagagaacagaattctacagagggtccagtgcctaacccaggtctgttttgtttgtttgtttgtttgtttgtctaagatggagttttgctcttgttgcgcaggctggagtgcagtggcgcaatctaggctcactacaacctccacctccctggttcaagtgattctcctgcctcatcctcccgagtagctgggattacaggcttgcaccaccatgcctggctaatttttgtatttttagtagagagaaggtttctccatgttggtaagactgatctcgaactcccgacctcaggtgattttcccacctaggcctcccaaagtgttgggattacaggcgtgagccaccgcaccaagcgttcaccccttgttttttgtttttttgttttttgcttttttcagttggagtcttgctcttgtttcccaggctggagtgtagtggtgcaacctcggctcactgcaacctctgtctcccaggttcaagtaattcttgtgcctcagcctcccaagtaactgggattacaggtgcctgtcaccacatccagctaattgtgtgtgtgtgtgtgtgtgtgtgtgtgtgtgtgtgtgtgttttcttgaaatggagtctagctctgtagctcaggctggaatgcagtggcatgatcttggcacactgcaacctccatctatgggagtcaagcgattgtcctgctgcagcctcctgagtagctgggattacaggcacctgccaccatgcccatctaatttttgtatatttagtagagacagggtttcaccatgttggacaggctggttttgaactcctgacctcaggtgccacctgcctcaccctcctgaagtgctgcgattacaggcatgagccactgtacccggcaatttttgtatcttcagtggagacagggtttcaccattttggccaggctggtcttgaactcctgacctcaggcgacttacccacctcagcctcccaaagtgctgggattataggcatgaccaccacacccgaccagattcaccctttttggagcccttatttaggtctggccccaccctggagtcttgcatcacaaagctgatttaaaaagatgagagtttttgctggtgaatcctgctgcctttctagagctggtgctcaaaatttcagaaacccaaaagcaggtaaatgagaaaaataaactgtatattttgggatcctaatttttaagttttgtgttaaaaccagtgcttacagaaatattccatttagcaacttgttttctattcctgcagatccagtagttgctccacaagtaacaaaaaagtaaatataaacacaataaaaatttctctaaactacattaaattctctcattctgtatccctcctatctgtctatatttagcttttattctatacattttatttttaaaaatgacagagaaacagatgaagaaataaaaatgctgaaccctttatctaaatcctgggaattattgaacacttagagtcaacttccagggtgttatgaggattaagtcacataatgtgttattccccacatagtgctctgtaacatactcttgagcagatagtacctgcttaataaacattgcattattacatgtttacatgttgtttttcaaatgcagaattattctgaaattgctgctttctgtttcctctgtaaactttaaagagccagcaaagaatacgaaacgtttggatggagattggttgtctccatttgtaccagaaatatttgtgttgtgacaacagagctgagtgtaagggactctgtgctgtgcccgctttctctaactactgctaataatgaacccaggggtagcaacatcagcattggcaggggacttgtttgaaatacccattcatggactttttccaaacctgcagattcacattacatagattgggaccaaaattcccaagtaatgttggttttttttgagacggagtctcgctctgtcacccaggctgaagtgtaatggcacgatctcgtctcactgcaacctctgccctctgggtttaagcgattctcctgcctcagcctcctgagtagctgggattacaggcatgcaccaccacgccagctaattttttatttttagtagagatgaggtttctccctgtttgtcaggctggtcttgaactccagacctcaggtgatccgccccactctgtgtcccaaagtgctgggattacaggcgtgagtcactgctcctgatcctattaccaagtaatttttaagctcattaaagcttgagaggcagtgcttatcagcccacttctctcattaggattacacggtgaaatcctgactctactaaaaatacaaaaattagctgggtgtggtggtgtgtgtctgtaatcccagctactcaggaggctgaggcaggagaatcgcttgaacctgggaggcggatgttgcagtgagctgagattgcaccattacactcgagcctggtaagagcgtgaaactccatctcaaaaaaaaaaaaaaaattgcagaaatctctttacttgtgccctttccacagtttctatttattgttctgggtggaagcatccatgttgttttaatgaagggcctcatgtgactctaagctgaggccagaatcaaatatgagggcttcaaaatacattcatgagagtgaagtgccacctttgtactaaagggtggtcacagggcccgttcagtttgggtttggtagggacagggcagtgtggtgcatatttccattactgtagcagaatttgctggtgtctgtggcaggggagggcacctgtggacaggaaaagaggaacacttttaatatggcagatcatatttttatttccatggagcagctcattttttcctgaatctcttctgttataaaggagagaaatgcatggactttttggtcttggtccttctgtgtgtgggcgtgacactagtaggtaagcaggtggtgctgatgcttttaagggaattttctcaagatgcaggtgttacttgtccagagaattttatctgaaaaggatttccagagaaggaggagaaagaggaataatggcttcttttcagctaaacatgtctcagatcaagagctgtgtccactctgcctcctggagtgccatgtgtttagtacttggaaaccttctctgcttgtgtttttcctccccagtgagtttgtttcaggtactttaaaaaattcttgtaatagtcaagggtctctaaaaaatatttgtttctggctgggcgcggtggctcatgcctttaatcccaggattttgggaggccgaggcaggtggatcacttgaggttgggcgttcaagaccagcctgaccaagatggataaaccccgtctctactaaaaatacaaaattagacaggcatggtagcacatgcctgtcatcctagctactaggaggctgaggcaggagaatcacttgaacctgggagacggaggttgtggtgagccgagatcacaccattgcacttcaccctgggcaactcaaaaaaaaaaaaaaaaatgttttcctatgcaccagacccttctctacatcatggcttcttatatgcaatgcagaattcctaccatgaatttatgatctgccatattaaaagtgttccttttgtggctgttgaacatgggaagatgtggatactcaagattcctactggggaaaagctggggtccttagtaaagatggagaacatataatgttgtggtttcatctaaacccaggaagttgtgaaaaaattattaagagatacctgctctctagagtgctaaagaaagactacttaaaatcattattaaaattatggaatgcgggagatatcttgacctttgcataaaactgattttttaatggttaaattcagtctataattgactttttgaggggcaatatctcagcagtgatgctgtgttcttctgtgtgcatcagcacatcatagaaatttgttctagtgtagttgatgttaataatttacttggttaaagagctctgtgactttttttcactatagagttaattatttttatctttattattaagtatctttatacagctaatgtgcataaaccatcacaattaatctggtgcctgcccttttttcttaggtttttttgtttttgtttttttttgcatgtgtctgtctttggaaaatgaagacacttgactttgtttacaagccagaaacattgggaaaaacacagtctctttcacttgcctaatgtttgacaaaatagtcttcctgggataaaaacattggcattactagtgacctttttagaattttaaaaactcagactttattccagatcttctgaaaaatataaaaaaatcttcatggcaggatctccagtttatcgtgcacatttaaatttgagaggtaccttctgactcaacatgtttttctttgtctgaaaaatatacacaactcattatgatgtaagtatagcactcaataatgtatatgtttgtgtttgtgtccttaattatatactttatcatccagagaagtatcatatatgcactggtgttgtggatcttaggccattctctgccctcagagtaggagaatacattagaaaatatttctgtgttaaaaattattggataatttcagttattcttataagtcagaatcagttctctttactctctcaattcaccttaattcaaataataaattctgcccatggccacttggtaaatatatgtgtgtctctgtgcttgtgtttttcaggagacattgacatttagggatgtggccatagaattctctctggaggagtgggaatgcctgaaccctgctcagcagaatttatatatgaatgtgatgttagaaaactacaaaaacctggtcttcttgggtgagaataactttcatacacaattcttaatatgccctaaatgtttcatgtctctttttttgtagaatttttttgataatttatgctttgtataaatgagtttctaatcccagttttcaagaaaatcttgatgatttgtccgtgtggaaaagaatttcttcaacgtgtttcatcttgatctgaactttccacattcctgagctgatgtgtatccttcactctagattagtgataattccagaaatttagtggcataaaatatcactgcccatatcttaaaatctatttgccatcaccaatttttgattcaggtagtaaaattaaaaacctacaaatttaaaatattttctaaatagttagagatgtctctctttaatcagtattttcagattaattttattttatttatttatttttttgagatggaatctcaccctgtcacccaggccggagtgcaatggtgcgatcttggctcactgcaacctccaccctgggttcaagcgattctcctgcctcagcctcccaagtagctgggattacaggtgcacacctccacacccagcaaatttttgtattagtagatacagtgtttcaccacgttggccaggctggtctcaaactcctgacctcaggagatctgcccacctcacccttccaaagtgctgggattacaggcgtgagccactgcgcctggctaaaacacttttttttttttttgagatggaagtttgctcttgttgcctaggctggagtgcaatgcactatcttggctcactgccacctccgcctcccgggtccaagcaattctcctccttagcctctggagttgctgggactacaggcacctgccaccatgcccagctaattttgtatttttagtagagatggagtttcaccatgttggacaggttggtctcaaactcctgacctcaggtgatctgtccgtctcggcctcccaaagtgctgagataacaggtgtgagcaactgcgcccagcctttggattaattttctaaaatattctatcacatcctttttactgagcacagtactaggttagtaattagagaatataggcaagattcatgttatttatttttaataaagcaggtgttgctgtctctaagcaagacccagtcacctgtctggagcaagaaaaagagccctggaatatgaagagacatgagatggtggatgaacccccaggtaggtgagagtgaaaaaaaacagatgacacagatgagaggtccaaagcttaaaaaaaaaaaatgtgccagtccttacaatgtgttttgggaagctgtgttataaagcatgtagtttctgggaggcctgaatattttcttaaaattttttcttacatagggacatcttctgtcttatgcttttaaattctctaagaattctacttttccttgggggatcttccttcaagtctacaagagagccaaagcatattgtcatagcatataaaagactgtcatggcatataatctgactgcttttttattgttttgggggacgcacaaatatctgtataattttgaaaaattctttgttaaattattttttagttctctttttgaatcctgtctgaaatatgtgagagtagtgatttctgttccattaggggtttcttgttaatttttttgcatatttcatcctgtttgtattactatagtcttaaaatatagtttgaaattataaattatgatgtccctctgctttgttcttttttctcaagaatgctttggctatttgaaatttattacaatttcttgtaaattttagaattgtattttctattgtgaaaaaaataccactggaattatcatggggagtttattaaatgtatagattactctagataatatggcattttaacaatattctttcaatccaagacatgaattttttttttttttgagacagaatctcactctgtcatcaggctggagtgcagtggcacaatcttggctcactgcaacctccacctcctgtgttcaagcgattctcctgcttcagccttctgagtagctgggactacaggcatgtgccaccacacatagctaattttttgtatttttaatagagttggggtttcaccgtgctgttcagactggtctcaaactcctgaccttgtgatctgcccacctcggcctcccaaagtgctgggattatgggtgtaagccactgtgcctggccaacatgaaatattttaaaatttatttttgtcttctctaatttttttcattgatatatatttcattgtaaagattttttaccttcttcgttatatttgttctcagaaatttattttaatgctattattaataagactgttttcttcctctattgtatcagatagttttaagtgtatggaaccataactttatgttaattttatattttgttaagttactgactgtatttattagtttagacaaatttttcttttttttcttttttgagacacagtctcactgtgttgcctaggctggagtgcaatggcataatctcagctcactgcaacctctgcatcctaggttcaagcgattctcctgcctcagcctcctaagtagttgggattacaggcactcggcaccagcccagctaaatttttttttgcatttttagtaagacggaatttcactctgttggccaggctggtcttgaactcctgaccttgtgatttgcccccctcagcctcccaaaatgctgggattacaggtgtgaaccactgcgcctggctgtttagacaaattttaatgtactgtttatggtttttttatatataagatcatatgatccacaaacagcaactttttacttatttctctttaattccaatggcttttaaaaaatgttcttgactaattcttgtgccacatactttcagtgctaccttaaaatagaagcattgacaatgggcgcaatatagttttatattggtatctgtgaatttgaaggagcaaacaactccttagcttttataaacaggtttcaggaggtaaagatctttttctgttgtgtccctagggtgatggaatgccctctgggtttgtagtgaagaggggttgtagctttgtcacaaggctgctgggtctgcactagagtccacctttagatggcttgtcacaagggcttgggtaattgtaattcccattttatttttggacagattgtatatattctttaagactttgatctgtagggcagataccagggcagatttctgcagttggctccttatataatggccctatcaggatgtgaatgggtttgcctttcactgaataccagagaggatttcttcaggtcactgtgtgggtttctgtttaggaaaaactgatcatgatctgcggctcagagagctggaactgagtcaataaactgcttcagggaccacagtaaaaaccaaggtctgtaaacctgtctgcatggctgcaaataggtgtcttcctccaggtctctggaagggcaggacctctcttagactgtaactgggaggagtttgggatggttacagagttaatttcagaattctctgttggaccaagttgggtggaccatttcttgatctgtagccaaaaccaagggtcctgtaatttcccacacgaataagtgcctgtcctctgaaaaaacactcctcaatcttgggctttagcagagtttcacaactccctccctgcatctcaaagctctcttaaaggcacttactttggagatgggatcttgtttatcatctggtctggaaatccaggcctgcagcaattctccaacctcaatgtaccatgtagctgccattaaagatgtgagccatgatggctggctgtctcatgaaggcattttttgtcagggatgactgaataaatttttttttgtggcgaggataatcaaatagagcaccttctatttttttatgtcactgatgttactctttctatacatttttactttcgattttccatttcaaacttctctgtcattttagattcagacatttaggacaatatgctagaatttacatgttatgcctgaagtaaattagataattggtaggcactccatattactaagatggttacttataaatttaagttcgctgcaggtaaaaaggaattataggattttcacccactttcttcagcatatatctaaatgataacataatttctttcttttcttttcttttcttttttttttcttttcttttcttttctttctttatgagatggagtgtcaatctgtcacccaggctggagtgcagtggcatgatctcagctcactgcaacctgcacctcccaggttatagctattctgctgcctcagcctcctgaatagctgggactacaggcgtgtgccaccacatatagttacttttttgtatttttagtagagtcggggtttcaccatattggccaggctggtctcgaactcctgaccttgtgatccacctgcctcggcctcccagattgctgggattacaggcgtgagccattgtgcccggcccaacataatttatttctaaatatttgttttacatatcagaggctgtaaccctactttgcaaaatatacgtttaaatttagcaatgtaatgctattctttgcttctaaagttgaattacagtggtttcaattttgtgtaagaatagcatatatttaaaacgtaaaatttatcatattttttacatgcttatttaaaaagtttcttattagactattctaattatactgcatattctgtgaaattttactgccatacagtgcatgccaatgattcaaaatacctgccttccctgagtacacagtcaactattgtagttatctagacaattcttttttaatggtactttaatgttgcataccagattttatgagtaaacatgtctcttattacgcagtttcttattagcgttttttcagtataggtttcttaacatcagcttgttgtgttttttagtttttcttatataattttagccaatttgcaattctgtttgtatactttaagtcaatgtgaggtgtaattaagagataagtcagccatacgtctatcacgatcagattatatgtgtgtgtgtttatctataaatatgaccccaatattggttatgacttatctcatatatattctttcttaactgattttcagtggctgttttatcttgtctaagtgagtagtcatgaaaatattttcattatgtcttattttcaccatgtttctaatgatgaatatatatatatatatttttttttttttttttttttttttttagacagagtctcgccttttcgcccaggctggtgtgcagtggcacaatctcggctcacggcaacctccacctcccgggttcaagtgattctcctgcctcagcctcctgagttgctgggactacaggcatctgccaccatgcccggctaattttttgtatttttagtagagatgggatttcaccgtgttagccaggatggtctcaatctcctgacctcgtgatccacctgccttggcctcccaaagttctgggattacaggcatgagccaccgcacctggcctgaatatatattttctttgtgtgagaaaaacatttttgtgatttgaaggatattttgagaagatttataattctgtatttttttctgtttttcctttagaaaaattaattgttgtaaaaacataacaggccagtcacggtggctcatgcctataatcccagcactttgggaggcagaggcaggcagatcacttagggtcaggagctccagaccagcctggccaatatggtgaaaccctgtctctactaaaaatacaaaattagccagacatggtggtgtatgtgtgtaatttgagctatacaggagactgaggcaggagagtcacttaaacccaggagacagaggttgcagtgagccgagatcatgccaccacactccagcctgggtgagagagcgagattccatctcaaaaaaaaaaaaaaagaaagaaaaagaaacaataaaaacacataacataaaatttagcatcttaaatctatttaagtgcacatttcagggccagacatggtggtggctcacgtttgtaatccctggattttgggaagccaacacagcagtatcatttgagccccaaagtttgagactagcctgggcaacatatggagatttcctctctataaaaatttttaaaaatatctaggcatagtgttatgcacctgtggaccccgctatatgggagatttagggaggattacttgagcctaggagtttgaggctgaagtgagacataattgtgccgctgcactttagcttgggtgacaaagtggaccctgtcttaaaaagaagctgtacatttcagggatgttaaatatattcacattgttctgcaaaagacttctagaaatttcacatgttgtgaaactaaaacccaatatccatttaagtgacaagatgccattttaccctctccccagtgcttgacaaacacccttccactttctgtttttatgagtgtgactacttaagctatctcatataagtagaattatatagtattcatcattttgtttctggcttatttcaagtgacataatattttcaaagtttatcttaaaatgtgacaagatttctttgataatatttgatttaattatgaaaacatttgatctttgatttctgtgatatttcattgaatatatatgtttcatttttgatgtgtttataaattaagagacacctgggttgcttctgccttttggcttttgtgagtaagggtacaataaacatggatgttcaaatatgtcttctaggtcctgtgttggatagtttggatatagcttcgtaagagtgggattgctgtatttgataattccattgttaattatttaagaagcatgtataacatttttaaataatggctgcttccttcttttctaccaacaatcagcataggctttattttcattgtatcatcaacagattttgtgttttaaaaaacatgtagtatatttttaaacatatagtatagtggccattgtaatgagattttatttctttattattttttattttttgagatggagtcttgctgttgtcatccaggcctgctgttgtcacccaggcaattggcacgatggctcactgcaacctctgcctcctgggttccataaattctcctgcctcagcctcctgagtagctgaggttacaggtgcccgccaccatgccaggctaatttttatatttttagtagagatggggctttcacagtgttggccaggctggtcttgaactcctgacctcagatgatccgtccacctcgacctgccaaggtgctgggattacatgcgtgagccaccacgcctggcctcatttttatttttatgagtttctctacaaatcattaattttgcttttcttttcaaatggtttttcccatttgaatatcttttttgatgaaaatttagttcaattattttttctttctttggttttttttcttttttttttgggagtctcactctctcacccaggctggagtgcaatggtgcaatctcgacgcactgcaacctctgcctcctgggttcaagcgattctgctgcctcagcctcctgagtagctgggattacaggcgccaaaattactctttgtcttccaccatgattgtaagtttcctgagaccctcaccggaagcagatgctgttacatccttcttgtacagtctgctgaactgtgagccaaataaaccttctttctttgtaagttacacactcaggtattcctctatatgcaaaatagttaatacagtctataatgcctgttttctgttttcttactgatattttatctgaattttctattattgcaaatgatgtcttgatcgccacaattatgttgctatgtatttcttccttcacctttgtcaacgtttgctttatatattttggagcccttatgtcatatgtatgtatacatataaatagatatgatagttacagattcctggtaaattgactcatttgaccgttatataatatcgtgtttgtcctatgctgttacatacaagcatatgtcctatgctgttatatacaagcatattatatacaatataattattaccacctcacccaattgtggttactatttgcatggaatatagattttttcagttctgttactttcaacctatttgactcaatgctaaaatgcctctcttatagacagcaaattgtatactttttaacttaagctactaaggcatcttatttctttttctttttataaatgtatgtatgtatgtatttatgtatgtatttttatttttatttttttgagatggcatctcgctctgtcacccaggctggagagcaatggcatcgatctctgctcactgcaacctccacctcctagattcaagcgatattccttcctcagcctcccaagtagctgggagtacaggtgtagtggctaatttttgtatttttagtagagacggggtttcaccatgttggtcaggctggtcccaatctgacctcgtgatctgcccgccttggcctcccaaagtgctgggattacaggcatgagccgctgcacctggccaatgtatttatttttgagataaagtctcactctgtcatccaggctggtttgcagtggcatgatcacgactcactgcagcctcaacctcccaaactcagatgatctcatttcagtttcttgagtaactgggttgcaaatgtttgccatcccaaaccgagatagttttttgtacttttttctgtagagacagttttttgccctgttgtctaggttggtctcaaactcctgagttaaagtgatcagctcccttggcctcccaaagttctgagattacattatttttattaagtaatttaactaatttttaaaatgactgcttaaagatataaagttactattaccagttttattgttgttctttttttaagtttaatttaatttaattttatgttccaggatacatgtgcaggatgtgcaggtttgttacataagtaaatgtgtgctgtggtggtttgctgcacctattaacctctcacctcggtgataagccctgcatgcattagctatttatcctgattctctccctccccgtgacagaccccagtgtgtgttgtttccctccatatgtccatgtgttctta

SEQ ID NO: 9614 - DNA, 1794 bp, Homo sapiens
ataaatctgtattttgtttttcgtaatggctatcctcatttacgttcacaccaacagtgtgcaaggattccgttttcttcacatctttaccaacacttttttctttttcttttaataagagttattctaacaggaatgagttgatatagggattttttttttggcttgtctttttgtgataatagtcaacattgagcatttaaaaatatatccgttggacatatgtatgacttttcttgaaaaatatttatttcagctatttcctttttttttttttttctttttgagatggagttttgttcttgttgcccaggctggagtgcaatggcacaatctcggctcactgcaacccttgcctcccagatcaagtgattgtcctgcctcagcctctcaagtagctgggattacaggcaaatgccactgcgcccagctaattttgtatttttagtagagacggggtttttctatattggtcaggctggtctcgaacttctgacctctggtgcccacctcagcctcccaaagtgctgagattacaggcatgagccaccgcgtccggcctattatttttaataattttttattgttgtcattttaaatacacttttgatattaacctcttgtcacatgtataatttgcaaattttttctcccatgttctagttgtcacattctgttgattgtatcagattttgtccagcagctttttaatttgaagtgatctgacttatttttccttttgtgtcctgggatgtttaggttaaatcaaaaaacttgcggccaggcgcagtggctcacacctgtaatcccagcactttgggaggccgaggcaggtggatcacgaggtcagaagttcgagaccagcctgaccaacatggtgaaatcctgtctctactaaaaatacaaatattagccgggcgtggttgcacgtgtctataatctcagctactcaggaggctgaggcaggggaacggcttaaacccagaggcggaggttgtagtgagccaaggtcatgccactgcactccagccttggcaacagaatgaaactctgtctcaaaaaaaaaaaaaaatttgctgcccagaacaatgttatagggcttttgctttatattttggcagtagtagtttcagagtgtcaggccttacatttaagtactaatttatttcgagtttatttttacatatggtgtgagatgagggtctcaatttttatctctgcatgtggatataaagttttcttaattgaagattctgttctttccctttaaagtcacctgtatttaaaatcaactgtaaatacatggatatatttctgctgtttttttcttctgctccattgacctatgtctctgtttttattcaagtaccatactgttggttaccatagctatgtagtgtatttcaaagttagtcacttattttgtcttgattgctttggctattcagggtcttttgtgataccatatgaattttagatatacttttaaaacttttctatgaagtatatcacgtatttcgatagaggttgcattatacctgtaggtcattttgtgtaatacaaatattaatgtcagttcatgaatagtccatttatgtattaatttctatttagaatgtaaggcgtttcaactttttggttaaatttatttcaaactatagttattgtagatgtaattgtttttgaatttcattttgggatagttattaatgtagagaaatgctgtgactttttgatggtgcttttgtattttgaaagtttaataaattttgtttatttatttatttattttga

SEQ ID NO: 9615 - DNA, 530 bp, Homo sapiens
ctaagtcaacataaaagaattcatattagagagaattcttaccaatgtgaagaatgtggcaaagcttttaaatggttctcaacccttactagacacaagagaattcatactggagagaaacccttcaaatgtgaagaatgtggcaaagcttttaagcagtcctcaacccttactacacataagataattcatactggggagaaaccatatagatgtgaagaatgtggcaaagccttcaaccggtcctcacaccttactacacataagataattcatactggagagaagccctacaaatgtgaagaatgtggcaaagcttttaaccagtcttcaacccttagtacacataagttcattcatgctggagagaaaccctacaaatgtgaggaatgtgacaaagcttttaatcgattctcataccttactaaacataagataattcatactggagaaaaatcttacaaatgtgaagaatgtggcaaaggctttaattggtcctcaacccttactaaacataaaagaattcatac

SEQ ID NO: 9616 - DNA, 1793 bp, Homo sapiens
ataaatctgtattttgtttttcgtaatggctatcctcatttacgttcacaccaacagtgtgcaaggattccgttttcttcacatctttaccaacacttttttctttttcttttaataagagttattctaacaggaatgagttgatatagggattttttttttggcttgtctttttgtgataatagtcaacattgagcatttaaaaatatatccgttggacatatgtatgacttttcttgaaaaatatttatttcagctatttccttttttttttttttctttttgagatggagttttgttcttgttgcccaggctggagtgcaatggcacaatctcggctcactgcaacccttgcctcccggatcaagtgattgtcctgcctcagcctctcaagtagctgggattacaggcaaatgccactgcgcccagctaattttgtatttttagtagagacggggtttttctatattggtcaggctggtctcgaacttctgacctctggtgcccacctcagcctcccaaagtgctgagattacaggcatgagccaccgcgtccggcctattatttttaataattttttattgttgtcattttaaatacacttttgatattaacctcttgtcacatgtataatttgcaaattttttctcccatgttctagttgtcacattctgttgattgtatcagattttgtccagcagctttttaatttgaagtgatctgacttatttttccttttgtgtcctgggatgtttaggttaaatcaaaaaacttgcggccaggcgcagtggctcacacctgtaatcccagcactttgggaggccgaggcaggtggatcacgaggtcagaagttcgagaccagcctgaccaacatggtgaaatcctgtctctactaaaaatacaaatattagccgggcgtggttgcacgtgtctataatctcagctactcaggaggctgaggcaggggaacggcttaaacccagaggcggaggttgtagtgagccaaggtcatgccactgcactccagccttggcaacagaatgaaactctgtctcaaaaaaaaaaaaaaatttgctgcccagaacaatgttatagggcttttgctctatattttggcagtagtagtttcagagtgtcaggccttacatttaagtactaatttatttcgagtttatttttacatatggtgtgagatgagggtctcaatttttatctctgcatgtggatataaagttttcttaattgaagattctgttctttccctttaaagtcacctgtatttaaaatcaactgtaaatacatggatatatttctgctgtttttttcttctgctccattgacctatgtctctgtttttattcaagtaccatactgttggttaccatagctatgtagtgtatttcaaagttagtcacttcttttgtcttgattgctttggctattcagggtcttttgtgataccatatgaattttagatatacttttaaaacttttctatgaagtatatcacgtatttcgatagaggttgcattatacctgtaggtcattttgtgtaatacaaatattaatgtcagttcatgaatagtccatttatgtattaatttctatttagaatgtaaggcgtttcaactttttggttaaatttatttcaaactatagttattgtagatgtaattgtttttgaatttcattttgggatagttattaatgtagagaaatgctgtgactttttgatggtgcttttgtattttgaaagtttaataaattttgtttatttatttatttattttga

SEQ ID NO: 9617 - DNA, 521 bp, Homo sapiens
agcaatgctgaagcacttgcagctcacctattaccaaaaactgactgagccctccctacacaagccataactactgctttgattggacaagagactgatttcagtagttttctcttggtaagagaccactggccgtgggctggttctggacagtttacagaagctatgcacttgattgcctttgtgtccctgcttcaccttttgaagcatagggcctaattataatgtatttaaatgttgtctccaccccaaagtgaacatgggttgcatgtaacaggcgtgtttactcagcatgcatgcagcaggatcccttcacaaatattcagagctccccctattccctgttgaatatgtatatgtggccaaccagatcaacgtaaatcactattcgccctcccctccctggaaacttacttttcgggtttcagcaggaagctatgcctcccagtctgtcagaatggccacttgcaggctgtaaccctttataaaaaaataaaatctcctttctaaatttataaatt

SEQ ID NO: 9618 - DNA, 690 bp, Homo sapiens
gaagatgtggattgtctaactggaggttgggagtccagggtgcagaaggagaagcttggagtgcaggatttggtggtatgtgtgtggcagtaggcactatgttctaattgccagtttttttttcttcttcctttttttctctagctaaacaagcactggccttgagataagcaatgctgaagcacttgcagctcacctattaccataaactgactgagccctccctacacaagccgtaactactgctttgattggacaagagactgatttcagtagttttctcttgataagagaccactggccgtgggcgggttctggacagtttacagaagctatgcacttgattgcctttgtgtccctgcttcaccttttgaagcatagggcctaattataatgtatttaaatgttgtctccaccccaaagtgaacatgggttgcatgtaacaggcatgtttactcagcatgcatgcagcaggatcccttcacaaatattcagagctccccctattccctgttgaatatgtatatgtggccagccagatcaacgtaaatcactattcgccctcccctccctggaaacctacttttcgggtttcagcaggaagctatgcctccccgtctgtcagaatggccacttgcaggctgtaaccctttataaaaaaataaaatctcctttctaaatttataaatt

SEQ ID NO: 9619 - DNA, 450 bp, Homo sapiens
tactgctttgattggacaagagactgatttcagtagttttctcttggtaagagaccactggccgtgggctggttctggacagtttacagaagctatgcacttgattgcctttgtgtccctgcttcaccttttgaagcatagggcctaattataatgtatttaaatgttgtctccaccccaaagtgaacatgggttgcatgtaacaggcgtgtttactcagcatgcatgcagcaggatcccttcacaaatattcagagctccccctattccctgttgaatatgtatatgtggccaaccagatcaacgtaaatcactattcgccctcccctccctggaaacttacttttcgggtttcagcaggaagctatgcctcccagtctgtcagaatggccacttgcaggctgtaaccctttataaaaaaataaaatctcctttctaaatttataaatt

SEQ ID NO: 9620 - DNA, 6498 bp, Homo sapiens; identical to SEQ ID NO: 5874

SEQ ID NO: 9621 - DNA, 6493 bp, Homo sapiens; identical to SEQ ID NO: 5876

SEQ ID NO: 9622 - DNA, 1496 bp, Homo sapiens; identical to SEQ ID NO: 5888

SEQ ID NO: 9623 - DNA, 1494 bp, Homo sapiens
tgagaggcggcatcttcacctatgggaattttttctgctccattgtgagacaaagagcatgtccgagttttcattttggccaggccgccccctagtttacgcactgtgggctaaactccagaagctggcgcccttccgggccagcggtttactccgctctctggaggctgctaggattaaaggcaaagcaaacgacaggtcttttagctacaatcgcaggagagaaaacactactgtgactcagattagaacccaggttgcggcaaccacagctgcaagtattgaccactacacgaccaaaaagcctgctgacaaccattgtacttcttatatttttttatgtaaaaacactcatactattttctctgctttattctcgaacgtctgcagattttcgtgcttttctctctttcatgcgcttctccgttactctctccccattccgctacataatttaaaaaacatctcatctctcaggacctggccactgcctctacaacaagcctcctgggaagtctcgttgtcccatcgacacctctcccttctttcgctccatttttttttttttttttttttgacggagttgctctgtcgcccaggctggagtgcagtagcgcgatcttggctcactgcaacctccgcctcccgggttcaagcgattctcctgcctcagcctctcaagtagctggaatagcaggtgcacgccaccacattcggctgatttttgtatttttagtagagacgggatttcaccatgttagccaggctggtcttgaactcttgacctcaagcgatccatccgcctcggcctcacaaagtgctgggattacaggcgtgagccaccgtgcccggccaaatttcaggccaacacctgttgacacacattgccagacacacggaatccctcactgaacaccgatgggcccacaaaacacgcggaggccacggtggctgaagatgttagcaaattcggttcgcggtgtctggggtacagcctcgagggtccattggctacctctgtgcaaggaccactctgcgcaaggaccagtcaccgctgctctcctcatctccattgagattctcccgcacacacctcccctttctttgggccgctgaggcctcttggacctccgaggtgattgccccgcccgcagcttctctccttccgggagcttcatttcttgttcctctccgtagtggctcagcggtaagcccaaggtccagcacacgaatcaggaaactgatggttcttgggtttgcaggaatccgcccagagaacagatgaaagtaacaggtaccaatatcaaaactgcagtgactcaccagaaacactacgtgcttgccactttgcttagcggtttgttgagtccaacaactgcgtgggtcccgggttagtctcctgaatgtcttttgctgctactttggtcagcgttgttgtcagtttaccttgtggtggccaagcccttaaatgcactattaggttatgcagtgtaa

SEQ ID NO: 9624 - DNA, 756 bp, Homo sapiens; identical to SEQ ID NO: 5880

SEQ ID NO: 9625 - DNA, 384 bp, Homo sapiens; identical to SEQ ID NO: 5882

SEQ ID NO: 9626 - DNA, 1002 bp, Homo sapiens
  SITE (43): n equals a,t,g, or c
tgagaggcggcatcttcacctatgggaattttttctgttctantgtgagacaaagagcatgtccgagttttcattttggccaggccgccccctagtttacgcactgtggactaaactccagaagctggcgcccttccgggccagcggtttactccgctctctggaggctgctaggattaaaggcaaagcaaacgacaggtcttttagctacaatcgcaggagagaaaacactactgtgactcagattagaacccaggttgcggcaaccacagctacaagtattgaccactacacgaccaaaaagcctgctgacaaccattgtacttcttatatttttttatgtaaaaacactcatactattttctctgctttattctcgaacgtctgcagattttcgtgcttttctctctttcatgcgcttctccgttactctctccccattccgctacataatttaaaaaacatctcatctctcaggacctggccactgcctctacaacaagcctcctgggaagtctcgttgtcccatcgacacctctcccttctttcgctccatttttttttttttttttttttttgacggagttgctctgtcgcccaggctggagtgcagtagcgcgatcttggctcactgcaacctccgcctcccgggttcaagcgattctcctgcctcagcctctcaagtagctggaatagcaggtgcacgccaccacattcggctgatttttgtatttttagtagagacgggatttcaccatgttagccaggctggtcttgaactcttgacctcaagcgatccatccgcctcggcctcacaaagtgctgggattacaggcgtgagccaccgtgcctggccaaatttcaggccaacacctgttgacacacattgccagacacacggaatccctcactgaacaccgatgggcccacaaaacacgcggaggccacggtggctgaagatgttagcaaattcggttcgcggtgtctggggtacagcctcga

SEQ ID NO: 9627 - DNA, 850 bp, Homo sapiens; identical to SEQ ID NO: 5883

SEQ ID NO: 9628 - DNA, 332 bp, Homo sapiens; identical to SEQ ID NO: 5886

SEQ ID NO: 9629 - DNA, 1496 bp, Homo sapiens; identical to SEQ ID NO: 5888

SEQ ID NO: 9630 - DNA, 611 bp, Homo sapiens
  SITE (26): n equals a,t,g, or c
tatgaatccaagtttccgttttttanagaaaaaaactaagtaaactgctttttaaaaatcaggaattctacttgatgtttttaatatgaaagatagttcatttttgttgctgccctggttcaatattttactcgaagaaaattaagtagaactgtttttactggttttaggagatataacacataaataaaggttctaagtgactttttgcactggagatagagacagtgtcttaatgtggcatgagaataaaccaggagtgccaagcctttttttttcaagctctagtttcactacttactggagatgttactttggcaaagcctttgagaatgtaaaatagggaagacacttcatagagtggctgcaaggtggctggacatggagtgcatgcttaacatatttcttttctctccttccctgttttaagagatgaaatacgcatgctgtctctctcccagagtagctgtgaaataagaaagtgataagtgctaacaaatatatggtactcttgttattaacctgccataaatagattctgctctgcagaatcatgaaacctaatatatgtagaagtgagttccaatagtcttaataatattagataaggt

SEQ ID NO: 9631 - DNA, 648 bp, Homo sapiens
  SITE (1): n equals a,t,g, or c
  SITE (15): n equals a,t,g, or c
  SITE (26): n equals a,t,g, or c
  SITE (114): n equals a,t,g, or c
ncaggtaagtaaagntaggtagttanatgcaataaaatctacaacaagttcacaggtccttttgcgtcgattcatctcaagtacaaaacatcaaaaaatttgaaagtaggtttntaactcttaaagtacatgacttatgaatccaagtttcctttttaagaaaaaaactaagtaaactgctttttaaaaatcaggaattctacttgatgtttttaatatgaaagatagttcatttttgttgctgccctggttcaatattttactcgaagagaattaagtagaactgtttttactggttttaggagatataacacataaataaaggttctaagtgactttttgcactggagatagagacagtgtcttaatgtggcatgagaataaaccaggagtgccaagcctttttttttcaagctctagtttcactacttactggagatgttactttggcaaagcctttgagaatgtaaaatagggaagacacttcatagagtggctgcaaggtggctggacatggagtgcatgcttaacatatttcttttctctccttccctgttttaagagatgaaatacgcatgctgtctctctcccagagtagctgtgaaataagaaagtgataagtgctaacaaatatatggtactcttgtt

SEQ ID NO: 9632 - DNA, 24099 bp, Homo sapiens
tggctatcgcggctcatagtatgtaatcgtttcctaaaaagtcctatttttcttttcctttgctcctgttgtcccatattagggtttaataaacttgctgtcctgttcttagggtcaattgcaagcaatattttatcaaaccaaattctgcttttttaactttatgacttctataggctccctacagacacttcaagtaaagctaatgaattctctttttactattagatcttgtatttctgtgagctattaaaactagctgttatataacaacaaattaaatgctgttgattttcttgtttttaggggttccttcaggagtcacaagtactattgggttggaaaatctgggagaataatagtttacttactgatgaaactgctgtattatcattcattaagctggagcagatcacagtttgagggtaaactacataaaatgaaggccactattttagatggatgcctaatagtacttatcagtatacccttacttccttatggagctctcttttttgtaatttatttaatgaggtcctttgattccttggttatcaagtgaagatattcttttttaactcaaaatatatttataaaattaattttatacatagtatatagtggatattagagtttaaaaagaatgtattttttaatggagaggaatatcaatatttttgcaaccccaataaattgtagtaaattgtaacaattattttcttccaaaagtgtaattttcttgaggacaagatatctttgtattctcattaaccataagagtacattggtagcttatgttcagttgttggttaaatgaatgaattgagccatgcctgtaggactgaatagctactaataccatcgatcatttctgtttataggtactaccattaaagataccttcttctcagcaaatctatgataaaaaatataagtaacagaagaagaaataactgttatttgtcaagtgacaagcttttaatgtcagaatggctcacctaaagcgactagtaaaattacacattaaaagacattaccataaaaagttctggaagcttggtgcagtaatttttttctttataatagttttggttttaatgcaaagagaagtaagtgttcaatattccaaagaggaatcaaggatggaaaggaacatgaaaaacaaaaacaagatgttggatttaatgctagaagctgtaaacaatattaaggatgccatgccaaaaatgcaaataggagcacctgtcaggcaaaacattgatgctggtgagagaccttgtttgcaaggatattatacagcagcagaattgaagcctgtccttgaccgtccacctcaggattcaaatgcacctggtgcttctggtaaagcattcaagacaaccaatttaagtgttgaagagcaaaaggaaaaggaacgtggggaagctaaacactgctttaatgctttcgcaagtgacaggatttctttgcaccgagatcttggaccagacactcgacctcctgagtatgttgaagaatatttattgtttattctttatcaccaggctttgcaggggagagaggggtgagctaaggaagttatctgttttttagctactctaaggcagaaaatcagcaaatactgtttatttaacctgttgtatttattttttgcttataatgattgaggctacatatccctatttatgcttggtgaggcagtgcagatatgaaaagttattagcttggaaattagaaaactgaattctagatctgactgctatccacaaggaaattctttattcctaaatactgtggttttctcatctatttagggggaattattggacaatttgtataggaagtagaaggtagaggaattgtttccatttctctgtatttctttagaataaaaatgtttaaaaacatgccaagattttggaactgttggataatattttatatatgtgtaaagcaattcacagactttgtgattactttgactcaaagtttttgagtacctaattatatttcagaatgccctattttttgtaaacaatcccaagtagctgggattacaggcgcccgccaccacagctggctaattttgtgtatttttagtagaaacggggtttcaccatgttgcccaggctggtcttgaactcctgacctcaggtgatccatctgccttggcctcccaaagtgctgggagtacaggcatgagccattgcacctggcccaccctcaacagattatttatttatttatttattattattattattattattattattattattttgagatggagtctttctctttcactgaggctggagtgcagtagtgtgatctcggctcactgcaacctctgcctcctgggttcaagcgattctccagtgtcaggctcccgagcagctgggactacaggcatgtggcaccacgtccggctaatttttgtatttttaatagagacagggtttcaccatgttggccaggctggtctcgaactcctgacctcaagtgatccgcccacctcagcctcccaaagtgctgggattacaggcgtgagccactgcacccagcccctcagtaagtttttaagtgtacaagataggccaggtttggtggctcacacctgtaatcccagcactttgggaggccgaggagggcagatcagctgaggtcaggagtttgagagcagcctggccaacatggtgaaaccccgtctctattaaaaatacaaaaattagccggacagggtgccgtgtgcctgtagtcccagctactggggagcctgacgctggagaattgcttgaacctgggggcagaggttgaagtgagcggagatctgtgccgttgcactccagcctgggcgacaagaacgaaactccatctccaaaaaaaaaaaaaaaaaagagtacaagataagcaaactggaagcaaacaatgcctgtgtattttgctttgctttctggatattagagaattacatttggcagtgaacttgaagataacttttggtctattgtttcactcaggtttttctagatttaggattatcaatactggatccaagtatatgagtcccttaacattgaaactgtgtagcttagatttctgttgagctattctaatctgattgattcaagtttaggttgctcataatttttaaatgaatgtgtaaagaaactaatatctataaaatattctagctgatataacaaggcacattatagttcctttcatacagtaatagattagaatgcagtattgcactttactgacttgaagagaggttttgattgaaaagtaatctacattaaaaatcaataatcatgatttttattcttttgacatgacaatcagtgacagctcaaaatgagcttttttctcccaatatagcattaagaagctgcaataattttcaataatgttaatcgctaagtaagtgaaaaacaagtaagcacattaacaacattttttggttggagtgaagatttaattatttcttactttggacagggttttgtacaggtggtaaagatttgttttttgacttcgtgatctgcccgccttggcctcccaaagtgctgggattaaaggcatgagctactgtgcctggcctggccaacatggtgaaacctcatttctactaaaaatacataaattaggtgggcatggtgatgtgcgcctgtagtcccagctacttgggaggctgaggcaggagaatcacttgaacccgggaagcggaggttgcagtgagccgagattgcaccattgcactccagcctggtgacagagcaagactctgtctcaaaaaaaaaaaaaaaaaaaaaaagatttgttttttactttgaatgtaaccagtatcagcaaataacacattttctgaagaactgctaatgttttccatgctcattagaaatatagacctagtttctcccaaagccagatggtcatgtgactgataatttaagcatgtttctatgtgccaggtttttcaaatggtttgactggaatgatacagtcactttggcaagttattttaattgcactattttaaatatgtaaaacaattttcaaagcatacatttaacatgttgtttcaaaatgaatggggtttatgaaattatattgtgaaattttattacttgtattgatatgacatttgtacttgatattggtaattatcagttaagcaaataaatcctagtttaaactgacggaaaatcttgcaagattaaagtgataacattttactagtatgaatttttgtgaaattttatactttaaatcttcaaaaccattttataattatcgattaatactatattaattaaccacatagcaaataaaggtaggaaaaaaatcttatactcagaatttcactttctcctcaaaatgcttataacaaatcataggtttcctcttttttttttctttaaaaataaaataccacaatatggaatttttcataatttttacttctagtttatgttggttataaacttttatgggttcaaaatataagcttatatttagtcatttatttctgtgtagttgtggttcaagtgtgtatattaatagtttgtgtttgagcttttttattaattggtagtttatccaaaattcaatttagaataaataatttgtttttatttatgaatgatgaagaaggtgcttattttttccgcccatgcacctgtatcatgctttgaaatcatgaagaaactgaagagcaatgccactttcactcagaatccatcctctcctttttctaatctgttgttgacatcttctcttgatattttaccccaatccaactcctttttttaatcactacaaataatccattctaaagacttgctgttaaaaaagggtatcagagacattcctattgaggtatgactatgaaagtaattaatgggataatttgtgtatctttttttagggcagttttctcaggcccctaatatcacactggaggctacagtttccccattggccctggcagaggaactgaagggtgatgggcttttatctccaatttatggtttttaagtgaccttaaagatatagttgctttatttgcttatctttcccataaacctcacacagttttattttatgtcccagtgacttgaagccctctcctatatgttctttcatttaatcctcacctccattcagcaggcttggcactgtggttatctctacatctctagcctcaaaggctggagactatgcagactctcctgcaccccagtggcttaatatgaagatatttttcattgaggaaagacattcctatacaaatgaatttgagatcaatttataagtaatgtttttaactaatggatagtagtaccactaatcagtcaagggcacttagggtctctctccctgtgcccaatcaatgttttagatggtgacatgagcacaggacttttaacatggatttaggtctttatttagatctttatttctacgtatttttaaagggtttttttaaacgctagtcttatttgatagtagatcaaattattggagcaaaatctttaacacatggcaaatggcagtacttaataagtatttgctgaatgatgaacatcataaaaagataggtttaggctggacatgatggctcacccctataatcccaccactatgggaggcttaggcaggaagattgcttgaggtcaggagttcaagaccagcctgggcaacatcacagactgtctctattttaaataaaaataagaagaacataggttttacaataaagctattttttcccttttgattctgtgtatagattaagtaaattgattcaataaacctaggaaatacttaagaaacctatattacatacttaggtaaatatctaattaaagataatctttataaaaatgatttaatattgtgggcgcagtggcacacgtgtgtaatcccagcactttgggaggcctaggcgggtggatcacaaggtcaggtgatcgagaccatcctggctaacatggtaaaaccccgtctctactaaaaataccaaaaattagccgggtgtggtggtgggcgcctgtagtcccagctactcgggagctgaggcaggagaaatgcgtgaacctgggaggtgaagcttgcagtgagccgagatcgtgccactgcactccagcctgggcgacagagagagactccataaaaaaaaaaaaattaataaagtggtacaatttttaaagttgcaaatatgaaaaatgaatgatttctgcatgaaataagaaaaatttggtttttatttgagcaattataagggtttgtcatttttacatgctgcctcattgtaggttattttcattatttaaaatgttatttgcatttaaaattacattgttgagaaagctataataacatgttgtaatccttgatatgttgtcatctctgttggtagacatcatctctgggtgagtgatttgcttgtaaaaaaattgttttgatttatttacattttatatagcattgagattatatcacatacaagaaaactatcctttttcagtgataaagattcaataatgataatgttagcaatggtatagctgtgaaataaaataataaaatttgtaattgtttttctacttctctgacttcttctagatgtattgaacaaaaatttaagcgctgccctcccctgcccaccaccagtgtcataatagtttttcataatgaagcgtggtccacgttgcttagaactgtccacagtgtgctctattcttcacctgcaatactgctgaaggaaatcattttggtggatgatgctagtgtagatggtaagaaagcacatgcaaattagattgtttcccaaatccatattgtggtatctacagtctacttggttatgtggtactctctgtatgccatctcagagcttgaatataatagtttggatagtgggtatggtgaatgaaattagaatccaaggatggacatattcaaatattttcaaatgcagaaatgtatgaaacaccattattcataactatgtagtcctcaatgtgagactgttacagtaaggcatagaggttaagagcacagacttgagcctttgagtcaggctgccttgatttgaatcccagctcttttcctaaccaactatatgacttgggcaagttactcaacctctctgctgtgatttatcagcaaaatgggaataatgccatatttcattaaatatattatgtgttgttaatttataaatcactagagaaaacccacagctaattaaacttaacatgccattgattataagaaattgattataagaagaatccaattgtgtagcttaaaattgaggaaatacagaactagtacataatttctagagttgttttaaagactgaatgagttaatataaatatcaataaataatataaatgaatagttaaaaagagtcaccatgttctattttatttcggtgttcttaaatattccaatattacttacaatgttagtcaaattctttagtacatttccacttaaaattggaagtcaaatactaaattacacattttaaattggaatcacaaggctaatttaacaaatactctaacttgtaaattttcaaacatcataagtattttaaatattgtgtcaaacagatacatattatttcaatgattacaaaatttattccttaataaatccaagtttggagttagattcctgaaggtcagatatctcattttatcctcccagcaatgtcttgtgatggtgagtccgattatcctcatcttaaagaaactgaggcgcagaaaaggtaaaattccttgcccaaggtcacacagctaaaagtaattgtgccataaagtgaaatcagggcatctgatttcatgtagctttctgttcttaacctcccaaataaagggtgtgcatgggagctaaatttagggtgcagatataaatttacgggaagttcatatgttgtgggtaagtaaatttttttttaacaaattccaacagtgagagggtatattgaagcaatctgtagtaactccatttaaaataattctaaccaagaatgttgaaatttttacaagcctcttaaaacagaaaatgtttatgattatatatttaagatgagttacaattctgcttgtctttctgagaattatttctgaggtagttagaaggtgttaaaagcttaatctgagaattattttgaggtagttagaaggtgttaaaaagttaatctattactctgagacaacagtgtttagatagatttatttttctacaagggttgttcctgcactttcctctcttatgaatgtttaagctttaaataagcagctctcttaactgaaccactggagaattgaaaaaaaggttatattatcacagataaagtcaaagtcatctgcatttccttctaaaatctggcagaagcaaacttttgccccaggacatttattgattttcttaacattcccaaatttttttgaggctatgttttgggcccaagaaggctgcttgaagaactgcattttgtactcaataagaaatcaaaaatttaattgagaaaaacaggcttaagaagttgtttcagaatatgaacagctgggcgcagtggctcaacctgtaatcccagcattttgggaggctgaggcctgcaaatagcttgagttcaggagttccagaccagcctgggcaacatgatgaaaccccgtctctaaaaaaaaaaaaaaagaaaagaaaagaaaaattagctgggcctgttggagcatgcctgtggtcccagctacttgggaagctgaggaaaactgcttgcagcccagaggcggaggttgcagtgagttgtgccactgcactccaccctgggcgacagagcaagaccttgtctcaaaacaaaaccagacaaaaaaacaacactggattgacatttgttaataacttttttaaaacctatgatctcaaattttgcttattacaaaccttatccaatttggtatattgaatatcttaaagtatatacccaatactaaaatttgcctgtttcatattttactaaataaaactgtcaggagactccaaagctttcgcaaatttttctgctgactctgtgtaggaatcgtcccaaactgctatagctgtggactttctgacgtggctcaacattttggtgttaaattattttgatccttgcttaaatatcagaggtctttagatatttgacatttttctttaagatttccagatttaaataccaatttcaaagcattgaatatctttttggccaaattccatatctttcactcttgtagtcagtcttctcagacctctaaatgagtcttttgaacggctagggttgactccatttgaagtttctcacttccctccaaacacattatatttattgataggaagtgtacagaataagtatgcattacagtgttttgtgttacagtagtgataatttgcatagctagcctttttccccagtaaggagttaaagataaaattttcattttgctggaaggacacatgcaactgttaagattatgaatttggaaggatcattgctctgtggtttcattagctttcataagctatatatgaaaatgcatttagaaagaattaaccctgattttttttccttacagagtacttacatgataaactagatgaatatgtaaaacaattttctatagtaaaaatagtcagacaaagagaaagaaaaggtctgatcactgctcggttgctaggagcaacagtcgcaacagctgaaacgctcacatttttagatgctcactgtaagtatatatgtatggatatggttgtaacattttccctccctctccctctaatttaaaaggtaaggaagtcttttcttttctaaatgcctaattgcattttctttaacagcgttttcaactggcgattatagcaatgacagcccaagcaggtaacagctctgtggagaaaattcctttcacttatgcagaattcttatctccttttgtgtttaagtttcctcaacttcagtgttctccagttactagctgttccagccagttatccttgcctcttttttttttttccatgtttcttttctgttaaaaaaaaaagtgtttgtttgtttgtttgtttgttttcttgattcccacactttaaagtgaatgaaagcttatttactatttaaatgtagccgggcgtggtggctcattcctgtaatcccagcactttgggaggccggcgttggtgaatcatttgaggtcaggagttcaagatcagcctggccaacaaggtgaaaccctgtctctactaaaaatacaaaaattagccaggcatggtgacatgtgcctataattccagctactagggagactgaggaatgggaatcgcttgaacctgggaggcagaggttgcagtgagctgagattgtgccactgcactctagcctgggcagcagagtgacactccgtttcaaaatgaatgaatgaatgaatgagtgagtgaatataatccaccctatcattaaacttcgtcctagtactgctgctttttttatattttagtttgtgtgtgtgtttttttttttaaatttgcagactccttggcataaaaaggagtctgcgaattttcaataaaaaccacaaaaccaaaatatgtttatatatatactttttatgccaggttaggggtgccccatcccatcttctttggtatcccttacataaacattgtcaatttttgtttgactttgctgctgttggtttttctttgtactttaattattttcagagtcaaagtttttgaagtatttagaaagcatttttagagtcaatgtgtcatatgcatgctagttattactaaactgtcattttgtcccttgagctctgagtttagtgggctatactttgtatgagtgtctagctttgaattggccagtgcttaggttatgtttcacccaattactagttttgagcacacaccgattattacagaagggcttttggatgtgcttgtgttgcttagagccatcacattcagttctcttttaataccagacatttagaaaatgaagagaacactaaaggtaatgctagagaggtgctttaaaaaggaaaataccatcctctggtatttcttctcgttgttcaaaattacaataagatcatactggacattcttacccactacccactgggtggatatgtctgacggtcctcccggaccatgactgccaaatactgctttgtggggagcccagaataggacagcacatgcattggctgaacttgctgtgtgttacataaaacagcctggcctgtgaccagggcttagacctatcatgacatgaaactccttggccctccctttatattaggtctggggcagctttgaatggtccttcttctccagttgctaaaatcggaatttatactgactccttattttctcctaagacccagtcagataaatgaaaatttcaattactgtaccttattcagggagatacgagtttaaataaatcagaacacttttagggccaggtaatgtggaacagcaaaaagctacctttgactcataggccattttaacacatcatctaaactttaaatacactggtgttattttgcatcttttgtagaagaaagaaggtcatcatctgtaggggaatttttctaactgtagtgaatcttttttcacctttttcatcctaccctcatctcatcacaataaacctttaaaaaatctccccttctggagatctattgtacaacgtggtgactgtaattaataataatatattgtctactcaaaaattgctaagagtagatcttagatgttcttaccacccgctccataagccgataaggtgatggatatgttaattagcttgattgcaataatcattttacaatgtatacatatataaacactatgatatacactgcaaatgtatagaatttttatttgttatatctcaataaatctgaggaagaaagaaatctccattatatacatgttcaaaacacaaattgactctgttattctcatttctctgtaaaccttcacctaaataactaaagaaaaaaacttcaatgtttttattgaattaattaaaattctgttccctccaggtgagtgtttctatggttggctagaacctctgttggccagaatagctgagaactacacggctgtcgtaagtccagatattgcatccatagatctgaacacgtttgaattcaacaaaccttctccttatggaagtaaccataaccgtggaaattttgactggagtctttcatttggctgggagtcgcttcctgatcatgagaagcaaagaaggaaagatgaaacctacccaattaagtaagatgattgctctcagagtcttatatttacaccctataccatacattgaatatgtacacactgtttgctttatagcaattgcctctgaggtaattgataaagaacacacatattctatataaagagaatctaaaagtcattcatttgtgtacttgcttatacatgatgttgctgagtaagaggtagcagtgagtgagctcttatgtcttcctcatcaatcattacttaaaaatcgtaaagcatggttaggagaagacatttaagtttactccaatgggagaggacacgaagtactccccccgaccccaaaaatcttgactttgaagatagcatttctagtttttattaatctgaataaaagctttgaaaatgtgatatggctttaattttttaacttcagttcttaaaatatgctgttttatcttgtttagtttttataacaaaatttgacaatggattatttttcagaacacccacttttgcaggaggacttttttccatatcaaaagaatattttgagtatattggaagctatgatgaagaaatggaaatctggggaggtgaaaatatagaaatgtctttcagagtaagtttatggaaattaaatatagcagatatattaaacaatgaaatatattgtgttctaatcggctggtacatatgattacagatgtgtgcactctactttttgtgctttctgaaacttaattgctggaaattttggaataagaatattttcttttaatatgtaacttaatatatttattcattgtcgccagtgtaacaagaggaatcagttaaactcctgtgtccaggcagtaacaccaattaatgcacttgtagctactgaattccagccaagataaatataattaaatctagtgcttcaggaaatgagttgatcatcaagggagttagaatggaaaaacatttatgaataattttaaaggacattggacttaactgtttggaatgaatgagcttgattttttctatacatattataagttaatataaaaaaaggctttgggtagactccgtatgtaccttatgtatttgatttcatgagtttcattttctgcagtaactttatcattcatttttcatctcttaggctggaatgtagtggaaaaagaactgaactaggagttagaagatttaagttttggctctggctccatcacatactggcagtgatgatcttagccaagtttgaactgcttatggcggggtcttgtttattcatttcagtatttccaacccctagcacgtgttgggtcacaagcacagtttgttgaattgaacatatcactgagtcttctcatttgttcaagaaagaaaggagagaaagagatttgtaatcacttgctctactacaagcacatagtattaaatatgacttattttctgattctttgcttggtaactatggcagagtcaattattaagatatttaagtgaaaaggcattgatttcatgatttgccattttatttagcattaatgccaataaggattttttttgacgttttctctctaaattggcatgaatttttaaataatcatcctctactttgcaagttcagtagaatgatcattggtaataatagccatctggaattgttttcttggttacaaaattgaatatacaagagataaatagggtctgagtccacttatatccaaactttgaagagaaactctagtttaagtgaagtgactatgtcagtagttcagacagaagtcaaatgcataagagcctttagttttctgtgcatattagagaacttacataattatttgcaaaaacaaaagcctggaattcatttttatgaaaaatctgaaatcaccattttgttaacttactgaaaatgcacttctgttgtctttagtgtctatgccatttaataaaataattccttacacttaagaacttaagttgaaatggcaggggacagagactatttgtaatattgtaatctcttctctaattttgtttttcataataccttaaaggtgaacttaaaagcaacactttgatttttctaaaatactgtaaatttaaacaaatatcattaattatcaggtatggcaatgtggtgggcagttggagattatgccttgctctgttgttggacatgtttttcgcagcaaaagccctcatagctttccaaaaggcactcaggtgattgctagaaaccaagttcgccttgcagaagtctggatggatgaatacaaggaaatattttataggagaaatacagatgcagcaaaaattgttaaacaagtaagttaaagctaagtagttaaattgcaataaaatctataacaagttcacacgtccttttgcgtcgattcatctcaagtacaaaacatcaaaaaatttgaaagtaggtttttaactcttaaagtacatgacttatgaatccaagtttccttttttaagaaaaaaactaagtaaactgctttttaaaaatcaggaattctacttgatgtttttaatatgaaagatagttcatttttgttgctgccctggttcaatattttactcgaagaaaattaagtagaactgtttttactggttttaggagatataacacctaaataaaggttctaagtgactttttgcactggagatagagacagtgtcttaatgtggcatgagaataaaccaggagtgccaagcctttttttttcaagctctagtttcactacttactggagatgttactttggcaaagcctttgagaatgtaaaatagggaagacacttcatagagtggctgcaaggtggctggacatggagtgcatgcttaacatatttcttttctctccttccctgttttaagagatgaaatacgcatgctgtctctctcccagagtagctgtgaaataagaaagtgataagtgctaacaaatatatggtactcttgttattaacctgccataaatagattctgctctgcagaatcatgaaacctaatatattagaagtgagttccaatagtcttaataatattagataaggtaaattaactagatagtttaagaccatgcttcagtgtatagtactcatctctttgtaggaaatagatagtgctaatttgcagggtgagggaaggtggagtatttattgggagtcaagggtatcaatattttggctgttgcggtgaagaacgatttggttacctctttccctttttctctggtctccagtatctccctgttaggatgcaaattaagagcactactgagttagattgctatctttttacccaaggccatgaagacaaattgggcagattgtgtactgtacaatagtacttggctaagcaggcaagtgggcactaaatgaagcttatgctctgcttgtcccccacaaaggggcacataaatcagcaaatacctgttggttaccacaggacacatagatctacatggtaaatgtaataagctagccagaagtcctaaagactcatactttttgctaaaacgcctgggttcaagacatcaaagttggcataagaaaatattttctttagttgaactgataagattgagtatttacttttgcatacatttagatattacatgtactttttctctaatattttgcctgtaggtcaaataccttgaagtttaataatggttttttaaaaaagttattttcttagtacgttaaaatgaaggaaagcaaaattcatttaacttgaaaattgcctttttctactaaaggttcagttggggatattgttaagaacaagcaacatcctgaaactagaaaaattactcccagtgggttatttcttgctggtggttttctgtgatcttgatggagaagagatagaagttgcattgtgtattggcactgtttgtctatacctgatttctgacacctcactttgcagatcatttttaggtataaagttgggaccaattttggatgctcctaccaccattcctttgcccacagcattttactagaaatctttgtcttgtagggaatgtttgtggcacaaatgaagaataaaatagcatcattttagtattttaatcagcactgaagtggtgttgactctcttttaaagccagaaatgaacaggcaggcatggtttttacttgaatgaatgatgaaggctgttgaattgcctcttgaatttttagcatggatttttaaaaatacctaaatagaaatacaaataagagtattttaagtgctttatcaatgttgttttaattaagcattcccttcatttctcatgtttctacagaaagcatttggtgatctttcaaaaagatttgaaataaaacaccgccttcagtgtaaaaattttacatggtatctgaacaacatttatccagaggtgtatgtgccagaccttaatcctgttatatctggatacgtgagtattttcctgttccttttttaattaatatactccttgccaccaacctttatgtggttctaagaaaattgctgaaatactttctttattgcttttgagattttacattataatcattaacattactttctaaattattttaaaaatatataaatcacatggattaaaaaacttttcataacttgaaaattttcctttagattaaaagcgttggtcagcctctatgtctggatgttggagaaaacaatcaaggaggcaaaccattaattatgtatacatgtcatggacttgggggaaaccaggtgagcactgcattaaaaatccttcacttgtaaagcatttacaagcacaagtgagatgttgcctatttttcagaagtcccacagcagctttatacttgggtaagctgtgtgtgaaatgttttcagactgagtttggcaattgatattgatgagtatttttttttggtttttactctggctctgaaaacaatttgagtagcttaaccattaaaaaaaaaaaaaaaaaaaaaaaaaggaggccgagctgagtggctcacgcctgtaatcccagcactttgggaggctgaggtgggtggatcacttgaggccgggagttcaaggccagcctggcgaatatggtgaaacctcatctctactaaaaatacaaaaatttgtcgggcgtggtggtgcatgcctgtgttcccagctacttgggaggctgaggctggagaattgcttgaaccacggaggtggaggttgcagtgagccgagatcacacaattgcggtccagcctgggtgacagagtgagactctgtctcaaaaacaaacaaacaaattaaaaaaaaaaaaaggaaaatgagaaaataatagaataatgccatttgaaattttttttaaaaagaaacttctatgtagctctttgatgctttaacttttgcatgactattggcatggtgattttgcaagtttacacataaaggccacatataactggattgaatcacaaattacatcaagtgttaataacaaaatagagcattataaattaattttgtgggccacaatattatttcaatatgttcctccttctccaacaaaagaggaagattctccttgattagtgacatacctgctttactaccttttgactattttactgattaagattcacatgtcaaatattactatttacttgcctatgggtagagaacatgttatatacaaagtttctgtttttttaagcttcctttccttaccttttgcagcttaactcctggaaagattagactatttccctcatttgttcattcaacaaattcattgagtgagccctgcatgccagatactctgatgagttcaagctatttagactctaactcctttaggaaatctataaactagcagttccttaggataaagcattcagagtgttctgggggtatagaaaagggcattgaatgagactgggtgtccacacattttcctgagaaagatgatatttgaaaacattaaaaaaaaaaaaagtaggtaggagctagtgaggtggctgtggggaatggcaacagaataagaagagtgtgaaggaaagtgaaatgaagagaagagcctggagtatctcttctgggcattgcaggtattttggtgtagagtccaagatgtgtgtggaggatttttgcaataattaatatccatgatgtcctattttaatgggacgaaactttgagatgtcagttttaggaaaaaagagccagtttatctcctggtccatcctcttctatatttcttcctacccattaggctcagcttaatctagttctaatccttattaacctaaaccaatcaatctactgagggcagatgatacagatgcccagaagccagagctggtgaactggatctattgctggatggttaaggtgtaattctgaaataggatggagatatatatggatgcatatagacagacatacatctatacctatatctatatacatatatatctgtacatatatgtgtatgtgcataaatctatatgcatctttttaagaattttcttaccctccatatattagaagaaaaatagttacataaataattgcattctttggaaataacactgatctatgcttgtaaaaattaagattttgagcaaagggaaatatttctgcatttgttaaaatcttactagtaaatgtaaatccctataaatttctcttaggcttcttctagcattacatttattttatcttaaaagctgaagatatattgtacacattgcttttttccatttttctgttatcattttcataaagataataacagctttatgatagctctgtatcaaaaatatgtttacattttaaatagaatatagctatcttttagaaattgggggatgggaaaacattcacatattctttcaataagtgtttgtttagaacctataaagtagcttgtactgactgttaccgtagtaaaaagacaaagctcctgatcttgtggagcttatgttccacaggaacaaagaaaaaaatatgtagttttgggcatgaagaaaaatatagcaggtaagggaatagtgtgtttcggggtagggtggttattttaagaggtgagggaagacctttttggaaaagcgatcttagagggaggcctgaatactgtgagagagtgttccaggagaagatgctcatcttggaggaaggatttccaagagtggaggcccagaggcagatacatggagaaagcagatagccagtgtacctagagcagagtggtctagcaaagaggactaggaaatgaggtcggggcattgatagggacctgatcatgtagggcttaactggccccattaagaaacttggacttaattctgactttgacagaaacaattgaagagttttgagcagaagaataaatattatctggtgtatatactaaatagaaacttcagcttttgttaccctaacacagctattgattttattttgctttatttccttgacattttatttttaatcaagcattgcacttaaaccgttttgcaaattttagttccctgagtgctaaaatttttagatattatataacttgatcattttttcatgtttccttctacttttgatcagataatatttttatagcataaaacttcatgtatgccaaataaaaataaatattttggttatgtgactaagctggccaatattactagtgtaatgcagtttgagtcattataacttgattatatttactgctttgcctcttctctactcgttctaagtaatgggtctctccaacattcacagttatccaattatgtgctcttttttgttaccaaagtactttcaatattttccattttttgtaatttttattttaatgactttttaataatgggtaaaatactcgacagcctttgttaccatttttgagatcttaaggcttatctttcttagccaagtatagctagaatgctattttcatcatctaaactcagtttcttcctgtgtttccatctgaagaactactagttctaaaaatgactgatgttttgcttgtgggcggagataaattaagcatgagactaagagtagggaaactcaagatatatggctctgtgaattcagcgaatgtttgtagagtgcctactgtaatacacataaagagtttaacacagtgcctgcctaacatgtaataaggacttaacaaatattagtgctcctactaattatttcattattgaaaatcaattatgttaacttattttatctttataatgtcaatattatgaaatattggatttgtgatgggtgttatgactcgataaattgcctgacttcagtctatggggaagccaggtctacacaccacacacaattctaatagagtgctagaaaagttatctctgatgtactatgggaaccttgaaaagattgtaattttgtgcagcagggcaaattcaggcaaagccaaagaaggaaggtagtatttgagttggctcttgaaggattaaaaaggagttagccaggcagaaaagggtcaaaagtgtattccaggcagaggacagactgtaaagcaaagtcttagagttatagatacatatgttctgattggtagaattgtgtgaaagaagcataatatataactggggcaatgattgatgcaagatcaaaaagaaagatttcatgtaccaattaaggagtgtggactttatcttagcaacagtagtgattcacttaagcaagggcagtcagggatcaaaccaatgctttaaaagactatctggcagcagattggattgctggatgataggaacagaaattggaagtagctgtaggtgtttcagtaaaaattctgagagtctgagtaacagaagtgagtacacggaagtgagaatggatgggatgttaacatctgagaggaatagtgcagctaagggacgaattacttggatatgtggagaaagagaagcatcagtagtaacaatagctaaaatgtatgaaaactcaccgtgtgccagtcattgttctaaatgtattatgcgtattaacccacttatcttcataaccctgtggggtaggaactattaaattacccattttctagtgagaaaactgaggcatggtgaacaccctgaagtccctagtttagtgaaaacacctttgattgagatgaagaagagagatggaacacttgtgggagagaggcaattaatgttcttgttataactcttcattcccttttctgaggaatgcctgggatagcctccactctccttgataacttccaacttctggtatggggaggaagacagcaccttgttaatgaagtaaccacctgttgatgaaggaaggctattgtatcgtctatcacaaaaactcagcttatgtttctaataactatttttattgtattattttgttgaaatagaaatgactttattatttaacgagttgctgatttatttatttattttgcaactgagcacatgggttgcttttgtcagtaacagtgctattccttccatagtactttgaatactctgctcaacatgaaattcggcacaacatccagaaggaattatgtcttcatgctgctcaaggtctcgttcagctgaaggcatgtacctacaaaggtcacaagacagttgtcactggagagcagatatgggagatccagaaggtacctcagtgcaattaattcatctatttaactatttttcttagctctacttgcttatctgggaaaatgagtggaacatggtacattaatattatctatcagaatttctctccctttattaactttgttattatgtgtttctacccatgtgataagagaatatatctatgaattaagtactcttagtaacaaaaaattaagttgcttggttgaaccgtgatatatgcagatgagcacttctgtgaattattaatattagtcgcttgttttttactatttagggtttcttataatgcttttagcaacagtcatattttttttctgtcagagagaagaaaaattattatatcttctcacttgaagtgattaatttttttctaccctgttttagcactttttcacaaacctagaattgagagaatacataacaggtctcttctgtttttaaacatgtttaaggcttagctgtatcatagcaattcttacctgaacattgttttgtgcagtactagaaaacgttaacactggcttttataatttatgatgtttttaagagtttgtcacttatggatatatcaagggaatacttcttgtttgaaaatgtgattcaaaccttgttctgtctgcctctcttcattatgtaatatcttactaattgaagagtagtagcttaaaaggtggcatttacactagaagccaaaaagagtttatcagacatggctcaccttagaaagatttgctattaggtttgcttcaatgaaaccataaaatctttttcatatttgtcacttaactatgagtcttggaatttaatgtctgttgtttccttttattctaggatcaacttctatacaatccattcttaaaaatgtgcctttcagcaaatggagagcatccaagtttagtgtcatgcaacccatcagatccactccaaaaatggatacttagccaaaatgattaagtgttccttaaaattaagttgaaaaaggaaatattctttctcataaaactgtgactaggcatacactgtagtttttgaaaattatgcaaaagcagctaaatgtaacttattccaagtgcatttttcttatttatatctttatgtagcactactacagaaattctgcaagtttctgtttcaaagcacaataactagtaataccaaagactatttcaaaatgtccagatgtaggggaagagatgtttacagtatgatgaaaataattttccaagtaaagtgatgtttgtgtgttttgtacacttagggatatatatatatagctacattcacacactcacaatttaaaatatttcccctagttttttggggggataggaagaaagatttgttactgtatttttttaactacataaaaatagatcaataaatgtcagcattggcctctgtgtacaaaccaagagcttttacagatccagaatttattagtttaaaatgcaggtgaacttttttttgcgtttggtttacttgtctgtcaaatgtttccttaaacatgaaactgaataaggagaagagtatttttaacacttaaatttcttggcaaattttaaaacattttttagtctgtaatacactccacttgaagcacttaagtcttccttaaatgacttttcttaagtaatgatactgtgtgttttcccaaagcacttttaaaaaaatttttataaattactatctgttgaaaaggtgtccttttcctttcttctagtatttttttcttaccaaaattcactaatcttgaatgtttgtgatattaaatttcaaatgcagaatacttgactcatttaaagctaaattttgttactgattcaattataattgtaatggatttttgactttgtaatggattcttttcatcaaaaagccttatttttttatctatgtggaaaacacaataaaaaatcctcaacactattgtaatcatttggttaagtttttttcctcttttgggtaaaatctgtaattgataataggtgggggaaaatgaattttgtatgctgaatttctaagcgcctattgtttgtaaaaccatcagatatttcttatggcacaaaaaatgaggaatagcaaaattcctgtgttcaatatttagaaaattttgtattaatttctgataaagttccttaagcatc

SEQ ID NO: 9633 - DNA, 476 bp, Homo sapiens
cgtcattttatatttagatctcctgtattcttgttcccgaagtaaaatacgatcggtttcatattttaaatctggcagagcctcagctgtacgaaaaagagcatatactggttattgaccctatcttctcattgtttgtttgtaagtttgaatttgtattaaaaagcctgcattctgagctggacatggtggctcagcttctaatcccagcactttggtaggcaaaggtgggaggatcatttgagctcaggagttccagaccagcctgggcaacatagcaaaatctcatctctacaaaaagtaaaaattaaaaaatgaaattaaaaataaaattacctaggtgtggtggcacgcatctgtagttccagctatacaggaaggtgaggcagaagcattgcttgagcttgggagatcgaggctacagtgagctatgattacaccactgcacttcagtctgtgtgactgagcaagactct

SEQ ID NO: 9634 - DNA, 12232 bp, Homo sapiens
ctatggtgcacctggcgtggagttcacaggcctgcaccgggatgcagccactgtcacacagatgcacttcttgaccggccaggtgagcctctgcttcccactagccagctccctgtggcccccatatctactcatccccctaggccagcctagttttcatctctgctcacacaccagggccgcctcctgtccctgcttgatgacagcagtctgcatctctgggagattgtccaccataatggctgtgcccacctggaagaagcactcagtttccagctgcccagccggcccggctttgatggtgccaggtactggagaacttggctggggccagccaccgggcagggaggatctgggggaggctgtgggaacctgctgtgcaaaggcagcatggagatgggcagcggttcagggcgggatgccttgagctgggcctgggtcccaggctgcagctgttggaccctgctttactgaggtatactctgaacttttcaggttaaatgggaggtttgggttgagtccgacgtgagcaggtaattaacattgtgagcagcaggaggtacatgcattatatgccaaacttctaggacctgaggcctggcactacacttactgcaatgatgggggtgtctaggggtttggggcagggcctaagccagttagtaacaggaagggtcccctggcctcttcagttgtgggtgggagacaggcctttctgtgcataggcagggttgagggcaaggagggtcccatgggctgtgcttggtaaggcgctggcagcatgccccagctgagtgagagtgtggggcatctctctccccagccctgcctgaaatagctggaaaaggggagtaccaacccagggatggattcctgatgcctcccagcttctgcagatgggggtatctggggccctcctgcgaagtcaggagatgtctgagcgctggcagcgggattcctaggaggggctcagcggggagctcctggtcctggcttgggcagtgccctggttcctgctgtcctctcctggtgggtgggaggagctgggagcccagtctgcaagacctagggaccctatttttatccatctccctgctgacatcctgatgaataattgagcgggctgatgatgatgcatgtcttcctggggtggctctgtaagtaggccctggtgagtgccgtggggccagtgatgagttatcagcagtggcccagcccctcacaccccacctgagcaggtggatgggcttgtaccctcactcccttccccttgttccctgcagtgctccgctcagccttacccgagtcacagtggtcctgctggtggctgccggcgacatagcagccctgggcactgagggcagcagtgtcttcttcctggatgttaccaccctgaccctgctcgaggggcagacgcttgccccaggcgaggttctgcgcaggtaagaggccggtgggcttcccagcacccactgtgtgcccgggaagttctgctggctcacctgccttcctccacagcgtgccagacgactaccgctgtgggaaggcactgggccccgtggagtcactccagggacacctgcgggaccccacaaagattctcattggctacagccggggcctgctggtcatctggaaccaggcctcgcagtgtgtggaccacatcttcctggggaaccaggtatgtaggtgaggcctgtgtcccctcagcctgggccccttgtgcatgcccaccatggctcatgcctgcctgcctgcctgcccctgcctgcccgcagcagctggagagcctatgctgggggcgtgatagcagcactgtggtcagctcacacagcgatggcagctatgctgtctggtctgtggatgccggcagcttcccaacgctgcagcccacggtagccaccacaccttacggtgagtgctggggacaccttagccagagggtggtgatgggagggggcaccactgagccaagccaaactggctgaggagggacttccccgagggggtggtctgggggcagtgtgtctcccgccgacttcccggggaggcaggaggcagctgtaaggtagagagcagtggagggcagagcaggaatggcagaattgctaagaaccaccagtgagtctggtctgacgctgtcccacccctcaggcccctttccctgcaaggccattaacaagattctgtggcggaactgtgaatctgggtaggtcgagggagtgggtgtccgatgtgagttgggtctggctagggggctggaagggtgggctctccctaggttgtgcagtatgtgctctggacccaagtggttcatggctcgcacacctccctctgcacataggggccactttatcatcttcagcggtggcatgccccgtgccagctatggtgaccgccactgtgtaagtgtgcttcgagccgagacattggtgacgctggacttcacttcccgcatcatcgacttcttcacagtgcacagcacacggcccgaggatggtgcgtgccctgccgtaccctaccctttcccagccccacctggtgccctctgccacctatggctgtgctcaccccatactccctccgtcccacagaatttgatgacccccaggccctggctgtgctgctggaagaggagctggtggtgctggacctgcagactcctggctggccagctgtgcctgccccatacctggccccgctgcactcctctgcaatcacttgctcggcccacgtggccagtgtccccgccaagctgtgggcccgcattgtgagcgctggcgagcagcagagcccccagcctgtctccagtgccttggtgtgtgcggcgatcaggggggtcttacagggtggagtcttgaggagggggagagtttcagttctaagcccggaggtcagaatgtgccatactcggggtgagagggagaagatgttcgtcctaaccttgtgcatacatctctgccaccccctcccagagctggcccatcactgggggccgaaacctggcccaggagccgtcacagcgagggctgctgctgacggggtaggtgtgcgtgcttatgtgggtgagtgggccccttgctgttgggggagagcccatcctgggcctggtgggtgcagaggtgccaggagactcaggcctggcccctggtgggaccaggtagttcctccttgcccaaggtggtttggaatgaaacctccctggaccttggttcaaggtgctgccctgatctgccttttggcctggaactgagctctaccaaaccccagggctccacccgcccagcctgcctgccctgggactggaaaatctgggctggcccacgctgagctgcccagggaaggtgccagagagcccagcgtgggcctggcgggcgctgacgtgcccagtgactcaggtctcaacttcctgccctgcccccactcccgcctgtgctgggaccctcaggcctctgactctggtgtgcccttccctgctgaagagcttgccgtggctttcagggctgctggaatgagtctcaaccacccccacagtcacacacctctcacgccctggctctgggctttcaccaccgcctggggccctgcttggactctgcagctgtgtcccaaggctgcgccctagatttgtctactccttcccctgccccctccctgctttctcccggcctctgtagtcttcctgctcctccacctacgtggctgccttgggccccatgcagctcctcccccgggatgccccatgctctgttctgtgactgccttactcttgatcacctctgatggctgctccagtgcaggcagaacccccaaagtcctctgttctctacatgtccccctttgccacctcctgttaatcagggtggtcatttccaccttgtttggtttaaaggctccaggtgcatatggtgcatgtggcctggcctataacaggtgcacagtgtacctgtgctgtctacagtaggtgcctattgttttttgtaacagtaggattccggtcagtgtttggcacgtgcagtaggtgcttagtgagtggttatcagatgagtgaatggaggggcgtgcaggcctcccaggaactcgggtatccctgacatctgccctccctgcagccatgaggacggcaccgtgaggttctgggatgcctcgggtgtggcgctgcggtcgctctataagctgagcacagctggcctcttccagacagactgtgagcacgctgacagcctggcccaggctccgaggacgactggccacccttccgcaaggtgggcccctcccctggccctgatgagctggtcctgaccccgcctggactcattactccttcccatccctctaggtgggctgcttcgatccctacagtgacgatccccggcttggcgtgcagaaggttgctctctgcaagtatacagcccagatggtggtggctggcactgcaggccaggtagggctgggtgtcccctgggttggagatgtcagggagggctttctggaagagatgagctggagggtctggtggaaagggagatggactggcacaggcaaaagccaaggtgggaatagggctctgggtggggctggctggggtgaggacagatgggaagtgggcctgtcgctgggggaacacagtgttgaggggagggactcatgtcagtgctgtgctccggatcacatgacatacaggaggtgctcaatgtgtccttattgctaaatgggagatagaggctcagggtaagggtggacactttgccctcagaggacagggactagtgtgtcttggtcaccactgtgttccttgtgctcagccagggccttggtatacagtacgcattcagtgagtgcttgtttagctgatgaactgaagacagtcctagaaccaccttggtggtggctggggctgcttcagaggctccaggctgagtggggcccagggcggcccctcccctgcgctgatgctccccctgcctggctgtgggctcaggtgctggtactggagcttagtgatgtgccggtggagcaggcggtcagcgtggccatcatagacctcctccaggaccgcgagggcttcacatggaagggccacgagcggctgagcccacgcacggggccgctgccctggcctgctggcttccagccccgtgtcctggtgcagtgcctgccgccagctgctgtaaccgctgtcacactccacaccgagtggagcctcgtggcttttggcaccagtcatggctttggcctcttcgactaccagcgcaagagccctgtgctggccaggtgtgtggggtggggccggctgggcagttggagcccccagcgagatggggtctgggcttccgtttccacctctagtgtttggtgtggcaaaggccactaacctccattgccctataagaaataacctggcagctccaagaaggacattctcagtaccacctgcagctgggtccataggactgcgccagaggggctgtgactccctgacctgggtgcctccacaggccagcaggagtgtggtggctgccccaggaggctgctctatagcacgactggaccctgtcttcccccaggtgcactcttcaccccaatgactccctggccatggagggtccgctctcccgggtgaagtctctcaagaagtcactgcgccagtctttccggcgcattcgcaagagtcgtgtctctggcaagaagcgggctgctaatgccagcagcaaggtgagctggggtgggctgcacaggagctgtgcctgtgtcctgtgccttggcctggctctggcctgggacccctggggcctgcttagctcagtgctcctccctcggcagcccctgggccctccagagggatgggtgaactaagctgggtggtagaggaatggtaacagaacgtagggtgcaaagcaggatgcaagccactggggtgctagggagacagtgttcaggagcccccgcccggcagttgcaggaagccaatgcacagctggctgagcaggcctgcccccacgacgtggagatgacgcccgtgcagcgccgcattgagccccgctctgccgatgactccttgtcgggtgtcgtgcgttgcctatactttgccgacacattccttcgagatggtaaggcaggggcaggggcagggacagggcaagggttgggggggctggcctcaattggccacctgggagatgggtggtggcaagggaggtggtgggactgcaccttccaggaggtggctgggcacggtggctcaagcctgtgagtgatcccagcactttgggaggccgaggtgggcggatcacctgaggtcaggagtttgagacccgccaggccaacatggtgaaacctcgtctctactaaaaatacaaaaattagccaggtgtggtggcgggcgcctgtaatcccagctacttgggaggctgaggcaggagaattgcttgaacgtgggaggcggaggttgcagtgagccgagatcgtaccactgcactccagcctgtgcaacagagtgagaccttctcagaaaaaaagcttaccatccagctctcccagggggactgctgggtcacccccagtctctctgggggagctggatggtaaaggatttttgagtgagctgggtgggcctctcagatctgagccaggagaagggaggttgaggcctggtggatgacggtgaggggcaccagccagtgcccaggccccgagccgggcatgtgtgtgggcagctgcccagccacttggctggagtggagcaggtgagggtcgaggtgtgtggttcagggagatactgctgctggccagaggctgaggacctggctttgattctcagtggcctgggagccctgggaaggtcctggatttgttgattgagtcactgattgattttgaacttgtacaatgggagagtttcaaacatacacaaaaatagagaggtggaaagttgtcccacatacctcacatgcctgccaccagccatgtgcccctgcggattctgcccccctcctccacattctttgctgttttttttgccggggtattttaaatgaaaacccagatacaagtacttcagcatgttcctgacagatgtcactgacagccactgctcacatcatgccctgtagaaccaatgtgaattcctgagtgtcatctgcttggtctacgagctcagctttctgatgccatttatttgtcgagggtctttgtgcagtggattttctcactgtctggatgtggcgggtgcagctgggggtggggggttctttgactttttgttttttttgactacaaagacctagaagaggagagcctggggtttttaacttgttccactggcccgagaaggccgatgggttcatgttcatggccggctggggttcctgttgggcatgttttgagttgtgcagacacttaatgcctcaggatccatcgggtcatcagggagcaggtgccgagtctgctcttgcttctgctgggctgggctctgattctccactaaagcttgtcacccagaggttcagttcacacaggcagagcagggtcgatggatggtcgtcctaggtgtccccaggcttggcggcttcctctggctgccacgtagggagcacactgaagacagtgggggtgaagcagggctaagacaaggcacacctgtcgacaggactagcaaggggacgcaggggtggagagaggagtcggggtcttgtggggcttggggcctgagtgatgctaggatggagctgcgtttactgagatgggggctgagggtgcagtgggatggggctggaggtctggtttgggtgcccatcagcattctgtgcagatgcgctacagctgttcgggcctctgcaggagggctgcatcctgggctccgactgcagtcagcagcatagagctggggtctcaggcctcgaggctggaggtcaccagggaggcatggggcaggagggaatcagccctgagtcccagggtgtcatagttaggaagcagggctacaagagaggcagggagggacctgcagtctgtgggaagaccccaggggagatgcctggcccacagggagcaccctcctacgcgcttgttttctgcaggggcccaccacgggccaccatgtgggctggcaccaactcaggctctgtgttcgcctatgcactggaggtgccggcagcagcagtgggtggtgagaagcggcctgagcaagcggtggaggccgtgctgggcaaggaggtgcagctgatgcaccgggcgcctgtggtggccattgccgtgttggacgggcgtggccgcccactgcccgagccctacgaggcctcacgggacctggcgcaggcacctgacatgcagggtggtcacgctgtgctcatcgcatctgaggagcagttcaaggtgagccactgtgggctgtgggggactctgggggactcccctccaggccccaacctcatggacaccattggaccctcaagaaacccttcctgcctgtatcccccactgttgggaccctaattcccttgcaccccagaaaacactcccagccagcagagaactcctacccaagaaccctgatgccccctcagcctgctgagttcccctgggagggcaggaatctagtcctatctcactgtgccacacaaggctcctgtactgggcccagacccctgagcccagtccccaggggctctgcctcgaaagaactcgaggtttgatggggataccagctgcataaccttggcataactctgtgattgattttgtcacagatcgagagagggcctgggaggtttctggagtacagtgtgaagtctggagtttagtggggcagccaggtgtacaggcacgggaggccacgtagcatgcagctgggctttgtggtgggggctgttgggtcagcagccacgagggtgaggggccctggggacgaggacagggccaggctttgtgctcaccagccacctgctgtcaggtgttcacactgcccaaggtgagcgcgaagaccaagttcaagctgacggcccatgagggctgtcgtgtgcgcaaggtggcactggccacgtttgccagtgtggcctgcgaggactatgctgagacctgcctggcctgcctcaccaacctgggtgacgtccacgtcttctcggtgcctggcctgcggccccaggtgcactattcctgcatccggaaggaggacatcagcggcatcgcttcgtgcgtctttacgcgccatggccagggtgaggcggggcagaggccgaggaggccttcctcaggcgagcgaactgagtgggaccagtactgcttgggagcaggaagggcactccaggtgggcacaggcccaggccacggaggagctgtggttggtggtatcttctaactgcactcctcattcttctgcccacccaggcttttacctgatatccccatcagaatttgaacgcttctccctaagtgcccggaacatcacagagccgctctgctctctggacattaactggccccgcgatgccacccaggccaggtgtgtggaggggcagctcctagcctgggggacctgtgcccagggccaggtctcatcccacccccgagatctgccttccctgggctcaggagtgggagggcaaggatctagcgtgccagcctcaagtcatccacctatggtccccatcatggccccatctctgcagttacaggatccgagagtcacccaagctgagccaggctaacgggaccccaagcatcctgctggccccacagagccttgatggaagccctgatccagcccacagcatgggacctggtgaggggggcatgaaaggggtccagaccctggccccacggtgccctgggggagggagtcgggactcacatagctcagggatcgggcaggcttctgtaggagatgggtggttgtgtgctcactggtgccacccctcaccatgggctgccttatgggtctgtgtccctaggcccccaggtgcagagggtgctaagggtcctggtaggggctgatgacttgctccctgtagacaccccggagccacccgaggctgcactctcacccatgtccatcgactcagccaccagtgctgacaccacgctggacacgacaggggacgtcacagtggaagatgtgaaggatttcctggggtgaggctggtgggcaggtccacagggggggctgccctgtcccctaggcctccgtccccagggctgccaggggctcccccgcccccacccctgagcaccatccccatctcgcagctcctctgaggagtcagagaagaacctgaggaacctggcagaagacgaggcccacgcctgtgccatcctgatcaaatgaggtgctgcaggggtggggccctggtcctcaccactggtgacgtccacccccttcagcccgtctgggtaccatttggccctggtcttctacctgagaccctggcaggcccatgtgatggcactctctgaaacctggctgccttccatggagtgcctcaattggggacttctggtgctcacacagacaccagtgtcatggttgggtattagaaaagcagggccagcccctcagcccttgcatgtgacaggtggtggttaggacaagaccagatttgttttgttttgttttgttttgttttgtttttgagacggagtcttgctctgtcgcccaggctggagtgcagtggcgtgatcttggctcactgcaacctctgcctcctgggttcatgccattctcctgcctcagcctcctgagcagctgggactacaggcgcccgccaccacacccagctaattttttgtgtttttagtagagacggggtttcactgtgttagccaggatggtctcgatctcctgacctcatgatccacccgcctcggcctccctaagtcctgggattacaggcgtgacgaccgcacccggccaacaagaccagattaacccacttagaggtggcagtagtttggggcttgggagctggtttggccagcctgtttcatagatgagatcactgaggtgcacgaggtcaggtctcatcggttgggcccagcaagtggctgacttacccctgcctgagtctgtggatcctcacctagatgtggggcccatagatctgcccagcgcatttgctgcctcatgttcccaggcacctgactgtaggccatagcctcaccctgcacaggacatggacacctcccagctctttgtctggtgcctctccctggcctcagtggggcatatgtggcctggcgcttggatacccatctggagactcagcaagcccatctcaggtggtcactgaagggccatgcctgccctgcagaggagacagtggcagcacctgtgtggtctggccgctgtggcaatccatctgcccttttgccctccctcaccttctgctgatacctcttctctccctcttccaggaaggccagaactatcccgacctccacctgccctgctcggagctggagtgctggatccctggcacctgcctggccccttaacatagaaccacgcctgctaacctgtaggctccactgggacctgctgtcctgtcccgcctgaccctgggccctggagcagcaccagccccagggtgtgggcctgggacctgggccagaactgagccctcctgcaggcatttggctgccctgggggcccactgcctagggaagaggacaggtggggcccagcacctgtgccacctccccccctccacacaccatccttccccctcactttgcagagtatttttccttttttttttttttcttaaagacggagtcttgctctgtcgcccaggctggagtgcagtggccccatctctgctcactgcaagccccgccttctgggttcccgccattcttctgcctcagcctcccaagtagctgggactacaggcgcccaccaccacgcccagctaattttttctgtatttttagtagagatggggtttcaccatgttagccaggatggtctcgatctcctgacctcgtgatccacccacctcagcctcccaaagtgctgggattacaggcgtgagccaccatgcccagccctgcaaagagtatttttctagcgcctgggctggacagttgtttctaaaactaaactattttggtacctgcttctgggccagtccccagcctgtcatgagtgtatgtgtgcgggcatggatgtgactgggagctctgctgggcacccacatctggggcctagtcaggtgtgtgtgtccggcggggggggggg

SEQ ID NO: 9635 - DNA, 2875 bp, Homo sapiens
acacaccatccttccccctcactttgcagagtatttttccttttttttttttttcttaaagacggagtcttgctctgtcgcccaggctggagtgcagtggccccatctctgctcactgcaagccccgccttctgggttcccgccattcttctgcctcagcctcccaagtagctgggactacaggcgcccaccaccacgcccagctaattttttctgtatttttagtagagatggggtttcaccatgttagccaggatggtctcgatctcctgacctcgtgatccacccacctcagcctcccaaagtgctgggattacaggcgtgcgccactgcccagccctgcaaagagtatttttctagcgcctgggctggacagttgtttctaaaactaaactattttggtacctgcttctgggccagtcccagcctgtcatgagtgtgtgtgtgcgggcatggatgtgactgggagctctgctgggcacccacatctggggcctagtcaggtgtgtgtgtccggcggggggtggggggcggggtgggggggggtcaagatgagtttccctgtagattgtaccttggggtttttttctgtcgttttgttaaaattagcgccattttaatattaaaaatactgatttttaatattgaaaataaaagcatttaatatctcttaaagggcatccacatctgctttatccctagcggaagagtgagggggcttcacacgtgcactcacactgtggagagagttggatttcccagacccctgagggcacctgtcagggtcatccccattggtgctgcttgaggctactggggactgtggcactggacgtggctggagcaggtggtgtcacctgagtacattctttgctagcagacagtggatgaggccccttcctcttcctcaccaagcctggggtgtgccagcctgtcttaggccagggccttgcagaaggcgctccaggcgtggaagcagcgggtaaaggcgtgctgctcattgcccttgcggaccaggcgcagcggcgcggccgctcatgttccttggaccgcatgtgctggatatatacctggcaaggggacagcgagccttgggtgatgaccctgccctgcccacaggcccacctcggccctccctccacccagattacctggcaggccttcaggctcagcttgatctccacctggctagtctgggtccccacccacatgtagacctgtgggggcagcaggggagatacggttgcatgggtgcctgggaacagccccttgctcctggcccgagaattcccatttgtaagtaagtctatgggcgcctccttggatgggcagggctagtggcaacatcacacctcttggccattgtctagcaacatgatgtcatcatctgccaggtcatcttggcaaaagtcggagcatttctcagtcactgcaaagtagcccttctcgttggagcacctgggaatcaagggtcaaggtgaggccagaggtcataagcagcagtgccaggactgaggggagggtcagggccctggcctcaccggaagagacgtgtgtgtttcatgtactcggcatcgtcatcatagggcttctgtgccccaatgcccacccagaagaagttctcaggctcctcaccttcgttgataacctgcgggaaaggccagtccagcccagggcccctgcctgccctggctcctctgtgtgtgcccgcctgcccgcccgcctcctgacctgcttgctgtaggaggtgtcaaacatggtgttcaggatgtcttctgccaacttggcttcgtcagggtctgatgcccggcccacccaggcatacacgatgccctggttgtcctcactctcaaagggaacctggggagtgtgcaggggtgggggtgttcgcagctgactcagcccccaaacaccccaccccttggtccacggagtcctggctcacacccacaaccccaccttgaggatgaagcagaactcggagttgaggaggctggagtcggtgttgatctggatgcacctgtggaagggatggggcatcagcaaggattcaggcctggctccctgacgcttgctcgccactgcgtcctcccccagccaggcaccgggtgcagagggcgctgccgttggtgcggatctggtagaggctgggctgttgggcgccctggaccgccttcctcttgccccggtggatgatgaacttcctcttgaaatgggacaggaacttggggttctcctgctgctgcgtcatgcgtaccacctggggatgtggaagtgttaggggcagctccctggacccccacctgcccctcgggagcctaaccttcgctgggtctgggccccaccacacccctccgcctggcctcgggctcgcggggctgccaggcacacctccagcttcccagggaagaggctctcgaacttcttttgcaggctgaaggtgaaggtgagccagcccatattggaggcttcacggccctgccagaagtacacgatgcactggaagtcctcctctggctgcttctcctctgcctcagcggttgcttcctcgccttctttgccctcggccttctcctccttgtcttccttcttttcctcctcctcgtactccacaggcacccagtacctgccgggttggaaggttgtgagcaggggctcgagcccccagcaccaggggagggacttggggaagggagtgctgaggtggtacctgcagaggaagacgtagcagtcctgcgtgtagaagtggccaaactcctcttccggcagccgcgcaaacttcttgccctccagcacgaaaccctccatgccgtctaggtcttcgttccactcctccatcagctgctccgcctgcaggtgagagggaccgccccgc

SEQ ID NO: 9636 - DNA, 99 bp, Homo sapiens
cagaactgagccctcctgcaggcatttggctgccctgggggcccactgcctagggaagaggacaggtggggcccagcacctgtgccacctccccccctc

SEQ ID NO: 9637 - DNA, 8477 bp, Homo sapiens
aagtgatggaccagatgataaagatgaagagcatgaggacgaagtagaaggtaatttgatttgtttttcaaagtgttggcatgtgttttgtataaggtttcctagaagagtctttatgcattttcatcagataggctctaggttatcagtgtaaaacattataaatcagggtattcttgaactaattttgtttgtccacttttagatcctttgttgagtagttttatttgattgctacactaatgaaattgtcattggtataaagaaatactgggcaggcacggtggcttacgcctataatcccagcattttgggtggctgaggtgggtggatcgcatgaggccaggaatttgagaccagcctggccaacatggtgaaaccccatctctactgaaaatgcaaaaattagctgggcgtggtggcgggcacctgtaatcccagctatttgagaggctgaggcgcaggattcacttgaacctgggaggcagaggttgcagtgagccgagatcatgccactgcactccagcctgggtaacagagccagagactctgacttaaaaaaaaaaaaaaaaaaaaaaaaggaatactttatgagaattatttgactatttgagagagattaattacagtctctctacataattattttcaaaatacaaaagctaaaattcttactcatgttataagataatttattataactatggcatattattttcataatattttccttccaaactggtaacttgtagaaccagggtttcatgtcaaacttacgtgagtcagtaagtaatatttttacttaccttgttttctaaaagatatttctaaattaattattcttccctcccccagttccagtgcttcactcacgcatacacatatttgaagaaaatactcagatccttccttaatgaacatagttccaagtatgtcaatactagatatcactggccacagagttttggaccatagtttgtaatccttaattcatgttagagtatctgagtttattcatctgagtgaatttagaaactttactttgaagctgagttttcattatattcaggcggttgttgaatttttttctgaaagtctaatttttttcttaattttgaaaataccaataatgtcttctataaagtgcacttataaaagtatttgtactctttgagatatttgtttttgaactagtgatgttttaaaaattgcttctctagaagcaggcaaacagaaaatagctaaaaagaatttctcgaaatttactttatgacacctgaattttcagttagtttaacaccttgtttagggaagtcacatcccagtttttaagctgtaatcttcagacttaagattattattttttagttttaatgcctctgtaagtagacattctttatataaggcttctagaagtcagtttttctcatcagatataaagtcgagatggggcaatatttttagtgttattgatatttgatattgatattccccactgcaatatttgtttcattcttgttcactaaaaaagtgttgactttgtttataaaagttatgccttttctcaagtaacatctgtgaacagttattctaaaggctatacatcgtataaatgcatgtggttacgtattctctaatgaactagcgattgtttaactagctttactgaggaatgattaagaaaaaagaagatacaagttaatgtaaatatgaaatttatcttgaaaaagattacttttggcactaaccaggctgttaaggatttcttttgtagttggtagaaatcaggagattaattatatgttgatatgtcattactgagtttttgagattataggtatttctcattatatagaaagttacagccagctttaaatttgttagagattggtaaattaggagctagattggtctggatttatagaaagattcaaaattatggaaatcccaaggcaacaaacttatttttttaaaaaaataattttgtagttgcaggatgtcagtccctccccttttcactaatggttagagacttctctaaagagagagccgtttggaggttcttgtaggccaggcaaccaggagtcctgaactgagaaaacaccagcagtgcaaagaagcagtgggatgattagcttctagccccctgaactcctcaggattgcagaaaggcccagagaccatgccttgtaccatggtatgccaaacctatttttgattgagagtgttggagagaggggagggaagagacaatacatttatttttagagagtaatgtggaccaaatctttttaattaaaaattagggaccaacacaactcctaaaaataattaatagtggtctagaatggcctgcaagctgtagcagagaatcagagacatctgtcaacaaccttccattactggtacatgttggcctgatgtctgccagcatgccctggtgctcacctcttgtggtgtgtgttaaggggtggaggggtcctggtctcagcactccttattgctcaggtatcattaagcagcaggaatgttaaacgcatgatattggcccataagtcattatttctgtcaacagagatggatccctctttgtgatgaaaacataattatcataaaaaaagaaaataaatttgagataatcttgagactagaagtataccagaaaattccctgatctggcttttgggtgtaagtggttgcatatggcatttccccccacttttgtctgaagaatgagagattaagagcatggagccagactgcctgtgtaaatgtcctggctcagccacttccccactggaagactctggggctctctttgcctcagatctctcacctgtagaatggagacaataatagtttctacctcatagagtggttgtgaggattaaaggagtttgtacatataaagagcttagaacaatacttaggatggaatatgtgctgcacagatgttgctgctcttctttatttgagatttctgtttttttgtggggttttgtttgttttttgggacaaagtcttgctctgttgcccaggctgggtggtgcaatctcggatcactgcaacctctgcctcctgggttccagcgattcttgtgccacagcctcctgagtagctgggactacaggcatgtgccaccacgcctggccggattttgtatttttaatagcgctggggtttcaccatgttgggcaggctggtctcgaactcttggcctcaagcgatctgcccacgtcggcctcccagagtgctgggattacaggcctgagccaccatgcccagcctcatttttatttttattgtaatgatagctttatagttttattttctctctaacccactggtcataatttatatcaaattatggcatttatagaacttgaattcagtatgttaaaatgatgttttatatttttgcaatcaataaatgatcaaagttattcctttgttttacattattttgccctttagaagttttagttgaggttatggtgtggttagaaaaagatggatatttttttcaccattcattagaatcctaagaaccagaaaatatttgtatctacttgacaaccagagtattgagagttaaattgatgagttttactttatattgtttacatttaaatattaggtttggggcaagatggaaagacactgctaattacgaatattgacatggagccatgcacggtagacccccagctaaggattattcttcagtggctcattgcctctgaggctgaagttgcagaactttattttcatgactctgcaaataaggagtttatgctagtaagtacctaccttacagagtgtgaggatacatttaacagtatatgatgttcttgtcatgtgattggtctaacaagatgcctggtgatggttaaattcttaggctgtagtgtccaacagtttgggttcagacatcagctctgccactttctagcagtataaccagaggcaggttcaccagtctgtctcattgcccctaactgcactatgcaaatgaatatagaatctaccttacaggggtttatgaggattaaatataatgttaaaaaaaatgcttggtctaatgcctggcataacactaagctctcaaaggtagatgctattaataagcattgtgtgtgttcctatgaaaaaattgaattattctctgtatttaattgatttgtaattgtacctaatgattaatatatctgtttctctgataatccagtttcatttgtatgagcagctgtcataattaaaagccgataaaagtttaaacaagatgcttactatgtgccaagtaccttattagtcaagattttcagtttacagtcttaaggtttttgttccataattttctttatcagaactttccttttggggtggtagaaatattcgaattgtggtgttggttgcattcaacttggagaacatactaaaaaccattgactaggacactttgggtgaattgtatgttatgtgagttttatctcaataaagctgtttttaaaaaggttaagcatatatatgttacacaaaattaaagtagtttttcagaatttaacttacagatctttcaaaacttaagagcttttacagaacttagtagaaaaagaaatgaacaaaagcatgtcgtgagtggtgacaacaggatttatttaaacctgtatttatttatttatttatttgttgttttgttgttgaaacattaacattctttaacttagaaagccatgtttccattgaggctagagtgtgtattccagaaaaatgccacactatatgttgtggaaggaaaatccacatccttttattgagtttgacgttgtctttattattttatgtcctaattgagggtgtggcagttgtatttagttaggtgaagaatttcctgtagaaactcagcctctgcatgtccatgcagactatttgcttggtgaggtttgtggagctctgtctccagcgatcccaaagtgtcattctctggaggagatgtgtttataaaggggaagaagggaaaatgtttaatttgggtaaaggggtagcggtttagaggggaagaccttgttataactaggaaacggtatttaattgtaaacagcaggattcttaagtttcagctaatattgaaaataaaaataaaagctttgttataaaattgtttttggttaatgtttgacacatctttctttcttagctttcaaaacaattacaagagaaaggatggaaagtgggagacctcctgcaggctgtgcttcaatactatgaagtgatggaaaaagcttccagtgaggagagatgcaagtcgctgtttgattggctcttggaaaatgcatagagcaaaccccaaaccagtatattttagtatttgtttggggaggggaacaagccaataaagatgtttaggataaaatttgaatagtgaatattaacatcgtaagtcagttgggaggcaagtaaatatagctttctgagcgctttgtgttatcactcggtgtatatagttcatacttttgtaatctgtcaaaatactaccttcatttattcttctatacacatgtgtagtgtgtcaagaccctaagaacatgtatttgaaggaaggtctaaccagggggttttcaggggcattgtctgaccacattctttttgtatccaaatagtgctgctagaaactgcactgaagtggctgaggataggttccagtgatagagttataattttgctcctttgcaaacaaatggtatctaattaataactagtctgacatcagaaaataaaattgaggctgatttttaaaaatttctagtagatttttggcctttctttcctgtttttaaaaatcagtttcattttcatatttcatagatcagctattggtagctttttgatttccccaaactatttaatttcttagcagaaacattagtattttaggtttctataaacactataagtgatagtttcccccatcctttcattgacattatttgccaatgctgccagtcattctggcatgaaaggtgtgtgtgtgtgtgtgtgtgtgtgtgtgtgtgtgtgtgtgtgtaagggagtactttaaccttgccagtttgttccctcttttattttactgttttctttttagaaacccactgttaaaatttaaaaaggtgctttaaaataaaacgcctataaagattgtgcagtaagaatttttattgacaataattaaaattttttttgacaattttgggttcccaacttatcttacaagtgaaaacttaaattgtaaaacatgttgaaattttaaaaattaatgttaatatggaaatgcatttagagaagcccagtagtttttattgttggatttttgaaaaaacctctaccaagaatgtggtgttttttttgtttgtttgtttgtttgttttagaaaaattgggatttccccccaccccgccccacccagataaactatatctacactgtctcgtcaagttctctgacacgatctttctgggctctacatttcctactagtttgtgtccagaaactgcaagttgacatgaatagaggacaaaggttgtgtcttgcttttgtctctctcttccctccctgcaactctctctcccctcctcccactctcttccccctcccccctcctcccactgtctctcacctcccccaccccccactctctctcatctctcgctgtgtcctgtgtatgtgtgggtgtgtgtgtatttgggtgtgtaaatgttggttcttccactactggattttgtaatctaggataaatcactttttttggggactttgattttgctccattacgttttcattttttctgagcactgactgttctgaaagctgcacaaaacgtagaaagaagacatagcgcctgccagggaataggaaatgagggcacttacacattaatgtgaattagtaattgtggtatagaaatgttttatagtgaaagattcaaatttgcttttcaagaaaaatgccaaaagctatttaaataattcgaggttacatcgtaggttttgatttttctcaatttaagatacagaaatacagcaagccttaatataaagtttcctaaagtttcttcaagtattttttaaggtggagaaatgcaggaattgtataaccagaattgttcctgcctttagcttttcagaacttgagatgtggcagcactggactgggtttttttaaatgttaggactaggaatgtttgctcttgttaattatgaattaattgattattaagtttagaatgcatttttacaagtatctaactatcaaattgtgtttagtaacttgagtgtatgcacaagtttgatcaacagcaaaatagagttctgaatttcttttaaagtgatgatatattattttgtgaaactttgtgtttgaaaatgtttatttctgtttatggtgtaatcattctgaggtgaggcttttcttatttcctttgcattttgctagagctgtgctgagttcagcatttgcttatttaaccactacataatgacagaccagttattaggtattagcatgtgtggtaataataatagtggaacttcacacttacatcaattcagtgcaggggcatagaataaaatattaaatattggcagatgtatgaaaagaagtgtgagttaaaaatattgaatattggcaggtgtgaaaacaagtgtcaaaattcctcatatagagaaaataattttgagtttagagtattatcttttaattaagtgtagtctaaacttaactttctgtaaaggcactttgtggtttttccaaagatgttctagatctatttggttgctctatagtcaaacagctcttttgaagacaactgtcttattttattacaaattggcttgacatatttatactgtaacattgtaatattgctgtgctgtacattttggcccttacgaaatacgtctttttcagaactgttaaagttttgatgtacatcgagctgaattctgtttttaccagtttcaaaaccttcaagtgatatgtggaaaaaagtgaatgagacctctgatagggggttttcagaaccttgttcacaccaaaatgtgacagttctttcatgttttcctaaaccaagttaaaattacatgtatattttggtgttaaggttgatttttaagatacttctgatttgtacaaaaggaatgtttcctttataaatcacagaagaaaatgacaatatctgttggatatttgatataatttaatggtgttataaaacctttaagaggattcatggtgaatatatgtgataacatctttatactttgaaaaatgttccacttacccttcagatatttgttgtaagttaattcaattcttaatactttaattttgctccaacaagggctttatgttgctggtaagagaatttatttactaaatgcactatgtataaagtgaaagatagtttacttatctgactttgatattagatggctgacatt

SEQ ID NO: 9638 - DNA, 687 bp, Homo sapiens
ctacaccgccgtgcttataattatgtatgcgtgagtctgtttcttccttagcgtctgatttctctttctcaggcagttttaatctgttgatctatttgttactacctgcaccagggccacacttttttttccttttagaaaaaagggtcttgctatgttgcccaatttggtctcgtactcctgacctcaaattgtcctcctgtcttggtcttgggattacaggcatgaaccactgcttggcccacattctctttacagtagtttttgacagctggcaaagcaagtccttatgtaaccccttaccaatacctgtaattatttttcagaagcatcttctaattgttttttagctatttgaattatcacataagaatccacctgtcaggtttcacaaaaaaacatgataggctattgggattatgagaaattgataaaaaaaatcactttggggagaatattattatgcttcttaatttttttcctttaagtcagatgggtagcgtggtagcatcctaacaaagtttgaaggaggcacatcgtacacatatgcctgaaaacctgatcatcatgcttatgaaccacaaaaggatcttatgctttctttaccgactcgttaagtataattattcccattgagattttgcaagtcttctcttaaagtttttctaggtacttgataggttatga

SEQ ID NO: 9639 - DNA, 687 bp, Homo sapiens; identical to SEQ ID NO: 9638

SEQ ID NO: 9640 - DNA, 410 bp, Homo sapiens
ctgtagctttgtttggcttctcttgtatctaatcatatcatctgtgaataatgacagtgtttattatttccaatctttatgccttttctttttcttgctttatcatgctgcctaaattctccattgttgaataaaagtcaagccagtggaaatttatcttgttcctgatctcagaaaggaagcttcaacattacaccattaaataggaagtttgctgtaggattttatatagatcttttataagcatatagatattcccattggtgagggagggattcctgccataggattatgaggttggcccaatacataacaactgacactgggcagatgaaattgacaacagtttattagtcacatagacttgtatagccctggggaggacactacattgccaggcagggccacat

SEQ ID NO: 9641 - DNA, 544 bp, Homo sapiens
gtgatctcagcttgctgcaacctctgacccccaggttcaagcgattctcctgcctcagcctcccgagtagtagggattacaggcatgcgccactacgcccggctaattttgtatttttagtagagatggggtttctccatgttggtcgggctggtctcaaactcccgagctcagtgattcacctgccttggcctcccaagttattattttttttatgagacttgatcttgttgtgttgtccaggctggtctcaaactcctgggctcaagcaatccttctgcctcagcctcccaaatatctgggatgacaagtatgcgccaccgtgtctggctattttaattttaataggagttattttatattctcgctatcttcttccattctgtttgccttttttatagggtcttttattttttgaatttgaatttttgaattttatgaatctctgtggtaagtactctcgttttaagaatctttctgggctgggcgctgtagctcacacctgtaatcccagtactgtgggaggatcactcgagcccaggag

SEQ ID NO: 9642 - DNA, 544 bp, Homo sapiens; identical to SEQ ID NO: 9641

SEQ ID NO: 9643 - DNA, 410 bp, Homo sapiens; identical to SEQ ID NO: 9640

SEQ ID NO: 9644 - DNA, 4370 bp, Homo sapiens
acaaggaccagctgactaaggagctgcagcagcatgtaaagtcagtgacagccccatgtaagtacccgaggaagctaagtgagggcagatggaaggggtcagttcccagtactcctgccccatgtctcctagggtggctgtgcagggggaagcttggagactcacagtagtggcttttttttctgcataagaagcaatttggcttagggatggggtgttctcttaaaaatgtatttaaactgacaaattagaaaatgatctattaaaagcaaggagacatagataaatcctaattcaggtgattacaacaaatatttcttaagcactttctatatgctggcaatttataagagtgtttaagataaatctagtataaatgctgaactcaggagagtaagaaaatgacaaatacttataggacagcccatgcgatattacaagcacatgcaatgttgtgaaataacacagaggagggcataattaactctgcaagagttaggaggaggttcaaagaggagggcctagtgagtaggcattttcaagatgtaaaggaatagaggggatgatgtggaaagaggaagaacctctcaaaacaagacagggctgggcttggtgcctcacacctgtaatcccagcactttgagaggctgaggcaggatgatcagttgagcccaggaatttgagaccagcctgagcaacacagcaagaaccctgtttctatttaaataagtttaatatattaaaaaaagacaacagagtaaacaagaagcactgaggcatgagacaacatgacatgcaaaagacagtaaagttgaactagtaacataatttctaatgtctccaaatgacgaaagtagcatacagctcttaaaactgacatgagaaagtgcatttagtgacttcagtctttggtggaagttcctagtgtatgaaatggaacagatgagaaaaggccttggttcccatgctgtgggaatagggaactggtgaagggctaagtatcagaggacgtgtaattcagataaatcactccgttggttacctggagggtgaatttgaggagaatgagactggaggcaggagcaaggcagtaccagtgcaggtgaagaaagaacataggtagaacttggccaccaattagaaaaggtgagaggaggagccaaggagagggaaacatgtgggatcacggccaggtttcaggctggaacaggacaaatggcagaagcatccaatattgaaaatagagtcagaggagccttcttgagtggagagggataacagggcattctaggacaggatgggtttgagatttcttgacatatctgagtggaaaagtcttggaagcatgaggccacaccagagctcagtgagggcaagaagatagggagtgtggagtcatcagcttgcaggtgacagctgaagccattctcccacttcaggagagaagcacatgagcaaagagctgagattcctggagaacaccaacattcccaagtgagctgaaagagagaattcggaggagggccagagggaaaattaaatggaagagtgtgctgtagagatagcactgtgatccagggcttgatctttgaaggcagactgcctgaatgacagtttccttttctgtaaatgagagtgaaattatctacccatgcatggaaaaaaaccctcaacaaactagaaacaggagggaacttcatcagcatgatgaaaagcatctgtgaaaacctaacagttaacagatttaatggtgcaagactgaatgctttcccctaagattgggaacaagacaaggatggccatgttcagcaggtctatgcagccttggttctgaccaggatgattaggcgattgatatataaaaggatccagattagaaaggaaaaagtaaaactgtcttactcccaaatgtcatgatcttgtatacagaaaatcctaaggtatccagtttaaaaaaaaaacaaaactagaactagttcagcaagttcacaaaatcagcatacaaaaatcaattgtatttctgtacactagcaatgagaaatccaaaaatgaaattcagaaaattattccattcacaatagcatcccaaagaataaagtactcactgtggaaagaaactaaaaaagaactaaataaatgaaagatattccatgttcatggatcagaagactaaatattattgtcagtactcatcaaattagtctacaggatcaacctgattcctatcaaaatcccagctaccttttctgcagaaattgacaaggtgatcctaaaattcatatggatatgcaaaggacacagaataagcaaaataatcctgaaaaagaagaacaagattggaggacttatcttcctaatttcaaaacttgctacaaagtaatcaagagggtatggtactgtcttaaggacagatgtataggtcactggaatatagttgaaagctcaggctgggcactcatgcctgtaattgcagcactttgggaggctgaggttgggggatcctttgaggtcaggaattcaagaccagcttgggcaacatagacagtgagacctgtctaaaaaaataaaaattaaagacaaatttgattagccaggcatggtggtataggcctgctgtcccatctagtcaggaagctgaggtgggaggatctcttgagcctaggaatctgagaatgcagtgagctatgattggctactacactccaacctggggaagagagagaaaacgtatctgtaaaagaaaataaagccaagtgtggtgtcttatgcctgtaatcccaaaactttaaagggccaaggagagaggatcccttgaaaccaggagtttgacaccagcctgggcaacataacaagactctgtaactatgaaaattaaattaaattaaatttaaaactatggctgggtgtggtgtaatcccagtactttgggaggctgaagtgggtggatcacctgaggtcaggagttcgagaccagcctggccaacatggcaaaaccctgtctctactaaaaatacaaaattagccaggcgtggtggtgtgtgcctgtaacaccagctactccagaggctgaggcaggagaatcacttagaacctgggaggcagaggttgcagtgagctgagatcacaccactgcactccagcctgggtgatggagggagactctgtctcaaaaagaaaaaaaaaaaattagccaggtatggtggcacacacttgtcgtcccagctacttaagagactgaggcaggaggatgaattgagctcaggagtttgaggctgcagtgagctatgatcacaccactgcactccagactgggcaacacaataagaccctgtctcgaaaaaaaatgaattgattaactgaaaaataattgaaatcccggaaagaaaccattacatttaaagtcaattgatttgacaaaggggtcaagaaacttcatttggaaaggaatagtcttttctttttttgttgtttttcattttgtagagacacatgtctcaccatgttgcccaagcttatcttaaactcctggagtcaagcaatactcctgccttggtctcccaaagtgctgggattacaggtatgatccactatgtccaaccatgaatagtcttttcaacaaatggtggtggggcaattggatattcatgtgcaaataaattaatttgggtctctgcctaacaccatacacaaaaattaactgaaaatggatcacagacctaaatgtaaaaactaaaactataaaactcttagaaaaaaacacaggagtaaatccttgtgatcttgtgtaaggcactgatgtcttagatgcaatgtcaaaagcacagttcaagaccagctggggctaaataatgagacctggaaaaggaggaaagggaaaaagtgagaaaatgaaaaatggcaaattgaacatcagccaaatttaaaactttggcacatcaaaagatacaatcaaaaaagggaaagacagcccacagaatgagagaaaatatttataaatcatatgtctaataagtgatatatccagaagaactcttacaactcaatattaaaagacaatccagcttaaaaatgggaaaagaacatgaatagacatttctccaaagatgatatattaatgtccaataagcacattaaaaagtgtttaacatcagtcactaggaaaatgcaaatcaatccacaatgggatgtcgctttacacccactagaatgaatacaaccaatcaagacagataacgccaagtgctggagaggaggtggagaaatcgaaaccctcatacactgccagtgggaatataaaatggtgcagccacttttttggaagatagtatgtcagtttcttaaaatgttaaaaataaaactgctttaaaccc

SEQ ID NO: 9645 - DNA, 1320 bp, Homo sapiens
aacttgggccactagtttaaaaatctcagggtgaagttattgttcgtattttacaatagtatgataatttaagcttaaggaagataagagctttacaatcacctattagatcatttttgtttagatttcctttaaattgttatctacttagaaaaattattctaaagattatagttatagttcacaacataataaaagatacttttgccttccttataaaatgttattttcagggttaggaaattacctaaaaaaataagctttaatcatgatttatgttctgagactttggaagagggtctatattaatataaatatttagaagaaaaaaatgtatcatcttgaaaggccctgaatattttcatggtggtgtttcttttttacaaataaatctttaaaagaatactttcattttttaaaacatcagaaatttcaaatacatacaaaaataggatcatataatgaacccccacttatctgttgccagcatcccagttttaaacagcatatagccaatgttatttcatttatatgctcatctattccctgctcccccaactattttaaagtagattctggatgtcatttaattttatatataaatgattcaacatacagagctctaaaagagaagtgatttttaaaatgttaaaagcgccattaaagacaaaaaagtaatgtcatcaactatctagtccatcttcagatttatctgaacgtctcttcagttcctttatagttgagttgttctattcagggtctgaacaaggttggtgtacacattcattgcactcggttgattatctttatcatagaagaacacctcctttaacctgtaggaaccctcatccccaattttttttctatctgtttatttaagaaagcgggtcaaatgtcctctggaatttcccacatttggatttggctggctgcatccggatggtggcattaacctgcctcttccagccccttgtattttctgtggattggtggtttgagccacaggcctgatgaggctggggtcccttgtgtgagaatactttgtggtatgtggggtgtgttttctgttgcatctcatctggcaacacatgatttctggttgtatcccttctaatttcacgctaacaatgtatatacaatgaaaatggagctttttatgattttaaaattaatcagtattttagatttgttcattaggtatttatattactagtaaatactgtttaagcaaaacaaaatttaaaagactcttttacgtaggcttctgaaactttgcttaattcaggcaattaagataaaaatatcaaggtaatgttttgc

SEQ ID NO: 9646 - DNA, 1320 bp, Homo sapiens
aacttgggccactagtttaaaaatctcagggtgaagttattgttcgtattttacaatagtatgataatttaagcttaaggaagataagagctttacaatcacctattagatcatttttgtttagatttcctttaaattgttatctacttagaaaaattattctaaagattatagttatagttcacaacataataaaagatacttttgccttccttataaaatgttattttcagggttaggaaattacctaaaaaaataagctttaatcatgatttatgttctgagactttggaagagggtctatattaatataaatatttagaagaaaaaaatgtatcatcttgaaaggccctgaatattttcatggtggtgtttcttttttacaaataaatctttaaaagaatactttcattttttaaaacatcagaaatttcaaatacatacaaaaataggatcatataatgaacccccacttatctgttgccagcatcccagttttaaacagcatatagccaatgttatttcatttatatgctcatctattccctgctcccccaactattttaaagtagattctggatgtcatttaattttatatataaatgattcaacatacagagctctaaaagagaagtgatttttaaaatgttaaaaacgccattaaagacaaaaaagtaatgtcatcaactatctagtccatcttcagatttatctgaacgtctcttcagttcctttatagttgagttgttctattcagggtctgaacaaggttggtgtacacattcattgcactcggttgattatctttatcatagaagaacacctcctttaacctgtaggaaccctcatccccaattttttttctatctgtttatttaagaaagcgggtcaaatgtcctctggaatttcccacatttggatttggctggctgcatccggatggtggcattaacctgcctcttccagccccttgtattttctgtggattggtggtttgagccacaggcctgatgaggctggggtcccttgtgtgagaatactttgtggtatgtggggtgtgttttctgttgcatctcatctggcaacacatgatttctggttgtatcccttctaatttcacgctaacaatgtatatacaatgaaaatggagctttttatgattttaaaattaatcagtattttagatttgttcattaggtatttatattactagtaaatactgtttaagcaaaacaaaatttaaaagactcttttacgtaggcttctgaaactttgcttaattcaggcaattaagataaaaatatcaaggtaatgttttgc

SEQ ID NO: 9647 - DNA, 2867 bp, Homo sapiens
aaacaaagaaggcatgagaccggttcatttaaattccctggaggagtgataataattgagctaatatgcattgccttctcataaattgcttcagtagtttaggccttgagtggcttagaaattagctgtctccccttgcctcttcactgttgctatagaatccagctaaaggcctgtttgtttgtgtttaaagaactaggataacctcttatattcactgacagaacttacattttgtttttgtcttctaagaactctgcaaagcactaccattactctaataagactctcactactaatttcattataacataccagtaaatcaacaaaataagatttagagcagtaacttccagacctgtctgagcatcagaattccctggagctcttttaaaagaatgtagttctctggctctcaccccaggttctctgggcctgggaatccaggaatctgtatggttggaaaagacctcagccttggagattcaaatttcccaagtgatttagatatgggcagtggactcatgattgggaattggaaagaccctagactagtagatagatgcttatttgagcttgatagtggattatttaataactggaagaggaagtagaagagatgataagttttaggaatatttagtgttttcatccatgacttgagtgaatgcatcaaaaatgggtaaaagacctagcaccttataaaatgggatagaaattccaaatgactgtgacaaaattaagaggaatgtctgttacagacaaatgctgaatagaaaatgtagaatagaaaacagactacataaaaagaaaaagcagaaagcaagcaagcatgcaactgggaaacaaaaacagaagtgtgacatgaaagaagaaacacacaatgatctttctttaatttaatgttttcccctgaagctcctgtgttgttttctgcttctcatctttgcaaagttcccagaacagatgtttgtgttttgtgtcctctttcatactctcatttattcttccaccctgaagctacctccgaaatgctaccaatcacctctcaattgccagctgagtattttgttctatttctgctgtcactaatgctctctggcatttgatctttcaactctcttttccaagacttcactatggtggctggccttcttctgatctaactactccatgtgggcccctctttctctgctgactcttgagagtggtcctgcccttgccctttgatctctcacttgacatgctctgccatggacttttcttccttttggccagagttgcttcagtagatctgcagccatgacttttcctctgaactccaacttttccttttccttttcctttcccctttcccctttcctttcctttcctttccttttttttctttctttctttctttctttttttgagacggagtctcactctgtcacccaggctggatggagcgcagtggcatgatcttggctcattgcaacctccgtcacctgggttcaagcaattctcctgcctcagcctccctcctgagtagctgggactacagttgcacaccaccacacccagctaatttttatatttttagtagagacagggtttcaccatattggtcaggctggtctcgaactcctaacctcaggtgatccacctgcctcggcctcccaaaatgctggaattacaggcatgagccaccgtgcccagccactgcacaccttatttctattggctttccaaacagcttcacccagaaatctcattgatcctcatctctaaagcttggtttatcttaccaagcctacctaccctctctataccttaggaagctaccactcatgtagtcaacaaagttaaaaaaaattgtcattgtcatcagtcttctctgaacacgtttcattgacaaccaagcctgtctctgattttcatctctaaagtgtcccttgaatatctctctctcttgttagtcctatggctactgatgatccttgccttctcccacttgactttgttaaaagaaaaactttagacaaaataaatataacagtttatttgagcaaataacaattcatgaatcaggcaacactcaaatccacaagagattctgagagctccgttccagcagtatgggcagggggctttcataggctgaatgtggaggcaaagtaaagaaattacttgattggttatagctaggcatttgccttatttggatatggttcaatagaaagtccctagttaatataacgaatttgctagttggttatctgcgattggctgaagctccattcaaaattaatcagtcacaaggaatgcctctaagttaagttttggtttgcttatttatgtaagggttcctagtacagaaacaaccccagactaatggtttcttgcttattttggcttaacagcttgttaatgataggtatgcagtaatttgtgataaagagggaaaaaaagatgaagagaaatattaggaatagaagtattagtaatgaaaaaaagacgtaattagatcaggaatagaagtattagtaatgaaaaaagacataattaaattaggtggaaattaaaataaaagactattaagaacaacttcgtgccaataaatttgaaaactaaggtgaaatagaaaaattcatagaaaaatataaattgttaatgtgagctaagaataaatataaaccctgaatagattattaaagaatttaaaccactggttaaaaaagaaagcaccaggtctggatattttaccaggacagttcgccccaaaatttaagaactaggtaactccagttttatgtacttgaataaatgttaacatctccaattcattttatgaggttactataacttgacactaaaaactaggatca

SEQ ID NO: 9648 - DNA, 2867 bp, Homo sapiens; identical to SEQ ID NO: 9647

SEQ ID NO: 9649 - DNA, 379 bp, Homo sapiens
gatatatatagtatcactcatctagatatctcagactctgaaataatataattgactaatttggaatttataagttaaatttataaggtttttaacaaatatatttgtaatggaattatttgacttttccaaataaattgcataaagatgtaaggattgcaacagtttatattaaaatttttttctggtttgcaatacttgggtggcctgatgaaaagaaattcttcaactttagtctctttcctgcattgtgttcataccactcatattttaaaagttgaccagtactttttgttcacttcttaaatgatgaaaaagaagccatcatgtaatttttttaaatcgtaagtattgtgcaaaaagcattaaaaaaaaaaaa

SEQ ID NO: 9650 - DNA, 379 bp, Homo sapiens; identical to SEQ ID NO: 9649

SEQ ID NO: 9651 - DNA, 379 bp, Homo sapiens; identical to SEQ ID NO: 9649

SEQ ID NO: 9652 - DNA, 6065 bp, Homo sapiens
gttctagatttttatttatttatttttttttgagacggagtcttgctctgtcgcccaggctggagtgcagtggcgtgatctcggctcactgcaagctccgcctcccgggttcaagccattctcctgcctcagcctcctgagtagctgggactacaggcgcccgccaccacgcccggctaattttttgtatttttcgtagagacggggtttcaccgtattagccaagatggtctcgatctcctgacttcgtgatccgcccgccttggcctcccaaagtgctgggattacaggcgtgagccacctcgcccggcccatgttctagattttttattctggtttagcaggatccaaactgcctgtcctgaagagactctctttctcttccatacaacggctggcctctaccaagttaactgcttcgtggggggaaaatattgcctttcctttggtctgcatgttttaagggaaataccaaatacacctacaggagtttatcaataatagacaaggctgatttcaaactctttcaggagataaactggaggggaagacgaatggcaggagggtgaagaggaaactgaattactgtgcaaacacccgccactcaaatccgggtggttactgcagagtgaataacgataggtactatttcgtgtaaggcaaagtcctttgaaagggctcctagagcgtcaaggcctccacctgatgaatgaatgagtcaggcaggcccagctccacttcacggatgggaaaactgaggtacgaggcctcgctgaaagatgcgaggcagagcggagaaccagaagcaccacttctctcaggctgatgctctaatctcggctccccccgcccctacaatggcgtagacggcctccgccgcccgactcacacacaccctcccccgggaacggcaagtctcctcgggttccaaggacagggtcaaaagacagggtcaaaagacaagaggcccgaggcgctcccgccgtgatttgcagccagataccgttgggagcgcagccagagagcgttgggagcgtgcgtacctccagcccaacatggcggcggtacggcgccgcccccgaccccaagccctccctcagggcccgaggcttctcctcagggccttccggtgggcgggaagacagcgcaaccccgccaggcctttctcgtcgctgcgcctgctcgttgaaggagtcacctacccgacgagactaacggctgcggcgcggaagccccacagcccgccgagaaccaggaatacgagagccaggcgcgcggcggcgggacctgtactgagcaagaaagaagatttcaaagtaatttattgttatgagatccgtgcttttatcttgtctcagactcccaatgataggcacatactctcctctgtacatttaatgaaactactaaaatatttcgatttaaatcttccacctatttgttttctgtgtatcctacctgttcccgaccttgacattttcaaagaatacaggttacttattttgttttttggtggtggtgagtttttttggggttttgttttttggtttttggttttatttttggagacagggctttgctgtatcgcccaggctggaatacagtggcgcgatgatagctcactgcagcctcgaactcctgggctcaagggaccctcctgcttcagcctcccgagtagctgggactacaggcctgcgccaccacgcccgggtaattttttattttttgtagagatggggtgttctatgttgcccagtgtggtctcaaactcttgggctcaagagatcctcccacttctgctgcccaaagtgctaggattacaggcatgagcaccgcgccgggacagttattttgtagagtgttctttaatttggatgtacctcatcttttatgtatctttgggaggaataccacataactcatgtggtttatcccatcgagagacacacagtgtcaatgtgttccattcttggtgatgttaacttttattacttagtgaaaataattctaagagatttcaccactgtagagtgaataaatgaatatgtgggattcatcaatgaataagtaaaaggatgccaactggcaaaagaactgagttgggaggatggcttgagcctgggaggtcgaggctgcagtgagccgtgatggcaccactgccctccagcctgggtgacaaagcaagaccccgtctcagaaaaaattaaataaataaataaatacccagcacctgaacatctcgggcatttcctgtgcctcttatattgggtccctggtttcttggagcgtatgtcttttttttttttttcttggtttagcttctcatttttgtaaaaaacacgttcttattttgtttaccattttgacaaaggcgaatttgggttaaaactttgggacccttataagcttgacagtgtctgtattctacctcttttggatgacaccttaactaggtttgaaattttaggttgaatgtggttttcacttagaattttgaattatataacattgtctgctagcttacagtgtttatcttaaaatatgacaatttgatttgtgttctgttactgttctttgtctttcaaagcatttaaaggccaggctcagtgattcatgcctgtaatcccagagttttgggagtacgaggcaggaggattgcctgagctcaggagttcaaaaccagcctggatgacataaggagaccctgttttcataaaagtaaaaataggccgggtgtggtggctcacacctgtaatcccagcactttgggaggtcgaggtgggcagatcacctgaagtcaagagtttgagaccagcctggccaacatggtgaaacgctgtctctactaaaaacacaaaatattagttgggtgaggtggcatgcacctgtagtcccaggtactcaggaggctgaggcaggagaattgcttgaacccaagagggcatggttgcagttgagccaagatcgcgacactggactccagcctgggcaacggagtgagaccctgtctcaataataataataataataattttaaaaaacatttaaaattgtctcttcgtactagttttctgaaatttcacagaaatgtgttttggtgtggttcttgtttctttcgttgtacaaggtactcagtggatctttgtattaatattttgaagactcatgatctgtgtttctagaaatcgccttttgtttgttctgtgaagttttcttccattcatttttcttctctctttctgaaattctaaacatccttttagttggatgttataatttctgatttcttctggtagttttgtcatctttcatcccttttatttttatttatttttattttttgagatggagtctcgttctgtcgccagactggagtactgcggcgcgatttcggctcactgcaacctccgactccctggttcaagcaattctcctgccttagcctcctgagtagctgggattacagacacctgccaccacacctggctaatttttgtatttttaatagagacggagtttcaccatgttggccaggatcgtctcgatctcttgacctcgtaatccgcccacctcagcctcccaaagtgctgggattacaggcgtgagccaccaagccgaaccacgcattgtctattttctcattatttatagcattgttttgcagcatacttgttggagtcaaacatttgttactatccaattattattattgttatttgagatggccttttgctctatcgcccaggctggagtgcagtgctgcactcctagctcactgcagcctcaacctcctgggctcaggtgatcctctcacctcagcctctcaagtagctaggaccacaggtatgtgccaccacacccagctaattgttgtatttagtatagagacggcgtatgaccgtctccaggctggtgtcgaactcctaggctcaagcaatctgactgcatcagcctcccaaagtgctcgggattacagcgtgtgagccactgtgcccagcccaactatcatcatctttatttttattattattattttttgagacagagtctcactctgtcacccaggctggagtgcgatggtataatctcagctcactgcaacctccgcccccgcccggttcaagcgattctcctgactcagcctcccaagtagctggggttacaggtgcttgccaccgcgcccagctaatttttgtatttttagtagagatggggtttcacaatcttggccaggctgctgttgaactcctgaccttgtgatctatccgcctcggcttcccaacgtgctgggattacaggtctgagccaccgcgcctggccactatcttattattaaataatgttacatgcagtgtctttggggagagaattcagtttttcagagacagactttgctcatttcctgatttgttcattttaattcaaatagtaaaagctttagaaaggcatgaggattgcttgactccaagagttcaagaccagcctgggtaacaaagcaagaccccatctctacaaaaaacactttttaaattagccaggccttgtggtatgtacctgtagtctcggctactgggaaaggtgagttgcgaggatctcttggggccaggagttgaaggctgcagtgagctatgattgcaccacttcgctccatcctatgcaacagagcaagactctgcctcggtcaatcaatcagtaaagatacttatcaaaagtaagcagacatgcaggcagatcacctgaggtcaggagttcgagaccatcctgtccagcatagtgaaaccctatctctactaaaaatacaaaaattagccgggtgtggtggtgggcgcctgtaatctcagctgctcgggaggctggggcaggagaaccacttgaacctgggagacggaggttgcagtgagctgagatcgcaccattgcactccagcctgggtgacagagcaaaactccgtctcacaaaaaaaagtaagcagacatgtctgctgcctacgtgaggtttacattctagtctgggagaaaaaaaagattttaaagtaaaaggagaaaatgaggtaattttatatcgtgatcaatactatgaaataaatcaataggtggtataagcagtaacttgagggatacttcccgtagcattgataggacaggtgactgagagataacccttgagctttggtggtgaggagtcagcagtgtggaagggtattccaagcagaggcacagttacactaaagatgctgaaaaatcagagagcacttggagcattccagaaacagaaagcagcctggtgtgactgaagcttagcaagtgagtgggaaattagtttagatttaggatgcagaggtcagcattttccatatcatgtgaggaaatgatagtgctgagattacaggcatgagccactgcacccagccccaaaccaagtttttacagtggtaagaatagatgttctgctatggtcagtgtctaaagattttacaaacaatatctcttctagtttgcagtcattattgaaataacaaacacgttctattgtcaggccttactatcactaactagtttcattgatctgaataggaaacttacttgattaatcagctactctggtattacctgacatctcattaatgcatctatgaattgaattgttgctcaataggagtgattgttaaatagtggcaatgtgatatatcactattgaagttatggcctctaatgtgggtcctatgacagtttcggcaactctgtaagcactacggggttttacaatgatttctgcaattttttttttgttttttttttttgagatggagtctcactctgtcagccaggctgcagtgcagtggcacgatctcagctcactgcaacctccgtctccctggctcaagcgattctccttgcctcagcctcctgagtagctgggattacaggtgtgtgccaccacggctggctaatttttgtatttttagtagagacggggtttcaccatgttggccaggctggtctcgaactcccgacctcaggtgatccacctgcctcggcctcccaaagtgctgggattacaggtgt

SEQ ID NO: 9653 - DNA, 571 bp, Homo sapiens
tttgtttaaatgtgtgttttaagttttgcttaatctgaattattttattaggtttttggttctcatgccagagtaaaagaaatgataaattcttttttcctcatttaacacatgtatataaaatactttgagtaacttcacatataaaaatatttagaagagtttaagctgggttttttgttttgtttggctttaaaaacaaaaaaagttacaggtgccagggataatatcttggctgcgtaacttgtatcttaccaataaaacttagtgcgttctgttttcctagaatttaagagttacaaatattgatgcttttagtgtggaatttatatttacaaaagtaattacttccagaaagttttctggctaagtcacctcttaaggagatccctgtaaaattcaccctttaaaaaagaaaaagaaaaagccaaaacactttggaatcctgagtctgaatgttaaccattcttccccacaaaaagtagtgtctgcttttagtaaactactttcaagtatcttaaattggaggaattttcttttggaaaaaagttgatgtaaaagatcttaagtg

SEQ ID NO: 9654 - DNA, 1818 bp, Homo sapiens
ggaggctgaggcaggaggtttacttgagctcaggagttcgagaccaggctgggcaacatagtgagaccttgtctctatttaaaaaaaaaaaaaaaaaaaagtcttaataagaaggtaaatgtgatagcttggcaggcatatttagtgaacttagggggagaggtgggagtgtgaagtaatgaagcagattatgagctcagatttgctgagtataagcacaaagttttgcccgttggtttaaaaaaatcaaccgtgcaagttacagcataaggaaaactgagtgactatcagttaatcacttaaaaatctagagattttggttaaatttcatgaaccaacatcatcttttctaccttatttaatgagtgtgtccaagtgaaacattttttccctataaagttgataaaatgtcagtattatgtacttcacaactatatcttgtcaccataaaaattcctgtgataagactttttatagtaatgtatgaacttaacagttttatcaaattcaagatttttatgagttaagcatttctggaaagatgctaaaatcataagcatgacatgaagatctgcataaaattcaaaatggtcttttttaatggtgatgtattcagcattgtcatttatttgtcccatgttttaatatattttttctaatgtagtttcaacgccttcttaagagcatccactttttaaaaaaatcctttgtcatttcctttaattaaagcctggttagtattgtagagtggcctcatgccctcatgcacgaattgtacatgtctgtccctgtatgtcactgtatagtctaaatgtccttgaaaaatgatttatgcttcattttctcttattgctgataaatcttaaattctgtgtagtatttttaaaaagagatcacttaacatgctaattggactcaaaatgcacctagaagagttcgtaaaactagtctcagagtttctaaggtcagttgaattggccaataccacattgcttaattaccctgaaaagcatttctgaggattccttgtttcctaatcctcgttagctacatacatttggtttaaagagtcatgctgactttgggggttttattttcttcctttagaaggaggaattgttttggttgaccagtgattagaagttcacattttgcacattaaactcaccatgcagccttcccaaactatacattcctggtcccaagcccgagggtgctaatttagacaaaaatatggttggagccggcacttctgcttaagtgttgcaggtaatacgtagacctaacaggttgagccactgttgcaggtacacagtacatgactgatgtttctgtgattatcacagttgaaatatttcagcccaagatgcacattacttcaaagctgctcatccttggttttcctaatttgtatactgaccatgactttactaatttcctggaacttctgatggttctgtcttttatgtagttgacagtgcttagatttgccacactcgtcacaagagtgtgtttatatttttttgtgtctgtgtgagcatagatgggcatctttagctcacctgcactcccaccactcgtttccctatgggaaaaggtgattttttgccccccttttaccattacatactgagagtgctgatgtcgggtattgggagtcattcttggtcattaaaacaggatttttttttctgccaattacctgaatgttctacatgaaattgttcttggtttcaatagatatataattatttccatattaactgaccagttttttagttttgaattaaagatatgttgctttagttttcgttgtaa

SEQ ID NO: 9655 - DNA, 567 bp, Homo sapiens
aataggtccatctaattggagccaatgattacctctgagtgtccacctcttgttccacacttttatacttccccaaaggcgtaagtgaaccttatctaaattcaagccatttactgttattttccatcattttacctttgtcttaatttgctaaatacagttaacacttgaacaacacgggtttgaactgtgcggatcgatcaatgcaacctggtacatgggattctaaacaccgtattgagagggccgacttttcttatactcacattccacaggacggacaggcagacttgagtatgcttggattggggtatatgtggtgggtcctggaaccaatcccacgtatatagtatatgggggatgactgtattgcattaactgaaagagctatgattagcaaactaaaaagcggtgtgtaaacactgcttctttataatttatggaaatgttaaataagatcagtccccactgtttacacttattactaacctttattacttgactttgcttctatttcctagccacaatttaaaaaacaaaattaaaatggtatcaacaacaatagaa

SEQ ID NO: 9656 - DNA, 567 bp, Homo sapiens; identical to SEQ ID NO: 9655

SEQ ID NO: 9657 - DNA, 567 bp, Homo sapiens; identical to SEQ ID NO: 9655

SEQ ID NO: 9658 - DNA, 2028 bp, Homo sapiens
gacttcctatcttcagcttctgcccaccacaaagtatatatagacaagctagccactctctagcaggaaagacctggaacacagctgtggatttgcaactaatgatgtctgtcatgaaaataacaggttttgctggttagatgaaagtgtcctgtaaagaaggctcttttcaaacagtttatgccaaaatttgggaagaaaagatggaagtgggtcatctagaagttacgtgagatgagctgggcacagtggctcatgttgtaatcccagcactttgggaggccaaggcaggggaatgacttgaggtcaggagttcgagaccagcctggccaacttggtgaaaccccattgctactaaaaatacaaaaaattagtcaggtgtggtggcgggcacctgtaatcccagctactcgggaggctgaggcaggaaaatagcttgaacctgggaggcggaggttgcagtgagctgagattgtgccactgtactccagcctgggcaacagagccagactcaaaaaaaaaaaatttatatgatatggtaaatcagagcatgcatcctgtgtagtggcacaaggccccacagtcaaaagggctctgtacttattttaatgctctgctgttatcaccttgaaattcttttttttttttttttgagacagagtcttgctctgtggcctcggctggagtgcagtggcacgatcttggctcattgcaagctctgcctcccgggttcacgccattcacctgcctcagcctcccgagtagctgggactacaggtgcccgccaccatgcccagctaactttttgtatttttagtagagacagggtttcaccgtgttagccaggatggtctcgatctcctgacctcgtgatctgcccatctcagcctcccaaagtgctgggattacaggcgtgagccaccgcacccggccatcaccttgaaattcttaatttttgagcaaggggctctgtatttttattttgcactgagccctacaaattatacagatagtctgtggtcagtgcagatccctggtatttaacagcatcaattaagaggaaaacgtaaaccttgtaattactgcagcagaacaacaaatatataatgattaaatgtgaaaagaatgtgaaaataaaacttagagtcttgttttctacaaaaatggtggtgattctcatggggaagacagtggaaagatttgcttgagagaaagagaacagctgcatcaagccagaagaactggcatttgagaatttaatccctaaggagagatcagacaaagaaaactacgtctgattcctcagagtataggctgtagttaaggtgtaagaaattagatgagatcacaaagaagtaaataaatagagaaagtgggggaaaggagaggctttgggtcataactgagggctggaactaggttattttattacattctatcctttcttttgaaagtcttgtccctggactagggagttgtaagaaccaagcctggtttaaggattcaggtggtggtatctcagaggtaatctagtccaactttcatactttggagctgagaaaccaatgttccagaaagctaagacaatgattctaagttccctttttaaaatgtattgaaatgtgttgtctaaaaattaaaaaataaaaatatctgtggtattttgtgaagacagaggccttggtttggagtagatactgtcacatgacttctcacctcgactcttttattgtaaaagaggaagataataataccttccagggaacattcttcccccttctccattgtggtaggaattaatcactgcccaagactcctggttgaggggctgagtgaagtgcaggcagtctccagccaggagctacaccgtttgttgggctaccctgtttgtagggaggaatgcctttctatgtttctaacttgcccaaagtctgcatccttgtaaagtagtgttctgaatgtgagcgatcatattcatgaagtgcctggcacatagtaagcactcaataaagagggatgtaattttta

SEQ ID NO: 9659 - DNA, 2028 bp, Homo sapiens; identical to SEQ ID NO: 9658

SEQ ID NO: 9660 - DNA, 141 bp, Homo sapiens
cagactgttgctctgttgcccaggctggagtgcagtggcacgatctcagctcactgcaacctccacctcctaggttcaagcaattctcctgcctcagcctcccgagtagctgggattacaggcacctgccaccacgcccag

SEQ ID NO: 9661 - DNA, 386 bp, Homo sapiens
ccggaaagtctaaactagcatttagctcgtcctgattagagtcaggcaccgccaaggcatgggttggcatcttccagatcccgctcccccaaccgcggccacagcagatctggaggaccgggagaggacgcaaggaggaaaagccctgctctgcgagctgacagccggactctgcccacattgccaatggaaccacgtcttcaagccggaaactcagctggacctctcgcagcgctctctgcgagggggcacaggggttattttctccgatgttgtccacacccagaaaagcttgtctctcggggctactgtgctgagccccgactggtcaggttaggccaccggggttagctctgcaactcttgcttcacggttaacagcccgga

SEQ ID NO: 9662 - DNA, 386 bp, Homo sapiens; identical to SEQ ID NO: 9661

SEQ ID NO: 9663 - DNA, 32250 bp, Homo sapiens
agcgtgctgagatcgtgccactgcactccagcctgcgcaacagagcgcgactccatctcaaaaacaaacaaaaaaacagccaggtgtggtggtgtgtgcctgtagtcccagctacttgggaggctgaggcaggagaatcacttgaacccaaaaaacagaggttacagtgagctgagatagtgccactgcactccagcctgggtgacagagcaagattctgtctcaaagaaaacatgaggagtggagaagagtgtgcccaaacagaacagttttcaagactttccttggaacaggtttcttagaactgtggggtcatggcctgttctcttctgtgactgatgcaggtgcttggctggttactatggcgaccccatcattgggtcaggagatcactgccgcccttgcccttgcccagatggtcccgacagtggacgccagtttgccaggagctgctaccaagatcctgttactttacagcttgcctgtgtttgtgatcctggatacattggtaagtcgtgtgcatactttgggaggcaaagagagagaaaaagatgtctttatgagttcattgttaatgagaaaaaaagatgcaaagtgaaccaattaagtctacttttataatttttaattaaaaattagaaaagatgctcttttcctatttggcacatggagtggagtcaattcatattgagtctctgataagaacgttataacacaaagcaggaaagtaagctcgtggaaatctagaaaccctgtggaacacttttctgttattaaacattagaaagattaacttaagttttactcctgcctttctttatccaactcctagcaaaagtatctcaaagctgtgaggttaccaaatagtagtcagaagaaagaaataatatcatccagggaatcacaagatggccgaatatattcttcactgttaatgatactcacattatctatcaagattcaattaatctagctgggttgttaaaaactccctcttatttcatccttgaagccactgttacaaatactgattatgtttatatgtaactcagtaaaatttttttgcatataatttcagaatttcttagggaaattggtcatcattaaagatcccatttttcaggttgctcacagaggagtggtaacttttcagtttctgtaattctttgttttgttttgtttttgagacggggtctcactctgtcacccaggctggagtgcagtggcacaatctgggctcactgcaagctccgcctcccaggttcacgccattctccagcctcagcctcccgagtagctggggctacaggcacctgccaccatgccccaccaccacgcctggctaattttgtttttgtatttttggtagagatggggtttcaccatgttagccaggatggtctcgatctcctgacttcgtgatccacccacctcggcctcccaaagtgctgggattacaggcgtgagccactgcgcccagcccactttctgtaattcttgaattaggctgggtgtggtggctcatgcttgtagttccagcactttgggaggctgaggcaggaggattgcttgagcccaggagtaagagaccagcgtgggcaagatggcgagacaccatctctccaaaaaaaaaaaaaaaaaaattttacaaaattagtcaggtgtagtgccgcaaacctgtagtcccagctgctgggaaagctgaagtgggagaattccttgagcccggaaattcagggctgcagtgagctattatcatgtcactgcattccaacctgggtgataaagcaaggccccatgtcttaaaaaaatgtaatccttggattaggatttctacatgaagctatgctttacattgttagtttgctcccaacatgctccacccccatgtgctcagaagctaaagtctcatgtgctaggacctaactgtccacagccgctgtggcctctggggcagttgcaacactgttagagactacaaaacattagattggtgcaaaaagttactatggtttttgccactgaaagtaatactgccttcctctcacaactcaaagcctattctttccccttcagatgtgatcaccctgggctctttaaacagtgcagtgaagatgaagcaccgccacgatcagctctctctaggcatgagtgtcggtgcactggtgagctttcagtcaataagctaaacatcttgtgtttggttttatcgggtgacaggttccagatgtgacgactgtgcctcaggatactttggcaatccatcagaagttggggggtcgtgtcagccttgccagtgtcacaacaacattgacacgacagacccagaagcctgtgacaaggagactgggaggtgtctcaagtgcctgtaccacacggaaggggaacactgtcagttctgccggtttggatactatggtgatgccctccagcaggactgtcgaagtaagatgcacatttattctgcccacttcttagaatgacttccacctttttttcattatcagcagattttattcttcctgtatttatttcacttgggaaaacacttgttcagagaggtaaaatttcactttcaactaaggaaagatgagaccaattttttttttttttttaatgagacagagtctcactctatcacccaggctggagtgcagtggcatgatctcagctcactataacctctgcctccagagttcaagtgattctcatgcctcagcctcccgagtaggtgggattgcaggcaccccccaccatgcccaggtaatttttgtatttttaatagagacggggtttcaccatgttggtcaggttggtctcgaactcctgacctcaggtgatccacccgcctcggccttccaaagtgctgggattacaggcgtgagccgttgcacctggtcatttttatttttttctttacatccacattttctggcaggagtgaggtctcaagatgtgactcagtgcctgggagagataacaggaaagaaaaaccatgtagctgtccccatgataaatggcatccagtagagggtactgatggtatgctctgcccatgaacttgctggttggatggacttcgaaatcctaaatacccactgtggtcccaccttttctagtggcattgatggaatagagccttccagcttaaggaagagaaagaagtagcatctctaacatctctcttttggacctctttatttctctcttaccgagatcaactagcatttcctcttgctgcagctgcacagcccccaggctcctggctttgtttatacaaacatgtgtggaatgctagggaccagcaggactggattccttaaaagccttagtagcttaaagggcttttacctgctatgtccaacacgtttattacggctgttctctgccaagagtttgaaattattagatatctcaattcccactggcattttttaaaattatttccagttaagccttcaattttaaaatgactcaccagcatcttgtcaaatctgtgtattttgaacatacttttaggtgaaatgtgtcattgtgtgtatctgggaaatgtcagaactgtgtaagaaatcacgagaacttctaaacagtaattttagctttatttttgaatcacctccatttctttccttctttgcatttcaaggtcaagatgtgaagtgggaacatcttagcatttagatgtggctaacatccgcatgcctgtgtatttgggagtgtgacaataagtaaatgtgatgttcttttgcagagtgtgtctgtaattacctgggcaccgtgcaagagcactgtaacggctctgactgccagtgcgacaaagccactggtcagtgcttgtgtcttcctaatgtgatcgggcagaactgtgaccgctgtgcgcccaatacctggcagctggccagtggcactggctgtgacccatgcaactgcaatgctgctcattccttcgggccatcttgcaatgaggtgaggggctgctgctggggatgatgcctttatgagctcaggtgtcagcccatggtgactttgccccagttagagcaaggcaccagggcacacagcttgaaacacagcgtggcctggatcttagccctcatttgtaccccttggctgggtctacataactgtgcacagagtccccatcagacacatccatagcatttcagtagagggtcccagctgcagatgcagactcacttaacaatagacaagggtgtgctatttctcttcagtacctgggcgctgaagcagactcttttcttagcttctcgaaaggaaccaattagccatacccagcattgtaaaaagtgctgttgtttcctgacacatgctaaggagggcatactccctaagtcaggcgagtcaaaggtggcccaggattgtggctgatctgtgaggataaaagtgaggaaatatgtaaataaataataacatgccacagacctttccaagccctgttgcaaaagagcacttagatgctggcatggggctctcgacacctacgattgaagtgggagtcccttttcctagtcaatggagaccttctcaggtaaacagttcattcctacttctaagtggcagctagaaaaaaaagatgacaactggcttctggcctgaagcctgcttgaccaaggtctgtgttctggccgcagttcacggggcagtgccagtgcatgcctgggtttggaggccgcacctgcagcgagtgccaggaactcttctggggagaccccgacgtggagtgccgaggtgagttgtgggcgttctcgcattgacttgatcagagagtggagggaactggggttctacaagagccttctgtaaattataaaacacagtacaaattaacgtgtctataagaacctgtatttaattgcaaaataaattaacactgattgtttaaaaaacaatctaacaaatctagccctgcccataagtataggtagtcaagagtggatgtgcatactctcccggcctcacaccctggggtaaagtttgtttctgtgtgtaagcacacacacacacacacacacacacacacacacacacaccacaaatacacacagagctgctttttaaaatacttttaaccaaggtgggaccatgtgaaccctatgtttggcaaagtgactttttatcccctctgaacagtattttgtggccaacttccttgatggcacaagaagaggtaaatggttatcctagtaagatcactggattcagtggatcaactagactctgttgacagtttaagctcttggcgtatgtgtgtaagataacatccccaccagtgaaaactggagggcaatgtcatggagacttcgtgcacaacaaagggctccaaggtcaggggctccaagtcagtttaatgtgaataaaacccagattttcacctaagcttatgattaaacaaacaaacaaaaaaagatggaaatgacattttcttacaaacaaaaacttgttaaaattatgtgaatcatcaggattgcttgatttttatggtattgcagtttttttgacctggaaaattatttttcagatcttaaagtcaaaatatggaaaagactgaataggctgttgcaactctgtttttatattctttctttcctacttgattttcttccctgtttttaattgatcattatggataaaaattttctgtagtttcttaagtgctctttcgtatatttgttgcacatctgaaattataggtctctgttggactcttgaattttttttttttttgagacggagtctcgctctgtcacctaggccggaatgcagtggcataatctcggcttactgcaacctccacctcctgggttcaagcgattctcctgcctcagcctcccaaataactggagttacaggcaagcgccaccacgcccggctaatttttgtatttttagtagagatggggtttcaccatattggtcaggctggtctcaaactcctgacctcatgattcacccgcctcggcctcccaaagttctagaattacaggtgtgagccactgtgcctggccaggactcttaaatttttaaaatgaccgttttctttttttggacacaactacagcaagaaataatacagatcttcaagttggcaactcattcaatatctcctacagaaggtcaggaacctagaaactgtgttccttcagggtgcaaacccatgtgttccttaacagcagaaaaaggtcagtgggcaagaccagaacaaattagatatgatttgttttttaagttgaggcttagccagaagggtttgtatggacctcttagattaaggtttgtttcacagtggggataatgtttgctatgtcaataaacaggtacttttctttcatcattctccaaatttggttcttaatgagatctgacatcccctcttccattagaaggtattgaaatccagtggaccagtttctccaagatgtctcttgaaagtaaaactctgcttaaaatctgttttttccagggctctaatcactactctgttaaattcctcaaacttgtaatgccccaaggcttgattttttccagataatggctctatcgttgcacataccctgattctgtcagcatgtgtcattggcaaaatagctttctctgccaaagctttctgacctttggctccatcttagctttgttagcaggaaaggcctgctacccagagtcagagtcaatcagagaattgttcatgtggtccttagaactttactccttacccttttatcttttctttaaactttcgcctctaaatctgccagggaaattgtgacttatagaaaccttgtcaacttgtttgggtcaaaagttagatcctgttttagaaactctgcaaagagtgagattcatggcatcattgttcgccaacttctttgttcctttcatccagaagaaaggtcagctcattacgtaagaaacttttcatcaggaaaagcaaacaaccgataaaaaacagaaactaagtattctgcaaggaaacctggtttaaggagaatgtattgaaactggatatgtctgttcctttttactcctccctttggcatttcctttttttttctgtaagataatcatagaaatttagttaatggaggaactacaaagatcacatggctttatggtttgcctattatgctggccaatcccggtggcacgagggcagcagggatgcagacagatgaagaggtcccatagccaagagtgtaggtcctggagccagactgcccacattcacttcaagcaattggtactcctgtattagaagaaaacaaagtcccttctcatctcctcacccagtatactcctctttttactcagcttgataggaatctttccagtcctctctgcatttatatgtatacatcattcgtattcgtgaccctaataatgatacccagtcagctcacaccagcaagaaaaagtatttttcaagccctctggaagcattggaagctccaagtgagcataagtgaaaataccctaagagatacttccaggttctagatccaggtgtttcattttccccttgttttcccactacattgtcatctctccaaccttatctttagttttgtttttttcatggaagaccagaaagcccctttccccaaagtgttaaaatctggggtgaaggcaactgacctcattgcatactttggcaattcaaagttataaaatgttagccgggcacggtggttcacgcctgtaatcccaacactttgggaggccaaggcgggcggatcacttgaggtcaggagtccgacaccagccggaccaacatggtgaaaccccatctctactaaaaatacgaaaattaatcaggtgagatggcgcacacctataatcccagctacttgggaggctgaggcatgagaatcgcttgaacccaggaggcagaggttgcagtgagtgagcagagatcgtgccactgccctccagcctgggtgacagagcaagactgtctcaaaaaaaaaaaaaaaaaaagaagaagaagatataaaatgttggggcatctttatttggggtgttaaagtagatactgtctctcctttgtgcccacagtggctgagctggggtggggacatttggaaatttgggaggaggggagtattttgggtcatcaccataatggggtcattgctataggcacttggtatgcaggagccaataataataaatgtcccacagtgcttaaggcagtctgtcaaacagagaatgtgtcggatcctcaatgcttttagcactctttggagaaagctcataacctacaaagcacccagagagagtgagaattgatttgagtggacaatgggggattgattcatggccagctatggggtctggtgcagacagggtggcaacaggagtaggaccagtgtggcctgtgaaggcaggggccaagatgcagaggcagacaaggctcttggttatgtttgtgctggaatgcattcacgattagaaacaggagcacaggggctttctgaagggatgggcccagagatcagcagggacaagaagaggtgtcattcaaaattagatggaactatgcaaaaagaacatcagctcttttctccagttatgtaattgcttgacaaatatgttttcagttgaattggttgttagagggcataaatttagactttctgatgccaactagctaacaatatgcttatagaaagatttaagtcctagctaagtattctccttatggaaaaaaagaatgtagttatgtaaaagacaaatgagttgagcctccaacttacagattgttgaatgttcctattgtccaggcgggttggggctgttggtcgatggtgccaagcctgaacaagcccaccactgtgctgggatggagagggaatctcatccacccaccatgaacgtgctggagaaaacagcctggagcgctgcattgtcctcctcaggagtcaaagagtcacaggaggaatctttctgttgattcatagatagcaaaaaggaagggtaaagtttccatttggggcctctggctcttggaaaagggcagtgtctctaaacccaggcaaacggtaaatgtggggcataggcaagagggtccgggtagtggccacttccccatcatgctcgtttctcattttgtgttttttagtagaaaaacacagtgtgttcttttgcccagacattaatctttagaatgcctgtattttctaatgttgggatttctttcacaaccacccaccttaatatttccattgtgactcagaaaatcagacttcattcgattctttagagaactataaatactgttgtcagtagagtgaagtcttgtcttatgtaatcctaattacagaatgtgttctcagaagaggtaggctagaccagagctgggcagaccacaggcagaggccaaatccagccccctgccgatagtagctaatataagttttacacccacttgttcatgtattttccctggctacttgtgggcagcaatgccagagtcaagtcatcataacagagacagaatggcctgaaagctggatttactatttcaacttttacattaaaacttgatgacccctgtgctagacaggcagctcatttctgcaggtaaaattatattcatctcccaactttcattccaaaattgaacctatattactgaggccaaaaagggaaaaggataaaagagaatgtcagaaaaaagaaaatcccatgtaagaaataaaaattatttaaattgcccttgcttttagtaaatagaaatgcctaagtaaagtatcagtaaaattcttggcattgcagcagatcctggagtcccacgttgctttgaggcaaggtccacggcagaagaaaaccccattacctgaatcttagggtgtagcagtttctctgtcccaaggcaaatttaagtttccaacaaaaaggaggataatcagcccagtactgagtgaccaatggtatagagtggggagtggacacagagagaacagctgatactgttctgccacttgcaggctatttggggacatggggtacataaaatgaagtaacaagatagcagaaagtaagtggcacaaacttttcagttgtcagaagagggcaagatcagtaggaaatggagtcattagggaagggtttgcagaaaagattagctctagtggccatctacagagaacgtgctgagtgccaagcacttttaggcatattatataagtattcttaattttatccttgcaacaaagaacctatgggggtaagtatcatctccatttcacacttgactaatctcagactcagagaggttaagggacttgcccaaagtgaggaaagaactgggatctgaagccaggcctatgtggccctgtgtcccagctgtttccacaagcctgggggctcctcattgacagctggtatttagagaggaaattatcatccaagctaaaggacaacacagacaacatgaagcagcatggctctgggaggtgccctcgggaaacagtctcagctggagagtcatggagagatttggtttcaccagattgtgtgaagccttcggtgctgggccattaagggtagactttgttcagtgggcacaggaaggtctggaggaggagagggaaggatgtaaaggaagcaggcaagttaggtctatgtgataaatgggtacatagactatttcccattgtggcattgacttgctagtgttttcctctggaccttagtatctttaaaatcggtacaatagctttcatttacctacttcttaacaattatgtttgaaatgataagaaaacttagtaaaaatagaggaagcctactggccacagaacagagagtgtgtttacagatgaaagtcaaattattatggcttgttaaaatgagtatctcatttaaaaaatactattcttcatcttcatgatttgttcatcttaaagattaggcaacaacttttgctatgtatgctctcctttccaagagaaagtttctgattctctgccaagtaatcccatttcttaaaataagactgctttatctaggtcatttggattctgattcctttctcttaagagagaaggagcccactggacctcatcagctgcagcctgaatagtcagttcacagtttttcagatcctggtgggtgtgtgagatgatgggagaatctcctccatacattagtgtccatgaagttttactaacttgtcaagtgtgaactgacctttctgcttcagccacgtgagtgtgggagtttcactgaaaatattcttgaagtggagggggtctttttacaaggttgtaaaatgtgggccttctggtgcctgcctcttaggtgactccaagagaagcaattctggaaattcaatagccagggaaggaagcacatgaccaggggcttcagcttgaaatcaaaacctggtacatttgagactagttatttggtgccctcccggagagtcaggcccaactttttcaataatgacactgcaatccggtcatctgtgagatttgatggtttacttttcaggtgggagaaaggaatgttggtcagtttggctgaactggttgttgacttctggagagagccgaagctctgctagctcattggaactcttacccaggctaatttccctcggccagataaagagggaagccttatctgccttttaagtctttcagggttgggctgttttccccttaaagatgcctatgacagaatgggagcaagacatgtctttggcaacgaaataaatgaaaaatgatcacagaaattaaaaataaatcaacgtatgcatgcatcccttgccccaagcatgaatccagcaaaaacctaatgtttaggactgaacaaaggtatacctttgcatcatctatgggaaagaaataattgtctaagcaaactataagcatatgcaactctgcctcagttgtgtcaagtctaagggagatgggtgagtaggccccagagggctgcctcaccctgaccactggctggtagacaaggtaagttttattacaaatggcatcacttcttcctctgttacgtaagtcctgagatttgtgcatcagcctacattgctgaacttccgaagtcgtgattctgctccagctccaccttttgaagggtatctctttctccatctctcacacagacacacagatacacacacacgcacatgctctctttttttctctaatatacagaaggcgggcagaaacagctgggaaagtaacagtcagtgctccacaaaacggggtcgcgtgactgtgaacatcagtatctcctgggaacgtgatagaaataaaaatagttctgggccccacccagacctactgaatcagaatctggggatgggaggagagtagagaagcaatctgttttttatgaaccttccaggtgattctgatacctacccaagtttgagaggtgaggacccaggtgactcgggggtaacttttagctttctggaagatgactaaattttaccaaatgataatggaaatgtattcctaaaatctaaacaacataaactcttaaggtactaagttatttaagttatttgtaagttatctaagttcttcctaatctcagaaatcgattaatgtagtggttttcccaagcctttctcattatttctcttgggtgtcactggcattgacttccactaaaaaaagatcccatggtcaaatgactttggcatacatacaactggataaaaacaatataaaacagtttttcctgcagaactcttctgagtctgtaatatgctgacacttgtttttaatcttcaagataaggatacagaacttttcatcatgggatagttttttcaaggaacacatcatagaacgtatggtctacggatcaccattaaagttatccatggtttgcctaaacagcttcctgattcattacgagaatattccccaaacaagaaaaatgaaacatactttaagtacctggaaaggatctgttttttgaaaagcatacacccaagttttacttttgaaatcctaaggtcttggttttgaaaaccccaggcgctaaggaaattacatgttttaaaatcctaaaggttgaggaattaatattctaaacttcaaatttttgaataatcatgacgttattggcaaatacatataaataaacatataaccggaacacgtttttcccctttatccaatggaaatacgatcaagcatcactcttagcagaagactaccagacacttgtagggacacgaaaagtgataataaaaacaatttatttattgaatgcttgctatagaccagatgctcttctaagcactttgtaattattttatcttgaaagcagtcctgtatttataatcattacctcttcttacagatgtggaagacgtgactcagtttcctgattacccagggtcacataacatgtgtggagaaggcaggatttaccacctcagtccgcagttcatgctcttaaccataatgctgtactcctcaaacctgccactcgagagcttggaatgtagggggagaacaaagacaataaaaagataaactagcaatacaaggcaggatgtggtgagggccaaatgaatgggccacaaacacacacctctgggttgaaaggatggtgatgttatagcagatctcaggaccctcagtataactggttctgggagatgttccattagaaagtttttcagaggaaggccgggcgcggtggctcacgcctgtaatcccagcacttcgggaggccaaggtgggcggatcacaaggtgaagagatggagaccatgctggccaacatggtgaaaccccgtctctactaaaaatacaaaaattagctgggcatggtggtgcatgcctgtagtcccagctatttaggaggcagaggcagaatagcttgaacccgggaagtggaggttgcagtgagccgagatcatgccactgcactccagcctgggagacagagtgagactcttccaaaaaaaaaaaaagtttttcagaggcaaatcacagctattgacccaagagtggctcacacctgtaatctcagcactttgggaggccaaggcaggcagatcacctgaggtcgggagttccagaccagcctgaccaacatggagaaacaccgtctcttaaaaaaaaaaaaaaaaaaaaaaaaaaaaaaaaaaaagccgggtgtggtggcgcatgcctgtaatcccagctactcgggaggctgaggcaggggaattgcttgaacccagccaggaggcagaggttgcagtgagccgagatcgcgccattgtactccagcctgagcaacaagagcaaaacctccgtctcaaaaaaaaaaaaaaatccgagaaagcatgaatctgttgtgctttgccacagttgacattgcacttcaggaggattattttcttttatgaaggtatgtaagtgtccttgcatgcctagactaaaatgaggttagggcttcatttggcaaagacgtttggattctgattgcaagttaaccctgagtccgatgctgaaaaacgaaaaatggtttaagatgtgcccctgcccttggagtccacaatccagttagggaaataagatagtatattctttatttattcctgtctttcctcagaatgggtggaagcccagcgataagatgttagcataaggcctttcgtaattcaaaccctgtataaatactttcaaatgtcagatgttgatataaaaatgatttggtcacctgaaatttgggaatctaagccagggttcaagggcacagccactgtgctaagtaatctcagccacagctactggccaagaacacattttgtcctgtacggcacgtgattttcctgtgccatttggctttgcatgaggtgccaaccctattgggcctgtgagacgctgagactgaatggctcccaagatccctgcttgtagtactggcagtggtcatcacaatggcagacacccccaagttagattatacttagttgaaagcctttaaactggatacttagaattcctttgggttttgttttgttttgatcatgtttattgcatttcatcaagtatgttttgttgtgagatagagtcaggtacgtaaagagcttctcatttgtgatgtatccgatgccaggtggcacattatcaggatgtaacctggattgtttgtacagacatggtctgtggggaaatcctaagtaagggggaggcaaaggcaggacggaggtgaagagtatagactccggagttgcaaagaactgaatcagaattctggcgtggccttttccttgcagtgagacttggggcatgttacataatctctctgatctctgagttcccacatctgtgaaatagtgattattataacacgtatcccatagggttattgtgagagttaaatgggatcattcatataaaacatttctgtttaaagtattattactgctaagaaggggttagcaaccactgaagtcacgcatgtgctagaggaagctgctacagtctctacctgagccattggtcaattgttgtcgatggttgacaccttcccattttcacagtgaagtgagtattctaaatgccacatcttgtcactgaggttcatgattaagtagatcagctagcattgcttattcccttctagcctgtgactgtgaccccaggggcattgagacgccacagtgtgaccagtccacgggccagtgtgtctgcgttgagggtgttgagggtccacgctgtgacaagtgcacgcgagggtactcgggggtcttccctgactgcacaccctgccaccagtgctttgctctctgggatgtgatcattgccgagctgaccaacaggacacacagattcctggagaaagccaaggccttgaagatcagtggtgtgatcgggccttaccgtgagactgtggactcggtggagaggaaagtcagcgagataaaagacatcctggcgcagagccccgcagcagagccactgaaaaacattgggaatctctttgaggaagcagagtaagtagttaatgagccagaggaattactcataaagctgaaaaaatattgtgagttaacagcaaagatttcctggcatggtgcttccatcaggaggttttgttagtcctgtgggtgagaacagattctgagccatttattttccagcagtcttgactgggcatttgggtgagtgaacgttggcacatcagtggggaccagccttctggaggctgcagtacagaatatgcaagcattatattcagtgctcctccttgcaaatcatgttctaagtcagtaaaatgggaggaatgctggatttagaagacaaagatccataattgagtcttggctctgatgctaggcttgtgaacttggatgactcaattcctgagcctgtattttctctcctgtggagaaggggtaggataatatatgccattaccttatgaagtaatgaaaggatttatatataaaataacaacaggattgcagaaaattataaattaagtattgctactatgggggaaattccattacctcaaaataagactgcttacttcaagttttttctgcttctccgccattagtccaccagaccagtgcttcattcatctagttataacagctgctctatgctgaaaagtcctcatcccaccccttctctaggtaatcttccctctgattggacagtgtttgttagtggaagcctagagaattgaccttctcaaggatcatttatctaccctttctcctacctcccctctcttgcccctaaacttcccaactccttttgccaaaaaggaacccccaaaacagcacaataagacctaagtgctaaaggacaaaaatagaaaagggtatgaggcatctgtgcttccctagatgctatggttttttcactgcagactcaccatctaggcctgaggggactgcttcacagttaaatcctgcacactgaggtgtttatatgacgaaatgacagtaacattttttgtgtgtgatgagactttaatcagcacctttaagaagccagagggacttttcatctcataccaggcatgagtagcagaggacagctgacattagctcaagcgacttgaaggaggtccttcctagacctagatttaaagtaactggaccttgatgtcaagccttgggttttatgcccaagaccatgtagctggccagagtgttaggaaacgtctgatgtagagtgacaatgcatttagtgaggcattttacctcactgaaaagactaagcctcctaatgtgcagagatcacagttttggcaggccgtggtccgaatgcaagcccatttaggaaatgatccttggcctgggtcttaggcatctctgggaggaagaaaaaaatctggtgtcctttgagagcctgccagaagagagattacattcccaaaacagctctgtttctaccgtcactattcatttaactagacagattgtaataatcacaggaaaactagttccattactcttttttttcaacatactatccaaggatacatgttttaggaaccaaagtggccttattttaaaatacgatgttagatttgcttgttttaaaaaaaattgtatcattttatgagacctgagaagaaatgaaagccttctgtgagtcatataattaataaaagcaaagcactgaaaaaagaaactatgtatattagcctcaggaaaaaaaggcactgaaatgtaatttaatctaccattttaaaccatccctttaagtactttttctttgagttgggttatagttttatctcagccttacatatcatttttctaatggctcccaacctttcagcatctttacattttcctggttttttatactattatatcgccaagaagacaattacattcaattaggtgaaccagtaatacccagaggtaaaatctgctcaaatattactttctttacaatacacatacaaccctacccacacccacctggagcacactcgcatgtgcacacacacacccatatccacactatgtacacaataatatacaaatagatgtcaaaagtacggctttgtaggtttgaaagtacagaacaaaatgcagtttagattccaaattaaatactgtgaaagctaaatcttcttatttcattcttagtagatgctattttcttataaaaaataaaaaggctgttggtagaaggaggcccctctgacggaagagaggagtgtatgaaagctgatactggtggctcctgttgtctttgtggcaggctatagggcttcccctctgcatgttccatcttgaaggagatccctgaggcttagggaagaatgttttgggcttgtggctgggaggcctaattgtataactggagtcatttatgtcttcagttttcacaattgtaagggcttgaagctgcctgtgaatagagccagaactccacactctgacctgtgctcatcttacagcagaaatttggaatcccttaaatggcttgtctgccacaactcagctgagtggtacttctgtgtttctctcaaaagtcattgaacaaagaaaaattgttagatttaatactatctgttataaggaaaataaaactagcacttagggatgaaatgttacaaattactgaattggtttgaaattagtaatggatacagtactagtagaaaatatgaaacgtgaaagttctcccttgggtttattttatgtaagtaagcttaactttctctttacaggaaactgattaaagatgttacagaaatgatggctcaagtagaagtgaaattatctgacacaacttcccaaagcaacagcacagccaaagaactggattctctacagacagaagccgaaagcctagacaacactgtgaaagaacttgctgaacaactggaatttatcaaaaactcagatattcggggtgagcattttttggtgcaaatagtcccagacaatggatttaacgatatgtctaacgttttaatatagcacttttggggaaaaaaaaaagttttctaataaattttaaaacttttgctcatccagtttctggcacaaatgaggatcaaagtccccattttacaaatgtgggacttgggcacagagaacctaagagacatagcaaaggtcccacagagtgaatggcagtagttgtatcagaatggtatccatttcctgattttttttttttccctccagttagtagtttaatcccctggccttttcttggaagggggttcttttgaatagttaaggtattaatacttctgcaaatcctttcacattcaagaatgctgcttggtcagaaaaaaacttttgcaaatcattatttatatcatagactgtaaaggatcctcagcaaaaagtgaatgtagaaatatgttacatcatactgtccaactatccatactgttttatgcatgattgcttttggactaaagctaaaaacatgtcatgctgttatatataataccgtcatcccttggtatccatgggggattggttccaggacccactgcagaaaccaaaatccacaggtggtcaagtccgttatataaaatggcacttgcatataacctatgcatatcctcctatatacttctttctttttctctctctctctttctttctttctttaagagatgggctcttgctatgctgctcaggctggtcttgaactcctggactcaagtgatcctcccgtctcagacttctgaatagctgagattatagaggtgaaccaccacacccagctttacttttttctttttttcccttcagtatatttaaaagtaatctgtagattacttacaatacctaatacaatgtaaatgctatgtaaatagttgttatactttattgtttaggaaataatggcaagaaaaaagtctgtacacattcagtacagatacaaccattttttccaaatgctttccatccacagttggttgaatccacatatgtggaacctacaaatatggagggctactatattagtcatttgagtggatccgaataaaggattgagaaaagtcatctagtcatataatcttcaggctgcctgaaaccagctatttataaagaactggatgtttgcttgtgtatagaaacaagattgcatgattttcttaatttttcatttttcacccagatgtttgccatactcgagctggagtaggtgctaatgggacaaaacatattcattgctcatgaaaactgtacttcataaatattttttcttgaattttaaaactttacagtaaatttaggacccgaagacaccaaatatagacactgcttggggaggaagcctagtatgatgaggttaactgtgggcaatttcatttcctaccctaggtgccttggatagcattaccaagtatttccagatgtctcttgaggcagaggagagggtgaatgcctccaccacagaacccaacagcactgtggagcagtcagccctcatgagagacagagtagaagacgtgatgatggagcgagaatcccagttcaaggaaaaacaagaggagcaggctcgcctccttgatgaactggcaggcaagctacaaagcctagacctttcagccgctgccgaaatggtaaggtttggggatgtggccttactgctatggtgccaagcaaaaaaaaaaaaaaaaaaaaaaaaaacaaagaaaaacaaaccatcttttgtcattattacaataatttgcaaatgaatcagcaggactgaaactcctaggctgaggtctctggatcctggaatggggtatctgtaaccaagacagattaaaagcagcagcatatgggtttccagccttcccctcttctgtttctctgtggtcctcaactaaagaatgaatcatgactattctcccatactgttttagctactcagtgacaccgcactgaaacttgatcctttttacactgtggacatttctttaatattttttttcctaagtagagacagggtctcactacattgctcaggctagtcttgaactccgggtctccagcaatcctcctctcacctcagcctcctcccaaagtgctgggattacaggctaacaccccagcccacccccacccccgcttttttttttttttttttaaagagatggagtctcactacgttgcccaggctgacctcaaactcctaggctgaagcgatcttcccacctcaccctcctgagtagctgagatgacaggcatgtgccaccacacccagcttggacattccttttttagtttgttctgatttgaattataaaacccatctcagtgtaggaattcagagtcattctagaaggggcttccattaaaaattaaagggagcaaaagaattttttcacgggtattagctattatgttcctttgttccagtaactttacctggtgaagattaaccctgaaaccagcctagaaagtagattcatttcccagaagcttttaaaaaggaactctggagccaaatgaaattgggttgtgagtttaatgaaaatcaggcagaaggccccaaaaaagcctaactgagcctgtttcttcctcttccttcctgtgttttcaaggaaggatacctatgtgaaataatttggagggtattttttatagactaaggtttgtgttctcttagcccagagacacagagaaagttaaagatggaaggtacataggcgcagaagagttcaaacttcattacagctttgtcttagtgatgcttcctccctcctctcatcactttctctgaaatagacaaaattggtcacaatataagacagtgtttattgatgcctgctaggtttcatactcattatcttctgaaactttatagcaaatagggagcaaataatctgtcatttattaaatggaaaaataaaagatgaagaaaaaagaaaaatgaaggcttagagcaatgtgtaaattgcagctaacaggagacaaagttatgaagcatgaaatgccaattctctccatctttcccttcagcattgattccttccttacatattgtagttaaaaaaaaaaaatcagttatcacaaacaagttctgtgtgacctacaagaaacagctaagcatgctaaaggatttttgtcttgaaccggaggcatctccgtgggcggcagggagatgcatgggcggtgggtggggttcggggttcctctggcctttcaaatgtgtgcccttccctgtgcttgcttttccacctggtaaactacctagggattagcagctgcttcagttctcttactgtgtttttgtctttgttaatgatcctgtgagaattctttctgtaagttctttactgccatttccttgtgtagagagagttttgtccttttgtttttcaggtacttctagttctgtatctttgtggatgtttagctagagccatactgtgtttttttttttccatgtctgccccatctgttgaaacaaaacagatcttctatgtgtgctgtcagattgtttttagaaagcaaccgaggttttacacttatgttcttaagactcatgttttacagcatgcagaatacactttattttctgaagctttttgtttttgtaagccagataaatgacttatttagttgtaatttgagatataatggaattataattatcttaaaattattaggctaaatagttgattgtatttatttaaaaactacttttttgtactttttaataacaatacttgtttgggaatattctgttaactccttttcactgcagtaaatctttgtcttcttttcagtatgagaatttccacaaacagctctaaatgcaattttctccctgctcagccttttctatcatatagcacacttgtattataatttatcaatttgcatttgtatgccatgaccaagtggtgatctttgagaggttttggtaggtaagaaaggaggactctatgcatgtgtgatggcagtcgggggtggtaatttgggaacacttcatctacctttgttcctttgtttgtactgttttctttaacctgtggaatgttttcccacttcccctgctcaaatcccaccagccaacagcttcttcagctacaactgtagcattcctctgcagtctctcctttgtctactttctttcatagtgactgcatctgacctattcttggctattttatgtggaatgatccagtcctaactagatgggaagttactaaaacgctaggtaatagatcttttatgtcaccatatttactggaggagttaacatggtgctggtgctggtcccaaagatggttcacaataggttttttttttaaactctaactggttagaaaaaaaggaaggcattccttggcccttgcactggcagaattcaacttgatatagcagatgtttgcatcctgggcagagctcatatagtattttaactcatttgggcagaagatattgatgagttgtaaacttccattgtttccttggaaataagcaggttagtttactcctaaactctctgctcctctctccattctgtctcccaaacactgttttcaagcacccttgctgaggaccacctacacattctctggggccacccaggccctgcacagctgttttgctgcagcagattcactatccgaagtattgtgcctgatccttggcttgttgcagacctgtggaacacccccaggggcctcctgttccgagactgaatgtggcgggccaaactgcagaactgacgaaggagagaggaagtgtggggggcctggctgtggtggtctggttactgttgcacacaacgcctggcagaaagccatggacttggaccaagatgtcctgagtgccctggctgaagtggaacagctctccaagatggtaactcagtggatggcctcagtttttgttatgtatgtttgctttcagctgtggactaaaggatctgaaagggagaaatcaattctaaatgctaactgaaatgaaaagggcatatcacaatcaaatatgaaagttcatgtttctgtgaggtcagagaaagagatggggagattttcttcacagataaagaatttgctttctcctcactcaacacatgctttagagcaagatgtttaaatcttatactggataatttgagatagccatcttacttttctgactccagggttataaatacatccagctgtatgacaaaaactctatactaagcaattgagcatttattcttctaaagtgacacacactttttaagtatttatgtgggcacctgagaaaaagactcaggactattttataggccaggagttaaaaaacaacttgaaaaattttaaatgctagttctatttatatcagaatactgtttaggaatctctatactgaatacttgcagtctgtaagatacaatactttgttgaatgggagaaagttgtttcccagacatatgattccaagtacatagtttttcaacatcatttttgagccatttccaatattctggtctcctttagaaagaatgaaagtcttccctgggtaatttattcttcatatttaggtctctgaagcaaaactgagggcagatgaggcaaaacaaagtgctgaagacattctgttgaagacaaatgctaccaaagaaaaaatggacaagagcaatgaggagctgagaaatctaatcaagcaaatcagaaactttttgacccgtaagaaattttttcattttacttttagacatttgtttctgtgtgattctctgtttacattttagataaaatccatttctgtcagggtactaagtgacatttccaaataagaaaaacgtccgtatattaaatgtttccacttcttaaacttatatatgtgtatcaaataactttctccaatgttacgcagatacagacacacctgatgggatactcaggtagccaatcaaaagtcaaatatttacattgaaaattgaacgtggaatttgttagaaattacgtatagtaatttctaaccttaaagaagtggagtttgttattttggcattgcccccaaagctttgtaattctattatttacaggatattatacctatagttagttaagagtgttgctagtcacagttcaagtgttaccagtaaagatggttttggctgcaaattacagaaaactctcaagtgaaagggacttaatcaaaaaggatgtttattatctcacatcttaataagatatccagtagcaggatagcttcctgggtctgcgacccacatacttttcatctttctactctaccatcttaagcatatcagctttgtcctctagctcctcatggttacaaggtagctgccaaagttccagacatcatataaagattaataatggaagaagagaccacctattccttgcatctttttaaaaaggaggaagtcttccctagaagcctttaagcagtcatccttataaacctcactggccagcaataagtcacatgccaatgcataaatgtcactggaaaatggaaatgcgattacagtaattcacaaactaatatttaatgctgggttgataattttacctgacttagaggcaggtacctgaaaaaaaatcagtattctgttagcaagaaaaaaggcatggctaataaggagtcaacagtatttgctaaggatatcttaggtaatattttatggaagccatcattcaagtacatattttatttgaataaatcctctggggtccatttttatgttcaatagtttaaaacataagcaaagcttgaaagtaaatgaggatctgacgtatttgaagcttaacttcataaactttttttttcaccatcttccacattttacatttgaaactccttggctttgttgacaacccattattccggttctcctgcttctataattttctccctttctataatttcctgaatctagatcatttgtaggaaatatcaaatctccatatctgcattcacaagtttctgagctattcgtccaacctcaattaaaagatttcattgcctttaagtctcagctttaagctctggccctctatggttttccacaatgttcagattcactctgctatactttcccgtaacatactctgccgttcctgtctccccatctggaattgtcctttcttctttcaaattctattatcccttaaaatctgatcagctcctcatcttccacgaaggtttccctcactacccagcctaaaacaaattctagtagtactcaattgtctgcagttacttttttgtgtgtgtaggtctcatctcccctcaaaatcccagatagattataaactcttaaacaggaagttagtgtctcttggtgtgtaaccccaccatgctagtccatagtagatgaccagtaagtggttgaatgaatgaaccatctattcttttcacctctttttggggacatctttgcttttcacagaggatagtgctgatttggacagcattgaagcagttgctaatgaagtattgaaaatggagatgcctagcaccccacagcagttacagaacttgacagaagatatacgtgaacgagttgaaagcctttctcaagtagaggttattcttcagcatagtgctgctgacattgccagagctgagatgttgttagaagaagctaaaagagcaaggtatctaaagacatggcatctaaggggcttattttgtgtatctatcatggagtaaaaagtatctctttaaccaatgaaacttctaagaaggacctatgcgagtctctctgggtcatttcaggaaggctattctttaaagaaaagaacactgagagtacttttttcatgttcagcaacaatatactgtctcattattttttactcagcaaaagtgcaacagatgttaaagtcactgcagatatggtaaaggaagctctggaagaagcagaaaaggcccaggtcgcagcagagaaggcaattaaacaagcagatgaagacattcaaggaacccagaacctgttaacttcggtaggcatacacaatcattacatgaatgggaacacacctacatatacacttaccagaaaagtacatttgttatctatgaacagaaattcttacaactcaacattaaaggattcctttaataaatctaaactactccgttagcatggatgctaaaaataagtggagataggttttcaaggaataaaaggactctgattcagacactggaccattacgtcccatctcattttctcccccacaaagtctgagaaagataaaaacttctattcttgggcgggcatggtggctcacgcctgtaattccagcattttgggaggccgaggtgggtgggtcatttgaggtcagtagttcaagaccagcgtggccaacatggcaaaaccccttctctactaaagatacaaaagttagctgggcatagtggtgtgtgcctgtagtcccagctacctgggaggctaaggcaggagaattgcttgaaccggggaggtcgaggttgcaatgagctgagatcacaccactgtactccagtctgggcaacagagactccatctcaaaaaaaaaaaaagcactcctattcattgaggaaacagcatatactctgttcagtagtatgaagtataataattttagaaaactgtcctgatgttataaagcagcttatctggttaagaaggccaatgtctcaagattttggtcatcaaacattttactatatagtagttttggaaactatgggagaacagtcagtctgctttcaatacccaattctagagaaacctaatagagcacttatagctaaacaatctgttctgtttagaatgcatggaaaacttaatgttttttataagaaatatactgtgactaccagatattaaaagtactcattacgaatttttcatagggatctagcaccttgctctaaaaatcctctttatctcttaaaagaagtaatgcaaacataattccattaaattcttttgtttctcagaaagttaatgttttcgttccaattttacgagtttttaaaaaatgaagaaaattgatgagttatctaatccctatacaggttctcagaatatactttgaaattaaatgctcccatacccagcattgtcagccttctcaggccaatcctccatgtgtttaaaacctgggaagatgaattttcaacatgcttttcttaccattagttggtaaaaacctgtgttcccctattctattgctgtcagttaaatgaaggccaataattctgtccattttcctccttaaatttcgagtatcaataagactttttcttcaggctatttgttcaagtttagaaaaattatgttttcccaccagactataaatattttgatgtttcgatctctaggtttttccattttctcagtttgctgttaatattttagtgaatattatgtcagtgactgtagaaattattgttttgaaagccaggtgcagcagtgtgtgcctgtagtcccagccacttgggaggtggaggtgagaggatcacttaaggccaagagtttgagactatagtgcactatgatcatgcctgtaaacaaacagtcactgcactccagcctgggaaatatagcaagaccctgtttcttgaaaaaaattgttctgaaaagcaaattagaaaatactgaattataggtgagatgtggcttgatgatgcaagttaataattggggttctgtttttcaggggccctagggggcaggaagtgttttaggttagtaacaataagaaacaaagagaacctctaactaaactgtgttcatgaaagcttatcagaaacaattcactcaaactttatcttctaagaattataatttctaagaattttattctaattaaagggtccttaggtttgaaatatttacaaattttagcctatgtcttatactgacccttattaacttcattatagcagtactgttattcagttaattctatgtaattagacccatccttgaagatcattttaaagaaaaattgagtgctcagtgaaattgattcttttgtcatgggctcaactgcttactttggctagcttttaaaagtcaatgtttattgattctactttgaaaggagatcagatgtggatcctcaccagttgcccagatatttttttttccctaaataactttgtgtatttagagtttacagctgtaacgttcccagaccatacatcatctcacaattctatagaaattcaaagaacatccctagtctccatgtcttcagtaattagctgaaatctccactactagagtttaacatttattttcccactcacattaagttggaaatttatgtggaaatccctcttcgcacagctgcttatttgtgaatgttctttagccaaagtttgcaggtgtccttaaaatgctttctcaacacatcatgctccttggggaggtggggttttttgtttttttttactgtcagaaaaaattttacatcaatctcagcttagatcatcagaagtactgaaagaatgaagtgaatatatgaaatgtagcaaagactaaagttagatacttcatgtaacttttcctgaaatattctttttagtaattacttcttttggtctagagcaaaatggcacagcagacttttaaatcttcctccaaacttgtactcatagtaattccatttcttaaactaatgtcttgctggaaaattgacatgcttttagattgagtctgaaacagcagcttctgaggaaaccttgttcaacgcgtcccagcgcatcagcgagttagagaggaatgtggaagaacttaagcggaaagctgcccaaaactccggggaggcagaatatattgaaaaagtagtatatactgtgaagcaaagtgcagaagatgttaagaaggtacgtaaatctttgtaatttcagagctatgttgttaaaggagccaccagtctcctccttgcctgccttagagtaagggacatggacctaacagaaacagaattcatcagaaatatcaaatgacctgttttgcaacagccgtctttagaagtgtggatgggaaagaatatggaaatatctaataagtatgacctatgtcctcaaatccaaatttggacaagagtttagaagaacggaattaacttaggggtagaagtctcaaaacaggctttttttttttttttaaaccaactatattgacaaaaaccagtcatattgaacttttatttctgtgcggtagtcagttaaattcttcatggcatatagtaattatcaggccatttgagaatattttacaagcaggttggaacagagaacaggtagtaggaaaccaaatcttatctctttgagactcattttgaattaactacccctcacctctcattcgaaggcactatattttgcagagaaaaactcacacaacccaaatgtttaatcagaagccatgtaataactgaaacacatgttcagtttctcaataatgcttatttctaaagagaacattaaaaacttggtggcgccggggtggggcttaaaaccattgaatcactggtccccaacttttttggcaccaaggaccagtttcctggaagacaatttttccagactcgggggtggggatggtttcaggatgaaactgttccagctcagatcaggcattagattccataaggagtgcacaacctagatcccttgcatgcacagttcccaataggattcgtgctcctatgagaatctaatgtcaccactgatctgacagaaggtggagctcaggcaataatacttgcctgcccacccagttcctaactggtccgtaggcctgggggcacctgcatttactgacctaatttcagtatttaactccctactattcaaaaattttctggaagttactgtagcttttcgggcattacgtaagagtaactttccctacctctctctaggttgggaaagagaacaaaacaatgagaaaagttcactgccacaatatcagacagctgtcttttctgttttggtttgtgtggtttcctgcagtactgaggacacaaatttctcaagtactctgcttcagggcattttgcataatgacattttatcacaagagaaaggaacaaaatctcttgaaatgaaatttccataaatggctatttgaacagtttctaaaaagaatcatttgcattccaaccccacaccccatttctcttctcctcactcacttcttgcatatgctacaatctcacctttccttcctgtatcttttgtttaatctttttcctctgatttccttataagcaagtcttcacaaatcctaatttagtcaagatccaaagagcctccacttcttcaatatgggcttctctaatgtctaatctacttttgaaaaatctgcgcttctctatgtaatttgcaatacaattatgctacaacttttctatagaaaagtaataatcaggagaatgaggacttagccctaaggatttgctgcaactccagaattttttgaaatgttctttaaaatcatgtcaattttgcattcaattccactgtttgaagataaaattttaaattacttaccagtgaatatccttggtggcccttaatccagaatgcatgccatgattacactattgctcttaaatgtaattactgacactaacattaccacttctttctgtctaaatgtggaactatagactttagatggtgaacttgatgaaaagtataaaaaagtagaaaatttaattgccaaaaaaactgaagagtcagctgatgccagaaggaaagccgaaatgctacaaaatgaagcaaaaactcttttagctcaagcaaatagcaagctgcaactgctcaaaggtgggtcttttcacacaggcttattttttaaattactttaaggcatccatagtttatttaaaagtgaaaaatatattcactttgtcttgagatcatcatagtataaattgctcagactttatatatatatatctccccacagatttagaaagaaaatatgaagacaatcaaagatacttagaagataaagctcaagaattagcaagactggaaggagaagtccgttcactcctaaaggatataagccagaaagttgctgtgtatagcacatgcttgtaacagaggagaataaaaaatggctgaggtgaacaaggtaaaacaactacattttaaaaactgacttaatgctcttcaaaataaaacatcacctatttaatgtttttaatcacattttgtatggagttaaataaagtacagtgcttttgtatatattttggtgtacttgttactttcactgattgttgatgaatcccttttttcactgtaaacgtggatttataaacaa

SEQ ID NO: 9664 - DNA, 136 bp, Homo sapiens
tttaataaatggtgttgggaaaactggctagccatatgcagaaagctgaaactggatcccttccttacaccttatacaaacattaactcaagatggattgaagacttaaacgtaagacctaaaaccataaaaaccc

SEQ ID NO: 9665 - DNA, 629 bp, Homo sapiens
caaacttgcatgtgtacccctgaacctaaaataaaagttaaagggaaaaaaaagtaaacatgttgtagaagtcacaatctatgacagtcttgttctttgccttctccattgcttcttagtaatctgtaaagctattgtttctgatatgagtcagtttctttgtccttcccttttacatttcctctttttttcttaccttttttgagggatcctaagagagcgttttagaatggggaattcttaaagaaacctgcaaaatatattttctccattatgttaaactccatagcaataaacttggtttaatgcggtcagttttatcacagatcaggcctccctaaggcgaaggagctaagccagtaatttgggaaggctttgaagccacatgtgcatgtatacattaacctctaagactaaccataatttcaattaacataaaataatctaaagacatgctgattagacaccgtgtggctttaacaaagcattctgggcagggggttggggaatagagaagctttaactattcctagcaccagcaagcagggctttctttaatcatttataacatattttctcaacctttttttcttgcgatgttcttagagactaaaaacaacaaaattcca

SEQ ID NO: 9666 - DNA, 630 bp, Homo sapiens
gcatcatgttacccaacttcaagctatactgcagggctacagtcatcaaaacggcattgtactggtacaaaaacagacgtatagactaatggaacagaatagagagcccagaaataatgctgcacaccttcagccatctaattttcaacaaagctgataaaagcattggggaaaggactccctattccctaactggacctaggataactggctagctatatgcagaagattgaaattgggccccttctttcaccataaacgaaaattaactcaagatggattaaagacctaaatgtaaaatctataagtataaaaaccctggaagataacttaggcgataccattctggacataggaatttgcaaatatttcctgacgaagacgccaaaagcaattgcaataaaaccaaaccagtgtctataaggaacttcttaaacaaatttacaagcaaaaaccaaacaatcccattaaaaagtacacaaaggacacacacagacacttctcaaaagaagatacatccagccaataagcatatgaaaaaatgttcaacatcactaatcattagagaagagaaattcaaatcaaaaccaaaatgagatagcatctcataccagtcagtatggctactat

SEQ ID NO: 9667 - DNA, 13322 bp, Homo sapiens
cagactgctctggcagccggagaggaggcggtgcggcggtggcgctgcggagacccggtccagacgcctggcggccgccggcacacaaggcgctttctagctccctcccccgagcgcacagcccgcctccttccgcggcgcctgcagtggcaggcttgctctgccctaccgtgacgcgctccggagacgctctgcgggtcctggacaccgggtccgcggcgtggggacgacagacggaggcgaacgccatcggtagccggtccgcgagccatcgttcggggcgcagtcctctccccggctggccctcctttctccggggcattcgccaccgcttccctgggctgagacgaccggttcgtcgcctccttgcccgtgaccgtcgctagaactcagttgtgcgttgcggccagtcgccactgctgtaagtttcccccactgccccggacctgttgcaggcgctgcgggcttcaggggctgcttcggctgcaggggtgtgttcgcgaggggtgagcgtgctccgagcactcgggagcttcgactagagggcaaggggagctcttctcggtgcggagatcacggtgcccgccgctgccctcccacagcaggcagaagccgggcatcgccggagaggtcgaccggcctcccctccgcggtgcaatgtctggggcgagccgctggggaagcgaggagccgagctaaggatacagtcagcctctctcctctgcggaaagcagcgctttcctgggggtgaatgtcgcgctgcgtcgctccccgcagcctccagggccgagcgcgcgggatggttggcccacgttgcatcctccccggcttggaggaaagttggggccatgcacagacaccctgagtgcgggcatgttcactgcggcggaaatgtctatagagaatgaatgaaaactgctttctgaaaaactagtttcttgatctgtcgtgttaacattattagttacaaaggataggaattggtgggcctggagatgaaacactgaatttatccacatgcggtttggtgtcacacaggcatggccagcttgttaaatagcgttgcaagtgttaataaaaagactctggcaagaagctacttttgttaacaagatctttataatgttctattgttaccggtaatgtaaatgcccagaaaaaaatctgcttagtttctcttttgattggattgagatcaggttcaaaacctggagaagggtgcgggacgctaagcattggaggcagagagcctgagttaggagcatgaagtgaactgaagttactgtaactgaagcccttttgatgttcacagtaatagcagccctttctctgtcttctttgcagacgtaggttaagtacatgtgtgcattttcttggccacttacttggtatgcaaatgtgatttctctgggggcttaaaaatgctcgaaagatgattcattttatgttgaaggtgtgttcagtgacttgtatacatggtttctgctgatattttgaggtttgcacagttttaaaccagaaagcaagtatttcctcttgggtttccaagtttactttttattttaatcaaacattgttgcaagaatgttgattgtgattttgactgtgacgtgcttttccatctgggtggtatccaagatgacaggctaggctcttccttctggcttgttgggccaacctggaacatacaggagcataaacacaggatgcggagagatgtagatcctatatcctaaggtcttctaagcaaattgttttcttaggtgtaagtctggttgtgaatgttgttttgcaccatcctgaatttaatgttcaaggaaatgtgttctgggcctagcatgattccagctcaatgtgtaagcattttggtgcctgtgcacctagtttcagggagcctcattcttccttcactcagggcagcatttgctctgagagaggcggcagattcacaagagtaagtagacagtctattgaggtttaggtttaaagtcttcctccagatactccagattgaatgtactaattaaaatagcaactacagtggtggagcattgagaatgctaatgaatgttttaaccctttggaaacctgatgcattcccataggttcatatggtcattctccaaaacactgggcattggttagaatggagtagacagtagatgcttagcttgaggtgggagtgaagctggctcctcaccattttttatatctcaagtcactgtggaaattactgggtgctttgtaaagtcttcctaacactggagctctaggactttgttgcttcctttcttccactcagccatgtttactcatcataaaaaattatattccaaaaaggaaagaaaactagttgcatcacctaatggtatgaggtatatgtgtcatgcccctgcctttgtggttttctgtgcagtcttatagtggggctcacatctggttggggaggtgcaggttagtattttagcccatgaatctgtggcaaatcattcatttgcatttattaataattcttagaatatgcatttaaaaatgtctgaatggttaaaggaaacagagtttcagctgcgcttttgggactggctgttatgtgtctggaacagatactgcaaccagccacacagtttaccctctggggataaacagcgggataaacagcttccttaggaatccttggacaggcaggttcttgaggacttcattcctttgaagtaacagagggatggtgtaaaagaaaaggatgaaggcatgtgattcagtttttgaagatgggtgacaagcatttcctatgtctctaccctactgttttcttactgaagaaaaccaaaagatagcattagattctactataatttcaatgtagataccaaggaaagcactgtagtcagcaaataaattctggggtggccctaaattaacaacagctggcaaaatacacacacacacacacacacacacacacacacacacacgtattttttgatttaaataaagcagtgtttgcattttgaactccttctatgcaggtgtcagcatttgcaggtatacaggaacagtcctagtgatgcactatttaatcaaaagacggatggatcttttgttcttgcagctggttttccaagaattgatataaagcgggaagaacagaaaacagcagtcataagtatgctactcaaaatattcttctttttatgtgccaaatcctcacattggaagctgtcccgagcaagacaggtagttggtgattatggccagaatttattctgtgctttgactaaaggcttgctgatcaatatatggttaatgttgaaattggggtgcttttaggactcttcagtggtagagctgtctggttagaaattaatctttaagttgggatgccgaggtgggaggatcaggtgaggccaggagtttgagacccggtctctacaaaaaatacaaaaaattatctgggtttggtggtgcacacctttagtgccagctactcggaaggccaaggcaggaggatcacttaagtccaggagttcgaggctgcagtgaactgtgattgcaccactgcactcaagccagggtgacagagcgagacttggtctcaaaagtatatataaaatgaaatacattatctgtaacatttaaataaaggtctgatcattgcagaagttggccttacatttcccatttactgtatgtgctgggagattggatcttaccaaaggaattcttaatggaattaattattaggtgtttgttttacgcatggctttatgttgcatggggcatgaaagccagtgcccatcctggcattataagagcaggagacctggcattttaagtggcccgcagtgaatgagctggactaggacagggagctgtgggaatgagactcactcctcttggcttttgctgacttatattctaaaagacttcgatggcctgaaagttggcaatcaggttttccaagatgaacctgctttttatgcagtgattttttttttttttttaaacagtgcagagttcaaatagctcaacagtattagcagtgaatatccttccttccgggtagttgtctctggctttgtcctggaatggccatacactattctagaatagtaggtggcatggtcaacaacaaagtgttctgttttttgtgcaaaaccattgttgctttcgttctgctgttctgaacatcaggagcatcattttcaatttattattattattatttttaggagtggaaacaaaatgtcagtcagtgtgcatgagaaccgcaagtccagggccagcagcggctccattaacatctatctgtttcacaagtcctcctacgctgacagcgtcctcactcacctgaatcttttacgccagcagcgtctcttcactgacgtccttctccatgccggaaataggaccttcccttgccaccgggcagtgctggctgcatgcagtcgctactttgaggccatgttcagtggtggcctgaaagagagccaggacagtgaggtcaactttgacaattccatccacccagaagtcttggagctgctgcttgactatgcgtactcctcccgggtcatcatcaatgaagaaaatgcagaatcgctcctggaagctggtgacatgctggagtttcaagacatccgggatgcatgtgcagagttcctggaaaagaacctgcatcccaccaactgcctgggcatgctgctgctgtctgatgcacaccagtgcaccaagctgtacgaactatcttggagaatgtgtctcagcaacttccaaaccatcaggaagaatgaagatttcctccagctgccccaggacatggtagtgcaactcttgtccagtgaagagctggagacagaggatgaaaggcttgtgtacgagtctgcaattaactggatcagctatgacctgaagaagcgctattgctacctcccagaactgttgcagacagtaaggctggcacttctgccagccatctatctcatggagaatgtggccatggaggaactcatcaccaagcagagaaagagtaaggaaattgtggaagaggccatcaggtgcaaactgaaaatcctgcagaatgacggtgtggtaaccagcctctgtgcccgacctcggaaaactggccatgccctcttccttctgggaggacagactttcatgtgtgacaagttgtatctggtagaccagaaggccaaagaaatcattcccaaggctgacattcccagcccaagaaaagagtttagtgcatgtgcgattggctgcaaagtgtacattactggggggcgggggtctgaaaatggggtctcaaaagatgtctgggtttatgataccctgcacgaggagtggtccaaggctgcccccatgctggtggccaggtttggccatggctctgctgaactgaagcactgcctgtatgtggttggggggcacacggccgcaactggctgcctcccggcctccccctcagtctctctaaagcaggtagaacattatgaccccacaatcaacaaatggaccatggtggccccactccgagaaggcgttagcaacgccgcagtagtgagtgccaaacttaagttatttgctttcggaggtaccagtgtcagtcatgacaagctccccaaagttcagtgttacgatcagtgtgaaaacaggtggactgtaccggccacctgtccccagccctggcgttacacagcagcagctgtgctggggaaccagatttttattatggggggtgatacagaattctctgcctgctctgcttataaattcaacagtgagacttaccagtggaccaaggtgggagatgtgacagcaaagcgcatgagctgccatgctgtggcctctggaaacaaactctacgtggttggaggatactttggcattcagcgatgcaagactttggactgctacgatccaacattagacgtgtggaacagcatcaccactgtcccgtactcgctgattcctactgcatttgtcagcacctggaaacatctgccttcttaaatgcagtacattctaaagagagtgagcatgaggtaagaagtttagctatagatgtaagtatgcatataattaggctattgtgtaagttcagtacatggggtgagatctgatccacagagactgtactgcagaagtactaccaaagctgtaaaaataagagagctggtgcccctagaacttatccacttgtgttgaccacagcctcagcccccaccatggcattagccagtggttctcagcttttactgagcctcagaatctcctgaagagctttttatttattttattattattattattatttgagacagagtctcgctctgtcacccaggctagagtgcagtggcatgatcttggctcactgcaagctccgcctcctgggttcacaccattctcctgcctcagcctcccgaatagctgggatacaggcgcccaccaccaggcctagctaattttttgtatttttagtagagacggggtttcaccatgttggccaggatggtcttgatctcctgacctcatgatccgcccgcctcggcctcacaaagtgctgggattacaggcataagccaccgcacccggccctgaagagcttttttaaaaactgcccatcccagagacttagtttcatttggtctggggtggggtccaagcatcagtatttttaaaaagtttccggatgattccaatgaacaaccaagttgagaacccctgacctctgttaagtatgccagctaatgtttattgagccctcactgtgtgcttgcagcggtgccacgtgtttcccacggatcatctcattctatcctcacaacaaccccgtggggaattattactagcttcattttatagatgaaaaaaccttcatgcattacggaggctaagctgcccgagttagcagagcttagtaagaggtggagctggttaggaagtcaatgcagggggtctggctctagggcatcagcactggagcatcgtgttgcactgccaccgaataaacttgagcttcacatccatgacaccaatgtcatcccaggtgatacttcatttatattcaaattttgcttcctcaaaccctttgtagaatgattagggtttaaaaatgtattgctcaaattcattcctagtttattctctccaaaattattagcttattttaaatgttttacttaaaaagtagccccctttaaggcgtttattacctttaaagataaatctatatctgtctttgtaaaaggttgcatgtacatagcagaaatttgtgcagataacacagagccacctaaacttcccaaactatggcctttcagagttaatcagtcaggccgaccctattgtcaaggctaacaaaagttgtgtttctgagtcatatatctgagtacataatagttgtctgtgtatttaagagtatagaatactcttggctcaaataattaataggcctacacagttcagagttcgcaaagctcacggctgctttgctgctaagcattcttaggattggccccaggaatcgcttaggcatgtgtaagtatagcccagcgcacacaggatgtgttgacttgttttggtgattcatgggcttattactaataataagagaagaaagtaactgctttggaggaactacaatgaaaacaaactcatttacttgggaacttttggctctgttttccctagtatgtttcacacctttgaaggggacttcaaagggagaaaaggagatctaggcctagtggcaagctaagcacagaggggtttcatctcattggtcttttctttccctgtcccttacagctcatttagaaacatcattaaacttggcctcactctcacatttcagcttgccattttattttctttttgagacagagtcttattctatttcccaggctggggtgcaatggtgctatctcagctcgctgcaacctccgcctcctgggttcaagggattctcctgcctcagccttccaagtagctgggattacagtgcccgccaccacgtcgggcttttttgtatttttagtagagatggggtttcaccatgttggtaaagctggtcttgaactcctgacctcaagtgatccacccatctcagcctcccaaagtgctgggattacaggcgtgagccaccgcacttggcctccagcttgctattttttttacttcttcagttatctcttccagccttcgtacagttatcagagttctgagttatgtcatgctttcctggaatgaaactccttcaaagcagcaggaacaatcagacacctcctctggggagcaactgggctaatagtgtctcacaccaaactggttttttgtagccttgctggcatctcagtaatcttgaataaacaaatgctctgaaagtggttatttcatttgagatatgaatgcatgactcacctctaaagcaggtttaaagaacctcctaggcgaaagcatcaattaacagcacacttagttgggtgttagtccagaactgactatatttgcacagaagagccataaaaattgctaccagggtggtggtacataaaaaatgacaatgggcaggctggctggaatccttggaacaaggtaaggaaattgaggcagaaagaggagagaagccacatgtgtattctggccctagttttaagttctagaccttcctgagttttaggttgcttctctgtcaaatgagtggtttgatctttaatctcctgtgatctgtcccaactcagacttgggtcaattgataggggagttaaaagaggcgaaaatacctagcccagtgcttgacgtgtagtaacttactgtgagataatggcagtggaattagctttctgtgtggtaggaaaatgaggtttctttgactattatctgcttgttatctttagacttcacttttggttcctcctttttcagcccagagtgaacatgttggcaaacacttgacttcaccctaccctgggtgtttgaactgaatcatacccttccggtcgctgggaaacagagcaagtaaagtgttaagttatatgtgaaataacatcctcttcacccttggcgctaccagtgagagagtcaagcacatgaaaactaaatttgacagggccaagtttgctgcttttaaagggcagcgtaagcgcctgatcaaagccactctttgaatttccgacagggagaatgttggttaaaatttctaaagtttactacacaagatagtgctaaaacatttaagagggggttggagtgccttaaagtgctgggtaggtgggtctcagtcccaaactgcaaattcctctgccctccaaatgtaggtgctaacggaattaatagagtgtttaacagaaagtttccctaggtcttaaagctcatccacctaggaggttttatctgcctcctgctgctctgccagtgggtgggaagggcagaaaggaaattactttgattatcctctgttttcatggtgccgtgtggcctcaacctaacttaggctttgatttgctttgtttcttctctagattttgttgttgttgttgttgttgtgtgtcctttttttttttattatcgttcctgtttgaatatgcaattttttggggggagggtgtgtgtattccttttttcctgtttgaatatgcattgtcttgaaattttatattattataagatacattcttttggcctaatgttgacatataggttacaaggaggtggaggtggggcaatgacaccgtagtctaaggcatgccttgaaagcttgaatcactgttaggaaacagccaaaagaaacaactcatgaaatgaatcaggcttctgaacacacaaaagcaaagaattcagtgcaaggtcatgagtggctcctccagaattccctttgtctgtacttagacttacagcaatagggatacaaaagccctctgcacaatttccccagatgaaatgagaaataaataaatgggaagagtaagcagtgtgaggaaatgcaagctctatgaaatgtgcaggctttgtggttacggcactttgaattgatattcacacttgatgtacgtagattctgtagcactggcatgccgtagctgctggcacctacgtgtggactgacgaactttgagaataaactccaaacttgggctgttgaggcctgatacattgtcatgtgaaaggaagcgagactgatttctgccataatggataacagagatgcatttaaataagaggattagtatgtctgcctcctagatggtaaagttaatttggaatctttcatggtacatgggccaaggagggtttgcacaggaatctcccttcttttcaccccttagtgatcactttacagtcgctctgtttaaccacagaaagaaattttatgaatgttggaagcagaagatggcaactcctaatagcatctagacatataggtttggatttgaaagtgtgtatgcttaggaaagaagtgaaggtccttctttagacaccactgtttttgtcaggccagccatctgcatggatgtgtacgtgcacacgtgtgtgcatttaaggcaagtactttaaatatctttgcacagttcctactgaacatgtaagacctttggaagcaatattgtccagctccataccaagtttaatttaaaaaaaaattttgtggctaataagaaaaatttaaaaactatggcatcacacaaatccttcatgcttttttgttttgttttttttccttttccttctatttcagctcactccatcactcgatgagataatatgagatttctacttcggagaggccaagtctaatgaagagaaaaaaaggaaaagaagttgcaagactcgaataaaatctgctgcaccttgtaaatgctctaactggacatgaaggaaaggggcgagggaggggggtgggatttttggtgcaagtagcacatggtttaaatatgaatgaacaaacctgtgatctagtccttgtcttgtaattgtggattaatgtcaatgttaatcagcccctcaaagggagagaaaagctggaccttttcccttgctgtaccatattcagcatttgatttccatgggccccaccatttatgtgtagaatttgaaatggttgtcacctctctctgaggacagagcttgaagcctccacaccagctgctgctggagattcaaagcccaactgtgggtccgagagggaagctggctgggctggctgaagaatgaagaccactggactctccgttaatctctaaggggtctgctccccaggaacgtttctgaacaatggggactttgttggtagccatttggtagatgttcttttctatttataagtgactttaaactttcccttggctgttaagaagtttgttatagatttagctatttattgttcgatgcctgcatgctgaaacaatgcctacagctgtcttcacatgtatggacgtgtgtgaatggttgtacgttttgcacattttgtggctgttgagatgtgctttgctgcacaaacatgaaaatttttgagttacaatttggagcataactggagggtgggttggggaggggtggatttttaaaatgtcaagacagggaaggatgacaaaatggaaatttaaatgacatcctagaggtagagaaaccgtggagatcgcttttctcagactcaccaacttttaatgggatttcatggggtttggttgtgctgatagggtaaggggaggctgctttctgcccttctccccactcccatctgatttacttaattcagtctcagctgctgaaatttggaaaggaccaaattgctttacagtttttttctttgtgtagtatcttgaaatcctggaaaattctatggaatagttctgtatatagggcacaagtaaaggcattgtccaaagtttatttatttatttattaccctaagaatgctttgccataaccacatttaatgggaaaaacggcagtatcacagatgtaaattaactcaccagatttactgggcctgaactcattctcttcttgctatatgatttagcaagttctagaaggtctccaagacaataattacattggcacaatgtatacttcagtgctcacccgtaggcaaatctctttttaaaaaactctttggtgcacaagtaacacatttggccacaaaacaccaaagaattgtaggcagtggcccctattgagaagttttccggtagagttggaaatcagttgtgaatacattctttgctagttggagtgcttgtttactaagcatgtgccgtcgtaggtattagtgctagtctcagataggtgcttcccctgaggtgcaggggaagaccaaagtttgcaactcgaactgctttcgtccatgtttctcacattgctgtattttagaaaataggggttaagactgataacaaccttttacattgtgactgtgtttgcattgtctaatgacagataaatccttaacatttctctccaccttagtactttagactaattgtgtttgtccgtccatgccatgaatgagtgggctgtagttgggcctaaataaatgagctgttggaagaaaagaatcacagtactttccagcagtcagtccctggttcctagatgtgttctaagcaatgcaaatgtctaattgtcccccagtgggcatagtcagtgtcgtttatattgtagcagttacagctctgtagtttatgatgcaaatctgccaagagagatgtatgtgtcactgcatggcttctgaaagcaggatgaattttctgcagctgtttcaaagttggggtctgttcttgaatcctctattaattactgtgtgtgagccagagggagctgtggtaagggttgggcccccagcctgtagggaactttctggactcccactctttgaatcgatataggcatttggtctcactacttgaccattctcaccctgtgaaacgtcccacactttgaagcaaatacaattcacagcacagtacacacaaaaaccttggcataagacagagaaggttcttcttattttgtgggctggttgctgtagaaacacataacaaagggcagccctccacttctggtataattgtgtagccccttttctttgggcttgacacctgtcttgaataagagtgattagagctgcataatgtccctctcttggctattgaccatgtggttcacgtacaaaactctgtataagttgaaggaaaatgttcatgttcatatgtacttgtttgctatgactacattttgaggttttgtaaaactgttatttttttttttttcacaatgtgaaactgaaggtcaataaattattagagattttctcttcatta

SEQ ID NO: 9668 - DNA, 526 bp, Homo sapiens
ggcagagtccagccgggggtgccgcacccactggggagtggggagggaggacacataggaaatgcctggggctggagtctctttggctctctgccagcaagaaacttaaacgtcctggcttgctcaacccgagtgtccctaaactgtccagacttttgcccgtccattgccactatctctccccactctgggtgtcctacccaaggcgctgtctatgcgtgcccagggcctgtcctgcggatacccagctcgccccttgcagccctttttagagcatctcgcgggctctggcatcaccaagcgcacagccccgggctgcgctcccctaaggtgggtccctcagatccggggctgtccattaaccaggctggcccaaagaggcgcagacactcgaacccgggaaaacttattttattctcggttcccggggttgcagctgccagcggctgagacagtgcgtccgctttgtctctctgcactccccgcagcccccctctcccgcttcctctcccgattaactcccccg

SEQ ID NO: 9669 - DNA, 196 bp, Homo sapiens
tttttatcctattaccccttcccttggctaccaccccctaccctccacccacatccacagtgctttaagataaaggagattaatttcgcctgtaggaatccatgggaacttggccttcagacttcaggcaagcaccagagtggaaacatttggaagtctcattctaacatgtttttaccttaaaattttttaaaaa

SEQ ID NO: 9670 - DNA, 196 bp, Homo sapiens; identical to SEQ ID NO: 9669

SEQ ID NO: 9671 - DNA, 234 bp, Homo sapiens
ctgattgcagagccattctcccttagtgaagggacagatgatggtgaccactacagagacaggtaagaaggtagcctgagtcccaaccaacccagggagccacagcccctgcacactcaggaggcaggacggatgttgctttcttcttccttcacaagggagaagaataccttcagaatcagattcaaatcttgactcttcctcattgttagctctgtgaccttgggcaagtta

SEQ ID NO: 9672 - DNA, 882 bp, Homo sapiens
gacaatacaataagggagacaagagtaactcataagaagtagtctaccagtactgcaagacaaaataatactaagtactaaactatgtggtcctggaaataggttttggaagaatcataaggaagatcgttttcatgaaggccacatgtagtcaagaaagacacttgagttgtccgttagggggatattagacttgttttctacgtgtagtggttatcagggtcagttctgctctcccagctacaacaaacacacagaaccaaacagaacttaggaagtctggagagccgcaaagcaagcagacaccattagactctgcgtagatttgtttagagtttgtgggcattgttgaggtctctcagggtctgctgacagtcctgtgaccatctgcctggcagcaaggacttcagttgtttgcaatgctttggccaagccgagagcacgcggatctggatgcacagctgctgagcgtgtgctgacgggcctcagctcctcgagcgtgtttgttcagactggtctgcctaaatccactccaaaattcttccgagccagaaaaggagaacatgtgctttcttttcacatagtatttctgaatgcccatgaatataaaagagagaaaacaaaaccaaaaaagtctaagatacatgatattcccaaacaacaaaaaagacaggaagctttcggaatcagaaatctggccctttcttaagggaattccctgttggtttggagaccatgctggttgttagaaaatttagataaggaacaattttatttctttgcagcacagttcaaccattattttctgagtaccaattgtgtgcaaggtcctgtgtcagattctagagcaagatgctaatggatgcaaagacaagcaagacc

SEQ ID NO: 9673 - DNA, 101 bp, Homo sapiens
aggctggagtgcagtggtgcaatcttggctcacggcaacctccacctcccgagttcaagcaattctcctgcctcagcctcccaagtagctgggactacagg

SEQ ID NO: 9674 - DNA, 111 bp, Homo sapiens
agacagagtcttgctctgtcgcccaggctggagtgcagtggcgcgatcttggctcactgcaacctctgcctcccaggttcaagcaattctcctgcctcagcctcctgagta

SEQ ID NO: 9675 - DNA, 772 bp, Homo sapiens
aagagaaagacaacatgttaatagggatgagcttccattagcgcataacttgatggaaggtcctggaccctgaaatcacggggaatatcccaaaagaaggactggagtctcagtgtagatacgcttcttgtggttggcagtgtttatacaatgcctggctgagctagtactgtataaaaggtatccagcagatatcatcattattattgtagatgttgttattatagcccaggtcaaggggatctagtgggaaagtggctgaggaaaaaaggatttcttcgaggtatttaatttgaaattgttttagcccttataggtgagaatgcacagaggagaagtgtgagtctttgttcccatagaattatttcaccagctcagtctggcagcctccaccttttcagttaatgctgacaatgtcaggcactctatcaggaagggaaagcataagtgtggaggctagaaagttccagagcttatggagagatctgttcatggctccaggaagaatgttctaataggtattctctcttgcttgctcccttaccttttttctttgtccccaaattgtattttctctcactctctctttctctctctattcactttgattagagtttgggagacttaggatatcttccttttgaatagggcctggtttgggcaatgaagtttacaagtccaccttcagggatcactttcatttaacttctccaggtccatcacgttaggaactcccaagcccccccggtttaaaaaaaaaaaaaacatgaaa

SEQ ID NO: 9676 - DNA, 768 bp, Homo sapiens
aagagaaagacaacatgttaatagggatgagcttccattagcgcataacttgatggaaggtcctggaccctgaaatcacggggaatatcccaaaagaaggactggagtctcagtgtagatacgcttcttgtggttggcagtgtttatacaatgcctggctgagctagtactgtataaaaggtatccagcagatatcatcattattattgtagatgttgttattatagcccaggtcaaggggatctagtgggaaagtggctgaggaaaaaaggatttcttcgaggtatttaatttgaaattgttttagcccttataggtgagaatgcacagaggagaagtgtgagtctttgttcccatagaattatttcaccagctcagtctggcagcctccaccttttcagttaatgctgacaatgtcaggcactctatcaggaagggaaagcataagtgtggaggctagaaagttccagagcttatggagagatctgttcatggctccaggaagaatgttctaataggtattctctctttgcttgctcctttaccttcttgctttgtcccatatttgtattctctctcactctctctctctctctctattcactttgattagagtttggaagacttagaatatcttccttttgaatagggcctggtctggtcaatgatgttacatgtcaacatcaggaatcacttcatttactctcaagctccatcacgttaggaactcccaagcccgcccgggttaaaaaaaaagaacacatgaaa

SEQ ID NO: 9677 - DNA, 773 bp, Homo sapiens
aagagaaagacaacatgttaatagggatgagcttccattagcgcataacttgatggaaggtcctggaccctgaaatcacggggaatatcccaaaagaaggactggagtctcagtgtagatacgcttcttgtggttggcagtgtttatacaatgcctggctgagctagtactgtataaaaggtatccagcagatatcatcattattattgtagatgttgttattatagcccaggtcaaggggatctagtgggaaagtggctgaggaaaaaaggatttcttcgaggtatttaatttgaaattgttttagcccttataggtgagaatgcacagaggagaagtgtgagtctttgttcccatagaattatttcaccagctcagtctggcagcctccaccttttcagttaatgctgacaatgtcaggcactctatcaggaagggaaagcataagtgtggaggctagaaagttccagagcttatggagagatctgttcatggctccaggaagaatgttctaataggtattctctctttgcttgctcctttaccttcttgctttgtcccatatttgtattctctctcactctctctctctctctctctattcactttgattagagtttggaagacttagaatatcttccttttgaatagggcctggtctggtcaatgatgtttacatgtcaacattcaggaatcactttcatttactctcaagctccatcacgtaagaaactccaaagccagccaggttaaaaaaaaaaaaaaacatgaaa

SEQ ID NO: 9678 - DNA, 256 bp, Homo sapiens
gataaaagctaaccctcgtgggtgttggtaaatcaataattaattggagatcttccatgatatttcctcataagaatcattgctaaaattgttgtaatgactacacagactcccaagattgcaatagtcaaacaacacaaactgttgaagtcatgaagggatatgcaacatggctccttggttaaccttttggtagggatccagtttccaccatcatgaagtcctgttttcaatattaatttacatcattagaatg

SEQ ID NO: 9679 - DNA, 32082 bp, Homo sapiens
gccaggcgcggtggctcacgcctttaatcccagcactttgggaggccaaggcaggtggatcacgaggtcaggagatcgagactatcctggctaacacggtgaaaccccgtctctactaaaaatacaaaaaaattagccaggcgtggtggcgggcgcctatagtcccagctactagggaggctgagccaggaaaatggcgtgaacccaggaggtggagcttgcagtgagccgagatcgcgccactgcactctagcctgggtgacaaagcgagactctgtctcgaaaaaaaaaaaaaaaaagaaaccagaaacatttcaagcgggggcaacatttcaagcgggggcacctcactgttaggtgatggggcaaccatctggtcatttcattcatgatcccagttattttcatctgtagcaaaaagttacaggattttcattgttactagaaatgagaaaaagtatatatatatatatatatatatatatatatatacacacacacacacacacacacacacacatatatatctgtgatttctggcaaatgtataggtggtattacacttgaattatatccatatcgttcctaagaataattttatatgccaagagttaagatgcctaaattctttaaaaagaacagcaaacatccacaggcctcggagcacattgagatgcatacaatctaaatgtattcctttcaggattttgattgtaaaaaaattcaacagctccctcaaagatagagattatttattcaacaaacattatggcagattcaagtagcaaaacagtctgtaaatttgggcatgtagacccaaaaaagatcctctctcaaactgctaacctggtgttgctaaatgaaacagttcttgccgaagaattttcacaggtgttcatttgcatccatgaaattcctctcgttacatcagtttttaaacaggttgtttgcatcaagtttcaagagtaatttgtgaacattgctgtctgactatccatccccatagcagagatagtaacttcttaaaatttccagttattcctagagattaaagagttggaaaataaaaaagtaaaatttaaattacaatctactggtctaagcctatatcttcaaatggccaggcttataaaatgtcttcttatttaatatccttgtctcagctgtcttccccacgcaattttttttaaacagtctcaatctggcacctactgcagcctcaacctcctgggctcaggtaattctccaatctcagcctgctgagtagctgggactacaggagtccactaccaggcccggctacttttattgtattttttatacagacagggtttcgccatgttgcctaggctggtcttgaactcctgggcccaaagtgctaggattacaggcatgcgccacctcctcatgcaatttgagcagtatatacagttggaagcctcacattccaaaccccaccttcatcatgtttcccaaaattttcaaatcccaccctttcacctggtctttcagaccttcccctagagcagtagtacccagtacccggttcgtggcccaggcatcagggacccctgccctaggttacatctatttgttcttggagtcactgccacagccactgtcattattccctgacgtggcccctcacgggcttgtgctgatgcatgcaagccagccctccatcactgaccccacatgctgttactctggagcagctcccacacacatgcaaagctgatgtacacctgggacttcgttcattccagttccctacctacaatgtctacacagtccacacaccctgccaccggaccttcgcagccatgcagacacctcagctcaagaattacctctgacacctaaagaactcacagaccccacctccctccctttctcttttgtaccccacattttaatatctaccattttttcctgtttctctcctcccagtagactataacttccttaagggtgagaaatgggtctcctttctctttgtattctccagaactaaaaaaacttcctggcacatgttaaacatttcactacatgtttgttgaattaataaaagaataaagaaataaatgaacttctactctttaattcaaccaagaaaatataacagtggtcccctacatgtaatttatcacttactcctcagctttatataaaactttctccaaactagaatcactcaacttctttccaccacttccttcgaaatgcaccaacttcaaatgctccataatttaacccttcccctttgatccttcttttctgccatattccagattccacactcctcaggagcaggcttaaggccttatctttctcatattttaagtgtttgcttagttcctttttgtgccaggtacttactataactagatgggaaaaggttttttgattgttttcttgtttttaatttatcatgtaattttcacaacttcacaagatgaatattaatacgcatgatttaatagatgagaagactaagtaacttgcccaaggtcacacagctaatgaaagatggagctgacattttaacataaggctactgtattctgaagacatgctcttttctttttctccatcccagcataggggaaaggggacaaatattctaggctggatacttagtttatgttctttctgtaacagatctgttatattttaaaacaggaaatattttttaaaccacagaataagttcagcaaaataagtgaagcttatctttgatcagagataaaggcaaagaaacccctggcttcaaattaaaaccccatatatgcaaatgtaattttatgacccaagactattttttcctgagttttttaactttaaaacaccaaagcacagtggctacagaaggaaggtacttaaggagctgcaccaaggaatgaaatcgtattatcacaggccttaatacaacaggccaaattcatttcgaaaaaatgtattcaagtcttagaccctgtgaaaaaacaactcttattttcaagaatagaaacagctaggggttttttacatcttcttacaagaaatttccatccattggctttaaattttacttttcattcaaaagcacagcatgtttttatattgaaaacttcctaggaaaatgagagccattttctcacactctgaatcatggttttgctctgactaggtaaatagcatgcaccctcaaactcttgctagagagagtcactgaaaccttttaggttaaaaggaaatgattggtaaatagcttttctcaatctgagttcttctgtaggaaatggaaaaacagagaacctacaattctaaatagtagcatcagactcaaataacaactttgtgggaaaacaaggatcgatttgaaagctgggctccttcaggtcagactcagattttgaggggctctgtgtttttataattttggaggctctctacaagaaaaagaaggcaaacttacaaatgcaaatttaatcataaacacaaatatgtatctagaacaaaaaaacataaagcataaatttaataacgctgacaaatacagcaaacaaaatttttcaccaaaatatgaaataacatttttactaactgcctgggacatttcggtagtgctccctttcctatcttttttagttgcatgctcttttaaaacacttttttcctaaaaaataaagatttaaaattattttctctagtgagaataaaagttgtttttcctttaatttggctaaaatttggagttctttccaacattaatagtttagaataatttatttcagcttctcaactcattgataatgtcatgtaaattgttagaattattgacaaatttggagaaatctctgccaagtgtttttcatataggagctataaaatctggaaaaatacctgcagactgctggttctatatatttcaaatgttcctctactacctacatactgccaatgttaggctctgcaaaaagtgttcttctcgtagcacacgtcacaagcctggtgagtaggcacagtggtcagtaggactatctttgaaagcccctcccaccccaggatagttatgaataacttacctacttaaggaagtgattgcaaagcacataagtaaatcccattgctatggcctgaatgtttgggttccctcaagattcctaggttgaaatcctaacccctaaggtgatgctactaaggggtggtgcatttgggggggtgatgaggtcatgaggctggggccctcatgagtgggattagtgccctatggaagaggcctgagaaagacccctcacctcttccaccacatgaggacattaagagagaaagtgccatttgtaaccaggaaaggggccctcatcagacaccaaatctgctggtgctatgatcttggacttcccagcctccagaactgtgagaaataaatttctgttgttataagccatccagtttatgggattttgctatagcagctgaaatggattaagacattcactgaaatcaaactaaatatatccataagtcagctttcccttagcctagtcctaaaatccccatgaccactccagggccattcaacgaggtaagtcagcatgaaaagagacatgattgtggttgaaatattttttgtggccaggtatggtggctcatgcctgtaaccctagcacttcaggaggccaaagtaggaggattacttgagcccagaagtttgaggccagcctgggcaacataagggagatgctttctctacaaaataaataaataaataaattagccaggcatggtggtatgctcctgtggccccagatactcaggaggctgaggtgggaggattgcatgagcccagggagtttaaagctgcaattaactatgatcacaccaccgcactccagcctgggtgacagagcaagactctgtctctgtctctctctctgtctctctctctctctctcatatagatggatagatagattatatatatatagtactctatatatatattatctatatataggtgatatataatctatatattatagatataatatatatatccatatatagatattttaaaatatatatatgtatatcttaaagtactgacatcttccaccaccactcgtaatcacagccacaggctgtaaaccacactgtggagaatggaggcaaagtgcagctcaccaggccccagcgccagatactggattccgggattctgtgtgtgtctgcatagatgcatgcatttgcctctcccaacactgaggaagactccccctgttacacactgggagccggactcagagctactccccagcggagtgggacccagggcaggtgctctttctacttcccatggtggcttttccagccttcttttcctcaccataataagggtgacacatactcattagagaaaacgttttcagtagatgggatttttttaattacctgtagtcacattacctagacacaaccatggaaagattttggcatattttcatgtttttacggaacaaagaaattgaaaacattaaattaaatcaaatctatttttctcattattaaagaaatatatgttccctgtcaaaaatatgaaaagtataaaaaaccttaaaaccatctgtatttgttggcgagggctgtcataacaaagtgccacagactgcatggtttaacaacagacattttttgtctcacagttctgaaggccagaagtgcaagatcaaggtgttggcagggctggttggttccttctgagggctgtgagggaagggtctgttccacacctcccagctagcttctggtgttttactggcaatctctggcatcccttggttgacagaacattacactgacctctcccttcatcttcacatggtgtcctcccagtgtgcaaatctgtatccaaatttccccttcttataaggacactggttttattagatttgaggcccaccccactccagtatgacctcattctaacttaagtaattaacacacgatttccaaatagtcacattctgaggtagtgggggttagaacttcaacatatgaatttggaagggggtggcgggacacagttcaacacagaacaccatcccaaatcctatgagccaaagaaaaccgatgttaacaagttattaccaggtcgttttggaaagtatggccagaaattcttttgctactctgctgattgaggttggggtctgtgtccccctttctctgaatctgggcaagctggtgactgctccgctcagtaatcctagtattcaagtcatgacaacccaggcaccaggcagggcaatgaaagagcttccagatgcttccagcccccagctaccaagtcattgccagcttgagtcttactgagctgaggtctcagacaccagggaataaagacaaaccctccctcctgtgccctgttgaaattccagatccacagaacccttgagcacaataaatgcatgttgtttgtgatggttaattttatgtctagaccacaagatgcctgaatagataaaccttattctgggtatgtctgtaaaggtgtttggatgagattaacactggaatcatagactgagtaaagcagattgctttccccagtgttccttccccagtccattgcaggccagaacaaaaggcctggaaaggtagaacttgctccctctgcctgactacttgagctgggacatcagtcttctcctgccctcaaattggggcttacaccatcaagtgcccctggttctcaggccattcgactcagcctggaactgtaccaccagctttcccgggtctccggcttgcagatggcagactatgggacttctcatcttccacaatccatgagccaattcctcataataaattccctataataaaggtcttataatgtatgtatttatacactattggctttgtttctgaaggttccaaatacattgttcaagtcagtaatttcagaggtgggcggagggctaattacccagcaatagttatactgtaatatttctagtcagaaatattttcttatattattataattcttagtcttttttctgtgcctttaaaaatatttctcttactaaagtgagtcactaacttcttagatcaaaaggaaatgataatttctctgattctgagatttactttaaaaaatataaaaaacaggtcagcctcacttctaaatatttgcattatatgaacataatgaatatactgagtccagccataggtaacacagggacattcacaagtcccaggtggaggacagtatgaactgaagctttctgacaacgtggctgcttagaccttttactattccttcctagttaaaagtcagagaaatcaggtaaccattgaagtcttaaagatgcagacaacagctgggcacagtggctcacgcctgtaatcccagcactttgggagactaaggtggaaggattacttgagtccaggatttcaagagcagacccagggcaacaaagccagactgtctcaaaaaaaaaaaaaaaaaaagacatagaaaacatgtgaagctcttggtgatgctaatgatgaatacgatgcactacacagctctggttttgaggaagaggaagtgtttggttcttctcggcattggctctcaaccatgtaaatagtttggccaatattacagaccctggagccaaatcagtttcatgtggtcatcaatcatgacatttcttctgaaacatgaggtaaagcatgtgatgcaagaaatccactttccgggaaatgacggagaccttaagaggagcagctcaaggaggttcttgcaggccaaaccacagcccgtggccacagaactgaccagaccacatggaggccaatcaaatacctgtgtgtgggtccagcatgaacaatgctggtcttaaagtggatcatgatctcctcattactgagatcttcattttgaccactcttttgagtagcagatctttgagatgtgttaatgaaaggacgggaaggtctatggtaccaggccttgcaaatctgaaagtatatgctgttgccttgaaagacaacagacttagttgggcatgaggttgttcccaacatttccccctgaaaactctactacgtgtggtttcattgtcttctgatcttgggtgttgcaaaaaataaaaaaattaaaaaattttaaaaaaaagcctatggccagagagatttttgttcctgcataggaaacttacttttttctatctgaatgctcatatggtctatttcttatatctttgtaatgtgaaaatgttgtcattcttttttcttggaatgcagtggattctttttttttttttttttttttttttgagatggagcctcgctctgttacccaggctggagtgcagtggtgcaatctcggctcactgcaacctccacctcctgggttcgagcaattctctcctgcctcagcctctcatgcagctgggattacaggcacacgccaccacacctagctaatttttgtatttttagtagagacagggtttctccacgttggccaggctggtctcaaactcctgacctcaagcaatctgcctgcctcagcctcccaaagtgttaggattacaggcatgagcccctgcgcccagccctgtggtggattcttttgatcttcatcttcaagttcttttcagcacaagaaacacttgtttaattaggtctttggttgttgcttctattttcccataggaatacctaagattcttgcgttgactcattcttccctcccctagatagctctcatctcccacactcggccaatatttttaatccttttctctgcattctggcaacatacgttaggtggttcttcacatccctcatttgacattcaacagcattctctctatgtggatgtgaatgctattattcatctttaattgctttttaatcacttatctcttgatattccctgcctcatactctgattcagacacattgaacttctctcaattcctcaacattctagggttttgtttttgtatttgcttttggaggcagggtctccctctgttacccaggctggagtgcagcgacataatcacagcacactgcagcctctacctcccaggttcaatcgatcctctggcctcagcctcccaagcagctgggactacagctgcgtgtcaccacactcagcaaatttttgtatttttttgtaaagatggggtttcaccatgttgcccagtctggtctcaaacttctgggctcaagcaattctcctgccttggcctcccaaagtgctgggattacaggcatgagccactgggcctggacaacatcttgggttttttctcacctctagggcttcacacacggcattctttggtcataaacactctccaccaccatgtcatttcatttggcaaactcctacatcttcatatgctctgagctccagctttcatgtaggaagcttgccacgaccgccaaggatggctcggagtcctcgtgcttctattgtgccctgccaaccctattatcacacatttcacactgaattggaaatgccagttcccttgtctggtacctcactagattctgagaggacaagaatcatggcaattttattcatcattatatcctcagccccgagcgccattgctggcatgtggtaagcattaaaaaatatttttgcctataatatcagtctttttcaatcacatccgtctttttgcatcttaagaattctctgcatggctttattcaaaggtggtaccaaacagcatctttagggataccaatgagtttcatttttagagctctgtcttcctctgattattcaaatgtgtgttcccttcctcctacttgacagcattttttcgcagattttatgtttctcctcacctcctcctccaatgaatagaacagatccagacctggtgcccaccaacagacacacatcatattgtcctcggcctcactttctatctacctgggtgcctgtcaatctcctcttcaagctaaaaaacagactgcaatgtccagctcccagctccctcccatttccagctactgtgctcctctagacagaaatgggacatgccctgtcctactgccatgggtatttagttagaattggaagaaattccaacttcagtcaatgccactttaaaccaggagtccccagccctgtcattttaaatgaatcccaggaacaatgacagaattttgataattttggcaggtgttcttagaacacactttagaagtcttatttatgtcctatatattagagtttcatcttaaaccagccttgtataaaaaattttgtaatcctgttaatgtctttgttttctgcctctataattaagaacttacctttgacgtttggagcactgaccctgtttctctggagtcttttcctcctgaatgggccactcccagctttttcttgaataaactttttttttttttttttttttgagacagagtctcgctctgtcgcccaggctggagtgcaatggcgagatctgagctcactgcaagctctgcctcccgggtgcacgccattctcctgcctcagcctcctgagtagctaggactacaggcacccgccaccatgcctggctaatttttaaactatttaaaactggaaaaaaaattaaaatagaaaaattagctgggcatagtggcaactacctgtagtatcagctattctggaggctgaggccagtggatggcttgatcccaggaggttaagactgcagtgagtcatgattttgcatcactacactccagcctgggtgacagagtgagaccctgtcaggaagggaagggaagaagaagggaagggaagggaaaaagaaagagagagaaaagaaagaaagaaaagaaagaaagagagagcgagagggagggaaggaaggaaggaaggagggaaggaaggaaggaaggaaggagggaaggaaggaaggaaggaaggaaggaaggaaggaaggaaggcaggcaggcaggcaggcaggcaggcgggcgggcggacgggcaggcaggcaaagacatgcagactcaaggatattaaactgtttcagagcatgtgagttttatttttcaaaactggaaggtcagcattaactgacaatggcactcataaattcaaaattcttattctcttcatcaaaatcaaggtaattctacgtctacttctccagccccagcttctcaccttctcaagctataggatgttgtcatgcaggtgccctacaatcacaatatcaaaatgttcccccacaaggtaggggaggtaagtttgggccaaagagaataaaggcaccagacagaagcaaaggggaatgaagggtacacatgctgccgtcattccaatctctgattccagcaatgcctaaagcccacccacaatgctgccatccctgaaggcacaggaaccaccccataaacttcaaaacatgcccttctgccaagcaaattcaaattggatttctcccttatgcaaccgggggttctcactaatacaactgctttacataatacctatattgctgtaaagttcggtataaataatttttataaaattttttaaatcttatatttacatagcacttcataattttctaaattgttacacacattatctcttttggtatgcaaaaataattgcttgagatggccagaacagcatttactatctatcgttttaaaataacaacaacaaaataagacaaagaataatttaaattttgcatgaggtcacatagctagtgagaacaaaacaggagatgaactcgaagcttctgactccaaatccaatactctacacccagaactctggtcttctgattgctagcccagtgctccacgcaccacttgacggccatgcacatttgttaaacatactagagactgtcttttgaaaggaaacctctccaccatgtaagtaactgccttctagttagctactttgtttcgcttttgtttttgtttttgttttgagactgggtctctttctgtctgtcacccaggctggagtgcaatggcgcaatcttagctcactgcaacctctgcctcctgggttcaaggaattctaccgcctcagcctcccgaatagctgggattacaggtgcctgccaccatgtctgtctaatttttgtacttttgtagagatggtgtttcaccatgttggccaggctggtcttgaactcctgacctcaggtgatctgcctgcctcagcctcccaaagtgctaggattacaggcataagtcaccgcgccgggccaagttggcctactttgtaaatatgatttttaaaaataatatttccctaatacaaggtatacctgggctgcaattatttcgcttactagaagctaatgaagaattagtgacaccttgtggcaaaagcttattaattcatgttctactgctacccatttgcagagatgtccaaaggcttcgtgcacttcactaagaagacaagagcaaaacttttggaaagaataacctagggttgcaactctgcctctgtaactagattctctcttcaatcactctacatgggcttcagtcccctcctcttcacagaatctgtgtgactgtcaagtttacagatgacttccaggttggcaaactcaatgattacttctcaagtctcacctttctcaacctctcagtggtatctgaccaggttgaacacactgttcctaaaacccttggatttggcaaaatcagtttcccttctcctttaaaatgttttaaagccatctaagtgctcatgagtaccaaatttatatctctagttccactgaacttcagattcgcatctctaacctgccaatgtgacgtatgtatttggatgtccaatagcatctgtccaaaacaaaactcttggtctcctactctttccaacaattgactgcatcgcataaataacatgatcatcctgtcagtttagtaaagccaaaatcttagcagtcattctgtagtcctccactacttactattagtaagtggcagtgaggagtagaggaataaagggacttagttcgttctctgaaagctcccaaatgtacctcttctctccattttccctactatcaccctaattcaagccagagcctctcattaacctactcagcaccttcctaactagcaacttaatcttcacctcttacaatccattcttcacatagcaatcagtgatctttttaaaatataactcagatgatatcctttcttaaaacccttgaatggctccccataatcccaactcctcctccattctacaaagccctccaatttgcccccagcttcctcaaaatgctctaaaagctcacgtctaaccactcttccccgtcattccatgttctagccacactggccttccttttgctccttaaacatacaagcttgttccttccttaggaacagtgcactagccaccgccctctgtctgggcggctcccccagaacttcatgtggttcgctgcttcttatgtcacaaggtctctagttagatgttaccttctcaggccttttctgctacttaactgaaggcagctactcatgccccccaacaccaccacaaagtttttgttttgttttcaccaaagcttttatcatttcatgaaattttctttttttcttttttgatttatttgcctattatctacttccctacagtaggacaaaagcttcatctatccgaagctcttataatactgctcagtacagggaaggtgcttagtgtctgtcaaataatgaactatattaagttctcccttgcattctcttactgatgtggtttggatctgtgtccccacccaaatctcatgccaaagtataattcccaatgttggatgtgggcctggtgggaggtgattggatcatggaggtgtttttcatgaatggtttactgccatctacttgatactgtcctcaggatagtgaatgagttcttgcgagatctgggtttttaattttgttttgttttgttttctttgaagcagagcctcactctgtcgcccaggctggagtgcagtggtatgatctcggttcactgcaacctctgcctcccaggttcaagtgattctcctgcttcagcctcccaaatacctgggattacaggcacacaccaccatgcccggctaatttttgtatttttagtagagacagggtttcaccatgttggccaggctggtttcgaactcctgacctcaggggatcttcccgcctcggcctcccaaagtgctgggattacaggtgtgagccactgcgcccggccaagatctgattgttcaaaggcatggagcacctccccttctccctcttgctcctgctcctgccatgtaagacacctcacttctcctttgccttccactatgactgggagcttcctgaggcctctccagaaacagatgccgccacacttgctgtacagcccgcagaaccataagccaattaaacagcttttctttataaattactcagcctctggtatttctttatagcaatgtgataacagactaatacatttacctacacttaaaaacatttctgaaaccatagcctttcactcactttttgcacacttaaatggaaaatatgctgctgcttcttttcttggataaattgtatacccctgctattcactcattcaaaaaactattataaccaaacattaagtaatatggtaggactacaaatacaaatggaacatgatccctaccctcaaggaagtcatggcctagtggaagcaaacatgttagcaaatcattataaaagccatgtggcaagtaaaagatggcgttgtggctgcaaactatatgaacccaagttagaggcatcagaaatggcctcctggccgggtgctgtggctcacgcctgtaatcccagcactttgggaggccgaggcgggtggatcacctgaggtcgggagttcaagatcagcctgaccaacatggagaaatcctgtctctactaaaaatataaaattagccaggtgtggtggtgcatgcccgtaatcccagctacttgggaggctgagacaggagaatcgcttgaacctgggaggcagaggttgcagtgagccgagatagcaccattgcactccagcctgggcaacaagaagtgaaactctgtctcaaaaaaaaaaagaaatgccttcctggagaaagcaacaggagctgaggtttaaaagaggagtagaaaaaaaatccaggaaaagagacaaggaaaaatcataaagcacaaacacagcgtggaaacatgatagttcatgcagtgggactgcaagcgctcagctctgctgagaaaaaaagtacaagacagaaatcagtgagatgtgaaattcgaaaaatacgcagtaaccgggtagtggcaggcttatagcatagtttaagaaacttgaactcattaggcagtgggttatggagcaagcatgatcaaggatcacattctgttcgattattgtttggttccatagacgatttaatttagactacatgaggtcagaatgatgaggtcaaaggctggtaggaataggaaggatacaaaaaagaggatccagaagcaagaaacactgaggaagtaaaatggacaggacttagtgattattgggatatggagaatgaggggagggggaacaagcaaaaggggcaagaaatgggggatctgggagtgggaggacaatgaacatcataagctgatgctttcttgcttaagttctagagtccagcagtcaagggcttaagtcttggtcctgtcacttgcttgctatatgactttggtaagtcattttaacttctctaaatttcagttccttgcaaattaaatgggaataatatcagaatctacctcattgttagactgggattgttataataactaaatgaaatcaggtatgtaaactgcttagcttactgcctgccatacatcagaaacatctattgattaaagaattttaaaatgattatctgactatgtctgtggtcatagatctaccttttctcttcttactatagacgaattgtccatgtttctaggcaaggccaatccctcaacttatgcacaaaagcctattcctttttgccaacatcattccaccaattcttccctccgtcccacaccatccattccaccctctctcctgaatcacttctagaagcacatacacatacggtcaattctaccattaaaaaatattgaaccttttcttgactcaatttccctttaactaccagcccatttgttttttctttccttgagtcataaatcgctcttctgtcactctcttcaggatccattataactgaactttctcttctacaacttcatgaaagttgccttttttcagatcaccagagacctctatgctgctagatccaatgttcttatcttgcttagcacatgtatagcattagatacagctgattactttctccttgaaacactttcattacttaactcccaggtgaccaggctttccgcattttctaccattttgttggccctcttttgcagtctcctttgctgattattcctcatctttccaaactctaaatattggaacactcaaggccttatctctctacactcccttggtaatcttatcaagtctcatggctgttgattcaaaaatccacttctgtagcccagaccaatctcctgaaactctagactcccatgtccaactgtctactcaacatctccacttggatgactaacatgccttccaagcttgatgtgccccagaccaagctgctaatgctcactccaataatggatcctccccagcgttccctctatcactaaatggcaactccattcttccagatactctagtcaacaactttatcatggcctctagctgtaattgaatagtttaaattaaaccagtcctctcatgggaataagcacaagagctgaacatttaaaaaagcacacataacaaaaactacacaggctgtttgaagacactggagagcaaccaagatggtcaagacatgagagactgggatcccagaagacagatgcataaagtgatacagaacttctccattgctttttctgattgggtcatttgctgagttttgtgcagggcatttatggcgagcagaaagcagtgacctggaggtatcagggccctttcagatacggggagataaaaaattggagttgaaaactgcggataggacttgaagggacagatcccaaagaaaggaggatcatagagaagccagtctgacatttagtttggcttttatccttgaggcatttgctgaattctaagctgtaagggcactggaaatcaagaaaccaaacagttgctaaatagctaaaatgctaagtgtacatttcaacagtctcacagagctgggagtacaaaaattggagttcaaggtcacccaaagatggggacctgttaaataccacagatgttcatgttgagaaagaatagaaaggcctagctctgggataaggccaaactagaaaatgatcagccctcacaaagtctgaatccctaattaaaggtcatctgaggccaggcgcaggggctcacacctgtaatcccagtactttaggaggccaatgcaggtggatcacttgaggtcaggagttcgagaccagcctgatcaacatggtgaaacccagtctctactaaaaaaatacaaaattggccgggcatggtggtgcacacctgtaatcccagctacctgggaggtgagacaggagaattgcttgaacccgggaggtggaggccacagtgagccaagacagtgccattgtactccagcctgggcaacaagagcaaaactccgcctcaaaaaaaaaaaaaaaaaaagtcatccgttcctactctaattgcttgccagaataaaattaaatcctttctggagaaacacaacatcagccacagtctctatgcaatttatttatttattttttatttatttatttagtttttttttttttgccagagcctctatgtgatttttttcctacacaatgtctaacatttaatcagaaaccttaggttcatctcttttgcctttctttctctcgtgcaccacgtcacgtccaatctgttctaccttcaaaattgagctgggatcttcccaccacttttgtcccagatccagaaccaagctccactgaaagcaaggcagtctgtcccccgacatggcctcggcactgactcactgcatctctcgggcccgagcaccacacctacaccagatccaagccaccctctcaccagccttattgggagcagcttcctatctggtctctctgcttctgcctttgccccacttcagtctattctcaaccaaacaactagaaaaaacaaatttttttaatcaaactatgtcaagcttctactcaaaaccctttagggacttttaaccctagagtaaaacctaaagtcctttcactgacctacaacagggcgcacggcccagcctctgacttcatctccgaatgctcctccttgtgctcactctgctccactcactcttactgccatccccaacacgacttcctgccttagaacgaggaattggctgcttccttgacctggaatgctgtgacaattagtcacaagtctcaagtttcatttcttcacctccttcaagtctttactcaaatgtcaccttctcaatgaagccttctctgaccactataaaattgataggtctcccatgcccctagcacctagccttatttcctgctttatttcgaattagctattataattatgtaacacccataatgtactcacttttcttgtttgtatgactcctccactagaatataaattctgtcaaggcaggacttttaatctgttgtttgtttttgtttttcactgctatatccccactaacaccaggggagtggggacgagggacaagaaaacaacaatgcttggcacatactagatacacataactatttgtggaatgaatctttcagtttcagatcatccaagagttgtccacaaaatagtcagatatccaggactgtcacctgagggagaagtctaggttagagatacatcctttgctaccctgagtatataggtggtactagaaattacagacgtgaaatgggactgccctgggagaaagtacaagaagagaaacaggctgtggataaaaacttgtacaggccaggcacagtggctcacgcctgtaatcccaacactttgggaggctgaggagggcggatcaccaggtcaagagaacaagaccatcctggccaacatggtgaaaccccgcctctactaaaaatacagaaattagctggacggggtggcacacgcctgtagtcccagctactcaggaggctgaggcaggagaaccacttgaaccggggaggcggaggttgcagtgagccaagatcgcgccactgcactccagcctggccacagagcgagactccatctaaaaaaaaaaaaaaagaaagaaacttgtacaagaacctatagtggctatcaatttctttataaagcccactgtggctggtatagcactattgtttacccacttaatacccactcaattctgccccaacatcctcctaacagaatttgttctcctcctccctggccaagtgtttcttggaggcctagaaagaccggttacctggtctaatccaaatatggtggtcttatatagatcctaagcttaaatcaatatgatgtaattctggtcagttgggagtttacgagggggttttgctcttccaataaagacaaaagagcagatacttctattactactttgttgaagccaacaacccaggtgacagagtggaaaggtaggggaaaaaacgtgttgttgataatgtgctgagcccccaagttaccctccaggttaaccaacctggggagtgtaaaataatgaattccttattatttcagccacttggaattggttttttgttacttgagggaaaaaatattctaattaatatgctagtgtttactgtttccacgatgtggtgtcagcctgtctatatatatttctacaactcatctacacaaaccttgcttacagttttccaaatgcaccttgggcttcttgagcctttgatcaagccattccgaatgcacttcccccaagaggctggccagttaaaatactatcatttatcaaacacaacttaaatgtcactttctcctctagccctttcagaaattacctcaaaattaaatgatcagacctaaaatatgttgggagtgttttcacctctagaatttaccatacacctttatgctagtgttacttatagaatgcctacatctgctttaggtcatacacttcaaagcacagaacggtccagatcttaatataaaggcttgccatttaccaggcacagctctaagtattaacggttttaatcctcaagacaaaacctaaagagataaattcttctattgccactttgtggattaggaaaatgaagcacaaaaacatttaacttgcctgaggtttcggagctagtacattctagaacctggattcaaatcaagacagcaattagctgaatgaaggtgtaactgcaaatgcaaataactgatcacaagggatacacattcactcatacaagatagaagatttttaacgttgctggtactaaaaccaaagcgtctgcgtttttaagcgcagccccaccccgcaatactagagacattctttagagctggaagcctgatagattaaggggaactatgcctttgtattttttaagactcaataaattgctcacttctttcccaaaatgaggtgtctgtgggggaggcccctgtcgctccgtgtgccaagggtcctccgattgctagcacacagcggtgagcagagaaggtaggtgaggaactgcactgactcagctgcagagggcggcggcagcccgcccctggggcgggagaagggcaggagccgggagacaccaggaagctcttccccgcccgggcacgtaacagagctgggagcctggctgccaggggcgtgttatcgcgggggcagcctgggagcgctgctgcgccgcggcaggagaaacagccgaggacaccctggaagagcaggagcacgtgggcctgcgagaatggcgccaacaccagccctgcaaagccacattccaaagccgggccaaggacagccaccgttgccccgcaggcctcaaggatgacggtcaagccagccaaggccgcctccctagccaggaacctcgcaaagcgcaggcgcacctacctgggtggcgcggctgggcggagtcaagagccggaagtcccttgtgccgcagtccttcccgggaaacctggggaccggaactgcccggagttcccgcccccagacagaaccctgggttgctgggcaaccgatgcggcccccgcagctggtctctgtggtgctgggagcgagcccagtatagctcccacctcctgcgctggtaacctcccgtcccgcccgcctcccttgttgtcgcctctcctcgcgtcgcggaatccttgcccttggcactacttacatctctccgggtcccacaacaccttagcgcccacctgcttcaaagccaagctccaccgaaagcgaggcagtcagcccccggacatggcctcagcgctgactgatcgcacctctcgggccccgagcacctacacctacaccagccggccccgagcactgccctgccagcgcagccgttaccgggacagcctgacgcagccgtgagtgaccaagccagcccctgtgtggtccatacttgcaccccatccccaggccggggtctggccccttcgccctggcaaaaaagctgcttatgctgtcttcccttggctgcactctgccgaaataaaagttctgccctaaggaatctcccgtggtgtggaggagtgaagcaggaaggggcatgggttgggcatcagttaacttttagtgatatgagttgctgccgtggtccttaacatgtacacgaattggctcatttcacaaagtttgaattgtaccagtgtgtattgagggccaactacgtgctgagcaccttacggggggcattcaaatacgttttcttagttaatccacagtgctgtgaagttgattttataactccattatgcagatgaggagaccgcggtgcaaagatatccaacagtagcatatccaaaatgggagccgagtaaatctcttcggcaggctttgagcaggagtaagattattcttccatgcaggaccacagattggttttttgtggtggtggtggtggtggtggtggtggttgctgttgttgttttgagacggagtttcgctcttgtcgcccaggctggactgcaatgacgcgatctccgctcactgcaacctccgcccccctcccccactcctccccgatcaaacgattctcctgcctcagcctcccaagtagctgggactagaggcgccctccaccacccccggctaatctttgtatttttagtagagacagggttttgccacgttggccaggctggtctcaaactcttggcctcaagtgatccgcccgcctcggcctcccaaagtgctgggattacaagcgtgagccaccgcgcccggacggcagtttgtgtttttacatccatgaacagttgcaaatattcaaacatacataggaaagaaaaaaaacaaaacataagcctttttttttttctttttttttttttgagacggagtctcgctctgtcgcccaggctggagtgcagtggcacaatctcggctcactgcaacctccacctcccgggttcacgccattctcctgcctcagcctcccaagtagctgggactacaggcgcccgccaccacgcccggctctttttttttttttttttttttttgtatttttttagtagagacggggtttcaccatgttagccaggatactctcgatctcctgacctcatgatccgcccgcctcggcctcccaaaatgctgggattacaggcctgagccaccacacccagcaaaaaaaacataaactcttaaagttctcttaaagttaaacggttctctaaagttctttccataagcctcaaatgttgaattcagcagaactttataggaatgcaagctccatggatgcaggaacttttgcatcttttgttcacctagtacaatgcctggtacatagtaagcacttaatacgaattgtcaaactgatgattgaacatcaacaatgtaattattgatgcttatttcaaacgctctttctaaattcataattatcttgttctaacaaattctttttctataagagatgtctatcactgtaagaaaactaaaatagaaaatttaaatttgaagagtgatcatttatattagaaaaggattcaattttaaaattttctaatccttccaaaaacactttctggtgcctttaagtggttgcttacaaatcattactatccaatcagaccaacagattagaaacaagaatcaatggtggttcattaggaacaacttttttgatagttgattagtatattgaagtaatctattgattagtttattagtatatctgagtaatgcacaagacagaaaaatctcaattttgaggaagtattatcttacaaatcataatcattgatatcctaatggataaaatactgatattttatccataatttgcttatggataaggataatattctcctctgatatccttatgaataaaatattttttaagtgttcaggagagtagccgggcatggtggcatgtacctgtaatcccaggtacttgggaggctgacgcaggaggatcacttaaacccagaaggcggaggttgcagtgagccaagatcacgccactgcactccagcctgggcgacaaagcgaaactctgtctcaaaaaaaaaaaaaaaaaagtgttcaggagagtacttgtcttaatccatcttatgttgctctaacagagtatctgaaactggatagtctataaagagatctatttagctcacagctctgcagactgagaagtacaagagcatggtgctggcatctgcttgccttctagtgagggcttttcttgttgtttcataacatgatggagaaggtcaaaggggaagcagatccgtgggaagtggccaaacaggaggaagtacctcattttgtagcaacttgctgtctctggaactagtcctgtgagaacttaatccagtctcttgagagtaagagttccctcactactgcgagaactggtgccaagccattcatgagggatccacccatgttccaaacacctcccactaggccccacttcccaacactgccatattggaaattaaatttccatgtgagttttagtggagacgacaaaccatatccagaccacagcagtacttttagtacttgctggtgagtaactaaatgaccatatccaaaaagagtatgcttttgtgtcaatctgtctctatcctagaatgtcgtttagttctttcatgttcaaaattttatgttgaactggataaatcttcagtttttcagatgacacatggctggaatggataactaacttatgactgaagggagtcaaggttctaaattatcttgattgggtatatataactgggctgaaaccaaaaaatgaaacttaattggaaagctgtgaagttttacttaggtatgagaagtcagttacacaaatacagaaatgggagtatctgatttttcctttgaaagggtctagaaatttaacacaagtctaatgtgaatcaagaacttccaccttttcataggattataaagctgaaagagaacatttgaatactagtcttctcatttacaaacaagagaatgtaatacatcttttatgtatttcttggtagttgggtgatcataaatgccattaaattcacctttaggcatgtgtgaaaagacaattgtgataatgacattccctcattttacaaatcctttggtaaaggatatataacccttccaataaaataacatttttaatgcaaatgaattaaaaccttagaacataccttttttttatttttatttttactcaggtcaaataaggtttaaaatcaccgtagagggcagaataatgattccccaaagatgtcctcttcctagtccccagaacctgtgaacatgttatgtggtaaaagggactttgagatgtgattacattaaggatcttgagatgggagatcttgagatgggaaattagcctggcttatccaggtgggcccagtagaatcacagtggggccttaaaagtaaaagaagaaggatgggcacggtggctcacgcctgtaatcccggtactttgggaggctaaggtgggcggatcacgaggtcaggagatccagaccatcctggctaacacggtgaaaccccgtctctactaaaaaaatacaaaaaaaaatgagccgggcgtggtggcgggcgcctgtagtcccagctactcgggaggctgaggcaggagaatggcatgaacccaggaggcggagcttgcagtgagccaagattgcacctctgcagtccagcctgggtgacagagtgagactctgtctcaaaaaaaataaaaataaaataaagtgaaagaagaaggcacaggagtctgagtcatagaaggagatgtgtcattagaagcaaaggtcagaatcacacaaatgctgactggaaggcgaccacaagccacggaatgagggcagtctctagaggctggaaaaggcaaagaaacattctccccaggacctccaggaggagtgcagtcctgttgacacccattttggacatctaaattgcagaattctgagaataaatgcgttattttaagccaactatgtagttagtagtaccatttaatgaaataggaaacactgaagaagtaatgagttggaatgggagagtgataattagttcaattctgaggttgccttccaggtaacatagtgagatgtcattgggtaactggatatgcctagagttgagagaagagttctcagctaaaaataaaaattgagagttttgggtatatggattataattgaggtcttgaagatggatgaggtcaactaaggataagagaaggctgagcccggaggaaatcctccagtatgggaggaactgcaaacaaaggctaagaaaaaggtgttagagaagtagtagaaaaacaatcagaagattatagtggtaacacagaggcctaggaaagagaatgcttcagtgaaggagtggccagctgggcttaacactgcccagagatcaattaatacaagaaatgaaacttgttagaatgttcaatagtggcttcaatatatgaaaaaaaagcaacttataccccactcagaatcatttcccatagagtactgttattggtgtagggcaatgtttagtgtcttagctataagcaatatataattgaaataactttgaatggaaatatcaactgtgtttttgtattttttactagcaatcattcaatcactgaaattaatattttattttatttcttatttatttatttattttttgagacaaagtctttctctgtctcctaggctggagttcagtagcccaatctcagctcacagcaacctctgcctcctgggctgaaaccattatcatgcctcaggctccagagcagctgggattacaggtgcaggccaccaggcctggctaattttgtatttttagtagagacagcgtttcaccatgttggccaggctggaaaatagtattaacattttcaacaataactttaaaaaatatatttgggtttaaagaacaatgagaaaattgacttaatttttaagcctcatttttttattagtgtaacttttcaatctttgaatcaagcttttttcagtactttaaagaaggctccttttcaaatgggacattttcatatttcctaaagtcatacagatttacaacctaaatctagtcctgccacttactagcaaggtgacctttggcagattcctgagtctgtttccccttctgaaaaaggaatcataattcccaacttgcagcttattgtgaataataaataaaataatgtacatgaaggacctggcatatagtaagcattacataaattgtatccatttacctccttattttatggaccacactaaaacagaaatttattttcttaaaatatattgattttagtctaaatcctattgaaaatgagttacttcatagataccaatactctattaaagtggttatacagaattttctgttttacagagatgaagaacctatgcattatggaaacataatgtatgacagaagggtaattcgaggtaacacttatgcactccagacagggccactggtaagttcagtttgaatagtctaacaccgtgttctcacattatctatggggaaggatcagtttcttggtgttaatttctaatccgttgcagactaaaacattcataaaataaagatgaattactataaaaatgaaatttttaaaaagacatacaaatagaagcccagtgacagtttccaggagctgggggatgaggggaccagggagggagttattgtttaatgagtgtagagtttcagttttgcaaggtgaaaagagttccggagatagaggatggtgacagtgatagaacaatgtgaatgtaattaataccactgaattttatacttaaaaatggttaaggtgataaattttacattatgtgtgttttaccacaaaaaaagaattagctaaaaaaaaaaaaaaaaaaagcaagccccagttggccgggcgcggtggctcacgcctgtaatcccagcactttgggaggccaaggcgggcagctcacgaggtcaggagatcaagaccattctggccaacatggtgaaaccccgtctctactaaaagtacaaaaattagctgggtgtggtggcgctcgcctgtagtcccagctacccgggaggctgaggcaggagaattgcttgaacccaggaggcagaagttgcagtgagccgagatcgcaccactgcactccagtctggcgacagagtgagactacatctcaaaaaaaaaagccccaatttttcattcgattcaacagaactctgccattctaaacatttctaaacctttactctcaatttctgtacttaaattgttacagaccagttcaaatagtttatagacactagccagaggcccacattttgagtggcacttgtctattgcatctagatttgtttagattatctcatactctaatacaattatcattatttaatcaaaaagtctgaattctgcttctttaattcactcaacaaatatttattgagttttaggtcctgttctgggtacctaggatacagagatgagtaagacatggtatgatattaagggtggtgagttcttggcacagaaatgaaatacagatgaatccataaacagtatatgacatgtaagtgcctaatacaagatggtgatagagatgctcctccacttaggatgaggttacgtcccaataaacccactgaacactgaaaatgaatttaaaacaccaaacctgccgaacaccataacatagcatagcctaccttaaatatgctcagaggccaggcgtggtggctcacgcctgtaatcctagcagtttgggaggccaaggtgggcagatcacttgagcccaggcgcttgagaccagcctgggcaatgtgggtaaccctgtctctacaaaaaaaaaaaaaaaaaaccccacaaaaattagctgggcatggtggcacgcccctgtagtcccagctacttgggaggctgaggcagaaggattgattgagcccaggaggacaaggctgcagtgagctgtgatcacaccactgcactccagcctgggtgacagagggaaaccctgtctcaaaaaacaaaaacaaaaatacaacctagaaggttaaggaattgagggaagctcagtgtgccctgaatcggagtctgaggcagggagtatcaagaaatacgtgattaaaaagaagttaaagatgaataatagcattcaaatccacgttagagagaatgttgttgaatgtcaaatgagggatgtgaagaacccacctaaggtatgttcccagaatgagaccctgtctacaaaaaaaaaaaaaaaaaaaacagtgctcattagcctacagttgggaaaaatcatctaacacaaagcctattttataataaagtactgaatatctcatataatttatgaaatattaaagtgaaaaatagaatggttgtatgagtattcaaagtacattttctgtggatacttttgtatcatcataaagctgaaaaatcataaaccacataagttggggaacatctattagtctgaagcaatggttaacttaataaacatatatatatgtatgtatgtatatacacttcagccctatcctggatctcctgcattagaacctccaggggttccctgcttctcccactgaggtggtatcaacaagggtggagcaggaagctgaactgtcaccttcacccagtaccaatgaggtagtaggagatggcacaagtcagtgccccactctttctggggtggtgccagcaaacccagtggggtagctgaattgcagtcctatctggtagtaacaaggtggtatgaggcagtgctagtcaatgctgcactcgccctacaccaccaccagtgtcgacagagcctagaaaggagctgaactaccacccccacctggcaccaatgtgttggtacaagttgaccctctgcttttgttgaggtggtgtcagtggggcccagcaggaagttgaacttccaaccccactcaggcttgtgcactaaaacaaaaagggtgacttcctactgaaaaattaaatagaatccaaagtcttaaaatataatacccaaaatagccaggatacaaacaaaaatcattcatcatacaagaatcaggacagtcacaacttgcatgaggaaagacaatcaagaaatgacaaaaccaagatgactcagatgtgggaattacctgacaaggattttaaagcaacaatcaaaaatgtttcaatgaaaagtgagcaattatagacactcttgaaacaaataaaaaaatcttagcaaagaaatacaagatacaaaagtgaaccaaatggaaacttatagaactgaaaaatacaataactaaaataaactcactggatggactcagtagtacattggaaatggcataggaaacagtcagtaaatttgaagaagaatcaatgaagaacggaagttatccagctgaacagagagaaaatagaccaaaaaaaaaaaaaaaaggctgagagagctgaagaacaatcacaaagatttacattcatgttgttggaatcctagaaggagaggaggaaaactatgagatggaaaaatatttgaagaaatcgtgcttgaaaattccacaaatttggcaaaaggcctacagatccaagaagccaagtgaccccccaagaggataaacccaaagaaatctacccgagacaaatcaagatcaaacttttgaaaattaaaaaaaaaaacattttgaaattagccagaaagaaattacacgttagctaaaggagaacaatgatttaaatggcagtggatttcttacctaaaacatggagacaagaaagtggcacaatatttttcaagtccttaaagaactatcaagctctaattctaatccagtgaaaatatttttcaggagttccaaaatggcagcatagaagcaggctggcttcactccccctgcaaaagaaaatcaagaacaaatgtacagtgccaagattaccaccagcaatattctaaagctcaagttgaaggaagaagcagttcccagggctacagaaaagtgaaaaagcttcaaggagatggtaggagaatcagacgttcatgtctacagtatctctccttctagtctgcctggcactaagggtgtggaggattgtattagggttctctagagggacagaacaaatggaatagatatatatatatataaaggagagtttattaagtattaagtcacacaatcacgaggtcccacaataggccatctgcaggctgaggagcaaggagagccagtccaggctccaaaactgaagaacttggagttcagtgttcaagggcaggaagcatccagcacaggagaaagatgtaggctggggggctaggccagtctctctttccacatttttctgcctgcttatattctagccactctggcagttgattagattgtgcccaccccgattaagggtgggtctgcctttcccagcctactgactcagatgatagtctcttttggcaacaccctgagacacacccaggatcagtacttggtatccttcaatccaatcaagttgacactcagtattaaccatcgcaaggatttatctctgacttgtgatttctgcactggaaaaagatcaaggtggacaactagtttccctaccatgttgggtttcctggcaggaaattcaacccaccagaagcatcatgagttcctgaagagagaaatacccctgagtacagccaaaaacaaaatggggaggtgagactaccatctccagccctggacactctgctgtataactcaaccaaaggaaacaccaaatcagagtggctgttcagcagcaccacattgtaggagataacattgtaccggtcccctgggcacaaacccctagccagtcacactaccagtgtatcccctttgggacctcccccattcaggatgggcagtgctctgatcatttactagagccaggtgaacctggccttaaggcaccacctagagccaaaaaggaggcagcaatctagtgataaaggatctctgtcggggcgcagtgtctcatgcctgtaatcccagcactttgggaggccaaggcaggcagatcgcttgaggtcattagttcgagaccagcctgaccaatatgatgaaaccccacgtctactaaaaatacaaaaattagccaggcatggtggcgggcacctgtaatcccagctacttgagaggctgagtcaggagaatcgcttgaacccaggaggcagaggttgcagtgagccaagatcacaccactgcactccagccagggtgacagagcgagactctgtctcaaaaaagataaaaaaaaactc

SEQ ID NO: 9680 - DNA, 592 bp, Homo sapiens
tttcggtcatctgaaattgacctctttttattaacttctttgttgccaatacatcacattttcctggtccttcatattttgagtagttttggacatggtggatgtttcataagtcaagactctaaattctgttgtattcattccaaggctgttgatactttgttttaacaagcaattgacttggttacactgaaggctgtaaactccatgtctctcatggtgagtggccattcaaatctcaattcagtactccaaaccttagctgcaagtggctttgaatctggtttgtgtgcatgtggttcacgggtcagctagagacttgggcagagttcagatacagcatttgggtgcccccttctctggctctgtcctctctgggatttctccctcactctcgtggccatgattgccccaggctccagcccctggttccctagaccagaaacatggcagtctttctatgggagttttagccacccccagacactttgtgaccagggcccatcttttggacaaggctgaaaaacaggaaactcacactctcctccaagattcaactcccctctgcctgcatttgctcacttcccaggtc

SEQ ID NO: 9681 - DNA, 1767 bp, Homo sapiens
aaaataattgagaggttagggcattgtcgctgtgagaaagcttagaggtaacacattatatgttatctggagagaagaatgttaaatggaaacaaagtttatgaagaatttcttcaagtacctgaaggactttctgggaaattacaagatagcattcttaggttccatatgtctagaagacttttcataactgtaagcaacttttgcaaatggtttgggaacataaaactcttccagcatagaagaaaatgggtactattaacattcagatggttatgggaccatcataacagtttgatgtgatatgcaaaatgctacatccccaactatgaccctcagtatgacttttaaaggaattataagctccaaatactttttggagtataaacagtacttgactttttcacacatttgctaatacccttctcataagttttatttctttctgatgtttcagctaacactgagttaacagaagctaaataataataaaatgaagaacagatagtaaatatattgaaattgtcattcctggccgggtgtggtggcttacgcctataatcccagcactttgggaggccaaggcaggcagatcacgaggtcaggagatcgaggccatcctggccaacatggtgaaaccctgtctccactaaaaatacaaaaattagctgggtatggtgacgcatgcctataatcccagctactcgggagactgaggcataagaatcacttgaacccaggaggtcgcgccgctgcactccagcccggtgacagagcaagactccgtctcaaaaaaaaaaaaaagaaagaaaaagaaattgtcattcttaacataaattcccatatcactaaaatagatcagagaggtagaatgaaattttctctagcataggcatcattacatttaagccatctgagggctatgagcgtggcctgcaaagtcactctgagcaacacaaggtggagtttgaaagcagattcaaagccagaccactgggcttgagtcctcacatgcaagcatgtagtcttcaccatggagaagggggtttgcctttctcaaagcttttttcttttaaattaagaaaaagaactgatttatcagtctagtgtttcattttaaaaacatatgaaagggtgggtaacttgcagaagaaagtatttggagcctataattccattaaaagttataatggcggtcatagttggggaagcagcattttgcatattatatcaaaatgttatggtaccataaccatccaaatgttaatggtaccaatttcttctatcctagaaacatttcattttatgttgttgaaacataacaactatatcagctagattttttttctatgctttacctgctatggaaaatttgacacattctgctttactcttttgtttataggtgaatcacagaatgtatttttatgtattctgtagttcaatagccatggctgtttacttcatttaatttatttagcataaagacattatgaaaaggcctaaacatgagcttcacttccccactaactaattagcatctgttatttcttaaccgtaatgcctaggcctaacctcaaccaaccttccacaatcttgttcacagtcagagacccaaaaaagagtgttataagtggggtgtcactattgtgaaagtagtgctaatggtgttgaattggtacctatgattcttcttttgaattagattgtatgtttcatgatctcaacttacattactaaaattcaataaactgatcatttagatga

SEQ ID NO: 9682 - DNA, 127 bp, Homo sapiens
aggaaaaataattaatgagtactaggcttaatatctgggtgacaaagtaatctgaacaacaaacccacataacacgagtttagctatataacaaacctgcacatgtactcctgaactgaaaataaaa

SEQ ID NO: 9683 - DNA, 497 bp, Homo sapiens
cagcaccagtctccagaacaatatgcaattgagcctgttttcattttgagtgttaggaattgattagatgtagccctaacattttaaaaaattgtcagagcatttttttaaatggaaagaagcctgggtagcaagaaatttggtgctgccacatttggcttgctactctctcttttcaggacacccatattgcacaaccccagggggcactattcacatcgtattctatgtgaagggtacctccaggagcattaaaggaaaacatattggcatagaaaggtgagaaaatatgaagagaatatgtgtgtgagtttccatgtctgcctctctctcctctcctgagtgggaggcttgattgaatgctattgatgatggctttcaaggagaaaagggctccaaaaaaatacaagaagatccaagcaacaccttttagaaagggaggatcgcaatcagagtgttccttgtctatcttacacccttctgcttccttagaatgc

SEQ ID NO: 9684 - DNA, 480 bp, Homo sapiens
agtggagcaagagtgacaactggctagcatctggtagtgataagtgccttgatgaaaatgtaatgaggatatgattggagatgactagaaagcaatccaaggggtttggccagaaaatgcctcttgaaaggaggtgacttggcatctgggagctgaatgacaggaaggaaccatctgggtgagggtctgggcacattattccaggtgctagaaacagctcacacaaaggccttcagatgggaacaaacatggacattcaaggaacgaaaagtgaatgaggggaagcgtgaaacaacctcagctcagagaggtcggtgggagcagaaacatgtagtccgcagtctgggtgggacggggaccgcggatgactttgagcaggagagtgaagtggtggagtcttatgtttcaggcttagtctggcagcttgttggagaaagggctgtaagagtgtggaaggaggctgggcatggtggctcacac

SEQ ID NO: 9685 - DNA, 31813 bp, Homo sapiens
gttttagcatctggtatcctcaccctttctttaatacagacagtccccaacttatgatggttcaactttacagtgatgtaaaagccatacacggctgggcgcatggctcacgcctgtaatctcagcactttgggaggccgaggtgggaggatcacgaggtcaggagattgagaccatcctggctaacacagtgaaaccctgtctctactaaaaatacaaaaaattagctgggcgtggtggtgggcgcctgtagtcccagctacttgggaggctgaggcaggagaatggcatgaacccgggaggcggagcttgcagtgagccgagtgcatgccactgcattccagcctgggcgacagagcgagactccgtctcaaaaaaaaaaaaaaaaaaaaaagcgatacacattcaacagaagccccatcctttagtactcatacaaccattcttttttttttttttttgagatggcgtctcactcttgcccaggctgcagtgcagtggtgtgatctcggctcacagcaacctctgcctcccgggttaaagtgattctcctgcctcagcctcctgagtagctgggattataggcgactgccaccaggcctggctaatttttgaatttttagtagagataggatttcacaatgttggccaggctggtttctaactcctgaccaggtgacctgcccacctcggcctcccaaagtgctggaattacaggcatgagccaccgtgccccggttctcatacgaccattctgttttttcactttcagtacagtattcaattacatgagatattcaaaattgtaacataagctctgtgttagatgatgttgcccgtaggctcatggaaatgttctggcacatttgcagtaggctatgctaagtaagttatggtgttcggcaggttacatatattacatgcgtttttgacttgtgacgttttcaacatatgatgggtttgtccttataagttgaggaacatttgtagccatttcatcgtctgtgaagaggcctgagtggattttgtgctggagaccggtgtgactcagctccagtgttgactgaccttctaaccatgggcttgtgactgaatgtcctgagccttcattttcttccctgtgaggattaaaatgaacctcaggaaatgctggcttgtcctctttctgtcaagctgggttctgagggggtgagcccaggtaggagtgacttctgaaccagcccagatttacaggcttgggcatagggagcccagcctcagcctgggagcctcatcttccattaaatagctcctggcattcaggggagtgcgttgcagcaccccatttttttttcattgaagtcctgtcttccagccaggcacagtgaatcacttgaggccacgagtttgagaccagcctagccatcatggggaaaccccatctatactaaaaatacaaaaattatctgggcacggtggcgcacacctgtagtcccagcacaccagagttcaagaccagcctgggcaacatggcgaaaccccgtctctacaaaaaatacaaaaattatccaggcgtggtggtacatgcctgtagttcctactccttggggggctgaggtaggagaatcactcaagccgaggaggttgaggctgcagtgagccatatttgtaccactgtactccagcctgggtgacagagtaaggccctgtctgtaaaaaaaaaaaaaaaaaaaaaaaaaagtgctttcttcttcttcttctttttttttttttttttttttttttttttttgagacggagtctcgctttgttgcccaggctggagtgcagtggcgtgatctcggctcactgcaagctccgcctcccaggttcgcgccgttctcctgcctcagcctcccgagtagctgggactacaggcgcccgccaccactcctggctaattttttgtatttttggtagagacagggtttcacggtgttagccaggatggtctcgatctcctgaccttgtgatccgcccgtctcagcctcccaaagtgctgggattacagtcatgagccacgatgcccgacctctttcttatataatttttttttttaatcgggcagccctcagaatcacagcagattcagaaagactccccagaaaagttctttcactcctaacttctacccagcctcatggtcacctcagcagctctcctgagaccgttactaagttctccacagctaatggtaactcagcttggaaagagttctcttgtaggaggatgctgaagggaggttgccaagtggtgtgggaaactgcttcatgcttaagttcacttccatatcatgatactaaaaggtatctaacagctgattttcattgctttcatttgtgatctgctaggaccacttgatccttatcactgcttttggcacactcctcatccaagagttgatcgcagaggcagagttccttgccaccagtccagtggaagtacaagccaactttgctctccaaatggcagcagtagctgagcaggccgccctgcattctctcctcataaacatgctgttctcaagtttgtcagaatccagagctctctactcattacccccttttccaaacaagcaagcaaagcatgctcttcctttgtttcccttaattgcctaaaacatctccatgctcatagctgttgactctctttgcctcctagttcctgttcctctggtgtaggatttctcagccctagcactgtaaacatgttgggctggataatcatctcttgtatgggctgtttgtgcattgtaggatgttgagcagcatccctggcttctacacactaagtgccagtgacactcttctcccctccccagctgtaaaacccaaatgtctgcggacattgccaaatgtctcctagggggcaaaatcacccctggttgagagtcactgctctatcatttattcactaaatactgctggtcagctgggtccactggcgaacctcacatcaataaacctggtaatagaagcatattgttcttacattagaagtttactctcttcagttatctcactgggcccttgagggctttggggaggagtgatgggaaatggtttacaattaacagcatattccaatgaagaaagaaagcatatgatgtctgcacaacagaggagagtgtccacaatgtacagctcttccctggagcagttatgtttctcagggtgtgcttttccaagtcattttgtgtctggttagaagccaccttcccttagcatccagaggtgccatgtagactagggttggtcacagtgtgtagattgccattgacctgcccattcctagtgtttgacctggtggtcatggcactctgaccacatcagttttcctctccaagcccagatgggttctcagaaccctccaccccaagctgcactcatgagaggcggcacttctgccatcctgatctagagcttgttcatgtggtccagaccatttctttgcagccccctctcctgtgtaaaagcctttaggaaagtgcagagatcctgatggattccccttgaccctcagcacgcacatcctggtatgtagtgctcagcactccgttgggggcttcagactggagaagagaaaactgcccttccctttcaaggacatcctccaagggccagaatgctcagttccgtaaaattaactctccactgcctacttttttttttttttttttaagacagtctcactctgtgccccaggctggagcgcagtggtgtgatcttggctcactgcaacctccgcctcccgggttcaagcaattctcctacctcagccttccaagtagctgggattacaggcatgcgccacctcacccagctaatttttgtatttttagtagagacgggatttcactatcttggccaggctggtctcaaactcctgacctctagtgatccacttgcctcggcctcccaaagtgctagtattacagtcatgagccaccatgcctggcctgctgcctatttaaatagcaagcagttacagttaaagaaagaccctggcctggggacgctgccaaggctcctaatctgacacttctttcatgtggaccagggatctgaactgtgtttcttccaaacttttggagcttgcttccttggtggtaagctaaatagtggcccccaaaatatacccctttataacccctgtaacctgtgaatattatatgacataatggactttgcacatgtaattaaattaaggatcttgagatgaggggattatcctagattatctgggtggacccctaaatgcaatcccaagtgtccttatgagtgggggccagagagagagattggacacaggagaaggaggcaatgtgactactgcagcaagatgctacactgctggctttggaggtggaagagaaggccaaaaatgcaacgaacgtagctttggaagctggaaaaggcaaggaaactgttttcccttagaacctctggaggaagtgtggccctgccaacacactgattttagcccagtgaaactaattttgaatttctgacctctagaactgtaagagaataaatgtgttttgttttaagtcgctaagtttgtggtaatgtggtaatttgttacagtgcagtaggaaactaatacagggctcatctgcctccaggtacaagtggtggcttggctgatccctgttcttattttaaggcgtccctctcatggcacaaggagagcataggcccagcattttcctgaaccagtatttgaaacaatctgcactttgggggaacctgttggggagttcttggaagcaagagagaaagcctcatatggtacccgatccttgctttggaactctcccagcaccttcagtgatatcatgaacaaagagttctttcagaccagtgaggatgtaggattattaaaatctgattctaattccatcttcccctctcctcttccatttattcaataaatgtttattgtgtacctcctatgtgctaggcactggggatgaagggataaacaaagcagataaaaaatctcctgctctcgtggtaactgaggtgggggaagtggagggagccagagttaagtcaacagcatgtgagatggcttcagatgctctctagaaaactaagcagaaaggagggtagtggcagttccacatagagggccggggaaggtctcaccacgaaggtgacatttaagtggaaagaggagagtgaactattgtgggaagaatctcgcaggcagagggaaagcaagttccaaggccctgcactgggacacagctgaggtgttcaacgcatagcgaggaggccagcgtggctggacagagggagggaggagaccaggagatgaagttagagacgagattggtggccctgaagtgccataacagcttttactttgcttggcattttgccccttctttctcctctcctccccctcacaccacctcacgagttttaggcccatgttcctcagttcctttccatgggatatttatcccatcatacttagggactaccagcaggcaaacatagtcacttaaaaatattagaagagggggaaaaagcagcctcctctttctgaatgatgaaagcagttccatggcagtgttggcatggcactgtgtatctagcagtgcaggctggccattcaccgcgtagttctgggtggtttctgagaggttcccctccatggccttcttcagcccatgaggaagtccaacccccctggcccgctgtttctttccatttcacccctcttggtctccccagtgggactcccacagctgacttctatccccacctgtgtctaatcccctttccatggctgagccggtagataacctagtaacgatctgagtagaatatggctcccacatgttgaatgcattgtgctgatcactacatatatcactttgattcacacaacaaccctgagaggtaggaaccattgtaccccttttagagatgaggatactgaggctcagactggttaggaaaattgcctaaagttgcacagctaatgaatggcagagctgggatttgaacccaagtgattaaagcccatgtctttgatcactacatagcagggccttctaggaaggatggctggctggatctagttgttccagtttggaaagtacctgcttgactggccagactgctgttggcttcagaaaatagcagtctcttgttggtcactgagaagaggcaaaattttggcaggccttggggcctcctgcagagtctcattccaggtcagtggacagaggaggccctgagaatagtcgtgcatactggctccctggatctgctccaagacagtgagcagcccctagaaccacaagagactggccagccaagctgtgggcccggcctgtagggtggaaggaactcttaagagaaaaaaaaaatctctgctgtgattaatcaacagcttcagtctggtgaagtgaaaagagaaaagttggcccagatgtgcacatagggagagaaataagggagggaaattgcctttattcatgttctcccttaggccagtcgttaccccacggatgagatcaccttccttttacaccagcctgcaagaggtgtgtagtggtagtctcattttacagacaaggtgtaggatcagagaggttaactcgcccaagtcaaacagctaacaagtggtggaattggaatttgagccctgttcttctcagttcagtagccctgctgttcttgctgatgtcacctcagcatgggctctccaggtatgtgcaaatagttatgcaagtgttgcatccacaggcttgtgagcagaggctgaaagggagccagggctcttggtacttgccctctcaacatgggccctgcctaagctagcaggactcactatacccaaaccagcagtggcattatatttttctcttttcttgcaccttgccatccccgatttatttttagagagccttttctatttctgttcccatttcttggcttggatgcaggggctggggtgcagggatggcgctagaaatcagaagaggcaggcatagatggcatctcactggtggccttggctggtctctgggaactgtgcccatctgcctgccctgctggctcctcctcaggccagctgtaggccccagggatcatagagctcgggtagctagaggctgggagggcaggcgagacagagaaacagccacacttctcatttctttggcttctcagagggggatgagcttcctcctggaacagagaagggagtagctcactgcctgtttctcagggttaggttacggacttctagggaatatggggtagtgcttaagagccagactctgtgtggcatgggggtgataactgtagaccctccacctctggggattaaatgagctcatacatgtaaaggcacagaggaggcactcactgaatgatgattgtttcattagtgtctttagaccctcagcacccagcaccataggtggatgccagtcattattggttagaccaaacagaacttcaaggcagctgggcatggtggctcacacctgtaataccagcactttgggaggccaaggtgggagggtcacctgaggtcaggcatttgagatcaacctgggcaacgtagtgagacccagtgtctatttatttaaaaaaataaaataataataaaaaaagaaaaataactttaatgttatttttgtcgtcctcttcatctgaacattggcctgcgtaggtattaacctgagtccagtgattgtttgtggagccccacagggtacttcccagtgacagcagcctggagtgtgctcctgccagcccctgcctgggccctggaaaaggcagggcagtgcagcgaggaatcttctggcctaaggatgcctgtaaccaccaaaccttatgtttagttttacaccttgctgagggtctggcttttggatatgagctctggagtggtaggggtctgtgtcccatggggacaggtggttctgggtgttgggcacgaggtgatggaggaagggcctgccacttgcaagctgtttatctgactagtaataaacagtggatgacacctttaggaaactgtatttgggagctttgaaattaatcagatgccaccaatggcatttttaatttagttaaaaatgttttagttatataaataatgctcattcgttatagatgattagaaaatacagataagcactgaggagaaaaaagtaatatattatcacacataagtggctgctttgatatatgatttttttttcttacctaggttcttttcaaattgtgtatacctagttattttttctgtctttcgaaatgggatgctgtttaacatttagttttgtgacttgcctttcccatttttcaggtggttttgtggtgtctgcttgtcctccgacctcctctcccatttgtgggaaaggcatttggcctggagggaggcacttgggaagaactgtctggttgttccttgatgttattgccagacttgcagagggtagagaggtgcatgaagtcttactctgcctctccccatctgtgtctctccctgtccctgtccagcgccccatctgctctgcctactcaccactcctgccttttttttttttccttccatacaaatccagaaaaggataccacctccagtctgaaggtttctttctatggcttttagggatgaatctctcaggagtttagaaaaaaagatgcacagacagtatataggaagggtaatgccagggctgggggtgggggtcttgggaagagcaactgagaggagggcctgggtccctggtgctgtcttgagtcagtgagaagaagctgcgtgggtgatgggttggggcggggtaggcagcaggtgactgcagggacctctctgaaacagcaagcaagctggccaggaagacgcctggagaataaggggcccagataggggccagacataggggagaagaaaatgtgtctcagtggcacctgctcctccaccctggccccactctttccatgatctttccagagattctctctttttctgcctgatctgcttccctcacctggcagtgcccagccccagtagtttgacacatctggtatatctggctactgtgctctactgacacctgtgtggcagcagctgcacagcttcttggcatctccctgggcagtaggcagggatccgagcatagaggaagatgttccatgcatcagtaactcagattccgttccagaaacgcatctcaaagcaagggagaaaattgaagatggggtattttgtggggaacaagctatgccttcctgtcacttcttacagaataaaatggggtctctggcagtaggcaaggagaaggcctttctgagcactgagggtcagtggcttctcaggtcttttctgggccactttggcctgcacacaggttgggctaggaattcatgcttaaaagcaggctgatttccataggctgtgcgttcctgtgggcctgcctggatcatatctgttctgctgtgatcccaggcctggtgagacccactggcttcctgtacgtcccctcaaagcctgcgccaccgcctctcccttcaccactcccaagctataattaagttcccatgtgaaactgtatccctcagctgacacacgcttgtaactacagccctggccattggacggctcatctggggtgacttctggggctggtgcctcagcctccagacgctctccagtaggtctgagtaggtggtgtggacccaccaggaaagggtggatccagtgaggcgggggccaggccttgcccaagagtcagaaagtgggaagtcacgggggagatgaagggcgagtgagcagctagaaagtgccaggggacacaaaaatgggggagacaggcagccttttggggctggagggcatggacagggtgactgatgcctgagccacaggcagaatgtgagcagtttattttattttatattctacatatttttatagcataaaattaagatatagttcacataaccaaattcaccactttaaagtgtgtactttgatggtttttgtatattaactgtgttttatatattatattaaattaatatatttatatattatattaacggttttatatattattttagctgtgttgtttatatattatattaactgtgttctattaaccactaattccaggacacttctatcacctaaaaaaccctttacctgtcagcagttactccatcccttggctgctaatctacttcccttctctatggctttccctatcctggacatttcatatgaatggaattatataatatgtagccttttgtgtctgaacaatttcacttagcatgttttcgaggttcatccatgttgtagcatataatagtactgtattcctttttgtggctgagtattccattgtgtgtatatattccattttatttattggtaaattggtggacatttgggttgtttccattttttgactgctgtgaacattcatgtacaagcttttgtgtggacatatgctttaggttctcttgggaatatacttagtgaaattgctgggtcatatagtattccatgtttaacttttttttttttttttttttgagacggcatcttgctctgttgcccaggctggagtgcagtggcacgatcttggctcactgcaacctgaacctccctggttcaagcaatttccctgcctcagccacctgagtagctgggattacaggtgcatgccaccacgcctggctaattttttttttgtatttttagtagagacgaggtttcaccgtgttggccagactggtctcaaactcctgacctcaggcaatctccccgccttggcctcccaagtgttactctttgttttttgtttgtttttttttttgagacggggtctcactctgtctggagtgcagtggcgcgatttcgcctcactgcaacctccacctcctgggttcaagtgattcttctgcctcagcctcccgagtagctgggactacaggcgcatgccaccatgcccagctaattttttgtatttttagtagagacggggtttcactgtgttagccaggatggtctcgatctcctgaccttgtgatccacccgcctcggcctcccaaagtggtgggattacaggcgtgagccaccgcgcccggccccaagtgttactcgttaggcagatacctgatacctgtctgctatactcactggtctgcaccttgcttcacttattatatcttggccatctttgcataccagacatgtagagcttccttattcttttttttttttttttttttgagatggagtctcgctctgtcacccaggctggagtgcagtggcgcgatctcagctcactgcaagctccacctcctggttcacaccattctcctgcctcagcctcccgagtagctgggaatacaggtgcttgccaccacacccagctaatttttgtgtgtgtgtgtatttttagtagagacagggtttcaccgtgttagccaggaaggtctcgatctcctgacctcatgatccgcccgcctcggcctcccaaagtcctgggattacaggtgtgagccaccacgcccagcccctcattcttttttttttaacagttggctcatccattgtatggatgtgccagtctcttcttttttttttttagacagatttttgctctgtcacccaggctggagtgcagtggcatgatctcggcttactgcaacctctgcctcctgggtcaagcgattctcccgcctcagcctcctgagtagctgggattacaggcatgtgccatcatgcccagctgatttttgtatttttagtagagacagggtttcactttgttggccaggctggtcctgaactcctgatctcaaatgatttgctcatctcggcctcccaaagtgctaggattacaggcgtgagtcaccatgcacggcctggatgtgccattctcttattcattgatgaatgtgcaggtgacttctagtcttttttggcaatgaataaccttgtcattttacacacagataaacagattgacaatgcttctgtgtgataggtgcagtaatggagatagacactggggaactagggaaggcttccagaggatagttaagaaaggctcagggtgagtgagcgctggtatctgagtgggccttgcaggcctggcagaatttcagcaggctgagatgttgtaggaagggcaaatatgactgaagaaaagaacaacagctcaggtgtgacaggggaaatgaagagtattagttatctattcctgcataacaaattaccccaaaacttagtagcttaaaacactatctcgcagtttctatgggttaggagagatttacacaaatatgtgaataccagaaggtgaggattgttgccagccattttagaaggctgactctaatagcaagttgcagtaaggataggattggccaaggcaacagatggagccatgattgtggacaatcttacatacttagctgagaggttgtcagagattgatctgagaacagtgtgagccatggaaggtctttgagcaggagaataatgtgatagttgctatacaggacaattaatctgatagcatttatgctagaggggtcaaaatggagagagatacacaggcagaggcctagattaggagatggctatagtagtacaggtgagaaattcctggcctgtagtactaaatacttttttttttttttaagacaatctcactctgtcacccaggctggagtgcagtggcatgatctcggctcactgcaacctctgcctcccgggttcaagcaattctagtgcctcagcctccttagtggctgtgactacaggcgtgtaccaccatgcctggctaatttttctatttttagtagaaatggggtttcacggtgttggccaggctggtcttgaactcctggcctcaagtaatccacccactttggcctcccaaagtgctgggattatgggcgtgagccgctgcatccggcctctgtattaaatactttagctgcatattctttcttcgaaatgaccacaaaaagaaggtattactgattaatatgcatatggtcttgcgtatggccagacttatgacttgcgtatggtcataaaggtagtaagttgcagagcagcactcagacctgcctggctttgatgaccgtgccttgatggcactggaagtggaaaggtgggggtgactggggaggtgaggttttgtccgttccctggatgctaaaaggaaatggaggagtgtaagaggttgattctttgaacctggatggctggggcaaagataacactgtaacaggaagaagagaggccggagggaacactgatgtgatgggagaaggtgagtgatttgggaacatggggcatttgttggcagggtccttcccaattatagggcgagtataaatagttcctgtgctttgtgtatgaagaggtacccttggcccaaaaagactctaaatgtggaaaaaggatatggtggtgtggtggtggtttgaacattgggtttgcgcagatagtgatggtaactggcactggcctgcgcttcagactttcacagcccgttcacttctgttgaaactcacacaaccctattcaggttatcatcattccctatctgattgatgaggaaactaaggctcagaaaaatccatttgctcaaggagaaacagtgtttcagttacctactgctgtgtaacaaatcacctgtgaaactcagtagtttaaaacaaccaccatttatcctttctcttgattgtgtgaattgggtccagatgcttggttctgccccacatgatgtcggccaagcttgcccatttgtctgtgtttagctgcactgtaatgtccaaggcagcttctctttgcatggcctctaatccttcaagagtctatcctgaacttcttgcagcatggcatctgggggccaagacagtggaagccagtcgtgttgaggcctgggctcacgtcccagaacatcacctcaatcatgttctattggtcagagctgtcactgggccagcccagattccaggttgggaactagacgccacctcttgatggaaagagtggcaaaaggtttgtagccatatttaatccacagacagccggtagtggatacctggatttgaacccagatctgtgtgactcagactcacagtctgtcatgccatactgcatccctttctgcttctggttccttgggagttgcaaagcttgctggctcttttgtgtggttggagagggctgatttttcttgtggtctcccacagtggaagttgtactagtcatcccccttttcacagatgagcatccaagatcactgtgtcttagggaaccttccaaaataggtttgctctagggatttgctagcttcccccaagcttcagcagtgatagccagacatgcatggaatttccctgtggagtttccctttctgcgcttagtggccttttgatgcacagtgctcactgggtgggattcctgctgcattgtagccagatgtggaggctagccctattttgagttatcccagatggtatccagcccagtgagtcccatacttgactcaactggcatattcaccagggagttttggggaaaatgtagattcctgggccttcctcatgcctattgaattagaattcccagggatggcgtccaggaacctgcctttaaagctccccattgatttgggagtacagcctggttgggaaaccaatgacttccagaggctggcaccctccctcagcccagtcatttcagaaagatgcctttgaagtcactgatcagaggaggccacatgggagagaatgatttgtccagagggcctcacacttcacaaccaggaagtgactcctgaaagtgtccaggaagtttctatttgaatctgctcaaatctttgatgttgttttgcatgctttgatagtatctgagctttatggtggcctctgggtgtttttctttgaaagtgtttgcagagagtagcaagctcttccagcagtcagcagacactccctaaccaggagctacttggtctgatttatttgaaatatgaaattcctttgcttggctgtctggttggtatctttggtgtgaagaatatgacaaccctagagatacctaggttagcacagcagttggacctttctagtcttgtgccttggacatacttaaggtacacttggaaaagtagattttaaaaccctggataatttggtttgccagttaaataaacttctatattttagaatatttggaaaataaagataaatataaggaagaccataaaattacctagaactttcctctcagagaatttccacggttaatgttttgaatggctattcatccttcccctcatgacccttcacaccccctctttttgaaaaccatattgaagtcatattgaatgttactttttagcagttttgttgagatgtaagtcataaagtccacctgttgacagtgtgcaatttgatggtttttagtatttacagagttgtacaaccatcaccacaatctagttttagaacattttcttagtcccaaaaagacatcttataatccattagcgtgcattcccgcctcgatgccccatcccgcccttactccagcccaagactaccactcatctgctttctctacgtacagatttacctgttctggacatttcatataaatgggatcatacaatatgtgatcttttgtgattggcttctgtcactggacataatcatggtactgttttgaaacctgctttaaacatttatatcctagcaatttgaatatagttttcaagaatgcacttttaatagcagagcggtattcattcttatgagaatatctaatcttatttaatcagtcctgccaacagacgtttaggttatttctcatcttttgctcttatagccagtgctctctgcactcagaaattattttgttgatttattggttaattgtccgaatctgtgactagaacaaaagctctttgagaacagtcaccttctctgtctcccctactacttggcatagttcctggcacttggtaggtattcagtttttaaaggatgtgtatgtgtgtatatgtgcaaattttgaatgaatcaaaatgtaaggatattaataaatgttgccatattgccaaattctagaaagttgtactaatttaccctctcactgcagtataagggtacctgactccctgttcctttgaatctgggttaatttgtacaggaagtcctgtgatcttttgaatgatgatattctctgacctgtcaaccagttagtttgggaattgatgctgtctgtgtcctgaccctgtctgtgggccaggaagggtctggctgttgggaaagatggtggtgtgtgggagctctagctgcccgggtcctcattgtggctccgtggtattgtatcgtttcctgttgcccttagaaaggctgcatcgtgttgtctggccacttcctctattgtgtgcaggcatgttggggagtgagtagagttgggtggataaagtatgtgtaagaagatactggttatggctgctgattggagtgccttttgaagtcgtcaggagagatgtcactctggaagttcagtgtcttcaaaaatagaaatgaagaaatgcttccaggaagtctgatgcaactggcccagtctgcccccatctgagggtggtgggcacccacatggctggtaaacgcttcatgagtcacccactggccacagtccctgctcctctccacacacttcctgtctggaaaagcctgctacccgcccatggtgaagagtcaccccagagaacttgccagggatgcagggcaggtcttcccaggtcacagcagcagcctctcgctcatgggtttcacagcagttcttctccccaagatgagttgtggtaactgctttttagataaatatgtggaatggatggttgggattggaaaaaaaaagagcggctagatggcaaggcagctcttgtgtgtagcagggagctcacacgagccccatggtggggcagttaaggccccagaattcaccttctccagcagctggctgctcattcttttcttcttctcgtggttttcccatcacatttcccttggggtttcttccaggccttcccctactcaccccacaccctctcagaagatgctgcctcatgtaacttggccaagctctcaagcattacagatgcctttaccttcttttctttgcatcttagaaatcactcacatgttggtctctctcacataattgctttttattattacttcagcggttgccaagtgcctactctatgcctagtaccttgttagactcgggaatgatgcagaagaaagagactggaccctgccccctaggagggtaaatgtctgttctcccatggcctctgtttcccttcctctctgactgcgcctttgctgccctggttcctcttcctctttccgctgcctgagtgtcaacattcttcaggcttctgccctctctcctctccctccacgcgcttgtcccttcctgtggctgtgaccatctgctcttatagctaccaaatactaaagttcttttctcctgaaaaccaggtccctgtgtccacctgcctgctggagtgtgcagccttaaaagcagagtccatctttgtctctgctctttgcatatcccctttctgttaataatccgtcattctctcagtttcccggagccttactgacagctttaaacctcattcctctgccatgcacaggtcgttcctcccgttcttttgagtgtttctccccactgattttcctgcctgtagtgagttggatggttgcccctccaaaagatatgtccaagtcctaacccctagaacctgtgaacatgaccaccttgtttggaaaaaaactcattgcagagattctttcctatgctgcagacgtacatgaacctgtgctcattgacctcctctctgggcctggccttgttggtctctggcttgaaatagtgactgtacttctagtccacacagtgattacatatttattactctgtttgagctcccctagtccaaaggcaaagttcactgcctgccctttccactaactcctaggtcagacttgctaggttgtgtgcacagcagctacaagtgtggtttctaaggtgggtctgggtttgaatcctggttctgtcatttattagccaagggcctttgacagattgtaacctttctgggcttcagtttcctcttctggaaaatggagctaatggattgttgtgagaattagattgcatagtgtctagcactgtgcctgacactctgagctttatttttatttatttttattttttgagacggagtctcgctctgttgcctaggctggagtggagtggcatgatctcggttcactgcaacctccacctcccaggttcaagccattctcctgcttcagcctcccgagtagctgggtttacaggctcccgccaccatgcccggcaagtttttgtattttttagtagagacggggtttcaccatgttggccaggttagtcttgaactcctgacctcaggtgatctgcccaccttggcttcccaaagtgctgggattacaggtgtgagccaccacgtccagcccactctgagctttataaccagagagatgctgtggctagccaaatcgctcaacctatacttggaggatcccaagcttggatgagtgtaagagctgtgacttaaatccagcctacttgtatgtcattctgccacagttgtctttgtctctccacagtttgtcctggagctgggcatggtgagggctaagacaatggattacagagctacaggtctaggagggcatgtggaattatgcctatatgagatagatgacaaagtgggtaagagcatgtgctctggagttagacctgggttcagattcaggctctatgaccctatctcagtgaccttgggaaacttttctttgcatctctgggtctcagttttctcatctgtaaattgggaataacaatggttcatacctgtcttagtctgtgctgctataacaaaattcctgagatgggtaatttataaacaaaagaaactgatttctcacagttctggaggctgggaagttcaagatcaaggcattggcagacttgatgtctggtgaaggctgctgtccacttccaagatggcaccttgttgctgtgtcctccagaggggatgaatgctgtgtccttacatggcagaagggtgaaagtggcccagctagttccctggagcccttttataagagcactaatccgttcctgagggcagagccttcatgacctaaacacctccaaaggccacacctcttaataccgttgtattggggattaagtttcaacatgaattttggagggttcacaacattcaaaccatagcaatgtcttatagagtaatcgggatgattaaatgaaagaatgcccataaaacattgaacacatgcctgactctttgtaaacaataattattaggtatcgctattatagagaccagcttctgctgtggagagtgttaagtgccttgatgccacaagccactggacacgcagctgcatggatcaatgtacccctgtaattatgtaacaaggggacatggagaaaaaaacatttccaatgttgcctcctctgtaacatgattgtacccctaaactgcacagaggagctttctgttctttgaactccatagctgttggtacgtctcttgtggggtttgccatagtctgtcttatactatgactgttcttcactctacggtacatttctttctttctttgtttctttctttcttttttttttttgagacaaagtctccttgtgtcatccaggctggagtgcagtggtgcaatctcagctcacagcagccctgacctccccaactcaagcaatcctcacacctcagcttcccaagatgctgggactgctggcatgtgccaccacacctggctaattttttttgtattttttgtagaaatgggatttcaccatgttgctcaggctggtcttgaacttctgggctcaagcagtccacccatctcagcctaccaaagtactgggattgcagtgtgagccaccacgcctggcctactgtatgtttcttgaggtcaagattgggcactgggtaactgattacttgaattgaaccttgggattcagccagtgaaagtggtccacctggcagtagtgaacctctggctcctgacctctgctgctggtgaatctgtttctcctatggctgcacagacacagggtttcctgcctccaaagagcttttccactctgtacatgggacctgaaccggctccagaaaccttggagcctggcaccacttttcacatcacccagcaggagcagaacttagatggaccaggcatagatgggaaacatgggtttattgctaaggtcatggttagttctcggcggtggggcgggggggtttagtgggcaattgctttttggatttttgttttgttttagaagtaaaaaatatgggccaggcgcggtggctcatgcctgtaatcccagcactttgggaggccgaggcgggcggatcacaaggtcaggagattgagaccatcctggctaacacggtgaaaccccatctctactaaaaaatataaaaaattagccgggcatggtggcaggcacctgtagtcccagctactcgggaggctgaggcaggagaatggcgtgaacccgggacacagagcttgcagtgagctgagatcgcgcccctgcactccagcctgggcgacagagcgagactctgtctcaaaaaaaaaaaaaaagaaaaggaaaaatatgtacatttttaatagtggtagtaagaattttctgtaactacttacgggacatcttcactgaggggtctccagagctcctaaaactcagcactcccccagtgattcttacattttcctgccagacttgctcttcttcccacaatccccaccttaatggaatcatccacatccccctggtcacctgacagttgccctctatttctttattctcctcagcctcttttaatcagccaccaagtcttgtttgtccttcctccctaatgtcactcctgttttttgccgtgaggtctgatggcactagtgctgcctggggttgctactgcctcatctcttcaacctttttgtgtcacgatgtttaggagtttctttcataaacagaatgtggctggatttaaatcaaatctgacaatctgtcttaagtaatttatgtacatttttgggatttaacttaacgtattactgtattatattttttagtactttccatgtatttccatttttgcctatttttctccttccgagtttttttttttttttttttttttttggagatggagtcttgctctgtcacccaggctggagtgcagtggtgtaatctcagctcagcgcaacctctgcctcccaggttcaagtgattctcctgcctcagcctcccaagtagctgggactacaggcacgtgccaccacacgcggctaatttgtatttttagtagagacagggtttcgccatgttggccaggctggtcttgaactcctgacctcaggtgatccacccacctcggcctcccaaagtgctgggattacaggcatgagccactgctcccggcccggaattttctttatttctatacattttacttccgttgtttttttcttttttgagacagggtctagctcttttgcctaggctgaagtgcagtggtgtgatcacagctcactgtagctttgacctcctgggctcaagcaatcctcccacctcagcctcctaagtagctgagattataggtgcacaccaccatgctcagataatttaaaaaaaaatgttttctagagatgggatgttactgtgttgcccaggctcgtcttgaactcctcactcaagccctcctcccaccttggcctccaaaagtgctgggattacaggtgtgagccaccttacctggcctttatttctgttcttactccaacattttctcatcttttctcccatccttttacttagaaaaatgttaaaattagaggaaatagtacaatgaacatgagtattctctttaatcttattcaattaatatatttctctgtatatgtatatatgcttttgtttggaatcatttgaaattaagtgtggatttgttctccatcttcttgctcaggatttggtgtgctgcttttatctgaggactcatttataaaagaaaaaacaaagaaaaagcctttttactttaaaatgattgtagataaacttagctttacacagagtttctgtattccttcacccagcttcccctaatgttaatctcttacatttaattctttcttaagttctggaaaatttcagccattgcctctttggctttctcgttttctctacagtggcctctggaatgcctcttagacatattgttgagcattttaccaccaaagtctctatatttgttctttctgtgttcctttatctgtttaatcatccaagttttcttgtgtagtttctttgagactgtcttatttctgattcttgggatgctacttctctttttgtgtctgaggcttgcccctcttggtggtttatttccttgtgtggtttgtaactttgggtgtgagttcatctccaggagggattctcttttctggctgagacttgggtcctgaattatgaaagtatacctcagagcagcttgtttgcctctggcggggccatgagtgtttcagtggtcctggctcagtttttgttcactgcttagtgcggcacccctttactaccctagtagtgtaagttcagttttatatccatgggcaggactagcttggtggcttaagaaagggtgacctcccgccgggcatggtggctcacacctgtaatcccagcactttgggaggccgaggcagggggatcatgaggtcaggagattgagaccatcctggctaacgcggtgaaaccccgtctctactaaaaatacaaaaaattagccgggtgaggtggtgggtgcctgtagtcccagctgctgggaaggctgaggcaggagaatggcatgaacccgggaggcagagcttgcagtgagctgagatcacgccactgcactgcagcccgggcgacagagtgagactctgtctcaaaaaaaaaaaaagaaagggtgacctcccacccatacctgacccacagagccttggagaagtgttcagcttcttgttgctttcctttactgggcagccctttgaggctctcttcttgatactggggctcaaagccacaggcaggctttaaaccgcttcatttgtgggtgcgaaagtccacaggccattgtggtgtcagttccactcactgtttatgtttcaattcttctcgcacataggcatttctctttccaatttggctgcatgtctacggacgtcatttgttttattttatctggtatttttctgtgatagtggtggaaaggggaagctctttcacgttaatttagtcccgtatcctactgaaagtttgttcaaatgcttagcgtgtcatatgaagcttttcatgatgcagcccattctacctctcctgcataaacttagctcttaaattttacacttcagcaaattgaactatttgcataccatgtactgtaatgtttaaaagcacaggttttagggtccagctgtttggcttggaacctgtcttttcataaggtatgattttggacaagttacttatcccttccataactcagctttctcatctgtaaaatggcagcgtccggcatgcagtaaccctgatccctgttggctgcctctgtggttgctgcccccagcagttgaggctgccaggcctctgcgcaattgcactgtttattcctttgctggaattgcctgtctcccctcctctccttgatccctcccaggagagcagcctttactccttcagagcttggggtctctgtctgtagtaactatcactctgtgggtcgctgcttgtttacgtatctttttttttttgagacagagtgttgctctgtcgccaggctggagtgcagtggtgcgatcttggctcacggcaacctctgccttctgggttcaggccattctcttgcctcagcctcccacgtagctgggactacaggcgtgcaccaccatgcccagctaatttttgtatttttagtagagacggggtttcaccctgttggccaggatggtctccatctcttgactttgtgatccgcccgcctcggcctcccaaagtgctgggattacaggcatgagctactgcgcctggccacgtatctccttttttcagccgactctgacccccttgagagcagggtcttgtttttcttggtacttgaaactccttacattctacctgtcatttggtgggcattcagtgttggtagtttaattgcattgaatttctctggctgagtagaggcaagtgctgggagtggtatgggacgcagaggcagggaatgacagcaggaaagcttgttttttggcacattttgtgccaagttgatggaaatgtgaatcagtatggctgggacacaaggtaacaattcttagtctagctgaggatgccagagacttaaaacaagccagtggccagaaaaagccactaaatcttgcaaattaaagtggtttccagacttaagaatgcatgccccacattcccttcccaaactcagcgtctctgagtgccaggtggaggaatacaaactaattataatcctagtgggccctgagaatctttaattttagaataaggctgcacttctgaaaggcgcagttgctttaggagtaggtgactctgtatgcccggggcctccgaggagaccaggatgtgaaaactcagtacctggcatttagagctgtgtcacccatcacttctgacctcgttaagatttctaccctactgcgacttaacaactaaaaagggcagatgagataggtccggggcagagcttaatggcctgtgtcattctcctcagctttgcctgaattctctggactcttgagactctatcataggaatattctcagaagagaaggcaatcgaacctttaaagatccccagattatccatcagataacagtctcatgagagtgatgaacaatgacagcaccaactctcaattcccttggctggaatttcaggaatcagcttgaactcagaggtgggcacagggttagggcttggagtaggcgtcttttctttctttttttttttttttttcttttttgagatagcgtctcactcttgttgcccaggctggagtgcaatggctcaatctctgctcactgcaacctacgcctcctggtttcaagcgattctcctgcctcagcctcccgagtagctggggttacaggcatccgccaccacgctcggctaatttttgtatttttagtagagatggggttttaccatgttgcccaggctagtctcgaactcctgaccttgtggtctgcccaccttagcctcccaaagtgctggtattacaggcatgagccaccgcgcctggcttgcagtaggcatctttgcccaacccacgtgaatcccattagttctttcttgacagctctcagtctgtggtcatatattaagcaactatgtgttcagtactgtgctgggtgctattgctgaagatacggaaatagtaatgccacaagtccctcttcttagagaggagagcttgcactctagttggagagaattcctagcacacagaaagctgcaaccagtggtgcccaacagtaatgctgtctgatgccactgcatgcaagtgtgtccctttgacaacttggtgcttttgcccaaaaggagctgttctctttctgaggcttggactattcgtttgttttttctcagatgacttgctggcactgttacagactggtctgaattaactaggactaccttttatctgtttctgaggaatagccccaaatgtgctctctcttggtctttatgaacttttcctttcttccatttctccaaattatgatagattaactttgcagtgtcatctgctaatctccaaggtcttctaggggcacgtcatcagcagttgctgcttttgaggtatcaaggtttgtcctgtggagtctcagatagtttctttacctgttcaatgaatctgattttccatttttctaggagagtgtatctcaaagtgattgctgaatcagaatgtctgggagtgtgacttggaatctattactgaagattagaggaaaatgtagcaaattgtgatctgaagcatttatggatggattgatggattgatggatagggattctgactgagttaggtagtctatagtctcagacagttgtggaagctccattaggtcatgagcaacccagactccttccaattctgtgccctgccattcttagggtgtggctgctgtcctcatggtccaaaatggttgccgtggttccacatctcacagtgagatagaagaagacagaagaatgatgtctcacctcccttctaaggagacttcagcaaagcctgcctctaccactttctgtgactgagggaaagttaattcatactcagagccaattaacctcgtgttttttttttttgtttgttttttttttttttttttttttttttttttgagacaaggtcttactttgtcgcccaggctgtagtgcagtagcacaatctcggctcactgcagcctcgacctttcgggctcaagcagggctcctccctgctcagcctcccgagtagctggaactacaggcacatgcaccacacccggctaatttttaaattttttcgtagagattgggggtcttgttatgttgcccaggttggtctggaactcctgggctcaagtgatcctcctgccctggcctcccaaagtgctgggattacaggagtgagccactgcacccaaccagttacctcatttgtaaaacaggcatggtaacacttagtgcaggagcaagaggatcagggagcacacatacatacaaagtgcttggtgctgatgcccagcctgcagcacctgttctctaaatcatagcagcaattgctgctgcagcacacttctctttctcctctctccaccgctccatctctccagggtctctaccttgcctgtcaggctccactttcctttgctcctgccttttgcatctgttcctctctgcattctcccctcatctcctctcttccgtgcacctcattttcctgctcccctcctgcctctgtccctcatcttcttttcagagacttaaaaccagccagtggccactggcttttcagtgtctcctcctcctccttgaactacctcttccttctagtgcttctgtccttccctcctcctgacctccagtgaacaataattatttgtaacgtaatgacaaattatcgttacgttacaaagaccagaggttagaggtggtgattggccttgtaaactgtaggtcagcgatgagtaatttaagaaaactaaatttaattggtttactcatgagtcagttaggaattctatttggcagctagaacagaaatagcagtggcttaaaccagtagaaattttttctattgtgaaaagaaatctagggggacagtctagggcttgtctctccgctctgccatccttagtgcagggcgtccaaccccaaggttgtatcatggtctaagatggctgcgggagccccaaccatcatgtcaggttctaggaagaaagcaggaagaagagaggaaaggcaaaaagaacacatgctccatcttaaggagctttcctgcaagtcccaccaaatagcttcagcttctcctccttgcctccattagttgcaagggaggctgagacatcatttagctgagcacattgctacctgaggtagaattgggattctgtcaccaagaaagaaggggagaatggatattgtgtaaacaattagcaaggtctgccgccattcattcaacattaatttagcacctacaatctactagttatgaagaacagtcaaggtgccccattccagagggaagacatagataagtaaacaagtacagtacacaggatgggtgaggaagagggggagagtggagaaaggcatgaagtgggtatcttacataccctccaagggcgcattctagagttcgtcatgcagacattcttgcctgtggtttgtttcctcttctgctctctcctttttgtcattgtcgccattgttgttgttggggtttgtttttgcccctccattctgacgtcagcagtagcccctagaaccttaggaaacagaaacagttggcctagtgggaagctctgggatgggagccatgtgtttgaagagccaagtcccagggccattaggcaattagaggcctgtggcaggagagcattcgttcctggacatgccgtggcactgccaggagactttactccaggaatggggtcgttgtcaggaggcatgttctaaccaggcacctggcatcacctatactgtgcttgccataaaatgaaattttggagcagtaaaattctccaggtcccgtgaaatgggtataattgtttcacccacattaatttaaccagaggtcttggtatgctatagtgttaattatgtgtaaaaatacttctacttactataaaatgtattgacagttagacattgatattccttcttagaactcaaaaattctaggaataacttgggagacccacattatctttcattttgatcccaagaacatctattgctgtttcctttgggaagttagagaggcaatgggaagcctgctgcagagattttctaaacaggcatatcccagcccctaaggagtttgaaagtgtcagagaaggctaaaggattaaaagatcgtttgttctggcacagtgcaatccttatgaggttgtactgtgaccctgggcaagttaccatcctatcctcagtttcttcatctgtcaaattttgatcctgtggaccctccccaacagggctgtgatggaaatgaagagacacatgggaagcattcagtatgtgttgttgttattatcatcattattgttatttttattattattagtgctactggtagtgctagcccactagcccactgggcagcgactgcacccgtatcagagtgtggaaagccttggatgccacattaaggagttggattttgtgggcaagggtgtgacaggtcatggctgggcttagaaatgtcactgacaggagtggagaggcagatctaggtgaggagtgggcagggcttgaacctggccagtcaaggaaaggggagaatggatacctgagtggtgagggaggacccactggtgctggagttcagcctgtgtgcccaagggatggtgtcccattgacttgggtgggaagcactagaggtggagcagttggggtggcaggaggggaaagaagcatatggtgatcagctcagcaaacaaatgggtaacttgcgcactcagtgctcggtggtgcccaggctggagtgcagtggcgtggtcccggctcgctacaacctccacctcccagccgcctgccttggcctcccaaagtgctgagattgcagcctctgcccggccgccaccccgtctgggaagtgaggagcgtctctgcttggccacccatcgtctgggatgtggggagcccctctgcctggctgcccagtctgggaggtgaggagcgtctccgaccggccgccatcccatctaggaggtgaggagcgcctctttccggccgccatcacatctaggaaggaggagcgtctctgcccggccgcccatcgtctgagatgtggggagcgcctctgccccgccgccccgtctgggatgtgaggagcacctctgcccggccacgaccccgtctgggaggtgaggagcatctctgccccgccgccccgtctgagaagtgaggagaccctctgcccggcaaccaccccgtctgagaagtgaggagaccctccacccggcagctgccccgtctgagaaatgaggagcctctccgcccggcagccaccccgtctgggaagtgaggagcgtctccgcccggcagccaccccgtccgggagggaggtggggggggtcagcccccccgccaggccagcagccccatccgggagggaggtgggggggtcagccccacgccccgccagccgccccgtcagggagggaggtgggggggtcagccccccgccaggccagccgccccgtccgggagggaggtcggggcgtcagcctcccgcccggccagccgccccgtccgggaggtgaggggcgcctctgcctggccacccctactgggaagtgaggagcccctctgcccggccagcggccccgtccgggagggaggtgggggggtcagccccccgcccggccagccgccccgtcagggagggaggtaggttcagccccccgccaggccagccgccccgtccgggagggaggtcggggcgtcagcctcccgcccggccagccgccccgtctgggaggtgaggggcgcctctgcctggctgcccctactgggaagtgaggagcccctctgccaggccagccgccccgtccgggagggaggtggcggggtcagccccccgcccggccagccgccccgtccgggagggaggtgggggggtcagccccccgcccggccagccgccccgtccgggaggtgaggggcgcctctgcccggccgcccctactgggaagtgaggagcccctctgcccggccagccgccccatccgggagggaggtgggggggtcaggccccgcccggccagccgccccgtccgggagggaggtgggggggtcagccccccgcctggccagccgccccgtctgggaggtgaggggcgcctctgcccggccgcccctactgggaagtgaggagcccctctgcccggccagccgccccatccgggagggaggtgggggggtcaggccccgcccggccagccgccccgtccgggagggaggtgggggggtcagccccccgcctggccagccgccccgtctgggaggtgaggggcgcctctgcctggccgcccctactgggaagtgaggagcccctctgccaggccagccgccccatccgggagggaggtgggggggtcagccccccgccgggccagccgccccgtccgggagggaggtgggaggggtcagccccccacccggccagccgccccgtccgggaggtgacgggcgcctctgcccggccgcccctactgggaagtgaggagcccctctgcccggccaccaccccgtctgggaggtgtgcccaacagctcattgagaacgggccaggatgacaatggcggctttgtggaatagaaaggcgggaaaggtggggaaaagattgagaaatcggatggttgccgtgtctgtgtagaaagaagtagacatgggagacttttcattttgttctgtactaagaaaacttctgccttgggatcctgttgatctgtgaccttacccccaaccctgtgctctctgaaacatgtgctgtgtccactcagggttaaacggattaagggcggtgcaagatgtgctttgttaaacagatgcttgaaggcagcatgctcgttaagagtcatcaccactccctaatctcaagtacccagggacacaaacactgcggaaggccgcagggtcctctgcctaggaaaaccagagacctttgttcacttgtttatctgctgaccttccctccactattgtcctatgaccctgccaaatccccctctgtgagaaacacccaagaattatcaataaaaaataaataaatttaaaaaaaaaaaaaaaaaaaaacaaat

SEQ ID NO: 9686 - DNA, 117 bp, Homo sapiens
tttttttgtgtatttttagtagagatggggtttcaccatgttagccaggatggtctcgatctcctgacctcgtgatctgcctgcctaggcctcccaaagtgctgggattacaggcgt

SEQ ID NO: 9687 - DNA, 684 bp, Homo sapiens
cgagtacctactgtacactcatgagtgctaggcagccagccttccaggtgctcaggtacatctgtgaacacaactggctattggaggaagcaaaatcagtaacatgacctgctctctttgatctgtgctacagaaaaaaaggaaagtggagaggcatcaggaagtcaagagtgctggggaggggctggtaacagtcatggtattaaagaggagggcaggcaggccttactgtgaaggtggtatttgagatgaagtagttggtcagagtccctgtttgacacatggagaccaccttgacagcaaaggccctaagggggagcggtgcgaagcaaggtgggctggtgagtgagaggagagggatggcatagagctgggtgggggcacaggagcccgtggggaaggtgttcgcctctgaatgaagtggggttgtatcagataccacgggtgaagcatcgggaagaggatcctgcctgtaaaccctgctcaaggactgcaccatcatcatgcccagtgtgtgcgtgtattaggtttgtatgaatataatgttgccaattgtatctgtttttatgaaatgtttgctatgtgccaatgattattcgatccatggggagaccatagaagaatgatccaaggagttgggaggggaatcaaataataaatcagcgattctgcaatataacgcca

SEQ ID NO: 9688 - DNA, 456 bp, Homo sapiens
gaagcccttgtttgtgaacagtgattgtttcccggatgacagccagatgccgggcagggccacgcagatcttagctggagcctacaggtacaagtgagagccaccccctttgacgtaactggactggcatttacagaactcatgtacagcccactctcaggaacaccagccaggaaccgtgacatggaggagaggaattgggaggaaccgaggggtcatcaaaggctggtagggcttaggtgctctagcaaacatcctagtctgtggggttccagagctctggtgctacagctcccaaccctttgattggcccaggaactggctgttgagtgggcatccgtgttcatagctctgccccttgcaaccctaaagcagataaaatgcaggaggcagaaattgctggcagacagcatccaattaatccccactacccaattcagtttcttcccctgacct

SEQ ID NO: 9689 - DNA, 6259 bp, Homo sapiens
cttcatgctgtcagaataatttcttgacttagaatcagagaatcctagacttttctcccctctaaaattaactacatgtctgaatttttctccctctcttctgaatcctcagaaagcaagccctcttctctacactccccagttagaagatgcatctctttctctttagtgaccataaaactagacacacagtcagccttctgcatctgtggattcaaccaaccatggattcaaaatatttgaggaaaaaaaaagtacctctttactgaatatgtatatactgttttccttgtcatgatttcctaaacaatacagtataatggtgatttatataatatttacataatattaggtgtcataagtaatttagagatgatttaacttatatgggagcgtatgtgtaggttgtatgcaaatactacacgatattttatcagggacttgagtgtctgtggattttggcatcctcggggggtgcttggaaccagtccccctggatacctgaggagtgactgtactgtgtgatagcagcagtatgggatggaaagatgagatcctagtggtgcaggtacatcagttggacatttggtgtaactcaccaaaagtgaaaaaaacagagaaacaatatttgtggtgaattaagagattgagaagcaccgaattgaattgagaggtggttttgacttcctgaaatctccccacaccattttataactcctcagtttttccatttagctttaccttcttctgtgacagagattcattcattgtctttccttactatgctttaagcaactcttacacttctgtatagaaaaggtgtttcattccctcttttcattttgatcaacatatctatatagctaccctcaggattttgaagtcataaatgtgggcatttgggagggtagcatgagaagagcatttaattaaaaatagctatattgtgtttctttattttagagtactattaatcccgtagatgcaatatatcaacctagtcctttggaacctgtgatcagcacaatgccttcccagactgtgttacctccaggtaatttgggaaaatgtttcttagattcattgatgagaaaaaaataatttgtgtggctgtcatagcagtcttagctattactgtttatttttgattttccttgtttttaataaaagcactcaaaaaataatacagccaaaagtgaactgaaaaaagatgataatgttttgatattggggctttactgaagtgtgatgaaagtggttttgttattcaaagtgagatagaaaacaaacttggttactacgatttggattcactggtagaacaggattctatgactcagaattcatggctagcgaggaaaaattactataccttattctggataatccagggatgttccgttttggggtattctgtgtagctctgaacaatacaaatggtatgttcatggtagattttaagataatgagaaagtgaagagggaaatttatgatgcctactgatcacatgacatctgggttttgttttgttttttttttttttgtataaagcaatacatgcaattttttaaaaactggcaaagaagggctcagggccaatacctagctacactgactgattccttttgcccttttgttatatccaacatttctatgttctcgatggcatagtgaagtcagaaattgtactgtaaaatggaaaactctttttaaaagtactagtaagtatgtgaaatccttttgtgagtttttacttcttaagtgaattagcttaaactacctcttggggctaaagaggaacaggtactgtactccacttcagattttttgtggtttgaggctcagaaacacattatcatcagaagcatttgttggttttacagcatagttatactgcagtattggcctactgtggctggttttttgatatcctgcctggtatcttagtactctgtagcctatcatcattgagtttaagaggctaggaagtcaaaaggaaggagtagcatggaactagacttaatgaaataaagtttcaaaaattactggcctttaggattttgaatcccagacaattacagtcaatagaatgtgtgtttggctgtttctgtaccttattttatacgttcaaatctcctagaacctgttcagttgtgtaagtcagagcagcgtccatcttccctaccagttggacctgtgttggctaccttgggacatcatcagactcctacaccaaatagtacaggtacagatttgcataatttctttatgtctcataactctattaacatttgaggtttgtttgtgacctctgatgaggagggggaaagttgaagaaatgtgttgtatattttctgttggagatatgttagttttaacattatagttccatacatgaagtggttagctttgtgtttgaaagagaagctttagttaagttttatttatttttaagtttttaaaatttttatttttgagacagggtctcactctgtcattcaggctggagtgcagtggtacgatcagggctcactgtagttttgacctcccaggcctcaggctcccaagtagctgggaccacaggcacacacaccacacttggctgatttttaatttttgtagagaggagtctccctatgttgctcaggctggtctcaaactcttgggctcaagcagtcttcctgcctcagcctcccagtgtgctgggattatacaagcatgaggcaccatgcctggaataatttaaataaaataaaatattacagagttttgtttgtttgttaccttaacatttatttggtgatctatgttgactttttgaaaaatttactccagctagacttgcatactttcttattatgaagctgacacagaagtgcacagaataaaaactgcaagtcctctttactctccccccagtaatttgcatacatgtatgtgcatatacacttatgtcgtgtatttttattgtttttgtttaaacctaacttaggttatgtgtttctgtgacttgcgtttttcctttaacaaagaacacttagagcactttccatgtttgtaaaattaggtctacagcattctttttacagctgcctgggcaggtattgcttgttttttccactgatggaagcaatacttcagtgatatccttgtacagcacctttggcatatgtatatttttttagaaaacatttatcagtctttcacctttttgccagttttatagttagaaaaaagatacttcattttaatttgcattttctttttgtttgtttaaacgttttgttttttgtttttgagatggagtctcactctgttgcccaggctggagtccagtggcactgtcttgactcactgcaccctccacttcctgggttgaggtgattctcctgcctcagcctcctgagtagctgggattaaagatgtgcgccaccacgccccacaaatttttgtatttttagtagagacggcatttcactatgttggccaggctggtctcgagcttctgacctcaggtgatctgtccacctccacctcccaaagtgctgggattacaggtgtgagccaccgcgcccagcctgcattttcttaattcgtttaggcttagggtctttattttttctctgttttacagggatactatcagtgttagatactagatttatcttgttttaaaattaattaaatgtatgttgaataacttgtagaaccaaactcaaggaagcatctagcacttttcacactgttaaacctggaaaccaaaaccaaaaccactcttgaagaagtgggagatcagccccttttgttcatcctcagatttttttcccgggtaggatttttcctgtgtaatgatgaataattaccctgtgatttaaaaaattcgaattagtaaaagtactgatgctattactttgatctttactatttaacagcatgggcagttgcctttgaattttgaaagaaaaaaaatagctctcttacttgaagctcttgggaaaaggctgataagcaatttgaataatgaaattgaaatattttggctgacttctgtatttcctgagctgtgtcacctcttcttcatttaaaaaatagtacctgtttgttgttgttcgtatttttatgttggaattttgaaacaaccaaaattccaaaatttttctgtttggaaatacgtaaaactagcaacagactttgagaaagtgagaagctcttcttatgtatattaatttttgtaaaaattactccagaagataatcttctgaaaactatttcagttgaaggtatttcaaaaatctaacactttagagtagatttaaagaaaaatttaaaattaaattcctgtgatttatatcttatttgatttttcatcctaacttcattttctccacttttctttcccttacttctcttgttaatacaaaaaagaaataaaggaataagataaaatgtttgctctcctaagtaaatctcagatcttttgtttgcagttcccactcaaacttttcttcttagatacagtttcacttgtgtgatcacctggaatatttgcatgctacttaatcatttgcaattcttgatcaattttttttttattccaataagaaaaagctgcttttctctcttactttttctgttgggtaataaaaagaatatgaagttatttactaataaggtgagctacctttggaatttccaaaataagcattaccttttaggggttaaactttttgtgttatctttttaaaatacctttgtgaatatgatgactaaatgtggcaaactgatgtgctttttttcacaactattgaaccatacatataggaatgggcaaaaaatccgtaagtgactctggattcttttttttttttttttgagacaaggtctcactctgtttacccaggctgtaatgcaatggcacaaacacaactcactgcagcctcgacctcctcagattaagtgatcctgccccagcctgtcgtgtagctgagaccacaggcacatgccaccatgcccagctaatttatttatctatttttttaagagatggggctctcactttgttgcacaggctggtcttgaactcctggcctcaagcagtcctcccaactggtcctcccaaagtgctggaattacaggcatgagccattgtgcctagcctggattcatttttattgctgtcttcaatttcttccagaactgtggccctggctttcagattgccatcagtgtcttaataaactttagtcttcaccagacatctgtagattagtataaattgcctgactgacagcccttaaatgctcagtaagttaaattgatcttaatactccatttgtcgattggtttgatacttttttgttcttgctttactagtagataaggtaccagatgatcatctcagagattagatggcaggcttctttgtctgggtcttcattaatttccatttctttagttagactatttaggaatagaaaaatgttcttctgaatcttttcattttctgcattcttctcatcgtagtcctctatttttatctccacctctgagcccctgacttaggtggaaaagaggagaggaatttggatggtgtgtgtattttccatgtgattgccaaaaaatattgaatgataggaatgtgatatcctgcaatattttaatgtttatgtggtcttaatattcttttcattttgcattcccagtggctcactgctgcatttttaggtatctggatctgcagtgtaaaataagagtcccggcatcccattgtaatcatatctgttgttggacttgcaactccacaactcatataatcaaaagggcccccttcctagtattaatgataatctttaattatagaatgaggacatagctttttgtttcatttatttaaaaggctgtgtcctcattttatatcatgatttgccattttctgtgtggagtttaaatgttgattttctttataaatactgtagcgacttttacaaacttaaccaaactcttttttgattttagaaaagtctgctttgactccatctccctagtttcttctctttcaccaatatttttctctaaaacccttttaacttcctaggcagtggccattcaccaccgagtagcagtctcacttctccaagccacgtgaacttgtctccaaatacagtcccagagttctcttactccagcagtgaagatgaattttatgatgctgatgaattccatcaaagtggctcatccccaaagcgcttaatagagtgag

SEQ ID NO: 9690 - DNA, 6260 bp, Homo sapiens
cttcatgctgtcagaataatttcttgacttagaatcagagaatcctagacttttctcccctctaaaattaactacatgtctgaatttttctccctctcttctgaatcctcagaaagcaagccctcttctctacactccccagttagaagatgcatctctttctctttagtgaccataaaactagacacacagtcagccttctgcatctgtggattcaaccaaccatggattcaaaatatttgaggaaaaaaaaagtacctctttactgaatatgtatatactgttttccttgtcatgatttcctaaacaatacagtataatggtgatttatataatatttacataatattaggtgtcataagtaatttagagatgatttaacttatatgggagcgtatgtgtaggttgtatgcaaatactacacgatattttatcagggacttgagtgtctgtggattttggcatcctcggggggtgcttggaaccagtccccctggatacctgaggagtgactgtactgtgtgatagcagcagtatgggatggaaagatgagatcctagtggtgcaggtacatcagttggacatttggtgtaactcaccaaaagtgaaaaaaacagagaaacaatatttgtggtgaattaagagattgagaagcaccgaattgaattgagaggtggttttgacttcctgaaatctccccacaccattttataactcctcagtttttccatttagctttaccttcttctgtgacagagattcattcattgtctttccttactatgctttaagcaactcttacacttctgtatagaaaaggtgtttcattccctcttttcattttgatcaacatatctatatagctaccctcaggattttgaagtcataaatgtgggcatttgggagggtagcatgagaagagcatttaattaaaaatagctatattgtgtttctttattttagagtactattaatcccgtagatgcaatatatcaacctagtcctttggaacctgtgatcagcacaatgccttcccagactgtgttacctccaggtaatttgggaaaatgtttcttagattcattgatgagaaaaaaataatttgtgtggctgtcatagcagtcttagctattactgtttatttttgattttccttgtttttaataaaagcactcaaaaaataatacagccaaaagtgaactgaaaaaagatgataatgttttgatattggggctttactgaagtgtgatgaaagtggttttgttattcaaagtgagatagaaaacaaacttggttactacgatttggattcactggtagaacaggattctatgactcagaattcatggctagcgaggaaaaattactataccttattctggataatccagggatgttccgttttggggtattctgtgtagctctgaacaatacaaatggtatgttcatggtagattttaagataatgagaaagtgaagagggaaatttatgatgcctactgatcacatgacatctgggttttgttttgttttttttttttttgtataaagcaatacatgcaattttttaaaaactggcaaagaagggctcagggccaatacctagctacactgactgattccttttgcccttttgttatatccaacatttctatgttctcgatggcatagtgaagtcagaaattgtactgtaaaatggaaaactctttttaaaagtactagtaagtatgtgaaatccttttgtgagtttttacttcttaagtgaattagcttaaactacctcttggggctaaagaggaacaggtactgtactccacttcagattttttgtggtttgaggctcagaaacacattatcatcagaagcatttgttggttttacagcatagttatactgcagtattggcctactgtggctggttttttgatatcctgcctggtatcttagtactctgtagcctatcatcattgagtttaagaggctaggaagtcaaaaggaaggagtagcatggaactagacttaatgaaataaagtttcaaaaattactggcctttaggattttgaatcccagacaattacagtcaatagaatgtgtgtttggctgtttctgtaccttattttatacgttcaaatctcctagaacctgttcagttgtgtaagtcagagcagcgtccatcttccctaccagttggacctgtgttggctaccttgggacatcatcagactcctacaccaaatagtacaggtacagatttgcataatttctttatgtctcataactctattaacatttgaggtttgtttgtgacctctgatgaggagggggaaagttgaagaaatgtgttgtatattttctgttggagatatgttagttttaacattatagttccatacatgaagtggttagctttgtgtttgaaagagaagctttagttaagttttatttatttttaagtttttaaaatttttatttttgagacagggtctcactctgtcattcaggctggagtgcagtggtacgatcagggctcactgtagttttgacctcccaggcctcaggctcccaagtagctgggaccacaggcacacacaccacacttggctgatttttaatttttgtagagaggagtctccctatgttgctcaggctggtctcaaactcttgggctcaagcagtcttcctgcctcagcctcccagtgtgctgggattatacaagcatgaggcaccatgcctggaataatttaaataaaataaaatattacagagttttgtttgtttgttaccttaacatttatttggtgatctatgttgactttttgaaaaatttactccagctagacttgcatactttcttattatgaagctgacacagaagtgcacagaataaaaactgcaagtcctctttactctccccccagtaatttgcatacatgtatgtgcatatacacttatgtcgtgtatttttattgtttttgtttaaacctaacttaggttatgtgtttctgtgacttgcgtttttcctttaacaaagaacacttagagcactttccatgtttgtaaaattaggtctacagcattctttttacagctgcctgggcaggtattgcttgttttttccactgatggaagcaatacttcagtgatatccttgtacagcacctttggcatatgtatatttttttagaaaacatttatcagtctttcacctttttgccagttttatagttagaaaaaagatacttcattttaatttgcattttctttttgtttgtttaaacgttttgttttttgtttttgagatggagtctcactctgttgcccaggctggagtccagtggcactgtctcgactcactgcaccctccacttcctgggttgaggtgattctcctgcctcagcctcctgagtagctgggattaaagatgtgcgccaccacgccccacaaatttttgtatttttagtagagacggcatttcactatgttggccaggctggtctcgagcttctgacctcaggtgatctgtccacctccacctcccaaagtgctgggattacaggtgtgagccaccgcgcccagcctgcattttcttaattcgtttaggcttagggtctttattttttctctgttttacagggatactatcagtgttagatactagatttatcttgttttaaaattaattaaatgtatgttgaataacttgtagaaccaaactcaaggaagcatctagcacttttcacactgttaaacctggaaaccaaaaccaaaaccactcttgaagaagtgggagatcagccccttttgttcatcctcagatttttttcccgggtaggatttttcctgtgtaatgatgaataattaccctgtgatttaaaaaattcgaattagtaaaagtactgatgctattactttgatctttactatttaacagcatgggcagttgcctttgaattttgaaagaaaaaaaatagctctcttacttgaagctcttgggaaaaggctgataagcaatttgaataatgaaattgaaatattttggctgacttctgtatttcctgagctgtgtcacctcttcttcatttaaaaaatagtacctgtttgttgttgttcgtatttttatgttggaattttgaaacaaccaaaattccaaaatttttctgtttggaaatacgtaaaactagcaacagactttgagaaagtgagaagctcttcttatgtatattaatttttgtaaaaattacttccagaagataatcttctgaaaactatttcagttgaaggtatttcaaaaatctaacactttagagtagatttaaagaaaaatttaaaattaaattcctgtgatttatatcttatttgatttttcatcctaacttcattttctccacttttctttcccttacttctcttgttaatacaaaaaagaaataaaggaataagataaaatgtttgctctcctaagtaaatctcagatcttttgtttgcagttcccactcaaacttttcttcttagatacagtttcacttgtgtgatcacctggaatatttgcatgctacttaatcatttgcaattcttgatcaattttttttttattccaataagaaaaagctgcttttctctcttactttttctgttgggtaataaaaagaatatgaagttatttactaataaggtgagctacctttggaatttccaaaataagcattaccttttaggggttaaactttttgtgttatctttttaaaatacctttgtgaatatgatgactaaatgtggcaaactgatgtgctttttttcacaactattgaaccatacatataggaatgggcaaaaaatccgtaagtgactctggattcttttttttttttttttgagacaaggtctcactctgtttacccaggctgtaatgcaatggcacaaacacaactcactgcagcctcgacctcctcagattaagtgatcctgccccagcctgtcgtgtagctgagaccacaggcacatgccaccatgcccagctaatttatttatctatttttttaagagatggggctctcactttgttgcacaggctggtcttgaactcctggcctcaagcagtcctcccaactggtcctcccaaagtgctggaattacaggcatgagccattgtgcctagcctggattcatttttattgctgtcttcaatttcttccagaactgtggccctggctttcagattgccatcagtgtcttaataaactttagtcttcaccagacatctgtagattagtataaattgcctgactgacagcccttaaatgctcagtaagttaaattgatcttaatactccatttgtcgattggtttgatacttttttgttcttgctttactagtagataaggtaccagatgatcatctcagagattagatggcaggcttctttgtctgggtcttcattaatttccatttctttagttagactatttaggaatagaaaaatgttcttctgaatcttttcattttctgcattcttctcatcgtagtcctctatttttatctccacctctgagcccctgacttaggtggaaaagaggagaggaatttggatggtgtgtgtattttccatgtgattgccaaaaaatattgaatgataggaatgtgatatcctgcaatattttaatgtttatgtggtcttaatattcttttcattttgcattcccagtggctcactgctgcatttttaggtatctggatctgcagtgtaaaataagagtcccggcatcccattgtaatcatatctgttgttggacttgcaactccacaactcatataatcaaaagggcccccttcctagtattaatgataatctttaattatagaatgaggacatagctttttgtttcatttatttaaaaggctgtgtcctcattttatatcatgatttgccattttctgtgtggagtttaaatgttgattttctttataaatactgtagcgacttttacaaacttaaccaaactcttttttgattttagaaaagtctgctttgactccatctccctagtttcttctctttcaccaatatttttctctaaaacccttttaacttcctaggcagtggccattcaccaccgagtagcagtctcacttctccaagccacgtgaacttgtctccaaatacagtcccagagttctcttactccagcagtgaagatgaattttatgatgctgatgaattccatcaaagtggctcatccccaaagcgcttaatagagtgag

SEQ ID NO: 9691 - DNA, 315 bp, Homo sapiens
cgtctttttttttttttttttttttttttttgagacacagtctttgtcgcccaggctggagtgcagtggcgccatcttggctcactgcaagctccgcctcccgggttcacgccattttcctgcctcagcctcccgagtagctgggactacaggcgcccgccaccacgcctggctagttttttgtatttttagtagagacggggtttcaccgtgttagccaggatggtctcgatctcctgacctcatgatcagcccgcctcggcctcccaaagtgctgggattacaggcatgagccaccgcgcccagccttttttg

SEQ ID NO: 9692 - DNA, 274 bp, Homo sapiens
ctttgtcgcccaggctggagtgcagtggcgccatcttggctcactgcaagctccgcctcccgggttcacgccattttcctgcctcagcctcccgagtagctgggactacaggcgcccgccaccacgcctggctagttttttgtatttttagtagagacggggtttcaccgtgttagccaggatggtctcgatctcctgacctcatgatcagcccgcctcggcctcccaaagtgctgggattacaggcatgagccaccgcgcccagccttttttg

SEQ ID NO: 9693 - DNA, 742 bp, Homo sapiens
ttttgaaaaaatagaggaactattcatggaataggccttagaggcaggctgcttgggttcaaataaaatagccctgccactcactacctgtgaccttggcaaattacttaacctttctgagtcttaatttcttttcctgtaaagaaagctgaaatgttctaccttagaagtttgttgtaaggtacagaacaagcgcatagtattcaatgaatgttagctatatgtacatgtatgtgtatgtgcaatacattgtattacgtgggtttcattaatgtcaaaacagattagggctgagtagtattatttttgcttctcaagttctgcacatttatttttaaagcaagttgtagaatgtaatgtgacatatttgagcctgaagttggctgaccaaggactgtggataagtgtagcatagttattttttctatcaaaaacaataacaaaaagattgagtacttttaatatacatgttgtcaaaagacaaaattacaacaaatttaatcatagatctaattggcttttattcaagatgcatgaatcggatcagcctccattctacaaaatagaatgagaggtctcactgggcagtggcaaagcagtgggttttgtaaggtgagaactgtaacaggaaaaaatgctgattggttaacatcagattacttttcttttaagggttaaaacagtgagcatttccgtattacactgattcgggtagactggaatctcctattttcagaaaaaa

SEQ ID NO: 9694 - DNA, 813 bp, Homo sapiens
aatccccccagttttatttttttattttttgtcatatctgattcaatacttttatttatttttattttttatttttgagacagcatcttgctctgttgcccagtgtggagtgcagtggtacaatcttggctcactgcagcctcaacccccgggctcaatcaccccaatttcatatcagactcacttgcttataacagcacacttcaaatccttctcagaccattttccaaccactaagaatcagtatatttcatgccagcttctgtcctagatactatggctataacacagttttcaaggaactcacaatttggagagagagagagaaatactaagtatgtaactagctgtcatagttctttaaaaaaaaaaaaagaaaaaaaagtaaggccaggcgcggtggcttatgcctgtaatcctagcactttgggaggccgaggcgggtagatcacctgaggtcaagagtttgagatcagcctgaccaatatgatgaaaacccgtctctactgaaaatacaaaaattagccgggcatggtggcatatgccatcatcccagctactcaggaggctgagacaggagaatcacttgaatccgggaggcagaggttgtgtagagccaagatctcgccattggactccagcctgggcaacaagagcaaaactctgtctcaaaaaaaaaattaaaataagtaaataaataaaaataaaaaataataagatagacctgattgtggtggctcatgccccgtaatcccagtgctttggaaggccaaaatgggaagatcacctgaggccaggagtttgagaccagcc

SEQ ID NO: 9695 - DNA, 813 bp, Homo sapiens; identical to SEQ ID NO: 9694

SEQ ID NO: 9696 - DNA, 306 bp, Homo sapiens
tatagatcactgacaaagtatctgttttagcagatagggacaaagtttaaataatttggccaaggtcatagtagaccaagatttggacccagcacaagcatcctctttccaggaaaccttccctcaggcccttagttggtttaagtgccctctctctgtactattagcatatgcacacacattcattttagcgttgactttaataataaggatgtttaccatgtaccagatacatagtacttgcacctgtgttatctatgtttaagtgttttgtaggcattagttcatttaagcctcataactgcc

SEQ ID NO: 9697 - DNA, 306 bp, Homo sapiens
tatagatcactgacaaagtatctgttttagcagatagggacaaagtttaaataatttggccaaggtcatagtagaccaagatttggacccagcacaagcatcctctttccaggaaaccttccctcaggcccttagttggtttaagtgccctctctctgtactattagcatatgcacacacattcattttagcgttgactttaataataaggatgtttaccatgtaccagatacatagtacttgcacctatgttatctatgtttaagtgttttgtaggcattagttcatttaagcctcataactgcc

SEQ ID NO: 9698 - DNA, 954 bp, Homo sapiens
gggaaatgagttaagaggggtcccgaaatctgtagagtgctggtttgggggctcgccatcccaaatctgttccagcctgtcctgaggaaaatggagtgtaattaagggtgagcacccttaattcttgagctgtctttccagatacacctcgctgcttggagattcagtgaacctaagaaaaggtgcaaaaactatttaggtcaacttggagagcaggggaaggaagaaataagaaataaagaggtaccgaaagctggaacatacttcggagaaacacctaggccagccctctcactggaaacacagcacagcacagaacaaaacagacacagctcctgtcccgcgggctgacagccaagtaggagagatgaatgttcaacaatcttgcacataagcagtaagtgccatggtgttagccagcgttctccagagaaacagaaccaataggatggatatacagagatatagaaaaagatttattatgaggcattagctcccatgattatggacgctgagaagtacccaggatctgccctccgcaagctggagtagttccagtccgcgtctgaaggtgcaagaatcagagcatggatgtctgaagcagggaaaatatggtgtcccacctcaaagaagagcaaatttgcccttcctctgcctttttattctattcaggtccttaacagattaaattatgcctgcccatagcggtgagggcggtcttctttactcagtctactgattcaaatactaatctcttccagaaacagcctcacaaatacacctagaaataacattttaccagctatttgagcatcccttagcccagtcaagttgacacttaaaattaaccatcacggtggctcaagcctgtaatcccagcactttgggaggccgaggcgggcggatcacttgaggccgggagttccagacctgcctgaccaacatggtgaaacc

SEQ ID NO: 9699 - DNA, 829 bp, Homo sapiens
gggaaatgagttaagaggggtcccgaaatctgtagagtgctggtttgggggctcgccatcccaaatctgttccagcctgtcctgaggaaaatggagtgtaattaagggtgagcacccttaattcttgagctgtctttccagatacacctcgctgcttggagattcagtgaacctaagaaaaggtgcaaaaactatttaggtcaacttggagagcaggggaaggaagaaataagaaataaagaggtaccgaaagctggaacatacttcggagaaacacctaggccagccctctcactggaaacacagcacagcacagaacaaaacagacacagctcctgtccccgggctgacagccaagtaggagagatgaatgttcaacaatcttgcacataagcagtaagtgccatggtgttagccagcgttctccagagaaacagaaccaataggatggatatacagagatatagaaaaagatttattatgaggcattagctcccatgattatggacgctgagaagtacccaggatctgccctccgcaagctggagtagttccagtccgcgtctgaaggtgcaagaatcagagcatggatgtctgaagcagggaaaatatggtgtcccacctcaaagaagagcaaatttgcccttcctctgcctttttattctattcaggtccttaacagattaaattatgcctgcccatagcggtgagggcggtcttctttactcagtctactgattcaaatactaatctcttccagaaacagcctcacaaatacacctagaaataacattttaccagctatttgagcatcccttagcccagtcaa

SEQ ID NO: 9700 - DNA, 1593 bp, Homo sapiens
  SITE (195): n equals a,t,g, or c
ggccgccgcaccgccgcctgccccaccgcaccacggggccgccgcgccgccgccgggccagctcagccctgccagcccagccatccgccgcccccggcgccggcccaccagtgcgccgggcctgcagttcgcttgtgcccggcagcccgagctcgccatgatgcattgctcttactgggaccacgacagcaaganccggcgctgattcgcgcctcgatctctgagagcccaccgcatgccggtgcagacggatgcgaggatgcagggacgcgcgacgccggccccggtcgcagccgacgacgccgccgccagcctgacctcacaccctctgggcccgcctctggagccagcgcccagggtccctctgtgctttttcgctttcctaagctcctgtcgctcctctttgtcccctcagtttatgtcctcctgtgctcacctccctgacctctgtgaccttgcactcccctggcctgaagctgcctctctgcgcgctttctactgggctcgtctctttccggagccccagcgtctcctgcccaaattcaccgcggaaagggcccggggcggaggtgcgaccgggcgtcggcagcgcagacctcttggccttctctcacaggtcggtgcgctcgctctccgcgttccccgcccgactgccgtgcagtccatggctagacgcgccggacaggactgatggcgggaccgcgctgcccgagaaagggacggaccaatacgtgtgtttgctccgcgaaccctcttgaagctgttcagaagccgcttgccgcggggcccactaggcggggcgggggttgggacccagcgggagccggggcagcctggctccacggcctgtactcggtttaacaccgcgggcgggcgcggagggaggctgcgtttcctccgctatcagtcccgtcgcttcgggcacctccgggccccggcggctggctaatgttttgtttgaaagatcggtggaactttttaagagagtatttaaaaaaaaaaaaaggaaaaaaaattcaccgggcaaccggggaagtattgtggccttggagtttgctaaatccaaatatgaaaatcaaaagctttagtattcctcatcttctcttctggaagatttgcgttagagtttttgttgggccttcaaaaagctgtgttcagagttaggagaatatatccaataaaagatggtttcgtctaccaattggggaagtttcaccctctccctatctgaagaaaaaaatcaaaaacaaatgtccccggatctttcgatgcaagtcctggaggcagggagatcactgcctgcctggcccacgctgctgggacggctcgtcctccctgctttttgtttttcaaacctcctgcttctcccaccttgggaaggagaaatgtgaaacccggcagcggccgacctaggcggtcttgtggcccggagccggcccggcccgaaaaccatagacctggttgtactgtagcttgttgtttgggggaccaaattttctagagagaactagagcacttttgttgtgtttttttgttttgtttttgttttttgccttgtcgattcccgaataaattttgtgttccttcttttaa

SEQ ID NO: 9701 - DNA, 353 bp, Homo sapiens
tttctctctcttcctttactgagatccccaaataacgaattaagatccatgcttccgcgcaggcacacaggcgtttgacctggttgcagtctggttctcccaggcggattagggggtggtcggctttcactcttctgatgggatagatgacttccgacttctgataggatagatccgccggttcttgcgggctgctgctcagctgagactagaccccgcacccagccctcactgccccccccccgtctatctcggggcctggccagcaatgtggcggcaggtccaggccggctggtgggccaggagcggttttgcgccacgggaatgagcctgcaggcctctcacttcagccc

SEQ ID NO: 9702 - DNA, 741 bp, Homo sapiens
gattaacatgtctttctgacctttcccttgaatcatgaatttgaatcctgtggatgaccatatattgaagcctctgatcccagaaaggtaataagctgaaagttgaactgagagaccagataatagaggttaatacccttgggataggaaagaaaacttaaagggtaactgatggggttatccttagcaaaattctatccctatgagatgaccctaagtggagccatctctatgaggattaatccagagattgttgcacacctggcagtgtcaggtctgggaaaacagttgctgatgttttcatggagtgtgaaatactgaaagctgcgggcatcccttggggaccactgacccacactttgaagaaccctcaatgagtctgaaagaggttcagtatctcttgggaaggatgtgttccaggctccaggcctagtcttacatggccagtggggttgaaagactgtgcccctgcaatggtcttttcctaagacagttgaacaaagttccaagtctgtctgtcctattttaaccatctttaagaagcacaaaggggatatgagaaaaacagatgctgaaatgaaaattttaactgatatcttacttatctcacaagtcgtgtaaagaaagaaatgatatggtcgaatattagattagatggtttaatgatgttttgagtgttatatatgagctatgatgagacctagaaaataaagtaaaaataaaaaatatataagccatgaa

SEQ ID NO: 9703 - DNA, 1383 bp, Homo sapiens
cctgtgccagcgcgaacccccagcctgtcatgctgacatcatcgatggcagcgtccctgtcttttgctcccccagccctcccaaaggctgagttagcctctatcatctggaatacagtgtggcttctgttttcctaattgaaccctgacttactacctttataatgtttctctctgcttatgtagtttttgatgagtcggaaggtccttgccacgctcacagtgtgtgtactgtgtctcatctatatgcactctctgatgggcaaggaggtatgaattacgactgaagcccttaccacatgccttacacttatagggcctctctcctgtgtggactctgagatgaacacgaagatctgaattctgactgaagtctttaccacactcatcacatttatatggtttctctctggtgtgatctctttgatgtaagtgaaaatatgaactgtaactaaagcactttccacacactttgcatttatatggtttttctcgagtgtgaactcagatgagtgtgaagaacagagctatacgcaaaatcctttccacacacattgcatttgtatggtttctcccctgtgtggactctctggtgaatgtgaaggtgtgtactttggctgaagccctttccacactcatcacacctataaggtttctcccctgtgtgaaacctccagtggacttgaagaacggagcttgaactaaagcacttgccacactcactgcatttgtagggcttctctccagcgtggactctctgatggacaagaaggttggagctctgatcaaagcccttcccacactcttcacttttatagggcttttccctgtgtgtactccctgatgaatacaaagaagtgacctaaatccaaaccctttcccacatgcatcacatttgtagggcatctcccttgtgtggactccatgatggttataaaggaaggagttgcacctgaagcccttgccacattctttacatttgtagggtttgtttcctgaagggactttctgatatctgggaaggtctgagctctgtttgcagcccataggccattcgtggaattcatagggagtctcgccagagtgagttttacaatgaacgataagatcttggctctgactaaagttctttccatactggtcacatttataagatttttctcctaggtgagtgctgtgatggacatgaggatctgtatcatctgcaaagggcaccccacagttattacatgtgaaaggctgtggtaatacatggactgcattatgttgttcaactgttgatttcataccaaagtttttcctgcagttgggatgtctaccagggtcctctcctttacattcttgggactcatgatgatcatgtgaggtccagttgaggctgtca

SEQ ID NO: 9704 - DNA, 2222 bp, Homo sapiens
gaaaataatgaatgtggaaaaccccctcagagcattcaccttattcagtttacaagaactcaaacaaaagataaatgctatggatttagtgaccgtattcaatctttttgccatggtacacccctacatatacatgaaaaaattcatggaggaggaaaaacctttgattttaaagaatgtgggcaggttttgaaccccaaaatatcccataatgaacaacagagaattccttttgaagagagtcaatataaatgtagtgaaacctctcatagttcctcccttactcaaaacatgagaaataattctgaagagaaaccttttgaatgtaatcagtgtgggaaatccttcagctggagctcgcatcttgttgcacatcagagaactcacacaggggagaaaccttatgaatgtagtgaatgtggaaaatccttcagccggagctcgcaccttgtttcccatcagagaactcatactggagagaaaccttacaggtgtaatcaatgtgggaaatcctttagccagagttatgtccttgttgtgcatcaaagaactcatactggggagaagccttatgaatgcaatcaatgtggaaagtcattcaggcagagctataaacttattgcacatcaaagaacacataccggagagaagccctatgaatgtaatcaatgtgggaaatcatttatccagagctataaacttattgcacatcaaagaattcatactggggaaaaaccctatgaatgcaatcagtgtgggaaatcctttagtcaaagttataaacttgttgctcatcagagaactcacacaggagaaaaaccctttgaatgtaatcagtgtgggaaatccttcagctggagctctcagcttgttgcacatcaaagaactcacactggagagaaaccgtatgaatgtagtgaatgtggaaaatcttttaaccgcagttctcaccttgttatgcatcagagaattcacactggggaaaaaccgtatgaatgtaatcagtgtgggaaatccttcagccagagttatgttcttgttgtacatcagagaactcatactggagaaaagccctatgaatgcagtcaatgtgggaagtccttcagacagagttcatgccttactcaacatcagagaactcatactggagagaaaccatttgaatgtaatcagtgtggaaaaacatttagcttgagtgctcgacttattgtgcatcaaagaactcatactggagagaaaccctttacatgtattcagtgtggaaaagctttcattaatagctataaacttattaggcatcaggcaactcatactgaagagaaactctatgaatgtaactagtttgtaaatcagctgggatttcttcctttttatttcattcttttaaaaaatttattttaaggtagtacatgtagttggaagaactactataaaaacaatatatgtgggaaaacttccagccctctgttaattgtgtgtctcaaatttgttctggaaaagaaagggggaaagtctatgaacgacttttcaacctggcaattccatatacaatgttaaacttgattcttatgacatattcctatgaaaataataaatactggcacttttccttgcagaaagcactcagacctgaatcagagaaaatcatatgccaaagccaactgccagtgttagacctctttttccataaagagtaaatggaatgctaacactagtgggcttattgagaaaatttaaaggttgctgtagtgtttagaacttaggctggaaaaccatattttagtgcatcattttactacatgatcttccaattagatagcttgtaatctgttccttacagcacttgctgttgttacatgtgaagattttataaattttaggaaagtgtctatgatatatagtgaaaagtgtgggaaaagaatatagaaataatattcacttctaaaaccattatgataaaatatttgtgtatggattagaatagaaagggattatggatgtatctattcaatttctcagtttatgttgggccttcctttttggaatgtacgctgttatgctatgataaatgatataatgagtaaaaattattcaaagccaaaaatgaaatacaaagatttccttctttgactatttaggaaagactaagcaaccaaatagcaaagatccctcaggataatgaggtttatgtttggaatagcatgagcagattactacttagg

SEQ ID NO: 9705 - DNA, 8928 bp, Homo sapiens; identical to SEQ ID NO: 6916

SEQ ID NO: 9706 - DNA, 529 bp, Homo sapiens; identical to SEQ ID NO: 6917

SEQ ID NO: 9707 - DNA, 625 bp, Homo sapiens
tgtagaaacggggtcttgctatgttgcccaggattgtcttgaactcccatgttggcctctcaaagtgctaggattacaggcatgaaccaccacacccagcgaagagcaacctctctgatgaggcttcctgactccctctccctatctaaatctggctctcataactgtacttgtcccttaagacacttaccagaattggtaatcaaaaattacttttgtctaattatgtgtttcctatctgctctcctttcagactccaagggccctacataaggaacagtaggaaaaccaagtagtccagagtggctacaggataatagaaatgcctagaactgtgcttcccagcaagtagaacagaacagtaggtaattgttcatccatgaatatactggggccaaatctgtgaaatccagactggtaaaactgtatttaattgcataagcagaagggcacctctgtgagcttctgagaagaatggcaggcactgaagtaaaaccttagcgagattaacctggcaatcttgtacagaaacaattcacactgggaagaggaaaaagtgattaactttgagactactgttgaaacctgaatccacaggaagaggttaaggtttgggagtgtggga

SEQ ID NO: 9708 - DNA, 625 bp, Homo sapiens
tgtagaaacggggtcttgctatgttgcccaggattgtcttgaactcccatgttggcctctcaaagtgctaggattacaggcatgaaccaccacacccagcgaagagcaacctctctgatgaggcttcctgactccctctccctatctaaatctggctctcataactgtacttgtcccttaagacacttaccagaattggtaatcaaaaattacttttgtctaattatgtgtttcctatctgctctcctttcagactccaagggccctacataaggaacagtaggaaaaccaagtagtccagagtggctacaggataatagaaatgcctagaactgtgcttcccagcaagtagaacagaacagtaggtaattgttcatccatgaatatactggggccaaatctgtgaaatccagactggtaaaactgtatttaattgcataagcagaagggcacctctgtgagattctgagaagaatggcaggcactgaagtaaaaccttagcgagattaacctggcaatcttgtacagaaacaattcacactgggaagaggaaaaagtgattaactttgagactactgttgaaacctgaatccacaggaagaggttaaggtttgggagtgtggga

SEQ ID NO: 9709 - DNA, 285 bp, Homo sapiens
ggaaacagaagggagtgatattattaagagtttttataaagtaaaaactcaatggaaaggaatgtcaaaaatgactttaagatttcaagccaggacaaccaggagaatatagaaaagacagggaaagaagctagctggtttgcaggacgaaatacaaattcaattttttgaatttgaatttgtactgacataagcagaaatagtcaacagaagaaagagactagaggttgaaagaaaagttagaactaaaggtatatcttatgccacatgcatgtacaatcactg

SEQ ID NO: 9710 - DNA, 316 bp, Homo sapiens
ccatcccttttcaggaaacccagaaggcaaactctaaggcttaaagaatccagtaatttaagtcgtccttattttaaagaaataaggacggttctcccttcaagtgggcgcagctgctacctggtatgacagtacagggccaggcagtgggctgtttaaggcgcatgcagcctaaagatgatggctaccagatttcctaggctgagctcaaagcgcagtgaggggtactttcaaaaagttaaacaatgtttgcaaacatgctcccccatgccacgttaaatgtccctcaacactagcctgaaagttccaaatgcct

SEQ ID NO: 9711 - DNA, 285 bp, Homo sapiens; identical to SEQ ID NO: 9709

SEQ ID NO: 9712 - DNA, 316 bp, Homo sapiens; identical to SEQ ID NO: 9710

SEQ ID NO: 9713 - DNA, 686 bp, Homo sapiens; identical to SEQ ID NO: 8687
  SITE (95): n equals a,t,g, or c

SEQ ID NO: 9714 - DNA, 364 bp, Homo sapiens
aaccaccatcaaacaggattttcgcctgctggggcaaaccagcgtggaccgcttgctgcaactctctcagggccaggcggtgaagggcaatcagctgttgcccgtctcactggtgaaaagaaaaaccaccctggcgcccaatacgcaaaccgcctctccccgcgcgttggccgattcattaatgcagctggcacgacaggtttcccgactggaaagcgggcagtgagcgcaacgcaattaatgtgagttagctcactcattaggcaccccaggctttacactttatgcttccggctcgtatgttgtgtggaattgtgagcggataacaatttcacacaggaaacagctatgaccatgattacgc

SEQ ID NO: 9715 - DNA, 364 bp, Homo sapiens; identical to SEQ ID NO: 9714

SEQ ID NO: 9716 - DNA, 288 bp, Homo sapiens
attaagcgcggcgggtgtggtggttacgcgcagcgtgaccgctacacttgccagcgccctagcgcccgctcctttcgctttcttcccttcctttctcgccacgttcgccggctttccccgtcaagctctaaatcgggggctccctttagggttccgatttagtgctttacggcacctcgaccccaaaaaacttgatttgggtgatggttcacgtagtgggccatcgccctgatagacggtttttcgccctttgacgttggagtccacgttctttaatagtggactctt

SEQ ID NO: 9717 - DNA, 288 bp, Homo sapiens; identical to SEQ ID NO: 9716

SEQ ID NO: 9718 - DNA, 10951 bp, Homo sapiens
tacaggttttagatggagcaggattagatattgatttccatcttgcctctccagaaggcaaaaccttagtttttgaacaaagaaaatcagatggagttcacacgtaagtaatctcttttagttgagtttcattgctgaataataccagtgggttatctgcagggcatggaaagttagcacatttgatactacatatcaatattagataattccatatgatttaaaacagttcatgatagtgtgccatctgataaacaaaaacatcttccattaacctttctatttttgtttaagcgttttcttttgatccaggctaaattttttctgtgctttggttagtaaattagtattcccctggtattccattcaatctatcgtggcattttaaacctgccttctggccagcacaagctttctattttaacttaaagctactgttccaggtatatgtcttaaagtttcttgagctgctggctatatgccatttttgtccatagttttctttcttaaaacaggacagtatatctttgtgtgtacgtaaattttttttttttattcagacctcattcgttttaggtaattagaaggcctgaaagtaaaagatctgatcatagggaactatataaaaataaaatacttgttataactctttgagttcagagttcagcaaaagaccatatattcttcttctgacacctcacttccctcttttcatatctcactggtatgtttcctggttccattctattatcttactataacattttcttaagtcagttttgttatatgtttaaactgtgagtctgtaggaagaagagcaaatatggagtatctagtatttgctataaacaagggttggcatgttataggcttctaaattaatctttccattacactatgagatagagtctttgactcaagattcccattttatagacaaggaggctcagagaagtcaaataagtctccagggatacacatgcagggtggagacaggatggaccaaaactctttgctttctaccatatgcttagaacatccctggtacataacactattgtaagaactagctattattaaaattattggtctttgttaaccaaaatgcctgatacataatcgatactcagtaaacactgaatacatgtatgaatggatgagaggaaaaaaatgtctcaacaataattttttaagatactcatttaaaatgcattttaaatggcattttacctatgcagagctcagaaaaatatttgcataagctattactaaataagatagaaatagtaattttaaaagtcagtttatattgatatacttggaattaactgttttctctttgataggtgtataagaagtaaaaatgggccaggcactgcggttcacgcctataatcccagcactttccgaggccaaggtgggtggatcacgaggtcaagaaattgagaccatcctggccaacatggtgaaaccttgtctctactaaaaatacaaaaattagctggtcatggtggcacacgcctgtagtcccagctacttgggaggctgaggcagaattgcttgaaccccggaggcggaggttgcagtgagctgagatggcgccgctgtactccagcctggcgacagagactccatctcaaaaaaaaaaacaaaactaaaaatgtagttcatcttttaagtttcagaattttaaaaatgttcaaaatgtatgtcagtctttatttctccccaattatttgctccctttttgagataataaaattcactgttagaaaaataagtatcttactgcttccttgtgtagaattacctctcattaaataattgggagaaaataattgagtttataatagttcacatttattgcattcttttgatatgccaggccagtgttctcagcacttttcatgtactaatttttttattcttaaccacagtcctatgacgtaaatattattttaccaatggggaaactgaggcatagaacaattaagttgctgaaggttacacagctagtgaacggcaaagccaggatatacattcaggcagtccaactcactattaatcactataccagatttacaaattttggtttttttttatttttattttgagacggagtctcactctgttgcccacatggagtgcaatggggcgatctcggatcactggaagctccgcctcctgggttcacgccattctcctgcctcggcctcctgagtagctgggactacaggcgcccgccaccacgcccggctaattttttgtctttttagtagagacggggtttcaccgtgttagccaggatggtctggatctcctgacctcgtgatctgcctgcctcggcctcccaaagtgctgggattataggcgtgagccactgtgcccggcctacaaatctgttttttaaacattaaacaaagcttttatctttagctatattaattttgtaagagcagcaaacatctgagtatgtcactggtttttcttaagtaggctttttctttttcttttaaatgtaatttcttttttaaagacaaggtctcactatgttgcccaggccagagtgcaatggtgtgaccatagcttactgcagcctaaagtactgggctcaaccaagcctcccgagtagcttggactacaggtgtgtactcggctaattttttaatttttgtagagacaaggtctcacttttgcccaggctaatctcgaacccctggcctacagtaatcctgcctcagactcccaaagcgctgtgattgtaggtatgagccaccgcacctggccctgcttttaactttcgctaatatgggaaactaattttaactagggtactggtaattcagatattattcatttttttcttcagcacttggcataattaatgatgggctgaattacctttatagaattaaataataaaatataaactagttttatttaattctcaaaaaaagcatttaggatcaaacataaacatctataagggagccagtggcagttaataggcaaaatcagtaagaggcctggaagaagacatttaggacaatccatcactgcttttgaaaacaaaactcagtttaatctcagttgtagggtaggttggcagtcatatctgcatatgaattgaactcatgataaaatacttttaataatgtataaatattaaagtttattatgagttatgtatacaggtttttaattctatccttttccaaaaatgaggtcactaaccataatttactgagtaaatgccaaacatgtctaagttgtacttgaacatatatattttcaggttgcttctttcccaagaaattataaattatctttcaatactaaggaaatttatgggtaagctgtccaattactataaactatgttatttgttttttgttttgttggtttctttttttttttttttttttttgagacaggatcttgctctgttgcccaggctggagtgcagtggcatgatcatgcctcactgcatcttcaaccttccgggctcaagcaatcctcacactctgctaatttttgttatttttttgtagagacaggattttgccatgttacccaggctggtctcaaactcctgagctaaagtgatctaccagccttgccctctcaaaatgctgggattacaggtgtgaggcaacacactcagcctgttacttcttatttttacctttagttgcttttcatcacaaatagaaatacaggtaacttaaaacatgtacttttttttatacagtgtagagactgaagttggtgattacatgttctgctttgacaatacattcagcaccatttctgagaaggtgattttctttgaattaatcctggataatatgggagaacaggcacaagaacaagaagattggaagaaatatattactggcacagatatattggatatgaaactggaagacatcctggtcagtatggtcttctaataaaataaaaattattaacagccagaggccttactatggtaataagttactgaactaagcattttatctgcattatccaggaaaatctgtttctaatattttatttttgccataaatactttgacctcaagtatcagcttaattttattttatattaatatagcccttttatagttttcaaataacttatcttccaggaccctattataaaaatagcttcagatgtgcaaataagactgcatcttggtaagtttgttttataaatgtgcagttagaatttttaaattataaatagattatgcttctgattatacagcaggcatatgaaaagtaaaatgttttctaatttcacaactattttgtggtattaaaacattgggtgttttactgaatactaaattgttcagataaacatacaaagaaggaaatattataaacacatgcattatgtaataggtaaatacctaaagttatatcaattgggtttttaaaaatgaaatcatttgccaggcatggtagcaggtacctgtaatcccagctactcagaaggttagggggaggatcatttgagcccagttcaaggctgcagtgaaccatggtcacacatataaatagatactacactccaatatagcaagaccccatctctaaaaacttaatcatttgaccaggcacagtctcaggttgcaatgagccgagattgtgcctaggcaaactccatcccccgacaaaaaaaaaaaaaaaaaaaaccttagtcatttcctttggttgtgtgaggactaagaaagagataatgtacgtaaaactcctgatgctatgccactcagaataatttcatgttacctattttcaattcacagtagctttgttcccttgttaaataactacttataaacaatataaatatgtcaggagaactattatataaccttacagagaatctctaatgtaatataaatagtacctgccctttaattgaattgtgcagccatctaacttaaaattgtgtttggataaaaaacataaagcatattttgaaaaaaactttttttgagacagggtctcactcactctgttgcccaggctggagtgcagtggcaccattatggctcattgcaatctcaacctcctggactcaagtgatccccccacctcagcctcccaagtagctgggaccacacttggtgctaccatacccatctttttgtagaggcagagtctgtctgtgttgtccagcccagtcttgaactcctgggttcaaggggtcctcctgccctagtctcccaaagttccaggattacaaggcatgagtcactgcacccagcctcattttttaattaagttaaaatttctgagcattctttaataataaaattattttatttatctccaggaatccatcaacagcatcaagtccagactaagcaaaagtgggcacatacaaactctgcttagagcatttgaagctcgtgatcgaaacatacaagaaagcaactttgatagagtcaatttctggtctatggttaatttagtggtcatggtggtggtgtcagccattcaagtttatatgctgaagagtctgtttgaagataagaggaaaagtagaacttaaaactccaaactagagtacgtaacattgaaaaatgaggcataaaaatgcaataaactgttacagtcaagaccattaatggtcttctccaaaatattttgagatataaaagtaggaaacaggtataattttaatgtgaaaattaagtcttcactttctgtgcaagtaatcctgctgatccagttgtacttaagtgtgtaacaggaatattttgcagaatataggtttaactgaatgaagccatattaataactgcattttcctaactttgaaaaattttgcaaatgtcttaggtgatttaaataaatgagtattgggcctaattgcaacaccagtctgtttttaacaggttctattacccagaacttttttgtaaatgcggcagttacaaattaactgtggaagttttcagttttaagttataaatcacctgagaattacctaatgatggattgaataaatctttagactacaaaagcccaacttttctctatttacatatgcatctctcctataatgtaaatagaataatagctttgaaatacaattaggtttttgagatttttataaccaaatacatttcagtgtaacatattagcagaaagcattagtctttgtactttgcttacattcccaaaagctgacattttcacgattcttaaaaacacaaagttacacttactaaaattaggacatgttttctctttgaaatgaagaatatagtttaaaagcttcctcctccatagggacacattttctctaacccttaactaaagtgtaggattttaaaattaaatgtgaggtaaaataagtttatttttaatagtatctgtcaagttaatatctgtcaacagttaataatcatgttatgttaattttaacatgattgctgacttggataattcattattaccagcagttatgaaggaaatattgctaaaatgatctgggcctaccataaataaatatctccttttctgagctctaagaattatcagaaacaggaaagaatttagaaaaacttgagaaaacctaatccaaaataaaattcacttaagtagaactataaataaatatctagaatctgactggctcatcatgacatcctactcataacataaatcaaaggagatgattaatttccagttagctggaagaaactttggctgtaggtttttattttctacaagaattctggtttgaattatttttgtaagcaggtacattttataaaatgtaagccctactgtaaggtttagcactgggtgtacatatttattaaaaatttttattataacaacttttattaaaatggcctttctgaacactttatttattgatgttgaagtaaggattagaaacatagactcccaagttttaaacacctaaatgtgaataacccatatatacaacaaagtttctgccatctagctttttgaagtctatgggggtcttactcaagtactagtaatttaacttcatcatgaatgaactattatttttaagttatgcccatttataacgttgtttatgactacattgtgagttagaaacaaacttaaaatttggggtatagaacccctcaacaggttagtaatgctggaattcttgatgagcaataatgataaccagagagtgatttcatttacactcatagtagtataaaaagagatacatttccctcttaggccatgcgagaagagcagcttagatttccctactggcaaggtttttaaaaatgaggtaaatgccgtatatgatcaattaccttaattggccaagaaaatgcttcaggtgtctaggggtatcctctgcaacacttgcagaacaaaggtcaataagatccttgcctatgaatacccctcccttttgcgctgttaaatttgcaatgagaagcaaatttacagtaccataactaataaagcagggtacagatataaactactgcatcttttctataaaactgtgattaagaattctacctctcctgtatggctgttactgtactgtactctctgactccttacctaacaatgaatttgttacataatcttctacatgtatgatttgtgccactgatcttaaacctatgattcagtaacttcttaccatataaaaacgataattgctttatttggaaaagaatttaggaatactaaggacaattatttttatagacaaagtaaaaagacagatatttaagaggcataaccaaaaaagcaaaacttgtaaacagagtaaaaatctttaatatttctaaagacatactgtttatctgcttcatatgctttttttaatttcactattccatttctaaattaaagttatgctaaattgagtaagctgtttatcacttaacagctcattttgtctttttcaatatacaaattttaaaaatactacaatatttaactaaggcccaaccgatttccataatgtagcagttaccgtgttcacctcacactaaggcctagagtttgctctgatatgcatttggatgattaatgttatgctgttctttcatgtgaatgtcaagacatggagggtgtttgtaattttatggtaaaattaatccttcttacacataatggtgtcttaaaattgacaaaaaatgagcacttacaattgtatgtctcctcaaatgaaaattctttatctgaaattttaaaagacattgattccacatgtaaggatttttcatctgaagtacaataatgcacaatcagtgttgctcaaactgctttatacttataaacagccatcttaaataagcaacgtattgtgagtactgatatgtatataataaaaattatcaaagaaaattaactgccagtcatttgtaaatgctgtctactcctgaaagccttccttcatctctatttagttaataatgtgctctctcctcctgttttgaaaccccatagctctctacacctcttattgtacatcactctactttgcattggagttctgtttctatatgtacttattcacctgttgcctaaacatgcactgttcctaaaaggtacagtttttgctcaaaatatatgaaaggaaagataatcagttcttaaagtttggtatgctaaataagcacccagggaacttacctgctccacctcaccccagaaattgattattcaggtctggaatatggctcaggattcttaattttcaaccaacacaatatagaatcctgtcagttatccttggatcatttgctaagtgatcttgcaaaatcaaaactcctttgagactatttcattttcagaaatattttaaaacttgttcagaaacatcttaaaacttgttagcatataggaaaagtacaatgcttggtgtaggtaggttattatttggtcatttccctcaaaccatccagacaagccactcttctaccacaagctggtagaaatccttaggcacctttctgcttctgcactgctatcactttcaggtgtctaaggcttctggaaggctgttgtcataacctggagccatacacctaatgtacgtctggggaaaggacaccaattaaagaatctagagctaggatgatgttacataagacagggcacaatggagatggactctggatccctgcatctgaaagaaaaaggcaagaaaatgcagggcagggaaaatcctgaaggtcttcactgaccatgaattaaaatcctaattgacagttttacaaacaaaaaccctcgttttagtacttgtgttgtttttgtttctgttttaacaagcttagatttattattgtgccttttatggaagatgaggaagaaataggaaagcagtaaaatgaacaatgagaatctgttacccaaactgatataaactccctcagaaagaaagatactactccctaatcctggaagtgttaagtggcaataatgatcaaatgttgtaaaggggattgttactacagctaatatgaaatgggaggctggactaaatctaacctttctacccttgatttcaattctaaaaggacacgtaataccattgcagaaagaaaagacagttccaaatgataaattttagagttgttttgctaggatgcaagagaaattggataagtggaccactcatacgttgctggtgagatatgaaatagtagagccactgtggaaaatattcttggcagtttcttataaaactaaacatacatttaacatataactggcatttgtactacttgacagttatccctgagaagttaaaacttaacattcacaaatgttacatagcaccttcatttataatagccaaaacccggaaacaacctggatgtccttcaaaaagagtgaatggtttagtatgtccacaccatggaatactaaatagtaatatgaaggaacaaactactgatacatgtaacaaattgcatggacctcaagggaattatgcttgggtggtttggggggacaatcctaaagttttacacactgtatgattctgtttttgtaacattcttaaataataaagctatagagatgggaaacaagattcgtggttgccaggtcttgggactgaagggaaggagaatgtggctataaagggagccttgtggtggaaaagttctgtagtttgattgtggtgattacataaatatacatgtgaaatgttagaagtatttatagctgaaacatattagtatgttggtatatacatatttctgactaattaatttcgccatgttgcccaggctggtctcgaactcctaagctcaagtgatgtgcccgcctcaacttcccaagtgctgagattacaggcgtgagccaccatgtccggcctgttttttcctatgcatgcataattacgatcaagtttaatttgtaattaggcacattaagagattaacaatagctaacaaaatggaacaattacaacaatatattgtaataaaagttatgcaaatgtggtttctctctctcaaaatatcttgtactcacccttgtgaggctgtgagatgtcatacaatgcctacatgaagagatgaaatgaggtgactgatgtaggtataagtgatgtagttaggctacattatcatcaaaataacttcgggtaatcctggatcactgagccaaggtaatgttgatggttaaggagcagacaatgttgatggttggggatcctcaataggtgaaggatttctattttggggtctttttgctgaaaaattttggaagaacactgtaaccagaagttgttgactcttcagctcatcgaagtgttgctgcagagactgtaatcctttggtgatcatattggtaactttaatgctgtgtctcatctgaggatcgtattctataattctgttgtttaatgtctgtgcaattcaaaacacttcggcaagtttaattaatgtctatgttggcta

SEQ ID NO: 9719 - DNA, 10949 bp, Homo sapiens
tacaggttttagatggagcaggattagatattgatttccatcttgcctctccagaaggcaaaaccttagtttttgaacaaagaaaatcagatggagttcacacgtaagtaatctcttttagttgagtttcattgctgaataataccagtgggttatctgcagggcatggaaagttagcacatttgatactacatatcaatattagataattccatatgatttaaaacagttcatgatagtgtgccatctgataaacaaaaacatcttccattaacctttctatttttgtttaagcgttttcttttgatccaggctaaattttttctgtgctttggttagtaaattagtattcccctggtattccattcaatctatcgtggcattttaaacctgccttctggccagcacaagctttctattttaacttaaagctactgttccaggtatatgtcttaaagtttcttgagctgctggctatatgccatttttgtccatagttttctttcttaaaacaggacagtatatctttgtgtgtacgtaaattttttttttttattcagacctcattcgttttaggtaattagaaggcctgaaagtaaaagatctgatcatagggaactatataaaaataaaatacttgttataactctttgagttcagagttcagcaaaagaccatatattcttcttctgacacctcacttccctcttttcatatctcactggtatgtttcctggttccattctattatcttactataacattttcttaagtcagttttgttatatgtttaaactgtgagtctgtaggaagaagagcaaatatggagtatctagtatttgctataaacaagggttggcatgttataggcttctaaattaatctttccattacactatgagatagagtctttgactcaagattcccattttatagacaaggaggctcagagaagtcaaataagtctccagggatacacatgcagggtggagacaggatggaccaaaactctttgctttctaccatatgcttagaacatccctggtacataacactattgtaagaactagctattattaaaattattggtctttgttaaccaaaatgcctgatacataatcgatactcagtaaacactgaatacatgtatgaatggatgagaggaaaaaaatgtctcaacaataattttttaagatactcatttaaaatgcattttaaatggcattttacctatgcagagctcagaaaaatatttgcataagctattactaaataagatagaaatagtaattttaaaagtcagtttatattgatatacttggaattaactgttttctctttgataggtgtataagaagtaaaaatgggccaggcactgcggttcacgcctataatcccagcactttccgaggccaaggtgggtggatcacgaggtcaagaaattgagaccatcctggccaacatggtgaaaccttgtctctactaaaaatacaaaaattagctggtcatggtggcacacgcctgtagtcccagctacttgggaggctgaggcagaattgcttgaaccccggaggcggaggttgcagtgagctgagatggcgccgctgtactccagcctggcgacagagactccatctcaaaaaaaaaaacaaaactaaaaatgtagttcatcttttaagtttcagaattttaaaaatgttcaaaatgtatgtcagtctttatttctccccaattatttgctccctttttgagataataaaattcactgttagaaaaataagtatcttactgcttccttgtgtagaattacctctcattaaataattgggagaaaataattgagtttataatagttcacatttattgcattcttttgatatgccaggccagtgttctcagcacttttcatgtactaatttttttattcttaaccacagtcctatgacgtaaatattattttaccaatggggaaactgaggcatagaacaattaagttgctgaaggttacacagctagtgaacggcaaagccaggatatacattcaggcagtccaactcactattaatcactataccagatttacaaatttttttttttttttttttttttgagacggagtctcactctgttgcccagctggagtgcagtggcgcgatctcggctcactgcaagctccgcctcctgggttcacgccattctcctgcctcggcctcctgagtagctgggactacaggcgcccgccaccacgcccggctaattttttgtctttttagtagagacggggtttcaccgtgttagccaggatggtctggatctcctgacctcgtgatctgcctgcctcggcctcccaaagtgctgggattataggcgtgagccactgtgcccggcctacaaatctgttttttaaacattaaacaaagcttttatctttagctatattaattttgtaagagcagcaaacatctgagtatgtcactggtttttcttaagtaggctttttctttttcttttaaatgtaatttcttttttaaagacaaggtctcactatgttgcccaggccagagtgcaatggtgtgaccatagcttactgcagcctaaagtactgggctcaaccaagcctcccgagtagcttggactacaggtgtgtactcggctaattttttaatttttgtagagacaaggtctcacttttgcccaggctaatctcgaacccctggcctacagtaatcctgcctcagactcccaaagcgctgtgattgtaggtatgagccaccgcacctggccctgcttttaactttcgctaatatgggaaactaattttaactagggtactggtaattcagatattattcatttttttcttcagcacttggcataattaatgatgggctgaattacctttatagaattaaataataaaatataaactagttttatttaattctcaaaaaaagcatttaggatcaaacataaacatctataagggagccagtggcagttaataggcaaaatcagtaagaggcctggaagaagacatttaggacaatccatcactgcttttgaaaacaaaactcagtttaatctcagttgtagggtaggttggcagtcatatctgcatatgaattgaactcatgataaaatacttttaataatgtataaatattaaagtttattatgagttatgtatacaggtttttaattctatccttttccaaaaatgaggtcactaaccataatttactgagtaaatgccaaacatgtctaagttgtacttgaacatatatattttcaggttgcttctttcccaagaaattataaattatctttcaatactaaggaaatttatgggtaagctgtccaattactataaactatgttatttgttttttgttttgttggtttctttttttttttttttttttttgagacaggatcttgctctgttgcccaggctggagtgcagtggcatgatcatgcctcactgcatcttcaaccttccgggctcaagcaatcctcacactctgctaatttttgttatttttttgtagagacaggattttgccatgttacccaggctggtctcaaactcctgagctaaagtgatctaccagccttgccctctcaaaatgctgggattacaggtgtgaggcaacacactcagcctgttacttcttatttttacctttagttgcttttcatcacaaatagaaatacaggtaacttaaaacatgtacttttttttatacagtgtagagactgaagttggtgattacatgttctgctttgacaatacattcagcaccatttctgagaaggtgattttctttgaattaatcctggataatatgggagaacaggcacaagaacaagaagattggaagaaatatattactggcacagatatattggatatgaaactggaagacatcctggtcagtatggtcttctaataaaataaaaattattaacagccagaggccttactatggtaataagttactgaactaagcattttatctgcattatccaggaaaatctgtttctaatattttatttttgccataaatactttgacctcaagtatcagcttaattttattttatattaatatagcccttttatagttttcaaataacttatcttccaggaccctattataaaaatagcttcagatgtgcaaataagactgcatcttggtaagtttgttttataaatgtgcagttagaatttttaaattataaatagattatgcttctgattatacagcaggcatatgaaaagtaaaatgttttctaatttcacaactattttgtggtattaaaacattgggtgttttactgaatactaaattgttcagataaacatacaaagaaggaaatattataaacacatgcattatgtaataggtaaatacctaaagttatatcaattgggtttttaaaaatgaaatcatttgccaggcatggtagcaggtacctgtaatcccagctactcagaaggttagggggaggatcatttgagcccagttcaaggctgcagtgaaccatggtcacacatataaatagatactacactccaatatagcaagaccccatctctaaaaacttaatcatttgaccaggcacagtctcaggttgcaatgagccgagattgtgcctaggcaaactccatcccccgacaaaaaaaaaaaaaaaaaaaaccttagtcatttcctttggttgtgtgaggactaagaaagagataatgtacgtaaaactcctgatgctatgccactcagaataatttcatgttacctattttcaattcacagtagctttgttcccttgttaaataactacttataaacaatataaatatgtcaggagaactattatataaccttacagagaatctctaatgtaatataaatagtacctgccctttaattgaattgtgcagccatctaacttaaaattgtgtttggataaaaaacataaagcatattttgaaaaaaactttttttgagacagggtctcactcactctgttgcccaggctggagtgcagtggcaccattatggctcattgcaatctcaacctcctggactcaagtgatccccccacctcagcctcccaagtagctgggaccacacttggtgctaccatacccatctttttgtagaggcagagtctgtctgtgttgtccagcccagtcttgaactcctgggttcaaggggtcctcctgccctagtctcccaaagttccaggattacaaggcatgagtcactgcacccagcctcattttttaattaagttaaaatttctgagcattctttaataataaaattattttatttatctccaggaatccatcaacagcatcaagtccagactaagcaaaagtgggcacatacaaactctgcttagagcatttgaagctcgtgatcgaaacatacaagaaagcaactttgatagagtcaatttctggtctatggttaatttagtggtcatggtggtggtgtcagccattcaagtttatatgctgaagagtctgtttgaagataagaggaaaagtagaacttaaaactccaaactagagtacgtaacattgaaaaatgaggcataaaaatgcaataaactgttacagtcaagaccattaatggtcttctccaaaatattttgagatataaaagtaggaaacaggtataattttaatgtgaaaattaagtcttcactttctgtgcaagtaatcctgctgatccagttgtacttaagtgtgtaacaggaatattttgcagaatataggtttaactgaatgaagccatattaataactgcattttcctaactttgaaaaattttgcaaatgtcttaggtgatttaaataaatgagtattgggcctaattgcaacaccagtctgtttttaacaggttctattacccagaacttttttgtaaatgcggcagttacaaattaactgtggaagttttcagttttaagttataaatcacctgagaattacctaatgatggattgaataaatctttagactacaaaagcccaacttttctctatttacatatgcatctctcctataatgtaaatagaataatagctttgaaatacaattaggtttttgagatttttataaccaaatacatttcagtgtaacatattagcagaaagcattagtctttgtactttgcttacattcccaaaagctgacattttcacgattcttaaaaacacaaagttacacttactaaaattaggacatgttttctctttgaaatgaagaatatagtttaaaagcttcctcctccatagggacacattttctctaacccttaactaaagtgtaggattttaaaattaaatgtgaggtaaaataagtttatttttaatagtatctgtcaagttaatatctgtcaacagttaataatcatgttatgttaattttaacatgattgctgacttggataattcattattaccagcagttatgaaggaaatattgctaaaatgatctgggcctaccataaataaatatctccttttctgagctctaagaattatcagaaacaggaaagaatttagaaaaacttgagaaaacctaatccaaaataaaattcacttaagtagaactataaataaatatctagaatctgactggctcatcatgacatcctactcataacataaatcaaaggagatgattaatttccagttagctggaagaaactttggctgtaggtttttattttctacaagaattctggtttgaattatttttgtaagcaggtacattttataaaatgtaagccctactgtaaggtttagcactgggtgtacatatttattaaaaatttttattataacaacttttattaaaatggcctttctgaacactttatttattgatgttgaagtaaggattagaaacatagactcccaagttttaaacacctaaatgtgaataacccatatatacaacaaagtttctgccatctagctttttgaagtctatgggggtcttactcaagtactagtaatttaacttcatcatgaatgaactataatttttaagttatgcccatttataacgttgtttatgactacattgtgagttagaaacaaacttaaaatttggggtatagaacccctcaacaggttagtaatgctggaattcttgatgagcaataatgataaccagagagtgatttcatttacactcatagtagtataaaaagagatacatttccctcttaggcccctgggagaagagcagcttagatttccctactggcaaggtttttaaaaatgaggtaaatgccgtatatgatcaattaccttaattggccaagaaaatgcttcaggtgtctaggggtatcctctgcaacacttgcagaacaaaggtcaataagatccttgcctatgaatacccctcccttttgcgctgttaaatttgcaatgagaagcaaatttacagtaccataactaataaagcagggtacagatataaactactgcatcttttctataaaactgtgattaagaattctacctctcctgtatggctgttactgtactgtactctctgactccttacctaacaatgaatttgttacataatcttctacatgtatgatttgtgccactgatcttaaacctatgattcagtaacttcttaccatataaaaacgataattgctttatttggaaaagaatttaggaatactaaggacaattatttttatagacaaagtaaaaagacagatatttaagaggcataaccaaaaaagcaaaacttgtaaacagagtaaaaatctttaatatttctaaagacatactgtttatctgcttcatatgctttttttaatttcactattccatttctaaattaaagttatgctaaattgagtaagctgtttatcacttaacagctcattttgtctttttcaatatacaaattttaaaaatactacaatatttaactaaggcccaaccgatttccataatgtagcagttaccgtgttcacctcacactaaggcctagagtttgctctgatatgcatttggatgattaatgttatgctgttctttcatgtgaatgtcaagacatggagggtgtttgtaattttatggtaaaattaatccttcttacacataatggtgtcttaaaattgacaaaaaatgagcacttacaattgtatgtctcctcaaatgaaaattctttatctgaaattttaaaagacattgattccacatgtaaggatttttcatctgaagtacaataatgcacaatcagtgttgctcaaactgctttatacttataaacagccatcttaaataagcaacgtattgtgagtactgatatgtatataataaaaattatcaaagaaaattaactgccagtcatttgtaaatgctgtctactcctgaaagccttccttcatctctatttagttaataatgtgctctctcctcctgttttgaaaccccatagctctctacacctcttattgtacatcactctactttgcattggagttctgtttctatatgtacttattcacctgttgcctaaacatgcactgttcctaaaaggtacagtttttgctcaaaatatatgaaaggaaagataatcagttcttaaagtttggtatgctaaataagcacccagggaacttacctgctccacctcaccccagaaattgattattcaggtctggaatatggctcaggattcttaattttcaaccaacacaatatagaatcctgtcagttatccttggatcatttgctaagtgatcttgcaaaatcaaaactcctttgagactatttcattttcagaaatattttaaaacttgttcagaaacatcttaaaacttgttagcatataggaaaagtacaatgcttggtgtaggtaggttattatttggtcatttccctcaaaccatccagacaagccactcttctaccacaagctggtagaaatccttaggcacctttctgcttctgcactgctatcactttcaggtgtctaaggcttctggaaggctgttgtcataacctggagccatacacctaatgtacgtctggggaaaggacaccaattaaagaatctagagctaggatgatgttacataagacagggcacaatggagatggactctggatccctgcatctgaaagaaaaaggcaagaaaatgcagggcagggaaaatcctgaaggtcttcactgaccatgaattaaaatcctaattgacagttttacaaacaaaaaccctcgttttagtacttgtgttgtttttgtttctgttttaacaagcttagatttattattgtgccttttatggaagatgaggaagaaataggaaagcagtaaaatgaacaatgagaatctgttacccaaactgatataaactccctcagaaagaaagatactactccctaatcctggaagtgttaagtggcaataatgatcaaatgttgtaaaggggattgttactacagctaatatgaaatgggaggctggactaaatctaacctttctacccttgatttcaattctaaaaggacacgtaataccattgcagaaagaaaagacagttccaaatgataaattttagagttgttttgctaggatgcaagagaaattggataagtggaccactcatacgttgctggtgagatatgaaatagtagagccactgtggaaaatattcttggcagtttcttataaaactaaacatacatttaacatataactggcatttgtactacttgacagttatccctgagaagttaaaacttaacattcacaaatgttacatagcaccttcatttataatagccaaaacccggaaacaacctggatgtccttcaaaaagagtgaatggtttagtatgtccacaccatggaatactaaatagtaatatgaaggaacaaactactgatacatgtaacaaattgcatggacctcaagggaattatgcttgggtggtttggggggacaatcctaaagttttacacactgtatgattctgtttttgtaacattcttaaataataaagctatagagatgggaaacaagattcgtggttgccaggtcttgggactgaagggaaggagaatgtggctataaagggagccttgtggtggaaaagttctgtagtttgattgtggtgattacataaatatacatgtgaaatgttagaagtatttatagctgaaacatattagtatgttggtatatacatatttctgactaattaatttcgccatgttgcccaggctggtctcgaactcctaagctcaagtgatgtgcccgcctcaacttcccaagtgctgagattacaggcgtgagccaccatgtccggcctgttttttcctatgcatgcataattacgatcaagtttaatttgtaattaggcacattaagagattaacaatagctaacaaaatggaacaattacaacaatatattgtaataaaagttatgcaaatgtggtttctctctctcaaaatatcttgtactcacccttgtgaggctgtgagatgtcatacaatgcctacatgaagagatgaaatgaggtgactgatgtaggtataagtgatgtagttaggctacattatcatcaaaataacttcgggtaatcctggatcactgagccaaggtaatgttgatggttaaggagcagacaatgttgatggttggggatcctcaataggtgaaggatttctattttggggtctttttgctgaaaaattttggaagaacactgtaaccagaagttgttgactcttcagctcatcgaagtgttgctgcagagactgtaatcctttggtgatcatattggtaactttaatgctgtgtctcatctgaggatcgtattctataattctgttgtttaatgtctgtgcaattcaaaacacttcggcaagtttaattaatgtctatgttggcta

SEQ ID NO: 9720 - DNA, 389 bp, Homo sapiens
agtgaggttttatctggaggtaaaaataccacctcaacattttcattttcatagcagacagattcatgtattgtccattattaatactttaaattctaaccctttctctttcaagtatttttgcacttctgggatgaagcactggtggaaccattccataaaaatggctgtcacccacactgattatgttgccaagacacataatattttgttttgttttcgagatcatgtaggttcttcactctatacactacacctcgctttatcatatgccctgcagcaatgccatatagtaccagagttaatctgttcttccatgctgtatgccctgataccgccgcatttgcacttttatgaatctaagttctattgggcatcttctcccagaa

SEQ ID NO: 9721 - DNA, 389 bp, Homo sapiens; identical to SEQ ID NO: 9720

SEQ ID NO: 9722 - DNA, 2761 bp, Homo sapiens
cttctgcctctcccgctatctagatggctcggggaggcacaccacacaccaggtcaccttcctctctgaacccccagcacctcatactgtttctgtgcagagataaggctgggtgaaagcttgtgtgaatgatctgaagtcttctactctaggccagtctccaggagcattatgatctttaggagggtgggcttggttcctctgtacaataatgggtcataaaactgagtggtcaagatcatcccggtgagggcagtccgtgtgttgccatagttgctgtaccggttaagaatgcacctggctgcaatttcctgaaaacctgacgtatagtggcttaaacaaagagtggtttattttccttctgtcatagcaatctgggggaggccactgtggctttggcgcaggaggtcgggaaaggcccgcttctctgatatcattgggggcctccccagtgcttgtgtggcagaatgacaagaggaagaagaaggagaattatggcactgagtatcatgagatttggggtcatatatctttagtgggcggtgtttgctgccccaaatgtctcatgccattaaaatgttctggaaatgatttaggtagttggagtttccttcccaaagacaaggcatttacagcatgatgtccaatatccattgagtttgtgtcatgcattcattgtattcatagtctgctttaggtacttagcaaaatattgctgatattaacatgcctttgtttgcttcactggagatgaaattgtgctccaagtgttttccaaggttccgtatgacccatcatttgatgaaacaagaacagcagtcagatccattacaaagagagacacacaaaaaagcaagtatatgtcgttaacctgacatgtgtacatacctctacagacctctgtgttatctcaaatatgcgatgctagcattttagcattccttaaattaactactgtggtggagggggtgcaaagccaaactgagatgtgaagaactctctgaaatcccctctacagtcttcctcccaatatgggagtctataggcttcagtgtgaatatccctgtattttggggtgatccctgacgtgcagtgtcaggcatgttctgccactctggaggctgtgcagaggacagaaacccggtttgcaagtggggttcactgttccttgtaacaggagctatgagaagtgtaatcactttctgttcaccagcgctttataggtcactgcccaggagtgcccaagtcaccggcttgggagagtaatgtcttcctgcgtccctccctgtcacctctgccatcattccacctcatcctctgtaaaatatttgcccagagaagcagagctgatttctcttccagcactgatgctccagtgccaatgctgagaggaagcagctggccacatatgcaaaaataatgcatattaaccccaaatcacatgaagaaaagagaaaccttgtaaggtggacatcatgtgaattaggaagaaaagtaacaatgagtaattagttatcagaataagccagctatgtgtgccaggaattataagactctcagtaaagcaatttagtaactaatcactctgccaatgcattccataagccattgagaaaacatatgaatatttcactgcataatctcaatagcttgccctgcaccatgttttatgatgctcccttggcagatacattttgaggaacacatttttagcaaagtgcttgcatgattaagtatgtctattcttaatgatttatcagtgtcttattaacagagaactgtgcattgtcatttattggatcaaagtggttgtacttgaaatcatttgccatacaccatgtaggcctttctacccgttttcctgtagcattaaacctgccatgtgcacaaatctctcaatgcttatgcatattgtctgtcaacagactatgtgaaaatgagcttagcccctggtgttgtgttggaacttcagatgcttgcagacacttcatgaatgctctgtgacactcagaataggtgggttcaggccaagtgcatgatgctcacctcaaaatcccgtgcagaagagtatcaatctgaagggaacagctgcagacccaatgaaagacttaatcacagccatggtttattttcccttaggctattcccaacagaagagcttgaacaatgctgcatttgcatcaggttcaaatgagcgagaggaacatttggctaaaatatttggtaagtagcctcctgctatgaagcctttagcctgtgtttgaagagttgcatgcttgtccctggttgtctctcaagtagcctgttcctgctgctttgaggggaaagcaagtgctttgccttgaggctagaatctgtttctctatgagtcaaaacctcgataaattaagctaaacgtggaaaataaacacctggaaaggatcctgctcctcaaagagtgatctatggagcaggagcagggctaccatctggtagtgtgagaataccctggggagactgtttaaaagagacaccccaggccctcgagatgagcctggccaacatggtgaaaccctatctctactcaaaaaatacaaaaattagctgggcatggtggtgtgcacctgtaatcccagctactcgggaggttgaggcaggataattgcttgaacccgggaggcggagcttgcagtgagccgagatcatgccactgcactccagcctgggcgacagagcaagactccatctcaaaaaaaaaaaaaaagaaaaaaaaaaaaaaaaa

SEQ ID NO: 9723 - DNA, 196 bp, Homo sapiens
taacacggtgaaatcccgtctctactaaaaatacaaaaaattagcagggcgtggtggtgggtgcctgtagtcccacctactcgggaggctgaggcaggagaatggcatgaacccaggaggcagagcttgcagtgagccgagatcgcgccattgcactccagcctgggcaacagagcaagactctgcctcaaaaaaa

SEQ ID NO: 9724 - DNA, 7588 bp, Homo sapiens
ccaggcggggatgctgcggctccgcagcgggctgaggcaccttcgggcaacacccaatactcggggctccgctcggcttctttgcgccgagatgcctaagaaggctggtgcgacgaccaaggccagtagcaggtcccgtggcggcagaggggtgggcctcaggggtacttgttgaagagcgcgggagaagcggggcccgggagtgagtggaggcactgccagcggcttgccgtctctcagttccggggctcaggacagccgccgccacccccagagctgcggcctgctgccgtcgccccgcctcagtaggctgcgctgccgtccacctggtgatttctgagcgctgggcccggcggcagccgagctctccttgggctgcgtgtgctgacctttggcctcctacccgcactcccagtccagcaattcatgttcccgcagcggcatgacctgcgtttccccaggaggctgtattctgctttctcctcccttgctttggctgatcgcaccccttctgtcaagaatacagcactcccatttccaccatctttgtttggccaaccccagtccgtttctcagactcagctcaagcactgcctcctgctggcagcattctccagtgccccaatgctgatttgcctgtggggtaatgttctgtgcctatctcatcggtgcacttagcacagtgtattataattttgtatgttctttctccctcgcagcagtccgagctccttgagagcaaggaccatgtaccttttcatctttacatatccattgcctacatatttgttgaacgaaagttcctagcacagcccctgtcccataacaggcctttaaatatcaagcactatttttttttcctccctttcccgcaacatgcagacatacacactttcaccaacatttattagctccgactgcatgagatacaatgatgaataataaatgatccctgcccccaaggaattggaaatacaaagcagagggaggagcaagcattaaggtttagaagccagagttaggttttcttgcaaggggggaaaaaacactgttgggttgatgggaacccttcgtgggaaaattgagtagagccttgaaggttgtgggaaaagctttctaggtggccagaagtccctggacaccactgatgagcctagtttgtctgttaagggtgaaagggggtagtggaagaatcaaattaaatgtgtgggaaaatattttgtaacctgtaaagttgtgtggttgtcattttagggtaaaagccagagcaaggaaccagagagaccacttcctcccttaggtcctgtggcagttgatcctaaaggatgcgtcaccatagccatccatgcaaaacctggctccaaacaaaatgctgtaacaggtatacctggacactggggtgggattcaagtgtgaatcaggtgtctcctacagccctcctttgctttggttagctgaaagcttattctatgacagttgatttttcacatctgcagttagaggcttctccattttaaaattctagattctaatgtaaaggtgtcttaaagtgaatatatctttaaatcatgccaagttacacgaaaaccattgtatattttcctctttaaaaatacagtattttagaaaggacagttatggaaacttgtgtgtagtctggattattcttagtttgtcctgttccaaaactggagacattggccagagaaagaagagacattttagtgtagtttaatgatcactggcctaaggagagggagaaaacttgagatctgagacccgtgatcagttcctgtgcgaatttgttttaaatcaaaacagtataaaacattcatgggtccagttttttcatctgtcagatgagatcgttggactaagttagaggctttcaggctattctctggagtgctggaggtgcctcaggaatcagctttgggcaaggaggaggccaggcagacagggctcctgactagctctgtttacatttgttttacatattgggattctggagaaaattgggggaagggattctaaaggaaaaaaagttcaaaaaccattgctctaaattcttttgaaggtctttttcacctctaaagctctgtatttcaaaccatttttagattttgaaaggaaaaccacaacattgacgtgctagacctggtttatgctgatgaccaagttaacttagccataccctccttggccagcattttctaagtagtgggtgtggacactgtctacgttggagtattatgtttcattagatctaaaatgggaggctggatgccatggctcatttgtaaaatggagataataatggtactaatatcttcataaagttattataaggattaaagaagttagtatttgtaaagcctttaacacatttgtgtgtgcttaaaattggtgtatagtaagtgctctgtaaatatttgttaagtaaacattattaaattttaaaaacactcaagatatgtgtcacataagaggtgaacctagtccggggctctcattttcctgttgaggaaaccctgcacaaccttgtacaatctagtaagctgccctgtccatacacttcttcagtgacattgatgaggctgaaggccatctatgactccctgcctggggctcttcacataccaagggcaatttccagttgcctaaatccaggatattccccagggctctgtaagcccatcttggtcggcaagattgggtcaataacttttcttctctggatttatttcctgtaatggtagggccatttttatcatgttcatgttccttaaatgtgattagtttaatcattcatttcttcattcaacagtttttaattgaaaatctgtgtgccaggcaaatgcaaaaactcttttacaaaatgtccttgcttcatgaagaaaaagaactccttaaggataaagtccacactattttcattccagatttgacagcagaggctgtaaatgtagctattgcagcacctccatcagagggagaggctaatgctgagctctgtcggtatctttccaaggtcctagaactcaggaagagtgatgtggttttggataaggtaggtctcgctctcttttttttttttttgagacaaaatcttgctctgtcgcccaagctggagtgcagtggcgtagtcttggctcactgcaacctccacctcctgggttcaagctattctcctgcctcagcttcctgagtagctgggattataggcgcatgccaccatgcctggctaatttttgtatttttaatagagacggagtttcaccatgttggtcaggctggtcttgaactcctgacctcaaatgatccacctgccttctcctcccgaagcgctgggattagaggtatgagccaccatgcccggaggtctctctctttttaaacttctttaattattttctttttttttttgagacggagtctcgctctgttgtccagcctggagtgcagtggtgcaatcttgacgcactgctacctctcactcctggattcaagcgattctcctgcctcagcctcctgagtagttgggattacaggcacccaccaccaggcccacctaatttttgtatttgtagtagagacagggtttcaccatgttggacaggctggtcttgaacgcctgacctcaggtgattcacccaccccggcctcccaaagtgctgggattacaggcgtgagccactgcgcctggccttattttatttcttttttgagatggagtcttgctctgttgcccaggctggaatgcagtggcgtgatcttggctcactgcaacctctgcctcccaggttcaagtgattcttcagcctcaggcctcccaagtagctgggattacaggtgcccaccaccacacccagctaatttttgtatttttagtagagacggggtttcatcatgttggccaggctggtcttgaactcctgacctcaactgatctgcccacctcagcctcccaaagtgctgggattacaaacgtgaaccaccatgcccagccatgtttgattattacatattaatgatgattcataaaatactgatttttctttgtctttttcaaataattgggaaactagttgtttataacttttatatttacttaattgcataaatctgtcaattcttcctatttagtctccttcatgcctgctgccttaatccttactgagactatccacactgtgtgcctatgcttcttcactgccgctgttgccagtgttttctcctttctgaattcattcctgaacctgctgtcagattaatcttgcttagctctctcatcctttaagtcatcaccacgctaaacaatctaaagcaattcctattgttagtcatctccatgagggactccgtcaagtactttgtccttgcttgctaggagaagctcattgggaagatagaaggttcatatgatgtcattaatatggttttgcactaggggtggagatcaaagtcacctgggaatgatttctaaatacagatccctgggtatcactctaggcttcttgaaatagaatctgcaggaggggggcccagccatgtttatatttcttaaagctctgcttgttttccagtgctatactatatagctcctatccaggttccagctggcattcacagtcattgattaacagactgcacctaaaaatccatttgaatgctccccacctgtggcaggtcatttctgatttttggctagtgctcatgcgctgacgtttgcctgaaagatgttcctcattcttctgcctgttcaaattccactcatctaaataaaccccttctcaaattttatcttctttaaaggctgtgtttgaaaacaaatcctttctttttcttttgggacggtgttttcgctcttgttgcccaggctagggtgcgatggcgcaatctcggctcactgcaacatccgccccgcgccccgcccctccccggttcaagtgattctcctgcttcagcctcccgagtagctgggattggaggcgcgcgccaacacgtctggctaatttttagtagagacagggttttgccacattggccaggctggtctcgaactcctgacctcaggtgatccacccgcctcagcctcccagagtgctaggattacaggtgtgagccaccacacctggccaacaaatcctttttaaagttttaagtggttgtgaaatcgtggcacttggatatgtggctactttttgtttggaattttcagaaatgtttaacaacatagagaatagcaatttgtttatatttataattattttactacaaagtttatataaaattgcaatatttattttggtattttaaagatgattttcatttttaacttaattgcttgagactagaatatcattttttagattttttttttttttgagatggagtcttgctctgttgcccaggctggagtgcagtggcgcgatctcagctcactgcagcctctgcctcctgggttccagcgattttcctgcctcagtctcctgagtagctgggattacaggcacatgccaccatgcccggctaattttttgtatttttagtacagacggggtttcaccatgttggtcaggctggtcttgaactcctgacctcgtgatctacccaccttggcctcctaaagtgctgggattacaggcgtgagccaccgcgcctggcccatttttgagattttaatgtccagcttttattatagaaattgatgtatgaaggtaaaaaccctggagagttgttagtactaacaaatgtttagtaacaaatggtagtaaggaagaatctaagagatagtctttggttagaccagaagtaaccaagagaaagccatcaggagagcccattatacaacggaggtctgctatctctaatagcattagaatgtgctaaacagtaaagtatgctttttctcttttggtccagggtggtaaatctcgtgaaaaggtggtgaagcttttggcttctacaactccagaagagatcttggagaaattaaaaaaggaagccaaaaaaacataaaagcaagaaatgaggccgggcgcagtggctcatgcctgtaatcccagcactttgggaggccgtggtgggcggatcacctgaggtcaggagttcgagaccagcctgaccaacatggtgaaaccccatctctacgaaaaatacaaaattagccagatgtgatggcgcatgcctgtaatcccagttactcaggaggctgaggcaggagaatcacttgaacctggggggcggaggttgcagtaagccgagatcgcgccgttgcactccagcctgggcaacaagagtgaaactctctccccccgaaaaaaaagaaataaaaaatacatccttgagaaacttttttattgctaatggtgaagaggctgttaaatagaaaaatatactacatgcacagaagaacatgggggacatatatatatgtatatattcgaataagactccaaaaagtagaaatttaaaaagtgctatacattgcatcaggttctaaaatcccaaaccccaaacagcctggaacatgttactctgatttcatggcgttgtaaaataacagagctgggaagaatattcaagatgacctgatttaacacctttcattctgttggggggcctttgatttcctatatccagaagttgagagacttactcaagattgtaccatgcaagctggcaactagaacccaaatccttggactacttgttgaatgcagtttttctagattgtaaattaaaaatcatatctccacaacggttctggaattctggggattgccttctaatccagtttacaagtgacagaaaacctgttatgctgctttgtagtcttaccttagatttttaaatgcttatttaaatgtaaaaaaaattttttttttacatcttttaaagactatatttaccattttgttgaaaaagtaaagaaaaatcatgacttgtaattaaatgtgaattataatttttgagaagtcactgaattttcatcttcctctaataacttaaataatcagcaaattcagtagtttttatgaatctccaaagatccttaaaagaagaaagaggacttggaagctattttcagtatttgtaaaagcttgtcagaaattacatctatattaaagtttcaaaagctaataatatatttttacatcttcaggtcaagttatagtaatttattaaagaaaataaaattaatttcctttgctgatcaggagagctgatctgcagttgtgcgctttgtccagcaagtacatgagaaagatgtattgatggaccaaatcattaaaaacaaaatccacaaggaagaacaataataaaaattgctgatggtagctgggcttggtggctcacgcctgtaatcccagcgctttggaaggttgaggcaggaggaacacttgagcccaggagtttgagaccagcctgggcaacgaagtgagaccctgtatctgtctctgtctctttctttatagatagatagatatacatagatagattttatacatagatatatatatttatatgtaagattatatataagacctcatatataagaagtccaggccgggtgtggtggctc

SEQ ID NO: 9725 - DNA, 373 bp, Homo sapiens
ggaaatggggtcagcatactcagaagcaaagaagtagagagagttggatacctgaataaaattgggaaaagttacaaagagaggaatggatgctggagaggaaccaccagtttctactacgataacctatttacttcattttaaacggtgatattttaaacgtgggaacattttgcctagtgagtttttttctttgagaaacgtagcagtatcttgtaacaaagaagatatggggacactctgtcatcaaaaactactttggggccgggcatggtggctcacacctgtaatcccagcactttgggaggccaaggtgggtggatcacctgaggtcaggagttcaagaccagcctggccaccatggtgaaacccc

SEQ ID NO: 9726 - DNA, 374 bp, Homo sapiens
cctgcggttactctagttcaggccaccctctcccatttagggggcggatctccctgtctctggcttttcctctgtcggccacagtgcagccggtgtctttctaaaacccagcaaattgggctgctaataatcccttgcttgaaagccttcagtgactccatgatcttgcctctgctgatttgtttcatgtctctccatatcacatgtcgcagtgtatttcctcttcttttacattgtgggatccgctgcgcctggcacaaggtaggtgcgccatcgatacgtggaagattcacaagggccaagccgccacgaggctctatatcgacttgatggccacaggcagcgcgtgggactctgcatctgctgcttggctg

SEQ ID NO: 9727 - DNA, 2672 bp, Homo sapiens
tgcgctgggactgatactgtggtcctggtcaccagagccaaaatagggggaaagctggcttggaaaaagcaggcaaccaagggtacacaccgttagccaatatttgcaaggctgttggcagattagatatatctgtactcaaacactgcaatctgatttctctgtcaaaagtacacttaacatttttgtcccattacttaaatctagtggattttctactcagcatcaggtaaggctctcttagcccactgtgtgcgtgtgtgtgtgtgtgtgtgtgtgtgtgtgtgtgtgtgtgtgtatgatagattcttatttaacatgagatatttcctgtgggtgcaagtgcagtagagaaatgggccaagttctctggacacgtgtggatgtgtatattgtgttatacacaaggccccaaattcctgcaactatttatacatgcaattgttctgttgtttgctgagatggaaatcatatacacagagttacaaattcctgaaatgttccatctatatttgatataaacagacatacagtagctgagaaagtaacacagcttgactattgctctgtttaccttctattggaaaaaataattgtatccagaacaccatatcagccttatagcacgactgaatatcatgttgcaattaattaacaacctgatatctatttgggagcaaatttaagggaagactggaggcctaggaaatagaatacaaaatctcaaaactttttaaaaagaagtaattcctgaaagaacaaagcaaactcattccttcataccatgcttctgaaagctattccagcagcccctcccccaaacaggcatgtaatttatggatcttttacaaggtaataaaccacagtaattacctccctgcatcccaaactaagaggacaaattaagtcagaacttgaaaataatttaaaagagttttcccttgtttcaaataggaaaaggaaacgccaagacatagaaaaccacgcttttcccgtaggaagaaccgatgatgagccctgatgaaagaaggaagaagacccgctgtctgcgaaggcctaaaggttagaaatacagcaatttttctcatgccgaaggaaaggcaaaatggtctaagaaactgcaagagtgtgatacaagttttcctcaacagcgagctgggactggcgacaatttcttaactcacagcctccgcagtcgccttagtcgacaaagagagcagcccacgcagcggccgccgcgcccgtgcccgtggcctttacttgcttttgccctgaagttcagtgtagtggtttgtttggggcttgcaggaagaaacaaacacactccctctgactctccacaacccatctttgccttctgcaaccgcttctcctgcccatcgctggttttggggtaggctctttgtctgcctgaggccccgcactcgcagggcaagaagcttaaaggaatccaactccaaactcctccgaagttaaatattgaccagaacctctttcaacaggccgcggttgccaggaaccgtggagggccaactcctcccaaccgccctggtgcaaagtcccacgcggcgaagagttttggagcagcgcttacctagaaagatgtttaaattctgaaccaggaattgtctccaactccaggcgctcagggaatcgccttttccggtgtccaggcgctctgcagacaaataaacagcagaaggtgaatggcggctgcgagggaagggagttggaggccgggagtgggaagcgaggctcatgcgggcgccaaggtggccctgggggtgacgcgaacatcagggagtcaccagggcactcgtccgtgtggcgcactcattgctcgaaatgttccagtctacaaatggtccgaagatggtgatttatttttgtaaaataaatacatactccatctccacacccatactttctcctttttctttcttttttttggcgggggagtggggaaggaaaggacatgaagcaaacagaggaagctgagaaggtggaagtggctttgctggtggtgtgggctgctttcagagagctctctcctcaggcaccacaacttggagaatgtgaatgcttgctttattttcctttcctaacaaaaggaagccttgtctgggagcattcaatcacggactctcctgaaacctcactaatatgtgttcatttctgtaggcgcgaaatcagacccgggttcattccactggccagaggcagtcttgggaggatttgtgttctggtttattcaactctgggtgcgttccttttaggtcctagtgggctggcggggctaccgcagcacctagtccctcagagcaggccagctaaggctgctggaaactgagagggacgccggctggtacaatacctgctcaggggccctgctcctgcctggccttgcgcaacggccacaagccgatctgatgccttgattctgctcaaatctcgtccctcacagtatttgcaaccctctcttgccctctaaccagcaaatggtcaccgagccggcagtcagctttctgggagtgggagatgatggggaaagaggaaagaatcgtccgctcgccggaccctggcttggagaagttctgcgctccgctgggactctgcgggccctttgcgtctacagacctatccctgccccgactaccccttcactcagaccc

SEQ ID NO: 9728 - DNA, 414 bp, Homo sapiens
tacatacatatatacatacatacccacacatatatacacacactcctccctcaaagctactaaacatgaaaacattgtgcctatatgataaaaatgtcaatattgctggtgatactgatgctgatggaaatgacgatattagctgccattaacgtagtatctaatgtgtgccaaacaatattaaaaattgctgtatatacatgtttgccatttattatttataaccttaacaagatgtctcactcataagactactttccgcactatgatacagaaatgaatattaaaacatgtgcatgctcatgtcaaactcatagaacttgattttattttggcaggattaaaccaatttgcaacttgagtacaaatgccaatatttcagctagttcttgaaaagttgtgccattgtgcaaa

SEQ ID NO: 9729 - DNA, 6143 bp, Homo sapiens
ctccactggagggggcaggcctgattagagactggagttgggtggtactaggcaaaactgctggttccaaaataggaaaacaagactttagtaattccacaaacttctgattctgtggctcactcttgtagtgggtggcactttgtggagtgaggctggatgatacctgggaggctggaggttcttctggctctggtggtatggagggttcagcttcttagcagccttgcagctctgactccagtagtgggtagtattttggtgaggttagagaagaaagagaagtaaggaatggtatatgggtgtgtgtgtgtgttttctatctttggtgatgttgaaacagggagtcagtaggtagaaatgattcaactggagaaggatgtcctcatgctaacagaagtgcttattcaacccgaatactagaaatcatgcacattgcatttggagcaacatgcatttgctaagagagctacctcctagtcaaaatgtaccaccaggagttctcctgacccttaaaaattgacaccaaagtttcctgtcttttcaggtcctcaagtatgttccacataatgaagcacaatcattacagctctcgattcggcagcaaacttgggctgcagtgcatcggtatgcatgagaaaggcatcatatttaacaacaatccagagctctggaaaacaactcgacccttctttatgaaaggtaagcaggtacttagttagctacaatcttttttgtctatgaatgtgccttttttgaaatcatatttttaaaatattttatttatttatttatttatttatttattgagacaggctctgactctatcacccaggcaggagtgaccttggctcacgaccttggctcactgtaacctccgcctcccaggctcaggcgattctcccacctcagcctcgcgagtagctgggactacagatgtgcaccaccatgcctggctaatttttgtattttttgtagcgatggggtttcgccatatttgagaccaggctgggctcaaactcacggagtcaaacgattgacctgcctcggcctcccaaagtgctgggattacaggcatgagctatcattcctagtctgaaatcatattttgaattctactgcaataaaggaggaagagctaacattcattatgcctttactctgttgtagccattgttctaaacacttgaatggcagccccatgtggtaaatgttgttatctcctacaattcacagaaaatgaggttaagtaacttgcccaaggtccaaacattagtaaatgatagcccggaatatagccctgaagcctatatttcttaatcaccacaaattcttttcttcttattgatgtgcaaagcaattttataggcaaaagaagagatgtagctatatatttagagtaatttcagttaagaatttagcatgtcacccatatgtttgatttaaacacggccaaacaatgtgtttgctgagtgcttgactgacagcccagatgatttagcaggaagcaatttgtgaatgaaattagataattttagaactgagagggaccatatctgtcatctagcctctgattttaacagttgaggaaataaagttccaacgaagttatgattttcacccaggcaaaatagggagtaatgaatgagctgagacccagttgcaagcttccttatccagtggttttcccccttaacctcatcatgctggaaatgaaactgttggggaatacacacgactaacccttgacattactatcaagcataaagaaagataatcataccctggaaaccttgtcagtggtggaatctggggctagatgattttaggtctggccctgtctattcacagccttccctccagcagcccgtgctgtgaacctaggtagccgccttccatgtgcctgctgagatggggggagctatgccagtacctctgcccactgggtgttgagcccagccttcagagctgccctccctcaccaggactcagcacaactcttgctgtagaccccagtgtatcactttcctattgctgctgtaacaaattgccacaaactaagtggcttaaaagaacacatttatctcacagttctgtaggtcagaagtctgacatggatctcaatgagctgaaaaccaaggcataggcaaggctatgtgcctttctgggggctctaggagagactctctttctttgtcttttccagctctagaggccagccacattccttggcttgtggccctttcttccaacttcaaagccatcaacagtgggttgagtcctttgcacattacatctctctgacccaccttctgtcatcccatctctctctggctttgacctcggcttggaaaggttctttgcttttttttttttttttttttttttttctgagacagagtcttgctctgtcacccaggctggagtgcagtggccccatcttggctcactgcaagctccacctcccaggttcacaccattctcctgtctcagcctcctgagtagctgggactacaggtgcccaccaccacgcccagctaattttttgtattttcagtagagacggggtttcaccgtgttagccaggatggtctcgatctcctgacctcatgatttgcccacctcagcctcccaaagtgctgggatcacagacgtcagcctataatctttgcctttaagaactcatgattaggtttggcccaccccatctcaaggtccttaaccttagtcatatctgctaagtcccccttttcatgtaaagtaacatgttagtaggttctggggattatgacccagacaaatttaggatgctattattctgcctatcactcatgttgggggagataaatctccttataccttataaaactatggaatgaattaatggaaaacgtataggacttagtattacaggttgtgggtttgcgtcccagcactgccacttgctacctatctgaccttaggcaagtcacttcgcctttctgagcttcagttcccctatccacaaaaggtgataaatgttatgaaacttgcactctagggctgttgtgaagaacaaatgaaataatgctataagatcccgtagaaatgtacatttgactttttcatttggctcaggtgtattaggaatatgtgaactagtatttagtagtagttaactttcacataccaatatcctctaccctgacatgcaagagctaattaaaagaatctctaagttcatccatttgtttaacaccccaccgttctcatctttgaactaggtaccaagatacaatgacaaacaagatgtggttcctgccctccaggaacttataatgggggagagaggtttgaattaggaaggggcagcccagcacatcaccaaatactaccctaggtgatggtaatgctggcggtgtgcccagagtgatgccaagtacagatgaacaggccatctaaagcacattgaggggcaggggagacttttcagaggaatggatgcttataatgagttttaaatgaaggtagaagctaattaagaaaacaaaagacaaatattctaggagtaaagaataggataaccaaaggcacagacaaatagatagacatgatgcatccagggccctgtcggtaagtccttgtgcctggtgcagatacattcagggacgtggccaaggggagggcagggccagatcaccaaagacctctcagttaaggcaaggaattgagcttatctcaaaaactatggagaatcactaaagattttaagcagaataacataaacatatttgtattttataaaaatccctctggtagcagagagaatgactaattggaaggaagcaggattgtgagcagtgagaacatttaggagctactgcagtgatgcaggaagggtggaggggaggctgtggtttcaagaaatgtcaaaagggtagaccctacagtagtagagcctatagtacttggaaattaagcaaaacatctttgtgatttttttttagacagccttctataggcaagatcagggtttctacaaaaagtgctacataactggacccaaattcataatctcaggaaatagggggataattgcttattggaaagttcactgtggtgtctgacatttctataatcaatgagggtcctaagcatttttcagtgaatctccttttggagttagactccctgttggttttcctgatatagtggaaagtttggcacaagttttagtatctaaatcagtaacattaatgaaagtattgacttactgggtgagtctgtagagaaatagttaagtgcaacttaggcaatgacccatcttgggaggtagggaagggtggtggcgaggggtgaagaaatagcatgtgtttcccaaaactgccgagaaatgtgtccatattgatggtatttgctgattgttgcccaattttcttttcactagatagagtcaatactttttagcatattttaaaaattaaatcatatctacatcataccactgcctataagccatgttattacatttttgcccataaatttggcatgtggcttcaagctctttaaacacagaggcaaatcatgcatcggcctgggagaaaaccacaagtgacattctaagccaacccttccacacaaagggttgagtcatttgtcctgcttgctgaagtggcagtcacccagagaacaacatcctggcctttcatatctgccaagtccttcctatggtcagaaagcctgctccttcctcaaccttccttccaagatgtatggaaatctcaaaagtctaggaccagtcctcaggcctcctttcttatttgcaaagtatacctttaggcatggggattccgcagcttaacccagtgtgtgtgtgtgtgtgtgtgtgtgtgtgtgtgtgtgtgtgtgagagagagagagagagagagagcaagagagagagagagaggatagtcttcttctggagttacgtctacaaagtttcccaatatttttcatctcatttcaaagactctgatgttaacagcaaacctgaataataaaagacttaaaaagagattactcctaaaagatgcttaaagaaacgtaacacaaagagagaaaggggcactttaagggttaaaccctcctgtgtaggccacctaccatcaggacccaccagccactgctcagatatgaacagggcaagagtaagatcaaagccagtttactctattttcattcattcattcattcattcattcctctattgaaaaaatatgtatgaaggcccccatggaccatcagcttgaagtgcaatgctaatgagtggctgtcactgtccttaaagagctctcagttcagtgagggaagactggtaagcaagcaaggaattgcttagctgtcatgccattggctgagtaaaataaacctggaagtagtttgaagagaaatcaaaattaagagaagggcactttgggggatttttacaactagccttttacacttaaacaggaagcaccttagatcaaataggatccaatttgaccagttttccaataatatcctgccacctgttgaaacgcaaaataaatatgaccctaggcaaatccaaatcatctttggagggaaatgtatgcaataaatatgaaaaaatcactgatttgtgatttatgaccacaagtactaaatgtttcatttgcaatctcataaatggctggctagagcatgaaaaaaagtttaatttttaatagtttgtttaaaataatatttgtccctatctccttccgttcattcattcttaaccataggatagtacatgcttatgtaaaattaggagaccacagaaaagcatacgaaaatattatgaaaacttccacccaattattaaattaaaaattgtggacaattaagctccaacataaaaagccaaaatggcatgattgtgtgtgtgccctggagttcgtgatggctgattctctgatgtgtactctgcagctctgtcaggccccggccttgttcgtatggtcacagtctgtgctgaatccctcaaaacacatctggacaggttggaggaggtgaccaatgaatcgggctatgtggacgtgttgacccttctgcgtcgtgtcatgctggacacctctaacacgctcttcttgaggatccctttggacggtactgaaatt

SEQ ID NO: 9730 - DNA, 593 bp, Homo sapiens
caaagtcacggacaacaggcaacatgtggcagaagggaagacagaggtacagaggctgatggtgtcattatcacaggaacaggatttctttggccactttggctgaaattcaccacttccatccaattcactcaagtgagagacttgaaatcacagatggagcatttcttgcaacaagagatactattttttcaaaaagtcacctaaaatttgatagtgttgaataactagttattcgattgtgaactttttccagttcacaggtactttctacagcagaatgataacagtatcaaagagctagtgccagctatcggtggtagtacaaggatgattttgtgctcaagtgaaacccagctgaatatagaattgtgtaggatagtgttaatatggtgatagaatagaaacagcagcaaatgaactaagtcatactatgaatgcctacactaccatggtaactttttgaagaatgataataccacttactttattgccttttgaagtaggaatattttagtggatatgctatagacctcaagtcctataaaaagtctcaaagaagctggctggataaagcctgctgtggatgtctt

SEQ ID NO: 9731 - DNA, 593 bp, Homo sapiens; identical to SEQ ID NO: 9730

SEQ ID NO: 9732 - DNA, 1143 bp, Homo sapiens
gagcatccattctggtggaggagccaaccacatggccagctctgggtgtgggcacagtgccacatcttccatcactttctgatgtatcctaccagcactgaagagacagcccggagagagtgcaagaggaaggctgagaaggatgagatagtgagtgctggcttctttctgaccctcagcacacccccaggtggtgaccatcaacctttagggatgggagagcaagactgatggcttcaaattcttccccaagaagatggacacaggccactcagctcaacctcacagccaatgagttgacaagcaagcagatgacagtgacaggcttttagaaagagcatcagaaggtggccagtttttcttcagcctcagccaggccttggaacttgactagaccatccacttcaccagagatgccttcaagaacatcagtgagctctttgccaatcagtccaggaaggacctagacccagccatggacctgttagtgctgtctcagggataccagaccaacatcctggacatcatcctcatacacaaggaagctattaccaaagtcacggagaacaggcaacatgtggcagatgggaagacagaggtgcagaggctgatggcgtcattatcacaggaacaggatttctttggccactttggctgaaattcaccacttccatccaattaactcaagtgagagacttgacatcacagatggagcatttcttgcaacaagagatactattttttcaaaaagtcacctaaaatttgatagtgttgaatgactagctatttgattgtggactttttccagttcgtgggtactttctacagcagaatgataacagtatcaaagagctagtgccagctatcagtggtagtacaaggatgactttgtgctcaactgaaacccagctgaatatagaattgtgtaggaaagtgttactatggtgatagaatagaaacagtagcaaacgtgaactaaatcatactatgaatgcctacactaccattataactttttgaagaatgataataccactttattgccttttgaagcaggaatatattagtggatatgctatagacctgaaaccctataaagaatcccaaagaagctggctggataaagcctgctatggatgtctt

SEQ ID NO: 9733 - DNA, 1146 bp, Homo sapiens
gagcatccattctggtggatgagccaaccacatggccagcttctgggtgtgggcacagtgccacatcttccatcactttctgatatatcccaccaccactgaagagacagcctggagagagtgcaagaggaaggctgagaaggatgagatagtgagtgctggcttctttctgaccctcagcacacccccaggtggtgaccatcaacctttaggggtgggagagcaagactgatggcttcaaatggttccccaagaagatggacacaggccactcagttcaacctcacagccaatgagttgacaagcaagcagatgacagtgacaggcttttagaaagagcatcagaaggtggccagtttttcttcagcctcagccaggccttggaatttgactaggccatccacttcaccagagatgcctacaagaacatcagtaagctccttgccagtcagtccaggaaggacctggacccagccatggacctgttagtgctgtctcagggacacaagacaaacatcctggacatcatccacatacacaaggaagctcttaccaaagtcacggagaacagacaacatgtggcaaaagggaagacagaggtgcagaggctgatggcgtcattatcacaggaacaggatttctttggccactttggctgaaattcaccacttccatccaattcactcaagtgagagacttgaaatcacagatggagcatttcttgcaacaagagatactattttttcaaaaagtcacctaaaatttgatagtgttgaatgactagctattcgagtgtggactttttccagttcacgggtactttctacagcagaatgataacagtatcaaacagctggtgccagctatcggtggtagtacaaggatgactttgtgctcaactgaaacccagctgaatatagaattgtgtaggaaagtgttaatatggtgatagaatagaaacagtagcaaatgaactaaatcatactatgaatgcctacactaccattataactttttgaagaatgataataccacttactttattgccttttgaagtaggaatattttagtggatatcctatagacctgaaaccctataaagaatcccaaagaagctggctggataaagcctgctatggatgtctt

SEQ ID NO: 9734 - DNA, 1134 bp, Homo sapiens
gagcatccattctggtggaggagccaaccacatggccagcttctgggtgtgggcacagtgccacatcttccatcgctttctgacgtatcccaccaacactgaagagacagcctggagagagtgcaagaggaaggctgagaaggatgagatagtgagtgctggcttgtctctgaccctcagcacacccccaggtggtgaccatcaacctttaggggtgggagagcaagactgatggcttcaaatgcttcctcaagaagatggacacaggccactcagctcatcctcacagccaatgagttgacaagcaagcagatgacaatgacaggcttttagaaagagcatcagaaagtggccagtttttcttcagcctcagccaggccttggaacttgactaggccatccacttcaccagagacgctttcaagaacatcagtaagctctttgccaatgagtccaggagagacctggaaccagccatggacctgttagtgctgtctcacggacaccagaccaacatcctggacatcatcctcatacaccaggaagctcttacccaaagtcacggagaacaggcaacatgtggcagaagggaaaacagaggtgcagaggctgatggcgttcattatcacaggaacaggatttctttggccacttcggctgaaattcacacttccatccaattcactcaagcgagagacttgaaatcacagatggaccatttcttgcaacaagagatactatcttttcaaaaagtcacctaaaatttgatagtgttgaatgactagctattctattgtggactttttccagttcacgggtactttctacagcagaatgataacagtatcaaagagctagtgccagctatcggtggtagtacaaggatgactttgtgctcaactgaaacccagctgaatatagaattgtgtaggaaagtgttaatatggtgatagaatagaaacagtagcaaatgaactaaatcatactatgaatgcctacactaccattataactttttgaagaatgataataccacttactttattgccttttgaagtaggaatattttagtggatatgctatagacctgaaaccctataaagaatcccaaagaagctggctggataaagcctg

SEQ ID NO: 9735 - DNA, 406 bp, Homo sapiens
gagcgtccattctggtggatgagccaaccacatggccagcttctgggtgtgggcacagtgccacatcttccatcactttctgatgtatcccaccagcactgaagagacagcctggagagagtgcaagaggaaggctgagaaggatgagatggtgagtgctggcttctttctgaccctcagcacacccccaggtggggaccatcaacctttaggggtgggagagcaagattgatggcttcaaatgcttccccaagaagatggacacaggccactcagctcaacctcacagccaatgagttgacatgcaagcagatgacagtgacaggcttttagaaagagcttcagaaggcggccagtttttcttcagcctcagccaggccttggagcttgactaggccatccactt

SEQ ID NO: 9736 - DNA, 223 bp, Homo sapiens
gagactggttaaatggttgtgacaagaatgctgacagaaacatggacagtgaaggccaggctgagggggcctagataaaaataagaagatttctggaaaatgtcttccttttggatatggaaagcttacacaatgcctgtaccatcattttactttagacgcagtgaacttgctttttatttcagagactcgtaggaaaaagagaatgtagccttgacccaga

SEQ ID NO: 9737 - DNA, 224 bp, Homo sapiens
gagactggttaaatggctgtgacaagaatgctgacaaaaacatggacagtgaaggccaggctgagggggcctcagataaaaataagaagctttctggaaaatgtctcctttttggatatggaaagcttacacaatgcctgtaccatcattgtaccttagacgcagtgaacttgccttttatttcagagactcgtaggcaaaagagaatgtagccttgacccaga

SEQ ID NO: 9738 - DNA, 224 bp, Homo sapiens
gagactggttaaatggctgtgacaagaatgctgacaaaaacatggacagtgaaggccaggctgagggggcctcagataaaaataagaagctttctggaaaatgtctctcttttggatatggaaagcttacacaatgcctgtaccatcattgtaccttagacgcagtgaacttgctttttatttcagagacttgtaggcaaaagagaatgtagccttgacccaga

SEQ ID NO: 9739 - DNA, 223 bp, Homo sapiens
gagactggttaaatggctgtgacaagaatgctgacaaaaacatggacagtgaaggccagactgaaggggcctcagataaaaataagaagtttctggaaaatgtctcccttttggatatggaaagcttacaaaatgcctgtaccatcattgtaccttagacgcagtgaacttgctttttatttcagagactcgtaggcaaaagaaaatgtagccttgacccaga

SEQ ID NO: 9740 - DNA, 1424 bp, Homo sapiens
tttcgttatagctagtgagaaaaaaatcaattaagttatacatacaaacatactatggtcttgttttatcaaaaaatatgtacaaaatataaaatttgtaatttctgagcatttgtattttaagtaaagttcttttcctttttattatctgtgattgctgcagtgagcatgtacaaaacttctagtaaagtttattaataaagaaataatccttgggaagacaggaatatgaatcttacaatattaaaaataatttctcactttctattttttatcattattgagtgtattgttatcttctttgaactttagcctcttcagaagtaaaaagggaatatttttatctgtttccagattttattatctatatattttattatgtacatatgtttttcttatgtattcattcaatttatgcaaacaatgatagattaatcatttcattttaattgtattcttaaataaaaataacatatattactattgcaaaaatattgctttataggagtttatttaaaaatattgaactccccaactgtatttttccattctttcattccatttattcatcaaacataacctgagtacctgttatgtagcagacatattctgctatctctcaggtcccttctatccttaaaaacttcatgtttacctgccctgcctgcacaagctgagagatttaaaataggaatattgggacttattctccttgaaactttgtcacccaactttcaaacaaaagcatttctgaagttagaaaatagtagaagataagctttaactgcccactcaaaagtttatcagtcttaaatactaatattaatcatgggaatgtcttatttccatatattctgtaagcataaatattgaataaaatgagccatatgtattcatttgaatcatgagtttcctttgtcttcaatttgtttgaaaatcaaggaattaatttgtttgaaaaatgcattattattatttcagtgttctatccccatagtacctttaagcaggcggacaagccagcagcctcacccactcaaggaagcccagatggccaggttccaacagcatgagtagctgccacctgatggctgatggagcagagtcctgaggaaaagcagatggcactggggccctaactctagggcagaataactgatgtactgtgactggcagcatgtgaggttggtgattggcccacctgttcctggcacacccttgcagaggtggctggttgttttttgagccagcttggccttgcctggcatgcacaagcctcagtgcaacaaccgtgctacaaatggagccatatataggaaaggagcaggaggctcaggagcagggtgtgtgcttcctcgggggctccagtgcatgcctcagggttcatatggtactgcaggcttctttgttgccaagaggcagac

SEQ ID NO: 9741 - DNA, 1019 bp, Homo sapiens
ggttttaaatgcggagtcatctcttgatttgtcagcgaggctttgactgtgagcttcgcggcgttcgcgcctcaccgcctcaccgagggtgggtctttcgcgcgcagaattgtgtaggattttccaaagggagtaaaagccgatcggggcctacttttaacattccacaattagtaacgtctgattcgtttgtttccacagtgggtacgctgcgaagactaggcttatgttacccagaggttagtcctctactaggccacgtactttaaataatttatcacgctagtggaaatgcggggtggaagaaaaccccaccagcctttggattgtaacagcacagtaactttccctggtttttaaaaatattgccaaaatactgcgactccatgtggccaacgtatagtgactgatcactttgaaatgcatgcccttgacccaccaactcgcatggcctctcgctataagagagcaagccggctgtgttccatgttcaattcaataagtgcaattcaataagcttttgacttgttctgcccaagcaaatcctgcctttatatcgaccttgcaagcagaacagagaatgctgtttggaaggcagaattcatagtacctagttttcttgtccctgggaattttgagggacttgaaatgtcgcgtggatgagtgagggagtttgtcttccagagacaaagcaaaacgaaacgtcaaagttctgtgctggtgaaaccagatttgaagaatatcaaaggcgtcttaccaaagaggaaaaaaaatgcatcttgccaagacttgaagaaagggattagagaaaccagaggccttgaatactcagaaaatgggagattgtgaatgggtgtagaggatatctatgaaccttgacatttcttttcacgccaagtccattcccctgttaacagttgcttcccagtttcctgcacagctgcatggtctgggacacttaaagaaaaaaatcacaggaaatcagtgttcttggtatattatataaagttatgattcta

SEQ ID NO: 9742 - DNA, 1019 bp, Homo sapiens; identical to SEQ ID NO: 9741

SEQ ID NO: 9743 - DNA, 570 bp, Homo sapiens
cgggcggctgaagagtcgaggccgggagtcgccgccgtccccgcccccgcccggtccggccgttgctgcagcctgaacgaagcccccgccggccaccgaaccacgtccttaccacggtgtttgtatttgccgagttcgccatttccacacacaacacaaacaagagggggcaaccccaagaaaacaagataaaaacaaaaccaaaaaaaaaaaaactataacacccggagggtgacccaaatcaccgcaagattggggaaaaaattttaaacaaaatcaatcctgaaggagtaggggagagcggagagaggaggaggaggggggcactcctcccgcagctgaaaacctcgagaatcgccttaaaaaaaaaaaaaaagccacgacccttcaggggtccggggggcgttgcccgctccccaccccgcgccaaggagggaaaccaccaccggtcaccgctccctgcgccgccgctgccgccaccggctgcagctccagccgtccggtccgcccgcttctctcctttatatagcgagccaacaagctgcgcgagccaccaccgccgccgccgcc

SEQ ID NO: 9744 - DNA, 172 bp, Homo sapiens
gggaagaaaagctacgaggtttgctcttcacagaattaatctgtgaaataatggattgtagttactggattaaaatggcagaaaacctagtcttggcctccttaagaccatcagactccctggaggctctgagttggcttctctctttacacctagattgcaacaagaccta

SEQ ID NO: 9745 - DNA, 172 bp, Homo sapiens; identical to SEQ ID NO: 9744

SEQ ID NO: 9746 - DNA, 558 bp, Homo sapiens
cgggcggctgaagagtcgaggccgggagtcgccgccgtccccgcccccgcccggtccggccgttgctgcagcctgaacgaagcccccgccggccaccgaaccacgtccttaccacggtgtttgtatttgccgagttcgccatttccacacacaacacaaacaagagggggcaaccccaagaaaacaagataaaaacaaaaccaaaaaaaaaaaaactataacacccggagggtgacccaaatcaccgcaagattggggaaaaaattttaaacaaaatcaatcctgaaggagtaggggagagcggagagaggaggaggaggggggcactcctcccgcagctgaaaacctcgagaatcgccttaaaaaaaaaaaaaaagccacgacccttcaggggtccggggggcgttgcccgctccccaccccgcgccaaggagggaaaccaccaccggtcaccgctccctgcgccgccgctgccgccaccggctgcagctccagccgtccggtccgcccgcttctctcctttatatagcgagccaacaacgtgcgcgagccaccacc

SEQ ID NO: 9747 - DNA, 558 bp, Homo sapiens
cacaggacatttagactagcagggacttaaagactcactgttgtattacagattatggctcggaagcactgagggaaggaaagataggtgtgggtgttataattcacccgtggttttcttgccctgatgtatttatctggtactcttttgccagtctccttctcaaagacattttcttgctaaatttcttactaacttgtcaaatggagggaaaataagaatgaattagttaaacattcttatcacaatatactgtaaaagaggctgggcgcggtggctcaagcctgtaatcccaacactttggtaggctggggcgggtaaatcatttgagctcacaagctcgagaccagcctgggcaacatagtgaaaccctgtctctataaaaatatacaaaaattacccgggtatggtggcacgcgcctgtggtcccagctactccagaggttgaggcaagaaaatcgcttgagcccaggaggtcaaggctgcagtgagctgagattgcaccactgcactccagcgtggctcatgggagtgaaaaccttctgaaagaaaaaaaaa

SEQ ID NO: 9748 - DNA, 32132 bp, Homo sapiens
agtttgctggaacattatcagatggcttagggaagacgatggacaatcggcatcagtcagagcgggagtacatcaggtaccatgcagccacaagtggtgaacaccttgtagccggcatccatggcctggctcatggtaagtcatgggtgacatcaggctctgctgctgctggtcctcagaggcgcctttgtatcaatctgattgcagctataaaaaaagaaaggtgggctgggcgcggtggctcatgcttgtaatcccagcattttgggaggcctaggagagtggatcatgaggtcaggagtttgagaccagcctggccaacacagtgaaaccccgcctctactaagaatacaaaaattaggccaggcacagtggctcaatcctgtaatcccagcattttgggaggtcgaggcgggtggatcatttgaggtcaggagtttgagaccagtctggccaacatggtggaaccccatctctatcaaaaatacgaaaattagacaggcgtggtggtacatgcctgtagtcccagctactcgggaggctgaggcaggagaattgctcgaaccctggaggcagaggttgcaatgagctgagatcgtgccactgcactccagcctggcaacagagcaagactccaattcaaaaaaaaaaaaaaaaaaaaaaagaaaaggctgacaacagaggaaatcctgtgttggcgtacctgatagccttccaagctctcttactttatcctccttgcagttgaaatacgacagccggtgagaactcctcattcgctttctgaatgttgtgcacattgcaattccttttcgttctctggcttctgttcccaaagtatcataaggtgtaatcaaccagacctgttcttagaattgtagctgctacttctcttagaattgtaacctctgccttctccttactgatcattccttccaaagaaattgaaatgaggaatttgtggccaggtttgtagcccaggtgttttttagttttacataaatgtgcattcactaaaattataaatttatttgcctaagagatgttggtgatggcatgaatgcatttggtctctgactttgaattcttttaatgctttaattctgagtcatttgccttttgttgcatttttcttaacaatttcttagtacggcatccaaggcccttggaactataaatccagccaattttccaaccaccatccttcagccatgctgcactttggccacacacagctatgtactgcttcccaggtgtgcttccaagtccttgctcacacatggtccttctgctctccctcctctgcctcatttccttgtctatcaaaatcctactcagcctgtaagtcccaactcaatacattttcccagctctattgtccctgttagagttaatgacagagcacagtctgggttgtgtatgtcaccagctgtgtacatctgatagattgagaatgtgaggaggggagaaggaccactttgcattcacctttctccttgtgtacctcacatgacacctggcacatagctcatgcatagtaaggcttagtaaattaaactctttgtaccagatccttaggaaccatccaaagctatcagagtcatatcaagactgatcagtattaattatctgcatttggaagaagaggaaggaatatagacagtaaaatattatatttctatttgtgcttaggacacgtttagaatagagtttttgtttatcagctttcctaatggtgagatttggatcaaaatgcctttgcttttcctaaggctgcccaaccgtaaagggagctgtccctaaggagacgtcaggccagaagtgaaatttggctgaaagtaatttgtttatggattttaaaagttgactgttgggcaatcatttggggttaaggtttaatcattctttctcgtaatggtaatgacagtacattggactcttagaagacttttaaaatgaatataaaatgctttgttatgtgtggtggcctttatctggccagcatccttgtgacgtggagagagcatggctctcctcactttctggatgaacacacaaatgtgctgagaaaatgcatgattggttcaaagttgcaaaatcacctcccatcaagaatcattcctataatatgtacagcctctccaggagccaatggcttcatccaaagaggatccactgagctctgggttatacgaaggcagtatcctagagtgagagtcttcccttaggatgaaaagacctttagaaggtgataagaaccagaatccactcaatccccttgatgtaagaaatgggaattgtgctcagttctctctgcaggccttgctggacccaggttcagtcatgttctgtctctcaggtcccagtctgaattcctgttctgtgtgtgctctgccaaaaactttgttcaaaagtttgggaaagggctgggtgcagtggctcaggacagtaagcccagcactttggaagacctagagggagaatcgcttgagcccaggagtttaaggctgcagcaagcggtaatcatgccactgcactcctgcctgggtgatagacggacaccctgtttctaaaaaaaaaaaaagtttgggaaagagatattgcctcactggagcaaatttacccagaatccaaaagaaatgttgtgaattgttagtacattctcacccaaggagtttcctttaccaatttgtctcactagagctgaagagtctagagagcttcctcacaccccactgtcagagggtaaacatcctgtgagtgtccctggcacaggtcctggagatgctccctagacgggctgcctcttcccttcagtgactgtgacctcttcagcctctgccagcttctggcctcttctaaggtgttttcagccattgctgtcaacttgcaaaatgtttggaatgcctttttgacctggattggtcttttgaactgactccattgagggtcccagccagctttcacagctttttggggtgctcttcatgaaggttttatataatcgccgataccgaatttcatcaaagcatgcagtagcttttaccttatttcaagcatccagtggggttggccagtcacccccatagtgttctttgaaaattgcaaatgtataccatcagctctccatatccacagattcagccaaccatggatggaaaatatttggggggaaaaaagatttcacgaagtgccagaaagcaaaatttgaatttgccacacgtttcaaatactgtattgactccacacaaatgaagtgatatgtgggcatcgtattagctacaataaataatctagaggtgatttaacgtatacaggacggtgtgtgtaggttatatgcaaacacctacagcacattatgtaagggacttgagcatcctaggattttggtatctgcaggggatcctggatcaatcccacatggatactaaggaacaactacatttagttatctctctctgccttagatatctttcttttcttttctttttttttttttttttgagacagtctcgctcggtcgccagactggagtgcaatgctgcgatctcggctcactgcaacctctgcctcctgggttcaagcaattctcctgccttagcctcccgagtagctgggactacaggcacgcatcaccacgcccagctaatttttgtatttttagtaaagatggggtttcaccatgttggccaggatggtctcgatctcttgacctcgtgatctgcccgccgcagcctcccaaagtgctgggattatgggcgtgagccactgcgcccagcctctgccttatatttcataggatgccatcatcttcaaactttccccgaaggcccaattttctagtctcctgttgatttaatcctctatctgtatcctctcctgatcgtccgtaggctgcccaagctctgggatcgaaaaattggccactgttaacctctcagcttttctctgatttttttttttttttttttttgaactggagcacactttacttctgactaacatgtaacatatatcctctgactctggacttaatgggcaaatctgcaggatcctcttctgtgagttggcctgtctgtggcctctctggcacagagattaatagaatggccttaagttatcattccataatcaaggggtttggctttaaatgcttttgcttttgtcctcgtcaggttacaacagcccttgtctttttcactaggtatcattggtggactgaccagtgttataacttcgacagtggaaggtgtgaaaacagaagggggtgtcagcggtttcatatctggccttggaaaagggcttgttggcactgtaaccaagccagtggcaggcgccctggattttgcatcagaaacagcccaggcggtgagagacacagccacactcagcggccccaggtcagtggtgtgggaagaatggcttttgcagtttccagcctaggtctgctgcttctcctaatccatactgatgtgtttaattgtgcactttcttagttatagggtttttaattcaaatacttgtaactgaaatttctgatctgcctaatataaaaagatgaaaatgaggtacagaaacctggcatgaattttttcagataaatatatatatagcatattttatatatgctatatattttatatatgtatgtatatatagcatattatatataagtatgtataactatattatgttatttttctccattagagaggtcagaattaggattaaactgttagaagcttcttctgttcaccaagccaactggatccccacatgcctatgaagaaaactgtcagattgtagtctggttcttactcctacaccccgtgatatagttctagaatccccactgttgttgttcaccatgtgggtctgttccttcttaattttccttccgcttgaaagtatcagccccaaccccataaagaaaagtgccaccccccatccccccagcaggtcagcagttctgctgtgggattgctgtctggccttgataccagctgagactggaaatcagggacagcccatatggttccaaaccccacagaacccaactgctttaacgtagctgtttgcttgaatggcctattttagcctcccttttccagagtgactaattggggattcttatcaacaaagggtataatgaatgttaagggcccagccaagctagactcgacttaagcccagaaggattttgctgctgcttggataatagattttccctgagtgaattagtacgcccttttagaatgcctagggcctggcccacatccacaccctatcactccctcaaataggatgtgaagtgaaattgtccccaattgaagtgaatccatttgtctgtcaccaggaaaacttactgaagacacattactgcagtaggggaaatgctccgattgtggactggggccatgcagtgtgctgtgccagaatgccttccatctggaagcagctgagtaaactctgtatggtttactttagttaagttacattctattctcagatacaaaactaaaacaatccttgagtatattttgaagcatttatgaagttgtggggaggggcaggcagtgaggaggcttcgaaagtatttccagttagtttttccatctctgctcgaagcccaagaagtccacctccagtatttgttaagataataagacttaatgaagtgtaaagctgaagacgcctaagagttcccaaagaagcatgtgtattcttaaaatgtcaaaatagccaagggattggttgattaaaaagggttcaaggtatatgtgataaattttttaaagatgattttgtgctgtgaagttttaataatgttgacgagaaagaaacggcttgaattttatacattgtcagcttgcaagtcttcatgggggtttttcattctttttaggagcacaagtaatgtagccacagtcactgcagaaagaatgtctttgagagggacattcttgtcatttttattagttgttcaacattgccacagaagtttgattttctgtcagccagtacatagctgccatttattcattgcctgtcagtaaatagtgattgaaaatttcctatgaactcagggttgggaatagcagaaaccaaaactgtctctggtctcaaagagcttataatcaagcagggcagcaaacataaaaaattatataaacacttatttgctgaaattgtgacaaatgacatcgaggacacttagagggtgccgtgagactatgatcagagaaggtgatggggagaaggagggtggctaacctagtgatcaggggagttgagacaggcttttctaggaaagtaatctttgaggtgaagcctggagtatgaagtaggagttggccaggtgaagagaagagagaatcaccttccaggtaaaagggaactactgtgtgtgcaacagcaaaaggaaggaacttatctatgtgccaggcattgtctttgtgcctccacgtgtggaatcccatttaatcttcatagttgatttacaaatgaggacaagacagtccagagaagtcatggagcttgtccacagccacacagctggtgggaaatggtagacctagacttagacccagcctatgtcttgaccctgtgcccagcaccactgcattgcaccctgctgcctgggtctgcgaggagggggctcattggatttctcttgtacgtgtttcagagtcagttagtgtcaagatatggcattccacatagtttcttccctgctgactcaagatttactttactattacctgcacactgacatgattcaggtcttgaccaacactgcatttttgtctgtctgtttcctctggcctgccaccttagccttatctggacctcagcagcagagaccatgccctcatgaaggcactggggagccgttcacagtcagcactggccactcctcatctcagcccaatgaagttttacatttccatgtagatgaggcactcgggatatagaaaagttgtgcagcttgactcaaagcagacagtaattgggtagcctaattgaagtttaactgcaagttccaactttgtaggctgcagaaaaaaaggaaaaaaaaaaacaacaacaacaaagtttaactgcaagtttcatgagacagcgatctgcctaaccattcactcctcctagaagcaaaagctaccgtgatcattgaggcacagccggtcttcatatatcctcaaaggagggggattagcttccacatcccttctctattcctggaggtgccagtagtgggagagtcatggcagaagttaccagaggcaagtggggcagaggcaagtagggtatatgtttggatcagtggatcagtgtcctttattgtgcagaaaaagctaaaattacagattcttctgaagggatacatagcagccgtttcaccaatgtccctcagtccatttgtccaggtccagaagtattcatgaggagctatgcgttagaagagagcacttgggctgggcatggtggctcacacctgtaatccagcattttgggaggccaaggtgggaggattgcttgagcccaggagtttgagaccagcctgggcaacacaatgcccccatctcttacaaaaaaaaaaacaaacctggatatggtggcgggtggtgtgcacctctggtccttgctacttgggaggctgaggtgggaagattgctgaagcctggaaggttgaggctgcagtgagctatgattgtgcccctgcactccagcctgggcaacagtgagaccctgtcaaacaaggaaagagaacacttgatctggaaaacaacaggccagagtcccagccaccttacttattagctttgggccctgggtcaagtcaagacatctatgtaagactcagttttagttttttcatctataaagtggggataaatttatctctctgtttattctgcttctcaggggtttgaagcccaaccagagttattttaatgtggaagctataaagaactataaaaatgctgggtgatattattttaaagtcctattaaaggagcgcagagatccttgcaggtggagaaatgtttcagtgccagtttgttctgatgacactgtatctcttaggaacatactggctctaacactatcaccgagggataaatcaccctggtttcttggaagtgagttataaccatctccaaccatcccggttgattgaacaggatccaggggtgttactcagggtttttccccactgtttagacaacagggactaacaaatgatttgaagggattagaagtgagattctgaccgagggttgacctgagcccagggaccaagccaggaatagaacccaagagtccaagagttctgcctctgagcctgcaattggaatgagactttctgcttcctttgtaatatttcatccaagtaaaggcttagatcttagcatctatgttttaaaagacccaaattttaagcagatgataggaaagtaagccataaaactgtgaaagagtactccttccagtaatccatctgaaaagtggccttacaggaaacattggctcttttttgtgtttatttgaacatgattttatttatagggaaccccccctccttatgttcttttagattaaaatacttccaagttcctctccttgttggagtgcgctggcattccaagcgacagccacctaactttcctctgaaatttccaggcaacccaatagttctcaggaaggcaggtgggggtggggagagaagagggcggaggactgcagagcctttggcctcaacatgagtgttgtggaccaatatcccccactgcatttgttcactgtacaagtatgtgtggtttggaactgaaataagaaaccttttccaaggcaacgttctgctggctcaggttgcatcttctggcctacgtgtattgggccacactttgtctgttcccaagtaaagtttatgaaaatggcacagatgcagccacacttgaggtgccactgaagctatgtgaagagcctgctacccttcaaacagaccaggcccaagcaaggtgccaagccatgtgagagtgcccagtccactgtgtaaatgtgacggcctttgatggtagtgtttgaaaagatacttagtagaaagttgcagagacccgggagcagccatttcacaaaagaaggcaaaaatacctttgagaagaaaggaatgtctgcctctgcactatgtatttgcttgtttgtttctccaaataccatctgttgcagactggggtgcatgacattttaggtaagtagcagatgaagatttatgaagctgggccctgaggtttcctctaaaatatttcttcaccttttaagtcaagacccaaaagtggggagagaagtaggagttggcagaacttgaaatatttaaactaatttagcaaagctcaggagtgttggagcttatctcgttatttaagttagataaggaggaaggggaatttgaaggataatgatagatcagtgtttaagaatacagccatcaggactgataatgttctggaatcccgggaccctcggattgtgcacgtagatgtaaattccatttgctctgagaacttttgaaaaagaaagtttttggttgatttcacagaaaagatttatggtgggcatatttgactttttcagtaaaaatagccccaaaacaccacccaaaatctgttaagacacttctcgtgaatgacctcttagatgtgaaatggaaatgggttttcttaaggaaaggccccttttgttaacaatgtttgcatgttacttatgactctccaggataaaaggactaagactcttttgggtcaccagagcctgaatgcagtcaggttggacaggtcagcaaaaagtctgcaaagaggccgggtgtggtggctcacgcctgtaatcccagcactttgggaggccgaggtgggcggatcacgaggtcaagagatcgagaccattctggccaacatgtcgaaaccctgtctctactaaaagtacaaaaattagctgggcgtggtggtgcgcgcctgtactcccagctacttgggaggctgaggcaggagaattgcttgaacccgggaggcggaggttgcagtgagccgagattgcgccactgcactccagcctggcgacagagcgagactccatctaaaaaaaaaaaaaaaatagtctgcaaagagaacttaggaaatgcttccattaactttttcatcctagctgggtaatactgcttttaattactctgctctgagagcagccatttcttatacttggtattacacataggacatcaaacagaattggcttgaattgagcctttagggaacttccaaaggtaaagattgagtaaagattcaaatgtttattaggatataccagtgttcatttttttcccactaatattccattcaaggcaggagactaggctgatatcccatgtatctagagtggatcaagtccaatatttctttcagagttcctgttccttaaaactgtaaatgggttttatattttattccatgtttggcttaataagaaaatatttttaattgctacctggtaaaattaacatttcagaaagatctgatatgttatcctgtggctcctgcctcatacttatctaggaagttccagcacgctccttccagatgagtccggtacgctgtagtagcatccatatagaggcatgtatatggtagaggtgaaaagctggaacttgtacctgtttgaccctaaggctctggttctaatctttgggcatatctgtcttttggcttggtgtaacatctgctgcttgggacagccattgtgttagttaacatgtcagtttcatcacgaaaaaggcattacatttcagtgaaactgaaaaattattgctatatccagctgaagggaagggactgtcaaatatctcctctgttgtccaaacatggcacagtagatatagtgacagtccctttatcttctactcacccttgcgtatatatttgtgaggtgagagccatatattctcacttcctgatcttgccaaaccaggtccttccagagaatgcttgaaggtagatgggtcattttctcattcctccctctacgtgagcaaccccagaagaacactaagacctgtgttgatgacattggatgtctcacttggctctgaaattaagctgatgaaattataggatcggatattttattttattttttttcaagacagagtcttgctctgtcgcccaggctggaatgcagtggcacaacctcggctcactgcatcctccacctcccgggttcaagcagttctcctgcctcagcctccaaagtagctgggatggcaggcgcacgccacctcgcccagctaattcttatatttttagtagagatggggtttcaccatgttggccaggccggtctcgaactcctgacctcatgatctgccgaccttggcctttcaaagtgttgggattacaggcgtgagccaccacacccagtcaggatcagatattttaaagaagcatcttaacagtccttcatgccttataagttaaaattcctctcacaggaacgtaagcagagaaatcttattttctgagacaggcttcttccctctcgctgaactctaaatactgtattcccctttcactcaaaggccccagacgatgccattctcattataacataacttatggaaagctcagatctattgttggaaaaaatgcaaagtgtgtgtgttcatgcacacacgtgtttgagaaaagcctttccatttctgaaatcccaagagtcatttttatgcaagattatctgttaggaaaaaacccacttttttggtcatggtacattataatcatttctagaaaggagagcgtctaatttttgccatttttggcatgcagagatgactgacttcatagaaaccacactatcctgcttccaaaagaaaaaaaaaaaacctactgaatttacatctgaatcaacatctcttcaaagtccagtccttgcatctcaaccagcaggtccttgtgcaaagaaaatgaatgggaagtgtgatttggggttattccatttactttctgatttggggttattccatttaaaaatgaaataatgttgccattatacatctgtagtcccttctgtgttcagtgaatttgtttttaaaactctaacgtgacacctaatattacatacataagataagacatttgagatttttggtttgaacttcaagaaaaaataaaacggtgtctatttctttttgagaaaaaatttgtattttgtgcattagagaaggttgaagagccatttgttatttgtggaactcctctgtaaaggcattggatttacttatttttagattttcatgactatcccatgcctcatgtttttcccttacagaatcatccacctttgcccaagataaaattgaaatctttaacaagaggacccaggtttgagttcagctcccctgctcccagagagctttagactgtaagataattctgagatacacacaggacatttggactagcagggacttaaagactcactgttgtattacagattatggctcggaagcactgagggaaggaaagataggtgtgggtgttataattcacccgtggttttcttgccctgatgtatttatctggtactcttttgccagtctccttctcaaagacattttcttgctaaatttcttactaacttgtcaaatggagggaaaataagattgaattagtaaaacattcttatcacaatatactctaaaagaggctgggcgcggtggctcacgcctgtaatcccaacactttgggaggctggggcgggtagatcatttgagctcacaagctcgagaccagcctgggcaacatagtgaaaccctgtctctataaaaatatacaaaaattacccgggtatggtggcacgcgcctgtggtcccagctactccagaggttgaggcaagaaaatcgcttgagcccaggaggtcaaggctgcagtgagctgagattgcaccactgcactccagcctgggtgatgggagtgaaaccctgtctcaaagaaaaaaaaaaaaacaaaaaacttttgttatattgggcttatataattcaaattaataatgttacttatctatatccttagtggatttactttaatacattgaggaaaccgctttctgattagcagagagaatttgtacatatgggttcttttagaacagagggtctcaaaatacggtctagggaccccctgcggaaccccagatccataacctaaaacctatttgtatatattcatgtacttatatatgaatttatagatataacaatttttataatagtattctctaatgagtatacagtggagttttccagaagctacacaatgtatgatattgtaacagattgactgtagaagcagataggtgaatacagctgttttccagttagcaagacttaagagatttacaaaaatgtgcaggtgccactctcctcaccttctgtgactctgcatacatgccaccagccaacaaacgtacctggttaatttttttgacaagctgctctagttgaaaatacagtgattgataatccatcatcttgctgataagtagcacatatcggcaatgatgggctaattcggactaaaccgtaggagccgctgtaatgcaatgcttccctttggcttcctgccaacagttgtcagccctcctggtttgctcctgacttttactgggtttctagaagtaacaattggaaatattttatcacatatcagaaagacctcttacaataatttacctaatttagttcttcaccttaacctaccatcccaataaattttaatttcggcagggtagtaagtgtagagcagattacttcaaagtgcagaatcttgtccaaaggctgcttggttgtgtttgcactgccctgactcttgcaggtactcgagaaggtgtatctgtttcagaattcacttgccaaaacctcaactttctcccctagcaaagttgctggagtaggataaacccacagtatttggataagctcctttgaactccttgtagaaagcagtttttatgaggcagttgttctgtgttaacaccagagacaattcctagcagatttccccaaacatacttcaaacatcgataatggcaggggtgacccaaactgtatcataaaatcccagggactgcaggagacttcaaaggggagacagagcaaaacctcacttctcgttatgaggagtatgggtcacaggaatcctggctagaatccatggtaacctcgcggagtaatgccaggatggacagaggccagggctcatcagttccctagactttactaattgaccccagcagcacagttagagtggtaataactggcacctgcccacctcctgaggtgttagaggccaaattaccacatgtgaagtgcttttctatcctttagtgagaagatgcaaaccttgaagtgtgtttctatttttgtttgaactatcgagggcccagttaattcagttgagccaattctgaccttgggatattcagatccatcacttagtatgtacaggcaaattgacagtagaaatttattgagtcttgaactcctactatatttcaggcatttaataagtattaaatactgggaatatttaaataattgaggacaaactgctctgaagaatcaccaagctgtttggtttgtgtgttaatattcttaagccactcttacgtgttcattaaagcaagtttccctatagttttcttgaagaactcattttttagtgatttgacttactctttattcttgaaaacaacaaaattgcatttgtgcatatggtatgtgttgaggggggtaattacaggcattttttccctcattaccgggtccgttacagctccttgaaaacaaatagttatagttttactaattgtttataaaattagctaatgatcctttgattttttagtttttttataccttagctgtatttaataaatatttagtatcttctgtgcaattaataagaacaatgggggccaggcatggtggctcaagcctgtaatcccaggactttgggaggctgaagtgggcagatcacctgaggccagagttcaagactagcctggccaacatgatgaaatcctgtctccactaaaaatacagaaatcagctgggcatagtggcacacgcctgtagtcccagctactcaggaggctgagacatgagaatcgcttgaacctaggaggcagaggttgcagtgagccgaaatcatgccactgcactccagcctgggtgacagagtaagactctgtctcaaaaaaagaagaagaacagtgtttaaaaacctgttatttttacctgaattattttgctacgacaaatttatctttcaaattagattttatcaaagtagatatgtattcacttttttaagttgaagtctttctaaatgtctaaaaccaaaacacagtaatctcctgccctacctttccctgattcctgctccctcagaggcaatcactttcaacactttgggctgtttcttcaatgtggaggtatttacctttatatttcataaataaaccaactgctatttcttgacatcatttgacttcatgttgttatacatacatgtttcctttccccatttttcagtacagttatatgatcctttttgaataacttagtattccatttttacgttattatgactgtgtaaatagtattcccagtgaagccccccacccaggtcactttgatgatgtttcctttttaaatgttgtgctttgtttttttctccttggagttagtaactgctctttcagtattgtctgctttgttttctatatgcacattcgtaatttattctcaaatgcttatttagtttccacatttttttaaccctgggcctagtaactcgtttttctttaaaaaagaaaaaaaaaattttatgttcctattgctaatttatccacaaacactcttctgtatgtgtacaaatgcactgagtaatttattggtttctaattaaattctccctcttgatgtcctctgctcccatctgactggttgttgtctagctatttttgtctctaagctatttttctatagtagtactatagcagtactattctgagtttctttcttccatttatttgttttggtctttttctttcatgaatagagacagtccccagagaatctggtgattcttgactatctgttctactcctctttaaagatgaggcactaaaaagccaattgggagctcttggtttgaggctgagggggccttactgtggaatgatcaagtggggacctgctgactctgggctcctgttgagaggagcaaaactgaatggggatgagagaggggacctgaagctctaactgcttcccatgcagccttttaaccaatcttcctgttttcacctcactccaggcctatctgtttctcctttatgctccaggccttcagagctacttgctgcctccatctttctgaaatgcagtggaggccaccatcctaattagctttctgctttgtggcttccactccctcaaggcttacatttcagcgccacgtgtccatctgcttttcagcttctaaaatattgttgacaccttctctttatccttttggatttgtgccatttgtatccctttgctttccctttagaggggtctctggactagatctgtcatgtttaatcagaagtcctataatttagacttttcactaatttgtgtttcctttcttggtgttctttcccctttacccccaactagtggctctgaattagtgtggttttatgaaacccatatccattcagccatggttctatgtattatctcatttaggcatcacagcagcttttgcacagcatctgctcaggcagtctgtggctcttctttccccgaaagattgagaatacatctggtgagaagccgttgccagtcccagcccctgctttgagtctggtattggtctttaatctctcattctgtgtgttgtaaagaaacaggttgtggaaggctcttgtcagatcccaggaacatgaaagaaatagcacaccctacggtagtgacatggccctgtcaccacccctcattgaaccataaaagctattcagaggggccagcagctggggagcgactgtacttagatcctgggtgctgatgggtgttttgtagtttccaagggaagttgctgaaagttttcttatcttgacactccaagggcaagaggtctttcttcaaagagaagcgcttgtttcagaaaaagatgtggaaaggacgtaaaatcacaggttcttccccagttctgaaaaagaaataggaaggggcaacgtggcagtcagtgtgaaaagaaaccacgcatttgcaggaagcaagaaggggttccgcagcactggctgcttccggcatctgcagtgcgagggtaaacaggcctactggggagtcggttggccctgggtttgagtcattgggctgctgcttggctgtgacctggaacaagtttttcccctcttaatctctctgagatgagattcctttgagtcatatgcctacctcggtgggtggttacgtggattaaattatatcatgtatataaagcactcagcctggcatgtggcatgcaggtagggctcaagaaatggtgtcagtgtgaatattctcccctgaatgttggaatgttgtgtgaaggtgaaacagggattgtgtccctagctcttacttaaattcaaccctgtccccgaattcttgctgaccacctgctagagtgtgaggactaggagttcatgtgcttggctgggcttttgtccttcccattctctttcttcacacaaaatgaacagttgaactcaggccaccaaacctggttgagttgctgggtggagggactctcctgggctctgagcctttgtgtgtgggaaccgcactggaaaaggtgtgcagaggccacgaacttgctctgaacccacttgtgaagagcaggtgaccccaaactattgttagtgtctgctgtaaatgatatgcctctgggttcgagcagagttcagccaaaagccccacatgacatggaaatctgtcctggagccaggtttgtcgggtaaaagttatgtagcaaatgtctccaaacattggcatctgttgtctgccgagactaggacaaccgagaatgatggagtgcttaaggaaattaggatggggcatgcgaccctgtaacagctgataaactgtttcaggccaccgtggctcatccagctcttttgataaacagctttaaaagcattacgtggtttggaaagcattcttcaaaaatggttatattttccagacgcatgacagtccactgttcagtattatttaagggttttaaattgtagaatcagattccttttcagtggggctcttggaactgtcgagggctgatctgtctgactcccaccaggacaatctcacaacaatattattatgtaggtcggggtcccctaggtctgttaaaaaaaaaaaagttcagggctaagcgtttaagaggaaaaactatttctttcatttctagctaagtctgatgggccctttcaaacactgctttcatcatgcaccttttatttcacgatttctgcataatgaaaatacaagatcgataactgtggattatcgtaatgccttgagcctttgaaaatgaacattttctagattataaatgttccctttgtaattcatttcaaacttcatcctcccatttgtcctaattcccgaaatttaactgttgccttttgagcctcctaggaaattctgggtatcctttaggcaagggaggtagctcttgggggaatagcattcaggccacaggcaattcatttgcgacttgggctcttcttagaacatatgataagtacaacgcactgtagtgacagattttttaaaaaccctattaaagcccaatatactaatgcagattttttttttttaagttttagagagattcatgggattttattctttttcccaaaggcagtggtggagctgacagagtagcatggagcctcgtcctgatgtattgtgcggaagtggcagcagttcacattcattcagtttgtcagcataggatcagttccttcttgactcaactctctgtgatcaaaataagctattggatgttccctttgggtactggaagcagcttggccccttggcaagagaacaggattgcaaatcacaagagcagagccctgactccagctctgatgctactgtgctttgtgaccttgtgcagacagctttatatccccatctcaggtcattctcccccatacaaagggggagagggtcatccttgccctggtcatgtctgcatggctgaggtgaataactagttgtgtaacttcctggaggagtggcacagaggaagctcccttcctagggctggctctgccatcagggaggaagctggatattagaatgaagaaaaagcccatgcagaatatatggcagcccgataatggattctaaaaataaaaaagcactaggttaatctgcagctgtagtgtacctaaagtattctttggcaggttgtggccctagcctaatccccagctggacttagcaccatttaagtgagttacatctcatccccgcaagggattgagtctgtagccaatttggccttgtcaccacttcagccctccctctgatttcacctttgggaaaactacaaagtggccccagacatacatagcaggcttgatcacatgggtggagtctgtcaggacagcatacatcaaataaaatgtccagggaacctgttgtaaataaaccacttcccgcatgctcagtcatcgtggaggtacttgaatgtttagtttcttttagctgatggccaagaaatcaatgtttaaaaaaaaaaaaacaaaaaacaaaaaaacaccttgacagaggcattttgtacaagaatggtgtgtgggtgtgaaaaagtaaattccaaaacatatttccttttagttcccaaacccatattagatgagtacttcttagccttggccacagtgctagagtaaatagcagtgtcacatagctcgtggaacaggcaaaccacagaatgtacaagagagaagcgtgcacaccagtgagtctgctatggcagctctctttgtcctggtttctacatctcatttgtaagcaacttgtgttcctgcattttcagagtttggccagtttatttacttagaattgcatgttcctggaatattgtcataaaagtgatcctgagatagaaaaagtcaacaggaagcaggggcattgagtttataagttctcagtctgtcttggcccatattaaagtctcattctcaggggtaggtccagctttccaaattttaatatatcagagactcctgatgcatctgggctcatgatgggccaaagtaggccttcaggagtcctcgtgttacacactcaacgcctaatggagactggattcatttacgtgtattaatgtaacctgcgtgatcatgtgagtgcaagtgctttgtagattgtcctgggagatgtggcatattatgactaaagacttaattgaaccctgaacatgtatatgaataactggagacagattgactggattacacatttttcttgaaaatttcctaaatttagcctacctctttgttgccttttatttcccagcttaagtggttctctataacactatattttaaacaaaccagaacaaatagtatacaaaagcatagacaagagggatataacaagagatggttttctgtgatccgtggcacctcctctctaccctgcctccaccaccaaaaggggctttaaattaagattcggaatggcaaattcacttaccagctccaaacacagtagacaaggaaaccttgtgaggaaaatccgagagtatatttacagtttctgttcagaaatacatagcttaacttcgaaggaggaagcgtgacttttcacctgcagatagaactagggtctgatttgaaacagaccactggcttcactgaaccccatcaaagaagtctgcttctgcccggaattggaaagtgccagtgggcatgtagttgctagtatgggatttctgtttttatttttaacaagcttgggcccaactcttagtatcaagatgggtgaagacaaaactgaccagaaaaacacgtatcaagtcagcagtggctcacccctcagaggccatttttcccacctgctcctcttatacctttggtttgtttttggttttggattttttctctatgttcctcctactctttctttctctattttgcttgggccttcgttagaagagttctagtaatcatttcagacttccaaaattcaacccagtagcctcattttacaggtggacccactaatacacaacagctcgatgtgacaaaccatagactcacagttaatcacttggagagcctggattcacctccgcgatgacctgcctttccagccctccagtggcgtcctctgtagtgagttgtaaatgtgccactctagaacattccaggaaagccctcctcttgggctaaactctaaaactaaaatgaagtcctgcccatgtgagctgcttgtttaacactttggatgctaatcagagcattaatgagaacacatggatagattcggcaggtctaatgcttgggaccttctcctatttgattccataagactaaatcccctataaacacttccctcctgtgcacacacacatgcattcacatacagcactcacgtatccctcccttatagccaaagaccgaaaaataaattttttttttctacattaaaaataagaccagctagtaaccagggttggcattcccatctcctgtggaacctggaaggactagcagatagctatagagatctgtctcctttttagtgtggttgtattaagggcaatcttgcctcccatggcaccccagaaaatccaggagttcaagtgggggtgcactgtaggaggactcagcagctgttttatggaaggttcgtcagggatcagactgaagattttgcttttgtgagaacaaagtgaaatgtgacattcaggagcagctcggggcctatatataggggcccagggcctgctgggatggggttttacacttgggctgtccttttgcccttcccctgaactcttttcacttcagtcatgagcaaacagtcagtgcctgaactaacaaccctgtagtcctccgaagcacggctggcttacagtaccgaacaaagggagggagtgccgcgtgggccggcccaggccgaggaatgcggcttcagggttctgctccataaatttaaccagcacgacgaaaaggagataatatgagccttcgtgatgatctgaaagggggaggttctgtgtcccattgattgcggtctggcccaatgccaggcccaagcctgaccgacagttgaaccatatcattaaggcgtgtaatacagctcgagtcttgtactgccgccaatgagtgcatatccacagggcaaaagtttataaagagtcgaggctgtcctgtttaaccctctcacactgcatgtaatagaaccagctgccattcagaacttgcccatctgaggtcataaaggaaagcctgcacgtttcttttcttcaaacagcttttcaggactggggagaggaagaaacgctgtctagagagggtcaaggcacggtgatgtttctctctggagaagcaaagcagtctgcctccctccccccggccagaaacgggacaccttagtgctttcttcagagtagctctctgtttgtggtataatgttgctggaggaaacagggctgacaccacaggaaacctgcctgtctccaaggaggccgcatcggtggcagaggtgggtcagatgccggccgtggagtgctcttgtcaagcttgggatgatgccgttttccttccccatcacctcgaaagctgttaatagccttgctttctggccttccacagctacgcccaggtgctaaaacagagcaggtggaaggccgccccacggagtggcctgtgagcccagagttctcactgtccgaggccggtggccccatgggaactctgtccattcaatagggagggcatgtagaaataggcacattgtcacagcaaggcctggagtggcctgggttcttacagtgggcactgcattgaggaaatgggcagacaaacaaggatttagcataagtatagtcagaaagaaagggctgcctgtgttcaaaggacaaaaggaagaaagtgggcgaaggggtagtttagtcctgtccatcagccagtcacgttctttggccaaactcgggacctgcctgtgctttgtccatggtgtccaggaagaaatctgtgtctgtcacttccagattgctgcttgtctgcaatggacaatgcctcttaggcagacacctgctcgggatgacagtgctgcagaaattgatccaaaacattgactagcttgcatggtatcgctgtcattagtattcagtcttcacaaccaccctatgaggtgggtgctatactttccccattgtacagatgggaaagttgaggcacacaggggatacgtaacttgtctaagatctcagaggtagtaaggaagggtaccagaatgtggaccctggccaactgaacacagagtacatgctcctaatctctgtgctgcttctgggccatctctcggtccctcacatcgaaagacctcatgatttcaatccaaagcatctgaccaagtgttaggtctacttcctttcgattcttggatatgaagggtaggagcttaatatctgcctatagcccagaagatttgtgcaaagaccctggttcacttggagaggaggtactataaaatttggaccccacaatgcgaatgaagggtatgtattgaattccctcagcccaccagcttaacacagagacagtgtgagggatatactatagctgggaagcttggaagggctcatgttcaagggcctctttgggccaaacagcagtgggcctgagcatggagagaccctggccttttagtgccagtgcctagagaagcaggtcactaagctttgtgcccaggagctgtgctgtccctggtccatccctgtgtaccccattccactcctgaaataatgaactactgcagccttccaagttcacagtgtgccagtttgtcacagaatagcagtgacacttctctgctgcaacccatctttgctctgccatgctgccaagaccatcttcaccaggcggtaacctgggaactccagctggtacacagtacaagaagcctccgcagtagactgtcccaggtgcatgtgctcagtatgtcatagccatctccttttggaggccagggagagcttctgtttgggtgccacggatcctggacagaagctttctagaggtaggagaagagactaaatggctggccaacccagagattgttggattgtgttatgattccatggtcaaagtgctttaaaaacctagaaattggctctggtagtgagtcccaggatggagctaacttacgatctggactccattacatgattgctaatcctgaagttcagcaaacgttggtactggctgacttttaatggagtacctgtttgagggttctcctcatcatgtatttaaggttaaattgtataaaggaattctgctgctcttttgaaattttctggttctgtttaaccatacctaaaaatgccatgaggtagccagatgattgactaactgggatttatggaaattcttatctgcaaaaatctcaagacaaagagggcactaactagaaggttcccagtgctttatgtaacatgcagaaggaagtctggtctcagcttcttggatctgagcaatcctttggaaagggagcaatgaagagcagtaactgaagactcatttcctgccttctgtgtgactcactctcctttgtcaacttcaagtttgccctaggcctgcttgcttctctccaccccaaggaacttggtctttggaagacacaggcacctgccctctctgtctgccttttgcccccaggtccagagggagaaacaaaccctcagttggaggaaagtctagagcacaggctttgtgttgctcagagaagcatgacaggaagtggtgctgttgcctctgcattggccgactcctggctgcacctgcttttcccagaggcacggggaggcccaggcaggggcccagggcctgctgctgatcagtttgtcctgcttgcaagtctgcatcccagtacccaacggggccaagtagaaaaggcacatagtgtagtgtgagccgtagctgtcaccagatgggtctttcccctccgtgcccaaccccttccctgacctgaaagggcctagcctctttccccactggcttccaccaagttctaacacattttatatatatcgatttccaggcttgtagaggcaagacctacagtccaggagttcaaatggattcagtgttgttggttcttgtttcctagaaggacaagtgctctgaaggtttggtgtcaactctgacccaaggggtgtatctgatttttatgaaggcacagaaatgcacctgaggtgaccccaagtccttctcttttattttttgatttcccaccacctggatcattaattctgctttcaagggggatggggaaaggagaacatttcaaagcaaagttgatttggtctctgaaccagcttgtcttctaggctgtagttcaccctgatgagaatcagaaaggacagtctgtaaaccccttcactctagtgactctgcagctggggagcctcaaaaccagttccagatgttctctctccctatattggccagaagggaatttcgggcaagcaaggaggcagagagcttttgcccattcattgagtacccctgtctgcaaactgtgtcttgcttcatggcactttagggagagtgctgagcacctgggtccatttgggaccagccagcccttcctgttcctcggttagaggcatgctgctccaagctggctggttactgcaagcaagagaagcccgccttcctgctgttcagggtcagaaagcaagaccgtgctggagaagtaagtcaggcaggctaggaaggagacctgcagatgacccttgggttaacaaagcaactttcacggccctgttcaccaccagctaggatagtacagggctttgcctcccaatcttgggagacgaggcatagatagtaatggtcaactgatggccctttactcttgagaaactccacccagcctccccttatccagaagaaagccattcctgactaagcctggccattctgacgccttctttcttagtctgcacccagcctgtgctgtatgcggtatatgatggtagaaatttgcactcttcatgctttgattttaaatgcatattagacattttggcatttgtgcctgaatgctctctgtatcatcttttttaaaacatagtttgattatgtaagttaaagaatgtacaaatgtaaacttctgaaaatacatacaatatatgatttcttagagtgtatggacactgctccagaggccttgcatgaattatctctttaatccttacaaaacgaatgtgatgggtactattattcccacttcaaagaagaaaataaaaaggacttattctccctgggcattgacaagcaaagagattaataatggtaaccccaccagacatctctatgggtatatatgtgtatatacactagtatacatatatgtatacatagtatacatatatgtatacatagtatacatatatatatactagtatatatatatgatttgacatgaatgggagtacatatgttgatgtctaatctttttcactccacaatggtgctagaacgtctttccattccaaaaatcatttttaacatttacataatattataatacaaatattccataagctacttaactagttccccattgatggatgtttttaatttgttgctgttgtaagcatcctctacatatatcccatcttacttgaataattctctccttaggctaaagtcctaaaactatgattgctggatttaagggtgtgtatattttctgctttgaaacacattgtgaattgccttctagggagttgaaacaatttgtactcccacccacagtgtgtgagaggactgactcctccagccgtgtaccagctctggctattcattcattcagaattcagtcaagaattacatgaagtagctgcagtgtgccagatactgtactcagaaccaggcattgttactcttttaagtctttgccaatctgaaagagtgagtatctgtgttactacttgcatttctttgagaattagaagcgttgaaacatcttttcgtgtttcagttggccatttggatttttcttcttttgtgaattacattgcgtattctttgcttcaatctttttaaacccgttaaggtcagaatttgtctttttagtgtgtggtttttttttaattcttatctagtgttggtctaacccttccaacagttgtcatttagccagtttgtcatccatgtaagtacatatctttcttccagatattaacaaagtttatatcagtctcttggtgaattccgttcctgtaagttagaatctgcatcatgactttataaaagaccatcactgtgcctacagttctttaggaatcgctttggcattaagaatgaggcttcagccaggcacggtggctcacgcctgtaatcccagcactttgggaggccgaggtgggcggatcacgaggtcaggagttcgagaccagcctgaccaacatggtgaaaccccgtctctactaaaaatacaaaaattacctgggtgtggtggcgcacccctgtaatcccagctactcaggaggctgaggcaggagaatcacttgaacccgggatgtggaggttgcagtgagccgagatggtgccactgcactccagctgggcaacagagtgggactccctctcaaaaaaaaaaaaataaaaataagaatgaggcttcagccagatgtttttggattatatgtggcgtggcctattacatggtttttatttttgtttcctcctatttcttagtatttctttccaccagttcctgttgtaaaacgtgaccagttggtactgatgctgtacatccttgtattagtaaaaatcctgctgtgcctggaggcagggacctgcttgggccaggccttcccaggaagcccgtcctaccctctgtagcatatagtgccggaccaccccagcgctcccacttacctccttcactctttcattgttgatacatgggctaggtttcctacagagtcacttcaaggatgtagatcttatcctcccaattggattgtgagtttgttgttattgccttttttggtattcctcaaggatgttcagaatacctcacatagtgatggactcagagtacctattaaagagattttcattaaaatcacaccattcagtaagttgaccaagtacatcaagagagtcagaaagacccaagatctagtttggctttgccaggcatagcttcctcatccataaaatgaaatactagtaagatacttccttatgtgaatcttgggaggctcggagtgtccagtacacattcagcactcagtcagtgcagctgtagagacatagcgtggaccttggtggcccagcagtctcaatcctggtttcttctgacctaagattggtgggaaagtacagataaaagctggttgaggaggtgttgatagcacagagtgtttttacggagtgtcctcggagggttacatgctcctttttgttgaatccgaatctttttttttttctaatatggagcctcataatcattcaaggactcagtgtgatgccacaggtttcaaacttgccagttcgtctcttatgttctgccaattttttaaaagtgggaatatgagtgcatgtgcacgtgtacacacacgtgtgtgtgtgtgtgtctttgtgtatgtaaaatgcttgggataaaaaaagatggatcaaattttgtctggcatggcatagcaactctcacctctagtatcctctaaacatttaaccaaatggactttaactggtttacttcaattctatttttattttcgtagtcatttaaatgtatggggagccaactctttcaaatgagacattttgtcattaaaacatgttatttagtttaaccgcatgggcccggcttcagcaacattgaggactgtgaagagggttctgagcggctgttctctcctgacctgaccgcagcagtgacccaccagcttgcaatgcacgcaaactgaaacaggcaggatggccagcccagggttgtctgcacggtggtcttggcatctgtaccttaggttgccagctcctggccctccttgcctgcatttggtggcccttggccctgccgtgtcatatggcacaagagcccttctggcccgcatcaccctgtgtactgattaggcaggaatcagcaaatccgttgagtgcatgtttaatgtgacacagatgtgggacatactacagatctttctgctttacaaattttcagctttttgcatttcatcagtgttgcttattatttacagaatgtaacttgagacatcagaacagattgtaatttttaaaaaggttgttgggggggtgggcccgcaggggatctgggagaaaaaatccagtagtgtggaatgttgtttgctgtccagaccaaacaaaccagtttgccaagggttgatggactatgacaatcagtccaattcatgttaacactgggggcacttaattaaaaggcagcttgacctccttatcaccaaataaagaataatcttttgttaccaggttgaccgtcgcagcaccaggcagaaatgtaccccttgtagaggcactgaagggtaccaccaagctgccagctcgtgtcctgcctccttcctgtccacagagaaaggcaccattgaacccagtccccactcagacatgtggatattcttgcctcatgcctgctgtggctttacacccaggcgctatggcaagaggcggaaaaaagaaatctcttcctttgcccaaaaatccaagatactcttgagggcattggaatgatgagccaggccagtttgacacaagttcaaggagaaggtaccatctcttgcttctagaggggcacatctggctagaggtggccctggcttctgagaaagctcagccataggttacatttaagggcaaacaatgaaaagcaccagctggtcgggaggaagatgaggaggagtgggtgattggttgcttctttcctgtgtctagttctaaagaacttaaaacttgggtccaaaataatgagagccgtgttgtaaaaatcatttgaagagagttctcctggggaatgtgagctagtgccgtgacctgatcccttggtcagatggttctgagctgtttaagtgctgagtgtcaactgtctacagggagccaggcccctgaggagcggccagggttccaagccccactgttcttttccttcctggaaaagtgcagacggtgcacgttccccggaggccaccaggcagctctccagttgccctctgggtgaacgtgacccaggtcggtaactttctagtgtcccccccacgttggaatgatcagcattcctgtactccaggggttcttgagttcttgagttgttaccaacgccctgcctttctctggctcagattcagaggaggagttccactgcggactgccgcttcttcaccctctgggcttcggaagcagcacctctggctcccctgcacccagtcctcagtcttgtggccctggtctgcccctttatcacatgtcttgagcaccctctcagcacacagcaccgttctgagcgctgaggtgcgaccatgcatagaagagacaagaatccctggttccgcatggcttccctcaacacctacgtttccaggccatggcttgggttcagaagaatcaccctccctggaagagatgagtgactggaaggagagcatgtcactggctcccctgagaccctcccaagagcctcagtttctccctctaccacctgaagtctaactgcagggcctgaaacagattctctttaaaaacccatgagtgtggtgactgcataggttttcattctcctgagttcttaatttccgtgtccctagcactttttgaagcatctgctcctgttgcccctttcttttcctcctcaccctcctccatagtctctgtttgatagtagaaggagatttaaaacctccaggctgagtgaacaggcggtcttgaaaaagcaaacaaatcgggtcaggcacggtggctcacgcctgtaatccccagcactttgggaggccgaggtgggcggatcacaaggtcaggagttcgagaccagcctggccaatatggtgaaaccccgtctctactaaaaatacaaaaaaattagccgggcatggtgccgtatacctgtaatcccagctacttgggaggctgaggcaggagaattgcttgaacccaggaggtggaggttgcagtgagccgagatcacaccactacactgcagcctgggcgacagagcgagattccatctcaaaaaaaaaaaaaaagcaaacaaatcacaaagcaggtcccctctgggggctggagcatcctcatatctgcttggctttggtcactgaaagaggccctgggggagggggcttcagggcttcccaggggagaggtgacagttaggacacacgcctcccccacttcagtcaaggcagcttcattgtcagcggttgtacgtactaagattgtgttacaaacttcatttgcagaaagtgttttacccctgaaatttttttttgaaagcgcctgctgtgagttttattaatggcacttttctaaaacttcattaatttcaattatgagaatttgatatctggtgtaattcattgagctgctagtttgatttgctctagctcgttttaaaaagctctgtcaggcaacaggatatggatgggagtgggtcaggtgagtgaaaacgttttaagcactcctttcttcagaaaacacctctgtacccacatggggtgtgctcctcaggagtcattcagacaggtccagg

SEQ ID NO: 9749 - DNA, 482 bp, Homo sapiens
cgtctaatttttgccatttttggcatgcagagatgactgacttcatagaaaccacactatcctgcttccaaaagaaaaaaaaaaaacctactgaatttacatctgaatcaacatctcttcaaagtccagtccttgcatctcaaccagcaggtccttgtgcaaagaaaatgaatgggaagtgtgatttggggttattccatttactttctgatttggggttattccatttaaaaatgaaataatgttgccattatacatctgtagtcccttctgtgttcagtgaatttgtttttaaaactctaacgtgacacctaatattacatacataagataagacatttgagatttttggtttgaacttcaagaaaaaataaaacggtgtctatttctttttgagaaaaaatttgtattttgtgcattagagaaggttgaagagccatttgttatttgtggaactcctctgtaaaggcattggatttact

SEQ ID NO: 9750 - DNA, 274 bp, Homo sapiens
ttttttttgagatggagtctcgctctgtcacccaggctggagtgcagtggcgcgatgtcggctcactgcaagctcagcctcccgggttcaggccgttctcctgcctcagcctcctgagtagctgggactacaggtacctgcaaccacgcccggccaattttttgtatttttagtagagacggggtttcactacgttagccaggatggtctcaatctcctgacctcgtgatccgcccgcctcagcctcccaaagtgctgggattacaggcgtgag

SEQ ID NO: 9751 - DNA, 688 bp, Homo sapiens
gatattggaatttatgttttacagacaaggaaacttagttatgtgttttgcccaggctaataagttatggaagcacaattcaaaataggtctgtagctttggctttgaatacctgggtagtgagtaaaattttcatttcatgtggtggtttttacatagttgtaatccaagcagtaacacttacaggaagattagattgtcagtaatgtgaacagtagattggaggggaagaagcaaagagagccagtcttaattggttggatacttttatttctgtattcctcagtgatgttataaataaatattttgtttttcagagaatgactaatagtagcagctccccaagccttctaaatgacagtgccaagccatattcagcccatggtaagacctgatcccttttgcttatgtgtgtctgtgtatatatttcttactctaaaagtaatatacaaccattgtagaaattttgaaaattgtaaacgggcataaagaagaaaataaaaattattatcttcccactcagatctaactattgagatttagattccaggccaggtgtggtggctcatgcctgtaatcccagcactttgggaggctcaggtgggaggaatgattgagcccaggagtttgaaaccaacttgggcaatataacaagaccatgtctctattattaaaaaaaaaaagaaaa

SEQ ID NO: 9752 - DNA, 339 bp, Homo sapiens
gtaagcatgttaatcatgtttaaactttattttttgatggctttatctaaatttcaaaaattcttccctaatttactcctgattacaaggcaaacttaaaattttcaacatttcataatgggcccaacaatttaaaaagttgaaaatctcttcacattagaaatttaattttatttggaatttagattgatagaccatgtatggatttttgaagtattttataaggactgatgttgtgacaagttgaataatttgatgcctttgagtcttaatgagaatcttgttaatactaataatcatctagagaagatagtcttttttggttaggatcagcaacag

SEQ ID NO: 9753 - DNA, 253 bp, Homo sapiens
gccaccactcctggcctagtgtttatacttcaagttggactgattttaagggtttgtatgaaaccaatgcttttttgaattattttaacttatttcgtgtagatatgcactctaagggttgtttataaagaaacatgcacagccatatatagaaatggttatgttttatgaacaatataactagtttaatgcatagttataccttattttaactgcctgtgagccacaatttcaggtactttttaatatatat

SEQ ID NO: 9754 - DNA, 12045 bp, Homo sapiens
acatcttgaaggcggcattagctgaaactgatggtgaattttcacttcatgaacagacagtcttactactttttcttgatcattgcttcaatagtttggtacttttactttatattttggggtaattttcaagttttcttgttcttttaggttgagtttagatgaaattacctctgtagccaactccattcatccataatagcaggcaataaggataatgctaaaagcttgatttcagccacttatcagtaaaaccattttataagtctttaagatatgtttttataagatatgttcactttttaatagatttgaaattgatacttaattttttctatctagactcttaagaaaaatgattataagaactgaaactctaaagggagagcacaaaaatgagaagcagcaaggagactggttatatggaattggagtaatgagatctgtgccacaaactgcatatacatacaggaatgtagtttcattgcttttcatcatgccttatgcataggctggttagtcaacaggagagttgtattttgagttgactgataaaggccaagtgtaaatgatctttgaaaatgtcttgtgtgtgatacattttcatccttcataagattatcttctaaaaaattaaatattttcagtaatattttatttgagctttcctgtgtggttagctgataaatacacatatttatttagtgcctctgaattgataattcacttacacccatgcaggaggaatgcatggagttctttcttattctgaagactgagtgttaatagatggatgattattacctgtttccatgtactatctcacatggatcttttaaaggcataaaaaaagatttatgatgcctgcactggataccactgttatctctttaacatttatttttatttatttatttatttatttatttatttatttattttgaacataaactcaagattttattgtcttcataataaaagatgacacttagaactgaatcacttggccctttctcttcttatctcctcccagttcaaaatgcttgcatcttttaatagccagcattctcttagatctgcagttgggctcaatgcactcaagccttagcacaatctttgtagttttagcctttttccagaaaattggcttagtttgcccaccatagccactctgcttcctgtcataacgccgctttccctgggcatacagagaatccttgcccttcttgtactgtgtcactttatggggttggtgcttgccacacttcttacagaaagtccggcgggttttagggacgttaaccatgcttgcgtgagcgttatcggcacagaaagcctctttaacatttattaaactaaacagaacaaatagaaatataaatagatgtgatttttttatcagaaactaaacagaaacaagattttattagtattagtaatttggtgatagttttagccaacttaccaaactagtttattattgaaatgctttatcttttaaaatatgcagtcagttcttatttgaggtagttatgttcattttataaagtagctatgaacattgaatgagctaatgctgaaccattactccttggggaaatacagggttaggttcctgcaagccttggtcatgacattttacaaactatcaatacatagccttattttatgtgtgtttctatttaaagacagcttatttattgtatattattgattcattaaccatgaactcactgccaacagcactgtaattatgcctgaacgaagcttatctaacatacgtatttactctgtaagacatatcacagccttcttgcacccatgaacatcagacagcacttcagccttgggcttgttgccattttaaacagcgaaatcatcaaaaagcacaagcgtgccaaaaaaaatagtactcaatagaccacaaaaaggatacttgtttcttacagtatgagagctgagaatgaagcagagcatcagctcagtctcacctgagaatgtgcacgtcggacaactcagatttttgtttgggccatctggatgactgtgaaagcacatggagtgttgattttggggttacaaatacatttttattagtatatgaatttgcaagtacaaaatctgtagataataaggatggagtcttttttaaagcattgaacttcttaatatcaaaatattaacttgaaaatatttgtggcatgttttccctccaggacttaaaaaggcagtatacttcttatgtaaagacttaggtagaaatgctggtatgtttataaacttattttcttcatgccctaaacaggaagtagacttgatacgaagtcaagtacagcagcttatctccctcccaatgtggatgggcttacagctggtaagtctctaatttcagagtcttatgaatgtatgtgttataagtagaacgtgtggttttagtctatagccttaatctggatatacaagtggtagctaaataccccttttcttagaaaagccactttgcttaacttttcatagatatagtttttattttaaagtttttatatgcattcgatgtttaacttaattttagtaatataaaatgaataaggtagtatctattgagcttatagagaaagggggttaatttagcaaagtatagatgagactaaatgtggacttgaatttttttttccttgattagagtatatatatagctgtaggagaagatctggatcatacctaatattaatgacttccatttttccataaagtctttattgggtaatatgtgcaggtaccaaagccaaattaatacatcttaggtagtttagttaaaactatcagatttcattgtaatgctttattcagaatttcccttcctgcacatgggtgtttctgcatatactcagatatgcagactcatttataagcaccagttgatggggatgaaaacataaggcacgtataaataattaatactaagttaaaaagtggcaagtgctataagagagaatatgctgatgtggacatttccttatttacttgtgatcgctgttttttgtgcattgtttcagactcatatttttcaaaccttagtgattatgctaagtgttgatgcatatatttttcagacttagctctttaagttttgaaataaaaaattaattgattattgagcttacaatcttgatttgtatttttattaacaagagctagagttgaataattttttaaaatatcgttattcatttcttaattttcagggtttgtcatgttattttcaggttttatcagattgctctattttgtactcatatattagaaaactagcaaatagttgatctaatccttatccttgtaaactttgaggctactggtaatttaataacacatctcttcttcaggcacgattggaattagaattaaaaaagacacctaagctaagaaaattctggaacttgattaaaaagaatgatgaaaagatggatccagaagcaagagaacagtatgttggcagagcttcatttcatgttggcttattatgctggattgtggaccttagatgatgttgactggtttgttgtttccctttatatagtgctgagtgcaaataaattattataataagtgcttttacctagactgtcattaagaatattttccacaaagatctaaagcagaagccagagcatcatgcttttcttcttttccttctttctgtgctgctaagtatatatagttgacccactgtttttctccctgcctattgtccgtctccctcatggatggttctcaattttctccactatcttcaggctattaatataacttctctttctttttcttactccttcactctttttttatttttttgagacggagtttcgctcttgttgcccaggctggagtgcaatagtgcgactgtggctcactgcaacctctgcctcccagattcaagcgatttctcttgccccagcctctgagtagaggggattacaggcatgcgccaccacgcctggctaattttgtatttttaatagagacagggtttctccatgttggtcaggctggtctcaaactcccgaccttaggtgatccgcctgcctcggcctcctaaagtgctggggattacaggcgtgagccactgcacccagcctaactctaaacttcttacaaggttttcagaagcttgcagctgtttcttgtgactcttgcaaatcactggactactctagtcattgcttctttagcatttctttcctaagtccctttcctcttcactccacttaattgaatattaaccatataaacactcttccagaccaactactttagatcatagtgctttcatctgaactcctagaacacatgctctgtgatttttttttgaaacaccagctgtttatgtaatgattgggatatgtatagtagttgaggatgtaggttctacaatcagacttagctagattccacactcaattgctgtatgactttgggcaagttacttcacctctaagcctcattgtgaaatctggacagtagtacccatttccgaggactgttatcaatattaaataagatgtgaagtgtttagcatagctcagatcctggcaaaatgcgtgcttaattaatgtcaggcagttttattaatcacatactggcatgtattactaattgtgtttataatatatgacttgttattgcaagtagattttagccgttccccttctttgtatttccagcaggactgttacaagcatttacagctgtacgatacttgatacatgtctgttcattaatggatatatcttaaagtagtaatgaatagaaaattattttttaaacatttgatctttagctattgtaatactctattatacttaaacgttaaaatataatattgttcatctcattttaactacattaaatgtgagatttttaatggtaagggcagactataaatggaattttgaaacttctttctcggtctgacttgtaaatcacaaatgaaaatgtttggctgggagctgtgtctcaggctgggcgccatggctcatgcctgtaatcccagcactttgggaggccgaggcgggtggaccacaaggtcaggagttcaagaacaccctggccaagatggtggaaccgcatctctactgaaaatacaaaaattagccaggcatggtggcaggcgcctgtcatcccagctactcgagaggctgaggcaagagagttgcttcaacctgggaggcagaggttgcagtgagctgaaatcgcgccactgcactccagcctgggcaacagagcgagattccacctcaaaaacaaaaaaagcagaaaaaagaaaacgttcacggtgagagaaggaggtgcttgcttaggtggcttattaggtcagtaatgtgactctccttttcttcatatagcactgtatttacatagaaagaagaagctgtatattgaagttatagtcccagcttcacaaagaaatgaacagttgaacaatattggaaagccgtggtcaacatttaaagtttacttttgaaatgactattcttcaaaaataattggtcaatgttctttctgattttagggcatatcaagagaggagatttctttcacaactcatccagaagtttatctctgtgctgaaatcagtcccactttctggtatcttcttttttactcagtgcatttgtgaaattatcatatagctgcccctatggtatttactcatctctaatctaaaaactgttcttggaatgattttaaattgtattggcaaagtgtatgtcctctcctttttaaatacattaccagtgtgagtattgggactgcctttaagggttattttattttatttatttattttttgagacagagtgttgctctgtcacccaggctagagtgcagtggcatgatctcggctcactgcaacctcccccagcagggttccagtgattctcctgcctcagcctcccgagtagctgggattacagggatgcaccaccatgcccagttagttttgtatttttggtagagacggggtttctccatgttggccaggctggtctcaaactcctgacctcaagtgatccatccacctcagcctctcaaagtgctgggattacaggcgtgagccactgcacctggcctaagggttattttaaaggcaccagtgtggttattgaaatattcctttatgtagcaaattttttatcacctaattactagatccaggtcctgtctaaggtgctgggatacagttgtgaagaggaaaattacagaccatatttgcatgttatttataatatggtgctgaatagtgtttttaagtcctattgataccgttggaggaaaaaaggagaaatattactgagatatgagctaaaagactaaatagaaggattttcctccatcatagctccatttactgatttaaaaagtaagtatatatatatactatattaaaattataaaatataattaaaatataattgtttaattattattatttttttttgagacagagtgtcactctgtcagccaggatggagtgcagtggcacaatcttggctcactgcaacctccgtctcctgggatcaagcaattctcctgcctcagcctcctgagtagctggagttacaggcgtgtgccaccacgcccggctaatttttgtatttttagtagagacgaggttttaccatgttggccaggctggtctcgaactcctgacctcaggcagtctgcctgcctcggcctcccaaagcgctgggatcacaggcgtgagccaccacgcttggccaattgtttaatatttttaagtggaatataatctaagaacagctctataggtataccatatttatataggtataccatatttatatttttgcatcagaaagtacagcttttaaaaaaacacaatggaatgagttataaatgctgaccctccaagtaatattttacaattgaaaatcttagctacgattcagtgaggaattgataccaatgcagtaaatcagttgtatctgacttagggcacagtactactactagcattagtataaagaaaatgttttggcccgggcgcagtggctcatgcctgtaatcccagcactttgggaggctgaggtgggtggatcacgaggtcaggagatcgagaccacagtgaaaccccgtttctactaaaaagacaaaaaattagccaggcgcagtggcaggcacctgtagtcccagctactcaggaggctgaggcaggagaatggtgtgaacccaggaggtggagcttgcagtgagccgagattgtgccactgcactccagcctgggtgacagaacaaaactcagtctcaaaaaagaaaagaaagaaaacgttttatgcttataatcttaagtctcttaatgttagtatatctaaatctttccactaagtgccttcaaacctggaaagaggactaagattgggttttcttggcacaaagaataacattgagcgctttgagctactaacgtctatagaactaatgtctgtaataaaaattgatatctctaactatggaatgtttatctagggtcgtctaggtttcaaaagcaagaacatagggcctgcagtaatttaacagcctataaaccacttgctgttgccgctattgtttatatactgtcagaaaacaactttttttttttttttaaagatggagtctcattctgtctcccaggctggagtgcagtggcacaatctcagctcactgcaacttctgcctcctgggtccaagtgattctcctgcctcagcctcccaagtagctggtactacaggtgcacaccaccatgcccggctaatttttgtattcttagtagagatggggtttcaccatgttggccaggctggtcttgaactcctgacctcaagtgatccaccctcctcggcctcccaaagtgctgggatttcaggtgtgagccactgcgcctggccagaaaacatcatttcttaatcttgagtttttatcaaaatttgtcagcttgctggcaaaggaactaacaggatgatgacagtaatttgccagttcagaatgggtatgaagatagatggttgtgtagttaggaaacagaaggctaattttttaaatattttgagaaggattgtagtttcctttttaaaatagggtcattaaaaacagaatgcccagatgagttgttggaaatctgtgcaggatagtctgagatgttaagattgctgttagaagggaaaaaaagttacagtatagctgagacaaatgataaggatatatttgtgtctgaaattgggatagcaaggtttctaccttaggcaacatgcccagtaggaccagctctcataaaaaaacatgcaactttagtcaccagagcaccatgcattgttttctaattttaaataggccatttccagtaatttgtcaagacgtaaataaagatacagaattcagaatttgctcactcttttagtttgggaaaaaatgttttcctttgacagttacaagaacaaaagatagcaacaaaaggttggttcgaatggatttaatttaaaaattgctcctttaaattgttattttaaatgactgtatatgtatgtctcagaaaaccagggttccagttctaaccaaccattctagctttacacctttatcaggtcattttctctgatcatgtttttctacctagaaaatgaagatctagaatagatgctctcaaaggtcttttccagctaataatttctatacttctgttatttcagggtttggattatgggcatatgctagctgaaaaagttccagttaacatttctgtatatattaatcacaaaagtattcacatttcttgctttacattaagctttccgttttcctgtacactacaaataaataaatggatttttatgtaagcatttgtaggatgccttctatagatctggcactgggtgttagtcactgctgtaagtttttaaactaagtagcaacaggaaacctaaaattatctttgttttaattgaaaccaacttgacaggatggttttagttggcaaaatggtagaccatttcctggcattagaaaaaaagcttttactctgaaaatatttcatgccccaaggttgtaattatttaaaaacaaaaataaatgtttgtaaaaatagtatactatgctcataaatagtatataataagctagtgatttaaaaggtatttttattgttctttgtgtcattggcattctaatgttaaagtaatacatgtacagtggaaaaaaataataaaaattacctctctaattttcagtgcactttaaaggtgtgtgtgtgtacatatacgtatgtgtgtgtttatacatacgagaaaactctcagaagtttagaatgtaaagacaataaggaaagtgaagcaaaacctgatataaaactgccttctagtttttatatctctaagttttttcaaaatctaatttaatacagatttttaaaggttaatacttttaaaatatctttgcaaacctgatttttaaaatgtgcttttgacccaagctagatcttttattttctcatatttgtagagctaagtatcagggtaaggccttccttaaaaaaatatatatgtgagatcctcattctaaatcatagtccaattctgatgaataaaagacaattgactttatttaagttattaaataactgccagttttcagaaacagcatgcaaaatggcctagtaaggaaattctatcatgcgttctctcttatgtctagaacctgtcactatggacaaagttcattactgtgaaagattcattgaacttatgattgatctagaggtaagaaatctaccgtgacttttttgttatataatcattagggggtctaagattaagcatatgaccatatatgaagtatttttttctttccttttcttttcaatacatatgtatatatttattatatatttcaatttctcacattaatgagagaaaggaaaggtatatatttcctttctctcattaattaaaatatattaaaggtaaatatgtatatatttattatatacatatgtattatataataatacaatacatattgggtgcccatggattgtataataatatagtattgtatacaatatttattaatatagattatacattaataaaaaattaatacaatacaataaaatacaataaaaatacattaagaaaaaaattctttttcttttcccttttcttttcttttctttccttttcttcttttcttttcttttctttgagatggggtctttctctgtcaccaaggctagaatgcagtggcgctgtctcggctcactgcagcctccgcctcccaggcctcaagtgatcctcctgatccacctcagacccctgatcagctgagactacagttgggcaccaccacgcccagctaatttttgtgttttttgtagagacggggtttcaccatatttcccaggctggtcttgaactcctgggctcaagcaatccttccaccttggcctcccaagtaggaggattgcttgggattataggcgtgagccaccgtgcctggtctatatgaagtatttattcatcacctcaaactggttttactttgtacatgtttcaaggtgtcacttagagaaggaagtcacaagtaattggcccttcaggttttcaaatgactgactcatctatcatgggctgttgtttgtagaaaaaacattacatagtatagttattaaacatgagtccagcagtgacaatttattttgtgtcatactttaatacccctcatacagagttttctgtagtgggtgaagtcatgggtttataattgtctctttaaataatctcacttttctaaatgtgcccaatgtttgtgaagaaaaatatagctgttgtgttcaattttttaaaataaagattcttaaaaaaaaaaaaagatttcatactcttaggtgcaggatttgctgacaagttcagacacagaattgatgtagttcagattgaattgatttcctttcctttctctcattaatgagagaaattgaaagaaaatctgttccttgtctggagaagtaaggtggttttttgatatgagtattagcatattggactagcagtcattcatgagatctttcaaattctagctctgccagtaactaacttctaacttctgaggatctcaataacttcatctataaaatgaggatatttgattagattagtaattttcaagctatagtgtaggggaacatgaggagaggaaacaaagacaggaatctccacatagggatttgtacttccttttttctcagagcaactccacttttaaacatacacacggtatatattgggattttatgtaggattttgttggaaaactactggccaagatgatctgtgagattccttagtgctagattttctttctttctttttttttctgagacagtcttgctctgtaatccaggcttgagtgcagtggcacgatcttggttcaagacaacctctgcctcctgggttcaagcaattctccctgcctcagcttcccgagtagctgggattacaggcgcccatcaccacacctagctagtttttgtattcttagtagagatagggttttgccctgttgcccaggctaatcttgaactcctgacctcaggtgatccacccgccacgccaaagcactgggattataggcatgagccaccgcgcccggcctttattttcaattttatcttaaaagttcttttatcatcattattgtttttaaaaccaaaaacattgccactgggtttatttacagcatgaacgggacctcttgcattgtatacagtgtgtctattggaaggttggagggtaccttgtatgtgattaatacttgagagttaaatatcactagatttcacttctagctgtggagaatagatgcaaacttactgttatgatgtttgtttttcccaggccctgctacccacaaggcgctggtttaataccatcctggatgattcccaccttctggttcactgttacctttccaatcttgttcgtagagaa

SEQ ID NO: 9755 - DNA, 554 bp, Homo sapiens
atgagcattaattttaaatgaactgtgccccaatagtatgactctttctataagatgatggtgacagatagttgatcatgtagaagtatacatgctgccttgaataaggaagctgcaaatgcacttaactttgttgtcttggctaggaagacacagtattttacatttcctgttatgtcatgcagaagaaagcatttcttttggttttgttttgttttgtttatggagacacagttcgctctgtcacccgggctggagtgcagtggcagtggcatgatctcggctcactgcaacctccgcctcctgggttcaagtgattctcctgcctcagtctccccagtagccggaattacaggcatgcaccgccacgcccgggtaatgttttgtatttttagtagagacagggtctcaccatgttgcccaggtggcctcacactcctgaactaaggcaatttggccacctcggcctcccaaaatgctaggattacaggcgtgaaccactgcacccagcaggagaaatcatttttaacaaacttctaatgctatctttcaat

SEQ ID NO: 9756 - DNA, 4509 bp, Homo sapiens
taatttatcaaggaaaaaggtttatttagctcatggttcttggggctggatggtccaagattgggcgactgtatctggtgaagggcttgtgctacttcatagtatggtgatagttgcttctggaagaacagaagggcaagtgagtgcctccaaaagcagagaggagacaaagtgccctgacctgctttatcataacctgctctccagagaaataaacccagtgttgtgaaaactgcattcatctctttgtgaaggacccaaacacttcccactaagccctacctctgaacactgcagcaatgagggattaaggttccaacacgtgaacttttgagggacacacttaaatcataacaggtagttatttcctgaggattaaagcagtttcacagacagatgaagaagaactttttcttctattacttagtaatcgaccaggagacctattctttgaaagagaatattctttggttccagtacacatggtgggggcgggaatccatgaactaaaatgggctaatgacagtgatggcagacctaagattctttttccctccaaagccatccccaaatcccttaagacctatacttccaagcctcacctgtctgtgtctctttgcagtggcagtgaccctggacccagacacagcacatcccaaactcatcctttctgaggaccaaagatgtgtaaggcttggagacagacggcagcctgtacctgacaacccccagagatttgatttcgttgtcagcatcctaggctctgagtacttcacgactggctgccactactgggaggtgtatgtgggagacaagaccaaatggattcttggagtatgtagtgagtcagtgagcaggaaggggaaggttactgcctcacctgccaatggacactggcttctgcgacagagtcgtgggaatgagtatgaagctctcacatccccgcagacctccttccgccttaaagagcctccacggtgtgtggggattttcctggactatgaagcaggagtcatctctttctacaatgtgaccaacaagtcccacatctttactttcacccacaatttctctggcccccttcgccctttctttgaaccttgccttcatgatggaggaaaaaacacagcacctctagtcatttgttcagaactacacaaatcagaggaatcaattgtccccaggccagaagggaaaggccatgctaatggagatgtgtccctcaaggtgaactcttctttactacccccgaaggccccagagctgaaggatataatcctgtccttgccccctgaccttggcccagcccttcaggagctcaaggctccttctttttagggatatgccacattacctgctcccatcaccatccagcccagcaccctggacttcagtcgcctggcccaaccccatgattatggaacgtctcttcaccttaacccaaatccagacccttttgtggtttctatttgtaccacttttctcccaggcctcagttctgaagcttacctttcttctaaggaattgaagctcccagtgacctggagggaggattcctggaaaccaaacaatcagtttaggtgcaggtggagatgttgaatatgtgttaccaagatacagcacaggttcagggaaaagagttcgctactccaggggttatttagaagacactttctctgcctcatcctgccctcaagctttagtcaagaagttatggcccccagtccctgacttcttacttatcccattgaggactgcctttctctctctcagttctggcctctgccccccaaagtcagctctctaaaagcaagcatgttttagaccactcactctttccctctttcttcaggaatgaattgggaaaggctgatgagtaaaacataccatccttttctattttcttgatgctgtttacaacatagtttggtgatatccagagctaatgtacatgctttcaaaagctaatctgcctgttgatggtaactaggtacagcgactttaaatacagttgctataatcctgaaaagccccaggagcacatcagggagctgggaaacacagttgcagagaactcagctgtatgttgccctctgaccttggcccagaccttcagaggctcagtctgttgagtctgttgtgactgtcttatgaatcaatctgttgtgccaaccctttctgagattcagagaggtccagctagaaaaagtggcagttttaaccaccaacgtagaagcttttttttccccacaagaccattgtactgcaatacttgagtatttgtgtagcaaacagcctcttaggttggagagtattgatttcaaataggaagttggtagactaggtgtgaggatgaaataatgaccttgatttttgggtgtgtattgcagaagcctcgtcgctttcaagtcacatcatatatgcgatctggcctaaccatggagatattggttatcagtttgcagatgaatacacagttctatccaacagaaactgtatctttctgtttgtcagaagttctccgttagttcctgtattagtcaaggttttccagagaaacagaatcaatatatattggggcaggggggcggtggttattataaggaattggctcacgtgattatggaggcggttaaatcccaagatctgcaggataagtcagcaagatggagtcccatgagagctgatggtttagttccagtctgatggcagcaggcttgacgccaaggaagagatgatgtttaattcaagtccgaaggcaaggaaaaagctgatggtcctgtccaaaggctattaggcaggaagaattctcttagggcagagttagctcttttgttctattcaggccttcaactgattcagcaaggcccgcccacatttgggaggacagtctgcattactcagtctactgatttgaatgttaatgtcattgagaaacaccctcacaggaacactcagaataatgtttgaccaaatagctgggcatcttgtgacccagttaagtggatacataagattaactatcacagtgactcagtggaattttttgtttgcttttgtacagttttaaaataaaagtttggtatttgtgttttggtatgctgttattttcattgtgaatgaggagttgtggggaaggtaagagattggtttccaaagagctttgagtcccccaaggcaaggtttagccaccgttcatactaaagccatagttttattcctgagtctgctctctagtattttattttatcaatttataaacaaatagtgttcataaggcacacatatttcactcaaccatattcagttccaaacatgcattcctgaatatcccaatcttaaaactaactcacattgtcagcttgtggaggcagaatacatgcatacatatacacatacatacatgaatatacatataatatacacacacatatgcatacatacacatatacacatgtatacatgtatgtgtatatacatatctgtactacataggtgtatatatatgtatatgtatttagcatgtatgcacgtgtatatgtatacacatatatacatatgtatgtataatacatattcacacatgtatgcatgtatatacacatgtatacattagtatatgtatatacacatgtatgtgtattatacatgtatatatgtacatacatatcagtctactgatttgaatattaatgtcatcaagaaataacctcaatatatgtatgtattataaccttacaactatataaaacatacatacatatatatgtatatatgtatacacatacacatgcatgagaatatatgtatgtatatataatatcctcacagtaattctgccagggattttatgggggagggagttggtactccaaatggctaggtggtagagccagagttttatacttggtttatctagctctgaaggcaatgctccttgttctttgcactgaaacattgtgcagatacgagaagcctgtagtttacgtatttcattagccttttattattttaaaaaataaaacctgaaaaaaaagacctagtcctggatactttggtgatcttgttgtgtctggattgacgaacacgtgtcaggcttaattagggatgcacgcggaacccgggaaaatccctgctcaggggggctggaagacctggaggttgatccttgaacagggtacttttagcttctccgataaggagattgggttattttatctttaaactcccttccagctctaccctcctttgattttaagttataaaccttgagtgaggtgccagactctaggcttcgttggacgtctacaggacggtcaaggattaccaactcaaagtaaagaaggaaatttgagtacttgcccccttggaggttgtgtaggttggctatacagattctacaacttcccagacgagtggccctgagacttggggctgaacgcgcgagcacggaaagaaatcccaccgtaggacggaacccagtctcttcagctccatcctaaacttcgc

SEQ ID NO: 9757 - DNA, 5870 bp, Homo sapiens
ccctcgcctacagaggcggcgctgtccctgatcgagcggcgggagcgaggtgggtccgggttgggcccgaggtcgcggggggaggcggacacgacttcgcgggaaactctgtacacggccacttccctctcaccgaggatctggatgctgctgctttgctccctggaccgagtgggaagccaaggggccttgtggtccctccgccgcgaccctcggccctggcccccggcccacgcagccaggtggctgtccccaacccattccccggcccttctgttgggtttgagtatacagccttcctgccgctgaccatacgtttaggatcagcccctcctcctctcccacctctctggccccaagcccgccggcaatctctgaaaccagctcttgtacccttggacctccgccattggcttctccccgccccgcaacacacaactcagctcttgggccctggcctgtgacacttctggcagcctttgcttcctcttccctgaccgtctcctgcgaccctctgacttccttggtcctcctgtatctctgacccgttatctagcttccctgtacaattaccctgttagcaccttgctcttggtctttcatagctcctctctcctcttcctccctgcagcccttgacttggccccaaagacctgtaacttcggacctccataccgcactatggcttggccccttgcctttaacctaggcgcttcaccttcatcatctgtgatcactagccccatcttcttggctcttaacttcttagacctggcccctcctccacttctcagccccttccaccgttgcttctctctgtgcagctgagccaccaggaagacaaagcccaatagaccccttttccccccagatctctgcagtgtgatatgaaagtgcctctgtacttcagctgcactgtcttctcagtaggtagttgcctctttatctctgcaagtcccagtcttacccatcctgcaaaccttaggtcaaatacctactcctccttgaaacttctcagccctgatttcatcagggagatacatctgtatcatgtgaacttcagtggtactgtttttatttccttccttcccgtcttctctccttttttccttcagtaatagtataatggttaaaagcactgactttgaagtgatgggcataggccccagttctgccacttacttgctgtgtgcccttgggcaagatacttaatttctctgagcctcagctttctcatctctaaaataaggatgatgtgaagtgaaattagatgattcatatatggtccttagtccacagcttagcacttgattcgagctttaaaaaaatgttaataatgtgccaggtgctgtgttagacactgaggagtgggtacaaaggtgactaaggcacagttcctgcccctgtcccctgaacttaaccttctgcattgtatgacaatttctggagttcacggtctgtttcagtacactgtatcacaaactgagtggtaatcataatcctaaatccttttgctcttacattgacctagcatccagccccgggtagagctggaacttggtaaattataggttctcagaatagcagtttcggaagtgagtggaggctgaatagctcattgcgtagagatactgtagctgtaggtcagatgggagcagggcagggggtgggggatgggatggtggcgtgaattaagatcacatcctgtcacttatacattcaaaagacatttgagcacccagctttatgctgcagaaggagattactaatatgacccagtccctttcctcaagttgcttataaactactaatagaaacagacatgttctactagtagttgcaaaccactataagccaagcacaagattctgtgactgcataaaggagaaagtaggcaggaatcaggagattgctgaggaaaagtgggtgagacagttcatggttacttgtgtcccatgaagacagagctggtgttttattcaactcattcaacaaatacttatgaaggatctactgtatatggctgccactactctaggagttttggttacattggtaaattaaaaaaaaaacaaaaaaacaacaaagacaccagctctcatggaacttatgttttagggaagcagacaataaataatagacataaagagaatgtcagaaggtaagatgtgctatggggcaggaggactgggagtgtgggagtgattttaattttttaaaggatggtcaggaaacagtgtctaagtatcaaggaatagtttctcatgtttacttgcatttttggaagtaaagcaaaccaattatttttcatattcttatctaaattcttcaaggaacactaacagggattggcaaaccacagctcacctcctgttgctttaaataaagttttattagagcacagccacacattcctttatgtcttgtctatggctgctttcatgattcatgatacagtggcagaattgaatagttacagcagatatcccatggccataaatatttactaaatattatctggccctttacagaaaaagcttgtcaacctctggttcttaaagagttgaggttctgtctgtatttcacattttagaaggttatatacagttttatgctatttttaagttaaaagttttttcttaatgagatcatttaaaagatctttttcttgtattcttcacagggcctggacgtagtgtcttcaacagttgtaacagcagctgccatttgctgaatgacagcatgtgtcacacactctgctgagtattacaggcatttttttctaatacaaagtcttgtagtgtgggtaggtatcacaattttagtgaagagggagtttaggctcagagtggttgaataatttgcagagagcgataaagatagtatgtgtcacagttgtaatccaaccctaaatgtagtcagtacccctttctttattctgtgtttcttttttccagaaatacttgcagacttgaaggaattatcagtctttcattttctatcatcagtgtcctatgatagtttgtgcttccctccctcatccctttgttcatgtcactctgttcaccaacccactctgctgaaatgtcgttatttcttcaaggcccggaggaaatgctaccactctcatcagaggtacttttccccccaactctttccctgtccttggctgtaggaacccaaaggagtctgtgcagcttagcacacattagtgatgtttgcacaaatcaggacctgtactgggcactcttatgtgtttagttttggggtggggtgtggggagtgtggtttgtgtgtctgtgtctgtgtttatctttgtgtgtacttggtatgtgagtgtgtgtctgtgtgtggtgtatgggtatatgtgtatagacatgtatgtagctatatatgtgtgtggctgtggtatgtggctatatgtggtatgagtgtgtatgtagtatgtatgtgtgtggtgtgataatgtatggctgtgtgtggtgtgtaggtgtatagctgttgtgtgtggtatgagaatgtgaccgagtatgtcaggtatgtgagtatgaccgtgttacgtgagaatatggctttgtgtatggtgtgactgtgtctgtgtgattctgcttgcttgtgtgcatgcatgcgtgtgtgggcggggggtgtgggtggggctttgtatggtgtttgagaatgtagtggagggcactgactgatcagaagaaacacagcccaggccccacagtaggtcctggaggtcccaggtattaacccagatgtttacttgctagattctggtgtgggctggagaggggtagagtggcagaaatctcaagaaaagccaaagctgggccttgtcacctaggaaagcctcaagatttagaggttttgttttgttcattttgaaagcaggcatataggtagatacttgtaaggaaggtttttcaaaaaggattaaacataaaaagagttacagttaacttacagttaggcagaaaaattgaacttatcccaaaatgaaagctcttttacttgcccatgaattatagtctggattgtcattgcttagtggtttcaagaagagtgacattattcaaatggcacaaatatcatctggtggtggtggacaaagccggtgccttctttttgctctggtgggtagctttaaatatctctgaaagtttgtcacttaaaaggtagcaagtaaaggtattctatccaagtattccagttgattgaggttatttctaatggatggtcccatggggaaggtgtatacccttcaaactgaacaaaagattccctgtgatctggcccaacccaaagaataaaggtgttggccatttgtgttcattctcagggttcagagatgggcagtgagaaggagcagagtccagaaccacacctgcctgaggaaggggaagggggtaagccttggagagtggatgactcagagggttcttggatcccacctggggagaaggagcatgggcaagagagcctgtcggatgaactgcaagaaactcatccaaaaaagccatggcagaaagtcactgtccgggctcgagagctaggggaccccattgctcatccaaggcatgaggcagatgagaagccctttatatgtgcccagtgtggcaaaaccttcaataatacctccaacctgagaacacaccagcggatccacactggtgagaagccttacaagtgttctgaatgtggcaagagcttctcgagaagctccaaccgcatccggcacgagcggatccacctggaagagaaacactacaaatgccccaagtgccaggagagctttcggcggcgctcagacctcaccacgcaccagcaagatcacctaggcaagcggccataccgctgtgacatctgtggcaagagcttcagccagagtgccacgctagctgtgcatcaccggacccacctggagccagcaccctacatctgctgtgagtgtgggaagagcttcagcaacagctccagctttggcgtgcatcaccgcacccacacaggtgagagaccttatgagtgcactgagtgtgggcggaccttcagcgatatctccaactttggagcacaccagcggacccacagaggggagaagccctaccggtgcactgtgtgtgggaaacacttctcccggagctcgaatctcatccgccaccagaaaactcacttgggcgaacaggctgggaaagattccagctgaaggagagccccatttagagtgagggagagagagtgagagaccctaacctattggaggaagatcttcagcatcttttgctgctaccttgacctcaagcccttcatcccactttggagaatggttttgtatagcctctgaagtcaggatctcaggaagtcctgaggagggactctggaataaaaacccttgcctctttccaggccaatttctcgtgttggaaagtcagaagacccagtcttggctttactttcttggggtgaaagagaaatagggtaggctcagaacatgctcatgttattaaggcagcagtccccctggcctttgaggaagtacttatgagatgggtgtcactgtctgaaggttctccaaattgtctgtgaactgcttaggtaggagtgcactgcagtttcctgctagttcccacctgttgtgccccaactttgcttctagatctctggggtgggaggagtgaccttctcaatggaaggggcctccttggtctggagaagagatctgaggtcccaccttagaaatgaaagggaaaccctcagggagccatgacccagggaccttcacactcccccatgtttgttacttgttatccctcccccaacctgcctctgttttccccagagtgattagcagtaaaacccttcaatgaaaa

SEQ ID NO: 9758 - DNA, 5521 bp, Homo sapiens
gccaggccctcttaacctcttcaagtctgttttctcatctgcaaaacagaggtaataagatcagtatcttcttaatggaagcacctggactacatttttttcattcattgttatcataaatgaggactaacctgtctcccgttgggagttttgaacctagacctcatgtcttcatgacgtcatcactgccccaggcccagctgtgtccctacaccagccccagctgacgcatcttctttttctgcctgtagagatggttacaatgcctggcgtgatgcattctggccttcgcagatcctggcggggctgtgccaacgctgtggcctccctgcccctgaataccgagccggtgctgtcaaggtgggcagcaaagtcttcctgacaccaccggagaccctgcccccaggtatcagcccctttctgttcaagcaagatgtcggtagaacaaggtacagggggcccagtcttgtgtgctccccaaaataacccatttcttcagcaagtagatgtgaatttggttgagtaaggacgaggttcttgggtattagggagaaaacagtctttattggtgagtgtgagattcccccaaagagccaaagtggacccataactaatcaagttcccggaacacagaggtcccatagagcgccccatataacagaatgtggctgcagaattaaatggctggaggcttattttttatttatttattttttttgagacagggtcttgctctgtcacccaggctggagtgcagtggtgccatctcagctcactggagcctggacctcccaggctcaagtgatcctcccatctcagccccctgagtagctgggattacaggcacgtaccatcacgcccacctaagtttctttctttttttttttttttttttttttggtagagatgaggtttcgccatgttgctcagactggtctcaaactcctggactcaagcaatcctctcatcttggcctccaaaagtgctcggattacaggcatgagccagtgtgcctgctctggtggcttattctctaaatagggtctaggcaaaggtggcagtacctccaatcccactgtcccactgactgctggcttttcactgggcaaagttatagcagcgtctcccactttttgtgcattacagagctgctctcctagtccacagggctttatccaacacagtggcttccccagcttagagcttctgttgggggggcggggggggggggagggcgggaggagagatggaaactgtgtggagccctaagctcacacacctcttgcttcaggcagcagcagccccacagtggcgagcggggaccctgaagaggcccaggcattgcttgtgctgcggcgctggcaggaaatgccgggttttgggatccagctggtacccgagcatgtagaaaccaggcctctctaccatccccacagcccagggctgctacaggtgtgggagggctcagcacccaggcccagaatcacaagactcttagaatcccaggacacccacctgatcctggaccctgggcccccaggacagcctttccccaagatgtccacctgggtgccacctgcagctcctgactgcagctcctgttgctggtccctgtgtccctgctcatcttggacctccatcctggaccacaccttcaccctgaccctagtcctacaggatccccacccccgggccccaagactcagatgtggggttcctaacctgacctccccccagatccctaagatctggaccttggaacaccagatattacttttaatctcaacttccccttctggaacctcattttttttttttttcctttttgacatggggtctcactctgttgcccaagctggagtgcaggtgcatgatctcggcttactgcagcctccacctcccaggctcaagtgatcctcccacctcatcctcgggagtagctgggattacaggcgtctgccaccacactcggctagttcttatattttttgtagagacagggttccgtcatattgcccaggctggtctcaaactcctgagctcaagtgatctaccctccatggactcccaaagtgctgggattacaggcgtgagccaccgcgcccagcctggacctcatccttgaacccctaatctaaccttgatcctggaacccacacttcagactccaccttcatcctcatcccccaggatctacccgaccctgtcattttgaccctagctcttttctccacttggggacaaggcacagcctgtggccatagggctgtcagggaaggttgggagcctggcaagaccctccagcctggtcctgtccccccagggatctcttcacatgtggattgacatctttcctcaagatgtgcctgctccacccccagttgacatcaagcctcggcagccaatcaggtgagagttctgtcgcctcctcccaaggcgggtgcacatcctggtctacctgtacaaggctcctctgaaaacccgggtccccagtgaagcaggcagaggttgctcatcacaggcttttcagttaggtgtcattaaattccctgttattcaaaagcattgcaagttgagtgtctcttgtaaattgagtccaagtaccttttggtaagcccccttcccacctaagctcatctgagtggagttgtgtgtgggtcacagccacttcacacagggctgaatgcagatgctcggatatcagcagcctgtcactttctgcctctgggctctgctttccttggtgtcgctctcagggagccctctgcagggctgggggcaaagtggcatctaacagtgcgaggcttacatctcagccaggccacttgagcagaaacaaacacctctttcccagttacagcaaaagcctcagggctgactcagccgaccagcttgggtcaaatgctgtgccctgaagaaccaatcattgtggttagggggctgtaatactcgaattggccagtccagtgatgtctccccgaccccgtccagccagggagggaggggcctgccccaccagaattccatagattgacagtggtggtggggaggggtggttggggtgggggtgggtcaccagcagaaaatcacggtgctgtcaacaaatgaggggaaattgatgctgggctggagaaaacagctatccaggcaaccccatggcccccaaagacagggctatatgcgggtagggtccagagtgtcgcagccctcctgtccctcaggcgctgtatgctcctgtcccccatctctcatcctccctcttctccctgcagactggctttctgttcactcacttttctacatccccaaactctggcttgtggtagctccagctttgcatctgatgccacaccatgcaacagtgcagcgccctgattctaaattcacgggaaggagaacctcgctggccccacagaccattcctggggccatctgctgtggccagggtggtcagtgacacctggggcttcccttcatgggaccacaggcattggattcccctgctgggcacacaggtgtccagtgaatgtcagtggccccggcccaggtccctcctgcttcctgcagccccttttagggccccactcgagagtctgaagccaccccctaatgtgccccccagctatgagctcagagttgtcatctggaacacggaggatgtggttctggatgacgagaatccactcaccggagagatgtcgagtgacatctatgtgaagaggtaggctgctggccgggcggggcaacggcggtgcactagggggattgcaaatgggtgtgggccctcgggctgagtccagagccccgaccccaggccctccgtggtgctgagagcggggtgaggagtgggttctccatgtagctccagccctgacgctcacccaccccggccccagctgggtgaaggggttggagcatgacaagcaggagacagacgttcacttcaactccctgactggggaggggaacttcaattggcgctttgtgttccgctttgactacctgcccacggagcgggaggtgagcgtctggcgcaggtctggaccctttgccctggaggaggcggagttccggcagcctgcagtgctggtcctgcaggtctgggactatgaccgcatctctgccaatgacttccttggtattacaatgcttagccttccccaccctcagcccctgcctccagccctcacctccgcccctgcctccagccctcacttccgtcccccagttccctactctgacccaaccttgaatcttgggattttggacccgaggtgtgaaacctttgctttctggcctaattactgagttaattaggcctagaccacagtaacctccattcccacccagagtctctgattcaactctgatttgaccctagcttgtcaccctgacaccgactccacagcctttggtccttggcactctgatcccgacccttggccctcttccactgggaagtagcaatgggtggaccgctgggctgtggtctgggtggtctatagctgtggcctgaccgcacactgcaacaactttcaatgccccaatttacaaccttggtgtgttgcctcctcacccctggcacaatgagactttgatcccatgcctaatctggtgtgctctggacttgcaggatccctggagttgcagctaccagacatggtgcgtggggcccggggccccgagctctgctctgtgcagctggcccgcaatggggccgggccgaggtgcaatctgtttcgctgccgccgcctgaggggctggtggccggtagtgaagctgaaggaggcagaggacgtggagcgggaggcgcaggaggctcaggctggcaagaagaagcgaaagcagaggaggaggaagggccggccagaagacctggagttcacagacatgggtggcaatgtgtacatcctcacggtgggtgcccgtgggcagaggccaggctgagctggggcctgagcccgccccctgctcccagtgatgcaggaatgtcttttttagggcaaggtggaggcagagtttgagctgctgactgtggaggaggccgagaaacggccagtggggaaggggcggaagcagccagagcctctggagaaacccaggtgagtcaggcaccggggctggggccacagcctgggccgatggggaggtgggggtggtcaaggggcttcctcctcatcctgacaccactcttctcctcaacagccgccccaaaacttccttcaactggtttgtgaacccgctgaagacctttgtcttcttcatctggcgccggtactggcgcaccctggtgctgctgctactggtgctgctcaccgtcttcctcctcctggtcttctacaccatccctggccagatcagccaggtcatcttccgtcccctccacaagtgactctcgctgaccttggacactcacccagggtgccaacccttcaatgcctgctcctggaagtctttcttacccatgtgagctaccccagagtctagtgcttcctctgaataaacctatcacagccactga

SEQ ID NO: 9759 - DNA, 4846 bp, Homo sapiens
gccaggcccacttaacctcttcaagtctgttttctcatctgcaaaacagaggtaataagatcagtatcttcttaatggaagcacctggactacatttttttcattcattgttatcataaatgaggactaacctgtctcccgttgggagttttgaacctagacctcatgtcttcatgacgtcatcactgccccaggcccagctgtgtccctacaccagccccagctgacgcatcttctttttctgcctgtagagatggttacaatgcctggcgtgatgcattctggccttcgcagatcctggcggggctgtgccaacgctgtggcctccctgcccctgaataccgagccggtgctgtcaaggtgggcagcaaagtcttcctgacaccaccggagaccctgcccccaggtatcagcccctttctgttcaagcaagatgtcggtagaacaaggtacagggggcccagtcttgtgtgctccccaaaataacccatttcttcagcaagtagatgtgaatttggttgagtaaggacgaggttcttgggtattagggagaaaacagtctttattggtgagtgtgagattcccccaaagagccaaagtggacccataactaatcaagttcccggaacacagaggtcccatagagcgccccatataacagaatgtggctgcagaattaaatggctggaggcttattttttatttatttattttttttgagacagggtcttgctctgtcacccaggctggagtgcagtggtgccatctcagctcactggagcctggacctcccaggctcaagtgatcctcccatctcagccccctgagtagctgggattacaggcacgtaccatcacgcccacctaagtttctttcttttttttttttttttttttttttggtagagatgaggtttcgccatgttgctcagactggtctcaaactcctggactcaagcaatcctctcatcttggcctccaaaagtgctcggattacaggcatgagccagtgtgcctgctctggtggcttattctctaaatagggtctaggcaaaggtggcagtacctccaatcccactgtcccactgactgctggcttttcactgggcaaagttatagcagcgtctcccactttttgtgcattacagagctgctctcctagtccacagggctttatccaacacagtggcttccccagcttagagcttctgttgggggggcggggcgggggagggcgggaggagagatggaaactgtgtggagccctaagctcacacacctcttgcttcaggcagcagcagccccacagtggcgagcggggaccctgaagaggcccaggcattgcttgtgctgcggcgctggcaggaaatgccgggttttgggatccagctggtacccgagcatgtagaaaccaggcctctctaccatccccacagcccagggctgctacaggtgtgggagggctcagcacccaggcccagaatcacaagactcttagaatcccaggacacccacctgatcctggaccctgggcccccaggacagcctttccccaagatgtccacctgggtgccacctgcagctcctgactgcagctcctgttgctggtccctgtgtccctgctcatcttggacctccatcctggaccacaccttcaccctgaccctagtcctacaggatccccacccccgggccccaagactcagatgtggggttcctaacctgacctccccccagatccctaagatctggaccttggaacaccagatattacttttaatctcaacttccccttctggaacctcattttttttttttttcctttttgacatggggtctcactctgttgcccaagctggagtgcaggtgcatgatctcggctcactgcagcctccacctcccaggctcaagtgatcctcccacctcatcctcgggagtagctgggattacaggcgtctgccaccacactcggctagttcttatattttttgtagagacagggttccgtcatattgcccaggctggtctcaaactcctgagctcaagtgatctaccctccatggactcccaaagtgctgggattacaggcgtgagccaccgcgcccagcctggacctcatccttgaacccctaatctaaccttgatcctggaacccacacttcagactccaccttcatcctcatcccccaggatctacccgaccctgtcattttgaccctagctcttttctccacttggggacaaggcacagcctgtggccatagggctgtcagggaaggttgggagcctggcaagaccctccagcctggtcctgtccccccagggatctcttcacatgtggattgacatctttcctcaagatgtgcctgctccacccccagttgacatcaagcctcggcagccaatcaggtgagagttctgtcgcctcctcccaaggcgggtgcacatcctggtctacctgtacaaggctcctctgaaaacccgggtccccagtgaagcaggcagaggttgctcatcacaggcttttcagttaggtgtcattaaattccctgttattcaaaagcattgcaagttgagtgtctcttgtaaattgagtccaagtaccttttggtaagcccccttcccacctaagctcatctgagtggagttgtgtgtgggtcacagccacttcacacagggctgaatgcagatgctcggatatcagcagcctgtcactttctgcctctgggctctgctttccttggtgtcgctctcagggagccctctgcagggctgggggcaaagtggcatctaacagtgcgaggcttacatctcagccaggccacttgagcagaaacaaacacctctttcccagttacagcaaaagcctcagggctgactcagccgaccagcttgggtcaaatgctgtgccctgaagaaccaatcattgtggttagggggctgtaatactcgaattggccagtccagtgatgtctccccgaccccgtccagccagggagggaggggcctgccccaccagaattccatagattgacagtggtggtggggaggggtggttggggtgggggtgggtcaccagcagaaaatcacggtgctgtcaacaaatgaggggaaattgatgctgggctggagaaaacagctatccaggcaaccccatggcccccaaagacagggctatatgcgggtagggtccagagtgtcgcagccctcctgtccctcaggcgctgtatgctcctgtcccccatctctcatcctccctcttctccctgcagactggctttctgttcactcacttttctacatccccaaactctggcttgtggtagctccagctttgcatctgatgccacaccatgcaacagtgcagcgccctgattctaaattcacgggaaggagaacctcgctggccccacagaccattcctggggccatctgctgtggccagggtggtcagtgacacctggggcttcccttcatgggaccacaggcattggattcccctgctgggcacacaggtgtccagtgaatgtcagtggccccggcccaggtccctcctgcttcctgcagccccttttagggccccactcgagagtctgaagccaccccctaatgtgccccccagctatgagctcagagttgtcatctggaacacggaggatgtggttctggacgacgagaatccactcaccggagagatgtcgagtgacatctatgtgaagaggtaggctgctggccgggtggggcaacggcggtgcactagggggattgcaaatgggtgtgggccctcgggctgagtccagagccccgaccccaggccctccgtggtgctgagagcggggtgaggagtgggttctccatgtagctccagccctgacgctcacccaccccggccccagctgggtgaaggggttggagcatgacaagcaggagacagacgttcacttcaactccctgactggggaggggaacttcaattggcgctttgtgttccgctttgactacctgcccacggagcgggaggtgagcgtccggcgcaggtctggaccctttgccctggaggaggcggagttccggcagcctgcagtgctggtcctgcaggtctgggactatgaccgcatctctgccaatgacttccttggtattacaatgcttagccttccccaccctcagcccctgcctccggccctcacctccgcccctgcctccagccctcacttccgtcccccagttccctactctgacccaaccttgaatcttgggattttggacccgaggtgtgaaacctttgctttctggcctaattactgagttaattaggcctagaccacagtaacctccattcccacccagagtctctgattcaactctgatttgaccctagcttgtcaccctgacaccgactccacagcctttggtccttggcactctgatcccgacccttggccctcttccactgggaagtagcaatgggtggaccgctgggctgtggtctgggtggtctatagctgtggcctgaccgcacactgcaacaactttcaatgccccaatttacaaccttggtgtgttgcctcctcacccctggcacaatgagactttgatcccatgcctaatctggtgtgctctggacttgcaggatccctggagttgcagctaccagacatggtgcgtggggcccggggccccgagctctgctctgtgcagctggcccgcaatggggccgggccgaggtgcaatctgtttcgctgctgccgccgcctgaggggctggtggccggtagtgaagctgaaggaggcagaggacgtggagcgggaggcgcaggaggctcaggctggcaagaagaagcgaaa

SEQ ID NO: 9760 - DNA, 15610 bp, Homo sapiens
gtactatcacaatcaatcaatagatttatcaacctggggctggggctgaccgaggaggtggagggtggcagaggctgggggacaaccacaggccagggagaaagaggagacagaggaagcaccgagggtgactacgttgtcttccctagatcaattttcttctggatggctcgtgctgagtggtagatgagcgaatcgatgagtccagccactgggagagagacaagggctggcactggcccagtgggggccttggcttttgacgctgagagccttgtcacttaactggccaggccagcatctgccccttcacccccaaccaaacctggggcacccaggctttaccctccccaccccacagctcacagacgccctgggcctcttacctgtgaacatgcccccaatgatggcgcacacacctgtcaggaagtgggtgaaggacctggtagaaggagagggtgggctcagcaggcatcctcctccctcaggcccaggcccccagaggccgctttgcccccatcctcacctgtgcttctccgtcagcttcaccatcatgggcgagagctcatagaggacgaagactccgggaaggccttggtcgcccaacagcccattggcaaccttctcatgtctggtcacagagaactgatttgtcctcagtacctggggtgggaggggagcctgggccagggctagggctaggacctggctccagccaccatcagccccacccctgctccttcccctttcctgttgagccttggccgtgtaaggagagaacacagcaccgtgctagtggcctgcactgcaaggcctggcccgccagaccccctctcctagtcttggcctcagccttcccctccaggtgccaagtctttacagtttacctatcctggcagcatttggtgggtgttctcacgggggtccaggctgagaagcagctctccaaagacgcaccaaggctgacctgacttcctctgccctcagcccctcgcatcctgccactctgctgagatgctgctccacaggccagggcagccttgggagcgggtacacagagacttgccttgcctaacccccagcccaggcagaccacagagaacagtgaggcaggcagacggtgggcaccggaggaacggatagaagcggtgagggcagcagaaagagcaggcgctttaaatctaacagccccaggcctgcactctgcctgggagggcaaatcccccaccctctctgtgcctcagtcttttattcgccatgtgaggacgaggcagctttcactccccaggctgacggaacaaaatgcaggaactccagtgcttggcaccgcgcaggagactctggtagggagctccctgactcacctctccgtccaccttcatgtacacagtgggcaccaccttcacaaagtactggaacatcatggaggctgaggggaaaacaaagcactgggtatgggtgcccggccggccttctgcggctgggggctgcctcccgggctggtaccttggggcgcagtgacattggtgtggtccagggggttcacaatgcctggatagtcctccccaaatgacaggtgctggatgtagtgggtcatgttgatctgtaaacaacaccatccagagctcatccaaagctctgatgacagtagcagacagggacacctgggtccgtctgcggagatgtgggaggaaggggaggctatggtcctaaggggacaacctccccgagataagaatcccccattccctgcctagaaactcctccttccacagcctgcaaactcctggggttccagatttttcttttttttttttttttttgagacaaggtctcactctgttgcccaggctggagagcagtggcatgatcttggctcactgcagcctcgccttattcaagcgattctcttgcctcagcctcctgagtagctgggattacaagcatgagccaccatgcctggccaggttccagatttcttaaaataccagcttcacttgtacgttaggcacacagagtagcaggtgctggctttgcctggaggcctaggctggaggctgtgaacccccagatacactcccttcctgctcccttgtgtatcagcctcagacactagaaggatctttcctaaaatgcaaatctgattatgtcgtgatcctgcttaaagaaggccaacagctttccactgttctcatgagaaagatgtgattcctcagcgtggcctctgagtccggtgtggtctggtccctgccgacttctccagcctcacccatccacacctgccccgcagttccttagaagggccatgctcccgtctgaccttgcgctgaggctctgtctgtctaggatgctcttatccaaccccaatcttgcccctagcctgctcagagttcagttcaaaagtcactctcgcttaaccctcaggctggatccccattcagaacgtggtgtatttttccatatgcactaccccatcccaggatgttcctacaaggaaatgaaggcagcaaccaagcctcccacccccacctgccctccatggtttccatctggtacgtacgttgtcaaggccaaagctctgcaagtcatggactaggagagaagggagaaggcaagggagaaggcgtcattagtaggagcagcactggcctcctccttcctccccctggactgcaaaccacctgtcttctctgcccctcattccttctccagcctggcacctcctggtcctgcttaaggacagccagaaagggcaagccttgggcctgtgtgagagttcacgccctcctcaggagtctttagaacagaccctggttcctccctgacgtccacagggaactctatgccttgactaccaccatggccctgcctgcatctccagaaacaaaacccaccgactatgggctctcactaactagagctgatggcaaatcactgaacctcaaagtgaggtgggatctgagaatgccatccacactttccctgcctccaccctcaaagctccccagaagaaatcccatggggaccctgtaccaactgttccagaacaatttattcctgccctctagcctcaatccctcctgctgcaaggaaccatacttcaaagatacatcccagaccttttacagtcacccagcagccaggtcagaggagacccaatcacagccccatccaacctccccgccattctagtagggcaggctgccccagaagtaggggtttggcctccatgggggcagggccacttactctccacagcatgtactgcagcatgggggagggaggagagagaagaaagattcagagcttcacaatgagaactatgagagcaagatatgttgcaggagggaagactggaacattcagcctcagcaacacagtctggccccagctaacaagcctccttctgggcccctcctcgagagtgaactaatctggccagagaggagcaaaatagtggcctagaaggacaagaggcctagagctcaaagagccaagttcctgactgtgtggccttgggcaaatcagttgccctttctgggcctcagtgttctcctttgcaaagggctgtcctaaggatcacgtgggatctaagatggaaaaatacttgtaaactttacactgtaagagattattacccaccccagccccaatcaacaaggatgttagaaactcactcccaggcctcaattcagccagatctctggccttgggcaactgtacctttgcatttatacatccttccaaatacagagcacccccggcccggggatccacaagtctaacagtcccaggccaagaggctgccactctggctgtgtgtctactgagtgcccgccagaccttgtgccaacagcttgacactgatcatcttcctgccctcccagcaagacccttttctcccagcttcctccagagtgaagagggggtcccagagctctgcagggtcctccagcccccacactggcccctccccaacacagccccacccccacagattgccctgaagaccagcagagctaccctccagggggccctttcttcctgttcacttcaaccattttgagaggccatcttcataccctgggctctgtcactgtgcagctctgtccatcctttactgtgacaccaactcccaccttccccaaccctgccttcaacccctgggttcctcttcactttcttgcttcagcctggctcttcctttcaggcactaactccctggcatcccctcaacgtgcgactatcttctctccatacacaacctcttccctggcctaaagagaagtctttcttgctccttactgccacttccagatcactttccctttatctgccttaaaaatgcacaatggctcacatctgtaatcccaacattttggggggccaagcgggaggatcacttgagcccaggagcctgggcaacatggcaagaccctgtctctgcaaaaaaaaaaaaaaaaaaaattagccaggcatggtggcatgtgcctgtggtctcagctccttgagaggctgaggtgggaggatctcgagtccaggaggtcaaggctgcagtgagccaagattgtgccatggcactccagcctcaaaaaaaaaaaaaaaaaaaaaaaaaaaaaaaaaaaaaaaaaatccccagctttgaagctcagggcaaagcagccctgcttgtttcagtcacctagatatcgatatggaacctccagaacagttttcccatgccatttttcaacagcttgggcaactgcctgtcactctctcctgtactacctctgtcacacgttctagtgatttccatatccacgtagatgatccttccagtacccgggcctcccagttcctggacatcctttcctccctgatcttgtgctctgcctacccaagccacttgctctgttggccattccctaaactttgtcattaacaaagccccttctgtgacttcaatttcaagcaactcatgctccaccagctttctaatttcctccagttccccaattccaataacttgttgacactacactcaggacttgtagtccctttttcctcctgccccctcactggcttccccacatcctgtctttcctcctttcctagctcatatgctgtggtccagaatcaagatgagttctttacatatttgactccctcacctttgcaggcacctggcaacaccaaaccccatgcaattgcaatgttctgttgactgagtccattcccacacagacaaccatgctgaccgctctctttgcattcacagccgcggactccagggaggccctagggctgcatcaatcctactcaatctccccagtccacgcactcttccacccccaagtgaccagtcacatcttttcttctttcaaatctccaacacctccttccctctctcctcattctcaactgaggaccttccttcctacaacacggagaagatgggaagactcagaagagactctccatgtacttctgccacaccagctaccaccctacctgtacctacagagcctgcccttcctcctggtgctaagtttggactttccacatatgtaaggcactagattctgtcttctttctccttctccaggacttcactccggtcactgtctcgtctctggagcatcacttatgctctttagtcgataatttccaacagcatattaacattctgctacatcaccctccttagaaaagcctccctcgactccacatttccctctagcttcagctcatgctctctcctcccctaggcaatttccactatagagctgtcaatactggctccaactcctcccccattccctcccgaacccactctagggtggtcctgtcacacccttaaatgactcagtcaaggctataagtgactgttgcatgtacatgccatggtcaattcccgcttgacatccagaagcatctgatgtggtatttgaaacacccgtccgtggctggcaggatgccacattcccagcttacactcctcctccagtctcccctaccaattccccctgacacccttggcctctaatgtgggaggcctggcacccagccctttgagcttcccttcttctccatctgccctcacctccagggtgatttcatccagtcccacagctctatacacatgctgatgatgccaacatctgcatctccaggcaagtcctctccctgaactccaggcttgaatggaaaacttacttgacaccttgggtgtctagaaggacacccagatgctattggtctgaacacgtcaaaagccgaataccagctgtacgatcccatttccgaacatctaaacctgccctgagtctccctcatcttgctaaatggcaactctatccttttttttttttttaatggagatggaatctcactctgtcgctcaggctggagtgaaatggcacaatctcggctccctgcaacctccgcctcctgggttcaagcaattctcctacctcagcctcccgagtagctgggactacaggcgcacgccgctacgcccggctgattttttgcattttttagtagagacaaggtttcatcatgttgcccaggctggtctcaaactcctcagctcaggcaatccacctgccttggcctcccaaagtgctaggattacaggcaactccatccttcttactactcaggtacaaaactttggaggcatccttgactcctttttcctttatccctcatgcccatcaggaactcttctcagctctaccttcaaaatacatccagaagccagtcacttcccaccacttccactgccactctgggccgtgccccaccatcttttgcctggattgatcactgcaactgcctcctaatgggcctctctgattctgtcctttcccctgcccagtcttgtccacagagcagctggagagcttttaagtcagatcatgcctcaccttcttcagggccctacaatggcttctcatctcatgcagagtaacggcccgagtccctacaatgcccctgcaagccctgcatgatacggccctgtgacctctctttatttattattattttttgaaatggagtctcactctgttacccaggctggagtacaatggcgcaatttcagctcactgcaacctccacctcccaggttcaagagattctcgtgcctcagcctcccgagtagctgggattacaggcgtgtgccaccacacccagctaatttttgtatttttggtagagacagggtttcaccatgttggccaggctggtcttgaactcctgacctcaggtgatccacccgcctcggcctcccaaagtgctgggattacaggtatgagctactgcacccggcctctctcacttcatttctaagcatgctcctctgctccagccaccctaaccttcttactgtatcttgaacttgccaagcacattctagccttaggaatttgcatttgctgttctctctgcttgtaacacttcctccccagacatccacatggctggctccctcactgtcttcaggtctttgctaaaatattacctcatcaaagagtttttccctgacctccatatttaaaataggaccctcactgccctaccctagcccctccccattaccatctttatcctgccttgttttggtccatatgacttaacagcatctgatataccatatacagatgctccctgacctacactggggttacgtcccaataaacccattgcaagttgaaaatattgtaagtcggccaggtgcggtggctcatgcctgtaatcctagcactttgggaggccgaggcgggcagatcacttgaggtcaggagttcaagaccagcctggccaacataatgaaaccccatctctactaaaaatacaaaacttagctgggcgtggtggcacgcacctgtacacccagctactcaagaggctgaggtaggagaatcacttgaatccaggaggtggaggttgcagtgagtcaagatcatgccactgcactccagcctgggcgacagagtgagactctgtctcaaaaaagaaaaagaaaatatcgttaagtgaaaaatgcatgtaatacccatcatgaagttaaaaattgcaagctgaaccattgttaattggggactatttatattttatatacttattgtctatttctttactagaatgttctgagggcacagattgttcactactgtacccttagcaactagactagtaggtgattactaaatattttgtgaatgcatgaatgaacaaatgaatgagaataaatctcatttgttcaccccaacagccctgtgagtgggtactattatcatcatccccattttacagaagaagcaactaaatagggcccaaatatgacatagcccaggtgtggcagaacctgtgctccaacctagctctgcttctcccaaagcctcatgcacaggtcatcatcggacacggggggctaccatttcaacaagtacctaccacaagccaggctccgtgctatcatctttaacctgcacacacaccctgtgagataagtgccctcatcaacattttataaagtagaaaacaggagtcaaaaagattaagaaaccttctcaaagtcacacagccagtaaggtctgaaactggtatctgaatgcaggcagtctggctcctcggcctgtgctcttagccactgtgccaaactgctgccctgagatgaaggcctgctctggccaaatggttgcccaagacaaatgagcagcaggcagaagaggaccactcaagctcaccaagaaggtggccagcatctaaatctccccagctagtgcagatcactcaccgtgcacatgggactgctggaagctcttcccaggggcaaagtggaagtttccggccacctgtaaggaacattctctctcattcactggctgtgtcctccttttgcctactcagggcctgactgggccctcggttcccagtggagcttgcccagcccagctggccctatcttgtcttgatccctcctgataccttattgacttccaagaagccatacacctggcagccttcattcttctgctcctgcatcttctggctgaagccctctcgccggcactgctcaatagtatctgggttcttgaaggcccagcctctacggcgatatgcctcccgcacatcttcacaggtgttacagcacctgtagggcagggagtgacggtgagagtgttaaagaggcataagtccagtgctggcatctggggaaatagagcccgagcagctctgcctgctaatgaaggctctgctagcctcatccctgaccaccaaacattctccaaatgtgtttcctcagtggcagaaggactgttttctttttttaatttttaaaatttttttagagatagggtcttgctatgttgcccaggctggtctcaaactcctgagctcaagtgattcacctacctcggcctcccaaagtgctacggattacaggtgtaagccattgtgcccagactaggactgtgaaaaatacatattcccattctgtttgaggcgatgacaagttttaggacagagagtggtgactgcatgacactgtgaagatacctaatgccactgagttgcacacttaaaaatagttaaaatggtaaattttatgtcacatattttcccacaataaaaaaaaatttaagtacacattcccaggccccactccagacctgctgaatcagtcttgcagaagtcagggtctgggaaacagcagcagttatcagatactgagggtctaataatctgggctgggccttccacctcagtgctttacacacagtacacagctaatccatatgtgactcttacgagaagatgttattatcatccctcttcacatagagaggttacatggcttggcccaaggaaacaggggtagaacccaggtaactggactccagagaccacctctgaaccatttctctaggtggaagagcagagaccacttcagcttcatctctaggtctgcagctcccagatagggcctggttacaaagcctcagtcgcttgcaccaggatcaatgacagaggcacataccccgcccactctagattcttggtctgacctccccacctgccacagtctgactgaggctgaggctgactgacagatggcgcctgatgggaaccctgctcccgctcccccccagctcacttgatatcttctgcctcagcaccatagcagctctcacagcgatcagggtccagggagtcagggtcaaacaccgtcacctcgactttcccaagctctaaggggaggggagaagcagaggcatcagctggggccagacacagtgaaatcggtggctccagtctgcacaagccctttgcttagggataataaaagttataataactaatattcatatagtacatgctacgggtcaggcattaagcacttctacacacatatcaattcttttaataaaagaaacagtaagaaaacagtcaacagtaaatactgaacattagctgtgtacagatcactgtacttcacaaccatcatctcatttcatccccacaatgactctttgagggtggcggtaattatccctgttttactgagaagatgttgaggctcactgatgagaagtgactttgcccaatgcaaccgaggaaacagatttcagctaattccaacgtgtatgccactaacctcttgccatggtgcttctcctcacacctctccctctgcaccggctccttgcctcactctaatcaccccatcataactggtgatttcaataatgaatactgacctcccgactcatgataatcttttgattttgccatctcacctcagctacccattttcatactcatacctagatcctgtcactgccaataactgcaaatcttccaaaattcaacttcaagtgtctgagtcttcaactacttacccttattttccaagttcactatttagtacccgaaatccaccaattctttgacactgctgacactatcacgtcctcacttccctcctgaaatcccatggtccactgtaattattctcttgcacataaccacaactccctgttcctctcgtctttcatttacaaatccagcaaaacccacaccctggttccattcaactctctgtacctacttctttcctgaagctcctttaggactgcctggcaattccacttcatttctctaatcagttcactctcccactctctaaggtgacttagaccttctcctctctccttaggctcccaaaaccccctcctatttcttcacttagctaatgtccttgctttcaatttccactaagaaaagagaagcaacagaacttcacttgctctcaccaccaaacccaccatctcaccactttctccttcagatcccactccatttctcagctctcccttacagtgaaactcccaagtcacctataggtaatgtctccacttccttttttgctctttgatccgattttcatcctcaacagtatcaaaattgttcctttcaaagtctccaggaatctctttgttgctaatttcaatggtcaattctcactcctcattttactggactatcagtagcttctgatacaactgctcactctctcttcttgaaactctctccacttggcttttgggacacctcttggttcttctacgtcaatggctaatccgtcccaatcttccttcctgtcctgacttttaaatattggagatacccagggtacaggccgtagacctatcctctacctacattgactccccaggttttcttagtccagttgtttaaactaccctgtacctgctgataactcctctaaattctagactggtacatctaattgcctcttaatatcaccagagtataaaataggaaccccaaatttaacataccccaaacctgagattcctctttcctgcaaatcctgaccttactctgtggaagctagtttccaagatgtcctcaatgatccccacttcctagtattcacacccttatgtagtcctctcccacaatgagtaaggctgacctgtgtaagcactagtatattgcagaaatgatggtgtacaacttctgaggctgggtcataaaaaaggttacacgtttttttgttgttgttgttgagacagagtttcactcttgttgcccaagctggagtgcagtggcgtgatctcggctcactgcaacctctgcctctctggttcaagtgattctcctgcctcagcctcctgagtagctaggattacaggtgcccaccaccacacccggctaatttttttttttttgtattttttagtagagatggggttttaccatgttggccaggctggtcttgaactcctgacttcaggtgatccaactgcctcagcctccaaaagtgctgggactacaggcgtgagccaccatgcctggccaaaggttatggtttctactttgttctctcagctcacttgcaagatccaagtgggggaagccagttgccgtgatacaaggacacacaagcaaccctactgagaggcccatgtggtgaggcactgaggcatcctgccaacagccctatgagtgagccctttaaaagcagatcccctgctgggcgtggtggcccatgcctgtaatcccaacactttgggaggccaaggcgggtggatcacctgaggtcaggagtttgagaccagcctggccacgatggtgaaaccctgtctctaccaaaaatacaaaaagtagccgggtgtgggggcaggcgcctgtaaccccagctactcagaaggctgaggcaggtgaatcacttgaagccgggaggcagaggttgcagtgagctgaaatcgcaccattgcactccagcctgggtgacagagcgtgactcaaaaaaaaaaaaaaaaaaaaaaaaaaagtagatccccgcgtggcaccagcccttctgccacagctgccattggagagcagcagccatggctctgtgctacccactatggccgtgtgccttgacaagggccacaagatgaccaagaacatgagcaagcccaggcacagctgccgccgcgggcgcctgaccaaacaccaaattcatgtgggacatgatccgagaggtgtgtggtttcgccccgtatgagcggcacgccatggtgttactcaaggtctccaaggacaaacgggccctcaagttcatcaagaaaagagtggggacgcacatccgcactaagaggaggcaggaggagctgagcaatgtcccagccatcatgaggaaagctgatgccaagaaagactgagccccctgtcctgccctctctctgaaataaagaacaccttgacagaaaaaaaataaatttaaacaacaaataagtaggccaggcgcagtggctcatgcctgtaatcccagcactttggaaggctgaggcgggtggatcacaaggtcaagagatcaagaccatctggcccaacaaggtgcaaccccgtctctactaaaaatacaaaaaattagctgggcatggtggcacaggcctgtaatcccagctactcgggaggttgaggcaggagaatcacttgaacctgggaggcggaggttgcagtgagccaagatcgcgccactgcactccagcctgggcgacaaagtgagactctgtctcaagatagacagatagatagatagatagatagatagatagatagatagatagatagtagattcttcagtgccccatcaatccttagatgactgcaacctcgtgagataccctaatcccgaatcacccaaacaagccactcctaaattcctgacccagggaaactgaaaaaacacatttttattgtatcaaactactaacttttggagtactttgttacacagcagtggatatccaatagccactcctccctcccaccaaaaaaaccttctcctccagtcatctccatctcaagtcattcatttgctcaggctgaaagcgttggaatcaacaaccatgactttgctctcctccactccacatccagtcctatagcaaattatgttggttccactggtgtcctgcattaatctgctgaaacaacgaatgataaaactccccaccagagtaatctctaaggtgttagaaatcccagctttgaggacagtttgctgtggtgggaaactgagttaacgaagggaattgggaagccaccaagataaaggaaaggaaggtaaaagtgggtacccactctgtaccaggcattttacacatatgacttcatttgatcttacaattccatgtggttggtactactgttttattaccactttctagctgaagctcacagactgcaggagacaaagctagatgtgaacccaggcaatctgacttgagaacctaaattctcattaaaccacctgcattccaaaggggaagagcattaagggctgaattaagccaatgggctgggaaagcaaacactcaaagaagcctgggtccatctagacagttctaccaaggcaagagcacataagacctatcttcaaacctctggtattcaaactaccatctgcaggtattgaggacctctgagaataatagccaggtagattacctgactcgatatgtatagaggattttagctcactctgactcttactagctgggggaccctaggcaagtcacttgacttctctagctcttagttgtttaatgtatcactatgcctgccacagttcacttgctagcagataggcttgggtacatccagctttgggatctgagacccggccccctcccctggttaccatgccgctcagcctctgagctcacggggatgccatctttatctagtcgttgcttgaacaggttgtgttccacatccagctgctgttctccggccacatccatggcatcaatactcagatctggaagcaggaaaatcaggctaaggtactgggaccctagggacaaggggatgtgggttttggaggggaaggggatactgggcctgtcttggggcagaacgggatgaggagaaggaggttgtcctggggtccagtccagaacctaagggtggaggtgtgaatctggcagcccacatgagaaccctgggtctctccagtcccacccatggtgaggtactcacaggcacaaggcatgtgcggaaaaagtacatcgatgttgatcttcagtttatctccccgcgacttgtccacgtagagctcaggatgcacctggggcagcgctacctcagtaagacttagccccaaacctctccttccccactcccacccctaaaggtcctactcctagaatgccaagccccgcccacgcactaagccccgccccttacctccgtggtgaggtaatactgcagctcggacaggaacagtagcagcatgagaaggccactgacaatggtcactgcaggacaaggggcgagggtcagaatggcctcgaatccgctccctcagacaccggcaggccagtcagagtccaggagcccgggctaagctctaggacgcccccctccacgcgaccccggccccgctgcggcctaccggtggcgcccccgcaggtcttgacccggaagtcctccaaagtcttggggtaggcatcgaactgcttcagcttccccagcgcctccatggggaccggccggaaaggggacgccagccggcccgcccctacagactccc

SEQ ID NO: 9761 - DNA, 508 bp, Homo sapiens
gcagagtttgagctgctgactgtggaggaggccgagaaacggccagtggggaaggggcggaagcagccagagcctctggagaaacccaggtgagtcaggcaccggggctggggccacagcctgggccgatggggaggtgggggtggtcaaggggcttcctcctcatcctgacaccactcttctcctcaacagccgccccaaaacttccttcaactggtttgtgaacccgctgaagacctttgtcttcttcatctggcgccggtactggcgcaccctggtgctgctgctactggtgctgctcaccgtcttcctcctcctggtcttctacaccatccctggccagatcagccaggtcatcttccgtcccctccacaagtgactctcgctgaccttggacactcacccagggtgccaacccttcaatgcctgctcctggaagtctttcttacccatgtgagctaccccagagtctagtgcttcctctgaataaacctatcacagccactga

SEQ ID NO: 9762 - DNA, 447 bp, Homo sapiens
ggttccaaacagcagttaggtcagcagtccgctcagccgaggcagctctgttcatggcgttctcgaagctcttggagcaagccggaggcgtgggcctcttccagaccctgcaggtgctcaccttcatcctcccctgcctcatgataccttcccagatgctcctggagaacttctcagccgccatcccaggccaccgatgctggacacacatgctggacaatggctctgcggtttccacaaacatgacccccaaggcccttctgaccatctccatcccgccaggccccaaccaggggccccaccagtgccgccgcttccgccagccacagtggcagctcttggaccccaatgccacggccaccagctggagcgaagctgacacggagccgtgtgtggacggctgggtctatgaccgcagcgtcttcacctccaccatcgtggccaagg

SEQ ID NO: 9763 - DNA, 9370 bp, Homo sapiens
ggttccaaacagcagttaggtcagcagtccgctcagccgaggcagctctgttcatggcgttctcgaagctcttggagcaagccggaggcgtgggcctcttccagaccctgcaggtgctcaccttcatcctcccctgcctcatgataccttcccagatgctcctggagaacttctcagccgccatcccaggccaccgatgctggacacacatgctggacaatggctctgcggtttccacaaacatgacccccaaggcccttctgaccatctccatcccgccaggccccaaccaggggccccaccagtgccgccgcttccgccagccacagtggcagctcttggaccccaatgccacggccaccagctggagcgaagctgacacggagccgtgtgtggacggctgggtctatgaccgcagcgtcttcacctccaccatcgtggccaaggtagggcctcccccagagccactcgagtcccgtcaccttggaggtcagagtcatggatcaggttggttggactccaaggtccagtcctgggagggacccgcctcctctcgagcctctcagcccctcgtcagccacacacaggggagtgggcggcagggatcagtctacagatggggccagcccaggctcctggtagtgcggggggcacctgggtgggcacctctgaatgctggcatctggacattcgccagcctcgcctggtcccggccctactgacccattagccgtgactccagacaactcagctgcagggggaaatcaggggtaaggggggtctggctgaactgacccaacaggcttcttgctgagacaggccagggtgacacacgtcaccctagagatggtggaggatgaggaacctgatcaatgttgaggctgggggcagaggggggttcttgctaaactgattcagcagggttctttgctaaaactggattttatgaggaagcgccagatgggcccaggagaaggctcaggaacctgactaaagtttggccaagcaaagcattctggtcaccccacgcccatttcctgatcggtgatgatggcccagattcggatcggggctccggttccaacatgagcagggagacttcaagaagcatccattccaccggtgaattcactcagttgacatttaaaccccttctagcagcaaagccacccctcgccctgcaccggcaaagtggcagacacatttccaaatgtgtccctgctgccacaacctcgccacaatcttgtgggatgggtcctatgacagtcctcatttaataacggagaaaaggaaaacacagagaggttaaggggctgtcccagcgcacacagctagagtgtcccagagcctgattcaatcccggcagtcagggtctggagcctgagtcaatcctcgcagtctgcatgagggacaaaagcaaggttgcgaggggtgaggagcggcagcctccttcaggcagatggttggggatggcctctccaaagaggatacattgacatcgaggctgggatggtgaaaggaggaatctgtgaaggtcaggagccccacagagcaaaggtcatgcatagaagtatgtctgggatttgaaggagcagaataaggcccagtgtgtctgcgcacaggtgctgaggggccagaagcaggtgcgggcacatgctctggagctgggattttctttctctttttttttttttttttttttgagacagagtctcactctgtcacccaggctggagcacagtggcacaaacatgactgcctgcagcctctaactcccggcctccaatgatcctcgtggcttggcctccccagtagctaggactataggcacataccaccatgcccagctaatttttttttttttttttgagactgagtctcgctctgttgcctagcctggagtgcaataacgcaatctcggctcactgcaacctccaccttctgggtccaagcgattctccagcctcagcctcccgagtagctggaattacaggcatgcacaaccactcccggctaatttttgtatttttagtagagaaggggtttcaccacgttggtcaggctggtctcgaactcctgacctctggtgatccacccgcctcggcctcccaaagtgctgggattacaggcatgaaccaccacgcttggtctaattttttaaatttttagtagatatgaggtctgactacatggcccaggctggtcttgaattcctgagccgaaaggatcctccagccccagcattccaaagtgttgggattacaggcatgagccactgtgcccgggattttcttttaaatgcaaaagaacctcatcctcgtcatcctcattggagggtttggagcatggaagtgatttggtctgacttgcattttcaagaagtcactttgcagagtagagaagctctgtggggggatggggagcccactggaggctactgcagctgcccgggtgggaaggggaaagagagaggtggagggagctgccgggcctcagtggaggacggacttggggatgggtgtggggtgttcaggcaatggatgactggtcctgggctgaagccactgtaaaaatcccagtgaaccgtgccaagctctctctagtcaccctcaccgctgatgacagcaccagatcacgactccgtgactccgtctctagaggaaaggatagcccagccgaggcagtggctctgccacgtccacctggccagcactcagtagaggtggaagccaagcctatggtttcacccctgccagccactccctgcccctgcctcccactgcccaccttgcctgccacctcacagcccaccactgccaggtactgccagacacagccacacattgcctgccaaagttctttttaccaagaaattgttcatttttctaccacttctgccccttcaaggccctgctgcctgtcagagtctgtcctctgcatgaggggggccactggaccccgtggagtggcctccacacagctggcagacgcagagccaggtcacattctgtcctgcagctgagcttcccatggggagttgcagccccatggccagcaggtcctctctacctctgtgacctggcactgggagtccagggaccccagtgtgggtcaggcgttcctcggccgtgcccagccctgtgatttcataccccccgagctgagccactgcaccctcctcttgcagtgggacctggtgtgcagctcccagggcttgaagcccctaagccagtccatcttcatgtccgggatcctggtgggctcctttatctggggcctcctctcctaccggtgagtgcctccgctcctcccagcccccagctccctcaaaacattgttgaagactatggggcagaaggttcagaaatgtcaggcaaacaccccatccctgcttccgtctccctcctgcctcctctgtttcttccctcccctggccatccgaaccaacccacaggctgttccgggtccccatctcagcaaggccccccagaccctggcctggttcccctcacagggaggccaccccaggccatcccccaccgcccccatttcctctcccatactcctgccagatggtcataggcctcctccatgcggccgtgcttggaccctgtgcctcaaagttgtcctggctccccatcctcctctcctctgtcctttgtcccccagtctcaaggcctttccagaagcctcacgtgggccaaacactagccaggtgcaagggatgcctcagcagaaatgggggaaggggcggtggggagggtgggagacaagtgtctgctcttccccagcttggagccaagcagggctcaggacacaggtaagtaagtcaggccaccttggaacgtgaggccggttaggggaacagggcacaggtgatgggcacgccagggccagccggcaggactggaaacgtctcgtaccaggtgacactgaagcctaggcctgctggcggggagaagcgttctctgtgacacactttcttctcttggcttccagaacatcctcactcctggttttccttccacctcccaggaagctgttcttgctccccctcctcccgctccccctcctgcctctcttcctgttctgggagctgagctgctgattccttgccacgccccctcactcccccagcagcctccatcggaggacacagacccccaacctgtgggacccttctgcgcctgcgctgtcccctggcctcccttcctcacccccacactcacctggctcttcctccaggacacactcagcccaagcccctctctgccacagcatccccttgcctgagccaccatctcctctcaccaggcaggctgcaacccctcgcaggtgtcctctgcagtggccgtccacgctgccacagcactgagtgactttgcaaaatctcggaggttgatctggtcaataaaagctggcccaaagtcctccgagggccccactgcactgaggacagtcccttcctgcctaccccctgccctgcgctgggcttccatccacccccagctccaccagcctcctcctggggccccctgcacgcctgcagagcgcctcagtgactgtgcttcacccagaagctcttgcctatgctgctttgtgcccacacgcaggccgcaactcaatgctcttccttgaggaggccctccgaggccacggagccagagactcctgcccggccccaggcatgactgtcccagcccctccttgcttccctcatcacagtgcctggctctgacgatgcctggctggctcaaggcttgtttgttgtccacgtccccacaagcacacagggacccagggactgtgctccagagcccagctcagcacggtggcagacacgcagtcattatttcatgaatggaggactgccttcccactccctcctgccaccaccctactggctctggggtctgactacctgggtctgaatcccagccttatcccacccagccttgtcctacaaggtagatctcttcccttctctggagatctcttcccttctctgggcctcagtttccccccagcagtggggtctcgcacctgcccacgcagttgtcgtgaggatgaagcgagtgtccttgctcctgggtgctgctcagacaggtgcggccaaggtctgcctcgcatctccgttctgagcagaacgggcttgagtggcactaaatgcaatctccggttcagactcagccggcctggaggccaccgcagcccagggcactcgggcaggggccgagggctctgcatccgccccatgagcacccccttcacagcgcacaggtgagagcagtggattgcaaagtctcggcctccttactccctggccccttgcccagtgtcttgattctcatagcagccctgtgaggcatgtccttatggatgcccttgtgttacagatggggaaactgaggctcagagatgtcgaatcacatgcccagggtcacccaggaaggacagagctggggctcaaacccaggcatctgatgcccaaacctgtgttcttttttatttatttattagagacagaggctcattctgttgaacagcctgcagtgcagaggcgtgatcatacctcactgcagccttgaactcctgggctcaagccatcctcccacctcagcctcccaagtagctgggaccgcagacacctggctaatttatttatttatttatttatttatttatttatttatttatttatttagtagagactgaggtctcactatgttgcccaggctggtcttgaactcctggcctaaagtgatcctccagcctcagtctcccaaagtgctgggattacaggcatgaaccaccgtgcctggccccaaaccccatgttcttaaacactgaaactgaactgcaccctcccatggcaaggtacctgccacttttataacagaagcactctgagtgtacccctaaaagttccaagaaggaggagctggctgcaagagatcccctggcgttgttgaactcccagaaggcaagtacctgcccacatatccacgtcctcaggggcccctctccaggccccgtgtgcttctctcctgtgacaggtttgggaggaagccgatgctgagctggtgctgcctgcagttggccgtggcgggcaccagcaccatcttcgccccaacattcgtcatctactgcggcctgcggttcgtggccgcttttgggatggccggcatctttctgagttcactgacactgagtgagtccccggctcagcgcgctcctgccatgggggcgggggtggcaggagagaatggggctcaggccgccgcatgaggcctcacctgcacgtgtctgcatccttcagtggtggagtggaccacgaccagcaggagggcggtcaccatgacggtggtgggatgtgccttcagcgcaggccaggcggcgctgggcggcctggcctttgccctgcgggactggaggactctccagctggcagcatcagtgcccttctttgccatctccctgatatcctggtcagtatgatgtgggaccttttccttaggagacccagggtgggagggggactcttcactttcacctctctggctggcagtaggtccagagacctggagtgccacagaagggccatggcatgagcggcaccctcgctagggagggacattggtgattggcagtcctgggctaagtgttgcagcccgaggtccgtggctcccatccagcccagacaggccaagatgggctggcacagcattggctcaaatggtgatttaaaaaatacatttgtaactagttgctaacatttaaaaatcagaagattttcaaaaacaaacaaaaacagtattttttaccttctttggaaaaactggaagatccaggggcactgggctgaacttcggccacagtggaagcggccgctctcccggtcccccaggccccactgccgctgtcccctgggctgaggctgtgagcatcgtccttcctcaatacttgcaccagcccccacccaccagcttcactccttcacatacagtgcggaccaacattggatatgaaaatagattgttgtcactacaattttaggggccgcaaaaatccctaaggtctggaaatccctccttgggttggcactgaggaaggagacacagacaggtgcagagggtcttaggtgctggggacacacaagtgaacaaaacaggcaaaaaccagtggccccgtggagcttacgtttcatacacagatcaataagtgaagaggaaggccatcccataattacaataattaggccatccccgccacgctgatcaggtgtgtaccaggtgcagtttataacactaggtgcgtattaacacaccttctaataagtaagatgatgcgattaccaccattttcaaatgaaggaccgagacctagaaaggttaggtcactcacccaaggtcacacacagccggtgaatgccagaggcaggatttgaacctaggcaggctaactcttcaccactacgtcagactgcctccagaagtccttcttagcttccctgcaaacagggctgagagccggtgggttgggcagatcctgtgccttccaccaggaaagtgtttctcctggcccacctgcccctgaggttggggagaaatagactggttttataaaatcacctggttctgcctggggatattttaaatgtgctaaaaaaaaaaaaaaaaaaaaaaaaaaggccgggcacagtggctcaagcctgtaatcccagcactttggaggctgaggcaggtggatcacaaggtcagaagatcaagaccatcctggctaacatggtgaaaccccatctctactaaaaatacaaaaaaattagccatggtggtgcacacctgtagaccctgctactcaggaggctgaggcaggagaatcacttgaacctgggaggtggaggttgcagtgagccaagatcgcaccactacactccagcctgggtgacagagtgagactccatctcaaaaaaaaaacaaaaaaacccagcaccaagtgacctttctatcctagaaatagccccagaatcactggtgaagcagccaactctagggacacccatgcccaggccacctgtgccctggctgtgtgcagggctcaggtgggcaggccccgggcagccaggcgagccagatggaggtggctcgcttgggaaggtgggcggccaggcattgggactcagctttattctgaaaccgctggggactgccaggctcctggctgggcagcagcggcacagaagcatgtgcttcctcatcactcatctcagctggagggtccgtgcccactgcccctttccaccccgccccgggggagagcccagcgtgcactcccagctacacacctgcctccttacaggtggctgccagaatccgcccggtggctgattattaagggcaaaccagaccaagcacttcaggagctcagaaaggtggccaggataaatggccacaaggaggccaagaacctgaccatagaggtgagatgctgctgtctgcgagacttgacctgggacaggacgtgcactgagggatcatccgtgtggcctccaacagcaccacccactccagcaccacctccaccagcaccaccaccagcatctccacagacaccaccaacacctccatcaccacctccacacagacaccaccaccaccaccaccaatcccgataccatcaccaacagcaccaccactgtccacacccaccatcaccttcactgccatcactccatcaccaccagcaccaccaataccatcactaaccccacagccaccatctctgcaaaacatctccaccaccttcaccaccatcgtcaccatcggtaacagcaccatcattatcaacagcacccacaccgtcacctccatcacccaccacctccacctgcatgtagcacgcacccacctcatgggggttctcgatgtgtctggggaaacagaatgtgtttatttgaaggtagctgctttcaggaaacaggcgctgccagagattagagtgaagatggggtcggaggataagggaaggcttccagaaggaggcaagctagagctgagaggaccagggctgagtcaaacctgcagaagagccagggcctggagagaaccttttctgccccatcccctccccttcccctagggatccagcttccagaggccgaggcccaggacaggctccccgtcactctggccacttggacactgttctctggcacagggggtggggcagggccattgccctaccattcacggtgcccccattctccccggaaggtgctgatgtccagcgtgaaggaggaggtggcctctgcaaaggagccgcggtcggtgctggacctgttctgcgtgcccgtgctccgctggaggagctg

SEQ ID NO: 9764 - DNA, 267 bp, Homo sapiens
ctgggacaggcaggaggcagagcgtccaggggaaacagcacccgcaggcctcaagggggtgcatttctgtctgggacaggacgcagacagccccagcaggcaggagtcctggcaggcagcagagagggactatgcacaggtgggatctggaggctgccatctgcaggaagccagaggaaaaggcagctctaggctgggggtcccagggtcccagggaggtcccaagacagaggcagagccagggtccctagagccaggggaccagcc

SEQ ID NO: 9765 - DNA, 25758 bp, Homo sapiens
agtgtgagaccctgtctcaaaaacaataaaaacccaaaacaaaagaaccaagaaattactggacctgaggcctggcctttagctgctgccctgcccttgtgacctggtcactcgggatcccctgggcctaaacacacagcctattgtctacctcaagaaggctccccactgcttggctggcaattggggtgggctttgcaggccccacctgtcctggccccacggcgctggtgctgcaggcccccaccactgcttgttccgagctccccagcctcctgcagagttgcctgcacctgatggcgatgaatcaggaaggcaggcgtgtcctgggccacagagcagtcatggctgtcagccaccagggggctccatttgcaactttggatgtggctttggcctctttgtccaaagtgaccttggggcccccagacaagagacagggagactggagcccagccccaccctcccgcacatacctggcccatccctgccctatcctggaagatgggggccaccacacgtgcaagggacacgggataggaacctttggccttgttatcagacattttaaaactaagtgcaaacgtgattatcaggtgcagtttttacagcagcaagaaacctgtgcttacagaaagaaacacgtgctagcaacccacctatgcggaaagccacacagagccattgttttctgcactctcaggtgacggctcacatttgccccagggaaggtcacagctgcctgaacttttaaaactcccagacacgcactgcctgtgcaggatccggagcccagcagcactgccagggccttgaagtgcttcttcagagacctttcttcatagactacttttttttctttaagcagcaaaaggagaaaattgtcatcaaaggatattccagattcttgacagcattctcgtcatctctgaggacatcaccatcatctcaggtgagcaccaggtggagtgcctctgggtgactggccggtttggagcagggagggaggcttagagtctcatcctccagcagcgagtgaggcggaggctccagcgtccctcccgggcgggttttctggtggatggaggagtgactcggggtcctctacgtggtgccagctgtttggctttctggacgttgtaggaaagggtttcccccgcctgcgtccccctgaccttgagctccaccagcccctgccagctgggctccagaaggctggagtgctgtggcagggatgacgtctcacttctgttatgtctctgtgccctgtgctctcccaggatgaggggcatgaagctgctgggggcgctgctggcactggcggccctactgcagggggccgtgtccctgaagatcgcagccttcaacatccagacatttggggagaccaagatgtccaatgccaccctcgtcagctacattgtgcaggtgaggccagggcagcctccccccaaaagcagaggagctctggagtctagggctggtgggcagggccagccctatggagccacagggtgtcgggtgtggggtactgagcaccactgctcccagcacggtggaacaggctcttggctgtggaccaaggtcctcatccctgctgtgctgtccctggctggcagcaggagcccaggcagaaacatgaggctgcggttaaaccgagcaatgccacgagcatcagctgtggctccctttgtggcgctgtagggtccctgggtggcaccagccctgctcagcaccactgtggccctgcccccagatcctgagccgctatgacatcgccctggtccaggaggtcagagacagccacctgactgccgtggggaagctgctggacaacctcaatcagtgggtgacagtggcagggtcataggaaggtgacatctcgtccacggcacagcctcacttcacttgggccccaagggtggggacctgggcacagcctcgctatcggcagccagaggggtcccctatggcccccgccactgggaccttttgtttcttcaatccagggatgcaccagacacctatcactacgtggtcagtgagccactgggacggaacagctataaggagcgctacctgttcgtgtacaggtgggtggtctagaaagccaggaagcccctccctcacctgggagggccccaacagagcagggaagtagtttgtcctattagtttgtcctatggcaagaacctgaggcttcagagcagggtccagggtggagtgaaaacaccccaaggtcccggaccaatgggttgagcaggtgcctggctcccccgccctcctgtcgcctgggtcccggaccaatgggttgagcaggtgcctggctcccccgccctcctgtcgcctgggtcccggaccaatgggttgagcaggtgcctggctcccccgccctcctgtcgcctgggtcccggaccaatgggttgagcaggtgcctggctcccccgccctcctgtcgcctgggtcccggaccaatgggttgagcaggtgcctggctcccccgccctcctgtcgcctgggacgcgacgcctgcctcctgggaagcaggagtggggcagcttccagcctggggtcacctcctcctgcccggccttcccgcaggcctgaccaggtgtctgcggtggacagctactactacgatgatggctgcgagccctgcgggaacgacaccttcaaccgagagccagccattgtcaggttcttctcccggttcacaggtgggtgctgcctgggccagggtggggctcggcttggcgcttatggcctccaccccctcctagggaacctggaatgcctgtgtcacacactgccctcccagtccctggggcttgggttttccattcaagtcatttggaaaatatccaccccccggggggactgtcatgatacatagttccagctgacatggtgactgaacctgcccccagggagtgtgcctcacacgacgtggctgtctccacagaggtcagggagtttgccattgttcccctgcatgcggccccgggggacgcagtagccgagatcgacgctctctatgacgtctacctggatgtccaagagaaatggggcttggaggtgaggccctcccaggggcagtgggcaccagcggcctccgcatgtcccagggccacaggcagcgtttcctggtaggacgtcatgttgatgggcgacttcaatgcgggctgcagctatgtgagaccctcccagtggtcatccatccgcctgtggacaagccccaccttccagtggctgatccccgacagcgctgacaccacagctacacccacgcactgtgcctatgacaggtgagcagggcctcgcgcttagggcagactgagggcacctccaagggcagccgtgactcataggtcgggcttcagaagcctcaaagcctttgaacactcacccaactgagcttcagttgatccactacagggaacagaataacaagagccacgatttttaggttttttcggaaaagcacatctggggataagaggagaggcagacacctaggctgtcatgtggtttccacattgaggggcacagaccagggtgtgcagttttgggcacccacagacctgcactggcaggtcccagggctcttagtttagttcctgcgggtgctgagccaggcccatgtgtgaaaggggaacctactttctcttcccaacacccatcaggatcgtggttgcagggatgctgctccgaggcgccgttgttcccgactcggctcttccctttaacttccaggctgcctatggcctgagtgaccaactggtatgtgtcctcccttgcacagccacatgaggatgggacacaggagctcaggtaggctcagcccagaccctgtgcccacttgcctgcaggcccaagccatcagtgaccactatccagtggaggtgatgctgaagtgagcagcccctccccacaccagttgaactgcaggaagagaggacccatcctgccacaggacccagaaaaaaagcccaacacacactcgggttaagaaatacctttaaatttaggtaaataaagctcaaggaggtggggctgtcatctgtggtgtcagtccttctggccccctggctgtcagtgtcgctccagggccttgacaagcagctcattcaagcggcccaccatggccctagggtcgtcaacaagtccagcagcaatcatggcgttctcgtatatctgaaaggcaagaggagaaacccattatgaggggcatggggcaccttttcatttttttttttttgagacagagtctcactgttgccgaggctggagtgcagaggcacgatctcggctcactgcaacctcaggtgatccccccgcctcccaaagtgctgggattacaggcgtgagccaccacgcctggccatttttccgtttttaaaacagaatttggctgggcacggtggctcacgaggtcaggagattgagaccatcctggccaagatggtgaaaaccccatctctactaaaatacaaaattagccaggcgcatgcctgtagtcccagctactcgggaggctgaggcaggggaattgcttgaacccgggaggcagaggttgtagtgagccaagatcgcgccactgcactccagcctggcaacagagcaacactccatctcaaaaaacaaacaaacaaacaaaaagacaggattttagaggaaaccgctgttccaccctgaaggcaggctggcagggctggtagcctgggtccctgcagtcatcctaagctgctgcactcacctgatccaccagcagctgagccaggccaggctcgcttgcgcgcagctgattcagcttcttgatgagcgcgtgcctgcaacacagaacccaccagaaaaagcagctcagtaccacgtgctgtgaccctcccttcatgttttgggattatcaggatatttaaagaagcacagtaagactgtctgtagttttttaaataaggtatgttaatgatcatttatagataatatcattatatacccagaaaacccaagagaatcaggagtgtcagtattagaaaatgctgtaaggtagccaaactccaagattaatatacactaaagggacaaaaggagcttagtacgtgaagacatgccttggttcctagataaataataaaagagaagggagtaagacccacatgttgaaacatattatagggctctagtaaataaaacagtttaggtctggaaagggggaaggcaaacaactccatgtaacgagggtggacactgagtgtctgatgaggacagtatttcacagaagagggaggagacagatcactccatccagcagcactgggatgactgggagccatgcagaaaaccatttagaccagagtaaattccagagggatcaaagatgacaagcacaattctagggaagaaatgtttcatcatctcagaaggggaaagcctttccaagcaaaaccacaaaccaaaaagtaaagaatgattgacatatttgacgtcagaacaatatttttttctgcataggaaaaagcatcatgtagtatttaaccttaacatgaatattataatttttcacttagaagtctgataaaaccgagggctctggggaactgtaaatttgtacaacctctccagaggacaactggagtcgggaaaaccacatgtggatgatatgctgagactcagccattccatttcctaactgcatccctttaaacacttttttttttagatagatagatagatagatagatagatagactctcactccttcacccaagctagagtgaaatggcatgatcttggctcaccgcagcctcctggtttcaagaggttctcttgcctcagcctcccaagtaactgggattacaggcacccaccaccacccccagctagtttttgtatttttagtagagatgaggtctcgaactcctgacctcaagtgatccacccgcctaggcctcccaaaatgttgggattacaggcgtgaggcaccgcacccaacctaacagaggaaacacttcaaatgcacatcctcacatttctagtctacgtagctggaaaaaaaggacattcttaatatgctaatgtggaggtcacctagttaccctaagggagaaaagcaaggcaaggacccactgcacagcaagttcccccttggaagcccacgggcgcagctgcccacaaatgcacataatctctgcagaaatacaaaagccctaatgctggctgcactggggacacaggtaggaggaaattttcccctgtaagcagttttgaattctgaactatgtggacagaacaccaaattttaaaacaaatgaaagtgaagctggctgggcacagtggctctcgcctgtaatcccaccactttgggaggccaaggctgcagtgagctctgatggcgccactggtacactccagcctaggtgacagagcaagaccctgtctccaaaagtgaagtggcaacagacagaaacgagcacttctgcagctatctcacaaaactagtttgccaccaaaactagttaaagtgacctggtgtccgcctcactgagctgctccagcagaggcacaggcattctgcatactggcgctgctgtgcactgacagccataagccaagtcagcctttccccaggagtgccatggctaggaagatgcatctccctcgcctccagtataattttaaaagttatggttgtaaaatgacaaaagaaaaaaactagacatgtactaaagaacaaaacaaaaactggctgggggtggtagcccacacttgtaatcccagcacttcgggaggctaaggcaggtggattgtttgaggccaggaggtagaagttgcagtgagctgagattgccccactgcactccaacctgggggacagagtgagaccctgtctcaaaaattaaaatactacttaggctacattgtggggggggtggtaagtctatggattttgatttcctttttgctgttttctatttttggtaacatgtttatgtaacttcattttttaaaaaattgctacattcaaaatttcccccaaaaaagaaacttcatatacaagttagttcatatacaagttagaaaatgaaattttaaaataccccataagacacatcaaagaataattctttaaaaatggtaccagaaccctacagagaatgtaaggtaccaaaggatgttaaagacctaaatagatcacattcatgggtgcaaagaagtgatactgtaaaaagaaagaaactcaaaagatacctaaaggcaggtgaaaagacatttacaacagataaagggcatataaagaacaacaggaagaaacgagggaaatcttacggctcagccactgtcagggctggggggttctcggtgcaccctggaagcagctcccaccaccggggccacagagaaacccacacaagccccagacacgtggacaagaatactcagagcagcctggctctccacaacttctgaccaagaaccaccggaggcccagcagagcagaacggagcagtctgctgtgccgaggtgggtttctgcagcggacattattcggctatgaaaatgaacttgtggcagcccctctgcatgggcaaccctcatgccaagtgagcaacgtgagacttcagcaaacaccaagatccacgtacaaagctcaaaacaggcaaaactgagcatgtccaggacacgcacaggtggcaaagccataaagcaaaacgaggacatggtcacaggctgggatgtggctaacctcccaggtgacacctggggatggtaaggggctggccaggttccatttcacatgggtgcagcctaaactgcatacagctccttatagttacccacatgtccacaggcctcacgcacttttcttctgtgtcacattccacaacaaaagaacaccacacacaggattctggggaatcccacaggctggaagagccaggagcgtggcctcacctggggttgatctccagcgtgggctgcaggagctgtgcgcgctcctcctgggtcttggccagctgctgcatgcgcaggaagtggcgggcagcccccatctccagcacggtgaccatggcagggtgggtgtccagtcggagggtcacctgtgagcaaagcccggggttgagggtgatagaggttcccaatgtgagagggctggcaggatcttaccaggggtgaaggtcacccagaccacgaggtagcaggcggggtctcaaggactcccctggaccagcgctgctccctccccattacccactaacttgtgggccctgagctgatgccccacgcaaagatactgtgcccgaggggctccaccaccctggtgccccgctgctgcctccaggagctgcccgaatccatcgtcctctgctccatgccagcccaccctgcatgaggccccttcctccaagtgaccatgcatgggacgctcatttctcactctgagctagacaggttggtggggggagtcttagctctctgaagcccacccaaaacccccgactaagcacccaagtgagcatgtgagctcctgagggctggggtagcatgtcccttgtttggaacccccacgtcctcagccattgcagctcccactcaggatgctggtttttcagttctcagttcacacctgctctggagcagggctgggagaaagacacggccttcctgcctcagcggcactcccgagcaacacgtgccgagcagggacccacagggtctccacctgacaccaagggcttctgctgctgctggaaggacacccaacgggccaggtactgggagccaccagctggccagcctgttagggacactgcggccaagtggtggtccatccccgggaaagcctcaccttcacgttggtgacacgcgaccccagcacatttctcatccaggccatgagctcctccgtctccttctctgataggcactcggcggctgcggaagagcaggcgacagggagctcaggcctgcatcccaactccccggcttccatgggggccacgcagcatgcttccagctcccacctcctctcccaccaggatggagacacaagctagcaagatgcttttcatctaaaagtaaaacctcaaaggatgcttcaggttgcctgaggcccatacaacttggttagggctttaaaaaaatacacagcctctcaagaagctgggccagctccagaagccaccgtggcaggagcactggacagacccctgatatctaaaccaggaggcaccttcctccagtcaccagggtgctcccacaaggctcttctcgggggtggctgagcccaggtcaactgacgaaaacccaaaggaagccctcgctgcggggcaggagaggcgtgcggggagtggaaaccagccccacgcctagagagcaggggatgccgacctggggacctgtcctcaaacttctcctccttgtagtgatccacgactatgtccgtctccacagagatcagcttcttcttgtcaaactcacgaaggtgcagcagggtgagctcatcaaactgctcaaagcagaagagaacctgcaggtggccaagagcagctccatcagaccccgggggcctccagccaccacagaagaaaggatgagggcggcaggagggctgggggagccaagcgggccacactggggaacaccggggcagttggggttcctaggcctgcatgacagttactacgacacctgggtctaaggaaggctctgactgccttcaaggcagaagcactccacgcataaagaaatccacatgtggctgagtgcagtggctcacgcctgtaatcccagcactttgggaggccaaagcaggcagatcatgaggtcaggagttcgagaccaacatggtgaaatgccgtctctattaaaaatacaaaaatttgctgggtgtggtggtgtgcacctgtagtcccagctactcaggaggctgaggcaggagaatgacctgaacccaggaggcggaagttgcagtgagccgagatcgcaccactgcactctagcctgggcgagagagcaagactccatctcaaaaaaacaaaaaacaaacaaaaaaaaccacatgtgacctccaagtgggaaacagccgtcacagtcggtccggcctctgtgcccgtgaccctgacccactgtgcagccctgcccggagtcttgggcaggttcacccagcacagagctgagaaggtcaagaccctccccaggttgcagcccccggagcccgccccacccaccgctcacccacctctgtgtctttcttcttcatggcctcatagtagggtgagtgctctgccaggtgacggttgggggcgcacaggtagtagatgttgcgggtgccggcccgcatgcggctggcgtattctgagaggctggttagctgcccggagggcagcgccgaggactcgtagcgcagcagctttgctatgtcctcctagaagggacggggcaggtcaccacttattccaggcccatgggctcaatgttgcccaactaactgggcgcaaaccctccgatgcccatggcctcctggcactccaggctggccctgacccgagggacggtagtggactcgggggttgtccgagagcaggccttgctctgcccatcaggccccttttgggagctctgggggcttaggaagcacctcctgccccaggtggcccaggggctctccagggagctacgcgcaccacgccctgggaggggaccccacccaacagcagagcccggcctggacccagcgtcttccctctgccctcagtgacagagtcagtctctggtgggcacacggacacgggtgaagtccacggttcccggccctcctcacagctggctatggcagagactggctttgcccagtgggtttcagtgggatttggagaagggcccttaggggaggggtttgccctcctccccatcagctgaacgcagctgtgacctctagagctcatgggagctgcagctggaaggacgcagggggaaaacagaaagagggaaaagcaaggagctggacacccaaccagcagggcccaggccacccctgcacacatggtgggtctgcattgataagacatgtcacacgtgcacacctacaaagacctagaaatgtctctgactcttacctgtgtgctgttaactcaaatgaagataaaggagaatgaagaggcctgtgtcagaagctgccgaagtcggcaaacaaccagaacacggcctccttgggaccccacacacgtggtcaccctcctcctgctgctggggagaagggacaccagcacgggatgggctcctgggatgaaatgttctggggttacagtggaggcagccacaccacactgtgaatgcactaaatgccactgaattttacgtgttaaaaggtgaattctgtgaatctgatgctatgtaagttgtatctcaataaaaaatggacaaaaaatgtttatggaacaaatgtttcgtttttcagccatccactattggattaactgaacgactggcccctgtagcatagtatttggagactgatatccagtacatgatgaatagtccctcaacagacactgagaccacccacttccccacccacgggatcggagtccttggcttgtcccacctgtctgtggctccccagcccccaacatcctctgaggggagacagtgtgtgcacgccctcttcctgccactccctgggctgcaccttcacacagcagtgaggctgagcccttcagagcacagcacagcactggtgggagggtaaggatgtgcctggaaggtgccagaggcccagaagcctggccttccatttcctgaccctggtggcagcagcagcagcagccagggtacccagctgcaccgtcgccacatcaggggacacctccaccagcttcctcagcagccccagggacaaggtggcccagaaaaaggcctggaacacagctcctataccttgacctcctgctcggtggcggtcacaatgccctcccgcatgaacaggccgtaatcttcaaaaaactttgcatacttctcagcatcttttttactctggtcaatgaagaatttgatcagcctctgctgtaaaacgtcccggagtttcctacagaaaagaaatgcatttaatacatacaagcagcctctatgaaatacaaatggccagagggtacgaaaaaatgttcagccccgctaagaatcaaagaagtgaaaacaacaaggtaccgttattggccaaactgaaaaagactgagcagaaagacagaaaccctgggcagtggccggacaggaggcagcagggtggagggcagacaccccctggaggcagtaggagaaccgatgcccccagagacaagatacccacgcccggaaaacccttccaacctttgagccagttgttccaattataggaactgcaccttaggaaacatgtgagcacaccaagatttatgtaccaggattttcactgtggcacataaaatataacaattatgaacaacctcatgttcaagaatataggctaaaattatgtaatgctaaatggccataaaaaaaaaaaactgcatcttttaataatcctcaatgacatgagaaagttagctgtgttgaaagaaaacccagaaaaatcccaatgtgggtaaattacagtacgtctatagatacaggcaaagaatgcacattctacatgtacataacaattttccatcattaggagcagcactgtatatactatatatgtacactgtaatttgggatttatactgaatatatgtatactctaatttttcaaaattgggattttagggatcaggatatttactgcagcattacataatggcctaaaattaggaacaactttatcactgggactagggatatttttattttcttcttaatatttagtctttcctttaagcaggtaaattacaatgtatttcaataatccagagcatgggaacaacactctctcgagttcatttagagcctttcctcccacactccatccccagtgactcagtccttcagccacagggcagaatgggacaggacatgccttcgtgcctgggagcggggggacagtagcccaggatgcggtgcagagcccagggaaggtgtctatgcagggccatggttgggaagagcctggtatgggtgtcagagcccaagaaccccagagaagggtgtccaggctgggggcgtgaccagcccaccgtgaagagtcagagcccaagtaggtgacagggacacccgcagaagagggcagtggcaatggtagattggttacatggagggggattggtcaaatgggtaaccgtgctaagaataatcaacggggcatggtggctcctgcctgtaatcgcaccactttgggaggctgaggcgggcggatcaccagaggtcaggagtttgagaccagcctggtcaacatggtaagcccccgtctctactaaaaatacaaaaaattaccagggcatggtggtgggtgactgtagtcccagctacttgaaaggctgaggcaggagaatcgcttgaatccgggaggcagaggtttcggtgagccaatacctcgccactgcactccagcctgagcaacagagtaagactccatctcaaaaataaataaataaataaataaataaaaataaaaaaattttattaatgatagcaagattataaactcttgaataaaacaggaaatcagcccatataaataaattataaatagtataaatataacacatcaatttttttttttttttccatccgacgaagtcttgctcttgtcccccaggctggagtgcagtggcgtgatctcggctcactgcaacctctgcctcccgggttcaagcaattctcctgcctcagcctcccaagtagctgggattacaggcacctgccaccatacccggctgattttttttttttttttttttttgagatgagtctcgctctgtcgcccaggctggagtgcagtggcgtgattttggcgcactgcaatctccacctcccaggttcaagcaattctctgcctcagcctcccgagtggctgggattacacctgcctgccaccacgactggctaaaattttgtgtttttagtagagatggggtttcaccatcttggcaggctggtaactcctgacctcgtgatccacccgcctcggcctcccaaagtgctgggattacaggagtgagccattgcgcccagcctaatttttctattttttaagtagagacggggttttaccatgttggctaggctggtctcgaactcctgacctcaggtgatctgcctgcctcggcctcccaaagtgctgggattacaggcgtgagccaccgcgcccggccaacacataaatattttaagtaaataaatgaatgtattgagagtttcatgaagaatgtgacatttacatagcttcaaaatacctataacatctgttaattacaaagggaaggacatccttgtttgttggaaacgcaccccaaaggcatcgagaaggcaacttcctctcacaggattcgaggaaaaacatgttcttggtaccatgcttccaacttttaagcctgtgattctttcaaaagctctaatttcggctgactcttttctgatcgagatgagttctcagactgacaacgcaacctttgacaaccacaagctgggatgaggacccctgctctgcagcttcgggcactaccagtgggccagcatgcctgccacagccaggaatgcagctcccttactgagcaggaccacccctctgtgactcagtttccacaactatgagtgaggactcacggctcccctcacaggatgaaacacgtgtttatgcaggctcagcacagttctcagtggagaagaaatactcaggaaacacattcaggatggggagaggaacgcagccgcctcggcccgcagggacgccaggagctccctctccacagggcctggcccctgcctccacttcatccgtgagcttcccagatgaggccagacgtgtcctcagttcagtgggtgtcctttgccttatccagcccagggacattgtacctggaacctcccctcctgtggccactcctgggcagggtgatggggatggacaaggtggggacaactccagcaccagcaataataatccgggagtcagccccaagccctctcttcactgaagtgaactgaaacattgggcagatcaccagtaacccacaggcgcactcgaagtgcacagggtcagtacaccaaagagcacgactctaacgaccacagaacagtcgctgctgtggggcggggatgcatcctgttgaggtcagcacaactgctgccctgtggtcatgtcggcagcaagtcggggtcctgctgtcagaagccagcacggctgtgtggggaaacaagcactgaggcccccttttcattgattatataacatctctttagtcagcaaggaaaataccttttatatagttatatcttccgaccaagtaaccccacccctagtattctatcctaaggaaatacagctgcaggtaaagatttcagaacaggccaggcgcggtggctcacacctgtaatcccagaactttgggaggccgaggcaggcagatcacaaggtcaggagatcaagaccatcccggctaacacagtgaaaccctgtctctactaaatatacaaaaaattagctgggcgtggtggtgggtgcctgtatcccagctactcgggaggctgagacaggagaatggcatgaacccgggaggcggagcttgcagtgagccgagatcgtgccactgcactccagcctgggcaacagaccaagactccgtctcaaaaaaaaaaaaaaaaaaaaaaaaaaaagatttcagaacaaagataaacatgcactgcagtgtcataactgcagaaacactgagacagcccagctgtgcagccccgagggacgggatcagtaaactatggtacatccctgtgatgtcccatgatgtagcaattaaaagtgcttccaaaaaacaacatgggaagtggtgcaaataaactaggtagaaaaaaggaaacagtataagcaatatgaattcaattgcatgaaaaacaaaaacaggccgggcgcagtggctcaaacccgtaatcccagcactttgggaggccaaggcaggcggatcacgaagtcaggagatcgagaccatcctggctaacacggtgaaaccctgtctctactaaagatataaaaaatcagccgggcatggtggcaggcacctgtagtcccagctgagacgggaggctgagacaggagaatggcgtgaacctaggaggcgaaggttgcagtgagccgagactgcgccactgcactccagcctgggcgacagagcaagactccgtctcaaaaaaaaaaaaaaaaaaaaaaaaaaaaatctaagtggccaggtgcagtggctcatgcctggaatcccagcactttgggaggctgaggccaaaggatcgcttgagcccaggagttcaagatcagcctgggcaacatagtgagatcccaactctacaaaaaaatacaaaaaaattagccaggcatggtagctcacacttgtagtcccagctacttgggaggctgaggtggaaggattgcttgagcccaagaggttgaggctgcagtgagctgtgatcacaccactgcattccaacctggacaacaagaaagaccctatcagtcaaccaataaaacatcactgcggcttgcttggttgaaaaaagaaaaaaatctccatggctttctgcctctgaaggtgaggcaggaggatatcaccggcaggccatgtgacctcgcagggctgggcatggacccaccaggcaggaaaccacactgcccaccatctccccagacctgctcctgcccgcggcacaggacagaatctctgaggaccagtgcctctcggtgtgggcctctcgccatgcccacagcgcagccccaacacacaccaattacccagactcatcctttttccgaggatctgcttccatttcaacactggagagaaaccggtgggcagagaaacactgcaggcacgttgggggctccaacaaggcccgttccatggcatgctgcacgtggtgggctcttgagagacctccagggctccaaattccagctgaatcctcaccccacaggctccctctgaaacctgccctatgtggctgccaatctaccccaccctaaaccatcaacagcagtcatctctaggtgagagcacaggtcacttgaatgtgctctagtaaggaaatactacttgcattaggggaaaaaaagccagtaagcgaggttttgaataaagactatttggtgagcctggggccagagtggggaagtgatagctactgatggagaacctggagccagcacactggagtcccctccacacagggctggcctgctgcagggctgcagtcacaaccctggggcacaggtgggcaggtctggctctgcggcccctccccctatccagactccagcctcagccatgaccagccacccccaccttcttctggaccacaagcttcagaggccaggccagcacctggaaggctcctgagggcccccatgtgcaggccgggcttccccgaccacctctgctctcagctccatgggccacggctagggccctctgggggcaaaggagcaggtaggggccttgtccccagcagggtcctctccccgcggcccgaggctcacctgatgagtgcgctctcctgcagcagctcccggctgaggttcaggggaatgtcctcactgtccaccacacctgggagacacggcagtcagcttctcccggggctgcggccctccacaccacccaacattccccattaacctgccctttgtcttcaggcctggccttcaacccagcacgtgtgctaagagggaagcagggaggcggcactgccggagcttcctctacgtcctgccacctcccagaacagtgacctgggctgtgggtggccgggacagcctcggggtaacactcggaaaatgacagcctgggctttatgttaaaaatcacaactctggctgggcacagtgtctgacgcctgtaatcccagcgctttgggaggccgaggtgggcggatcatgaggtcaggagttcgagaccagcccggcaattatggtgaaaccccatctctactaaaaatacaaaaattagccgggtgtggtggcgggcgcctgtaatcccagctactcgggaggctaaggcaggagaatcacttaaggaggttgcagtgagccacgattgcaccaccgcactccagcctgggtgacagagcaagactcgtctcaaaaaacaaacaaacaaaactctatcagggatggttcgcacctctgtgtaccaaggcttaaatactgaagtctttcttaaactataatctcactcaaacgtaacacaactcacatatcaatctgaaactcagtatccctacatatggaaagacctcaatctgaacaccccagtgctccccccagatcagtcatgtgcgtagggaggtggggcagctcccggggtctgtaaacgcgactgacacacaggcagcgcaggccgacggcggtgctctcgctgcagagggctgctgagaatggaatcagcacggtccctcacagatgcagcgggcgacactgggccacgggggcactgctcacggactctgagcagcgtacctcggatgaagcgcagccacttgggcaggatgtccgtggccttggtctggatgaggactttgcggctgtacagtgcaacgctggagcccagctcccggctcacatcaaacatggacggtttctgggggtgaggagaacacgccatcatgcagcactgaccctccccaggcaggccctggctgggaggtgggggcggacacgatgaatccagagcccactcccgcctcgccctcccccagcgtctgctctgagttgaagcccagtgcaggggccccacgatgccccacactgtggctctgcaggggctgaaggccttctctggcagctgccgccctccccagcccaccccctaaggaggacacaagagagtgaaccttgcacgtacccctgaacacactgaacacagccaaaccttgctacaggtcagggatcagcaaagagccctccgaccagatccagctcactgcctacctctgtgtagcctaagagtggtttttacactttcaaacagttgaggaaagatttcaaaaaggatgatctcatgagacgtgaagatgaaactcaaatttcagtgtctacgcagctcatgggacccggccctgtgtgctcagagggcagcagggcagtgctgcttcctcacccggcagggttagtggctacgaaagacaccgggcccgaaacgctgggaccagctcctgtctggccctcgtggaacgtgcctgccaacacctgctccacactggtacttcccgaaccgggacccacacctcatcacgggatctggttaaaatgcggcgggtatctagttcaaatgttgggagacctggttaaaatgtggggcgacctggttaaaatgggggggatccggttaaaatgcggggagatcttattaaaatgtgggctcccacgcaggagccctgggtggggcctgagactctaacaagcccctggaggccacacctggctggctctttccaagatggatgccagctgtgcaggacattaggagagtttccaggcagccaaggacagaagagcctgggggcaggacgggctggctctcagccccgaataggtctccttacggcaggatttgcgggaacttcaatgtggtaaaggaaaccaggggaggtggagggtgtggaggaagcacacagagaggccaacggagaggcaagaccacaggcccttcccagagcgcctggcaggacagcatccactgatccacagcagatgatgtaggctctgagggccctccccaggcacaccccagtccacaagcctccaccccagcctgcactgagatgcccatcaatccttccctcgccatgtgtgacccctgagacagaggaaacctctgtggttacccacccagaggcatctgttctttttttcttttttttcagagatggggtctcactatgttggccagcctggtctgcaactcctgggctcaggtgatccaccctcctcagcctcccaaagtgctgggataacaggcgtgagccaccacacccagcactacctatgtttttcatgccctcacactgccatgttaatcatgtgacatctgcagagctgatgccacaggggacaacagagtcaccctgagggccgtgggactgccacagtgcctcaccatgtcgggcacgtagaagatgctgcggatgttgagcggtgcgtccgtcttatagtgcagggtgtagcggggcttgtcgtgagcctgcgcgacgtagcggtagaactcctcatgttgccactcacggacatccttggggtccatcatccagatggcctggaaacggagatcggcggggagggcgtcgtgttcaccacgcacgtcttctccaccaccgtgcaggcctgagccagtgcagcgcctggccctggacaggctcctgggacagacgggcggtggtctcaggcgtagacccctctccagccccaccgctgggctatgccgggtagtgcaggggagacacacaaggctctggggcaggagctcctcaggacaacatgtcaggaggaccagccgggacctgagggggcctgtgggagaggatgacgctgcccagcaggggcgagctgacgaatacagtgtgggccgtgagagcgatgacgacccacgctgcaccgcagctgagccgcgagggggaagtcagtcactgaggacagcatgccgtgtgactccatccaggagaaacgtctggaacaggcagcacaatggacagaaaggagaccgtggctgctgggactgggggaggggcagtggggaaagggctgctttttggggtgatgggatgttctggaattgatgcggggtggctgcacagctctgtggctgcactgaacaccatggctgcacactgatgtggtgagccagctgggatgggcgttacgcctcagtgaaccctgacccctgaccccggctgcccggtgcacaggggcagggctgtggtagagctgggcccctgtctcatccccacacccaggtctcatctccacagagcagctcgccctgtgactctgggccgcatcccctgggctcatctcttctccgctgccctgaaacgtacagatttgtctccatgtttgaccagtccctagaggaactcagggctcacctgcaaggtgttcatccgccttccattcaagtacaaggggaagctgacgaagttgctgtacttcgttaccacatctggaagggacaaaagaaaaaccacactgcatctacaatgcttgtggaaacgcaagctttgcagcagctccaggatgagcgccagcctgctgggaagggtcctccatgctgtgtacacttcacaggtacagaaacagggcacagtggggacacctgtcctccccccagtctcacgggggcagcagcggagcccacgtgagaaccagagctgtggaggccccggctgctgcgagactgcaatgtcagcttgtggctggaacatggctttctgggctgactcctgggggtactcagggcctccctgagtgtccagcaggacacaaagagggaaggccacgcccacatcctgggacaggactgcgccaaacccccaggtgcactaaaggccaagggccacgcagaggaaggaggaggaggtccgcctcagccaggccagcttcctcccagtcccagcaggagctcgatgctacgcagccctggcgggcagcccccctcccagtcccgcagcggctcggcccttcacggctctgcctgtgcaccctacgtgcaggtagaaccagggaaaatgcctgctgacctggtggcctccaggccacacatggatcccagagtgagcctgggcccgggctcccgctcacctcgcacccgggcctcgctggaaaactccttgcagtcggatttcaggtggatgatgatttttgtcccggttctaactcccgaagcttcggcgatttcaaacactccagaactaaggcaggcaaggaaaggaaaagccaggtggatgtgacactgggacataccctgcatgggactccagcggttcccgagggtttcataggcagagcccaaacaacacacaacacacctcaaatgccccatttctgaccccagcgcaccactcaggccatcacatgcccatcaggaacgatgagcctgtcgcaggcggcagagttctcctggttccctcgggcggggggcgggggggcgggggtcctccaccgaccctgggcttcgaagaagcttctgggcttaccccaaaagcaggtctggggcacggtgggggactggcccagctccaaatcgggtgccagatgcccaggggcaaaaacaaaggccagggggacaggcgccccctaagaagagcagaaaaccatctccgaagcacaggaggggggaatcccccggcagggccatgttgatgccttggcctaagtttactctgagccccgctcccatggaattaaacaggaatgttagttttgggagagtggggagtcaagctgagcacagtgcacacactgtggagcagaaatggcatcacggagggaggacgcctcggctggctggaagcggctcacctgctaaaaagccctcggagccaggcgtggtggctcacgtctataatcccagcactttgggaggccaagacgggcagatcacctgaggtcggggttcgagaccagtctgaccaacatggagaaaccctgtctctactaaaaatacaaaattagctgggcgtggtggcatgcgcctgtagtcccagctactcaggaggctgaggcaggccaattgcttgaacctgggaggcggaggtggcagtgagccaagattgtgccattgcactccagcctaggcaacaagagtaaaactccgtcccaaaggaaaaaaaaaaaaaaaaagcccccagcaggctcctcaccctatagaggcagaagtgggctggggagacaaagccaggaaatgccagggctgggaggaagcagaatgagctcttgcagaaggtcggtcacaggaggctgcatagtgtccaccaggcgacaggccagtcctgcagctcagccactgagaaaggagctcagcgcgggccggacctgccttcccgagcgcagtggtggtgaccaaccacatgggaccagacaggtgccataggccacctggagccacaaaagtcactaactccccaaaatgggagagtcagatttcatataaaaagcccagaaaatgcctgtgtacgttttctgagtccatccctttccaaactccatgctaagggctccagctcagctttgagctgcctgtcaggcgacattcgtcactcacccatctgaaagccactggtaacccaggctccccggggctgccgagcgggaatagacctccactctgtcagccaccatgaaagctgagtagaaacccactccaaactggccgatgatcttgctgctggcctcagcctggttctgcagagcatccaggaaggcctgtggggcagaggccagttagtgaggcagcctcccctccagagagcagacactcccaacaccgtggctcttctgcgagcaccgctaagaccccttcatcctgaaaacagccacaccgagtacttttccaccccattctacacgtgaagagctaagtcacagagaggtgacacattagccctaggacaaccagctggcagcagtgggacaagtgtgttttccatttgattcccaaagctcacagtcctgcctgtcccagacaggtggaggcctgtgggtcacacctgggggtggggaaagagcagcttgaataagctctttcccttgaataagctccttccataggaaggccaggagtgaggagaggctccaaactggcttccatattcaagtctcctggactctacactttgtgggaaaaagagtagaaatcacgcgcatgcgtctgtaagcaccgcacagcacttcatttttctactataatactgccaaaggtcctaaggccaaagtcaagtaaaatacacacgcccactgccctggcccacgttgtccgatggaactttctccaacaacaggaacgttctgccaggtgcaatgcgacagcctgccgagcacctgcaatgtggcctgtgcagctgaggagcacaatgtccccttttatttaatttgaatgcatttacatttaaactgccacatgcagctggtggccgctacacaggacagcagaccaacctcgagagaaatacaacaaaagacgtaacgtgggggtcaagtcacagttagggtgggttttttgtttgttgttgttgttgttgttgtttttgagatggagtgtcgctctgtcgcgcaggctggagcgcggtggcgtgatctcagctcactgcaacctctgcctcccgggttcaagtgattctcccgcctcagcctcccgagtagctgggatgacaggtaccaccaccacgcccagctaatttttgtatttttagtagagacggggtttcaccgtgttagccaggatggtctccatctcctgacctcgtgatccacctgcctcggcctcccaaagtactggggttacaggcgtgagccaccgcacccgacctagtgttttcatcttacagatgaggagactgaagtaagtgctttgcccagagctggaaaagggcgaccgctggaggttcccaggctgttggtctgagtccaaatgtgttgctctgcctcacagcacttttctgcaaagtcgattccctgagccttgtgggcttgacgcagagagggtcagagggatcagtcccctctcacacagcgccgtgatgagaacgggcttgggatgcggcgtctgtgggtttgatggttctggtcagaactgctctgtgggtctgggcatagtgacgtgcacctgtagtcacgcctcaggaggctgaggctggaggatagcccggccaacatggtgaaaccccgtctctactaaagatacaaaaaattggccaggcgtggtggctcgtgcctgtaatcccagctacttgggaggctgaggcaggagagttgcttgaaccgggaggcagaggttgcagtgagccaatacagttggtcctcctatctacgggttccacatttgcagattcaaccagccaaggatcgaaaatactcagaaaaaaaataaaaaacaacacaatgataaaaagtagtataaaaaacataactatgttatatctatatctagcatttacattctatcaggtattataactaacctagagaccatctaaagcatacaagaagatgtgtctacaatatacggcaccaatttaatccgggactggagcatctgcagactttgctatccaaggggggtcctgaaaccaacccctagatactgagggaccaacccccagatactgagggatggctgtcatgtcatgaggtgttcccacagtacccactgcgtggcatgcaactgacaacgttcttacttaatctggcacccagggccacccctactggagggatccttgcaccctgaggggaagggggaggctgtgtgggggccccacgcttacctttgaccccgatctggcaatcgtccccaggttggacaccagctcttcctgtgtcatcccgataccagtatcctg

SEQ ID NO: 9766 - DNA, 25701 bp, Homo sapiens
agtgtgagaccctgtctcaaaaacaataaaaacccaaaacaaaagaaccaagaaattactggacctgaggcctggcctttagctgctgccctgcccttgtgacctggtcactcgggatcccctgggcctaaacacacagcctattgtctacctcaagaaggctccccactgcttggctggcaattggggtgggctttgcaggccccacctgtcctggccccacggcgctggtgctgcaggcccccaccactgcttgttccgagctccccagcctcctgcagagttgcctgcacctgatggcgatgaatcaggaaggcaggcgtgtcctgggccacagagcagtcatggctgtcagccaccagggggctccatttgcaactttggatgtggctttggcctctttgtccaaagtgaccttggggcccccagacaagagacagggagactggagcccagccccaccctcccgcacatacctggcccatccctgccctatcctggaagatgggggccaccacacgtgcaagggacacgggataggaacctttggccttgttatcagacattttaaaactaagtgcaaacgtgattatcaggtgcagtttttacagcagcaagaaacctgtgcttacagaaagaaacacgtgctagcaacccacctatgcggaaagccacacagagccattgttttctgcactctcaggtgacggctcacatttgccccagggaaggtcacagctgcctgaacttttaaaactcccagacacgcactgcctgtgcaggatccggagcccagcagcactgccagggccttgaagtgcttcttcagagacctttcttcatagactacttttttttctttaagcagcaaaaggagaaaattgtcatcaaaggatattccagattcttgacagcattctcgtcatctctgaggacatcaccatcatctcaggtgagcaccaggtggagtgcctctgggtgactggccggtttggagcagggagggaggcttagagtctcatcctccagcagcgagtgaggcggaggctccagcgtccctcccgggcgggttttctggtggatggaggagtgactcggggtcctctacgtggtgccagctgtttggctttctggacgttgtaggaaagggtttcccccgcctgcgtccccctgaccttgagctccaccagcccctgccagctgggctccagaaggctggagtgctgtggcagggatgacgtctcacttctgttatgtctctgtgccctgtgctctcccaggatgaggggcatgaagctgctgggggcgctgctggcactggcggccctactgcagggggccgtgtccctgaagatcgcagccttcaacatccagacatttggggagaccaagatgtccaatgccaccctcgtcagctacattgtgcaggtgaggccagggcagcctccccccaaaagcagaggagctctggagtctagggctggtgggcagggccagccctatggagccacagggtgtcgggtgtggggtactgagcaccactgctcccagcacggtggaacaggctcttggctgtggaccaaggtcctcatccctgctgtgctgtccctggctggcagcaggagcccaggcagaaacatgaggctgcggttaaaccgagcaatgccacgagcatcagctgtggctccctttgtggcgctgtagggtccctgggtggcaccagccctgctcagcaccactgtggccctgcccccagatcctgagccgctatgacatcgccctggtccaggaggtcagagacagccacctgactgccgtggggaagctgctggacaacctcaatcagtgggtgacagtggcagggtcataggaaggtgacatctcgtccacggcacagcctcacttcacttgggccccaagggtggggacctgggcacagcctcgctatcggcagccagaggggtcccctatggcccccgccactgggaccttttgtttcttcaatccagggatgcaccagacacctatcactacgtggtcagtgagccactgggacggaacagctataaggagcgctacctgttcgtgtacaggtgggtggtctagaaagccaggaagcccctccctcacctgggagggccccaacagagcagggaagtagtttgtcctattagtttgtcctatggcaagaacctgaggcttcagagcagggtccagggtggagtgaaaacaccccaaggtcccggaccaatgggttgagcaggtgcctggctcccccgccctcctgtcgcctgggtcccggaccaatgggttgagcaggtgcctggctcccccgccctcctgtcgcctgggtcccggaccaatgggttgagcaggtgcctggctcccccgccctcctgtcgcctgggtcccggaccaatgggttgagcaggtgcctggctcccccgccctcctgtcgcctgggacgcgacgcctgcctcctgggaagcaggagtggggcagcttccagcctggggtcacctcctcctgcccggccttcccgcaggcctgaccaggtgtctgcggtggacagctactactacgatgatggctgcgagccctgcgggaacgacaccttcaaccgagagccagccattgtcaggttcttctcccggttcacaggtgggtgctgcctgggccagggtggggctcggcttggcgcttatggcctccaccccctcctagggaacctggaatgcctgtgtcacacactgccctcccagtccctggggcttgggttttccattcaagtcatttggaaaatatccaccccccggggggactgtcatgatacatagttccagctgacatggtgactgaacctgcccccagggagtgtgcctcacacgacgtggctgtctccacagaggtcagggagtttgccattgttcccctgcatgcggccccgggggacgcagtagccgagatcgacgctctctatgacgtctacctggatgtccaagagaaatggggcttggaggtgaggccctcccaggggcagtgggcaccagcggcctccgcatgtcccagggccacaggcagcgtttcctggtaggacgtcatgttgatgggcgacttcaatgcgggctgcagctatgtgagaccctcccagtggtcatccatccgcctgtggacaagccccaccttccagtggctgatccccgacagcgctgacaccacagctacacccacgcactgtgcctatgacaggtgagcagggcctcgcgcttagggcagactgagggcacctccaagggcagccgtgactcataggtcgggcttcagaagcctcaaagcctttgaacactcacccaactgagcttcagttgatccactacagggaacagaataacaagagccacgatttttaggttttttcggaaaagcacatctggggataagaggagaggcagacacctaggctgtcatgtggtttccacattgaggggcacagaccagggtgtgcagttttgggcacccacagacctgcactggcaggtcccagggctcttagtttagttcctgcgggtgctgagccaggcccatgtgtgaaaggggaacctactttctcttcccaacacccatcaggatcgtggttgcagggatgctgctccgaggcgccgttgttcccgactcggctcttccctttaacttccaggctgcctatggcctgagtgaccaactggtatgtgtcctcccttgcacagccacatgaggatgggacacaggagctcaggtaggctcagcccagaccctgtgcccacttgcctgcaggcccaagccatcagtgaccactatccagtggaggtgatgctgaagtgagcagcccctccccacaccagttgaactgcaggaagagaggacccatcctgccacaggacccagaaaaaaagcccaacacacactcgggttaagaaatacctttaaatttaggtaaataaagctcaaggaggtggggctgtcatctgtggtgtcagtccttctggccccctggctgtcagtgtcgctccagggccttgacaagcagctcattcaagcggcccaccatggccctagggtcgtcaacaagtccagcagcaatcatggcgttctcgtatatctgaaaggcaagaggagaaacccattatgaggggcatggggcaccttttcatttttttttttttgagacagagtctcactgttgccgaggctggagtgcagaggcacgatctcggctcactgcaacctcaggtgatccccccgcctcccaaagtgctgggattacaggcgtgagccaccacgcctggccatttttccgtttttaaaacagaatttggctgggcacggtggctcacgaggtcaggagattgagaccatcctggccaagatggtgaaaaccccatctctactaaaatacaaaattagccaggcgcatgcctgtagtcccagctactcgggaggctgaggcaggggaattgcttgaacccgggaggcagaggttgtagtgagccaagatcgcgccactgcactccagcctggcaacagagcaacactccatctcaaaaaacaaacaaacaaacaaaaagacaggattttagaggaaaccgctgttccaccctgaaggcaggctggcagggctggtagcctgggtccctgcagtcatcctaagctgctgcactcacctgatccaccagcagctgagccaggccaggctcgcttgcgcgcagctgattcagcttcttgatgagcgcgtgcctgcaacacagaacccaccagaaaaagcagctcagtaccacgtgctgtgaccctcccttcatgttttgggattatcaggatatttaaagaagcacagtaagactgtctgtagttttttaaataaggtatgttaatgatcatttatagataatatcattatatacccagaaaacccaagagaatcaggagtgtcagtattagaaaatgctgtaaggtagccaaactccaagattaatatacactaaagggacaaaaggagcttagtacgtgaagacatgccttggttcctagataaataataaaagagaagggagtaagacccacatgttgaaacatattatagggctctagtaaataaaacagtttaggtctggaaagggggaaggcaaacaactccatgtaacgagggtggacactgagtgtctgatgaggacagtatttcacagaagagggaggagacagatcactccatccagcagcactgggatgactgggagccatgcagaaaaccatttagaccagagtaaattccagagggatcaaagatgacaagcacaattctagggaagaaatgtttcatcatctcagaaggggaaagcctttccaagcaaaaccacaaaccaaaaagtaaagaatgattgacatatttgacgtcagaacaatatttttttctgcataggaaaaagcatcatgtagtatttaaccttaacatgaatattataatttttcacttagaagtctgataaaaccgagggctctggggaactgtaaatttgtacaacctctccagaggacaactggagtcgggaaaaccacatgtggatgatatgctgagactcagccattccatttcctaactgcatccctttaaacacttttttttttagatagatagatagatagatagatagatagactctcactccttcacccaagctagagtgaaatggcatgatcttggctcaccgcagcctcctggtttcaagaggttctcttgcctcagcctcccaagtaactgggattacaggcacccaccaccacccccagctagtttttgtatttttagtagagatgaggtctcgaactcctgacctcaagtgatccacccgcctaggcctcccaaaatgttgggattacaggcgtgaggcaccgcacccaacctaacagaggaaacacttcaaatgcacatcctcacatttctagtctacgtagctggaaaaaaaggacattcttaatatgctaatgtggaggtcacctagttaccctaagggagaaaagcaaggcaaggacccactgcacagcaagttcccccttggaagcccacgggcgcagctgcccacaaatgcacataatctctgcagaaatacaaaagccctaatgctggctgcactggggacacaggtaggaggaaattttcccctgtaagcagttttgaattctgaactatgtggacagaacaccaaattttaaaacaaatgaaagtgaagctggctgggcacagtggctctcgcctgtaatcccaccactttgggaggccaaggctgcagtgagctctgatggcgccactggtacactccagcctaggtgacagagcaagaccctgtctccaaaagtgaagtggcaacagacagaaacgagcacttctgcagctatctcacaaaactagtttgccaccaaaactagttaaagtgacctggtgtccgcctcactgagctgctccagcagaggcacaggcattctgcatactggcgctgctgtgcactgacagccataagccaagtcagcctttccccaggagtgccatggctaggaagatgcatctccctcgcctccagtataattttaaaagttatggttgtaaaatgacaaaagaaaaaaactagacatgtactaaagaacaaaacaaaaactggctgggggtggtagcccacacttgtaatcccagcacttcgggaggctaaggcaggtggattgtttgaggccaggaggtagaagttgcagtgagctgagattgccccactgcactccaacctgggggacagagtgagaccctgtctcaaaaattaaaatactacttaggctacattgtggggggggtggtaagtctatggattttgatttcctttttgctgttttctatttttggtaacatgtttatgtaacttcattttttaaaaaattgctacattcaaaatttcccccaaaaaagaaacttcatatacaagttagttcatatacaagttagaaaatgaaattttaaaataccccataagacacatcaaagaataattctttaaaaatggtaccagaaccctacagagaatgtaaggtaccaaaggatgttaaagacctaaatagatcacattcatgggtgcaaagaagtgatactgtaaaaagaaagaaactcaaaagatacctaaaggcaggtgaaaagacatttacaacagataaagggcatataaagaacaacaggaagaaacgagggaaatcttacggctcagccactgtcagggctggggggttctcggtgcaccctggaagcagctcccaccaccggggccacagagaaacccacacaagccccagacacgtggacaagaatactcagagcagcctggctctccacaacttctgaccaagaaccaccggaggcccagcagagcagaacggagcagtctgctgtgccgaggtgggtttctgcagcggacattattcggctatgaaaatgaacttgtggcagcccctctgcatgggcaaccctcatgccaagtgagcaacgtgagacttcagcaaacaccaagatccacgtacaaagctcaaaacaggcaaaactgagcatgtccaggacacgcacaggtggcaaagccataaagcaaaacgaggacatggtcacaggctgggatgtggctaacctcccaggtgacacctggggatggtaaggggctggccaggttccatttcacatgggtgcagcctaaactgcatacagctccttatagttacccacatgtccacaggcctcacgcacttttcttctgtgtcacattccacaacaaaagaacaccacacacaggattctggggaatcccacaggctggaagagccaggagcgtggcctcacctggggttgatctccagcgtgggctgcaggagctgtgcgcgctcctcctgggtcttggccagctgctgcatgcgcaggaagtggcgggcagcccccatctccagcacggtgaccatggcagggtgggtgtccagtcggagggtcacctgtgagcaaagcccggggttgagggtgatagaggttcccaatgtgagagggctggcaggatcttaccaggggtgaaggtcacccagaccacgaggtagcaggcggggtctcaaggactcccctggaccagcgctgctccctccccattacccactaacttgtgggccctgagctgatgccccacgcaaagatactgtgcccgaggggctccaccaccctggtgccccgctgctgcctccaggagctgcccgaatccatcgtcctctgctccatgccagcccaccctgcatgaggccccttcctccaagtgaccatgcatgggacgctcatttctcactctgagctagacaggttggtggggggagtcttagctctctgaagcccacccaaaacccccgactaagcacccaagtgagcatgtgagctcctgagggctggggtagcatgtcccttgtttggaacccccacgtcctcagccattgcagctcccactcaggatgctggtttttcagttctcagttcacacctgctctggagcagggctgggagaaagacacggccttcctgcctcagcggcactcccgagcaacacgtgccgagcagggacccacagggtctccacctgacaccaagggcttctgctgctgctggaaggacacccaacgggccaggtactgggagccaccagctggccagcctgttagggacactgcggccaagtggtggtccatccccgggaaagcctcaccttcacgttggtgacacgcgaccccagcacatttctcatccaggccatgagctcctccgtctccttctctgataggcactcggcggctgcggaagagcaggcgacagggagctcaggcctgcatcccaactccccggcttccatgggggccacgcagcatgcttccagctcccacctcctctcccaccaggatggagacacaagctagcaagatgcttttcatctaaaagtaaaacctcaaaggatgcttcaggttgcctgaggcccatacaacttggttagggctttaaaaaaatacacagcctctcaagaagctgggccagctccagaagccaccgtggcaggagcactggacagacccctgatatctaaaccaggaggcaccttcctccagtcaccagggtgctcccacaaggctcttctcgggggtggctgagcccaggtcaactgacgaaaacccaaaggaagccctcgctgcggggcaggagaggcgtgcggggagtggaaaccagccccacgcctagagagcaggggatgccgacctggggacctgtcctcaaacttctcctccttgtagtgatccacgactatgtccgtctccacagagatcagcttcttcttgtcaaactcacgaaggtgcagcagggtgagctcatcaaactgctcaaagcagaagagaacctgcaggtggccaagagcagctccatcagaccccgggggcctccagccaccacagaagaaaggatgagggcggcaggagggctgggggagccaagcgggccacactggggaacaccggggcagttggggttcctaggcctgcatgacagttactacgacacctgggtctaaggaaggctctgactgccttcaaggcagaagcactccacgcataaagaaatccacatgtggctgagtgcagtggctcacgcctgtaatcccagcactttgggaggccaaagcaggcagatcatgaggtcaggagttcgagaccaacatggtgaaatgccgtctctattaaaaatacaaaaatttgctgggtgtggtggtgtgcacctgtagtcccagctactcaggaggctgaggcaggagaatgacctgaacccaggaggcggaagttgcagtgagccgagatcgcaccactgcactctagcctgggcgagagagcaagactccatctcaaaaaaacaaaaaacaaacaaaaaaaaccacatgtgacctccaagtgggaaacagccgtcacagtcggtccggcctctgtgcccgtgaccctgacccactgtgcagccctgcccggagtcttgggcaggttcacccagcacagagctgagaaggtcaagaccctccccaggttgcagcccccggagcccgccccacccaccgctcacccacctctgtgtctttcttcttcatggcctcatagtagggtgagtgctctgccaggtgacggttgggggcgcacaggtagtagatgttgcgggtgccggcccgcatgcggctggcgtattctgagaggctggttagctgcccggagggcagcgccgaggactcgtagcgcagcagctttgctatgtcctcctagaagggacggggcaggtcaccacttattccaggcccatgggctcaatgttgcccaactaactgggcgcaaaccctccgatgcccatggcctcctggcactccaggctggccctgacccgagggacggtagtggactcgggggttgtccgagagcaggccttgctctgcccatcaggccccttttgggagctctgggggcttaggaagcacctcctgccccaggtggcccaggggctctccagggagctacgcgcaccacgccctgggaggggaccccacccaacagcagagcccggcctggacccagcgtcttccctctgccctcagtgacagagtcagtctctggtgggcacacggacacgggtgaagtccacggttcccggccctcctcacagctggctatggcagagactggctttgcccagtgggtttcagtgggatttggagaagggcccttaggggaggggtttgccctcctccccatcagctgaacgcagctgtgacctctagagctcatgggagctgcagctggaaggacgcagggggaaaacagaaagagggaaaagcaaggagctggacacccaaccagcagggcccaggccacccctgcacacatggtgggtctgcattgataagacatgtcacacgtgcacacctacaaagacctagaaatgtctctgactcttacctgtgtgctgttaactcaaatgaagataaaggagaatgaagaggcctgtgtcagaagctgccgaagtcggcaaacaaccagaacacggcctccttgggaccccacacacgtggtcaccctcctcctgctgctggggagaagggacaccagcacgggatgggctcctgggatgaaatgttctggggttacagtggaggcagccacaccacactgtgaatgcactaaatgccactgaattttacgtgttaaaaggtgaattctgtgaatctgatgctatgtaagttgtatctcaataaaaaatggacaaaaaatgtttatggaacaaatgtttcgtttttcagccatccactattggattaactgaacgactggcccctgtagcatagtatttggagactgatatccagtacatgatgaatagtccctcaacagacactgagaccacccacttccccacccacgggatcggagtccttggcttgtcccacctgtctgtggctccccagcccccaacatcctctgaggggagacagtgtgtgcacgccctcttcctgccactccctgggctgcaccttcacacagcagtgaggctgagcccttcagagcacagcacagcactggtgggagggtaaggatgtgcctggaaggtgccagaggcccagaagcctggccttccatttcctgaccctggtggcagcagcagcagcagccagggtacccagctgcaccgtcgccacatcaggggacacctccaccagcttcctcagcagccccagggacaaggtggcccagaaaaaggcctggaacacagctcctataccttgacctcctgctcggtggcggtcacaatgccctcccgcatgaacaggccgtaatcttcaaaaaactttgcatacttctcagcatcttttttactctggtcaatgaagaatttgatcagcctctgctgtaaaacgtcccggagtttcctacagaaaagaaatgcatttaatacatacaagcagcctctatgaaatacaaatggccagagggtacgaaaaaatgttcagccccgctaagaatcaaagaagtgaaaacaacaaggtaccgttattggccaaactgaaaaagactgagcagaaagacagaaaccctgggcagtggccggacaggaggcagcagggtggagggcagacaccccctggaggcagtaggagaaccgatgcccccagagacaagatacccacgcccggaaaacccttccaacctttgagccagttgttccaattataggaactgcaccttaggaaacatgtgagcacaccaagatttatgtaccaggattttcactgtggcacataaaatataacaattatgaacaacctcatgttcaagaatataggctaaaattatgtaatgctaaatggccataaaaaaaaaaaactgcatcttttaataatcctcaatgacatgagaaagttagctgtgttgaaagaaaacccagaaaaatcccaatgtgggtaaattacagtacgtctatagatacaggcaaagaatgcacattctacatgtacataacaattttccatcattaggagcagcactgtatatactatatatgtacactgtaatttgggatttatactgaatatatgtatactctaatttttcaaaattgggattttagggatcaggatatttactgcagcattacataatggcctaaaattaggaacaactttatcactgggactagggatatttttattttcttcttaatatttagtctttcctttaagcaggtaaattacaatgtatttcaataatccagagcatgggaacaacactctctcgagttcatttagagcctttcctcccacactccatccccagtgactcagtccttcagccacagggcagaatgggacaggacatgccttcgtgcctgggagcggggggacagtagcccaggatgcggtgcagagcccagggaaggtgtctatgcagggccatggttgggaagagcctggtatgggtgtcagagcccaagaaccccagagaagggtgtccaggctgggggcgtgaccagcccaccgtgaagagtcagagcccaagtaggtgacagggacacccgcagaagagggcagtggcaatggtagattggttacatggagggggattggtcaaatgggtaaccgtgctaagaataatcaacggggcatggtggctcctgcctgtaatcgcaccactttgggaggctgaggcgggcggatcaccagaggtcaggagtttgagaccagcctggtcaacatggtaagcccccgtctctactaaaaatacaaaaaattaccagggcatggtggtgggtgactgtagtcccagctacttgaaaggctgaggcaggagaatcgcttgaatccgggaggcagaggtttcggtgagccaatacctcgccactgcactccagcctgagcaacagagtaagactccatctcaaaaataaataaataaataaataaataaaaataaaaaaattttattaatgatagcaagattataaactcttgaataaaacaggaaatcagcccatataaataaattataaatagtataaatataacacatcaatttttttttttttttccatccgacgaatcttgctcttgtcccccaggctggagtgcagtggcgtgatctcggctcactgcaacctctgcctcccgggttcaagcaattctcctgcctcagcctcccaagtagctgggattacaggcacctgccaccatacccggctgattttttttttttttttttttttgagatgagtctcgctctgtcgcccaggctggagtgcagtggcgtgattttggcgcactgcaatctccacctcccaggttcaagcaattctctgcctcagcctcccgagtggctgggattacacctgcctgccaccacgactggctaaaattttgtgtttttagtagagatggggtttcaccatcttggcaggctggtaactcctgacctcgtgatccacccgcctcggcctcccaaagtgctgggattacaggagtgagccattgcgcccagcctaatttttctattttttaagtagagacggggttttaccatgttggctaggctggtctcgaactcctgacctcaggtgatctgcctgcctcggcctcccaaagtgctgggattacaggcgtgagccaccgcgcccggccaacacataaatattttaagtaaataaatgaatgtattgagagtttcatgaagaatgtgacatttacatagcttcaaaatacctataacatctgttaattacaaagggaaggacatccttgtttgttggaaatgcaccccaaaggcatcgagaaggcaacttcctctcacaggattcgaggaaaaacatgttcttggtaccatgcttccaacttttaagcctgtgattctttcaaaagctctaatttcggctgactcttttctgatcgagatgagttctcagactgacaacgcaacctttgacaaccacaagctgggatgaggacccctgctctgcagcttcgggcactaccagtgggccagcatgcctgccacagccaggaatgcagctcccttactgagcaggaccacccctctgtgactcagtttccacaactatgagtgaggactcacggctcccctcacaggatgaaacacgtgtttatgcaggctcagcacagttctcagtggagaagaaatactcaggaaacacattcaggatggggagaggaacgcagccgcctcggcccgcagggacgccaggagctccctctccacagggcctggcccctgcctccacttcatccgtgagcttcccagatgaggccagacgtgtcctcagttcagtgggtgtcctttgccttatccagcccagggacattgtacctggaacctcccctcctgtggccactcctgggcagggtgatggggatggacaaggtggggacaactccagcaccagcaataataatccgggagtcagccccaagccctctcttcactgaagtgaactgaaacattgggcagatcaccagtaacccacaggcgcactcgaagtgcacagggtcagtacaccaaagagcacgactctaacgaccacagaacagtcgctgctgtggggcggggatgcatcctgttgaggtcagcacaactgctgccctgtggtcatgtcggcagcaagtcggggtcctgctgtcagaagccagcacggctgtgtggggaaacaagcactgaggcccccttttcattgattatataacatctctttagtcagcaaggaaaataccttttatatagttatatcttccgaccaagtaaccccacccctagtattctatcctaaggaaatacagctgcaggtaaagatttcagaacaggccaggcgcggtggctcacacctgtaatcccagaactttgggaggccgaggcaggcagatcacaaggtcaggagatcaagaccatcccggctaacacagtgaaaccctgtctctactaaatatacaaaaaattagctgggcgtggtggtgggtgcctgtatcccagctactcgggaggctgagacaggagaatggcatgaacccgggaggcggagcttgcagtgagccgagatcgtgccactgcactccagcctgggcaacagaccaagactccgtctcaaaaaaaaaaaaaaaaaaaaaaaaaaaagatttcagaacaaagataaacatgcactgcagtgtcataactgcagaaacactgagacagcccagctgtgcagccccgagggacgggatcagtaaactatggtacatccctgtgatgtcccatgatgtagcaattaaaagtgcttccaaaaaacaacatgggaagtggtgcaaataaactaggtagaaaaaaggaaacagtataagcaatatgaattcaattgcatgaaaaacaaaaacaggccgggcgcagtggctcaaacccgtaatcccagcactttgggaggccaaggcaggcggatcacgaagtcaggagatcgagaccatcctggctaacacggtgaaaccctgtctctactaaagatataaaaaatcagccgggcatggtggcaggcacctgtagtcccagctgagacgggaggctgagacaggagaatggcgtgaacctaggaggcgaaggttgcagtgagccgagactgcgccactgcactccagcctgggcgacagagcaagactccgtctcaaaaaaaaaaaaaaaaaaaaaaaaaaaaatctaagtggccaggtgcagtggctcatgcctggaatcccagcactttgggaggctgaggccaaaggatcgcttgagcccaggagttcaagatcagcctgggcaacatagtgagatcccaactctacaaaaaaatacaaaaaaattagccaggcatggtagctcacacttgtagtcccagctacttgggaggctgaggtggaaggattgcttgagcccaagaggttgaggctgcagtgagctgtgatcacaccactgcattccaacctggacaacaagaaagaccctatcagtcaaccaataaaacatcactgcggcttgcttggttgaaaaaagaaaaaaatctccatggctttctgcctctgaaggtgaggcaggaggatatcaccggcaggccatgtgacctcgcagggctgggcatggacccaccaggcaggaaaccacactgcccaccatctccccagacctgctcctgcccgcggcacaggacagaatctctgaggaccagtgcctctcggtgtgggcctctcgccatgcccacagcgcagccccaacacacaccaattacccagactcatcctttttccgaggatctgcttccatttcaacactggagagaaaccggtgggcagagaaacactgcaggcacgttgggggctccaacaaggcccgttccatggcatgctgcacgtggtgggctcttgagagacctccagggctccaaattccagctgaatcctcaccccacaggctccctctgaaacctgccctatgtggctgccaatctaccccaccctaaaccatcaacagcagtcatctctaggtgagagcacaggtcacttgaatgtgctctagtaaggaaatactacttgcattaggggaaaaaaagccagtaagcgaggttttgaataaagactatttggtgagcctggggccagagtggggaagtgatagctactgatggagaacctggagccagcacactggagtcccctccacacagggctggcctgctgcagggctgcagtcacaaccctggggcacaggtgggcaggtctggctctgcggcccctccccctatccagactccagcctcagccatgaccagccacccccaccttcttctggaccacaagcttcagaggccaggccagcacctggaaggctcctgagggcccccatgtgcaggccgggcttccccgaccacctctgctctcagctccatgggccacggctagggccctctgggggcaaaggagcaggtaggggccttgtccccagcagggtcctctccccgcggcccgaggctcacctgatgagtgcgctctcctgcagcagctcccggctgaggttcaggggaatgtcctcactgtccaccacacctgggagacacggcagtcagcttctcccggggctgcggccctccacaccacccaacattccccattaacctgccctttgtcttcaggcctggccttcaacccagcacgtgtgctaagagggaagcagggaggcggcactgccggagcttcctctacgtcctgccacctcccagaacagtgacctgggctgtgggtggccgggacagcctcggggtaacactcggaaaatgacagcctgggctttatgttaaaaatcacaactctggctgggcacagtgtctgacgcctgtaatcccagcgctttgggaggccgaggtgggcggatcatgaggtcaggagttcgagaccagcccggcaattatggtgaaaccccatctctactaaaaatacaaaaattagccgggtgtggtggcgggcgcctgtaatcccagctactcgggaggctaaggcaggagaatcacttaaggaggttgcagtgagccacgattgcaccaccgcactccagcctgggtgacagagcaagactcgtctcaaaaaacaaacaaacaaaactctatcagggatggttcgcacctctgtgtaccaaggcttaaatactgaagtctttcttaaactataatctcactcaaacgtaacacaactcacatatcaatctgaaactcagtatccctacatatggaaagacctcaatctgaacaccccagtgctccccccagatcagtcatgtgcgtagggaggtggggcagctcccggggtctgtaaacgcgactgacacacaggcagcgcaggccgacggcggtgctctcgctgcagagggctgctgagaatggaatcagcacggtccctcacagatgcagcgggcgacactgggccacgggggcactgctcacggactctgagcagcgtacctcggatgaagcgcagccacttgggcaggatgtccgtggccttggtctggatgaggactttgcggctgtacagtgcaacgctggagcccagctcccggctcacatcaaacatggacggtttctgggggtgaggagaacacgccatcatgcagcactgaccctccccaggcaggccctggctgggaggtgggggcggacacgatgaatccagagcccactcccgcctcgccctcccccagcgtctgctctgagttgaagcccagtgcaggggccccacgatgccccacactgtggctctgcaggggctgaaggccttctctggcagctgccgccctccccagcccaccccctaaggaggacacaagagagtgaaccttgcacgtacccctgaacacactgaacacagccaaaccttgctacaggtcagggatcagcaaagagccctccgaccagatccagctcactgcctacctctgtgtagcctaagagtggtttttacactttcaaacagttgaggaaagatttcaaaaaggatgatctcatgagacgtgaagatgaaactcaaatttcagtgtctacgcagctcatgggacccggccctgtgtgctcagagggcagcagggcagtgctgcttcctcacccggcagggttagtggctacgaaagacaccgggcccgaaacgctgggaccagctcctgtctggccctcgtggaacgtgcctgccaacacctgctccacactggtacttcccgaaccgggacccacacctcatcacgggatctggttaaaatgcggcgggtatctagttcaaatgttgggagacctggttaaaatgtggggcgacctggttaaaatgggggggatccggttaaaatgcggggagatcttattaaaatgtgggctcccacgcaggagccctgggtggggcctgagactctaacaagcccctggaggccacacctggctggctctttccaagatggatgccagctgtgcaggacattaggagagtttccaggcagccaaggacagaagagcctgggggcaggacgggctggctctcagccccgaataggtctccttacggcaggatttgcgggaacttcaatgtggtaaaggaaaccaggggaggtggagggtgtggaggaagcacacagagaggccaacggagaggcaagaccacaggcccttcccagagcgcctggcaggacagcatccactgatccacagcagatgatgtaggctctgagggccctccccaggcacaccccagtccacaagcctccaccccagcctgcactgagatgcccatcaatccttccctcgccatgtgtgacccctgagacagaggaaacctctgtggttacccacccagaggcatctgttctttttttcttttttttcagagatggggtctcactatgttggccagcctggtctgcaactcctgggctcaggtgatccaccctcctcagcctcccaaagtgctgggataacaggcgtgagccaccacacccagcactacctatgtttttcatgccctcacactgccatgttaatcatgtgacatctgcagagctgatgccacaggggacaacagagtcaccctgagggccgtgggactgccacagtgcctcaccatgtcgggcacgtagaagatgctgcggatgttgagcggtgcgtccgtcttatagtgcagggtgtagcggggcttgtcgtgagcctgcgcgacgtagcggtagaactcctcatgttgccactcacggacatccttggggtccatcatccagatggcctggaaacggagatcggcggggagggcgtcgtgttcaccacgcacgtcttctccaccaccgtgcaggcctgagccagtgcagcgcctggccctggacaggctcctgggacagacgggcggtggtctcaggcgtagacccctctccagccccaccgctgggctatgccgggtagtgcaggggagacacacaaggctctggggcaggagctcctcaggacaacatgtcaggaggaccagccgggacctgagggggcctgtgggagaggatgacgctgcccagcaggggcgagctgacgaatacagtgtgggccgtgagagcgatgacgacccacgctgcaccgcagctgagccgcgagggggaagtcagtcactgaggacagcatgccgtgtgactccatccaggagaaacgtctggaacaggcagcacaatggacagaaaggagaccgtggctgctgggactgggggaggggcagtggggaaagggctgctttttggggtgatgggatgttctggaattgatgcggggtggctgcacagctctgtggctgcactgaacaccatggctgcacactgatgtggtgagccagctgggatgggcgttacgcctcagtgaaccctgacccctgaccccggctgcccggtgcacaggggcagggctgtggtagagctgggcccctgtctcatccccacacccaggtctcatctccacagagcagctcgccctgtgactctgggccgcatcccctgggctcatctcttctccgctgccctgaaacgtacagatttgtctccatgtttgaccagtccctagaggaactcagggctcacctgcaaggtgttcatccgccttccattcaagtacaaggggaagctgacgaagttgctgtacttcgttaccacatctggaagggacaaaagaaaaaccacactgcatctacaatgcttgtggaaacgcaagctttgcagcagctccaggatgagcgccagcctgctgggaagggtcctccatgctgtgtacacttcacaggtacagaaacagggcacagtggggacacctgtcctccccccagtctcacgggggcagcagcggagcccacgtgagaaccagagctgtggaggccccggctgctgcgagactgcaatgtcagcttgtggctggaacatggctttctgggctgactcctgggggtactcagggcctccctgagtgtccagcaggacacaaagagggaaggccacgcccacatcctgggacaggactgcgccaaacccccaggtgcactaaaggccaagggccacgcagaggaaggaggaggaggtccgcctcagccaggccagcttcctcccagtcccagcaggagctcgatgctacgcagccctggcgggcagcccccctcccagtcccgcagcggctcggcccttcacggctctgcctgtgcaccctacgtgcaggtagaaccagggaaaatgcctgctgacctggtggcctccaggccacacatggatcccagagtgagcctgggcccgggctcccgctcacctcgcacccgggcctcgctggaaaactccttgcagtcggatttcaggtggatgatgatttttgtcccggttctaactcccgaagcttcggcgatttcaaacactccagaactaaggcaggcaaagaaaggaaaagccaggtggatgtgacactgggacataccctgcatgggactccagcggttcccgagggtttcataggcagagcccaaacaacacacaacacacctcaaatgccccatttctgaccccagcgcaccactcaggccatcacatgcccatcaggaacgatgagcctgtcgcaggcggcagagttctcctggttccctcgggcggggggcgggggggcgggggtcctccaccgaccctgggcttcgaagaagcttctgggcttaccccaaaagcaggcctggggcactgtgggggactggcccagctccaaatcgggtgccagatgcccaggggcaaaaacaaaggccagggggacaggcgccccctaagaagagcagaaaaccatctccgaagcacaggaggggggaatcccccggcagggccatgttgatgccttggcctaagtttactctgagccccgctcccatggaattaaacaggaatgttagttttgggagagtggggagtcaagctgagcacagtgcacacactgtggagcagaaatggcatcacggagggaggacgcctcggctggctggaagcggctcacctgctaaaaagccctcggagccaggcgtggtggctcacgtctataatcccagcactttgggaggccaagacgggcagatcacctgaggtcggggttcgagaccagtctgaccaacatggagaaaccctgtctctactaaaaatacaaaattagctgggcgtggtggcatgcgcctgtagtcccagctactcaggaggctgaggcaggccaattgcttgaacctgggaggcggaggtggcagtgagccaagattgtgccattgcactccagcctaggcaacaagagtaaaactccgtcccaaaggaaaaaaaaaaaaaaaaagcccccagcaggctcctcaccctatagaggcagaagtgggctggggagacaaagccaggaaatgccagggctgggaggaagcagaatgagctcttgcagaaggtcggtcacaggaggctgcatagtgtccaccaggcgacaggccagtcctgcagctcagccactgagaaaggagctcagcgcgggccggacctgccttcccgagcgcagtggtggtgaccaaccacatgggaccagacaggtgccataggccacctggagccacaaaagtcactaactccccaaaatgggagagtcagatttcatataaaaagcccagaaaatgcctgtgtacgttttctgagtccatccctttccaaactccatgctaagggctccagctcagctttgagctgcctgtcaggcgacattcgtcactcacccatctgaaagccactggtaacccaggctccccggggctgccgagcgggaatagacctccactctgtcagccaccatgaaagctgagtagaaacccactccaaactggccgatgatcttgctgctggcctcagcctggttctgcagagcatccaggaaggcctgtggggcagaggccagttagtgaggcagcctcccctccagagagcagacactcccaacaccgtggctcttctgcgagcaccgctaagaccccttcatcctgaaaacagccacaccgagtacttttccaccccattctacacgtgaagagctaagtcacagagaggtgacacattagccctaggacaaccagctggcagcagtgggacaagtgtgttttccatttgattcccaaagctcacagtcctgcctgtcccagacaggtggaggcctgtgggtcacacctgggggtggggaaagagcagcttgaataagctctttcccttgaataagctccttccataggaaggccaggagtgaggagaggctccaaactggcttccatattcaagtctcctggactctacactttgtgggaaaaagagtagaaatcacgcgcatgcgtctgtaagcaccgcacagcacttcatttttctactataatactgccaaaggtcctaaggccaaagtcaagtaaaatacacacgcccactgccctggcccacgttgtccgatggaactttctccaacaacaggaacgttctgccaggtgcaatgcgacagcctgccgagcacctgcaatgtggcctgtgcagctgaggagcacaatgtccccttttatttaatttgaatgcatttacatttaaactgccacatgcagctggtggccgctacacaggacagcagaccaacctcgagagaaatacaacaaaagacgtaacgtgggggtcaagtcacagttagggtgggttttttgtttgttgttgttgttgttgttgtttttgagatggagtgtcgctctgtcgcgcaggctggagcgcggtggcgtgatctcagctcactgcaacctctgcctcccgggttcaagtgattctcccgcctcagcctcccgagtagctgggatgacaggtaccaccaccacgcccagctaatttttgtatttttagtagagacggggtttcaccgtgttagccaggatggtctccatctcctgacctcgtgatccacctgcctcggcctcccaaagtactggggttacaggcgtgagccaccgcacccgacctagtgttttcatcttacagatgaggagactgaagtaagtgctttgcccagagctggaaaagggcgaccgctggaggttcccaggctgttggtctgagtccaaatgtgttgctctgcctcacagcacttttctgcaaagtcgattccctgagccttgtgggcttgacgcagagagggtcagagggatcagtcccctctcacacagcgccgtgatgagaacgggcttgggatgcggcgtctgtgggtttgatggttctggtcagaactgctctgtgggtctgggcatagtgacgtgcacctgtagtcacgcctcaggaggctgaggctggaggatagcccggccaacatggtgaaaccccgtctctactaaagatacaaaaaattggccaggcgtggtggctcgtgcctgtaatcccagctacttgggaggctgaggcaggagagttgcttgaaccgggaggcagaggttgcagtgagccaatacagttggtcctcctatctacgggttccacatttgcagattcaaccagccaaggatcgaaaatactcagaaaaaaaataaaaaacaacacaatgataaaaagtagtataaaaaacataactatgttatatctatatctagcatttacattctatcaggtattataactaacctagagaccatctaaagcatacaagaagatgtgtctacaatatacggcaccaatttaatccgggactggagcatctgcagactttgctatccaaggggggtcctgaaaccaacccctagatactgagggaccaacccccagatactgagggatggctgtcatgtcatgaggtgttcccacagtacccactgcgtggcatgcaactgacaacgttcttacttaatctggcacccagggccacccctactggagggatccttgcaccctgaggggaagggggaggctgtgtgggggccccacgcttacctttgaccccgatctggcaatcgtccccaggttggacaccagctcttcctgtgtcatcccgataccagtatcctg

SEQ ID NO: 9767 - DNA, 663 bp, Homo sapiens
aagaggcagagactggggtgatgcagccacaactaaggaaagccaaggattgctggcagcctgcagaaactggagggcaaggagcatcccccaaccgcccggagcctccaggaggcgcaaggtcctactgactccctgacttcagacgtccagtctccggaattttgagaggatccatttctgttattttaagcaaccaaacttgtggtagtttcaccagtctcaggaaatgaatacgaatggaaagtcaaagattccaagaaatgagtggcggggtgcggtggctcacacttgtaatcccagcatttgcgggaagattgcttgggctcaggacttggagaccttgtgtctgtgagaaacttaaaaaataggctgggtgcgatggctcacgcctgtaatcccagcactttgggaggccgaggcaggcggatcacaaggtcacgagtttgagaccagtgtgaccaacatggtgaaaccctgtctctactaaaaatacaaaaattagccgggtgtggtggtgcgtgcctgtaatcccagctactcgggaggctgaggcagaagaattgcttgaacccaggaagcagaggttgcagtgagccgagatagtattactgcactccaggctgggcagcagagcaagattccgcctcaaaaaaaaaaaaa

SEQ ID NO: 9768 - DNA, 663 bp, Homo sapiens; identical to SEQ ID NO: 9767

SEQ ID NO: 9769 - DNA, 1625 bp, Homo sapiens
gtggtgggagtgatcagaagaacctgccgaagagcacaccccctctggtctgatggtcccaccaccgccccatgtgaacctgtcccactcctggaggagtggacccaggagaccagaagagtgcatcaggggacagtggccccagaacctcagctctgtaaataatctgagactatgagtatctcggggaagttcttacagcattcctgggtaggggagctagtccctggacccttggctgaggtcataggtggggactcaaggtacaggaccaagactgaagtgtggctcccacaaccttggactccagctggcagctgaaatggaaaagattggggaaggggatttgtttgttctgttcttgtttttgtttatccaaaagcaacttcagcgggtaaactgtggatacaggtaatccagaggcataagagtcctggtccaaagtagggactatagctggtccagctctccccaaaaattgggtttttagttgcagtagctcctcagtgtttcacaatcctgcacttcgcctcctttttgaggaagaataaggtcaggaatggcagctgagcttactttggcttccttatacactgtagggacaaaaggaaaaacggggtggagcagacaagggctggatccaaaaagtggatggcacctcttccttcctcaagggaaaaggaagagttgtgccagtgggtgttgtcatggcccatgtcacattggcacctgatggcatcagctcaaatgcctttaggaggaaacttgggtgagagtggcccatgaagcccttttcttctttttttggggagtcggtcttggagatggtatgtggctacctcgctgccattgactcctaaagtgagacagatgtgttgagcaaggagtcatggaagtcaaagtgggttctctctccttgtgccctcttaggaacaacccaagactggtcccaagttggctaacagctgctcaagaaacaaaggaatctggggtcttctgacatgcctgttgagcagtaggagctgtctccctccccaagtcctatcactgtattcaggtagaggaggtagggaggggtctgtcctttggtcccaaaaaacaagatctcggcttgcttcctgatggccatccctacccaacagagtgtgggggatgggggtgggggtgctgcagagaaaagactaaagaagaaacctaatgtaggttccattcttaaccatattctttgctcctctctgctccaataccaccaccttgtccactcccaaaaaagtaatcgggtgtgtgtgtgtgtgtgagagagagtgtgtgtgagatatgaatgcatgtatttgtatgcttgcaggagatggcatattattgagccaaacccttctctggccctcaccttcagggaggatgagtggaaaatagcctcctcttgcccaaacatgaagggtgcttgaggtctcagcaggagctgaagaacacaatttggggaacagaagggcttttgttttggagggtttttttttttaagatgaattcaacagcctggtggttaggatgtttctaacccaagccagggcttgtgaacatgaattttctaaggtgaaataaaccttttctttctgctaaagaaagaa

SEQ ID NO: 9770 - DNA, 1256 bp, Homo sapiens
ccccaggtggtggtagtggaacaaaatggttcttttcaagtaaagattcccaaaaattttgtttgtgaacactgctttggagcctttcggagcagttaccacctaaagaggcacatccttattcacactggtaagtctcttgtttatattcaaaagggggagaatagtctatcgcttgtattccatgtctgtttgtggctctagttgggtttattttaatgggtaagtattagaaatgaaggaagaagataagtcaatgaagcagagagattgcatggctttgtatctggtgtcactgagaccagcacctttggggacctctccccatttatgatcacttaggtgtctacacattactaagagttaaagtttctgagaaaactggaatgaggtccctactgtacatacctccccacattcacttctctgtccacctgggccaggtgagaagccatttgaatgcgatatatgtgatatgcgtttcatccagaagtaccacctggaacgccacaagcgtgtgcacagtggtgaaaagccttaccagtgtgaacggtgtcatcaggtaaggctcatccctgctacaataccccacacacacttttccttccccaagaatcagggccaccctccactcctgcctgacaaaagagccaccagcgttactcgccataatagttaacacatcggggtgaagtgcatctgtctggccttatgcagctgatcatggggagcagcaattagaacattgtaataataataataatagcattccatatcacttactctatgccaggcactgtgagagcatactttacatagatgattttatttaatcctcacattgactccctaaggtagctgtattgtccttatttcacgtatgggaaaattgagattcagagaagttaagtttcccagggacaccgcagatcacgaacagagctgggattcagtccaacttcagagctaatgcactttggaggaagagatacaatctttgccctgggggtcagtatctgatctgatgagaatgtaagagctggggccaaaacaagacaagaacaagagatgagaaatgataatagctaacacttcctggatgcattgctaggtcccaagctttgctctgcactcttacactgaatcttcagacgctagaataaaagctccatgagggcagagactttgttcctctggttctctactctgtatctgccttgagatagatactcaataaatctttgatgaataaagca

SEQ ID NO: 9771 - DNA, 1487 bp, Homo sapiens
atgatttcatttcccagaaaatgtaaagaatggataccagcaatgattcctggctgttacctattctggaggggtggggttggggagggggttgtccatacctctgtggtatgagtatttcagggaaaaagaaagcaggcatggcacccattcgattttccctgacagcatctgagatccttttggggagacgctgaggagtgtttgctgccatgtactcttacagctctatgctgacactcccatttgatgtggtccagaacttagacctcagtccttggatcagccctgtggtccctgcaagcaggggcatctttctgcatgtgagccagcccccttcctgttcaagggttctgctggatctgggcttttcctgtccttcacttctgggatgattcaccccacatcttccagtaccctgtaaaccattttaaaatatttagaaaactatcctcccaaaaatgcttttgaaaatgagagccctctgtccctgccacttacagctagtctctttgggataggggtgtatgtggagagattcatgtaagtctcacatgagtgacctgtgcccctatgtgtactaatgtgtgtactgggtcagaaggtgccctgggttcccacagaccttggtttcctgcctgggtgggtgggagggagggaacttcagagagtatgtgcgaacagccatagcagagccacccctgccaaggacccagtgagggaaactcaggagcaggtggttggttcagttcccgcgctgatgtctggggcagtgcatgtgtgagaagagaggcgcaaagcagtgaaaggagtgatttggcatccagagggcccgggagccccacggataccccagggaagccactgactcacaccgctgcagaggctcctgggcccaatgcccgacccctgctggccagcatggggcctagcactggaagatgcctcaggtgtgtttggagtgggggaaacggaagtagggcacgctctcagagaccaggatagagagtcagggaacctgggaaagagtagtgccagttccgggtaggctgctgcaccaggccctaccagctcaggctataaacagtctgctttgccccaagtcttttccgtccacccccaacagccttgtcatcacttagctactgatcacgcccatggcttgacattggagggttacattagtggagtccgccacagcttcgaaccctctccccagatgccctttgcctctgctgtggccctggggttttatcaactgtccccttcctatcctcctctccaccctgttttttgttttttttttttttaaataatattttgctatgggggaggggaatatcaaatggacaagatcacttttaaatggtagtttttataagatgttataaacttgtatctttttaccattaaagtgcagtgtatgttccttcgtgatatatttaggatatttaaataaaaggaaaatggggcttttctacatacta

SEQ ID NO: 9772 - DNA, 6516 bp, Homo sapiens
gggttgcgggctgtggccccgggggctgagggcggcgcgggtgcggcggaagcagggaagccgcgaaccggccttctggctggccacagcgccctgcacggacgatcagtgaatggagattactcaagtatttatcgagaacttgcagtgggctaggcacagttcaggtagatcaacaaaccgaaagaccctgccctaggggagctttcgctccaatgcggggagagggtggatgattgcagttttgcccagtaatttttgggaccctcatgccaccattaattagctacacacatttcaccgaaagtctaccttacatattaatcagaagaagtggaagaataaacacagaagaagcaaaaaaggaaggaactttctcactgaaagtttctatttaatattaagtcttaaaagtactcctggaaggacaaaaggtgttcttaataaattatattcgcaaatattggatttaatcctaccagtaatgaagcagtcagttactttctagatgtgcagaaatacgtaatgaacaaaaaaaactaattcctattccattttttattaggtccacagttatttcacttctaaataaatatggttttttaaaagtggcacgcggtggaatgtaattgagacaggatggagttcctagagaaattttacttcctcaatctgcactccaccttacttaaaatacagtcttgggtctgtaattcccttatctgactctcaaggaaatgacaaagtaatgcctagattggactaaacctcatttaacttcaaggctgacctttctcaaagttgaaccttcgtcttgtgaggaacagaaagatcaagaactctgaagcacctcgactttccacctgtgaagatgtgttcaaatttgcaacgtgcggccacacctatgaggttgaactttatacaattggtttctttataggtttagatggttgaatttaagttacccccactgctattattattattttgagacagagtcttaactctgttgcccaggcaggagtgcagtggcgagatctggactcactgcaacctctgcctcctggcttcaagcaattctcatgcttcagcctgtagctggaactacaggtatgtgccaccacacctggctaattttcgtattttttagtagaggtgggggtttcaccatgttgaccaggctggtctcgaactcctgaccgcaagtgatccgccattttttgagacggattctctgttgcccaagctggagtgcagtgacgccatctcggctcactggaacctcctccttccaggttcaagcaattctcctgcctcagcctcctgagtagctgagattacaggtgccctccaccccctgctaatttttgtatttttagtagagacagggtttcaccatgttggccaggctagtgttgaactcctgatcttcagtgatccacccgtcttggcctcccaaagtgctgagattacaggccactgcacccagccttttgctacacatttatactaaactatattatggggcagcacagtaggtttgtttacaccagcatcaccagaaacacgtggttaatgcattgcgctacaatgttacagtggctacgacatcactatgtgataggaaattttcagctccattaagatcttatgaaacaactgttttatatgttgtttgacctgaatatcattacgtggcatatgggtatatgtcctccagtttttcaacattccttccttcaaaaagaggcaattcgttcccccaccttgagtgtgggctggacttagtggctcactcctaataaatagaaggtagcataagtgatggtatgtgacttccaagactaggccagaagaggcatttgagggtttctgctttctttctctcaggtcactccctctggaggaaaccagctgccactttgtgaggatactcatagtcctgtggaggcatatcctccatatggctgagacctcctgcgaacaaccatcactgacttgccagacatgagtgtgccaccttggaagcagattttccagccccagttaagccttcagatgacatcagcccctgctaatctcttgactacaacctcatgagagaccctgagccagaactagccaggtaagccactcctgaattcctgacccactgcacctgggagagaataaatatttgctgttttaaaccactaaattttattgtaatttgttatacagcaagagatagctaatacacactgctaaagcttacaatcttttagaattgactgagacatcattacaattcagtgtgatgatggtgactctaagaacaacctgaaatatgcacactctgagtacaaggaaaaggtaacctaattctctctggggtgtaagggaggaggtcatttgggctgggcctttacctgacaaatggtactgacagagaatgcagaaaaggagtgatagatgaatttggagagttaagatagaactggattgtggcaggttttgtatgctgtgataaagaattgtgactttattctgcaaacaatgggaaggaatggaaagttggtgttttttgtttatttgtttttgagatggagtttccctcttgttgcccaggctggagtgcaatggcaccatctcagctcactgcaacctccacctcccgggttcaagagattctcctgcctcagtctcccaagtagctgggattacaggcatgtgccaccatgcccaactaattttgtatttttagtagagacagggtttctccatgttggtcaggcttgtcttgaactcccaacttcaggtgatccacccacctcagcctcccaaagttctgggattacaggcgtgagccactgtgcctggcaagaaatggaaagcttttaagcatgaccagatctgtctttagaggagaactatcaggagtatggaagaccatcctgatttaaacaggaagaccactttggaaactattataacagtccagtaaagaaatggacacttctctcttctttttgagacagggtctctgtcacccaggctggaatgcaatggtgcaatcacagctcactgcagccccaacctcctgggcttaagtgatcttcttgcctcagcttccgagtagctgcgactacaagcacacaccaccatgcctggctaatttatttctattttttgtagagacagggtctccctctgttgcccagactggtctcgaactcctaggctcaagtgatcctcctgcctctacctcccaaagtactaggattataggcatgatccactgcgtctggctagcactcctcaaagaacagtagcagtaagaataaaagggagttgaatgagtcagaacttgcatctgggataacataaatgatggtgggaccattaaaaaatttatttggaataacagataaagagcatgtttaagggaggagaagaagatggcctctgctttgaacaagctgaggttgaggagccatggaacactttgacagctcagttggaaactgttggattggacttggggagggaaaatcacaactaaagtattttcagttcatcttcagtaggactgttgaggtcatcaggttatataagtgttctgagagaatgagaaaaagtctgaggtcagcagaatcctagtgaaccccgacactcggaatgggggaagatgaggaaaaggaaagcgtggcgtagaggaagccacgacataagaatttcgttaaggacaggttgaatcaggcagaacaagaatgagatgaaactcccagattcagccatcgtggcttttagagaccacttaattgaacattagagtgggcttaacagtaggtagaagttgagaaaaggaggtgggtaaaaacgtctgtttgtaaaaaaatgttttgtgagaaaaagagaaatggatggtgttttgagggctatggaagatctaaggaaggacctttaaattatatttaatttttgagattggagcatatttggagacagagaggaaaaacccaggagagagggaaatactgaaaatacttgagctacgggagatcagtgatgaaactgaggaggaggctagagggtggctccagcaataggaacaaaagggaaaactctcctgagatggatcagggacctaaaaatgggtgaatacagttccatctggatgtggaggaaataacaaccccttacgtttatattgcactttccagtcaccctgtgagggaggcaagacagttattaccagccctttcttgtagctgttctgagacatgaatgaccaagggccacataatgagtgggtagctgaagctgggctcagaccagccagtcaggctctcagcacagggttccctttgctggaccatacttcagcttgctcaggcttcctaaagcacagcactgtcaggcaggcaccacctgtgtccctctctgcctgcctagtcatggctgccaacaattcggctgtatcaacttttttttttttttttttttttttttttgagacggagccttgctctgtcacccaggctagaatgcagtggcatgatcttggctcactgcaacctctgcctcctgggttcaagtctcccaaaattacctgggattacaggcatgtgccaccatgcctggctaatttttatacttttagtagagatagggttttgccaggttggccaggctggtcttgaactcctggcatcaagggatctgcccaccttggcctaccagagcgctgggattacagacatgggccactgcaattggcctcaactcttaactaaattagattactccctctttacaaaacagaacttatggtttccaatctctatgtctgtgtgtttttgttcacctctcaatgttaaccatctttcaagataaagagtgtgcacctcttctatcactaagcttcatggcattagtctgggggcatcgacacagcaatttgtgtgtagctctcagctagcaccaggtcctcctgcaatcggtgtgtttgtctatgaattttacccctcattacatggtgcaatccttcaaggcatgaattctgccatggaatactgtcatagtctaacagcataaagcacaagagtcccgcatcttatgttctcatcagatattggttgaatgcatgattgaatgagagacgctgttgctgtaggctgtgtaagaatgaccactatccccagccttatctacatggagcacagcatgcttttgtgttgatgaattctttccagtagctgtcctttccccaaagtggaaaatttattttttcacataacaagaagcccagagttagtttattcctagggataagtaatgcacccaagaccagggtcttcctatcctcccactttgaaacttgtttgcttttgttgcaggcttacccctcatggttacaaagtggctgcaacagctccaggtgttctatcctttaacacagaataactcaaacaacaagacccaatattcagacaagaaggaaagggacttttggagagtgaagaaaactttcctagaaacctcaaacttctccccatgccttattggccagattgtatcccatgcccatttctaaaccaatcattggcaaagtgagtggaattgacgtgattagattaactttaccaagaatgcatcctcagagaggctgagaaaaagtccagcctcctttgaagagcctggctacctttcacctgaacaaaacaagaattctgatgaaaaatggagaatgtatgtggagcaggcacccggagtgtctatgccaggattttttttcagtgcgtttcaccggttatatttttgtctctttaccttacaagatatgtggcacgtttgcctaaaacaagccttgctttctgatttctgtgcactaggcacttaaaccttgcaaatgtcgcttacctaacagtcactgtcaaggagtacctggctaaagaatctccagctagacaaagtagaagtgtctgtgctctggcagttgaatatattgtatcaggctcaacagcacctttcaccaaaggatgagacttcacaaccattagatcttcttttattttgtttttattaaaaaaaaaaattttaacacaccattgctaacttgaagccattagatcttcttacccccaataccacaaaagtttagtggaatcaggggtataccaaggcaggtggagtaggggagctgggagtggtcagcccccagggcaggcaatgagggattgtgaatctgtgaagaattttaaagcaatgatacagctctaaatgcaatgtactatcctggacttagccctggaaaagaaaaaagatattagtggaaaaactggtaaaattcaaataatgtctgtagtttggttaatagtattataccaatgttaatttctgtgttttgataaatgtaccatggttatgtaagctggatgaaagatatgtgggaaatctctctactatttctgcaactctcctgtaaacctaaaaatgtttcaaaataaaagatttaatgctaaaattgactgaaaa

SEQ ID NO: 9773 - DNA, 17705 bp, Homo sapiens
gaacaccacccagtgtggagcagcccagccaagcactgtcagggtaagtggcgccaggccaaggatgtgacttatagattccagtggctcttttaattacccggtataataagacatcatctgcagggatttggctgggttcatgcactgatatttctgaatgaagattgtactactaaaatgattgtagcttttggctttaatgatctaacgttaaagacagggctaatatgtagtttggtatgatggaaggggtagagaagaatatgaaaattttattaatgcatgtcttctgtaaaatgttcatcctaaacaaacagcccagatcttgcagcacaatacaggtatgcaggttagctgtgtgcagtaagttatacatttatttgtatttaggcactggaaactcagatttctttctggttctgatttgttgtaggggttttctttcactgggctgtatttttggtgcagcttaggtgtctggaagtggattttggaagtgaacagaagaatagttgcctagtctttgattgtgcctgaatttgtgtattcccttctgggtttccctggctctaactggtagtgtcttttgttggaaatgtatatctcttttttgttggaaatgtgtatgtgtgaccttacaagtttggatctacatcattggtcatttgcagcagagcgcagcaggtgacctgctgaatttttctctggaaagaaagagggagggagcagagcctgcatctgacagctgtgtgtgcctcccggccggatatctggtttgcatctccctcagcttaaagctcccttcagcctggtgaggcaagtgtgactgtgcagccagccctgccaacccaggctgagtttcactgcaaatcaaggtttggcagcttcagcccagactggagttttcatgctgagattttcctagcattttgtgtttcatgactaaatatggtttgtgtttcaagaccaatgagctgggaactgtactgttctttcccctcccatcaactcatttttggcacaagacgcactctagtcagttggagcaaatcccctgacccgggtgcagttccaaaagcagacactcgagcgtgttttacctaattaggaaatgctttgctccaaaccgaactgctcattcaggttagagaggagctgtaaaccactgagctgactctttccggggacacagtgacttcttcaatgacagtgctccttttggacattataacattcttcctagattttctttttctttttcttttttttttggccaagtaaaaaacatttttctgcattcttgctgatgctgagggccagtctcctttttctgagtatagtcaacccctcctcccaagccatcactgcccaacaaaacagttattaaaaatatcccagcattcatggtaaccataccttcccattttcagagaccatcctaatttgaaatgttttatcctcttttcagcccttacttttggtttggaaaatgcacttagcacatccatagagtgcctgcttatcccctggggctggctgcttctgacagataccccaggctcttaggcttcttcccttttttctcctttatagttctcgcctcttttctaaagcttcttaatctgctctgagggaagccaaatcacaggaatgccaaaataattcagcatctggaaagggaaaagaagggtgggaaaggaaagggcaagccattcatgagtcccatgtccattcttgcaagtggaatccacacgttgattatttttattctaagcctggagcagtgtggaaagaaagcaaaggttagaaacaaagagttctggataatgaaaataatcacacagtgatagtaataataatgatgatgaaattagtatttattgagaacttagagtatctctgccactataaattattttaaacactttaaaaaacccaatctctataagaactccatgaggtatgtcctgatatcattactgttttatagtaaggaaattgtggtttagagatgttaaataactgaaatcacacagcttttaactgttggagcctggactcaaatccaggcagtctgacttcagagtctaagctcataatcactgtgatctgaaatcttcgttgtcctaaatgtatcagttcaaggctcttggacaagtcacttcaactccttaagccttggtttccttgtcagttgaagataatattacatgccttgactttaaaatatgtcatctcaattgcagttttatgttctttgcaaagagttattttacatgaagcactgctaaggaagttttaggcctttggcaagatgcaggtttgattttgtgggaatgttttggcagaactccaactctgtaatagctattttatttccctacttctcagatgtttccttaaaagaactgccttttttatatggatttggaggtgcaatcagttaacccatttagaagaagaaattttctcaatttgaaatcctaattgagatctcaatgccaggcagataactctgggtgtccttctcttaacggaacatttcgacctaattgtgattagaaaagtggaagaggtcttgaactggaagccaaggggtggctaaagagtacctgatgtctggctggagctctgcctctaatgccctgtgtgcccttgagcaatcacttcctgattttcttatttgtgaaaatgagagcattggatgaaaatgtcctctaatatgccttcaatttctcaaatttgtaagttgataggctgctccagcctttctaattttatgaaaggatccaagtataagatccaagtataaaatgggttatttaaaattttgttttattaccaaagaaatacacattcaatatagaaaattaaaaaaatatgacagaaccatgggaaaataattaaaaacacctataaaacccaccacttcataataacctcagtcaacatcttggtaaatatgattaatctttttgcaatgcataaaaaatacatttttaatgagatttacaatgttactttttctaacctattactcttacataagaactaccttttgcttatcctcttactctacctttttaatggcagtaaagtattctaccatatgatatataatccatcaggctcaccctcacttgttggactgttagcttaacagtgacttttattaacggtggataattgcagcccctaaaatttaaagcaccttctcagaaaattttatttcaaagcttctctgagggtaaagtaaaagtcctcatgattcaaaaagatttttccattaaacacttgaccattttaacatttctaaatttttacatgctgcctgtccctcaaaaatctagctttttgaaaaaatttcaaaaaggtatagcatatctagaaaaatgtgcatttgggttgatacagacaggaaaatctagatgcttctttaacataaggtaggcaacttgtctctgcaaagatctggtctcagactctggatttcccatctgtgctctgcagtttgtttattcattcactggctctatccacctttaaagtgctcacgagaacacatgatatgccggtcactacactaaggttgtatcaacatagaagtcagagtttcagaagtcagagtttcagcttactgaaagcttatagtgtaactaaagtacttccagatacatgctatattagataagggtcagaggatagcactaggacacagaggagggcccccaaacccagccttggaggtgggagttgtcaggtaagtgccacaaatgcccaattacagctgaggctgcttcctccctgttttctatagaatcctgtgaagcagctccagctatgtgtgaagaagaggacagcactgccttggtgtgtgacaatggctctgggctctgtaaggccggctttgctggggacgatgctcccagggctgttttcccatccattgtgggacgtcccagacatcaggtgaggaaaattatgattggaacataacaggacacagattaggttcctctgtgttcatgtttatccccagattgtctatctctttctgcccagaagttatgtaaccttgttacaaatagacctctaatgattaaggtccaggagtaaatgccaatttcacatataatgtagacagattatctgatgggcatctatcagatacaaagtctgcccctttttcatgtcctttttgtctaaatatagtcattatcatcatcatcatcatcatcaaatcatttcatcaccatcagaaatgcttatacattatcctgatgtataccaaagctactgtttggaaagaaactaaaataaaagtccaggtcacttaaccatacagggctgatgttagatgaaagcaagcatcgataccaaatgcaattttacataatattacctgtcaacaaaatatatttggacagccgcatggtaattttacacattatgtgtaaacaaagtattggtggcatcacatggtaaaaactcagtaatttcacctcagaaattcttcttcacatcagaaatgtagtttgtgcattgaggctatctgattgatgtttatgcctctctgcttgggatatattcatgagaataaataatagaaacctctcccaatgaatgcagtctgtctgaattcattgatctttatgcagtggagatattctgcacaagccgctattttatgggtccatagtagccatggctgttttgtagttctaaaatagtcactgcagtgcaatttaaaatctagtaacaataattttttaagaacttcaccttaatgattttttttaaatgcagctgactaatttaggcaaatgtcttaacagttgattggtatgaacttatccattagaaatcaagcctcaagtggttatttgtagatgcaatgcttttgcttataatagttagaaaataatgctcatattcttttgggtaggtgatgactttaaaagtacagtttaaaggatttataagacacaaaatgccatttaacaaatatgtaaaattgtatacattctttcaacaaataattattgagtgccacatatgtgccatgcaatttgctatagtgatggacaagacagacatgatctctgccctaaaaaagctcatcaaggaacataggagataaaaatacaaagtaaagttgactttcccccaacatctcctgttatttggaggcaattcaggtctttttccaatcaactgcagaattttgcttaagagcatagtggcaatgagactcaatatgtttattgttgctgataatcagaagaggaacttcccatctcaatgacttaaccttttgtggcttggctgtaattgattcacaagttttgggagatgctgactcataatgtgttgaacctttttagggggtgatggtgggaatgggacaaaaagacagctacgtgggtgacgaagcacagagcaaaagaggaatcctgaccctgaagtacccgatagaacatggcatcatcaccaactgggacgacatggaaaaggtatgggaggtttgctgcagcttgggccctcaggatgcataatccctgtgttctctgatacagaacaccacactactgctggggaaataactggctcacattgctcaactgtacttttacttgttaatgttcattctgggttattacccattgaaaaaaaaatccttgtagccataaaaaatgatgagttcatgtcctttgtagggacatggatgaagctggaaaccatcatcctcagcaaactgtcgcaaggacaaaaaaccaaacaccgcatgttctcactcataggtgggaattgaacaacgagaacacatggacacaggaaggggaacatcacacaccggggactgttgtggggtggggggagggggaggaatagcattaggagatatacctaatgtaaatgacgagttaatgggtgcagcacaccaacatggcacatgtatacatatgtaacaaacctgcacgttgtgcacatgtaccctaaaacttaaagtataataataataaaatttaaaaaaaaaagaaaaaaaaatcctaaaatgtttctttaaaaaaaaatcccttgccaggcatggttgctcacacgtgtaatcccaacactttgggaggccaaggtgggaggatcgcttggcccaggagtttgagaccaggctgggtaacatagtaagatcctgtctctacaaaaaataaatgaaattagccaggcatggtggcacacacctcagtcccagctacttgaaagattgaggtgggaggatcacttgagcctgggatatggaggctgcagtgggccaagatcctactccagcctaggtgacagagtgagatcctatctcaaaaaaaagaagaaaaaaatcctgcagggcacagtgactcacacctgtaatctcagcactggatcacttgaggccaggagtttgagaccagcctgagcaacatagcaaaaccctgtttctactgaaaaaaaaaaaaaaaaaaaggtttaattaacagtgtgtggtggcatgcaactgtagtcccagctactcaggaggctgaggtggtagcatcattcgagcccaggagttcgaagctgcagtgagctgatcataccatcagctgttgcactccagcctgggcaacagagcaagactctgtctctaaagaaaaggaaaaaaatgtccttgcctattaggttttattaactaattaaaggatgatagttctgtagatgagaagagtagccctttgccactgcagggaattaatcatctgttgctcacgtcaactctgttgccctcctaggacaagcagtgcatgagcagcagctcagagaatgaaaaccctcctttcattttcatcaggggctgcatggttatccctctcagtgcaatatagctaaaggggcttgaaatgctgggagtagtcttaaacagcccattcttgaaaggttttcattaactcactctaaacatctaaattaaaaatgtttttgttttcactatagtaaacaggagtgtaacattgcaggtttggtacatttctgaatgcctctccacacactgaagcacaagagccactgaaaaaagctatatgataaatattttaaaaattatttatctgtgttgcattacatgaggccttatctcccagacacttaataaaagagctaatgagaagaagagctaaattctaagattttgatgtttggtcattaaacattacagacaccagtgatcagagaaaaaaacagaagaaataatgagaaagtgacataaaaaattttaaatgcagcaagatatatcagaatcacgatatctggccttttatttatctatcggctcactactactactacgcacacaatttatcacttaaaagaaaaatacataatgttgttagaatttatcagcagtaatgctccaagctctatctttctacaaaaatttcatatcagtaggtttgcttgaggattctagatttggtaagattgcagtttgcacagagaaaaagatatcaatatcaataggaaaatattcttttagaatttctccatggagctgacaacatcttagaatgtatcgtcctagacagagactattggaagaaaaaactttccttatttctaaaatttaaattcaaagtatcttctggtggggacgaagagagagagaggagaaaggttgcttgctgtgactggcaggattttttgagcagtctgctgctttcactccactaaagaaacaaaactttcagaagtttcatttcccttctataaaccacaaatccaaaacaaaagaaagtggaataagatagtctttaaagctaatcttggttttgctaatttgtaagctttcaccagcagttcttgttttgctctgttttgattttgagtgaatctcatattcctggctctggtggagaattttcgtgcttttaaagattaattaatttagtcctttttgcaatggtttgttcttttcggcatctaggaattaaagaaagtgctcaaccataaataaatgtagttatgtccaaagtaccttcacatagacacactatacacaggcgtgggccttttggaaacacctgaaggccaaatgtctgactgtgagtggaagatccagagtgtgctgatagaggaagcttttctcatccctcgagagcaaagagggtgatggaggcaagagtcagagagccctgttctcttcttcatgtacactgcaaagggcaacttctctagaagcattaaaagtgtcaattaggttttcaagtaagcgtcatttattcatatatacattcatttgtctttttatttacaaaattaaatcattttcccatgaacattaaaatgggaagagagaacaaagaaaatagagttgaataataataacattgattctggaccagacactgggctggacaataactcgagggttaccttatttatttacacaaagacccgatgaggtacacactaattattttcatctccctattaccaatcatgagactgaagctgagaagggttaaaaacttgcctaagctcacacaactaagaagtgtccgagctgggctttgaacccaaggtttgatcaagggttgtgcccttaactgccataccatcctgcctcacagatctgggttagggattctgctcagtcacttagtagatgtgaatcctttgggaaggtacttacacactttgagcttcagtctctgcatctataaaaccatggacacatgcatgagtacttgtagcatttcctttggtcttggtttcaagtagcttctggtccctttttgggaaatgcaggacctcatgacagcacatcattgtgtttctcctctgtcccccaactcactagatctggcaccactctttctacaatgagcttcgtgttgcccctgaagagcatcccaccctgctcacggaggcacccctgaaccccaaggccaaccgggagaaaatgactcaagtaagtatgctaccccagcacacaacactgtggggtctggggaaacttctgttagaaggaggctatgcagcacagcagagagaaggccggagctaggagtccaccaacagactaacagccttcagtgaactcagggatcccaaaggacaggaacagcttgaaagtacttgcatccttcctgcagggaccagccctttgcctccaaaagcaataggaaatttaaaagatttcactgagaaggggccacgtttaagttataatgtctaaggagaagtcacttcaaaatgcagcatcacatacaataggaatttgggttccagagtcagacatatctaggtttgaaaactggatctgccacttatcagttatgtgaccttaaagaactccgttaatttctcagagcctcagtttccttgtctataagttgggagtaatattaatactatcatttttccaaggattgatgtgaacattaatgaggtgaaatgacagatgtgtatcatggttcctaataaacatccaaaatatagtacttactattgtcattattattacttgtttgaagctaaagacctcacaatagaatcccatccagcccaccagacagagctctgagttttctagtttggaagagctattaaataacaacgtctagtgtcaattctatacttgttatggtcaagtactgggctcagcattttacattcattgtctctttaagttctagcaatgtgaagcaggaactatgattatattgactacataaatgaagaaattgaggctcagatacattaagtaattctcccagggtcacacagctagaactggcaaagcctgggattgatccacgatcttccagcattgaagaatcataaatgtaaataactgcaaggccttttcctcagaagagctcctggtgcttgcaccaacccactagcacttgttctctacaggggaacatctgtgggcctgggaatcactgcacgtcgcaagagatgttgcttctgatgaattattgttcctgtcagtggtgtgaaggcaaaaaaaaaaaaatggttggaaattatggcttgctagcaaatgatgtcagacattctggttaatagagtaggaagggtcttacagatggagaaatgaagacccacggacatctcctgatgcacaaacttctcacaagtgacctggaggggcttggttctaatcttgtccctggactgcaccaactggggcactgacattctatgtggtcctctattaccattgggctggtcctgtcttccaggaaccagggcctctcccactgcaaccagaatggcctcagattctagggttagcattgacccagtaactacataaaaaagtggaatagattaaatagaacctcagacaaatcacagaaatggggctaaacctagccagcctgagcttcagatttaaaagttctctttctttataccagggaaatcaaaacctggatgttgtcttctctttttcttctggctttgacatagttaacaagccctaggatgtctgcactggaaaaatgggagatctcatttagtccaaactcctcctctgttaagagacctggaataaagccactattaatcaactattagtttggtgactattagtcaaagccaggaccagagccagaagctggactttcctttcccctggccaaaccttgtgtgcacactgtttcttcccctccccaccctgtcaggccattgatgtgatggctccccattcacaccttcatttctcctctttaacgtgaccagggctgttctgaacctccttactttggcctcctctgcccagaacaggtcaggcccctctgcatccatcaaccaggtgtgctctcctgaccattctttgtcagatgggcaccttcactaactcagctctttggattgctttgcagattatgtttgagactttcaatgtcccagccatgtatgtggctatccaggcggtgctgtctctctatgcctctggacgcacaactggtaggtggctgggcgggacagcaagctggttggagcgcactgccagagatgggattgaatggtcgttaacacgtgggggtgacggactggagttgagttagaatggacacggctgaacccagccctaaaagatcttcttctagtgttcaaaataagcccttgatctcatatttctagcagaacttttttctactgttttcctcttcctgttctttactttttttcatcttccccgagccctgtcccacctcacctctcctatcacatgccctgttttctctttttaaataagaggctcggaaattccctctcccccaaggcttccctctacttgtccagcaagtaaccacatgccagctgccatggtgacttatcacgcccaattgtctcccaggcatcgtgctggactctggagatggtgtcacccacaatgtccccatctatgagggctatgccttgccccatgccatcatgcgtctggatctggctggccgagatctcactgactacctcatgaagatcctgactgagcgtggctattccttcgttactactggtgaggcctgtgggagataagggggagaggggagcagtgtgttgctcagtaacttccaggaccatcctcactatccaaggagatgatgggatgaagttttgcaaatggcaaggcctggctctaatgcacagagcaaagcacatctttctttgctgtgtgaagttgcaaaatgattacactatttccttgaggagaacagttatagacacccagtgttatgcattagtcagtgttgtataattgatctttttttaatcccctccattagcaaatagaagaagattgtgcagagactgaagatggcatggtgtggtgattggcaggagacattgtgataggactcgagtcccaactctgctactcagtagctctgtgagcttggacaagttaaccaaccatagtctctttatttgtaaaatggggataataatagaccctatatcacatgattgttatcagtattaaatggaagaacgcatgtggaatacttgacatagagtaagcattcaataattgttagctattaacagtgatacttattaatagctaacacagtgacatatgtgtattcagattctaagccggtgcacccagtcctcccttcacaagaggaaagtgtcagcattgccagaaacattgtatgtcctcagtgctggtggctccagctacctgtcctccccttagcaatttggtattgtccaaacatttaggtttctgaacatgcctgaggcttattttatgctccaaatttgaggcttgagacttgaaccctgccaatgttaaagtctccacttgcaatatgaagttgaataattgcattcctcctctgctccctacaaagaatcccaagatgcctctaaaaggttcctagagcctcagatataattaatagcctagaacttcagagagcagaagtctgaaaggtctctccctgcccacttcttccgtatctcgttcagtatgcaccgctgaaaccttctggactaggcctggtcctgagacagcaccacctctttcctggagggtgagaaatgtgccaaaggtttaacctgctatccactggcccaggcaacaggatctcagactttttgaaaattgtgaggcccctgaggagctgattcagcataagatatcctggttaactgaaaatacaatataacaaactttctgtcataaaataattataacacagagtagttatcctgcccacccaccccaaaaaatgttatggtacaaaaggatccgctactgtgtgcctttctctagctagctcattttattcttgttatgcatttcccagacaatgcatgctgagggcctactatgcatgagacactgtcctaggaacagaggtggttccctggtggccctactacgtcattatcattgtggattttggattgcagaatattgaactgacacattttttgatggcacatgtcttgagggagagactgcagtagggcaggtgaatctttgccacctgtgcagaccctaatgtttgccacaatgtttgtatctggttgacagctgagcgtgagattgtccgggacatcaaggagaaactgtgttatgtagctctggactttgaaaatgagatggccactgccgcatcctcatcctcccttgagaagagttacgagttgcctgatgggcaagtgatcaccatcggaaatgaacgtttccgctgcccagagaccctgttccagccatccttcatcggtaggcaacaaacgcccttttcctgggaaggggagtcattgtcttcttccatatcaagccagcctccagaacatggagacaagtgacggttgccccaagaccaaaagcatttctaaaccagaaaaagggaaagtgccacattttcaaggcgagaagacataatgaggccaggaaaaaggttttcttcctaagaaaacactatctatgttgcagttaagcccaaagcattcatggtgtatgatgaaagaattaaataatgcctgtgctttggagacagcggaaagggtagcaagggtgtgctgaaggctgagaatttgggaatgctgggggagagaaaaatagaagagcactcaaagtgagtctgttcctacattcacattgtcttggagagacaggtttgcatagttgtttacagaggcaggctctgagaggggtgagcctgggtttcagtcttagttctcttgatcttgggaaagtcacttaacctcccaactagtctcctcatgtataaagcggagactgtaatattacttatgtcctaggatggctgtgagaattacaggagatagataaagagcacttagcccactgcctggcaaaagcaagcattcaataattatcagatatcactagtaattaataatcaggtagtgctattgttaacgttatcattacatcacagcactgcagaagatgaaagggcacctagaggttttttgaaaacacctgcgtcagaaattaacaaaagtccagacccccacccccacccaaaaaaaatgttagcaagattggaaaaatgagccttttccaacaggataaaaaatagagtaagtttccctgataatccagccccattagctttgggggctggggcagatgcaacgtagctgttaaatggagacctgggagagctctgaagagttgttgcaacattggctcagcgtggaagctttgcagggaattggaaggcttcatcccttatttaaaccacatggagtgagtagtgagtctattaaaaaatcagtgatacctgttgtagcccacacctcaggatgctgcagcaggccttcctcattagaaggcaggcaggaagacatagagcataacaagacccttttgtctctcagacaggtggttcctagattattatgtcttcccagcctcagtccactgcaagatcatccagatgttcaagtctggtcttccatgtctagcctgggttttactctccacttaaggaccatggcctgtgtctcttttccagggatggagtctgctggcatccatgaaaccacctacaacagcatcatgaagtgtgatattgacatcaggaaggacctctatgctaacaatgtcctatcagggggcaccactatgtaccctggcattgccgaccgaatgcagaaggagatcacggccctagcacccagcaccatgaagatcaaggtactgttcagtgacagacccagtggcaatgccgccagcagtgtcagccctataaccacagataagaactcttcagagactgtattttggtgacatgcaattgtgggttttaggggtaggtaatggacacaaatctcatattttacaggatgtaagtcaatctagttcataagaaaaattgagttactttatataaaatttgatctctatttatccttgtctgtcagctactttcagtagctgcagtcaaagtcaacagagctccccacatgctcatctctctttaaaatatgcattttgttgtttttctcgacacaaaaatagtgcatcatgcatgtaacacattttttaaaaatactgatgacctagacttatttctgaagaacttcaaacactgtagatttaggaggagcttatactcttcctccactactaacctcaatcctgtggccaagaattcaaattttatcctcattcctctgtctagcacatcttttggtacaggtgctcaaaagcacagaatgactctaggatgaccaagctcagtccctgagccacccaggacccctgtatgtggtgtgaatgttgagccctagtgaagggaactcggggattaaatggagataattctttggaggcaaacttaacctgtggctgggtcacttctcaaaggttattatcactctctgaagtcagaaggccacacttgggaccctctgacccatgtcacaggaagtagaggggcaattctagtgcagttcacacacgtgggtatttaaacaaattatctcctctttgcactcccttctgtttttagaaggagtatgcagctaacactagagagtgtgctagactgaaacatgcacactttctctctccatgataggctctggctagtcctgccctaaaagacttcagcatgagagaagagagactgttttccaacagcgtttgtgtttcttggatgccattctgatcagctcttaccccccttacttccacacaagagggaggtgaatgaagccagtagctgggctcactactgagttgatctcatgagggtcgataacagaaagaggctattgctagagttgggcagttcctagttctctaaacttggtttcttgaatagaaattaatgtgaaactctgggccccgatgtaatgagatagtatagagaaccaagaaaaacctaggacaataagatgataacatttggcaaaaatgaaactggatgagagacctatgggaactcccatagaatttgtcataggctgttcttgcgttgctataaagaaatacctaagacttgggtaatttgtaaagaaaagaggtttaactggctcacagttcagcaggctgtacaggaagcatagctctagcatcagcttctggggaggcctcagtctcagaaagcttcgaatcatggtggaaggcgaagcaggggcagacacctcacatggcaaaagcaggggcaacagagagggcaggggtggggggagggtgccacacactttgaaataaccagatttcatgtgaactcggaagaagagctcacttatcaccaaggagatgtcctaagccattcatgagagatccacccacgtgatccaaacacctcctaccaggccccacctccaacacgggggattacatctcaacatgagatttggaggagatatccaaactatactaaattctttacaacttttctgaaaatctaaaattgttccaaaataaaaaggttatttttaaaaccaaaccaaaacataaaaccacctgggagaacccaggtttgaatatcagatctgacactgatataaccggtgttacctgggccagttacttaaactttctcagcctctgtttcctcatatgtaatatgggagtaatttaagacttattcttcaagatgtttatgagaatcaaatgagataatacatgtaaaatgcttagcatagtgcctggcatataattacatgctcagtaaatatcagtactttgtattaagaagtaaatgctcagaagataaagattaaactggttagccagttttcactgttctctgtgcctaaaccattcatttatttaagaaacatgagcatgccttgcaggttaggcctgtgcactgggaaaggccaaccagtgcagcttaagaggcacctattgcaagggaatgtccccagcaggggaccctgagttccccaatgttaaacagagcatctgggtgaaaagtggtagttcacttcaccacgtggaaacacatttgtatactaagtcctagcacaattaaaacttctcctttgaataggctagggtttgtttctacagaaagtgtatcgtgttgaattctgaggcagagttcatggaaatcagaggcattgccagggttcttaagtgggggccatggctggatttggagccaactttcagtttgctcaataatgtggtcgaagagttacaggtgagaaaaacgaatgtgcttactgaagaatttctaaatccatggctccctctggcggtcctgccaagaacatgacacaattaggacacaattggcatctaacagacaagcctgtgtccctgctgaacaagaaactaggccatggtagaacatccaggctctgtcctaccgcactaacgactgcactaatgatgacattaatgaccattctttttcatcttgactgacagatcattgcccctccggagcgcaaatactctgtctggatcggtggctccatcctggcctctctgtccaccttccagcagatgtggatcagcaaacaggaatacgatgaagccgggccttccattgtccaccgcaaatgcttctaaaacactttcctgctcctctctgtctctagcacacaactgtgaatgtcctgtggaattatgccttcagttcttttccaaatcattcctagccaaagctctgactcgttacctatgtgttttttaataaatctgaaataggctactggtaacttct

SEQ ID NO: 9774 - DNA, 9662 bp, Homo sapiens
cacatagacacactatacacaggcgtgggccttttggaaacacctgaaggccaaatgtctgactgtgagtggaagatccagagtgtgctgatagaggaagcttttctcatccctcgagagcaaagagggtgatggaggcaagagtcagagagccctgttctcttcttcatgtacactgcaaagggcaacttctctagaagcattaaaagtgtcaattaggttttcaagtaagcgtcatttattcatatatacattcatttgtctttttatttacaaaattaaatcattttcccatgaacattaaaatgggaagagagaacaaagaaaatagagttgaataataataacattgattctggaccagacactgggctggacaataactcgagggttaccttatttatttacacaaagacccgatgaggtacacactaattattttcatctccctattaccaatcatgagactgaagctgagaagggttaaaaacttgcctaagctcacacaactaagaagtgtcccgagctgggctttgaacccaaggtttgatcaagggttgtgcccttaactgccataccatcctgcctcacagatctgggttagggattctgctcagtcacttagtagatgtgaatcctttgggaaggtacttacacactttgagcttcagtctctgcatctataaaaccatggacacatgcatgagtacttgtagcatttcctttggtcttggtttcaagtagcttctggtccctttttgggaaatgcaggacctcatgacagcacatcattgtgtttctcctctgtcccccaactcactagatctggcaccactctttctacaatgagcttcgtgttgcccctgaagagcatcccaccctgctcacggaggcacccctgaaccccaaggccaaccgggagaaaatgactcaagtaagtatgctaccccagcacacaacactgtggggtctggggaaacttctgttagaaggaggctatgcagcacagcagagagaaggccggagctaggagtccaccaacagactaacagccttcagtgaactcagggatcccaaaggacaggaacagcttgaaagtacttgcatccttcctgcagggaccagccctttgcctccaaaagcaataggaaatttaaaagatttcactgagaaggggccacgtttaagttataatgtctaaggagaagtcacttcaaaatgcagcatcacatacaataggaatttgggttccagagtcagacatatctaggtttgaaaactggatctgccacttatcagttatgtgaccttaaagaactccgttaatttctcagagcctcagtttccttgtctataagttgggagtaatattaatactatcatttttccaaggattgatgtgaacattaatgaggtgaaatgacagatgtgtatcatggttcctaataaacatccaaaatatagtacttactattgtcattattattacttgtttgaagctaaagacctcacaatagaatcccatccagcccaccagacagagctctgagttttctagtttggaagagctattaaataacaacgtctagtgtcaattctatacttgttatggtcaagtactgggctcagcattttacattcattgtctctttaagttctagcaatgtgaagcaggaactatgattatattgactacataaatgaagaaattgaggctcagatacattaagtaattctcccagggtcacacagctagaactggcaaagcctgggattgatccacgatcttccagcattgaagaatcataaatgtaaataactgcaaggccttttcctcagaagagctcctggtgcttgcaccaacccactagcacttgttctctacaggggaacatctgtgggcctgggaatcactgcacgtcgcaagagatgttgcttctgatgaattattgttcctgtcagtggtgtgaaggcaaaaaaaaaaaaatggttggaaattatggcttgctagcaaatgatgtcagacattctggttaatagagtaggaagggtcttacagatggagaaatgaagacccacggacatctcctgatgcacaaacttctcacaagtgacctggaggggcttggttctaatcttgtccctggactgcaccaactggggcactgacattctatgtggtcctctattaccattgggctggtcctgtcttccaggaaccagggcctctcccactgcaaccagaatggcctcagattctagggttagcattgacccagtaactacataaaaaagtggaatagattaaatagaacctcagacaaatcacagaaatggggctaaacctagccagcctgagcttcagatttaaaagttctctttctttataccagggaaatcaaaacctggatgttgtcttctctttttcttctggctttgacatagttaacaagccctaggatgtctgcactggaaaaatgggagatctcatttagtccaaactcctcctctgttaagagacctggaataaagccactattaatcaactattagtttggtgactattagtcaaagccaggaccagagccagaagctggactttcctttcccctggccaaaccttgtgtgcacactgtttcttcccctccccaccctgtcaggccattgatgtgatggctccccattcacaccttcatttctcctctttaacgtgaccagggctgttctgaacctccttactttggcctcctctgcccagaacaggtcaggcccctctgcatccatcaaccaggtgtgctctcctgaccattctttgtcagatgggcaccttcactaactcagctctttggattgctttgcagattatgtttgagactttcaatgtcccagccatgtatgtggctatccaggcggtgctgtctctctatgcctctggacgcacaactggtaggtggctgggcgggacagcaagctggttggagcgcactgccagagatgggattgaatggtcgttaacacgtgggggtgacggactggagttgagttagaatggacacggctgaacccagccctaaaagatcttcttctagtgttcaaaataagcccttgatctcatatttctagcagaacttttttctactgttttcctcttcctgttctttactttttttcatcttccccgagccctgtcccacctcacctctcctatcacatgccctgttttctctttttaaataagaggctcggaaattccctctcccccaaggcttccctctacttgtccagcaagtaaccacatgccagctgccatggtgacttatcacgcccaattgtctcccaggcatcgtgctggactctggagatggtgtcacccacaatgtccccatctatgagggctatgccttgccccatgccatcatgcgtctggatctggctggccgagatctcactgactacctcatgaagatcctgactgagcgtggctattccttcgttactactggtgaggcctgtgggagataagggggagaggggagcagtgtgttgctcagtaacttccaggaccatcctcactatccaaggagatgatgggatgaagttttgcaaatggcaaggcctggctctaatgcacagagcaaagcacatctttctttgctgtgtgaagttgcaaaatgattacactatttccttgaggagaacagttatagacacccagtgttatgcattagtcagtgttgtataattgatctttttttaatcccctccattagcaaatagaagaagattgtgcagagactgaagatggcatggtgtggtgattggcaggagacattgtgataggactcgagtcccaactctgctactcagtagctctgtgagcttggacaagttaaccaaccatagtctctttatttgtaaaatggggataataatagaccctatatcacatgattgttatcagtattaaatggaagaacgcatgtggaatacttgacatagagtaagcattcaataattgttagctattaacagtgatacttattaatagctaacacagtgacatatgtgtattcagattctaagccggtgcacccagtcctcccttcacaagaggaaagtgtcagcattgccagaaacattgtatgtcctcagtgctggtggctccagctacctgtcctccccttagcaatttggtattgtccaaacatttaggtttctgaacatgcctgaggcttattttatgctccaaatttgaggcttgagacttgaaccctgccaatgttaaagtctccacttgcaatatgaagttgaataattgcattcctcctctgctccctacaaagaatcccaagatgcctctaaaaggttcctagagcctcagatataattaatagcctagaacttcagagagcagaagtctgaaaggtctctccctgcccacttcttccgtatctcgttcagtatgcaccgctgaaaccttctggactaggcctggtcctgagacagcaccacctctttcctggagggtgagaaatgtgccaaaggtttaacctgctatccactggcccaggcaacaggatctcagactttttgaaaattgtgaggcccctgaggagctgattcagcataagatatcctggttaactgaaaatacaatataacaaactttctgtcataaaataattataacacagagtagttatcctgcccacccaccccaaaaaatgttatggtacaaaaggatccgctactgtgtgcctttctctagctagctcattttattcttgttatgcatttcccagacaatgcatgctgagggcctactatgcatgagacactgtcctaggaacagaggtggttccctggtggccctactacgtcattatcattgtggattttggattgcagaatattgaactgacacattttttgatggcacatgtcttgagggagagactgcagtagggcaggtgaatctttgccacctgtgcagaccctaatgtttgccacaatgtttgtatctggttgacagctgagcgtgagattgtccgggacatcaaggagaaactgtgttatgtagctctggactttgaaaatgagatggccactgccgcatcctcatcctcccttgagaagagttacgagttgcctgatgggcaagtgatcaccatcggaaatgaacgtttccgctgcccagagaccctgttccagccatccttcatcggtaggcaacaaacgcccttttcctgggaaggggagtcattgtcttcttccatatcaagccagcctccagaacatggagacaagtgacggttgccccaagaccaaaagcatttctaaaccagaaaaagggaaagtgccacattttcaaggcgagaagacataatgaggccaggaaaaaggttttcttcctaagaaaacactatctatgttgcagttaagcccaaagcattcatggtgtatgatgaaagaattaaataatgcctgtgctttggagacagcggaaagggtagcaagggtgtgctgaaggctgagaatttgggaatgctgggggagagaaaaatagaagagcactcaaagtgagtctgttcctacattcacattgtcttggagagacaggtttgcatagttgtttacagaggcaggctctgagaggggtgagcctgggtttcagtcttagttctcttgatcttgggaaagtcacttaacctcccaactagtctcctcatgtataaagcggagactgtaatattacttatgtcctaggatggctgtgagaattacaggagatagataaagagcacttagcccactgcctggcaaaagcaagcattcaataattatcagatatcactagtaattaataatcaggtagtgctattgttaacgttatcattacatcacagcactgcagaagatgaaagggcacctagaggttttttgaaaacacctgcgtcagaaattaacaaaagtccagacccccacccccacccaaaaaaaatgttagcaagattggaaaaatgagccttttccaacaggataaaaaatagagtaagtttccctgataatccagccccattagctttgggggctggggcagatgcaacgtagctgttaaatggagacctgggagagctctgaagagttgttgcaacattggctcagcgtggaagctttgcagggaattggaaggcttcatcccttatttaaaccacatggagtgagtagtgagtctattaaaaaatcagtgatacctgttgtagcccacacctcaggatgctgcagcaggccttcctcattagaaggcaggcaggaagacatagagcataacaagacccttttgtctctcagacaggtggttcctagattattatgtcttcccagcctcagtccactgcaagatcatccagatgttcaagtctggtcttccatgtctagcctgggttttactctccacttaaggaccatggcctgtgtctcttttccagggatggagtctgctggcatccatgaaaccacctacaacagcatcatgaagtgtgatattgacatcaggaaggacctctatgctaacaatgtcctatcagggggcaccactatgtaccctggcattgccgaccgaatgcagaaggagatcacggccctagcacccagcaccatgaagatcaaggtactgttcagtgacagacccagtggcaatgccgccagcagtgtcagccctataaccacagataagaactcttcagagactgtattttggtgacatgcaattgtgggttttaggggtaggtaatggacacaaatctcatattttacaggatgtaagtcaatctagttcataagaaaaattgagttactttatataaaatttgatctctatttatccttgtctgtcagctactttcagtagctgcagtcaaagtcaacagagctccccacatgctcatctctctttaaaatatgcattttgttgtttttctcgacacaaaaatagtgcatcatgcatgtaacacattttttaaaaatactgatgacctagacttatttctgaagaacttcaaacactgtagatttaggaggagcttatactcttcctccactactaacctcaatcctgtggccaagaattcaaattttatcctcattcctctgtctagcacatcttttggtacaggtgctcaaaagcacagaatgactctaggatgaccaagctcagtccctgagccacccaggacccctgtatgtggtgtgaatgttgagccctagtgaagggaactcggggattaaatggagataattctttggaggcaaacttaacctgtggctgggtcacttctcaaaggttattatcactctctgaagtcagaaggccacacttgggaccctctgacccatgtcacaggaagtagaggggcaattctagtgcagttcacacacgtgggtatttaaacaaattatctcctctttgcactcccttctgtttttagaaggagtatgcagctaacactagagagtgtgctagactgaaacatgcacactttctctctccatgataggctctggctagtcctgccctaaaagacttcagcatgagagaagagagactgttttccaacagcgtttgtgtttcttggatgccattctgatcagctcttaccccccttacttccacacaagagggaggtgaatgaagccagtagctgggctcactactgagttgatctcatgagggtcgataacagaaagaggctattgctagagttgggcagttcctagttctctaaacttggtttcttgaatagaaattaatgtgaaactctgggccccgatgtaatgagatagtatagagaaccaagaaaaacctaggacaataagatgataacatttggcaaaaatgaaactggatgagagacctatgggaactcccatagaatttgtcataggctgttcttgcgttgctataaagaaatacctaagacttgggtaatttgtaaagaaaagaggtttaactggctcacagttcagcaggctgtacaggaagcatagctctagcatcagcttctggggaggcctcagtctcagaaagcttcgaatcatggtggaaggcgaagcaggggcagacacctcacatggcaaaagcaggggcaacagagagggcaggggtggggggagggtgccacacactttgaaataaccagatttcatgtgaactcggaagaagagctcacttatcaccaaggagatgtcctaagccattcatgagagatccacccacgtgatccaaacacctcctaccaggccccacctccaacacgggggattacatctcaacatgagatttggaggagatatccaaactatactaaattctttacaacttttctgaaaatctaaaattgttccaaaataaaaaggttattttttaaaccaaaccaaaacataaaaccacctgggagaacccaggtttgaatatcagatctgacactgatataaccggtgttacctgggccagttacttaaactttctcagcctctgtttcctcatatgtaatatgggagtaatttaagacttattcttcaagatgtttatgagaatcaaatgagataatacatgtaaaatgcttagcatagtgcctggcatataattacatgctcagtaaatatcagtactttgtattaagaagtaaatgctcagaagataaagattaaactggttagccagttttcactgttctctgtgcctaaaccattcatttatttaagaaacatgagcatgccttgcaggttaggcctgtgcactgggaaaggccaaccagtgcagcttaagaggcacctattgcaagggaatgtccccagcaggggaccctgagttccccaatgttaaacagagcatctgggtgaaaagtggtagttcacttcaccacgtggaaacacatttgtatactaagtcctagcacaattaaaacttctcctttgaataggctagggtttgtttctacagaaagtgtatcgtgttgaattctgaggcagagttcatggaaatcagaggcattgccagggttcttaagtgggggccatggctggatttggagccaactttcagtttgctcaataatgtggtcgaagagttacaggtgagaaaaacgaatgtgcttactgaagaatttctaaatccatggctccctctggcggtcctgccaagaacatgacacaattaggacacaattggcatctaacagacaagcctgtgtccctgctgaacaagaaactaggccatggtagaacatccaggctctgtcctaccgcactaacgactgcactaatgatgacattaatgaccattctttttcatcttgactgacagatcattgcccctccggagcgcaaatactctgtctggatcggtggctccatcctggcctctctgtccaccttccagcagatgtggatcagcaaacaggaatacgatgaagccgggccttccattgtccaccgcaaatgcttctaaaacactttcctgctcctctctgtctctagcacacaactgtgaatgtcctgtggaattatgccttcagttcttttccaaatcattcctagccaaagctctgactcgttacctatgtgttttttaataaatctgaaataggctactggtaacttct

SEQ ID NO: 9775 - DNA, 773 bp, Homo sapiens
catcagctgttgcactccagcctgggcaacagagcaagactctgtctctaaagaaaaggaaaaaaatgtccttgcctattaggttttattaactaattaaaggatgatagttctgtagatgagaagagtagccctttgccactgcagggaattaatcatctgttgctcacgtcaactctgttgccctcctaggacaagcagtgcatgagcagcagctcagagaatgaaaaccctcctttcattttcatcaggggctgcatggttatccctctcagtgcaatatagctaaaggggcttgaaatgctgggagtagtcttaaacagcccattcttgaaaggttttcattaactcactctaaacatctaaattaaaaatgtttttgttttcactatagtaaacaggagtgtaacattgcaggtttggtacatttctgaatgcctctccacacactgaagcacaagagccactgaaaaaagctatatgataaatattttaaaaattatttatctgtgttgcattacatgaggccttatctcccagacacttaataaaagagctaatgagaagaagagctaaattctaagattttgatgtttggtcattaaacattacagacaccagtgatcagagaaaaaaacagaagaaataatgagaaagtgacataaaaaattttaaatgcagcaagatatatcagaatcacgatatctggccttttatttatctatcggctcactactactactacgcacacaatttatcacttaaaagaaaaa

SEQ ID NO: 9776 - DNA, 507 bp, Homo sapiens
tctcctgtggttctgccattttaacatttgatcatgaaagatagcacacatatagagtcacacacattcacaagatgtagagctaaattatttattacaaaatgaaaaactgggtaatcaccactcatgtcaagaagtagaatactgttagcagtccagaaatgccattgatgtccccttcagtcatcccccttccttaccactagagctaataataatcctgaaatttatggtaaccctttccttgtttttctttatattttatatcctaagcagtacagtttaggatattgcctgttttgtgaactgtatataaatggaactatacagcatgtattttttatggctggcatattttattcaatactatatacaatgaaactgaatgtttatgtccctcccccaaaaaattatatgttgaaatccaaacttccaaggtgatagtattaggagttggggccactgggagggattagtgcccttatgaaagagaccccagagagctcc

SEQ ID NO: 9777 - DNA, 320 bp, Homo sapiens
ggatatgagagatgcagtctagcagagtatcttaagatcatggactattggggtcatgagttccagttactactggaacttactatcagctctttgatcttggaaacattttttgaccactccaaatatcaattatcccatatttacagtagatttgatgactctcctttcacttgtgacccccactagttatattgggccaaaaagtatgcccctcatagagcctgaattctctaacaccaaatcaaattctcttagtacaaaatgccaggaggaatgatgtgagaaaagggcaaaaatattcccaaatatggaagttt

SEQ ID NO: 9778 - DNA, 387 bp, Homo sapiens
cacatggctttggcccttggagagctccaggccatcagagatggtgcaggaatggggtaggagacagaggaagccctgcaggaagccagcaaaaacctcacctaccttgagaactcagcaatgccggaagagattgagattcctagagaatggaggagccgggaacaaaggagaaggatgggatccaggaacaggccaagagaaccagctcgatgcttcttcctctcccttctagaaaattctgttcagaagccattaggtaaggtagagcaaggcaggcctctgtagctgagtggggaggaagtagcgtgcccagagcaggagggtggagtccaccggggtgagatagaggctcacacaagggcggtggtccagtgtgaggttgcc

SEQ ID NO: 9779 - DNA, 116 bp, Homo sapiens
agtagctgggattacaggtgcccgccaccacgcctagctaatttttgtatttttagtagagatggggttttgccatattggccaggctggtcttgaactcctgacctcaggtgatc

SEQ ID NO: 9780 - DNA, 14792 bp, Homo sapiens
aaacacacccaaagatgctgcgcagcaggatgcaaaggccgaagagaacaagaaggagcctctctgcaggcagaaagtgagtccatcttgtgcttcttggtcttgagaaatttgaggctttgtcctcttgagccgtggctggttatattctccctagaataagctcctttttggacagggcccatgatggaaatttatggcagcagttgggtgccgcagagtggaggtgacaactacctgagatttgcaactttgtctcatctggcgggtcagtgtgtctcaagtctacctactttaggataagaccttggtaaagggaggcttcagaccatgtgttgaaaggaatcagacgtgggtttctctctcttatttagtgccagagaaaactaccagtactagaagtaagccctcattttgtacaagtgcttacatttggctttttggtttgtggctttccccaagtcaacaagcctggctaggcatggaaatcaacaactctcggaggttcccctaaagctgaccgtttcaggaagctaaatgaagctgagtaggaagacaactacactgatggatttgtttatttatttttttgtcctgatctgtgaaataggagcttggttttttacgttctctgttcttttggctgcaagagatcctgccttgtcttgtgctcatcatagccattaacattctttcacgtaacgaggaaaagtgagattattttactatggaaggaacaggttgtaagaatcattacttgttatctttttacctggcaaattatactgattgctgtgtagcctcctgatcgttcttcctagtgttccaaggaagacaggtattctcaactgtgtctgaagtagagtagataacttcaatcaacatcatttagtgaccatagacactaagatatatgaccaacagtaagaaaaggacacagtttgtgttacagatccataatcccccatgtgtgcttccaaaaccccaaaggagtataaaaacgagaagtgtttttataaatttaacagcaaaacctgaccagaattagtgtgaattttcctctttggtgacaaggtactgccccagaccccacagagaagattgttatgtatttgaaagcaatattatctttataaaaattccaaaaccctgaaagttcaaaactctagggtttcagataaggggttataaacctatattaattatctaaaaggtgttgatttggagacttcacccccacatatggggtctcagtgtcttgaaaccgattgagtttcttctcatattcctgtttttctttgccacatgtatgaaatagtgaaatgtgagcacgtcagataggagtggtcgcaatggtcacacccttggagcataacatgcctcctaaatacaggtttttagttactaatggtagcttaacaggcttagaactgttctccacagtacaggaaatcttgttcaaaaggtacttgaaaggtgtgactcgaattgtacttccagcccatgctgctgtgtttcattgaggccaattatgatgcatcacatgacctaatgagagggatatagtcccttgcctttttaccagcttattaaggggtctgggggtgatgtctggagtgactttttgctagcagtctggcagtgctgagtttattcctcccagagggattccaccatgccagtgaggatttgggctggcttgtggctgcctagtgcttacatttgattaaattgttaccttctatccattcattgtcccctagttccagccttccaagcagtggctatgcctataaggccacagatggagaagaaagaagactcaggcatttgggccaggcaggagaactgtttaaggggccctgaacttagaatccttgaagagctgcctcagagttcttggggcaggtggtaggggtggagtttagaggcttcttaatgtcaggttatagagtaataagcatttctttctgaaaggtggctcttccaggttcctgtttagctggagttaagggtagggcagtggggaaaacttcggcgatgggctgggtctccatttgttgaagaactgctcctcctaggcagttagacggattaccagcatcttatagtgttctctggaagtttaagttgaaaaaggtgggtgccattttttgtctgctaggagagcaacaccctttgtcgccctctttagtttgatggtttaatcatttcagtggtgatttttttttttttttttgaggggaggagggcaatctggaaatcccgtttgctgtagaactttgatatctaatatggtagctatccacatgtggctggttaaaatgaaattaagaattcagttcctcagtcatagtagctgcatttcaagtgtgtaatagtcacagcagtaggtagtggctagcacaggtacgaacatattcgccctcccagaaagttctgctggacagcactgtgctatagtttcaaaggatccatagtctgtcgtcattaaaagcttttgagccaaaacactaaggctttcttcatcctctctttcaagggaatagtaacacgacgaaatgtagtcagctgtttcatttcattctctcttctgacttatagcaacacaggaaagtgttggataaaggaaaacctgaagatgtgatgccatctgttaagggggcccaggtaaggcggatttctttgtgagcattctgaaaatgaggcagccccaccgtctgacttgaggttcctccaatcctgtcccttctcttttttccctgtttttttttttttgagacagagtcttgctctgtcacccaggctggggtgtgccaccacacctggctaatttttgtatttttagtagagacggggttttaccatgttgcccaggctagtctccaactcctgacctcaggtgatctgaccgctttggcctcccagtgtgctgggattacaggcgtgagccaccgcgcttggcccccttctctttttttctgactgtccctccatctcttaccattctctcgtgccttcaggagcgcctgccaacggtaccgctgtccggcatgtacaataaatctggaggaaaagtgagactcacctttaaactagaacaagaccagctgtggattggcactaaaggtatgttcttcctcgcctccttgctggcccactgcctgcctctggcacccagcagcactcacattttagagtgcgatttcacccctccttctgaaacctctctctccactgtgctttgcttgcttctggcttttaaatttgcttttagatgctcgccttttgtttggaccgttttccctcattgttttcagtctgatcttagggctgatccaccaaacagtggctcttcagttgcacacagatttgggggtcccaaacacgtggcccaagggccaaatctggtccacagaaaaatgttttgtgggatgacacacaatctgtaaaaattgggagatttcactaatctgattttttttttttttttggcttctcttgaaaactcaaatgatctggccctttggggcctgcattctcacatggcatcgatccactagagccgagtggtggtttccagtgggccatactacagtcttcatggtcccatttatcttagaagtagccagctttgttcatttgtcacctgcctggcccctgtaggtcagagtttgaccctatagtaggtgaagttttcctaaccgctgccgaggaatctgcctctccctccccgcctggttgccctctgcctgccccacccccgcctgtgcacggtgtctggatcagccttgctgtttgctgggaagtgtctctgactgtcctccctctcccttcccccagatggttacaaagtcttgttagttacactgcagaactgtctgtccctttctttgccacactgttgtgccagttaaagttcccaagcatctttaaacttggtctgttcaaagcgagttaccctgtttcactgccccatctgtgttttcttctgtcctgtccatcttacctactgctttttatcctgggtacccgtgctcaaggacctttggctgtttaaggacacattcaaatgcctaaccatagcgttcagtgttctcaacactgggccttagtttaaattttggttccagcttctggcccgtttgccctgtggtcccctgtgtattttagccgcatctctctgtgaagctcccagtgtgctttgcacagctccttgtctttgctcatgctgtgcccttacctggaatgcctttttcccattccttgttattaataaaatcttccaaggccctacttaaatgtcctctctgaatgaagccttccttgattctccccccaccctccaaatgacttgctgccgcttctgttcatagagcgcttcgtttatatccccagagcactcattactctctgacttgtctgtccccctgttagattcctggagggaaccgaacatgcctaaatcacctgtttctgaccagcactgtaggtattcagtgttcgaggtaaatgctaaagagaagtatagggggtcccatcatctgacgttcactggtttcagggacagaccatttagtgagactccacttaaaatgggaccaagttttatggagaataattggggcaggggtggtgggaagagagagtttttaatcatctaaaacacaaaaatcagtgttcaaccctatactgattgttaaaatgaacaaaaattgaaatgccaaaaatgcttgagttttctatcaattttatgataacttgctattttcttcatttcacattcaactctaactgcatggtcaaagcaagttttgcagaatatctgagggttccccccagtttttgcaagggcctttgaaccctctgctagatcattctcttctgtagagcctgtccatcttccctttatcagtagtaagctgcccagcctctgtcaactttgcaggtgattttgcttagttctgtctcatcacattcacttgctgaagtgcatagacttcctgcctcttgctggacctctacttttgcttgtgggcagcctcattgaaggcagttgctacggctgacctggaaagaccctgccatgaagataggtgcaggcagagaagtctggatgggaactaagtctgtaagtgctcattggttccttggggaatatttctgtgtcaggaagttgtatagggaacacatcataactgcaggaactgacagaacaagaacttcctgaccctgtattggaagttttctttttgctagtaggagcagccgccttcctgctttggcctaaagggagagctgtagaagaagctcaatatgttggggcttctgagcccttgaaagcctccttactcaccagtcttgttgaggagcatggccatggactactcatgttttctagggttgaacaaggttaagattttcattcccacccatagcactgtacctctggagcccaaggggcaggcagtcttgtcacttgcccagtcctgttacctaagtgtcataagcactcataagaggacagcttgttctgggagttggctgctagccactggcttcgtctttctgctggcaagaagaagcggctatggaatgaccatcccagcagcgagttggcctcttcgtggggcgctttgctgagtaagtgacccttaagggctgctactcttgactaaactctgctagcttgtgtaggaggaggcagttctaacagcctcaaaagaatgagaacaagctccaggcaggaaaccggaagccgctggaggagagcatgtaccctgctcgtaggaaagttgaatctggctgaaggtctgatgtagtgatcaggagtgtgggtccagaattgcccaatttttggagttttcaagagaagccagaaatctgttgtatatttttgtgaaatctccagacatttcaggatgaaaggtgttttaaaagtttccatcttaaagacagctgctgcccaggtcctgctttagggccgactgttgtagagccactagaagtccaaacctaaataaacatcttcaggtcccttctccccagcccccatttttcagatactgaggcccacagaactgaagtaaaatgtcttaagtccccagctagaccagaacgctggtctctaaattcctagtctgtttggccaacttatctatttttagactctatctttccagatttttctttctgcaaaggctgcaagtttttttccacttggtttagctgtttgctgagcctccctgcccccctccccctgcgcccccgtccctgaggtgtctgctgctccaggatggccatgtccccttgtgcaggtgcacctcgcctcccctgacctcacccagtcccgcttcacttggctcactcccggcagtctcatctcactccaggcatcccttgctgcccccttctcttacctgccatcctccttaaactcgcctcaatgtcttctgaccccatgtgatcagtggtatctcaagtgttaatcacaaaaggttataaatgttttaagagaacttcataaaagtgtgtgaatatagagtgcggaggactcgaggagggaggccggggaagggagcagggtcgtggtatagaatctagccctaaaatccaggcactccccttcccttgtgagagccacaggggaacgtgttgcctctttgttcgtaggcctcttgactctccctactgcccaagaccttagtcaatgctgggcttgcataaggttacaaaggaatttcttgggtatttatttattttatatttttttttgttgagatggagtttcgctctttggcccaggctgaagtaaagtggcatgatctcggctcactgcaacttctgccccccgggttcaagcgattctcgtgcttcagcctcctgagtagctgggattataggtgcccaccaccacgcctggctaattttttgtatttttagtagagacggggtttcaccatgctggccaggctggtctcgaactcctgatctcaggtgatccacccaccttggccaaatcctgactcacaagatgttaggattacaggcttgagccaccgcgcctggcctttcttggatatttattaaccatcagacttttaaaaaataatcccagggaagatacaattctgccctcagagacctttactataccattgccaaacccagtttcccacttgctcctacggagttcccagctcccacacgaagccctatgtgcactggtcagaagaccctgtcgtgttgtccccagagggcatggcgccagtcacttgagtttactgtagatcccgcagccaccagccctgatgagggactgctgagtcagagaagttagaacaggagggccctttgaataatcactgtaatccctctcaacttagagcggactgagaaattgcccatgggctccataaaaaatgtggtcagtgaacctatcgaaggacatgaagactaccacatgatggtaagtagcgctggctgagttcagcccctctcactagactcccacttcacctggcagggaacagttttaactgagcttgtttaacggaagaaaactcagtctccagaagatgcacttttttaagaccctgatgttttcttcatctacttagaacttaatccatggcctctattcctagttctgtttattttacacccccccacacacaccttccatcagtttaaaggggatatgttttctcttacctcttttagaaaagtctctcttgcctccctcttgtcgtgtgttgtttctagaccaggaaaataaatataaagaggaggaatggcttgtggattttcattataagttttatcttgcttataaaacaaaacttgcccttagccttggtgttggtgagggcaccagacagcctcttttctgtaataacgatgccgctcttccaggcccagtggctgagggcctcgtggggaagacgggctctgtggagcgtctattctgcatagaacccactctgcagagagcaggctactctttcccaagacagaatgtttggaggtgttgtgcaggtctgcagaacaaagcaaaaaattcattcatctggtaaaatgagcagcttaggcagtttccaaaattttcccagtgctctttggaggagccacattgaccacgaagttgattctgcagttgcccatcaggggcctggcctgagcagctgtaatgtgagggcggggcctccggccattgttcatccaaggaggcaggcctttcagtgtccatcccacagtgatgaagccacatcagcccatcccagggaaaagaaggaactagtggtttgaccagtagattgggataacaagtcccaggcagagagatgtgttggaagatcctcttgctatagaaaaaaatcaaaggggcttaaaatatggtgggcaagggaggcagccctgttggcatcctgcctagtgtggctgtagcaaggctgtagctgggagtgcagtccctaggctgtggggctcttggggttttgtcttctggaagtgatgatgccccttggcagcccttccacccctactctctctgtagtctttttttttttttttttttttgagacggaatctcgctctgtcaccaggctgaagtgcagtggcgctatctcggctcactgcagcctctgcctcccaggttcaggcgattctcctgcctctgcctcctgagtagcagggattacaggctcacgccaccacacccagctaatttttgtatttttagtagagatggggtttcaccatgttggccaagatggtctcaatctcttgacctggcgatccgcccacctcagcctcccaaagtgctggggttacaggcgtgagcctccatgcccagccctctctctgtagtctttattacaaggattgcagacaaattggtttggcctggtcagttatttttttctgttttaacagttgggccaggcgtggtggctcatgcctgtaatcccagcactttgggaggctgaggtgggcggatcatgaggtcaggagtttgagaccagcctgaccaacatggtgaagccccgtctctactaaaattacaaagattagctgggcgtggtggcgggcacctgtaatcccagctactcaggaggctgaggcaggagaactgcttgaattgcttgaacctgggaggcgaaggttgtagtgagcagagatcgtgccactacactccagcctaggtgacagagactctgtctcaaaaaacaaacaaaaaaacaaaacaaaaaaaaacagttggacttgaatgtttttaactgggccccatcactcctttttgaatagtttgtgttgccagtcacaccctgtagggtttgtagcctgacttttcaagcagtgtggtggtagggagtccaaggaagttgagtggactgttttggacgtctttggaggaattggtgtggatgggtaatgacttagtatttcattgaaatgttcatttctctcgagttatttctggcagaggatagctctagtagtccccttctcttttccaaacacctttacctttgtcctaatgaaagtacttagttatctctttgggcagatgctatttctctagctaaattaacatgtcatcattcacagttggaaaactgtggctgtgctttttcatttttagagaaatgtttttaaaatacagaaaagaggctgggcgcagtggctcacacctgtaatcccagcactttgggaggccgaggtgggtgagtcacttgaggtcaggagtttaagaccagcctggccaacatggtgaaaccctgtctctactgaaaatacaaatatttagctgggcatggtggcgcgcacctgtaatcccagctacttgggaggctaagggaggagaatcgcttgaaagtgggaggcggaggttgcagtgagctgagattgcaccgctgcactccagcctgggcaacagagagagactccagctcagaaaaaataaaaataaaatacagaaaagaaagagaataactgtcacaaacccatatatccatcactgagaagtggcaattgtaaatattttgtaatttgctttaatttttttaaataaaagaaataaagtttattcacagcaatgatggccccactgtcttcccctcccccattaccatcgtcatgtgtcacgtgcgtccttcccatctatccattctttgatttacacgtgtatccacgaacaagatggagtgttgttttgtgcttccagttttcgtaaatggtattatgtattgttctacaacttgcttttctttggttcaacataagaatctgtcagtattaactgtagatccatatggacccagttgatacctctttaaaaagagctccagtattggtgtgactaagccttgtcactttgaattctgcattcccttactgatggatatgtaggttgccccaggtttttgtggtttcagacagtgctgcaatgaacattcatacctgttttcttgagcatgtgtgacaggttttctagggcagcgtttctccaactgtggtccctggatcagtagtgttgcatcacctgggagcttgctagtttctcaggccccaccccagacctccccaaattagaaacttcacagggttggagcctgctgatccatgttccagcaagccccccggatggctctgatgaccactcaggtttgagaactgctgctttagggttggctcagcttaaccctcagcctgcctgtttttgtttttggttgggagaatgctccccacgtgcaaagttttgtttggtttttcttccctttttaattaactcacatcccaaccctcacccatgtttgtcctgcctgcttggtctcccgacctctgaagtaccgcttggttttcctttttcccttccaggcgtttcagttgggccccacggaagcctcttactactgggtgtactgggttccaactcaatatgtggatgcaatcaaagacactgtgctggggaaatggcagtatttttgaaagcactttcacctctggcccaggagactgacccaaagtgaaggacattgccgggagaggcctgcagcatccctggatttcagagttctggaactttgttcataaaaaatctatattcaatctgaggtgatgtggtgactgaagccagaggtgatgtactttcaccattagcttaattttaacttaaaattaccagttccctttcttgcagtcagcttcataccatttttaaagtcaatacgatggaaatcaataaatctgaattccgaacatgttgtgtggaatactcttaagtgtgtttgagagtagatctgccaattatgttgacaagggaatgatcaaaagctttgttttttttaaaaaaaaaaaaagcagtttcaattgaaatattttcatacatctttggttgcaaacatttggactgcattgcaatgagttggggtgttttttttttccttttttgtataaaattgtatgcaaaatgggggtgggttagtaagccacatatttctgtccattgattcagatttaattctttccctttttcattctctcgcttcctcaatttgagtttttgttttaagaacccaaagatgtcagttcttcttttggtacctcatcaacgcttcctttcctgggctccctcccgccgtgctgctgctgcctgtgaacgcacggtgggagaggaagagctgctcagtcttgggcaaggagctctcacacttgctgtggtgttcgttgagcagcagagtatctcccagtgactcctgtttaaatgtcttgccctttgggcccccatctccaaggagttccattgctggttggatgattgtctgcacccctcactgagcttggcctagaggcccagcctggcatggttgtgcctgggctgtgccgctcaacagccccagctcccaagcagacaaagacctcttccaggaggagccaggtagaagatagttatacagccatatagctgcagatccagataaccttctttctttggaagttttcaagaaattcttaagcagtccaaggatgatttcaattatgcttctccattgggtccttctgctcatgcattcagttcaagtgtcctttatcccaggttcagagatgctgcctttctgaagaagacatctgaccctagcaggttggccagtgttattgaacaacaaaaatgggataaattgctttcatgattagctcaccttcttctggttttagcccttctgttctctgtacacgtgaacttctgtcatctccttctggcttggttgcctctgaaaggagggaaagtctcttggtaaatatctcttttgtgctgtttgctgtttctctgctgccgtctttgcagttctcctctcactggttgcaggctttcatagtaaggtttggcgagaaatgttccaaacatcacattttggattctaggctgtcacccctcattctgtgaaacgtattagcatgtgttcgcccaagatgactattccttgtgagccagttaatgatgatattctacgcccttcccttctaagctgtagttcaggaatccagcccacatagacagactcttgctttccatggtgtagtcaatgccaagtgatgcatctaggcaggaaaatctactctttgcttttttgggggcaattagtacatttgtgaagtgcagcatccaagaaacagcctgttttttcatcccttgagaaaggagcagtcattgcagcttttctgtccttgtcggcctgcagttcctggggaaaagagtacatctgagctacttgtccaagcctctgtctgcaggtgacaggttttgggggaaatgagatgcattaagtagaacatcatctcgggtcagacattgccccttttgtttgccaatgccccagtcctagagacttgtcctgacagtgccgcacacctacttttgatctctcagagcaggtggctccatccccagactagcctggctgctctccgaggcccctccacctgctccccttattgccccattcttgtggcttgccgggccacttggcctcccttcttgccggtgacagcgttccatcatctccccgctccccaagggccaactgcttctcactcaggctggtgtcatttcaggaggaccaaagcctgcgtgagcctttttattttcagtaaaatggtgcttttttccttacttcgagatactatatataaataataatgtaaatgacaccttttcgtacggagctgtttgagtattgctttacagagctcactaaatcagcttcaacaatcttgagctctgtggctcctcaccctgtctgcatggaagaccttgctggacgctctcgggagagcagacatagcaccagaagccactgggagaagtgttttcgatccgtgtctgggccacagtagtattcactgtttagtctttgagttccgtaagcagtctcttcatacatttcttacagtctggagtgtactgactaaatctgtgtaagcaaattgaaatactctttcttttaggtagcgtcacagtggttttttttttcctcaggataatttctatacaatttccttactgtcagagggaccagatctttccctcactgtggcaggggccgtgcaggtggataaaggaagagctggtttccggagagtgactgtaacagcgttgactcgaagctagagatggagggggtggccgtctcttagacattggacacctctcagagcctcctgagggcttctttgtcttctagaatctctaccggtggtcctcctgcaggttctggctcacagacatcatcatgcctttttttccctccctgaggcgccttggcagaagagcgtgaccctgtgagccaggccccccttagctctgcttcagatcacagaacacagacagactcgcgagttgctggacctctttggtattaagtgtttgaatccatggtgggccttttgcaagtagcgttagctctttttaaatgttgaactgagctaaggatgcactttcttgtggacatagaaggggcccacgtaaggccctgagtaggctccttagttgctgctttacctgatgagggccaaagagattaactctgcctcgttgccatgtctcagaaaagttgccatatttcacccagaaggggcttgttttcctcttactcttactttaaccatgtgcctggaggagccattctgggctcttgcacttgcccagcctttctttgccaggggcagagaagggaaagggggtagattgagtgtgccaagggccgtgcaagggcaggcttgctttccacccatctgctgagggagccctctcctctcgctccttgcctctgttcacacctgttgtcttggaagaggatggtccctttgtcttaaggctttgtgataaagtcatctccagttaggatctgcacctgtttccttcgtaatagtgcctggcggcctttctgaagttacaggtggttgggagccctctcgcatgcagaacatctggtagattgatctgccaggctgggtggttctactgctttctcaatttctaagaaccttttttttttcttaaagagttctgctgaattatttgacaatatttgtaagtaccatgtttccttgtggtgtatgctctgttctggtttctgttttcaaatcaaatgcctgtttgggaggagatgaacgtatttagtctattagatttgcactgctggattttttttttaaagtgtaaccttgaatagctgtcttattgtttatcctgtaagattagtcaatcgattaaagtttgataattaattgcg

SEQ ID NO: 9781 - DNA, 16851 bp, Homo sapiens
cggacccgcccccttcagcttgggaaagcgaaagcgtggcaggggccggacctgggagcggaggaggcgggtctccatagaaacctccacctgtttccggccgggctgtgagagattaggggctgctgcgggggccaatctcagccagctcgcctcttcccagcggcctctgcgggagcggtgggtgttgtacacaatcatcatggcggcggccggggccccggatggtgagtgcggcgggggtggcgggcgccgggccggggctgaggttgcggtcgctcctctgggggatgcggcccggcccgggagggagaaccgcggctcgggaacggaggtccggcggcgcccggacagcgtccgttcccaagcccagcccgcggcgagcgcccaccccctaacccccttgcaggcatggaggaacctggcatggacacggaggccgagactgtggctactgaggctcccgcgcggcccgtcaactgcctggaggctgaagccgcggcgggggcggcggccgaggactccggcgccgcacgaggcagcctgcagccggccccggcccagccccctggggaccccgcagcccaggcctcggtcagcaacggcgaagacgcgggcggcggcgcgggcagggagctggtggacttgaagatcatctggaataagaccaagcatgacgtgaagttccccctggacagcacaggctccgagctgaaacagaagatccactcgattacaggtaattcctgtggcgctgacagccagtcttccccaccccgcctcctgatggcccttgcaccctactaggcacctggtggctttccttgcatcaggtccccccatccttacagcagtcttctgaaggatacttggatgcccattactcagctggggaaagagactcaagtttatagagctagtaagttgcagagctgggattaaagccgaagtctgacgtttaggccccagtttctcattgatgttgctctaacatctctaattaaaaaatcacctaaggcgcttgttttacagcttctgggccctttcccaggagattctgattcagtgggtctgggatgtagccaggaatttatttttagcaaatatcttaggtaattcttctaagtgaagtttaggaaacgctgctattgactttgatgctggttcttcacagtcgattctgtttcttaattttaccttgttcatagctctttgccatctgagatttcttttctttttcctattttttttttttttgagacggagtcttgctctgttgcccaggctggagtgtactggcaccatcttggctcactgcagcctccgcctcccaggttcaagcgattctcctgcctcagcctcccgagtagctgggattacaggtgcccgctaccccgccgggctagttttttttattttatccacccacctcggcctcccgaagtgctgggattacaggcataagccatcactcctggccttgaacttttttttttttttaaagctttctacatgtagccttgtaatctccattaagaacaggagttttgtccctattggcttctgtagctctgatgcctgtggattctcacttaatatgtgaatgatttagatgactgaggaacaacttggaaagaatgagagctagtacttactgaacaattattcaatgctagccaccgtactaaatgccccgcattggtctcttaatccttgaaacaggtctgtacagaaggacttactctaataaatcttctacagttctagaaactgaggttcagaggttgtaaatctcccaagttcacaaagctaataggtggtggaggcagtattcactttttggtctgttaccaaagagctgtgtagtatccatacatttttctgtccttccttcctttcactgtccaccttctaccttttcccaaggtctcccgcctgccatgcagaaagtcatgtataagggactcgtccccgaggataaaacattgagagaaataaaagtgaccagtggggccaagatcatggtggttggctccaccatcaatgatgttttagcagtaaacacacccaaagatgctgcgcagcaggatgcaaaggccgaagagaacaagaaggagcctctctgcaggcagaaagtgagtccatcttgtgcttcttggtcttgagaaatttgaggctttgtcctcttgagccgtggctggttatattctccctagaataagctcctttttggacagggcccatgatggaaatttatggcagcagttgggtgccgcagagtggaggtgacaactacctgagatttgcaactttgtctcatctggcgggtcagtgtgtctcaagtctacctactttaggataagaccttggtaaagggaggcttcagaccatgtgttgaaaggaatcagacgtgggtttctctctcttatttagtgccagagaaaactaccagtactagaagtaagccctcattttgtacaagtgcttacatttggctttttggtttgtggctttccccaagtcaacaagcctggctaggcatggaaatcaacaactctcggaggttcccctaaagctgaccgtttcaggaagctaaatgaagctgagtaggaagacaactacactgatggatttgtttatttatttttttgtcctgatctgtgaaataggagcttggttttttacgttctctgttcttttggctgcaagagatcctgccttgtcttgtgctcatcatagccattaacattctttcacgtaacgaggaaaagtgagattattttactatggaaggaacaggttgtaagaatcattacttgttatctttttacctggcaaattatactgattgctgtgtagcctcctgatcgttcttcctagtgttccaaggaagacaggtattctcaactgtgtctgaagtagagtagataaacttcaatcaacatcatttagtgaccatagacactaagatatatgaccaacagtaagaaaaggacacagtttgtgttacagatccataatcccccatgtgtgcttccaaaaccccaaaggagtataaaaacgagaagtgtttttataaatttaacagcaaaacctgaccagaattagtgtgaattttcctctttggtgacaaggtactgccccagaccccacagagaagattgttatgtatttgaaagcaatattatctttataaaaattccaaaaccctgaaagttcaaaactctagggtttcagataaggggttataaacctatattaattatctaaaaggtgttgatttggagacttcacccccacatatggggtctcagtgtcttgaaaccgattgagtttcttctcatattcctgtttttctttgccacatgtatgaaatagtgaaatgtgagcacgtcagataggagtggtcgcaatggtcacacccttggagcataacatgcctcctaaatacaggtttttagttactaatggtagcttaacaggcttagaactgttctccacagtacaggaaatcttgttcaaaaggtacttgaaaggtgtgactcgaattgtacttccagcccatgctgctgtgtttcattgaggccaattatgatgcatcacatgacctaatgagagggatatagtcccttgcctttttaccagcttattaaggggtctgggggtgatgtctggagtgactttttgctagcagtctggcagtgctgagtttattcctcccagagggattccaccatgccagtgaggatttgggctggcttgtggctgcctagtgcttacatttgattaaattgttaccttctatccattcattgtcccctagttccagccttccaagcagtggctatgcctataaggccacagatggagaagaaagaagactcaggcatttgggccaggcaggagaactgtttaaggggccctgaacttagaatccttaaagagctgcctcagagttcttggggcaggtggtaggggtggagtttagaggcttcttaatgtcaggttatagagtaataagcatttctttctgaaaggtggctcttccaggttcctgtttagctggagttaagggtagggcagtggggaaaacttcggcgatgggctgggtctccatttgttgaagaactgctcctcctaggcagttagacggattaccagcatcttatagtgttctctggaagtttaagttgaaaaaggtgggtgccattttttgtctgctaggagagcaacaccctttgtcgccctctttagtttgatggtttaatcatttcagtggtgatttttttttttttttttgaggggaggagggcaatctggaaatcccgtttgctgtagaactttgatatctaatatggtagctatccacatgtggctggttaaaatgaaattaagaattcagttcctcagtcatagtagctgcatttcaagtgtgtaatagtcacagcagtaggtagtggctagcacaggtacgaacatattcgccctcccagaaagttctgctggacagcactgtgctatagtttcaaaggatccatagtctgtcgtcattaaaagcttttgagccaaaacactaaggctttcttcatcctctctttcaagggaatagtaacacgacgaaatgtagtcagctgtttcatttcattctctcttctgacttatagcaacacaggaaagtgttggataaaggaaaacctgaagatgtgatgccatctgttaagggggcccaggtaaggcggatttctttgtgagcattctgaaaatgaggcagccccaccgtctgacttgaggttcctccaatcctgtcccttctcttttttccctgtttttttttttttgagacagtcttgctctgtcacccaggctggggtgtgccaccacacctggctaatttttgtatttttagtagagacggggttttaccatgttgcccaggctagtctccaactcctgacctcaggtgatctgcccgctttggcctcccagtgtgctgggattacaggcgtgagccaccgcgcttggcccccttctctttttttctgactgtccctccatctcttaccattctctcgtgccttcaggagcgcctgccaacggtaccgctgtccggcatgtacaataaatctggaggaaaagtgagactcacctttaaactagaacaagaccagctgtggattggcactaaaggtatgttcttcctcgcctccttgctggcccactgcctgcctctggcacccagcagcactcacattttagagtgcgatttcacccctccttctgaaacctctctctccactgtgctttgcttgcttctggcttttaaatttgcttttagatgctcgccttttgtttggaccgttttccctcattgttttcagtctgatcttagggctgatccaccaaacagtggctcttcagttgcacacagatttgggggtcccaaacacgtggcccaagggccaaatctggtccacagaaaaatgttttgtgggatgacacacaatctgtaaaaattgggagatttcactaatctgattttttttttttttttggcttctcttgaaaactcaaatgatctggccctttggggcctgcattctcacatggcatcgatccactagagccgagtggtggtttccagtgggccatactacagtcttcatggtcccatttatcttagaagtagccagctttgttcatttgtcacctgcctggcccctgtaggtcagagtttgaccctatagtaggtgaagttttcctaaccgctgccgaggaatctgcctctccctccccgcctggttgccctctgcctgccccacccccgcctgtgcacggtgtctggatcagccttgctgtttgctgggaagtgtctctgactgtcctccctctcccttcccccagatggttacaaagtcttgttagttacactgcagaactgtctgtccctttctttgccacactgttgtgccagttaaagttcccaagcatctttaaacttggtctgttcaaagcgagttaccctgtttcactgccccatctgtgttttcttctgtcctgtccatcttacctactgctttttatcctgggtacccgtgctcaaggacctttggctgtttaaggacacattcaaatgcctaaccatagcgttcagtgttctcaacactgggccttagtttaaattttggttccagcttctggcccgtttgccctgtggtcccctgtgtattttagccgcatctctctgtgaagctcccagtgtgctttgcacagctccttgtctttgctcatgctgtgcccttacctggaatgcctttttcccattccttgttattaataaaatcttccaaggccctacttaaatgtcctctctgaatgaagccttccttgattctccccccaccctccaaatgacttgctgccgcttctgttcatagagcgcttcgtttatatccccagagcactcattactctctgacttgtctgtccccctgttagattcctggagggaaccgaacatgcctaaatcacctgtttctgaccagcactgtaggtattcagtgttcgaggtaaatgctaaagagaagtatagggggtcccatcatctgacgttcactggtttcagggacagaccatttagtgagactccacttaaaatgggaccaagttttatggagaataattggggcaggggtggtgggaagagagagtttttaatcatctaaaacacaaaaatcagtgttcaaccctatactgattgttaaaatgaacaaaaattgaaatgccaaaaatgcttgagttttctatcaattttatgataacttgctattttcttcatttcacattcaactctaactgcatggtcaaagcaagttttgcagaatatctgagggttccccccagtttttgcaagggcctttgaaccctctgctagatcattctcttctgtagagcctgtccatcttccctttatcagtagtaagctgcccagcctctgtcaactttgcaggtgattttgcttagttctgtctcatcacattcacttgctgaagtgcatagacttcctgcctcttgctggacctctacttttgcttgtgggcagcctcattgaaggcagttgctacggctgacctggaaagaccctgccatgaagataggtgcaggcagagaagtctggatgggaactaagtctgtaagtgctcattggttccttggggaatatttctgtgtcaggaagttgtatagggaacacatcataactgcaggaactgacagaacaagaacttcctgaccctgtattggaagttttctttttgctagtaggagcagccgccttcctgctttggcctaaagggagagctgtagaagaagctcaatatgttggggcttctgagcccttgaaagcctccttactcaccagtcttgttgaggagcatggccatggactactcatgttttctagggttgaacaaggttaagattttcattcccacccatagcactgtacctctggagcccaaggggcaggcagtcttgtcacttgcccagtcctgttacctaagtgtcataagcactcataagaggacagcttgttctgggagttggctgctagccactggcttcgtctttctgctggcaagaagaagcggctatggaatgaccatcccagcagcgagttggcctcttcgtggggcgctttgctgagtaagtgacccttaagggctgctactcttgactaaactctgctagcttgtgtaggaggaggcagttctaacagcctcaaaagaatgagaacaagctccaggcaggaaaccggaagccgctggaggagagcatgtaccctgctcgtaggaaagttgaatctggctgaaggtctgatgtagtgatcaggagtgtgggtccagaattgcccaatttttggagttttcaagagaagccagaaatctgttgtatatttttgtgaaatctccagacatttcaggatgaaaggtgttttaaaagtttccatcttaaagacagctgctgcccaggtcctgctttagggccgactgttgtagagccactagaagtccaaacctaaataaacatcttcaggtcccttctccccagcccccatttttcagatactgaggcccacagaactgaagtaaaatgtcttaagtccccagctagaccagaacgctggtctctaaattcctagtctgtttggccaacttatctatttttagactctatctttccagatttttctttctgcaaaggctgcaagtttttttccacttggtttagctgtttgctgagcctccccgcccccctccccctgcgcccccgtccctgaggtgtctgctgctccaggatggccatgtccccttgtgcaggtgcacctcgcctcccctgacctcaccaagtcccgcttcacttggctcactcccggcagtctcatctcactccaggcatcccttgctgcccccttctcttacctgccatcctccttaaactcgcctcaatgtcttctgaccccatgtgatcagtggtatctcaagtgttaatcacaaaaggttataaatgttttaagagaacttcataaaagtgtgtgaatatagagtgcggaggactcgaggagggaggccggggaagggagcagggtcgtggtatagaatctagccctaaaatccaggcactccccttcccttgtgagagccacaggggaacgtgttgcctctttgttcgtaggcctcttgactctccctactgcccaagaccttagtcaatgctgggcttgcataaggttacaaaggaatttcttgggtatttatttattttatatttttttttgttgagatggagtttcgctctttggcccaggctgaagtaaagtggcatgatctcggctcactgcaacttctgccccccgggttcaagcgattctcgtgcttcagcctcctgagtagctgggattataggtgcccaccaccacgcctggctaattttttgtatttttagtagagacggggtttcaccatgctggccaggctggtctcgaactcctgatctcaggtgatccacccaccttggccaaatcctgactcacaagatgttaggattacaggcttgagccaccgcgcctggcctttcttggatatttattaaccatcagacttttaaaaaataatcccagggaagatacaattctgccctcagagacctttactataccattgccaaacccagtttcccacttgctcctacggagttcccagctcccacacgaagccctatgtgcactggtcagaagaccctgtcgtgttgtccccagagggcatggcgccagtcacttgagtttactgtagatcccgcagccaccagccctgatgagggactgctgagtcagagaagttagaacaggagggccctttgaataatcactgtaatccctctcaacttagagcggactgagaaattgcccatgggctccataaaaaatgtggtcagtgaacctatcgaaggacatgaagactaccacatgatggtaagtagcgctggctgagttcagcccctctcactagactcccacttcacctggcagggaacagttttaactgagcttgtttaacggaagaaaactcagtctccagaagatgcacttttttaagaccctgatgttttcttcatctacttagaacttaatccatggcctctattcctagttctgtttattttacacccccccacacacaccttccatcagtttaaaggggatatgttttctcttacctcttttagaaaagtctctcttgcctccctcttgtcgtgtgttgtttctagaccaggaaaataaatataaagaggaggaatggcttgtggattttcattataagttttatcttgcttataaaacaaaacttgcccttagccttggtgttggtgagggcaccagacagcctcttttctgtaataacgatgccgctcttccaggcccagtggctgagggcctcgtggggaagacgggctctgtggagcgtctattctgcatagaacccactctgcagagagcaggctactctttcccaagacagaatgtttggaggtgttgtgcaggtctgcagaacaaagcaaaaaattcattcatctggtaaaatgagcagcttaggcagtttccaaaattttcccagtgctctttggaggagccacattgaccacgaagttgattctgcagttgcccatcaggggcctggcctgagcagctgtaatgtgagggcggggcctccggccattgttcatccaaggaggcaggcctttcagtgtccatcccacagtgatgaagccacatcagcccatcccagggaaaagaaggaactagtggtttgaccagtagattgggataacaagtcccaggcagagagatgtgttggaagatcctcttgctatagaaaaaaatcaaaggggcttaaaatatggtgggcaagggaggcagccctgttggcatcctgcctagtgtggctgtagcaaggctgtagctgggagtgcagtccctaggctgtggggctcttggggttttgtcttctggaagtgatgatgccccttggcagcccttccacccctactctctctgtagtcttttttttttttttttttttttgagacggaatctcgctctgtcaccaggctgaagtgcagtggcgctatctcggctcactgcagcctctgcctcccaggttcaggcgattctcctgcctctgcctcctgagtagcagggattacaggctcacgccaccacacccagctaatttttgtatttttagtagagatggggtttcaccatgttggccaagatggtctcaatctcttgacctggcgatccgcccacctcagcctcccaaagtgctggggttacaggcgtgagcctccatgcccagccctctctctgtagtctttattacaaggattgcagacaattggtttggcctggtcagttatttttttctgttttaacagttgggccaggcgtggtggctcatgcctgtaatcccagcactttgggaggctgaggtgggcggatcatgaggtcaggagtttgagaccagcctgaccaacatggtgaagccccgtctctactaaaattacaaagattagctgggcgtggtggcgggcacctgtaatcccagctactcaggaggctgaggcaggagaactgcttgaattgcttgaacctgggaggcgaaggttgtagtgagcagagatcgtgccactacactccagcctaggtgacagagactctgtctcaaaaaacaaacaaaaaaacaaaacaaaaaaaaacagttggacttgaatgtttttaactgggccccatcactcctttttgaatagtttgtgttgccagtcacaccctgtagggtttgtagcctgacttttcaagcagtgtggtggtagggagtccaaggaagttgagtggactgttttggacgtctttggaggaattggtgtggatgggtaatgacttagtatttcattgaaatgttcatttctctcgagttatttctggcagaggatagctctagtagtccccttctcttttccaaacacctttacctttgtcctaatgaaagtacttagttatctctttgggcagatgctatttctctagctaaattaacatgtcatcattcacagttggaaaactgtggctgtgctttttcatttttagagaaatgtttttaaaatacagaaaagaggctgggcgcagtggctcacacctgtaatcccagcactttgggaggccgaggtgggtgagtcacttgaggtcaggagtttaagaccagcctggccaacatggtgaaaccctgtctctactgaaaatacaaatatttagctgggcatggtggcgcgcacctgtaatcccagctacttgggaggctaagggaggagaatcgcttgaaagtgggaggcggaggttgcagtgagctgagattgcaccgctgcactccagcctgggcaacagagagagactccagctcagaaaaaataaaaataaaatacagaaaagaaagagaataactgtcacaaacccatatatccatcactgagaagtggcaattgtaaatattttgtaatttgctttaatttttttaaataaaagaaataaagtttattcacagcaatgatggccccactgtcttcccctccccccattaccatcgtcatgtgtcacgtgcgtccttcccatctatccattctttgatttacacgtgtatccacgaacaagatggagtgttgttttgtgcttccagttttcgtaaatggtattatgtattgttctacaacttgcttttctttggttcaacataagaatctgtcagtattaactgtagatccatatggacccagttgatacctctttaaaaagagctccagtattggtgtgactaagccttgtcactttgaattctgcattcccttactgatggatatgtaggttgccccaggtttttgtggtttcagacagtgctgcaatgaacattcatacctgttttcttgagcatgtgtgacaggttttctagggcagcgtttctccaactgtggtccctggatcagtagtgttgcatcacctgggagcttgctagtttctcaggccccaccccagacctccccaaattagaaacttcacagggttggagcctgctgatccatgttccagcaagccccccggatggctctgatgaccactcaggtttgagaactgctgctttagggttggctcagcttaaccctcagcctgcctgtttttgtttttggttgggagaatgctccccacgtgcaaggttttgtttggtttttcttccctttttaattaactcacatcccaaccctcacccatgtttgtcctgcctgcttggtctcccgacctctgaagtaccgcttggttttcctttttcccttccaggcgtttcagttgggccccacggaagcctcttactactgggtgtactgggttccaactcaatatgtggatgcaatcaaagacactgtgctggggaaatggcagtatttttgaaagcactttcacctctggcccaggagactgacccaaagtgaaggacattgccgggagaggcctgcagcatccctggatttcagagttctggaactttgttcataaaaaatctatattcaatctgaggtgatgtggtgactgaagccagaggtgatgtactttcaccattagcttaattttaacttaaaattaccagttccctttcttgcagtcagcttcataccatttttaaagtcaatacaatggaaatcaataaatctgaattccgaacatgttgtgtggaatactcttaagtgtgtttgagagtagatctgccaattatgttgacaagggaatgatcaaaagctttgtttttttaaaaaaaaaaaaagcagtttcaattgaaatattttcatacatctttggttgcaaacatttggactgcattgcaatgagttggggtgttttttttttccttttttgtataaaattgtatgcaaaatgggggtgggttagtaagccacatatttctgtccattgattcagatttaattctttccctttttcattctctcgcttcctcaatttgagtttttgttttaagaacccaaagatgtcagttcttcttttggtacctcatcaacgcttcctttcctgggctccctcccgccgtgctgctgctgcctgtgaacgcacggtgggagaggaagagctgctcagtcttgggcaaggagctctcacacttgctgtggtgttcgttgagcagcagagtatctcccagtgactcctgtttaaatgtcttgccctttgggcccccatctccaaggagttccattgctggttggatgattgtctgcacccctcactgagcttggcctagaggcccagcctggcatggttgtgcctgggctgtgccgctcaacagccccagctcccaagcagacaaagacctcttccaggaggagccaggtagaagatagttatacagccatatagctgcagatccagataaccttctttctttggaagttttcaagaaattcttaagcagtccaaggatgatttcaattatgcttctccattgggtccttctgctcatgcattcagttcaagtgtcctttatcccaggttcagagatgctgcctttctgaagaagacatctgaccctagcaggttggccaatgttattgaacaacaaaaatgggataaattgctttcacgattagctcaccttcttctggttttagcccttctgttctctgtacacgtgaacttctgtcatctccttctggcttggttgcctctgaaaggagggaaagtctcttggtaaattatctcttttgtgctgtttgctgtttctctgctgccgtctttgcagttctcctctcactggttgcaggctttcatagtaaggtttggcgagaaatgttccaaacatcacattttggattctaggctgtcacccctcattctgtgaaacgtattagcatgtgttcgcccaagatgactattccttgtgagccagttaatgatgatattctacgcccttcccttctaagctgtagttcaggaatccagcccacatagacagactcttgctttccatggtgtagtcaatgccaagtgatgcatctaggcaggaaaatctactctttgcttttttgggggcaattagtacatttgtgaagtgcagcatccaagaaacagcctgttttttcatcccttgagaaaggagcagtcattgcagcttttctgtccttgtcggcctgcagttcctggggaaaagagtacatctgagctacttgtccaagcctctgtctgcaggtgacaggttttgggggaaatgagatgcattaagtagaacatcatctcgggtcagacattgccccttttgtttgccaatgccccagtcctagagacttgtcctgacagtgccgcacacctacttttgatctctcagagcaggtggctccatccccagactagcctggctgctctccgaggcccctccacctgctccccttattgccccattcttgtggcttgccgggccacttggcctcccttcttgccggtgacagcgttccatcatctccccgctccccaagggccaactgcttctcactcaggctggtgtcatttcaggaggaccaaagcctgcgtgagcctttttattttcagtaaaatggtgcttttttccttacttcgagatactatatataaataataatgtaaatgacaccttttcgtacggagctgtttgagtattgctttacagagctcactaaatcagcttcaacaatcttgagctctgtggctcctcaccctgtctgcatggaagaccttgctggacgctctcgggagagcagacatagcaccagaagccactgggagaagtgttttcgatccgtgtctgggccacagtagtattcactgtttagtctttgagttccgtaagcagtctcttcatacatttcttacagtctggagtgtactgactaaatctgtgtaagcaaattgaaatactctttcttttaggtagcgtcacagtggttttttttttcctcaggataatttctatacaatttccttactgtcagagggaccagatctttccctcactgtggcaggggccgtgcaggtggataaaggaagagctggtttccggagagtgactgtaacagcgttgactcgaagctagagatggagggggtggccgtctcttagacattggacacctctcagagcctcctgagggcttctttgtcttctagaatctctaccggtggtcctcctgcaggttctggctcacagacatcatcatgcctttttttccctccctgaggcgccttggcagaagagcgtgaccctgtgagccaggccccccttagctctgcttcagatcacagaacacagacagactcgcgagttgctggacctctttggtattaagtgtttgaatccatggtgggccttttgcaagtagcgttagctctttttaaatgttgaactgagctaaggatgcactttcttgtggacatagaaggggcccacgtaaggccctgagtaggctccttagttgctgctttacctgatgagggccaaagagattaactctgcctcgttgccatgtctcagaaaagttgccatatttcacccagaaggggctcgttttcctcttactcttactttaaccatgtgcctggaggagccattctgggctcttgcacttgcccagcctttctttgccaggggcagagaagggaaagggggtagattgagtgtgccaagggccgtgcaagggcaggcttgctttccacccatctgctgagggagccctctcctctcgctccttgcctctgttcacacctgttgtcttggaagaggatggtccctttgtcttaaggctttgtgataaagtcatctccagttaggatctgcacctgtttccttcgtaatagtgcctggcggcctttctgaagttacaggtggttgggagccctctcgcatgcagaacatctggtagattgatctgccaggctgggtggttctactgctttctcaatttctaagaaccttttttttttcttaaagagttctgctgaattatttgacaatatttgtaagtaccatgtttccttgtggtgtatgctctgttctggtttctgttttcaaatcaaatgcctgtttgggaggagatgaacgtatttagtctattagatttgcactgctggattttttttttaaagtgtaaccttgaatagctgtcttattgtttatcctgtaagattagtcaatcgattaaagtttgataattaattgcg

SEQ ID NO: 9782 - DNA, 16853 bp, Homo sapiens
cggacccgcccccttcagcttgggaaagcgaaagcgtggcaggggccggacctgggagcggaggaggcgggtctccatagaaacctccacctgtttccggccgggctgtgagagattaggggctgctgcgggggccaatctcagccagctcgcctcttcccagcggcctctgcgggagcggtgggtgttgtacacaatcatcatggcggcggccggggccccggatggtgagtgcggcgggggtggcgggcgccgggccggggctgaggttgcggtcgctcctctgggggatgcggcccggcccgggagggagaaccgcggctcgggaacggaggtccggcggcgcccggacagcgtccgttcccaagcccagcccgcggcgagcgcccaccccctaacccccttgcaggcatggaggaacctggcatggacacggaggccgagactgtggctactgaggctcccgcgcggcccgtcaactgcctggaggctgaagccgcggcgggggcggcggccgaggactccggcgccgcacgaggcagcctgcagccggccccggcccagccccctggggaccccgcagcccaggcctcggtcagcaacggcgaagacgcgggcggcggcgcgggcagggagctggtggacttgaagatcatctggaataagaccaagcatgacgtgaagttccccctggacagcacaggctccgagctgaaacagaagatccactcgattacaggtaattcctgtggcgctgacagccagtcttccccaccccgcctcctgatggcccttgcaccctactaggcacctggtggctttccttgcatcaggtccccccatccttacagcagtcttctgaaggatacttggatgcccattactcagctggggaaagagactcaagtttatagagctagtaagttgcagagctgggattaaagccgaagtctgacgtttaggccccagtttctcattgatgttgctctaacatctctaattaaaaaatcacctaaggcgcttgttttacagcttctgggccctttcccaggagattctgattcagtgggtctgggatgtagccaggaatttatttttagcaaatatcttaggtaattcttctaagtgaagtttaggaaacgctgctattgactttgatgctggttcttcacagtcgattctgtttcttaattttaccttgttcatagctctttgccatctgagatttcttttctttttcctatttttttttttttttgagacggagtcttgctctgttgcccaggctggagtgtactggcaccatcttggctcactgcagcctccgcctcccaggttcaagcgattctcctgcctcagcctcccgagtagctgggattacaggtgcccgctaccccgccgggctagttttttttattttatccacccacctcggcctcccgaagtgctgggattacaggcataagccatcactcctggccttgaacttttttttttttttaaagctttctacatgtagccttgtaatctccattaagaacaggagttttgtccctattggcttctgtagctctgatgcctgtggattctcacttaatatgtgaatgatttagatgactgaggaacaacttggaaagaatgagagctagtacttactgaacaattattcaatgctagccaccgtactaaatgccccgcattggtctcttaatccttgaaacaggtctgtacagaaggacttactctaataaatcttctacagttctagaaactgaggttcagaggttgtaaatctcccaagttcacaaagctaataggtggtggaggcagtattcactttttggtctgttaccaaagagctgtgtagtatccatacatttttctgtccttccttcctttcactgtccaccttctaccttttcccaaggtctcccgcctgccatgcagaaagtcatgtataagggactcgtccccgaggataaaacattgagagaaataaaagtgaccagtggggccaagatcatggtggttggctccaccatcaatgatgttttagcagtaaacacacccaaagatgctgcgcagcaggatgcaaaggccgaagagaacaagaaggagcctctctgcaggcagaaagtgagtccatcttgtgcttcttggtcttgagaaatttgaggctttgtcctcttgagccgtggctggttatattctccctagaataagctcctttttggacagggcccatgatggaaatttatggcagcagttgggtgccgcagagtggaggtgacaactacctgagatttgcaactttgtctcatctggcgggtcagtgtgtctcaagtctacctactttaggataagaccttggtaaagggaggcttcagaccatgtgttgaaaggaatcagacgtgggtttctctctcttatttagtgccagagaaaactaccagtactagaagtaagccctcattttgtacaagtgcttacatttggctttttggtttgtggctttccccaagtcaacaagcctggctaggcatggaaatcaacaactctcggaggttcccctaaagctgaccgtttcaggaagctaaatgaagctgagtaggaagacaactacactgatggatttgtttatttatttttttgtcctgatctgtgaaataggagcttggttttttacgttctctgttcttttggctgcaagagatcctgccttgtcttgtgctcatcatagccattaacattctttcacgtaacgaggaaaagtgagattattttactatggaaggaacaggttgtaagaatcattacttgttatctttttacctggcaaattatactgattgctgtgtagcctcctgatcgttcttcctagtgttccaaggaagacaggtattctcaactgtgtctgaagtagagtagataaacttcaatcaacatcatttagtgaccatagacactaagatatatgaccaacagtaagaaaaggacacagtttgtgttacagatccataatcccccatgtgtgcttccaaaaccccaaaggagtataaaaacgagaagtgtttttataaatttaacagcaaaacctgaccagaattagtgtgaattttcctctttggtgacaaggtactgccccagaccccacagagaagattgttatgtatttgaaagcaatattatctttataaaaattccaaaaccctgaaagttcaaaactctagggtttcagataaggggttataaacctatattaattatctaaaaggtgttgatttggagacttcacccccacatatggggtctcagtgtcttgaaaccgattgagtttcttctcatattcctgtttttctttgccacatgtatgaaatagtgaaatgtgagcacgtcagataggagtggtcgcaatggtcacacccttggagcataacatgcctcctaaatacaggtttttagttactaatggtagcttaacaggcttagaactgttctccacagtacaggaaatcttgttcaaaaggtacttgaaaggtgtgactcgaattgtacttccagcccatgctgctgtgtttcattgaggccaattatgatgcatcacatgacctaatgagagggatatagtcccttgcctttttaccagcttattaaggggtctgggggtgatgtctggagtgactttttgctagcagtctggcagtgctgagtttattcctcccagagggattccaccatgccagtgaggatttgggctggcttgtggctgcctagtgcttacatttgattaaattgttaccttctatccattcattgtcccctagttccagccttccaagcagtggctatgcctataaggccacagatggagaagaaagaagactcaggcatttgggccaggcaggagaactgtttaaggggccctgaacttagaatccttaaagagctgcctcagagttcttggggcaggtggtaggggtggagtttagaggcttcttaatgtcaggttatagagtaataagcatttctttctgaaaggtggctcttccaggttcctgtttagctggagttaagggtagggcagtggggaaaacttcggcgatgggctgggtctccatttgttgaagaactgctcctcctaggcagttagacggattaccagcatcttatagtgttctctggaagtttaagttgaaaaaggtgggtgccattttttgtctgctaggagagcaacaccctttgtcgccctctttagtttgatggtttaatcatttcagtggtgatttttttttttttttttgaggggaggagggcaatctggaaatcccgtttgctgtagaactttgatatctaatatggtagctatccacatgtggctggttaaaatgaaattaagaattcagttcctcagtcatagtagctgcatttcaagtgtgtaatagtcacagcagtaggtagtggctagcacaggtacgaacatattcgccctcccagaaagttctgctggacagcactgtgctatagtttcaaaggatccatagtctgtcgtcattaaaagcttttgagccaaaacactaaggctttcttcatcctctctttcaagggaatagtaacacgacgaaatgtagtcagctgtttcatttcattctctcttctgacttatagcaacacaggaaagtgttggataaaggaaaacctgaagatgtgatgccatctgttaagggggcccaggtaaggcggatttctttgtgagcattctgaaaatgaggcagccccaccgtctgacttgaggttcctccaatcctgtcccttctcttttttccctgtttttttttttttgagacagtcttgctctgtcacccaggctggggtgtgccaccacacctggctaatttttgtatttttagtagagacggggttttaccatgttgcccaggctagtctccaactcctgacctcaggtgatctgcccgctttggcctcccagtgtgctgggattacaggcgtgagccaccgcgcttggcccccttctctttttttctgactgtccctccatctcttaccattctctcgtgccttcaggagcgcctgccaacggtaccgctgtccggcatgtacaataaatctggaggaaaagtgagactcacctttaaactagaacaagaccagctgtggattggcactaaaggtatgttcttcctcgcctccttgctggcccactgcctgcctctggcacccagcagcactcacattttagagtgcgatttcacccctccttctgaaacctctctctccactgtgctttgcttgcttctggcttttaaatttgcttttagatgctcgccttttgtttggaccgttttccctcattgttttcagtctgatcttagggctgatccaccaaacagtggctcttcagttgcacacagatttgggggtcccaaacacgtggcccaagggccaaatctggtccacagaaaaatgttttgtgggatgacacacaatctgtaaaaattgggagatttcactaatctgattttttttttttttttggcttctcttgaaaactcaaatgatctggccctttggggcctgcattctcacatggcatcgatccactagagccgagtggtggtttccagtgggccatactacagtcttcatggtcccatttatcttagaagtagccagctttgttcatttgtcacctgcctggcccctgtaggtcagagtttgaccctatagtaggtgaagttttcctaaccgctgccgaggaatctgcctctccctccccgcctggttgccctctgcctgccccacccccgcctgtgcacggtgtctggatcagccttgctgtttgctgggaagtgtctctgactgtcctccctctcccttcccccagatggttacaaagtcttgttagttacactgcagaactgtctgtccctttctttgccacactgttgtgccagttaaagttcccaagcatctttaaacttggtctgttcaaagcgagttaccctgtttcactgccccatctgtgttttcttctgtcctgtccatcttacctactgctttttatcctgggtacccgtgctcaaggacctttggctgtttaaggacacattcaaatgcctaaccatagcgttcagtgttctcaacactgggccttagtttaaattttggttccagcttctggcccgtttgccctgtggtcccctgtgtattttagccgcatctctctgtgaagctcccagtgtgctttgcacagctccttgtctttgctcatgctgtgcccttacctggaatgcctttttcccattccttgttattaataaaatcttccaaggccctacttaaatgtcctctctgaatgaagccttccttgattctccccccaccctccaaatgacttgctgccgcttctgttcatagagcgcttcgtttatatccccagagcactcattactctctgacttgtctgtccccctgttagattcctggagggaaccgaacatgcctaaatcacctgtttctgaccagcactgtaggtattcagtgttcgaggtaaatgctaaagagaagtatagggggtcccatcatctgacgttcactggtttcagggacagaccatttagtgagactccacttaaaatgggaccaagttttatggagaataattggggcaggggtggtgggaagagagagtttttaatcatctaaaacacaaaaatcagtgttcaaccctatactgattgttaaaatgaacaaaaattgaaatgccaaaaatgcttgagttttctatcaattttatgataacttgctattttcttcatttcacattcaactctaactgcatggtcaaagcaagttttgcagaatatctgagggttccccccagtttttgcaagggcctttgaaccctctgctagatcattctcttctgtagagcctgtccatcttccctttatcagtagtaagctgcccagcctctgtcaactttgcaggtgattttgcttagttctgtctcatcacattcacttgctgaagtgcatagacttcctgcctcttgctggacctctacttttgcttgtgggcagcctcattgaaggcagttgctacggctgacctggaaagaccctgccatgaagataggtgcaggcagagaagtctggatgggaactaagtctgtaagtgctcattggttccttggggaatatttctgtgtcaggaagttgtatagggaacacatcataactgcaggaactgacagaacaagaacttcctgaccctgtattggaagttttctttttgctagtaggagcagccgccttcctgctttggcctaaagggagagctgtagaagaagctcaatatgttggggcttctgagcccttgaaagcctccttactcaccagtcttgttgaggagcatggccatggactactcatgttttctagggttgaacaaggttaagattttcattcccacccatagcactgtacctctggagcccaaggggcaggcagtcttgtcacttgcccagtcctgttacctaagtgtcataagcactcataagaggacagcttgttctgggagttggctgctagccactggcttcgtctttctgctggcaagaagaagcggctatggaatgaccatcccagcagcgagttggcctcttcgtggggcgctttgctgagtaagtgacccttaagggctgctactcttgactaaactctgctagcttgtgtaggaggaggcagttctaacagcctcaaaagaatgagaacaagctccaggcaggaaaccggaagccgctggaggagagcatgtaccctgctcgtaggaaagttgaatctggctgaaggtctgatgtagtgatcaggagtgtgggtccagaattgcccaatttttggagttttcaagagaagccagaaatctgttgtatatttttgtgaaatctccagacatttcaggatgaaaggtgttttaaaagtttccatcttaaagacagctgctgcccaggtcctgctttagggccgactgttgtagagccactagaagtccaaacctaaataaacatcttcaggtcccttctccccagcccccatttttcagatactgaggcccacagaactgaagtaaaatgtcttaagtccccagctagaccagaacgctggtctctaaattcctagtctgtttggccaacttatctatttttagactctatctttccagatttttctttctgcaaaggctgcaagtttttttccacttggtttagctgtttgctgagcctccccgcccccctccccctgcgcccccgtccctgaggtgtctgctgctccaggatggccatgtccccttgtgcaggtgcacctcgcctcccctgacctcaccaagtcccgcttcacttggctcactcccggcagtctcatctcactccaggcatcccttgctgcccccttctcttacctgccatcctccttaaactcgcctcaatgtcttctgaccccatgtgatcagtggtatctcaagtgttaatcacaaaaggttataaatgttttaagagaacttcataaaagtgtgtgaatatagagtgcggaggactcgaggagggaggccggggaagggagcagggtcgtggtatagaatctagccctaaaatccaggcactccccttcccttgtgagagccacaggggaacgtgttgcctctttgttcgtaggcctcttgactctccctactgcccaagaccttagtcaatgctgggcttgcataaggttacaaaggaatttcttgggtatttatttattttatatttttttttgttgagatggagtttcgctctttggcccaggctgaagtaaagtggcatgatctcggctcactgcaacttctgccccccgggttcaagcgattctcgtgcttcagcctcctgagtagctgggattataggtgcccaccaccacgcctggctaattttttgtatttttagtagagacggggtttcaccatgctggccaggctggtctcgaactcctgatctcaggtgatccacccaccttggccaaatcctgactcacaagatgttaggattacaggcttgagccaccgcgcctggcctttcttggatatttattaaccatcagacttttaaaaaataatcccagggaagatacaattctgccctcagagacctttactataccattgccaaacccagtttcccacttgctcctacggagttcccagctcccacacgaagccctatgtgcactggtcagaagaccctgtcgtgttgtccccagagggcatggcgccagtcacttgagtttactgtagatcccgcagccaccagccctgatgagggactgctgagtcagagaagttagaacaggagggccctttgaataatcactgtaatccctctcaacttagagcggactgagaaattgcccatgggctccataaaaaatgtggtcagtgaacctatcgaaggacatgaagactaccacatgatggtaagtagcgctggctgagttcagcccctctcactagactcccacttcacctggcagggaacagttttaactgagcttgtttaacggaagaaaactcagtctccagaagatgcacttttttaagaccctgatgttttcttcatctacttagaacttaatccatggcctctattcctagttctgtttattttacacccccccacacacaccttccatcagtttaaaggggatatgttttctcttacctcttttagaaaagtctctcttgcctccctcttgtcgtgtgttgtttctagaccaggaaaataaatataaagaggaggaatggcttgtggattttcattataagttttatcttgcttataaaacaaaacttgcccttagccttggtgttggtgagggcaccagacagcctcttttctgtaataacgatgccgctcttccaggcccagtggctgagggcctcgtggggaagacgggctctgtggagcgtctattctgcatagaacccactctgcagagagcaggctactctttcccaagacagaatgtttggaggtgttgtgcaggtctgcagaacaaagcaaaaaattcattcatctggtaaaatgagcagcttaggcagtttccaaaattttcccagtgctctttggaggagccacattgaccacgaagttgattctgcagttgcccatcaggggcctggcctgagcagctgtaatgtgagggcggggcctccggccattgttcatccaaggaggcaggcctttcagtgtccatcccacagtgatgaagccacatcagcccatcccagggaaaagaaggaactagtggtttgaccagtagattgggataacaagtcccaggcagagagatgtgttggaagatcctcttgctatagaaaaaaatcaaaggggcttaaaatatggtgggcaagggaggcagccctgttggcatcctgcctagtgtggctgtagcaaggctgtagctgggagtgcagtccctaggctgtggggctcttggggttttgtcttctggaagtgatgatgccccttggcagcccttccacccctactctctctgtagtcttttttttttttttttttttttgagacggaatctcgctctgtcaccaggctgaagtgcagtggcgctatctcggctcactgcagcctctgcctcccaggttcaggcgattctcctgcctctgcctcctgagtagcagggattacaggctcacgccaccacacccagctaatttttgtatttttagtagagatggggtttcaccatgttggccaagatggtctcaatctcttgacctggcgatccgcccacctcagcctcccaaagtgctggggttacaggcgtgagcctccatgcccagccctctctctgtagtctttattacaaggattgcagacaaattggtttggcctggtcagttatttttttctgttttaacagttgggccaggcgtggtggctcatgcctgtaatcccagcactttgggaggctgaggtgggcggatcatgaggtcaggagtttgagaccagcctgaccaacatggtgaagccccgtctctactaaaattacaaagattagctgggcgtggtggcgggcacctgtaatcccagctactcaggaggctgaggcaggagaactgcttgaattgcttgaacctgggaggcgaaggttgtagtgagcagagatcgtgccactacactccagcctaggtgacagagactctgtctcaaaaaacaaacaaaaaaacaaaacaaaaaaaaacagttggacttgaatgtttttaactgggccccatcactcctttttgaatagtttgtgttgccagtcacaccctgtagggtttgtagcctgacttttcaagcagtgtggtggtagggagtccaaggaagttgagtggactgttttggacgtctttggaggaattggtgtggatgggtaatgacttagtatttcattgaaatgttcatttctctcgagttatttctggcagaggatagctctagtagtccccttctcttttccaaacacctttacctttgtcctaatgaaagtacttagttatctctttgggcagatgctatttctctagctaaattaacatgtcatcattcacagttggaaaactgtggctgtgctttttcatttttagagaaatgtttttaaaatacagaaaagaggctgggcgcagtggctcacacctgtaatcccagcactttgggaggccgaggtgggtgagtcacttgaggtcaggagtttaagaccagcctggccaacatggtgaaaccctgtctctactgaaaatacaaatatttagctgggcatggtggcgcgcacctgtaatcccagctacttgggaggctaagggaggagaatcgcttgaaagtgggaggcggaggttgcagtgagctgagattgcaccgctgcactccagcctgggcaacagagagagactccagctcagaaaaaataaaaataaaatacagaaaagaaagagaataactgtcacaaacccatatatccatcactgagaagtggcaattgtaaatattttgtaatttgctttaatttttttaaataaaagaaataaagtttattcacagcaatgatggccccactgtcttcccctccccccattaccatcgtcatgtgtcacgtgcgtccttcccatctatccattctttgatttacacgtgtatccacgaacaagatggagtgttgttttgtgcttccagttttcgtaaatggtattatgtattgttctacaacttgcttttctttggttcaacataagaatctgtcagtattaactgtagatccatatggacccagttgatacctctttaaaaagagctccagtattggtgtgactaagccttgtcactttgaattctgcattcccttactgatggatatgtaggttgccccaggtttttgtggtttcagacagtgctgcaatgaacattcatacctgttttcttgagcatgtgtgacaggttttctagggcagcgtttctccaactgtggtccctggatcagtagtgttgcatcacctgggagcttgctagtttctcaggccccaccccagacctccccaaattagaaacttcacagggttggagcctgctgatccatgttccagcaagccccccggatggctctgatgaccactcaggtttgagaactgctgctttagggttggctcagcttaaccctcagcctgcctgtttttgtttttggttgggagaatgctccccacgtgcaaggttttgtttggtttttcttccctttttaattaactcacatcccaaccctcacccatgtttgtcctgcctgcttggtctcccgacctctgaagtaccgcttggttttcctttttcccttccaggcgtttcagttgggccccacggaagcctcttactactgggtgtactgggttccaactcaatatgtggatgcaatcaaagacactgtgctggggaaatggcagtatttttgaaagcactttcacctctggcccaggagactgacccaaagtgaaggacattgccgggagaggcctgcagcatccctggatttcagagttctggaactttgttcataaaaaatctatattcaatctgaggtgatgtggtgactgaagccagaggtgatgtactttcaccattagcttaattttaacttaaaattaccagttccctttcttgcagtcagcttcataccatttttaaagtcaatacaatggaaatcaataaatctgaattccgaacatgttgtgtggaatactcttaagtgtgtttgagagtagatctgccaattatgttgacaagggaatgatcaaaagctttgtttttttaaaaaaaaaaaaagcagtttcaattgaaatattttcatacatctttggttgcaaacatttggactgcattgcaatgagttggggtgttttttttttccttttttgtataaaattgtatgcaaaatgggggtgggttagtaagccacatatttctgtccattgattcagatttaattctttccctttttcattctctcgcttcctcaatttgagtttttgttttaagaacccaaagatgtcagttcttcttttggtacctcatcaacgcttcctttcctgggctccctcccgccgtgctgctgctgcctgtgaacgcacggtgggagaggaagagctgctcagtcttgggcaaggagctctcacacttgctgtggtgttcgttgagcagcagagtatctcccagtgactcctgtttaaatgtcttgccctttgggcccccatctccaaggagttccattgctggttggatgattgtctgcacccctcactgagcttggcctagaggcccagcctggcatggttgtgcctgggctgtgccgctcaacagccccagctcccaagcagacaaagacctcttccaggaggagccaggtagaagatagttatacagccatatagctgcagatccagataaccttctttctttggaagttttcaagaaattcttaagcagtccaaggatgatttcaattatgcttctccattgggtccttctgctcatgcattcagttcaagtgtcctttatcccaggttcagagatgctgcctttctgaagaagacatctgaccctagcaggttggccaatgttattgaacaacaaaaatgggataaattgctttcacgattagctcaccttcttctggttttagcccttctgttctctgtacacgtgaacttctgtcatctccttctggcttggttgcctctgaaaggagggaaagtctcttggtaaattatctcttttgtgctgtttgctgtttctctgctgccgtctttgcagttctcctctcactggttgcaggctttcatagtaaggtttggcgagaaatgttccaaacatcacattttggattctaggctgtcacccctcattctgtgaaacgtattagcatgtgttcgcccaagatgactattccttgtgagccagttaatgatgatattctacgcccttcccttctaagctgtagttcaggaatccagcccacatagacagactcttgctttccatggtgtagtcaatgccaagtgatgcatctaggcaggaaaatctactctttgcttttttgggggcaattagtacatttgtgaagtgcagcatccaagaaacagcctgttttttcatcccttgagaaaggagcagtcattgcagcttttctgtccttgtcggcctgcagttcctggggaaaagagtacatctgagctacttgtccaagcctctgtctgcaggtgacaggttttgggggaaatgagatgcattaagtagaacatcatctcgggtcagacattgccccttttgtttgccaatgccccagtcctagagacttgtcctgacagtgccgcacacctacttttgatctctcagagcaggtggctccatccccagactagcctggctgctctccgaggcccctccacctgctccccttattgccccattcttgtggcttgccgggccacttggcctcccttcttgccggtgacagcgttccatcatctccccgctccccaagggccaactgcttctcactcaggctggtgtcatttcaggaggaccaaagcctgcgtgagcctttttattttcagtaaaatggtgcttttttccttacttcgagatactatatataaataataatgtaaatgacaccttttcgtacggagctgtttgagtattgctttacagagctcactaaatcagcttcaacaatcttgagctctgtggctcctcaccctgtctgcatggaagaccttgctggacgctctcgggagagcagacatagcaccagaagccactgggagaagtgttttcgatccgtgtctgggccacagtagtattcactgtttagtctttgagttccgtaagcagtctcttcatacatttcttacagtctggagtgtactgactaaatctgtgtaagcaaattgaaatactctttcttttaggtagcgtcacagtggttttttttttcctcaggataatttctatacaatttccttactgtcagagggaccagatctttccctcactgtggcaggggccgtgcaggtggataaaggaagagctggtttccggagagtgactgtaacagcgttgactcgaagctagagatggagggggtggccgtctcttagacattggacacctctcagagcctcctgagggcttctttgtcttctagaatctctaccggtggtcctcctgcaggttctggctcacagacatcatcatgcctttttttccctccctgaggcgccttggcagaagagcgtgaccctgtgagccaggccccccttagctctgcttcagatcacagaacacagacagactcgcgagttgctggacctctttggtattaagtgtttgaatccatggtgggccttttgcaagtagcgttagctctttttaaatgttgaactgagctaaggatgcactttcttgtggacatagaaggggcccacgtaaggccctgagtaggctccttagttgctgctttacctgatgagggccaaagagattaactctgcctcgttgccatgtctcagaaaagttgccatatttcacccagaaggggctcgttttcctcttactcttactttaaccatgtgcctggaggagccattctgggctcttgcacttgcccagcctttctttgccaggggcagagaagggaaagggggtagattgagtgtgccaagggccgtgcaagggcaggcttgctttccacccatctgctgagggagccctctcctctcgctccttgcctctgttcacacctgttgtcttggaagaggatggtccctttgtcttaaggctttgtgataaagtcatctccagttaggatctgcacctgtttccttcgtaatagtgcctggcggcctttctgaagttacaggtggttgggagccctctcgcatgcagaacatctggtagattgatctgccaggctgggtggttctactgctttctcaatttctaagaaccttttttttttcttaaagagttctgctgaattatttgacaatatttgtaagtaccatgtttccttgtggtgtatgctctgttctggtttctgttttcaaatcaaatgcctgtttgggaggagatgaacgtatttagtctattagatttgcactgctggattttttttttaaagtgtaaccttgaatagctgtcttattgtttatcctgtaagattagtcaatcgattaaagtttgataattaattgcg

SEQ ID NO: 9783 - DNA, 523 bp, Homo sapiens
agatcgaaagagatgggatggcacaaaaaacacaagaaactcctggcaatttgaattatttccgctcctgcacctcagtttccgcctctgtaaaatgggctcgcgctgccttaaccctcctccgcccgcccactctgacaccaccggaaaggattcattcgggaacattcgtggggcggagacgggacagggggcctcggcctgtagcgtcacgtccgccagggttacctgtggggctgggagcgaaccgcactcgcaccgcaaccccggcatcagtgcccaggttggcctcgcgccgtcctacggggcggccagaggccgccgaaggcctctcgcgctgcagcagtctcctcaggagcgccgccatgtgggatggaatagcacacgtgggcttctccctgcgtcacttccggggactgcttccaagccaatcggcctccgccacagccagcgcagccttgccccttaaagtcacaggccccctagcgcgaaatcccacgcccccctggacggctgcggccgc

SEQ ID NO: 9784 - DNA, 522 bp, Homo sapiens
agatcgaaagagatgggatggcacaaaaaacacaagaaactcctggcaatttgaattatttccgctcctgcacctcagtttccgcctctgtaaaatgggctcgcgctgccttaaccctcctccgcccgcccactctgacaccaccggaaaggattcattcgggaacattcgtggggcggagacgggacagggggcctcggcctgtagcgtcacgtccgccagggttacctgtggggctgggagcgaaccgcactcgcaccgcaaccccggcatcagtgcccaggttggcctcgcgccgtcctacggggcggccagaggccgccgaaggcctctcgcgctgcagcagtctcctcaggagcgccgccatgtgggatggaatagcacacgtgggcttctccctgcgtcacttccggggactgcttccagccaatcggcctccgccacagccagcgcagccttgccccttaaagtcacaggccccctagcgcgaaatcccacgcccccctggacggctgcggccgc

SEQ ID NO: 9785 - DNA, 9507 bp, Homo sapiens
ggcggtcccaggcaggcccagaagctgggcagcctctgccgggttccgggaaaaggagctcctgctgccactgctcttccggagcctgcagcatggggcccctgccgcgcaccgtggagctcttctatgacgtgctgtccccctactcctggctgggcttcgaggtgacgctgggaggggtcgcctcggcagtgtctggggagtgagggcggagggaagagtgagcgcagggctccgggacagaggtctcgtgtaactcctggcgccgcccaaggggttaaggcaagcagggagagctccggggctgaaggtcactttgtgcttttaaacggaatagagtcgctggctccaacccgagcctttatatcccgactgcagtttcccacggtggtggaaagaggggcggctccaaacattcagggagaaatgcagaacacggccacctcttagcccaacgatggcagttttggggaaaactggccacaggagcgaagatcctggaatagatttctagtagtgaggagagttttgccaatttcaaaccaaacaatgtagggtgtccgcataacccctgctctgcacttagcgcctcccttccctttccctcggctctttcacttttccatcttgcacactggcaatcgttcttgacctctgcccgcagatcctgtgccggtatcagaatatctggaacatcaacctgcagttgcggcccagcctcataacagggatcatgaaagacagtggtaggaagggagggtcggggcaggggtgatctcagtggcccaagagagccgaccccagcgggtccttatattggcactggcagccagaaagctgccctctgccccgtctctactaaaaatacaaaattagccgggcgtggtagtgcatgcctgtataccacagctactcgggaggctgaggcgggagaatcgcttgaacccaggaggcggaggttgcggtgagctgagatcgcaccattgcactccagcctgggcaacaagagcgaaacaacaagagaaaaaaaaggaagctgccctctgcccaaaacccacgtcgaggtccccaaacctgggacccttaggtcttttctcacttagcgtgcccaaccttctcctggcaggaaacaagcctccaggtctgcttccccgcaaaggactatacatggcaaatgacttaaagctcctgagacaccatctccagattcccatccacttccccaaggatttcttgtctgtgatgcttgaaaaaggtgaagagagtgggatgtagacagggtatccagtgaaaaacacagaagtcggagattgagggattgataggatggaggggctgcgggagactaaagcaagtgaagcctgccttgggaaacctcaggatcagccttgagcgagctgaaggttgccgggcatgaaagggaagaagagcaggcaaataggtcatgggaaccttgggtgagaggctgagggcggaggagctctgggggatgtcagaagcaaggaagagctagtcctccaccaggaaagcagcaagaggagccctgcctctgggtgcctctgccccacaggaagtttgtctgccatgcgtttcctcaccgccgtgaacttggagcatccagagatgctggagaaagcgtcccgggagctgtggatgcgcgtctggtcaagggtgagtgtggggctctgggaatcctctgggaggaccttggatgactttctgaccttccccaggcacgttttcagggtcatgatcctgcccccgcccgggacttctactgtcctcccagtcacacccctctccccgcaccgccttcctgctgtcttctcttcttcccagaatgaagacatcaccgagccgcagagcatcctggcggtgagtgtcctggctccaccccaactgcactcatagagaatctgagaacagttggcgtttgggggtaaagaagacaataggtctcttattgcatggaaaaggttataattactggggaagaaaggatgtctgtgattcagggcacaaactactgaaaagttggaactaaggatcctcaaaaggatatctcaaggttgaaaggggaagtgcaaaagggacaatatatgggaagaatttatttgctgaaagatgtcagtgagagaaagatgctcagtgttggaacccctggatggggagggatatagtattcacaagtctccacaaactccaacacaaacctcaccaacacatccagagtggaaggcaggagacttgttccaagaggctttaaaaagacgaaaagagataactaatgccagggttatataggagcctgagtgagaacaaatggaaatagctcaaaacattgaccagtgagccatggatgggggtataaaagtaagtttgtcttcaggattaaattaggaaattcaaaacagtattattcctctggtttacaaaaaaaaatagttgagacctattcaaatttaatatataaagtggcaaatcacacaaaagttaaacgtataaggaatggcaaatatatcttctacagtctatactcctgcaaagtacatgtgtaatttttagcttgcttttttacttcatatttaatcattttccatgctttttttttttttttttttttttttgagacacggtctggctctgtcgcccaggctggagtgcagtggtgtgacctcgacccactgtaccctttgcctcctggactcaagcaatcttcccacctcagtctcctgagtagctgggactacaggcacacactaccatgtctggctaacttttttattttttgtagagaaggggtttcactgtgttgcccaggctggtctcaaactcctgtgctcaagagatctgtctgcctccacctcccaaagtgctgtgtttacaggaatgagccactgtgcccagcctccatggaattcttaactctgaaagtatagttctttgtttctatagaggttccactgagtggacttatttttgttttgcttaaccatttttctgtggttaaacattttgtgtaggacataattctctaatttaaccaagtcaaagatagtgtctcattaggacaggctacatgaattcctgggtcccacttctgatctaggaagtcaagttgcagtggttgtcaatcttggctgtgaattaaaatcacctggagcaccttggcgctaaccctttcccctggaattgtgatgtaattgttcttgttcttttttttccttccttcctttttttttttttttttttttttttgagacagtgtcttgctttgtcacccaggctggggtgcagtggcatgatcatggctcactgcagactcaacctcttgggctcaagtgatctcgcatctcagccttacgagtagctgggacttcaagcatgtgccaccatgcctaattttttaaaaattttttgtagagatgggggtttcactttgctgcccaggctggtctcgaactcctgggctgaagcaatctcctgcctcagtctcccaaagtgctagaattacaggcatgagccacagtgcttggatctagttctaagggatgacctcacgtggagattttttaaagctcctcaggagtttcagatgggcagccaaagttaagaaccatctatcccaaactataccaacaaaccacaaactgaagcctttatctttgtcttgaagccaggtaggtggctgcagccatgtgccttgttacaaagttctcaggaagttccactggaattacagcctagctcttgattcaaaaaaagcatgagatacttaggaactgtgagaggtaggaaggaaagagccctggacttgaattctagagacctggattctagtgttggctctgctaccaacatgctctgtaactctgagcaagtaatgtatcacctctggattcaggctcttcatttgtgaaataaagaggtctatctagctgctctctaagatgtccgctggtgttaatttctgtgattgactctgtgccatctaccttttctccttttccacccatctcaagatttgggataaaggaaatagttcctcttggcaaggacagatctccacttgtgggtgggtaagggcattgccagcaaaacttgggggcagaaaataaaaagaccagagttttcctctgagatccccatccaatatcatgcagacacagttgtattccctactatattcccttaggctgcagagaaggctggtatgtctgcagaacaagcccagggacttctggaaaagatcgcaacgccaaaggtgaagaaccagctcaaggagaccactgaggcagcctgcagatacggagtgagcagctctttatgtgtgttcccagcacccatcctgaagatggagacttgagaatctctaagtttgagtccttatgctcctgtacaaaagccccctttccaagtgttctcctcagtgctcttaaacaaccctcatcttcttccttcttttccttgggctcagggaaaggaagggaaggagatgcacagtgagagaaaagagagcatcttagaaacaggaaggcacctggggccacagagcctcttagacctctttgcttctgtgaactcagaaaagtactgactcaaaggtttcaacccctgcctaatacctgctcctttgccttcctccttgcattgtaactgctttctccaggcctttgggctgcccatcaccgtggcccatgtggatggccaaacccacatgttatttggctctgaccggatggagctgctggcgcacctgctgggtaagtaagttaaagaatcaaccctgagccaggtgcagtggctcacgcctgtaatcccagcactttggtaggctgaggcgagcagagcacgagttcaggagattaagaccatcctggccaacatggtgaaaccccgtctctactaaaaatataaaaattagctgggactacagctgcctcagtgggaggctgaggcaggagaatcacttgaacctgggaggcggaggttgcagtgagccgagatcgcgccactgcactccagcctgggtgacaaagcaagactccgtctcaaaaaataaaaagattcaaccctgagctgcctttgaccccagctccacacccactatatcagttgaccagaaggaggggctcagagcaaaaaaatattcttggcacttccagtaacaaagcgttatgcagtcagtgctgttcaaggttgagtgggcaggggctgtcttcaaccccataaaagaaaaggaagccttctataccttgaagccaagcaaaagtctttctagaaaacccctgggaccttgtgggaccaactcctgctgccagaacacctgagaacagtgtgcagagtctgttgttttcttcatccaggagagaagtggatgggccctatacctccagccgtgaatgccagactttaagattgcccggaggaagcaaactcttcgtataaaaaaagcaggccatctgcttaacccttggctccaccataaggcactgggactcggatttctctatctgatagaggtattttctgtggccctgggagctgtctgtctttcccctacccccaaggatgccaggaagacgtccaccattagccatgtggcaacctttacttctatgcctcacaagtgcctttcagagagccccaattctgctttcccacaaaataaacctaatgccatcaggcaaaacatttctgtgtctgtatctgccctggtatattctcattcctggggtcacatcctgcctactctaggggtaggtgaaggagagctgtttcagtatttccagccagaccagccatgcagcccaccttgagcagcttgtgcggtggaagaagtgagaatagtcccccgttctctcacacagaaactcccctggtctctctatcagcaacagaaaaccaagccagatggactttgcaactaatcaagtttgggatttactgtcttctgaccaaccacagtgactgagatggggctgggaccagaagcccagtgggagtgaacagccgagggaaccagagtctggctgagcttgtggccagatatttaaactgggtccagccacacctgcaaaaccagggcaaggcagtaccgggaaactggctggagttgctgcggtttggggaagttgcacaccctttcatagatacctcccttaaccctcagtgcagattctgagaaaactccaaggcttctctgcctaacctagtataacccctgttccctactacatacatataacttttccattcccccagtaattgacccaaagtccctgcctctagctgtgcccattgtgcaatgatcagaatcccttgtttcaatagtattttgacttctttaagaatactctgtatttggaagctgaaacctcacttggatccattgttgggaaccaagtacggagccttacatagcccggaggagtttcaggagcaatgccactttcccttccatccctccctctgggtctggctcttcccatagtccattttccccttttatctcccattaatttctgtcttcctctctcaccttttccatgtctctagcatcctccaggatttaaaatcatctttacccaacttatctgtgaagtaatggcaaaagaacatctccaaattaagtactccttttcttcaaaggagtttcatgggatgtacagctagtataaaataaaaatatgggaagatgtccaatcttaaaaaccataagggcaaattaagacaaaactaagctgcccagagcagggtgagtggaaccagttttatgaataaagatgcttgtctcagcactatatgtggatatcaaaaattgtgaacaacttgaacacctatcaggaggagaatactttaatcaattatggcacattcaggagataatgttttacagtcatcaaaaattgtatatgagggccagcacggtggctcacacctgtaatcccagcactttgggaggccaaggcaggcggatcacctgaggtcaggagttcgagaccagactggctaacatggtaaaaccctgtttctactaaaaatacaaaaaagtaaccgggtgtggtggcacgtgcctgtaatcccagctactcgggaggctgaggcaggagaatcgcttgaacccgggaggcagaggttgtggtgagctgagattgcactattgcactccagcttgggcaacaagagcgaaactctgtctcaaaaaaaaattgtatttctgaagaattgttaagaacattggaaattcttgagatataatattgattggaaaaagatgaaactatatggtatgatctcaatatgtcctgatgaataaaaacataatacagaggacattattctgagataaaatacatcaaaatctttccattttatttgtatacttttacaatttttgattttttaaaatgtattctgatacacaaaataataaaaatgaaaaataaaaaatttggccgggcgcagtggctcatgcctgtaatcccagcactttgggagactgaggcaggtggatcacttgaggtcagcagtttgagaccagcctgaccatcatggtgaaaccccatctctactaaaaatacaaaaattaagctgtgtgtgatggtgcacacctgcaatcccaggtactcaggaggcttatgcgggagaatcgcttgaacctgggaggcggaggttgcagtgagccgagatcgggtcactgcactccagcctgggcgacagagtgagattccatctcaaaaaaaaaaaattgtagattcacattgcagtacaactgtgcatcttgcccattgatttctaaatgtattaactacttaaattaatcctgaatcttttcccaggcttaagtgggataatgttttattgtagatgcatatttcctggctctacccagtctttctttgaagactttatcatcctattttctgaatccagtggctgactttaatcttctctggaggaactagataatttctagactaatgcttacactcatgatccagattgtaatttctgaactccttcttccaaatagaatcaaaacaagaaaggggaaagcctctcaaagcaactgtgcgttaataatgaaacactctttttttctaatccaaggagggtttcatactttttcttagtttcttgccctcttcccttctgatcaataattgtaataggaaatttgcaattgtgccaatactcagattcaatactgaactactttcttgcattgtaattcaaattccaaggttaacaactagctgtatgtttccaaaacaatcttattgtatatgtattttcttaggtgaagtttccagaaatgattttttttttttgcagagccaaacacacatggtaatttaaaaaaataatgcacgtatgtggtaaaaacagtaaaagcaaggtatcaagtaaaaagtgaagagtcctccctttctcattcccattcctactctctaattttttatatatccattttgtaagctataatacagagattccatatactcttcacatactttccccagtggtaacctcttgcataactataggacaataacacactataggacaaaaatcaagaaattgacattgatacaatccatcaaccttattcagagttcaccagtttaacacatgcttattgtgtgtctgtatttagttctatataattttatcacatgtatgctgatgaccaccaccacagccaagatacaaaacattttcagtgtaaagatttctcatgctacccttttatagccacagctacctccctccctccctgtacttccctaacccttggcagtcactaatctgatctttatgtcttgtcatttcaaaaatgctacataaatggaatcagatttgattgttttcattcagcacaatccctttgagatctatccaaggttttgacatgtatcgagagtttattcctttttattgctgaatagtattaatattctatagtatggatgtaacatagtgtgtttaaacattcgcctgttgaaggacacttgggttgtttccagtttcaggttcttacaaataaagctactctgtgtgttcatgtacaggtttttattttcatttctctgggtaaatgcttaggaacacaaccactgggtcccatggtaagtccatgcttagttttagaagaaactgtcaaggctgggtgcatgatggctcccatctgtaatcccagcactttgggagaacaaggcagaaggatgacttgagcccaggaattcaagaccagccagggcaacatggcgaaaccccatctccaaaaaaagaaaaaagaaaaagccagacatggtgatgtgtgcctgcagtcccagctaattgggaggctacagtgggaggatcccttgagcctgtgaggcggaggttgaagtcagctatgatcacgccactgcactccagcttgggcaacagagccagaccctgtctcaaaaaaacaaaaacaaacaaaaaaaaggaaagaagaaggaaggaagggaaaggaaa

SEQ ID NO: 9786 - DNA, 434 bp, Homo sapiens
gaaactgccatactgttttccagagtagctggtttcacttttccaccagcaacgcatgagtgatccagtttgtccacagcctcaccagcatttagtgttactactgtttcttactttaatcattctgataggtgggtagtgatagctcactgtgatttttaatttgcatctccccaatgactaatgaacatcttttcatgtgctacttgccatctgtacatggtcgtcagtaaaatgtctgttcatgtcttttgcctactttctaactagactcctttgaaaatttctcatattgtttttaacaatagattttaaaagaatttacagagtaagaatacatttttgagacaatggggaaaatgatacggagtgaaaggtgatattaaagaattaatgttaatttcattatgtgataatagctgagtggctgtgca

SEQ ID NO: 9787 - DNA, 393 bp, Homo sapiens
ggcctggctaatttttgtatttttagtagagacggagtttcaccatattggtcaggctggtctcgaacttctgaccccaggtgatccaccgcctcagccttccaaagtgttgggatcacagtcccagtgattctcatgcaagcaaagtttgatcaccactgtagtaggcacccaataaatattggttggttggttgatttcaattcatttctgatggaaataaatcatgaatgctctgcctttggaaagcccccagagcagtggctgtcagtcctgactgcacactgaatcaccagtgttgctttcacaggctaaggctgggtcccacccacagaaattctgatttaactggtttgggtgcaggctgggctatgggcgagttttagcagctcc

SEQ ID NO: 9788 - DNA, 23587 bp, Homo sapiens
  SITE (23437): n equals a,t,g, or c
ggcgggcaggggcttgggagctctggggcaggcgctgaaggcaggtatgtgtgtgaagtcaggtgcgggggtgggggtggctcctggccacacccttgcagggctcaggccgccaatggtgctggggcctcctcccccaggaggggggctttgtcaaggattatggtgtatttccatcaccgaggcccaaaggggccagaaaggggcaggctgaggctgggggaggggctcaagggagcccagctgggagggcccaggcaggcagtgcggagctggccgtgggctgcctaccctttcatctctgcaactccttcctccctgggcctcccttctggtgtgtctgtgggtctgtctaggtgggcttgggaaaggggaaggaaggggcgtctctttaggcagctcagactggacaagccttctttgaaaatggtcctttgaacacacgcctgctggtggttggtcagacagatgcgccagcgggagccccggggccccaaggggacagctatctctgcaggaccagtgcgatgggcgggaagggaggaggggacacgagaggccctgtcctcttcccgtgccagcttgctcaggccctcagtcccagacgggcttttcccagagagctaaaagtaagaaagtaaccttcaggattaaagagaaatgtttctttgtttgggttttccgtctttctttctttttttttctcttttaagcctcttttcacatctgtagtggctttttttttctctcgcctggggtcaaaggagaagggccagagaatgtcgtcccagccagcagggaaccagacctcccccggggccacagaggactactcctatggcagctggtacatcgatgagccccaggggggcgaggagctccagccagaggggtaagtgtggaaccaccccacctcactctgtcagccatcagaatggggtgatggcagaggttgcaactggccagggagcagctcctgggcaggggctgctaggtctggctctgccactcatttgctgtgtgaccttgggcaagtcacagcctctctggggttcattcagtctctgcctctgttacatgagaacaacatccctcaccctgctgttaagacacctaaggctggtcaccttaggtatgatgtgtgacgtgttaaaaatacagatgattcagatctgcagggatggctccctgggtgattctggcccatagccaggatggagaagctgctgagagcagttgaggcaagcagacctcccttcaaggggttattggtctctgtggtgagcatttgggtgtggtgtttccaagtgtcaagttctctgggcaggctgggggattcggggaaggcagagaaccaaagggagaaagcctggtgagaagtcactgaggaaacaagcacccttgttgtctttggatggtctcagaggatgaggagagcctattccctttagcagaagtgctcaggccagcccaggtgagggtgggagcaggaaggcagcccgccccagggtggcctgagaacccagccacagctgctttgcctgggtccattctaccggggtttagtctgggcaccctggtggaggagctgggccccttctgtgtcccccacctcctgccaggatgtcttgcctgtgtaggacccagagccagttctcccctgttgttcccaggcctggccccatcccttatctccctgctctgtctgacggtttggagaagtagaaaggtgaggctgggggttgccgagccagatgtgtgcacatctgttctccatcaaaacctgaaacttgagaaggaaaaatccttgcgtgcctccccaggggctggggctgcggcctggctgggcttgggtcatccagcagggacagaggctccacccaggcctcggggaaggagctgttgtttggaggactcagggttctgaccacctggaaaatagcctgcagtcagcaagggcgtgctccccactcatcttgcctgactgaccgagagcctgtgggctccacatatcctgctgtgtatgtgtggcctgcgagagaccagaatgaggacaggcccaggaacccatgaggatggtttctgacctaggtgaaggctctaatctgaagctgtgtccttgggagcctcagggcctgggcactggctgggggccaggtgcctgtaaatgtagctgtggtctatagctgttgtctcagaataaagttgtgtgtatgtcaggcactgggtgatggggagtccagtccctcatgtgggtgacatctagaagattcagcttctttctcccactgcagggcatgacatccataagaataaagagatttgtttgaatctacttacttagccaaaccaattgagctgcctgccatccccctgcccccaaagtgggagcagaaaattgggagctcaggggaatcccaaggaaatgaacttgggttcacctctgtctgtgtgagtcagacaccctggggacatgttgcatcagagctttgaagaactccggagtgcccagtgccccagcactctcaggctggagttggggtggatgaacactgatggcagtggagtcagccacagaaatgtcctaaaatccagaacattcaatggctcaaacaccctcagtggcttcctggggcctcccatgcttgctgtaacctcatctcacctgacctctgggctgcaatcaaactggaaggcctgcccagccccagccacgctgcctgtcgcctgcctctctgcttcctcatgcacttccctccacctggagctgcctctccccttctttgcctaaagagatgctaaccaacttttatttatttattttttgagatggagtctcgctcttgttgcccgggttggagtgcagtggtgcgatcttggctcactgcaacctccgcttccccagttcaagtgattctcctgcctcagcctcccgagtagctgggattacaggtgcgtgccaccacgcccagctaattttttttgtatttttagtggagacagggtttcatcatgttggccaggctggtctcaaactcttgaccttggttgatctgcctgcctcagtctcccaaagtgctgggattataggcgtgagccactgctcccagccactaaccattttttaaactccaatcagataccacctccttttgcccaaagttctccctcctctgcatccttcagcacctgctgtgcctgtcccaggatcaagctcaccaccctctccaaggtctttatgtctgtgccatcctgcctgtcccatggcacaaaaagtggggccacaagccactagccaaatatttgctcatttctatgccacctgagatccccatctgacccctcacactgagctgagaggtcagatggggacctcaggtgatacaaaaagggccagaggctcccccaggcagggccctggagggcatttctgggggtaggggtggtttggggtaaggtccataggaaaatggtcaaactactccagggacagttttccaagtccctgccgggcccaggtgtaaaggtggagcgggacctagtcatgcggggagatgccggctgagagggagggctgccctacgcaccggagtgagaggccttggagctggaggtggggagctgacactggagtcagtgtggctgctactcacgatcccagttctactttgggaagaggctggtctcctggccaagaagctgcccagagctgacttactctgcctctccaccaagtgactggtttctttcccaccgctcacccgctgggatttcctgagagaaagcgagcaggacagaccgagctgacccagcagagcatcccagggctctgcactcccctggataatgcagccttgatgcctctcttcatacagtggagggcgttttggtgggcggctaagccctctgtgcaggcagggactggcggcagcccaggctccatttcaggccctcacccaccagaccccactggcctcacccatgctgccaccctccctctggctctcccaggcccaagctgggaaaacccggagctctactgctcaccagggacccagtcctgcctactctcccagggccagggccagccctgagctcaggactcctgcctcactccctttctccaccacatgattctgctggggaagcggagggtttcattgtcctcagtgacccctatctccactgtgggtttacctctgcgctcagccagggtgagtgcaggaccattgccaggccatagggagcctctgtggaattagagaaagggatccccagttaggtgcattcagctcagcaggtgctgggtttggtgagcagggtggcctgctcgttcccttggctgagcatctttgtgcagtgggcaacctgcatggctgtccatggaggctctcaatgagagggaagcaggaaaagagagggaccaggggagatcattttagtcacagaccaacctcagatggcagtgagtagagggcgaatcacagggccaaacccttgactgcttgacccaggtagtgtgctcaactgcagttctgagaagacgtctgtgagaccaggagcagtcagaggggctccctggagaggggaggccttgaaggacaggaagcatctgggtgagcaagaataagtgctcagccgggcacagtggctcacacctgtaatcccagcactttgggaggctgaggcatgaggattgcttgagctcagaaatccaagaccagcctgggcgacatggtgaggccctgtctctactaaaaatacagaaaaaaaaatgccaggcatggtggtgcacacctgtggtcccagctactcatgaggctgaggtgggaggatcttttgagcccaggaggctgaggctgcagtaagccgagatcgagccactgcactccagcctgggtgacagagcaagaccctgtccctccagaaaaaaaaaaaagagaataagtgatcaggccgagccggtctactctgcttcccctgggagcttcccatgtcctttagtcttataaccccagagcttggcatggggctggcacatcacagggacacgagggccccagaatgaccctgagaaggtgggactgggaaggcttgtgtaggagggatcagagggttgagggaggtagtgggtaaagcctcagtgtgaacagtcttgaaccccagacccatctgcacacccaggggggcctgacgcaggcctgagccagccttcatttgctctgcagggaagtgccctcctgccacaccagcataccacccggcctgtaccacgcctgcctggcctcgctgtcagtgagtccaacccaagttgaacctggcttgcaagctgctgccagcctgggcagtgggacctgtgttccccactggggctggtgaaggggggccctggaagatcctgggtggggggagctatctgggagttctcccagcttggaggcccaaaccaggatgcaagtccaaccttccagatgtctgtcaccccttgaccagtccccaagatgccacatgagtgtgcactgggcaggtaggggatatcctggggcctgagtccaagccctcaaactcagaccctcaggggaggcctgggcaccccaagccctcctctgcactctcctttcagatccttgtgctgctgctcctggccatgctggtgaggcgccgccagctctggcctgactgtgtgcgtggcaggcccggcctgcccaggtttgtaccatggcctgggcacccccactcaggggacccagctgacagggtccctctgggagggtgggtgatttgttaggtacctaaaaggcagctctggctttaatgacatccctatcgccctcagcctggagctttcctcacccccacctaggtctccaggtttagtcaggacccccagaggaagggggagggactcgctcaagcccgcctgggagaaaggactccaacccagaccctagggaaacaagcctgacaggacccagcgtcagagtgtaccttctcaggcagccctccatgtgtggattgacgtgaccatcccaatgccatcttgaccgtcatcttccctgagggtatcacctggaccctaatgcttgaaggcagatttatggggactgacatctagcccctatagctggagctttcttctcctatctccttcagccctgtgactccagagcctggacaggcgtgatcctgaggagatggggctgggcaagctagtgtgcgagagaccaaagggttagggcaggtgatgggtggctccttggtgtagacagcttcacatcccagacccagactgtgcaccgaggcaggtcttgctgtgctggttttgtggggaaccagcctggggtctctggttggccccagaaagagcttgccctggctggggcagtgtttgagggagaatgaacctctcagagcatgaatgcaagctgcagtgcagaagctgtgggtctgagtggcttgccctgagcccagaagggtgatgcctgggacagctatgcccgctgtctgccctctgccccgggtccacacccagcccagggcggcggctgttgtacaaggatgttgtgactcgctgagttctctgaaggtttgccagctcagacagaccaattagtgtggaggtggctgcttcctggagcttccagggtgggcggaggagcagtcttagggcttcttcccactgtatgtgtgtcccaagtccctttggcacggggcccagagcttggtagataagaggcactccacaaatatctatggaatgaatgaatgaaggggccttattcccccatctagaaagtgggactgactccacctccttgatttatggaatacagctgggaggtaatgggggtgcaggggctgagcaactccctcctgccctgtccttgcctctgtgctagccctgtggatttcttggctggggacaggccccgggcagtgcctgctgctgttttcatggtcctcctgagctccctgtgtttgctgctccccgacgaggacgcattgcccttcctgactctcgcctcagcacccagccaaggtacccactgacccccaggccctggggttggtgtgatgggatggggtagggtggggtctcggagttttaagcttggctcaaggagatgagagtaacaggaacagctgtcaatgagatgggctgctatcctgagacgtgacctttttagaccatccagtctttacaacgatgctacaaagtatgcatattagccccattttgcaatggaggaactgagagccagggaagtagtatcttaaattgagtatttgctcaggcaccatgctaagcattatatatccaccttctcattttgcccttgctaatatactgtgattattttcattttacagatgggaaaactgaggctccaagaggtaacttgcccaagatcacagagttgagactagtcagagcctggatttgaacctagtgttcttgcccactgaacgtgctgaagggcttggaagctggagaccgaagagaggcctgggtgggctcactgcaggccccatgtctgcccctccagcatgggtctctctgcttgtttcaccttccaggggcctggaagatactgggactgttctattatgctgccctctactaccctctggctgcctgtgccacggctggccacacagctgcacacctgctcggcagcacgctgtcctgggcccaccttggggtccaggtctggcagagggcagagtgtccccaggtgcccaaggtaaccgctgatcacaatggcctagggcagaggggcgcacagagcaacctactcaaaccacagtgcctcctttgagctctgattctatgatgggccgccctgcagccttccattgtgcatgggattccatgccttcaaacatgtgccccttccaagcttggctgctctgcaggagaggcagggaacaaggtggctgggcccagccctcaggaactttaagtctaggaggtggcggagaaggggaagtgggcagagtagggggaagagaaagcctgaaatggcccccacccccaatgcctgtgttagtgatcccccagcttccctttggtcaggctggagagggaatgggagtgaagcttgatggaggccggcaagtgcgaagtcagggatggtctaagagggctgagaggagaattccggaacctcaggaccttgctcactggctgctggctggggctgtgaagctgtccagtctagaactcaaagagtgatggtacaggctttagagccagacaacctgagtgtgaatccagcttcaccacttcattcattcactcacccattcattcaacaacatatttgaagcacatactttgtaccagggacttttccaggcactggactacagctatgaacaagacaaacagtccctagcctcccaagagccgtcacttcagaagggcagacatgacacgcaaacaaaatgatgccaggtggtaccaagtgccttggggaaacagtgccacctttctgagaccgtttctccatccgtccatggagctgataacaccagtccctcagggtggaggtgaagactaagaggttgctttgagagggggaacttggtggctttttttcaccacctagaacctggcacatactaagctctcaataaaagtatattgaaccaacaaataaatgaatgagtatacaaaaagcccacccccaggaaggcctcagccctgaggagtagggcatagactttcctgatgctcaggttgaaaactatatgtaggcaaaggcaggctttcgtgtgattttcagaactgttcctaatgctccgggaacacagaaacagaaagaggtgtcctttccagtggggggcaggagggaatcaagtgatctcctcctcttggctcctctcaggcccgtggggatccaggagcctgggggaggggtgagcatctctgcagggctcgagaaggggaagtgggcaggtttgcgctgggtggcaggttgggaaccatagagctgaagccttcccatggccccccagaccaccctcagggcccagtgtgaggtgggaagggcaacggattctggttcttggctgggggaagaaggtggaaagtagtctgtctgggtgtttgtctgtccagatctacaagtactactccctgctggcctccctgcctctcctgctgggcctcggattcctgagcctttggtaccctgtgcagctggtgagaagcttcagccgtaggacaggagcaggctccaaggtaaaggggcaggcctgggatgagctcttcctcagcacccaagacagccctactcccccgtatctgtggtcccagatacatggccgtgcttgatgtagggcccagcacagaatagatgctcagaaaatgtttgctgagtgactgcttagtcctccctccctaggcaaaagctggactgggcccttgactggcacccaggatacccgcggcactgggctgtgtgaatagtagggacttaacaaagcagaactgagtcagaagccaggagagtcatatctctgtctgtgaaacactgagatctggctggagagacagcctggagccttgtgcctaatccgagttctgcacataatgagatgattcaggaagcacccagggcagaactccattatgagtcaactctaggttggatgtggttgaataatttcagataaaggggagggctgagagggcttcctagaggaggtagactctacaagggcctgaaggacagggagatctagagtgatgagagaataaggagcaggcattgtaggcacgggaaagagcatgagtaaaggggaagagatagttttgtgtctgttttgttcattatatttgcagcactgggtgggtcttggcccttaatagatactcagcaaatatttttgaatttttgaatagatggatgaatggatggatggatcgaaggaaagatgtatggaaggaaggatggatggatgaatgcatcatggtaaaagagaattcttagaagatacttcaatctcactaaaaagccttctaagcacctaccatatgtcaggccccgggctcagtgctgtggacttggagctgatggacttgtgtctgatctccaggagctcccagtgtggtgggggagacagatgcggcacaaaacacctgcagtgcaatgtgaaacctgcaccgggtgttgggactgtggtgcagggggcggggtccactacttctttctggtgagagaggaggaagaagaaagctctgcagagaccctcaaaggggaaagaagaacagactcaggagaaagtcttaagacatagaggccaaagggcgtggcttctcttcagacagggcaggggaaggaaaggcttgatgggaggcacctggccagccagcaggtaggtggtggtgccagctgctggcccagggaaggtggagggaggagcaggtgctcctgggatgatgcttggtcctgagggtgtactgctcaaagtctggagctcagcagaggggctgggaccgggtgttaactcggcaaggtcagactgaatccagagagtgagtgagatccctaggcaggatggagaaccccgggtcccttttgggctactctggtccgagaaggcccacggactccagactcggctcccacgtggcaggcagggagttctgagcgcttgtagctcctgcctattgaggccaacacccctcgaggaagcccgtgtcccctcctgtttacagctggctctgaaaagggagcggccccccgggacgacacagtgcctgaggcatgcccctttaccttctcttccagggtttccaccaccccatctctctctccattgccagcctttcctcccaggcttgagaggtgtacaatcctctttggactttggtcaaagaggtttaagtctcaaaggacccccatcaagctttgagctgacccactcctgcccgggatcccagggttgtcatggcaacaagtgacaacagcctgtgttctcccagtgattccgggcaggggctcaccccatcttcccatgggcctctgctacttcacaggcagcttaaggcctggaatgtggcttagacaaatctggtcacccttgtgatctcccttgcgcagtggcagcaggagaagcctgagggtgtctgacctggaatgaccctcttctgtgtcctggtctaggatgtgcccgtgggacacaagcttccctttgccccagtttcagctagcagaggccagagggctaggggtgggaagaaacggtgaagagatgtgactgagtaaagcaggcgagagttggagacagatcttaggaagaacttcctggcattgatggttctttgataggagactggccttgtatttgtgagagagaaaagggaagctttggagggcacggacctcatccccacaggtcagccccatccacactcaccaccaccgccatggccaacaggtttttatggagcacctgcttggtgaacactctagttccctgagccagggacccacgaatgggtcgaggcagatctcatctgcttgttcaattgtctgtctccacaggggctgcagagcagctactctgaggaatatctgaggaacctcctttgcaggaagaagctgggaagcaggtggggtctctgacacaccctttgtgggccaatggattgggctggttagcagccgtgcttgggaagctggcactgggcagcatggcaggggcagaggggaagaatgaccagcctctggggctggccctcagggaatgggcttcccctgaggaccccgcacctgcctgggtctttctgcagctaccacacctccaagcatggcttcctgtcctgggcccgcgtctgcttgagacactgcatctacactccacagccaggtatggggttgggagctgaggccgagcgtgacaggggacgttaccctcccttgcacagaatggctgcagtggaggactggctcctgctccccggaatccttgtcatcaagagggacaactaccagcttgggacagcgggaagaccctggcctggccttggtcatttagggtcctgctggcccttttcctgggccccttgggagggaggagggctcccgggcctgagtggtgctgttcaccatactccttcctttgaggactacaggattccatctcccgctgaagctggtgctttcagctacactgacagggacggccatttaccaggtatgtccctcaccctgtactgccatctgcctctggagccctgccctcaacccccaagcctggagcagttccggcccaacccagctctccaggtgctccatccagaaccctgaccaggtgctgcaggccatcttgggagttctggcctacccagaagggcaggggtgttcactcttggactcacgaagtgactcggagcattaattttggaggccacataaacacgaatttaaatcctagctccactatttacctcctgtgtggccttgggcaagttatataacctctctgaacctgttagctcatctgtaaaaaggagaaaatagaataattttcctctttgagtaattgggaagatttagcaagacaacatgtttgataaactctgcctcaccacctccgaaaaaaaaaaaaccccgaaaaaaccaacaacaacaattaaaatcctgggagatgggtatgattattctccactttacagatggggagaatggaagcttggagaggtgaatttgacttggccaagtttctgcacagctaatatctcagcgtagcctaagtttgaatccaagtctgtccagctttaattcctgtgctcatttactttcacaacatagaaaaaccagaaattttacattccaaagtttagatagatagatgatgggtaaatagatagaggtgcagacacagtcatccctcagtatctgaggtgggttggttccaggaacacccctccataccaaaatccaaaggctcaaatttctgatatacgatggtgtagtatttgcatatagcctacacacattctccagtatacctcgttatctctaaagtacttataatatcgaacataagtgctatgtaaacagttgtcctatgtctgggtgtggtggctcacacctgtaatcccagcactttgggaggctgaggcgggcggatcacgatgtcaagagattgagaccatcccagccaatgtagtgaaaccctgtctctactaaaaatataaaaattagctggcggtggtggcgcaggcctgtagtcccagctactcaggaggctgaggcaggagaatcgcttgaacctgggaggtggaggttgcagtgagccgagatcgcgccactgcactccagcctggccacagagcaagactccatctcaaaaaaaaaaaaaaaagaagaagttgtcctactgtattattttttatttgtattatttgtattgaattgttattttttattgagggtttttccccaaatatttttgatctgcgcttgattgaattggttggttgtggatgtggaacccacagatacgcagggctgactatatgaagttacggtgctcgaaggcatgcctttggcctattaggctgtgattgcacctgtctgtaatgtcctcatttagaggcgtgagatccctgctctaaggggcagataagaacactgatgggcaatgggcatgtggctggggcctgtgtgctgccagtttcttccccagcgtctcccctgttagcacagaaaaccctttcctgggatggggccctcactgtggggctcttccaggtggccctgctgctgctggtgggcgtggtacccactatccagaaggtgagggcaggggtcaccacggatgtctcctacctgctggccggctttggaatcgtgctctccgaggacaagcaggaggtggtggagctggtgaagcaccatctgtgggctctggaaggtgaggcctccagggagcccctgagggctgcagtggggaatgaaagcggggagacccaaggtctatgccctagtcagccatggacacactgggggcccttggacacattccttcctctctctgggtctcgattgcctcatctccaaattgtggcagttggcgcttccagttctgagcttccatgaaacctgaagggacatctcagcagctcctgtcccttgcctgcttctgtggcatcttcccccaccacccccagtgtctctgaccaactatccaggcatggagatgaggaaggccatgggatgggggagctgagggtggggaaggagggaagagacggcgaagggagatggtgaggatttctgagcgaatcctcgtggcaggggtctggcgttgggcagggcacaggctttctcttccccactccctgtcttttggggccgtctcctttctccttccctcctctgacaatgagctcctgaaccagggaaccatcttggcttccccttctgtggtctgatgcctcctgcagccacctacttactctgcctcctgggcgctcccaacagcgctgtggaggggactgagaagtgtccccacttgacacatggggaaggatttgcctgaggccatccagcagggcagagtgcagccaagagaacgcagggctcctgaagcctaggcgggggccttctccatcaccttgggacaaagcccggtgctgaggactcaggaggcatgcgccttctgcttacttggggaccccaggctgggacggatgggcccccggcttctgaggagtaacatgtggtcagagcgtgggctgccagcgttgcaggtggaggtgtagctgctccgcagctgtacctgaccattaacatcatccttatcctacagacctgggcatgctggtcatggcggggcagggagtggggggtgggcagaggtgcacggagtgaccacttccttccctgaccacctccaccatctccgtgagcacctcagttcccgtactagaggctgccctggaactgctgctgagggcaacaaactggacaggtgacaagttccgggtgagctgaaaatgtcctctcccaggagattttctgagctggttgcaatctggttcataggcaggtgcagacatggtccaggtcagcccacaaccaacctcagacccttgctcacagtgaccctgtaggtcagcatcattgatcccagctcacagggcaggacattgaggctcaaagacaaaatgagacacatccagggcaaaggactctgcttccactcatcatgtcttatatttttaattgcatgttgcagtttccaagctcaaaggctcccactttgaatcttcttgggccaaacagagcaacagttactctttaaatttgcagatgaggaatactgaggcccaggaggattacagatacggccaaagccatcccgcaacctgggctccggtgtcccttggtctgtccttcgcctaaggagctaatgtcttctgagctcagagcttctgttaggactgccacccagcacttggaccataagcctggcatcactcacagagagctcagactgagtcaggcaaactagattagaatctctgttccatcacttacaagctgagtgaccttgggcaaagtgcattacctctcctgacctcaatttccccaactgcaaaatgagtgctggagtgaaaaaggaacacttgcccttgaggccctcaatcacatgagggaagacagatctatcccccaaagcagggcccagaagaaggcaggcacaggatcccagaggtggcaaagagcaggaagattgtgtgagtgctggggtttgggggtgcccaagttgggaaccagtggagggagagagaggtaggaggtagatggatggagatcaaaggccaggcctgtggccaagggggctgctaacccttcaaccctgtgttagcctgtacactcaccaggccaggctcagcaggcgggctgttcacctcctggcagcaaatggtccagaatgtgccctcgctgcagcccagctggctccagaagggggaccacagaggctggagctatgcatgcacagtgctttctcccaaccttgcttctgagaaaagtgtccctgcgagggccctggaggagggagctagggaccagcagaagggcctaggtttctgtagcatcatttttagccctggctgaatctgggaagcacctggtggctttaacattcccgttgctcaagccctgtgccagacctactgaatcagaaactctcagagtggggcccagcctctttgagtgaacagccctcccagtgattttttttttcttttgagatggagttgtgctctgtcgcccaggctggagtgcagtggtgcaatctcggctcactgcaacctccacctcctgggttcaagcaattctcccatttcagcctcccgagtagctgggattacaggcacataccaccaggcccggctaattttgttttgttttgagacggagtctcattctgtctcccagggtggagtgccgtggcacaatctcggctcactgcaacctccgtctctcaggttcaagtgattctcccatctcagcctcccgagtagctgggattacaggggcccgccaccaggcctggctaatttttgtatttttagtagagacggagtttcaccatattggtcaggctggtctcgaacttctgaccccaggtgatccaccgcctcagccttccaaagtgttgggatcacagtcccagtgattctcatgcaagcaaagtttgatcaccactgtagtaggcacccaataaatattggttggttggttgatttcaattcatttctgatggaaataaatcatgaaggctctgcctttggaaagcccccagagcagtggctgtcagtcctgactgcacactgaatcaccagtgttgctttcacaggctaaggctgggtcccacccacagaaattctgatttaactggtttgggtgcaggctgggctatgggcgagttttagcagctccaggtgatcctaaaggcgctatcggtgctgagatccaccactctaatccctgtggctatgtggaactagcactcaccttttctgtgtttgctctccccgtccttgagattctggtggtgacacgggcaccaggaacacttccctggactgactgatgagatcagggtgcaggcatctcaggctcattctggatctgcttagaaatggttacacacctcactctatcattcctagcagcatggctgtctgggcgaagccctctctctgagcctcagcttcctcttcagcccagtgggaacagttcttctgtctaaccttgcggggttgctgttacagtccagagcaagactggatgtggatgtaaggtgggagagttgcagcctgcacccctgaaattcttaaacacccaggcttgttcatgacacaccatcatgcacacactcattgtgtgcatggccagggagagggtgagggagctgggtgacagcggctgcctccctattctgatggactcaggccacaccgatgtggactcacaccctctatgccctgaacgaagaccattagtgcagacgtggatggggccttatggctcacattatcctgagagctgggcagcataacggcgtgcggtatgttcacgagcaaatgggggcctggggagaaggagtgccctcctgaaggccacatggccaagaagcagtgaagctggaggcagatgccaggttggatggaggtcccacagcaatagaagcagcaacagcagggtgaggactaggtctgcagactcagagctggtttcatctcttgaccactgtatgtcactgggaagaatggggtggccgaagtcattggcttacactgcatctgagacctgggggtggggccaagaggcttccacacagagttcagtttggggcagggggaactccccacaaggcaccaccctggcaggggttctgaggcctccaggagactctccagaccctgacctctcactttgctcattctctgcccaccagtgtgctacatctcagccttggtcttgtcctgcttactcaccttcctggtcctgatgcgctcactggtgacacacaggtgagtgacagactctggctcacccagcgccgaggtggggaaggagtgggagtcctgtgggcctgcggggaggccctgggcttggagggagggaagggctctgctggcccgggctgtcatggagcccacctgtgcgtggctgcgctgcagtgggagaaggtggggctgggtcctgcccttgggccttcctgtctggttggggaaacgtctgtgagtgtgagggacatagggcaccaccaactcagggcagctagtggagcttgccccctgagtaggggccaccgggtgggctggatgagagggaaggtggcctggggaagctgcacctgcccgggaatggaaggagataggaggtgaggactgtgtggacgagaacagaggctggggtggccctgccatgtgagagtgtaggtgaggggtagcctggtggcatagcacactggagaggtggtacgggtctcgccatgccaccttgcttgccctgcagcggtgagtggtgaggagcactgaaggcccagggcaggtggaagggccagcccgagcacttacccatgtcagagaactggcccatgtctcctgcgcacttgccaggcctcagagctcttcccagggatctttttccacaggtcacccctccttcttctggcattcaaggctcctcagcctgtgcttgccttgcctctttacctggtggctgtgctgtgtgtcacttccattctcactgttgtttctcacttttctgacttggctcaggttgagccttctgcctcgttttgtattcctcgttcactgtttaagactacccagatatcacctcttccagatatcttgggttagtggcctcctcctggctcccacagttctgggcttccctgctgatggctgtgagttgaaattctattgggagtttggccagttgctggcccagaggaggatttaggaagagtgtgttgctccctgaggtctctgcctccctggctcccaccccaggaccaaccttcgagctctgcaccgaggagctgccctggacttgagtcccttgcatcggagtccccatccctcccgccaagccatattctgttggatgagcttcagtgcctaccagacagcctttatctgccttggtgagcctcccttgcccgccacacccagccttggcctgggcctcccctcagacactggcctcagttggggagaagagtgctcagcaagtactgccctcagagtttgtctgggaatgctctggggcagcagcaagaaggagggacccccctgccttccctgcccttaagaagcttattcaggatgggggtacaggagccctcgggaaattgagtgtgtaccctccacatggagatgaaccctgggtgccaccaagtattcacatgggggtggacccaggtctggaggtgtcaaattcaaaatggtacattcctggctgggctcagtggctcacacctgtaatcccagcactttgggaggctgaggcaggtggatcacgaagtcaggagatgaagaccagcctggccaacatggtgagaccccgtctctactaaaaatacaaaaattagccgggtatggtggtgtgcacctgcagttccagctattcgggaggatgaggcaggagaatcgcttgaacccaggaggtggaggttgcagtgagccgagattgcaccactgcgctccagcttaagaaagggctgtgtcacatttggctacctacaaaggtaatgagatccctgtcactgggggtatgcaagcagagttccatggatattgttgcagtctgcaaagggggtcctgccctgagagagttggaccagataaccttccaggacccctaccagccccaagtttctgactctccccttgggtactgcagtgagaaaagcactctgaatggtgaggggctgtggcctgggttgcacatccaagggccttgtatctctccctccagttccttccattctcacctccttgcgggaggagaaggatggtaaaggagtagatgaattactaggacaaaagtcatagcgtctcttcttggtagcccttatgcctccaggcccttttgtagacatcattctctaatcagttggccagattatttcaatagacagtccttgggcacctaccgtatgccaggctctggcttgaaggaatgcaaacatcagtttaatatgtagccttatcccccagtaactcaaactcaggagaaactggagggaaataacatttgcaaagtattttgtgattttaagagtttccacagacattatctcattggatccttacaacagcctctgaggtagggactattatccccattttacagaggaagaaactgaggctcaatgaagtaaagtgatttgttcaaggcagcatagctaggcagtggcagagcagagatctaaaaccaggcctgcccaatcccaaagcccttggttctgggggcagcggggatggccagttttcctggaacctgttttctgtccccctgccactcccgcccctggcagggctcctggtgcagcagatcatcttcttcctgggaaccacggccctggccttcctggtgctcatgcctgtgctccatggcaggaacctcctgctcttccgttccctggagtcctcatggtgagtgaaacaagacatggagggctcagggactccttagaggtccgctaacagcgaccacctccccaccccactggcaggcccttctggctgactttggccctggcttgtgatcctgcagaacatggcagcccattgggtcttcctggagactcatgatggacacccacagctgaccaaccggtgaggtggcatctgggcttgtggctccctcaggccctcgcctcttcttcggtgtctctctctttttgtgtcctccctccactgccatctatcccttctctctatcaaggaacccagatgatagtagaaagagcttgccttacccatagagaaaagggacaatggctcagcccactccaaagtacctctctacatacccggcatggggctggaagtacccccgtgaacctttcttgctttgggaatcggtactgctctcccctggatcctctgtttccttaaaaccatgcccctccccactttgtagcaagggagttccctgtcagatgacaagtctgtgggagaaccttggctcccaggggaacttggaattagcagacaggggacccagaaaagggaggtgggaggcatcagggtcatagaaagactcagatggacctagagttaaagcccagctctgccactgaatagctgacagccttggctaagtctcccaatctctctgggcctcagtttcccatctcccagcatggtgggttgaaagagagaaggccttgcccagggtggggtgcacagaagacatagcaataaatggtaggcactcagtaaatacacagcagttctgggcatccaggtctgacactgaccctggggagggagctctggggaacggcctgcctcagctttcttctcccatcctaggcgagtgctctatgcagccacctttcttctcttccccctcaatgtgctggtgggtgccatggtggccacctggcgagtgctcctctctgccctctacaacgccatccaccttggccagatggacctcagcctgctgccaccgagagccgccactctcgaccccggtaaggtcactgggcggggctggaggattgctcaggctacccaagcagtgaggaaggcatctgccctgccccagggccgtgccagctgatcagttcacaccgatgcctgtagctgcatgtgccacctgtgtgcccctgcgctgtgcctcctgtggccctgcagcacgtgcagtggatgtggggtgttctagcaggtccacacgtgcccatgcagccaatgtgccacgtgcttggtgtgtcgacatgcttggatgcagggagtgcacgtgcactccctgtgtgtgtgttaggggatgtctggatgcctccagtgtggcccctgctcccccagcattgccatccgccaccccaccccaggctactacacgtaccgaaacttcttgaagattgaagtcagccagtcgcatccagccatgacagccttctgctccctgctcctgcaagcgcagagcctcctacccaggaccatggcagccccccaggacagcctcagaccaggggaggaagacgaaggtgcgccctcccactgggaatgggggaatagagcctacccagcttcttctaggaaggatgtgtgcccctccccagcacacagagtgagcgccaggaaaattctcacttcctctcttccttggctgcctttggtcacccctcctggtctgatctcagggtgattttttccatgatatgaacacacacatacacacaccatatgtgtgcacacagagagaatgaaacagctgccttcctaaggggctccgtcactgcccccgcttctcccttggggcagggagtatgactcctcctttccttctgcccagaagtgtgtgtagggaggggacactaagccagctccagacccttgtcccacccagcttccagtccatccacagacctcaccccccacttccatgtgctgtctgcaggggacatcctaagcctcacgacctgcacacgcctgggattttcaggctctctgatcaggtctgagggccagggagggttggctgggtgtttgctgagtgactcacagaaagtccgtctctctcagggatgcagctgctacagacaaaggactccatggccaagggagctaggcccggggccagccgcggcagggctcgctggggtctggcctacacgctgctgcacaacccaaccctgcaggtcttccgcaagacggccctgttgggtgccaatggtgcccagccctgagggcagggaaggtcaacccacctgcccatctgtgctgaggcatgttcctgcctaccatcctcctccctccccggctctcctcccagcatcacaccagccatgcagccagcaggtcctccggatcactgtggttgggtggaggtctgtctgcactgggagcctcaggagggctctgctccacccacttggctatgggagagccagcaggggttctggagaaaaaaactggtgggttagggccttggtccaggagccagttgagccagggcagccacatccaggcgtctccctaccctggctctgccatcagccttgaagggcctcgatgaagccttctctggaaccactccagcccagctccacctcagccttggccttcacgctgtggaagcagccaaggcacttcctcaccccctcagcgccacggacctctctggggagtggccggaaagctcccgggcctctggcntgcagggcagcccaagtcatgactcagaccaggtcccacattgagctgcccacactcgagagccagatatttttgtagtttttatgcctttggctattatgaaagaggttagtgtgttccctgcaataaacttgttcctgagaaactgtc

SEQ ID NO: 9789 - DNA, 16173 bp, Homo sapiens
cagagttgagactagtcagagcctggatttgaacctagtgttcttgcccactgaacgtgctgaagggcttggaagctggagaccgaagagaggcctgggtgggctcactgcaggccccatgtctgcccctccagcatgggtctctctgcttgtttcaccttccaggggcctggaagatactgggactgttctattatgctgccctctactaccctctggctgcctgtgccacggctggccacacagctgcacacctgctcggcagcacgctgtcctgggcccaccttggggtccaggtctggcagagggcagagtgtccccaggtgcccaaggtaaccgctgatcacaatggcctagggcagaggggcgcacagagcaacctactcaaaccacagtgcctcctttgagctctgattctatgatgggccgccctgcagccttccattgtgcatgggattccatgccttcaaacatgtgccccttccaagcttggctgctctgcaggagaggcagggaacaaggtggctgggcccagccctcaggaactttaagtctaggaggtggcggagaaggggaagtgggcagagtagggggaagagaaagcctgaaatggcccccacccccaatgcctgtgttagtgatcccccagcttccctttggtcaggctggagagggaatgggagtgaagcttgatggaggccggcaagtgcgaagtcagggatggtctaagagggctgagaggagaattccggaacctcaggaccttgctcactggctgctggctggggctgtgaagctgtccagtctagaactcaaagagtgatggtacaggctttagagccagacaacctgagtgtgaatccagcttcaccacttcattcattcactcacccattcattcaacaacatatttgaagcacatactttgtaccagggacatttccaggcactggactacagctatgaacaagacaaacagtccctagcctcccaagagccgtcacttcagaagggcagacatgacacgcaaacaaaatgatgccaggtggtaccaagtgccttggggaaacagtgccacctttctgagaccgtttctccatccgtccatggagctgataacaccagtccctcagggtggaggtgaagactaagaggttgctttgagagggggaacttggtggctttttttcaccacctagaacctggcacatactaagctctcaataaaagtatattgaaccaacaaataaatgaatgagtatacaaaaagcccacccccaggaaggcctcagccctgaggagtagggcatagactttcctgatgctcaggttgaaaactatatgtaggcaaaggcaggctttcgtgtgattttcagaactgttcctaatgctccgggaacacagaaacagaaagaggtgtcctttccagtggggggcaggagggaatcaagtgatctcctcctcttggctcctctcaggcccgtggggatccaggagcctgggggaggggtgagcatctctgcagggctcgagaaggggaagtgggcaggtttgcgctgggtggcaggttgggaaccatagagctgaagccttcccatggccccccagaccaccctcagggcccagtgtgaggtgggaagggcaacggattctggttcttggctgggggaagaaggtggaaagtagtctgtctgggtgtttgtctgtccagatctacaagtactactccctgctggcctccctgcctctcctgctgggcctcggattcctgagcctttggtaccctgtgcagctggtgagaagcttcagccgtaggacaggagcaggctccaaggtaaaggggcaggcctgggatgagctcttcctcagcacccaagacagccctactcccccgtatctgtggtcccagatacatggccgtgcttgatgtagggcccagcacagaatagatgctcagaaaatgtttgctgagtgactgcttagtcctccctccctaggcaaaagctggactgggcccttgactggcacccaggatacccgcggcactgggctgtgtgaatagtagggacttaacaaagcagaactgagtcagaagccaggagagtcatatctctgtctgtgaaacactgagatctggctggagagacagcctggagccttgtgcctaatccgagttctgcacataatgagatgattcaggaagcacccagggcagaactccattatgagtcaactctaggttggatgtggttgaataatttcagataaaggggagggctgagagggcttcctagaggaggtagactctacaagggcctgaaggacagggagatctagagtgatgagagaataaggagcaggcattgtaggcacgggaaagagcatgagtaaaggggaagagatagttttgtgtctgttttgttcattatatttgcagcactgggtgggtcttggcccttaatagatactcagcaaatatttttgaatttttgaatagatggatgaatggatggatggatcgaaggaaagatgtatggaaggaaggatggatggatgaatgcatcatggtaaaagagaattcttagaagatacttcaatctcactaaaaagccttctaagcacctaccatatgtcaggccccgggctcagtgctgtggacttggagctgatggacttgtgtctgatctccaggagctcccagtgtggtgggggagacagatgcggcacaaaacacctgcagtgcaatgtgaaacctgcaccgggtgttgggactgtggtgcagggggcggggtccactacttctttctggtgagagaggaggaggaagaaagctctgcagagaccctcaaaggggaaagaagaacagactcaggagaaagtcttaagacatagaggccaaagggcgtggcttctcttcagacagggcaggggaaggaaaggcttgatgggaggcacctggccagccagcaggtaggtggtggtgccagctgctggcccagggaaggtggagggaggagcaggtgctcctgggatgatgcttggtcctgagggtgtactgctcaaagtctggagctcagcagaggggctgggaccgggtgttaactcggcaaggtcagactgaatccagagagtgagtgagatccctaggcaggatggagaaccccgggtcccttttgggctactctggtccgagaaggcccacggactccagactcggctcccacgtggcaggcagggagttctgagcgcttgtagctcctgcctattgaggccaacacccctcgaggaagcctgtgtcccctcctgtttacagctggctctgaaaagggagcggccccccgggacgacacagtgcctgaggcatgcccctttaccttctcttccagggtttccaccaccccatctctctctccattgccagcctttcctcccaggcttgagaggtgtacaatcctctttggactttggtcaaagaggtttaagtctcaaaggacccccatcaagctttgagctgacccactcctgcccgggatcccagggttgtcatggcaacaagtgacaacagcctgtgttctcccagtgattccaggcaggggctcaccccatcttcccatgggcctctgctacttcacaggcagcttaaggcctggaatgtggcttagacaaatctggtcacccttgtgatctcccttgcgcagtggcagcaggagaagcctgagggtgtctgacctggaatgaccctcttctgtgtcctggtctaggatgtgcccgtgggacacaagcttccctttgccccagtttcagctagcagaggccagagggctaggggtgggaagaaacggtgaagagatgtgactgagtaaagcaggcgagagttggagacagatcttaggaagaacttcctggcattgatggttctttgataggagactggccttgtatttgtgagagagaaaagggaagctttggagggcacggacctcatccccacaggtcagccccatccacactcaccaccaccgccatggccaacaggtttttatggagcacctgcttggtgaacactctagttccctgagccagggacccacgaatgggtcgaggcagatctcatctgcttgttcaattgtctgtctccacaggggctgcagagcagctactctgaggaatatctgaggaacctcctttgcaggaagaagctgggaagcaggtggggtctctgacacaccctttgtgggccaatggattgggctggttagcagccgtgcttgggaagctggcactgggcagcatggcaggggcagaggggaagaatgaccagcctctggggctggccctcagggaatgggcttcccctgaggaccccgcacctgcctgggtctttctgcagctaccacacctccaagcatggcttcctgtcctgggcccgcgtctgcttgagacactgcatctacactccacagccaggtatggggttgggagctgaggccgagcgtgacaggggacgttaccctcccttgcacagaatggctgcagtggaggactggctcctgctccccagaatccttgtcatcaagagggacaactaccagcttgggacagcgggaagaccctggcctggccttggtcatttagggtcctgctggcccttttcctgggccccttgggagggaggagggctcccgggcctgagtggtgctgttcaccatactccttcctttgaggactacaggattccatctcccgctgaagctggtgctttcagctacactgacagggacggccatttaccaggtatgtccctcaccctgtactgccatctgcctctggagccctgccctcaacccccaagcctggagcagttccggcccaacccagctctccaggtgctccatccagaaccctgaccaggtgctgcaggccatcttgggagttctggcctacccagaagggccggggtgttcactcttggactcatgaagtgactcggagcattaattttggaggccacataaacacgaatttaaatcctagctccactatttacctcctgtgtggccttgggcaagttatataacctctctgaacctgttagctcatctgtaaaaaggagaaaatagaataattttcctctttgagtaattgggaagatttagcaagacaacatgtttgataaactctgcctcaccacctccgaaaaaaaaaaaaccccgaaaaaaccaacaacaacaattaaaatcctgggagatgggtatgattattctccactttacagatggggagaatggaagcttggagaggtgaatttgacttggccaagtttctgcacagctaatatctcagcgtagcctaagtttgaatccaagtctgtccagctttaattcctgtgctcatttactttcacaacatagaaaaaccagaaattttacattccaaagtttagatagatagatgatgggtaaatagatagaggtgcagacacagtcatccctcagtatctgaggtgggttggttccaggaacacccctccataccaaaatccaaaggctcaaatttctgatatacgatggtgtagtatttgcatatagcctacacacattctccagtatacctcgttatctctaaagtacttataatatcgaacataagtgctatgtaaacagttgtcctatgtctgggtgtggtggctcacacctgtaatcccagcactttgggaggctgaggcgggcggatcacaatgtcaagagattgagaccatcccagccaatgtagtgaaaccctgtctctactaaaaatataaaaattagctggcggtggtggcgcgggcctgtagtcccagctactcaggaggctgaggcaggagaattgcttgaacctgggaggtggaggttgcagtgagccgagatcgcgccactgcactccagcctggccacagagcaagactccatctcaaaaaaaaaaaaaaaagaagaagttgtcctactgtattattttttatttgtattatttgtattgaattgttattttttattgagggtttttccccaaatatttttgatctgcgcttgattgaattggttggttgtggatgtggaacccacagatacgcagggctgactatatgaagttacggtgctcgaaggcatgcctttggcctattaggctgtgattgcacctgtctgtaatgtcctcatttagaggcgtgagatccctgctctaaggggcagataagaacactgatgggcaatgggcatgtggctggggcctgtgtgctgccagtttcttccccagcgtctcccctgttagcacagaaaaccctttcctgggatggggccctcactgtggggctcttccaggtggccctgctgctgctggtgggcgtggtacccactatccagaaggtgagggcaggggtcaccacggatgtctcctacctgctggccggctttggaatcgtgctctccgaggacaagcaggaggtggtggagctggtgaagcaccatctgtgggctctggaaggtgaggcctccagggagcccctgagggctgcagtggggaatgaaagcggggagacccaaggtctatgccctagtcagccatggacacactgggggcccttggacacattccttcctctctctgggtctcgattgcctcatctccaaattgtggcagttggcgcttccagttctgagcttccatgaaacctgaagggacatctcagcagctcctgtcccttgcctgcttctgtggcatcttcccccaccacccccagtgtctctgaccaactatccaggcatggagatgaggaaggccatgggatgggggagctgagggtggggaaggagggaagagacggcgaagggagatggtgaggatttctgagcgaatcctcgtggcaggggtctggcgttgggcagggcacaggctttctcttccccactccctgtcttttggggccgtctcctttctccttccctcctctgacaatgagctcctgaaccagggaaccatcttggcttccccttctgtggtctgatgcctcctgcagccacctacttactctgcctcctgggcgctcccaacagcgctgtggaggggactgagaagtgtccccacttgacacatggggaaggatttgcctgaggccatccagcagggcagagtgcagccaagagaacgcagggctcctgaagcctaggcgggggccttctccatctccttgggacaaagcccggtgctgaggactcaggaggcatgcgccttctgcttacttggggaccccaggctgtgacggatgggcccccggcttctgaggagtaacatgtggtcagagcgtgggctgccagcgttgcaggtggaggtgtagctgctccgcagctgtacctgaccattaacatcatccttatcctacagacctgggcatgctggtcatggcggggcagggagtggggggtgggcagaggtgcacggagtgaccacttccttccctgaccacctccaccatctccgtgagcacctcagttcccgtactagaggctgccctggaactgctgctgagggcaacaaactggacaggtgacaagttccgggtgagctgaaaatgtcctctcccaggagattttctgagctggttgcaatctggttcataggcaggtgcagacatggtccaggtcagcccacaaccaacctcagacccttgctcacagtgaccctgtaggtcagcatcattgatcccagctcacagggcaggacattgaggctcaaagacaaaatgagacacatccagggcaaaggactctgcttccactcatcatgtcttatatttttaattgcatgttgcagtttccaagctcaaaggctcccactttgaatcttcttgggccaaacagagcaacagttactctttaaatttgcagatgaggaatactgaggcccaggaggattacagatacggccaaagccatcccgcaacctgggctccagtgtcccttggtctgtccttcgcctaaggagctaatgtcttctgagctcagagcttctgttaggactgccacccagcacttggaccataagcctggcatcactcacagagagctcagactgagtcaggcaaactagattagaatctctgttccatcacttacaagctgagtgaccttgggcaaagtgcattacctctcctgacctcaatttccccaactgcaaaatgagtgctggagtgaaaaaggaacacttgcccttgaggccctcaatcacatgagggaagacagatctatcccccaaagcagggcccagaagaaggcaggcacaggatcccagaggtggcaaagagcaggaagattgtgtgagtgctggggtttgggggtgcccaagttgggaaccagtggagggagagagaggtaggaggtagatggatggagatcaaaggccaggcctgtggccaagggggctgctaacccttcaaccctgtgttagcctgtacactcaccaggccaggctcagcaggcgggctgttcacctcctggcagcaaatggtccagaatgtgccctcgctgcagcccagctggctccagaagggggaccacagaggctggagctatgcatgcacagtgctttctcccaaccttgcttctgagaaaagtgtccctgcgagggccctggaggagggagctagggaccagcagaagggcctaggtttctgtagcatcatttttagccctggctgaatctgggaagcacctggtggctttaacattcccgttgctcaagccctgtgccagacctactgaatcagaaactctcagagtggggcccagcctctttgagtgaacagccctcccagtgattttttttttcttttgagatggagttgtgctctgtcgcccaggctggagtgcagtggtgcaatctcggctcactgcaacctccacctcctgggttcaagcaattctcccatttcagcctcccgagtagctgggattacaggcacataccaccaggcccggctaattttgttttgttttgagacggagtctcattctgtctcccagggtggagtgccgtggcacaatctcggctcactgcaacctccgtctctcaggttcaagtgattctcccatctcagcctcccgagtagctgggattacaggggcccgccaccaggcctggctaatttttgtatttttagtagagacggagtttcaccatattggtcaggctggtctcgaacttctgaccccaggtgatccaccgcctcagccttccaaagtgttgggatcacagtcccagtgattctcatgcaagcaaagtttgatcaccactgtagtaggcacccaataaatattggttggttggttgatttcaattcatttctgatggaaataaatcatgaaggctctgcctttggaaagcccccagagcagtggctgtcagtcctgactgcacactgaatcaccagtgttgctttcacaggctaaggctgggtcccacccacagaaattctgatttaactggtttgggtgcaggctgggctatgggcgagttttagcagctccaggtgatcctaaaggcgctatcggtgctgagatccaccactctaatccctgtggctatgtggaactagcactcaccttttctgtgtttgctctccccgtccttgagattctggtggtgacacgggcaccaggaacacttccctggactgactgatgagatcagggtgcaggcatctcaggctcattctggatctgcttagaaatggttacacacctcactctatcattcctagcagcatggctgtctgggcgaagccctctctctgagcctcagcttcctcttcagcccagtgggaacagttcttctgtctaaccttgcggggttgctgttacagtccagagcaagactggatgtggacgtaaggtgggagagttgcagcctgcacccctgaaattcttaaacacccaggcttgttcatgacacaccatcatgcacacactcattgtgtgcatggccagggagagggtgagggagctgggtgacagcggctgcctccctattctgatggactcagtccacaccgatgtggactcacaccctctatgccctgaacgaagaccattagtgcagacgtggatggggccttatggctcacattatcctgagagctgggcagcataacggcgtgcggtatgttcacgagcaaatgggggcctggggagaaggagtgccctcctgaaggccacatggccaagaagcagtgaagctggaggcagatgccaggttggatggaggtcccacagcaatagaagcagcaacagcagggtgaggactaggtctgcagactcagagctggtttcatctcttgaccactgtatgtcactgggaagaatggggtggccgaagtcattggcttacactgcatctgagacctgggggtggggccaagaggcttccacacagagttcagtttggggcagggggaactccccacaaggcaccaccctggcaggggttctgaggcctccaggagactctccagaccctgacctctcactttgctcattctctgcccaccagtgtgctacatctcagccttggtcttgtcctgcttactcaccttcctggtcctgatgcgctcactggtgacacacaggtgagtgacagactctggctcacccagcgccgaggtggggaaggagtgggagtcctgtgggcctgcggggaggccctgggcctggagggagggaagggctctgccggcccgggctgtcatggagcccacctgtgcgtggctgcgctgcagtgggagaaggtggggctgggtcctgcccttgggccttcctgtctggttggggaaacgtctgtgagtgtgagggacatagggcaccaccaactcagggcagctagtggagcttgccccctgagtaggggccaccgggtgggctggatgagagggaaggtggcctggggaagctgcacctgcccgggaatggaaggagataggaggtgaggactgtgtggacgagaacagaggctggggtggccctgccatgtgagagtgtaggtgaggggtagcctggtggcatagcacactggagaggtggtacgggtctcgccatgccaccttgcttgccctgcagcggtgagtggtgaggagcactgaaggcccagggcaggtggaaggggcagcccgagcacttacccatgtcagagaactggcccatgtctcctgcgcacttgccaggtctcagagctcttcccagggatctttttccacaggtcacccctccttcttctggcattcaaggctcctcagcctgtgcttgccttgcctctttacctgttggctgtgctgtgtgtcacttccattctcactgttgtttctcacttttctgacttggctcaggttgagccttctgcctcgttttgtattcctcgttcactgtttaagactacccagatatcacctcttccagatatcttgggttagtggcctcctcctggctcccacagttctgggcttccctgctgatggctgtgagttgaaattctattgggagtttggccagttgctggcccagaggaggatttaggaagagtgtgttgctccctgaggtctctgcctccctggctcccaccccaggaccaaccttcgagctctgcaccgaggagctgccctggacttgagtcccttgcatcggagtccccatccctcccgccaagccatattctgttggatgagcttcagtgcctaccagacagcctttatctgccttggtgagcctcccttgcccgccacacccagccttggcctgggcctcccctcagacactggcctcagttggggagaagagtgctcagcaagtactgccctcagagtttgtctgggaatgctctggggcagcagcaagaaggagggacccccctgccttccctgcccttaagaagcttattcaggatgggggtacaggagccctcgggaaattgagtgtgtaccctccacatggagatgaaccctgggtgccaccaagtattcacatgggggtggacccaggtctggaggtgtcaaattcaaaatggtacattcctggctgggctcagtggctcacacctgtaatcccagcactttgggaggctgaggcaggtggatcacgaagtcaggagatgaagaccagcctggccaacatggtgagaccccgtctctactaaaaatacaaaaattagccgggtatggtggtgtgcacctgcagttccagctattcgggaggatgaggcaggagaatcgcttgaacccaggaggtggaggttgcagtgagccgagattgcaccactgcgctccagcttaagaaagggctgtgtcacatttggctacctacaaaggtaatgagatccctgtcactgggggtatgcaagcagagttccatggatattgttgcagtctgcaaagggggtcctgccctgagagagttggaccagataaccttccaggacccctaccagccccaagtttctgactctccccttgggtactgcagtgagaaaagcactctgaatggtgaggggctgtggcctgggttgcacatccaagggccttgtatctctccctccagttccttccattctcacctccttgcgggaggagaaggatggtaaaggagtagatgaattactaggacaaaagtcatagcgtctcttcttggtagcccttatgcctccaggcccttttgtagacatcattctctaatcagttggccagattatttcaatagacagtccttgggcacctaccgtatgccaggctctggcttgaaggaatgcaaacatcagtttaatatgtagccttatcccccagtaactcaaactcaggagaaactggagggaaataacatttgcaaagtattttgtgattttaagagtttccacagacattatctcattggatccttacaacagcctctgaggtagggactattatccccattttacagaggaagaaactgaggctcaatgaagtaaagtgatttgttcaaggcagcatagctaggcagtggcagagcagagatctaaaaccaggcctgcccaatcccaaagcccttggttctgggggcagcggggatggccagttttcatggaacctgttttctgtccccctgccactcccgcccctggcagggctcctggtgcagcagatcatcttcttcctgggaaccacggccctggccttcctggtgctcatgcctgtgctccatggcaggaacctcctgctcttccgttccctggagtcctcgtggtgagtgaaacaagacatggagggctcagggactccttagaggtccgctaacagcgaccacctccccaccccactggcaggcccttctggctgactttggccctggctgtgatcctgcagaacatggcagcccattgggtcttcctggagactcatgatggacacccacagctgaccaaccggtgaggtggcatctgggcttgtggctccctcaggccctcgcctcttcttcggtgtctctctctttttgtgtcctccctccactgccatctatcccttctctctatcaaggaacccagatgatagtagaaagagcttgccttacccatagagaaaagggacaatggctcagcccactccaaagtacctctctacatacccggcatggggctggaagtacccccgtgaacctttcttgctttgggaatcggtactgctctcccctggatcctctgtttccttaaaaccatgcccctccccactttgtagcaagggagttccctgtcagatgacaagtctgtgggagaaccttggctcccaggggaacttggaattagcagacaggggacccagaaaagggaggtgggaggcatcagggtcatagaaagactcagatggacctagagttaaagcccagctctgccactgaatagctgacagccttggctaagtctcccaatctctctgggcctcagtttcccatctcccagcatggtgggttgaaagagagaaggccttgcccagggtggggtgcacagaagacatagcaataaatggtaggcactcagtaaatacacagcagttctgggcatccaggtctgacactgaccctggggagggagctctggggaacggcctgcctcagctttcttctcccatcctaggcgagtgctctatgcagccacctttcttctcttccccctcaatgtgctggtgggtgccatggtggccacctggcgagtgctcctctatgccctctacaacgccatccaccttggccagatggacctcagcctgctgccaccgagagccgccactctcgaccccggtaaggtcactgggcggggctggaggattgctcaggctacccaagcagtgaggaaggcatctgccctgccccagggccgtgccagctgatcagttcacaccgatgcctgtagctgcatgtgccacctgtgtgcccctgcgctgtgcctcctgtggccctgcagcacgtgcagtggatgtggggtgttctagcaggtccacacgtgcccatgcagccaatgtgccacgtgcttggtgtgtcgacatgcttggatgcagggagtgcacgtgcactccctgtgtgtgtgttaggggatgtctggatgcctccagtgtggcccctgctcccccagcattgccatccgccaccccaccccaggctactacacgtaccgaaacttcttgaagattgaagtcagccagtcgcatccagccatgacagccttctgctccctgctcctgcaagcgcagagcctcctacccaggaccatggcagccccccaggacagcctcagaccaggggaggaagacgaaggtgcgccctcccactgggaatgggggaatagagcctacccagcttcttctaggaaggatgtgtgcccctccccagcacacagagtgagcgccaggaaaattctcacttcctctcttccttggctgcctttggtcacccctcctggtctgatctcagggtgattttttccatgatatgaacacacacatacacacaccatatgtgtgcacacagagagaatgaaacagctgccttcctaaggggctccgtcactgcccccgcttctcccttggggcagggagtatgactcctcctttccttctgcccagaagtgtgtgtagggaggggacactaagccagctccagacccttgtcccacccagcttccagtccatccacagacctcaccccccacttccatgtgctgcctgcaggggacatcctaagcctcacgacctgcacacgcctgggattttcaggctctctgatcaggtctgagggccagggagggttggctgggtgtttgctgagtgactcacagaaagtccgtctctctcagggatgcagctgctacagacaaaggactccatggccaagggagctaggcccggggccagccgcggcagggctcgctggggtctggcctacacgctgctgcacaacccaaccctgcaggtcttccgcaagacggccctgttgggtgccaatggtgcccagccctgagggcagggaaggtcaacccacctgcccatctgtgctgaggcatgttcctgcctaccatcctcctccctccccggctctcctcccagcatcacaccagccatgcagccagcaggtcctccggatcactgtggttgggtggaggtctgtctgcactgggagcctcaggagggctctgctccacccacttggctatgggagagccagcaggggttctggagaaagaaactggtgggttagggccttggtccaggagccagttgagccagggcagccacatccaggcgtctccctaccctggctctgccatcagccttgaagggcctcgatgaagccttctctggaaccactccagcccagctccacctcagccttggccttcacgctgtggaagcagccaaggcacttcctcaccccctcagcgccacggacctctctggggagtggccggaaagctcccgggcctctggcctgcagggcagcccaagtcatgactcagaccaggtcccacactgagctgcccacactcgagagccagatatttttgtagtttttatgcctttggctattatgaaagaggttagtgtgttccctgcaataaacttgttcctgagaaactgtc

SEQ ID NO: 9790 - DNA, 464 bp, Homo sapiens
cacaggatcccagaggtggcaaagagcaggaagattgtgtgagtgctggggtttgggggtgcccaagttgggaaccagtggagggagagagaggtaggaggtagatggatggagatcaaaggccaggcctgtggccaagggggctgctaacccttcaaccctgtgttagcctgtacactcaccaggccaggctcagcaggcgggctgttcacctcctggcagcaaatggtccagaatgtgccctcgctgcagcccagctggctccagaagggggaccacagaggctggagctatgcatgcacagtgctttctcccaaccttgcttctgagaaaagtgtccctgcgagggccctggaggagggagctagggaccagcagaagggcctaggtttctgtagcatcatttttagccctggctgaatctgggaagcacctggtggctttaacattcccgttgctcaagc

SEQ ID NO: 9791 - DNA, 32192 bp, Homo sapiens
atgtgaaataacctagccaagttcacatagtgacaaggcaaaacttttaatatgcatcctctaaatattccaagattgtgtcctattctgccttagacttggaaatgcttttcagagatgttgtgtgatattaagataatttaatgtatgtcaaaatagacatgaaattaatactctaaggattaagagctggaatgcagagcatgtagatacatgcatgaatgatgcaaaataatactgataatactgctaaaactaataaactgattattcctttatttaaaattatctggtagcttcatttccgtagccactttgctctgcctacctttgtagttttatatttcctgtgcctaaaagatcttgctttctttacttatctattacttgctttccaacactaaggttgaacatcaggtcttttcaagatcattagttgtttgttatccagcccagtctttcctgatctagttgtctctcttctgtgtttccataatagttaatctatttataattttacttatctccacacactaacactactagtctttttctttttttttcttttgagacagagttttgcccttgttgcccaagctggagtacagtggcgtgatcttggctcactgcaacctctgcctcctgtgttcaggtgattctcctgcctcagcctcctgagtagctgggattacaggtgcccgccactatgcctggctaatttttgtatttttagtagaaatggggtttcaccatgttggccaggctggtcttgaactcctgaccttaggtgatccacccacctcagcctcacaaaatgctgggattacaggtgtgagccactgtgccgggcctaacactactagtcttaagcagaaggccttgattttgtttccttggtacctaacacataaatgacaaatgtatgaatgtaaggctggaaagtagaaattagaatcagttcaagtaagttcttgagtatgagactcaagaatgtttgcactttagtttgctatatactaattagctgctaaaggtttttgaggataataaaacagattatatatactacagaatatattaaaaggagacatatgaatatggggaaaactcaccaagaaagtgttgaaatagtctaattggttagtgatatagttttgagctggggtgatgacacttagaacagaaaagaaacaataaagaggatgaactgattgacttggcaactggttggatgcaggttaaaggagaaaatggaatatatagttagggaaggacaatggtacaggagaaggaaagacagatttgcaaaacaattttcagtctcagagataatacctgccatttttcttttcagtgaattacttcaaataatcttaagggtaagctgttctgttgcagtcacataggatataaagtaacctataggttaataaagtataatattggctggacacagtggttcatgcctgtaatcccagcactttggaaggccaaggcgggcagatcacttgaggtcaggagctcgagaccagcctggccaacatgatgaaactccgtctctactaaaactacaaacattagctgggcgtggtgtcatgtgcctgtagtcccagctacttgggaggctgaggcacgagaatcgcttgaacctgggaggtggaggttgcagtgagctgagatcgcatcactgcactccagcctgggtgacagagcgagactctgtctcaaatgaatgaatgaatgaatgcatgaataaataaagtgtgatatcagatacgctattcaagtccatacaaaagagctgtaacagtagtcatgggctgatctgtgtgtacctctgcctttaattatgaaatcatttttcagttaaacttccgtaaagtttatataaacatcaaagcattcttatgcttaagaacttgctgacaactctaattcttatcaaattagtagattttctagtggtatctggtaggtggtcaagctgtttgcatataaaatccaacccttttccccacacccaaatcccacctttgcttttgaagcaattttttgataggagaagctgtagccctttgccactgccttcattcttcactccattattttcttttggagattctggtggaaaaggattgaaactaatatctcatttatacttacttaaacataattccctttctcccaactcttctaactatgctcataaaacttcagagaaataaaaaagtagctcctggtaaagaaatggttaaacatgtttcaagatgtttgaatgcatttggaaactaaaaattatctttcatttagtatgatccagagctgtcatctcgacaatttggggttgaactgtcccgtttgaccagtgaagaccgaactgttcctttagtagtggaaaagctcataaactacattgaaatgcatggactgtatacagaaggtatttatcgaaagtctggttcgactaataaaatcaaggagcttcggcagggtctagatacaggtaagatagtgccctctaaatcataatgaaatacttttatttaaatagttcctttcatgctcttaaagttttcattacatgtcaatcctttacttagcagccagaagaatgcattcttttctgtgatgctttgttatcattttttggctttctaaagagtctttggtttcatttggtcaactcagcagacatatattgagcatataatttgcacttgggacagatctcatttaatttttgtaataatttagtaagattgtgatacctctgattgacaaagagaaaaactaaggtatagggaaattaaataatgagctgctgatgatgatgcaaggtgctgtactaatgtttttataatattcacaacaatcctatgaattagggatattattatccccatttacagaaaaaggaactgaggcttacagaagatcttgcccaaagactgatcgccaataagtgaccaaattggagttaaccccagatcttctgaattcataatctatttcccctttctctttattattctgactccaaggggtactctttcctgtgtatcatcttcttgcctgcctacactgatgacagttactcaaactgataattagtgagttgagcatgtatctttgtagagctgtagttttagtactggaattcatgcaggggactgactctggtttcattctcaacttctacattttaccactgttgggaaggaatagatctttttgaactaaacagagtaaagcatgtccttgtgtgggcaagaacctgtgttcaatgctgtttcttatgaacaaatcaatgagaaatgaattgagtatgaaaataataacaatgactggtaagactcaggcaggaggttccgtctacaagagacttggtctactttggtttacaggcagttactgactttgtctctgataccttgaaatagcacaagtgaaaatcaatcatcctgaatcttccccagtcatctaatctgtataaccttagggagtttataagtgaaacgggtgaaggtgtttcctttacattttctaagctcagttatcactgtccttttatctctaagaatgacttaaaattagccttactttcagaaagtgtcctgtatgcgttttttcatttgtcatgtaaaccattgttactcaaagtgtggtctgtggacaaatccaaaaccaggtaagtacagaaattgagagcaagcatgtagagacgtttatagcagtataacagtgcttcagcacgaaaacattcattcattcattcattcattcattcattcagagacagtcttgctctgttgcccaggctgtagtacaatggtgtgaccttggctcactgcaacctccgtctcctgggttcaagcaattctgcctcagcctcccaagtagctgggattataggcgtgtgccaccacacccagctaatttttatatttttagtagagacaggtctcaccacgttggccaggctgctttctgtctcctggcctcaagtaatcggcctgtctcagtctcccaaagtgctgggattacagtcatgagccgctgctcctggccatgatcttttattttacacatttcagtccacaacaggtttggaaaacaaatacacaagacgtattctttcaccacagttagaagcacagttccaaagcatggaattacattgtggaaaataggttagtcagtttgactaagaaacatgaagccggccgggcatggtggctcacgcctgtaatccctccactttgggaggccaaggcaggtggatcacctgaggttgggagttcgagaccagcctgaccaacatggagaaaccccgtctctactaaaaatacaaaattagctaagcgtggcggcgcatgcccgtaatcccagctactccggaggctgaggcaggagaatcacttgaactcgggaggcagaggttgtggtgagctgagatcacaccattgcactccagcctggccaacaagagtgaaactccatctcaaaaaaaaaaaaaaaaaaagaaacatgaagccttcctttaatgatgatagtttctaaagtgaattatttgaatctctttgcatgttttggctctgttaatctaactcttgtctctaaatagatgctgagagtgtaaatctagatgactataacatacacgtcattgcaagtgtattcaaacaatggcttcgagatttgcccaatcctctcatgacctttgaactctatgaggaatttcttcgagctatgggtaagcataggcttcctgggttagagagaaggcctatagttgggaaagaaatgccatcttgagtatagattatcaagccatcctctagtggtttaattcttatagattcaaaggtaagcttttgacagtgaatacaaaacggctagtatactgtcacctattcaaatgttgactttttagagactcatcaaaacgttagtgtcctaaaaattttctgagtgagacacttggttgcttcttacaaagaaatggaaagactggggttataaaacagattaaaatattaaaaataagttttaagattaggcttatgttcatttaaattggaaatctaggcaagaactatgtgtaaagctggctgttttatgccaagcttaacaggtttcagagtttagtttctcagtgctgtaagtgcgtaggatattgataaaggccttcctagaggtatttaggccctgaggattcataaattatgttgactttaatggtaaatcaatctgctacacaatgactgaaaaactagaacatctctatccccttgctgttattaaggattactgtgatataggttcaaactaaggagactgtttatgaatatagaactcaagcaaaaggagttaaatagttactgtgagttgctcttctcctgccctacaggtacaactactcctaaaactctgtagccagccttctttgcttcatagtgtctgggaggaagatacactgtataaggggggatatttagtcttagtttctgctcttactgtttttaggccttcaggagaggaaggagacaatccgtggtgtatactctgtgattgatcaactctcccgaactcatctcaatacactggaacgcctcatctttcatctagtcaggtaactttaagaagcaagggaacgatttttaatagtttctcttggattattttaaatagataaggaatttctccatttggaagactgacaggtatttattttttcttctatttataaagtcagtgtctcaaacaggtggttaggataccttggagcagaaatattcagctgagctggaatgcatggcagttgcttttctgcccttgtttgaaccatgtaacagcttcagcctcatggtggcagtgtgtagtttagcctgttttctaacagctgaactagaaaggatatataatctattgaaatgacctaattcatatgaggggttcagatcattctcaggaattgaccaaagaggcgtcaggagtagtgtctcttcccctgtgtgtaaatatcagcagtagttgagaagaaagccatctttatttttggttaaagcctctactctgcattctttttttttttttttttttttttttttttttttgagacacagtttcagtctgtcacccaggccggagtgcagtgacgcaatctcaggtcactgcaacctccgcctccccggttcaagtgattctcctgcctcagccccctacatagctgggattacaggtgtgcgccaccacacctggctaatttttgtattgttagtagagacaaggttttgccatgttggccaagattgtctcaaactcctgaccacaagtaatctgcccacattggcctcccaaagtgctggattacaagtgtgggccaccgtgcctggccgattctgcattctttggacatgttcatctagtgatcttggcctagagcaggtaggtcacaaatttcccttgggaagctatcggctgacctagactgcttcaaggaaagaacaagtgaaaatacattttccagagacaaaggaacaaaggaacaacttgggaaaagtctgcagacccttaaacttaatggatatccttctagtactatgcagttcatgtcatactgtcttcttttgctcatctcttctgcctatttccctatggtgctccctttttatcccttactcatttgttttttgttttgttttaattcttaggattgctctgcaggaagacactaatcgaatgtctgctaatgctttggccattgtgtttgcgccctgcattctccgctgccctgacaccactgacccactacaaagtgtacaggacatcagtaagactaccacgtaaggccagttaccataacctttgcaagacctcagggacttctgactatgtagtcactgtatccagatatcaaacatagtgaatgggttcataaattcaggtgtttttaagaagattgttggacactgctgggttttcttatgctgaggatgcaaactcctggattcaactgagcatcatttgtcttaaagcatcttatttttaaaatctggcttttctttaggactgcttgtagtttctaaatagattttaaatttccattttaccaaattatggacacttagtatcttcctgtaatctagtctaactgtggtcttaatggctctgaatcctttggtcttaatacttcagtattcctgtatttcaccttggtcttttttcttgaggctctgctttccttctaacatggttttcttttgctctcctcaatcttgactgcaaaaggaactttaaaaaatatatcaatatttggatcccatccccagagagtctgatttaattggtgtagcgtgtagcctgggcattgggatttgtaactgctctttattttgtattatttttaattaattaattaattaattttttgagatggagttttactcttgtcgcctaggctggagtgcagtggcatgatcttggctcactgcaacctccacctcccaggtttaagcgattctcgtgcctcagcctcccaagtagctgagattataggcgtgcaccaccatgcctggctgatttagtatttttagtagagacagggtttcaccatgttggccaggttggtctcgaactcctgacctcaggtgatccacccgcctcggcctcccaaagcgctgggattacaggcatgaaccactgtgctcagccataactgctctttagatggcttctaaagtgcagccaaagttgtgaaccaccattctaaaccttgtctctgagtttatcaagtaagggatgttaattttttccttcatctttcaactgtctaccacaaaaacagtctgtgagtgctatactttatttacttcacctcttaacagtttttttctctttccttctgtttcagttgtgtggaactgattgttgtggaacaaatgaataaatacaaggctcgtctcaaagatatcagtagcttggaatttgctgagaataaggcaaagaccaggttgtcactgattcgtagatcaatggtaagatgcaacacatggaatagtggaaaaatgggagttgtcttgggaatttaaatgtgcttttgtggtgtatacaaggattattatcagaatcttttttataaaaaacaagtaaaacgtcaccaaatctcaaggtgctatggattcctcatgtttaatctgctggctctctttagttacattatagaatctatgtgattaagtgtgcagaatttttcaaatcaagtatttagataaaatgttggtgtcttaataatctgccttgctttcttttcatgtcctttctatgaaaacgtaatcctcttctaacttttttctccacttccttccactgtctgttcccgcctttaatcgtgtcacttttggtggtcctgccaagacccctgggatgtagagaacttaatcatttgtaactgaatttaaatggaatcatttgattcttaaggaaatggaattccatctatgagtctactgtaatcaaaaagtatttctttgagtttagggttaggttttgagacagtccttgtaaaaccgataatttatttccttggtttgcccactttttaatatcttcctttgcaaccagtaacatataactccagttctcaatgaccactaatcagtagcttcagccttattgattagtggtcattgagaactggagttatccatatatgttaccctgaagtcagttttcaggataactggaaaactgctgcattaaggtttatttattgcccatttgccacccttcctctcagttgtaaaataaaattgtgacaatgagcacgcatttcagattcccaataaatctctaaagagaagcaggcttcatcatgcccttactctttcaggggtccagcagtacttcctcccatatcttcacagtttgcaaattagcactaaaataattctttttcttcctttattatttaatctgcctggcacagaataagtgcttaacaaaggtctgttgattaaggtagtgaagggtcttctgtaaaaacaaacataagcatgggctttttgcaggcagtaaagatattaaataaaactcatcataggggatactatctaaatcttttccccagaaattaaaaacagaaatcccacttaaaagtgaaacatttctgtagtatgaattttcaggagctcagttctgagaggcccaatttagtggtggctatccaggcaggaagggaagagccttttgctataaacctacttttcaaagcagatagataagctgcgcttttttccagtgctgcagaagatggatattcagtccattgcaagattaaaccttctcttttaatgaggcaatgacatgtacattctaaccttctgctttccttttcatgtccttcctaatccagaaacctgtactaattgcagttagattcatgaacattacccgcaattcagtctcggtatgtattaataatgcaatgtgtcacagccactctacattattgtctctcgttcatccaggaattgttccgccctgtctatcattcatgcctgtccaccctccatgttcggccccaagtcaggttctactttttgattacctttcacttgcttttctcttaatctctttctttagatccttcattttccttcctctgtattgtgtagttgaacagcatccatttaaaatacactggtttttcctctttgttagatgagcctccttttgggtttcttctttggttgaatcattaaaaggtgaaagttaaaagcattgagatatcaaattaatttctgctctatgagctgtgttcccagcaatctcctccactttattatttgaaatacttactattactttcagcatctcctatcattagtaatgcttatttgtccattcatatctgtgactccgatggtgtcctcccagatgtagaaatatggttcttatccacttagcatttatcagacagagctacaaataggagtgaactaatccaaattggtggactagttctagacttaaatattatggtatgctagaactcataccaggatctcattgctggtatccctcttcagttccattgattgtacaaaaaaaggaatggggggatggaaggctgagaacaccaatatttgtggaaaactgtccacctgtgttgtaaccattttattgaggaggcttaacttgttgggatgctaatacaagtcagtttttctttttgtctataactgcctcttaactccagcctgtcaaacttccctttcccattagatatcagttaccttaacagcatcttgaaaccaattctataattttcaaaaattcatttcattctagtatttaagagtcagttctcttcatattaaaacttcagtcagttttaatccagtgctcttctcacttcctcccagggcagactagacctttatctggaacttaaaactttggagggtaggtgggtaatttctgtttgtcagacacttctgcccttcgtctttcttgaccctttctcccctgatgttgagactgggaggagtgataggggaggcagaattctgtatgatatcttggtgttgagatggcagtccactttcttggttgttcaacactgctattctggctcattgtcagtaggctaagtaaagataagtagtagctccagtttaccctgttgacagtgaactcagttctatctcatttctgtaggcactgatagtcccttgcaagatatggttacatcttctggctaaatcctgggtgttggcattcacaccatatgggaagctgtcaaactcacagggcagatacaagttttccaaaattctcatatttgtttgaaagcttgaaatttactcactgacaacaaatatcgccatttgtttcacttgcagtaacagattcccttcatataatttcaaaccacgtactcaagaagaataatcaaactttgtcaattattgtaaatactgtttcattaataaagcagctaatttggcttgcaattcaaagaattgcactaatactctttcttgagataaccattagtatgtgacagagttgctgtatgtgtaatttccagttaatcatacagaaagttgaaaatagttaatttaacagttaagaagtaaataaaattaatttacacctcttgttcaatgacatgaagtgaaactgactttttaaaaactaaatgtgtggtagcaaaagaatatgaagactgctagaaccatttggtatcattaccttgattcacgtaacggtgacagcagttgaacccacaattgcttgtatgtaattagtacagatgtcaacaagtgaaaatggcaaatagcatcttagtataattatgaaaataattttgacattgtagaccctgtgaaatggttttgaggacatcatcacaccccagcatctttgctggggatctgtgggctacactctgagaaccactgcactataatacatataatactaccggctcactgcacttcacagaaatatttgatgagaataattccttttcatatgcaagatacaaatacctacaaacagatactagctgtatttaaagtgcttactaaccctgattatctggtgaaccataactgcaggcattgggatatgatttttgaacaagcttggatacctagttataataccacacaaaacaaccagtcttttcaaaaaaaagccttggataaaggatctctccttatcaggaaagcaaactcctcaggaagtggtctgataattcagttccttcctatttttgtgacttaacaaaaggcactcaacagtgatcttccgtcttgccctgaagtgctatttttgagtaaaatttcattaggattctgagatttgtgttttagctagttatattattattctgtctagataatgcatagttcctcctcctcacacatttaacccatagacaaaccctagtaacgtgtactttctttgggtcttcataaagtatcatgactttctgcatgagggtaatatatgtctttttctaaatagtcatcaggtttactaaaggcaatgcaattcattccttcattatcaccatgagtctcttttactgtttaggcttacttcgatttatagtatttaatttctttgtgcccatcaatcatgccttgccattccttcttgcattctttcgctatcgtgagccttacagaattttcagaagaaatcaaagctctcctcataggccttattcattctaacactggagtatcttctatttgtttccactgttatcttcttaaagtcttaggagaaaatgaaaaagtgagtttcaactgattccctcaaatagggtatcctatttccctcaaataggtatcactcagatcccccacattagagcatttgactctcaatatttttgttacagtctgagaagcctgtaatggactggtctcacagaattctcacccaaattaaataattaagactgtctgtttcagaatatcattcttagaaaaaatagaccatagaatcatatatagacttccttagacagagcatggcaaatctatatgattaggtgattgaatgtgggtattagaaagcctgtcccaaaaggaaggagggagagatggattagacagtactgtgtgccaaatatggtgagaatactaaggaagaagtacttaattctgcctggtggcacagggaaaggctgtagaagtgacatgtgagctagctcttaagggatgagtttaaattaagcagatggagaaagaactaccagttggtaaaagtcaacaaggtttaattctgtaaaaagctatatagcttacatataaacttgtatatataattgtgcagaagggaaaccttaagttaaaaccaaaataggctttgttttgaagcaaactctaagacattagtactatggggtcttgaagagtgagccaggactcacaaagtctcagagtttagtacttaatgtaaattttggtgctttatatcttatatttatgatagggaatgggaactgatgttagctactattttttagccataaaaacaatttcctcctgggtcgtcttcaaggttctcaataagaatagccaaaaaggggctgggagtggtagctcccagaacttcgggaggccgaggcgggcggatcacttgagttcaagaccagcctaggcaatgcggtgaaaccccatctctaccaaaaatacaaaaaaattagtcagatgtagtggtgtttgcctatagtcccagatacttggaaggctgaggtgggaggatcgcttgagcctgagaagcagaggttgcagtgagccaacatagcaccactgcacgccagcctgagtgacagagtgagaccctgtcttaaacaaaaacaaacaaaagagtagctgaaaagaatcctaagactaatctatttatttatttatttactttatttttgagacagagtcttgctgttgtcagcctgggctggagtgcaatggcatgatctcagctcactgcaacctccgcctccccggttccagcagttcttctgcctcagctttccaagtagctgagattataggtgcctgccaccgtgcctggctaatttttgtatttttagtagagacggggtttcaccatgttggccaggctggtctcgaactcctgacctcaagtgatccacccacctcggcctcccaaagtgctgggattacaggcatgagccaccatgcctggccaaacagactaatttaaaaagaagaagagataggagagttgtctaagaacttcctctcataaaaacatcagacataaatagtttcacagagaaaacgtaccaactctttaaatacataattacaatataatttaagctgtctcagagcagagaggggaaaaggtcttttttttaactaaaagagtctaacattgatcctcaccaccccccgccccatacacacacacacacatgcatacacaaagaaaagctaataaaaattgcatatagaaatttttttttttttttgaggtggagtctcgctctgtcacccaggctggagtgcagtggtgctatctcagctcactgcaagctccgcctcctgggttcacgccattctcctgtctgagcctcccaagtagctgggactacaggtgcccgccaccacgcccggctgatttttttgtatttttggtaaagacggggtttcaccgtgttagccaggatagtctcgatctcctgacctcataatctgcccgtctcagcctcccaaaatgctgggattacaagtgtgagccaccgtgcccagccacatatagaaatattaaaagcagcagagcacagcatggactctggactagacttttgggtgtaaatcctagctctagtttactagtagttgtgatatgggcaagttatttaatctccatgcctcagtgttctcatctataaattggttaatagtaccaaacttaggattaaatgagttaattttttgtttgctttttaattgagacagagtctcgctctgtcacccacgctggagtgcagtggcacaatcttggctcactgcaacctctgcctcctgggttcaagcgattctcatgcctcagcctcccgagtagctgggactacaggtgtgcactaccacgcctggttaatttttgtatttatttttagtagagatggggttttgccttgttggccaggttggtattgaactcctgacctcaggtgatctgccctccttggcctcccaaagtggtgggattacaggtgtgagccaccatgcccagtctaaatgagttaatatttgtaaaaccattaagaattatgcttgttatggacctctctccatagagagaaagagagttcttatacacacacccccatacacagatagcacttgatatataaatgtaggactgcctcatctatgaatattaattcaaaaatcctaggttaaaatatcaccggcactttgggagaccaaggcatgtggatccttgagcccaggagtttgagaccagcctgggcaacatggtgaaaccccgtctctacaaaaaaaacaaaaaaaaacaaaaaaaaacaaaaaaaaaaactacccctggtggcgagcacctatagtcccagccactagggaggctgagatgagaaaatcacctgagcctaggaagtcaaggctgcagtgagccatgactgcactccagcctgggtgacagagggagaccctatctcaaaaaaataaaaaataaagaaaaatttaaaataaaataaaaatgaatcagcaagcagaattcaatagcctataaatataaaaatataaatcttgaccaaggagggtttaacctaggaatgcaaggatgactctatgttaggatagctgttaatgtaattcaccatgtttgttgatctgtggagaaaaatcgtattatcctcatagatattttaaaagcatttgatatattagcattctttttaaaaacattcttattaaaacagggatatcttacattcttagcatgataaaaaatatatctgaacccaaaatccaacatcttgcttaatggaagaacactggaagcattctgattaaaatcagaaaaggcaatgctatccattatccccactattatttgacattgatttgaaggtactagataaagcaattaagaaaaagaattggagatataaaataaagaaataaaattatcaccatttccattatgattatatacatgcaaaactcaagaaaatcaatgaaggaacttaaagatgataagagaattcaataaggtgtctgagtacaattaataaattttacttatgcaaacaatcacttggatgatatgatggaagaaaaatgcccatttgtatattgtacacacacacactttaaacatcaacatcaaataccaaagaacacacttaacaagaaatgtaaaagatttgtacaaagaaagccttaaggctgggcacggcggctcacgcctgtaatcgcagcactttgggaggccgaggtgggcggatcacgaggtcaggacgtcgagaccatcctggctaacgtggtgaaaccctgtctctactaaaaaatacaaaaaaattagccgggcatggtggcaggtgcctgtagtcccagctactcaggaggctgaggcagaagaatggcgtgaaccccagaggcagagcttgcagtgagcctagatcgcgccactgcactccagcctgggcgacagagcaagactccgtctcaaaaaaaacaaaaaaagaaagccttaaaacctcaaatattacaaaagaagacttaaatacatttggaaagaaaggctaaattttgtaatggtgtcagttcttctaaattaatctattcatatattgtttcaatacccactaggagggaaagaggatattttcttaggctcaactttcagactcatatgactaccatgggctccacttggcatcagaatcactgaggatatgggactgggagtatagcatgcctgcagagagcctaagatcatcctcgtgtgggagcccttgcagcagtccacacaaccatcaatgagttatctttggcttctaagtcacaactcaggtgcaaggaaaaaggactccacatccaatggatgtagaactattctgccttagaagttttatgcctgtacaggaattaacctcttgtgaaattccatagatattgtttccagggtcccctcaaggggtatgtccagttacaacagactccactttcagggaattggaaatatatgacttcctatgggatatttataaattacttctccagatgcgatttatcaatcagattaatttttgccagaggtgatgttgcctaataacatcatttgcatcctgcctttatcaggtttccaggggtcctgagctagaacatttgaccaaagatcagttcttacacagacaaggaaagagtttcataactacttacaaatgaggtctcaacaaaaacagcaaaagaatactttggggatctttacaagttgatactaaaattcataagaaaataaagaagcagaataggaaaattctaaaagagaaaaataaaggattataatgtgagtggcatttcaaaggtctgggattcactaaatgatgtggggaaaatgaatatccatgtagggaagaaaagaaacaaaaaaaaagccgattcaggccaggcacagtagttcatgcctataatcccagcactttggaaggccaaggcaggaggattgcttgaagccaggagtttcagaccagccgtggcaacaatgcgagatatcatctctacaaaaaatttaaaaagttagctgggcatggtggtacatgcctatagtccgacgaattggggacactgaggtagaaggatcccttgagcccaggagttcaaggctgcagtgagctatgattgtgccactgcactctaggctgagcaagagtaagaccctgtatctttaaaaaaagaaagaaagaaaaaaaaaacctgattcacatcaaagactaaaacataaaagtactggaagtacagctctggcactccatcctggcagaggttctcactgccctgcatcctgtagaactcaagtaccctacctctctaccttaatactgccaaaatatccaagtagtttaactcagctcaaagggcaatcgggaaggagcacaaggggaaatcagcaaagttatcagctaaaccttttcatgcaaaagttgaaaccaagccataaaaggtggctgaagaggatacatctttagggtgaaaaaagtgcaaataaaaagggaaaaggggagcaaatggaaagagattaaccaaaaaacatttatcttcataaaacagaaactgaaaacaagccagaaagaagcttaagtgtgattaaagatctcttattaagtcaggggtcccagtatctcattgtacaattcagaagaatttttaaattattttataagtgtacctttttagagctctgaaaacacagcttttaagaagagaactccacttcctcccacttgaaaggaatgaattcagtgctagtttatttttctgtacaaactgagaatagttagctctctataagcctaataatgtcttaaactgcttcctgatcttggctctctgtcaaaagcatattatctgtgatgtctttggtagtggtagtccagtccagatttttctgataatcctgttaatgtgctataaaggattggaaatctgggtattgtatataatattaaattgtgatttagtaggacttgagacctactacttatcaacagttcaagataattgtatttgatattctcattttaggaacagtttgcctgcaaagtttaagccaggaagtcactggaatagttactgagaaaaaggatgacaatatggctttatattttttccagtacttgcattaagagttgggtacaaattattcatgtagtctgtgatcagtcaaaaccaatacaatccctattatgatggaaaaatataatcttggacagggctttgctattatataagaccattaaagaaaaaagttgaaaggttcagcaacaaaaaccaggtattattgtgtgacaaaaatgaccataaggaaagtaaaagggaagtgacgtaccataagaaaatattttcaattcctatttcaaagtctaattttccttaataaagagaagctcctataagtaaatagaaagattagctacccagtgaaaaatgaacaaaggatactataaaccacttctcagtgttatctacagatccttttcagggaggtctacaaggtcaaatttatttttatgatactgtcaagaaaatatttgcctttttcactctgtgacacactggtggtagaaaaacaattatggaaaaaaacactacaagagaatatacagtgaacatggatccaaaagaaaaaattccagtttgaaaaaagtaaattcatgcttattttaggaaagtgggaaagtgaaggatattattccagtcaggaaactactgttaataatttagtgtatttgcaaattttgtattactcatttttaaaaccaatggtatacaaccttatgtactgtttttaacacaatattagtattttctcatgtttctaaaagctccatgtaatcaactttttaaaaattactttaatctttttaagataattctaggctgtaggagtttccatttttctttgttttgtttaatgcttcttaaaagagatcagatctgttgagcttgtttgattttctttagccatattaaaagatttgcagctaactcatggtgaaatactccggtggccagctgatggtatgaacactgaaaaaaggcagctcttttattgaatactggaatgtggacactaggaataaactcagattttcaagctccttgaggcttttaaatcatattatttattcatttggctagaaatagtcaatgtcaaatggaactggatgatgtcctggaatttataacataaagaatactttgtcattttttgttaaatttgcagagtgatcttctgtttttagcttgtttttcttaacatgttttttccttgttgattttagaactaaaagtggaatagcaatattgtaatcctcctgattttatcccattaagtgttttagttttggaggagttagcctgaatgcccttagaactaccctccagcctttaccctatcacctgccctagatcatggatttctatttttgagacagcacttttcctttctttcttgccaaactcaactcagaaatttgtcagtttaaagtcacataattttcaaaggctattcgtatatttccataaatagctaactttgaaaaggaactcttaaatatcttttttattgcaaaatacaacacatacataacaacaaaacacatacaaaacacagaaacatattcagtttaaggaattattataaatgaacatccacataccaccccagctcaagaaataggacattgccagcatccccagaagctctcctctttccctttctagtcacaatcctctttctcctccaaaggtaagcagtaacctgatttttacattaatgacttactttattttttgtttgctaccaaagtatgtatccctgagcactgtagttttgctttacctaactttgagctttatataaatggtatcatctaagatgtattattttgtctctgattcatttcagtcaaccttatgtgtgtaagacttattcatattttgttgtagctcattttcataactgtatagtttatcagtgtatgcattataccacaatttagtctactgttgatggacatttgggttgtgttttggggaattatgattttaatggactcatacatgtatttttgttggagaaatatacaggagtggatttgcagggtcacaggatatatgtgtcttcagctttagtagataatgccaaactttcttccaaaatggttgttaatatgttagcaatgtgtaggaattcccaattgctccacctccttccagcacttcttttgccagattccttaattttagctattctgatgggtgtgttatttttaaaaattgtattttttgttgtgactctaacatgtataatgtgtgtgtatatatacatgttggccatttctgtatcctcttttgtgaggagcctgttcaaagctcttgcctgtttttctaattggattgtctgtctttttctgatgttctgtagggattctttatgaattccagatacaaatcctttattgttacttttgttgcaaattttcttccattctatggtttgcttttttcctttcttttttgatgaacacaggttctggattttaatgttgttaatcagtctttccctttaggatgaataccttttaaagtcatgtttaagaaaatttttcctttccacaatgccctgcagttccccttttattataaattgggagccttcttatgtgtgggtctgtttctaggtgctctgttttgactatctttgtaccaacaccaccactattttatttaccctagctttctaaaaataactggtagaataagtcatcctaccttcttcagtggtgttttgactattcttggctctttatatgccatataaattatgaaatcagcctcaaaaaattctcttgggatttttattgggattgcattggatctatagattgccttctggagaactgacatttttacgatactgatttttcccatctgtgaacatgatatatctcttcattcatgtagatcattagctactctcaaaagtgttttatagttttgtacgttgagattttacacatctttagtttgaattactactaggtatttaatatttaaatgcaatcataggtattattttaaaatttttattttctgttgcttattgtataaaaatacaattgattttggtatttttcatcttgtattcagtgactttgctgaattcacttattctaataagttttctgtggactcctttggattttctacctgtacagtcatatcattcatgaataatgatagtttcatttgctcttttgtaatccttataccttttctttctttttcttatgtaagttagaacctccagtatagtgttgaatggaagtggtgatagtgatcattactggcatgttcccagccccaaaggaaaagctttcaaccttttaccaccaagtgtgatgtttgctatagaatttttgtaggtactttatgagattaagcatgtgtccttccattccaggttttctaagagttgttattgtgacagaatgttgaattttatgaaatgcctttactgcatgtattgaggttttatcagacttttttattgcattgatatgacacactacactgagtccatttctaatggactacattagactactacattataatgtagtagtatcattatattatgtgtatgtagtagtatcatactactacaataaatccaacttttcatatatttaaaatttttatattacattttctatattacttgattccgttgtagttaggatattgtttaggatttttgcatgtgtttatgagtaaagttaacccataataatccttttttgtttttgtttgtttgtttgttttgagacaggctctcactgttatcacccaggctgcagtgcagtggcatgatcttggctcactgcagcctcaacctcctgggctcccgcctcagtgcttcatgtaggtggaactacaggcacgtgccaccacacctggctaatttttgtatttttttttttttagagaaggggttttgccatgttgccaaggctggtctcaaactcctgagctcaagcgatccacctgcctcagcctcccaaagttctgggattgtgggcatgcactactgcacctggcaataatccttctttttaatgtatttgttgtgttttgttatcaaacttaacgcctgcctctaaagacaagttagggaatagtttcttttttaattctgtggaagaatttgttatttcttcttctttgccactgaaatctaggcctagagttttgtttttggaaagattttgactctggattcaatttctttaatattattcacattcctaatttcttcattgatggtattaattagattttcatagaaatttctccactttgtctaaaattttatatttattgacatgaagttgtttttagtagtctcttatcctctttgggtctacaggatttgtagtgatatcccctttttcattacaacctttggttatttgtgacttcttttagtcttgctagggttttaaaaattttattagcctcttcaaagagctacatttggctttgattgtctttattctaatgtttgtttgctcttttctttattgcttttgttgcagggggaatttattatgttgttctttagtttcctgaaatagagtcttacatccttaattaattaattctttaattaattaattcttttctaatgtatgtatttaaggctgtaactttaaagtagacagagcttacatgggtttttatattgtttcattcaaaatattttctaatttccattgtgatttcctctttgaccatggtttgttttaaagtctatttcttaatttctgagtatacaagaatttttaattttctctttgtaactacattattagaaaacttgttttaaattactttaacggtcagataaattatttcaacccttggaattttgttgtcttgctgtgtgcgctttaaaatgagtattctctagttagatactgaagtctgtatatgtctgttagattgcttatatcaagttcagttttacatcatttctgattgcgtgtgcatacttgttctctcagtactgattatagtctattttttaaaaatagttttgtcaatattttactttaaattttttgaagcaatttcttaggtacatacatatttggaaatgttattcttcataatatgaacctttgtcattgtgaggtatccctctttatcacaggtaatacttcttaaagtttactttgtttacagttaatatagctgtactagctttattttggtatttgcatggtatgtcttttttttcccatttctttactctcagcctttctgaattcacatgtctcttataaacatcatatagataggttttctttttttttatatggcccaacaatcttcaaattttaataggagcatttcatctatttatatttaatatactcaccaatatatttgggcttaaaatctactgttttttatgtgctttttatttgtcctgcctgatatatgttcctttttcttttcttccttgccttttttgctctttcttgcatttttttactacttttttattccattttttcttttgtttggaagttttactcttttactattattttagtcattaaccaaatggtgaaaacagatctgtgatctatcagtatttgctaactagtagttttatctttttcccagataatacaggtgttttaatatgccttactgtgatatgattttgttcctcttgttgttgtgtatcttaattatctgtatgttttaaattcaacacatcgctattatgttttatgcagtcactatttaaacatactcacgtttcattgcctttcattatttctcacacctctaacttttcttcgagacattttcaatctttccttcaatatttcctttagtgcaggtctgctggtgtgagattctcctcttagtctgtctgaaatgtctttatttcaccttcattcctgaaaattattttctgtatataacaatcaagcttggcagttactttttcatcaccatgaaaatattccattgttttctgcattccattatttctgttgagaaataaactttgaatctaatagttattccttttttgcaaggaatttgctttttgtaacgcttttaagtcttttttttgccttaggcctttagtttttaacagtagtttgtctaggtatagacttctttttatttctttcttaggggttgtaggctttcttaaattcctaggttaatatctttaactgcttttaaaaaattctctgccatgatctcttcaatatttattctataggatctctctcttgtcctgatatttgcccaggctggagtgcagtggcgtaatcttggctcactgcaacctctgcctctcgagttcaagcaatgctcttacctcagcatcctgagtactgggactacaggcgcatgccaccacaccgagctaatttttgtattttcagtggaaatggggtttcttcatattggccaggctggtcttgaactcctgacctcaggtgatctgcctgcctcagcctcccgaagtgctgggattacaggcatgagccacggtgcccagccattcttttactttcttttgtgaatttttccattcttttgtttcttcctgcttggttcaggatttttcttttgacctaatttccagtccactacttcagctatgtcttcctgtctccttcagcatggttattttaaatctgatagccacaatatctggagtcttttagggtttctgttttctgtcatttttactagttttcatttacattgtcctgtctccttttgtgcctgttacctttgattatttgtcagagtatttgaaaaactatttttaaaatattttgaggcctagataatgttactttcttccaagaatgttttcatttttttctgcctggtcctaaagtattagcaatctgagattaattcatttttagggattagaattttctggaccattcagatgacttgaagctagactacagtatctgcaaggacttttataatttcagtttactcttatgtctaagaaacaaaccttggggatcccagtgtcaggcacggaggttttgccaggcagcaacccacaccattgagtgggtctggctccaacttttattctctatcccaaggtgatggcagactttttctgtaaaggactagagaataaatattttagtctttgtaggccaatctctgtctcaacaatcaactctgccattgttctgcaaaagcagcaataaacaataaattaatgagataaatgtattccagtgaacctgtatttacaaaatatgtgcaaggctagatttgccacacgggctatagtttgccgtcctctgctgtagcatgtcaaaagctctgtttagagtcacagccacttctgacatttagatcagcactaaatgctggactagtgtctccttaatctatcttgttagctcttcagtgccttctagcatatgttgagtttttatgtttcttagcaggagattaacctaaaaagtttagtttgccactaccagaagaaagtcatatataaagtaaccaatgtttaaaaaaaaaaaaaaaaaaaaaaaaaggaagaagcagcaatgagattttcacactctgatctcaaggatagaagtttcctaagaaaatatatctcactagcaccctgtgttctataaatgactacattttgtttttgtttttcaaaactgagttttagaacatacttctatggtcttcctagagagattatgcattccaaggctacagttatagagcactgttatccatcagaacttactatgatggtaggaaatgtagatctgtaccagtcagtgtgggggtcacaagctacttgtggctattgagcacttgaaatgtggctagtgtgactgcagaactgaaatgttagttcaattttaattaatttaaaaataaatacccagatgtggctattttgtttggaatggatgcagcttatattaaaagaagaaactcatctcagtacacaatgggttcttacactcccacctaccaaagtatccgttttccagtactcctgcaagaaatattttaacttaaatgtgttgtatgaatatgtctcactaaatatcctaggcctcgcagagtgtttccatttattcttatcattcacctggtgtgatggaaatacacttgttatcctaaaagagcaatgtaaaactgatgcagtcactcaatttactttctaacatgaatttttctctgcagggaaaggggcgtattcgtcgaggaaactatccaggtccatcgtctcctgttgtagttcggttgccttctgtgtctgatgtctcagaggagaccttgactagtgaggcagccatggagactgacatcacagaacagcagcaagcagctatgcagcaggaggagagagtactgactgagcagattgagaacctacagaaggagaagtgagtatccaggaggaaggggagagacagttatagtctgtttttgtttccttccttctatcgtttctttattttttcttatttattatctcctgtgtgttaaacactgtgtcagatgatacaggagatgttgagatgacaaagacgtgttgtctatactcaggtaacagtgtgagagttgttccctctgggaagccagttccatgagctgggaaacctgaggctgctacagtgatggtctgtagaggctgactgggaggaggacacagtatccacagggcatgtcagtcttagtcacgattcatctagcagtaacagtggggagccaagatgaggtactggagtcctaacaggtcggagaccagcctccatgaacagatttattttgcaaagaagagaaggaattcttaggctaagccaaagtccctttcaagaatgggcattattcacaaatccatgaaggaaggttattagccaaagatccatatgaccatgggaacagcaactagatggtcatagtaaggctatagccctagagggtgctaggatactagatagggaaattggttgcaatttaggagagagacaaatgagaagctcttttacctccattcatcactgttgcagggattgggtgacagtatgccttggggataatatgaacgtgccatggttctccctacaggtgctgtgtaatagttctggtcgacattgatgactcttaggaagtcttaatgggatctttattcctgagttccaggatcccaggtcttgagtttggtttataaggggatataagactgttaaaatactttcttggtctctcatgattgattctggaatataggccagctaaaaaagcagctggggctcagctgtaaaaaacatgataaggcaaagatgatgtacattgaccaggggctatttgctagaagagtgatctgaaaagaagacccagtttggctttgatgcagatggtattggcagtcttgaaggattaataggaattttcaaggaaggggagagtctctagaaaaagaaagaagaacgagcagagtctcagaatgcacatggcctcagacaattgtaatgctggtgatactgttcttgaaatgattgttcatggatctcaagccaggtaaaggggaagtaaaggtaaggggctctgttagggaagagacttgattagaaggtgagtaagaattggaaggataaggaggttgtgaacagggtggagtgttggattcagagtaatgacaagctccaggatctgtgcattggagaaagtagcttagataaagtagaggagaatattgttagaagttgcagacataaaggaacttcagtgttagaatattcagatgagtttttacaaagatattaattgaatagatcaggtgatgtcaggcattagtgaaaaagcaagattaggatctgagtaccaaagacctcacagaatgtggggcattactgagaggtagctgggtgaccgtgatgaagaagggagactagagaatacgacaactgaagatggcataagcttcaaaggacagaaaagatcaatcagtgtttttcttcgtctagaggtctctgtggtgaagatagagggtatcgtctatagccagttagtaagcttcatggaaaatagtttaagagctggaaggaatcttagaggttatctagtttaatctctttgttttgtggtaggaagctgaggtccagaagagaaaggtactttcctgatgcattatggatattatgaacaaggttagagccctgatctcctgcttatcagtccagagttcattttactgaaagatctcaccactacatctttcttcaccctacccttacccctattattggtcctagattggctatctgtcattttgtcctttagtccatatagttttagccttcaccatatttggcatacaggtcctcatcaccacctggatggggacagtaaaaatggactctctttgcttcttagattcctgacttccatggaggatctttttttctgttatcttccttccacttcctatcaaatgctaatggtttcttgattgtgtcttacagggaggagctaacatttgagatgcttgtactggaaccccgtgcctctgatgatgaaacccttgagtctgaggcctccattgggactgctgatagctcagagaatttgaatatggagtctgaatatgctatctctgagaaatcaggtaagtgaacatggtagaccaaagactccagatttgttttgcaaaggaggaataaagattccaaaactaagacaaagtcttttaagaatttactgactgtacatcagcaataacaaagtcttgaggaattttgtccttttatccatataattttagccttcatcgtttggcatacaggtagtgacctggatggggataagaaatataaggggataagaaatataattgtctttgctacttagattcctgacttccacggaaggtcttttttttcctgttgtctttgtaaagcttccatatacattgtttatcaaaccaactcttcaacgtgattgagttttttgttttttgttttgttttgttttgttttttggtaatttaatgttttatcctgtacttaccacagagaaaagccaataatcacaatatatgttgtcttactgacccataacccattttctgagggtggcaggcattgtgccccactgtgaggtgggactatatacatatacaaaggaggtgtttaactgggtggcatgtctcagggagatgtaggacttacctgcatatcctggcagtttttgaaatgatagtgactgttctaggcctccgctgatggcatagtcaaacaccagatttccttggagatgattcggaaatgctacatagagaaatggatggtgagctcttactgtgactgtgcccatagtaagtcatcctggaccctctgaatcttatcccacccaatttcatgtgtgaacagtggcatctattcattatatgatgatttgctttagagggcactgtcatttacatctttggtctcttttttgcattagaaagaagcttagcccttagctccctgaagacagctggcaagtctgaaccttccagcaagttgcgaaagcaacttaaaaagcagcaagactctttagatgtcgtggactcttcggtctcctctttatgtctgtctaacacggcatcatctcatgggaccagaaaactatttcagatttattccaaatctccattctaccgagctgcctcaggtaatgaggccctgggaatggaaggaccattgggccagaccaaattcctggaagacaagcctcagttcatcagcagaggaaccttcaacccggaaaagggcaaacaaaaattaaagaatgtgaaaaactcacctcagaaaaccaaagagaccccagaggggacagtcatgtctggccgcagaaaaactgtggacccagactgcacctccaaccaacagctagcactctttggaaataatgaatttatggtctgaaccggcagatgtgtgtccctccgtggctacagagtggtaaacaaatctcacctttggggctgcgtttcatcacctcgtccacaatagtcaatcctaattgtggtcctgcctcttttctaagcatatggctaagactgtatgtgctgaattcctgggcctcctgcagaagcagaaagcctgctggggatggtgccagctgtgccttggctgttgtatttgaattgagatttttactatacaaagccacctagggcctggggatttgggtcagttgtagttgcctctcccccaccctcttttcccttcccaaaggtgggtgttgaactaggggggatattgctgtcctgagggaccctctcatttctgacatttgaagaaaacgtataaatctttcttaaccgtgaaagcaaaagcctttgggtttattttgggatagttaggagctagggtagaatataatttttttccaaaaacttacttacaaacaaaaagcctaatccctctattttaagatttctgaaaaaacactccatgttatattctggggaaagcaaaaacaaaaaaaaaaaacaaaaaaaaaccgtgattgtttccattaagccatcagagcgtgtctcagatatcttgttatacagtgaagaagagaatacctattttttttgatgatgtttgatgtcatagtaatcagtgctggtttaactcctgtttagttcctgccaaatacattgcatgggctgaagtgtcagtagccatactgttctcatgtttcttggtcctaggatcagattcttctacattattttttagtttcccagagacatggtgatccctaaacttatgaaggtttcatcctaagccattcaggcttttctctttgtatagattaaaccgaaaaccgcatatgagcctgttcatctgctggtggattcccaccacagactcagactcaaacaaacaaacaaataatgtgaccgtttagttagtttccaaaaacattcacatacaatattgcatgaataagtaagtaagtgttacagaaagctgccaaaaaataaaaaggtttttaatatgacctatctaactaactaacttttatcttccttttctcagactatcagtattaaatagatggaaaaaaatcaaggactacttgaagctatttttgttaatattctggttactgaagtttattgtaaatatgtatgtatagtaggcatatttctttttaaccttgtgcttccctccttcccatggaatttcttcccacagatgaggggccactggacagggggatgagagccattcgtccctgggttgagggaattagtaagacatcattttcaccactgggtggtcttcatacacatgagttataatagcattttaagtatcttagcatttgtgggattagaaatctgtttttgctatttataatatataaaaaatgaaacatgatagcctttcttgagataagtatgtgaaatgtttatttttaaagttactaaatgcatcttgtcttgctactacatgcactgctctgaaaaagagcctttaccatctataacctgtattttgggtattcttccttttcatacttctttgaagttgtggaaatattaagtcttttgttaaggcagagtctctctctcctgttacacaacactgaacctcacgccactgcctcagtggttattggccagccccagaggttagacttggagcataattctgagtggcagctaaaggtagcaggagtcttacctctccctactttgggttcagaattgagccagagaaaggaagctattaaaatctccagaataatgatagttaatgagcaaatgttatgctttatatcccacagacatctgccaccttgttc

SEQ ID NO: 9792 - DNA, 1768 bp, Homo sapiens
agggtagtaggccttgttggctatgatcaagagatgaagccataactcttaaaaaccttcagaaccaaacgctgtgtctgcatccatctgttctcactggccctctgcatggtaaagttatgtcaccacaaagtgatgccgcattacaatcacttatgaaactgttagcccttaatatgcatcacatttgtggttccatagtgcttctcctttgcttgtttgatctctgcatggcagcagtggggcagctccacatttggagcccatactccaaaatgcagagcactcttctcacagcacacattcccagccccaaacaaaacctgaattttcaactctgcccattaaagtgaatgtatccctgtaatttagtatgtacttattatggaaaatgtaacaaaagcagagaagtgtgatttcattctgtatcacaaattgaagcaaatcaacagcaaatacagcaggattcagggaggcttagtttacaacgtactttgtacctcctgccatttaaattattttgccactctgggcttctgaaaacacaaagggagatacagccctccaactatgagccttgcagagagagacaaaagggccagaggtcctgggatggaatactagagcccccaccttctcatgctttggaaacctgccagagcgcttaccctgctggaagattaatgaagactccattctgtgtttcataacagtagcgttgttttctccatcaaaaacagagggtcacagaaatgtgctgaaaagatgtggtccagcaaggttctgtagtcccacctcagtgcctgtgggctgtgtttttcactgtaacaagcactttggtaaactagaaagaagaaaggattctcaggatgtgttcaaagctaagagagttttcattttaaaaagaaacatacatactcactccatggctttcctcatcctcctctcttttttcttcttggtgggaagctggatgcggggcatgcatcattctgtatggacaaatgtgttatgtccacccatactcttgtgacaactccccagcactgtcctgcaataccatgctggccttggtagtaaaactccttggtatctgtgagagtcctctttttctatgccctagactacttttaaccacttttctctggaatgactcccacatttgattgggtattgaaagggtaacagcaaaatgatgattgtggagatggatctattaggtctcatgttggtcccctggttgaaactattttcaaaaaagccccaacaatgggcctgtcaccttgctagtcatccattcttaatgcctatttatcagccctctgaggtcatataaaagttgcaccttttgaaccaagtatttgtatttactatgggaaaggtgtggactacagattcgtattatattattttaatggattttaagtaatttataagtatgctgagtgtaaattttttttaaaaactgtattataaaaggacatatcctgtgaaatataacattttactgtttaatagaataattctataagaagaatgatttatctcacccacggaactgattacattccggatgcaatcaataggcactttgtaatttcctttttgtttttttttctttgctggggggttgaggggtaacaagatatcatctgtataaagtgcagtttgtgtcactcaaaatatgcactgtatggctacacaaaagcagcttgatgaacaaatcaccccatggctcattaaagaacaaagcttccagaagcagcaa

SEQ ID NO: 9793 - DNA, 518 bp, Homo sapiens
aatccaattttagaaaaatcccaaaaggatttttcatgccagtttacagtcactgctctttactagcctcaggcactattactctactttctgtttctatagtcttaccttttctggatatttcatgtaaatagaataatacactgtggtttttgcatgtggctttttagcataatgtttttgaagttcatctatatcattgtgtttatccatagttcagtcttctttaatgctaaatagaattccattgcatggatatgtcacgttttatttatccttttatcagttggcagacatttgagttgttttgtatttttggctaccatgaataatgccactatgaacagttacgtacaggttttttcttggacgtacattttcagttatcttgtgtataaacctgagagtggaatttctgggtcaagtggcaactctatgcttccagttttcagaaactgccatgctgttttccaagtgactgcaccactttacaatcccacctgcagtacctgagggtt

SEQ ID NO: 9794 - DNA, 5086 bp, Homo sapiens
agagagtcctgggtggatttaagcgaacagtttgttataatgaaccagaaatacaagattccactgaaactgaacagttgacagaatatggttgaacttaaaccttcaagggaaacaagggcaaaacaaagctaatgagtggaaaagtccaagattagtttgggataaacatgaggatataattgcattttagcatggctatcttctgacctcttccagcagttcgtctgccatcattctcccttctgacacacctaccaaatcaaatggcttctgatcctctatattgcagtataaaccaaccctatagtacccctctggtcatgatacaaacccagaaggaaagtctgtaaatctcatacaaaggtagaaagtgcaattcaacccaacacgctggttatggtatatgtgctgtcaatgtacatggtagcaacttgaatcaaaccagagctgctaccacatgtaagcaacctcttatgctgccctgtagtgatgtcaatgttctcagtttactaaattatcaatgtggaagaacgcatttttgagctccagaccttctaaacattttaaacaggctatcgaagaggatgtaacagaaccctatttcagaaacctaaggatcagggaggaaggaacactgaccggtttttctgggatgtttctgtgggggcaacagggatgaacaaaagaaatgttagcatgtcagagcatatgacaagtgaggggagacagaggtaggaagagggtgttctagccacaaggctaatgcatttgtgttcaaagagaagtctgggcaaaggaggggaaaccccccctcccccctaaaaaaacaaaaacaaaaaaccaaatcaaaggacaaaagggtttcatacaacacagtatcaaaaagtaaaaggaacacactaaatgcacaagctggtggcaagtaagtccacagcctattgtgataggtccatccagcatcaatcagatttcttctcatctgttatctcaaggttatttacagatgtgttgactaacaagagtctctcatgggaggatgggcaggcttcaatcattggtttcgggatctgtctgcgccatgtaggcatccaactcagcatccaggtgtccttttgttttcgacatatatgcatccaattggttgtccagctgctccttggtcaatacagggcgagcaagggcacctctccctcgtccacggcctcggcctcggcctccaaagccccctcttccccgacctatcataccccgacctggcccaaaggggaaaaaaaaaaaaaaagagacagttacaagtaagtttaataggtgctgtagtaaatgccccttaaagcagtggggcctagctgagaaaagctgaagggcagggcaaagaggagaaatctggaaaaaaaggaaacccaatgggtagaaagcaacacatggaaagcacacataatgaatcctctatcacatgatcatctctaaatgctattttaacaaattttattctatcaataaaggaaaataattaactggcaactataattttaaaaaaccttaatcaatcctaagataaaattacctaacatttgagattcactaagttcataattaaaatacatgacagataaccccatttggtaagatagggaggtggtaacaagagcacagagcatcaggggtgtgaagacaagacagttttcaaattaagtttattggagacccttctggaaagtcatctcacctgtccttaaacttatcaagtctaatgagctagctgacctcatgtgtcaggagactgagtttttctgacacaggaacaatgtaggggagatttgaaaaaatattttgagttgtcctagctatttctacctttaattctagttaccttatgacaactgacaattgtggttatctgagaagcagtgtgaattcagttaacaaaacaaactcagctttttgaaaagctattttagtctctcccaccctcgtgatgtctctcaggatccaagtcaagataatttggaaacatgttatttcatcctgaaacccaaactagcttgcacttcactcagtaagtatcatataatgggagagaagaaaacaagcccttggttatcaacttttctttcctaacagttattattccttggcaacttcaaggtcataagttatggaagacccaagacaccttttaagagaaccaaagcaaatatacacaggggcttcaatagtgttttttttctggacaggtgttgggagttttccactaagctctaaaccagaaggctcccatgagatttagtattaacagcagcaacatcattaaactctttcccaatctgggtcatgaggtcacaagacaaacatcaataaatttcaaaggcaagattatcaataagagccagttagttaactgataataattccatcttgctctctaccttaagcaaaaaaagtcatctctggttctccacaggcaccaaatgtgacattgaatttatttggtttcagagccaatgcccagctccaagtctcaccaccctcttaactctacttcatctttgtatctctctctctcttctatattctcatgtgactcaaaccaggatttggagctacagggtggtatgtggtggtgatggtggtgggacaggggcagagaaaggcaaaaccctaaactgaccattttggggggtattttcaactatacaatttaaatttgcaagagcttggaggaagatggcatataatctggctctataatatgcacttgattgattcttggaaaaatcatgagacttttgcactaccagcatggtaatttgaaaaataagccagtttcaaataacaaaacaagacaaacaaagaagcctgcctatgacttgaagctgtgcagaaaggtggctctgagtttttaagggaggaaagtaagggggagctactctctgaagttggtagctgactaacctctaccaccgattccgccacgacccatagctccacgccctaggccccctctcccaggacctccacgacctcgaacaccacctcttcttaagcccattcggggagctacggctcgtccacctcggagcaggttttgaccttagagaggaggcatacaatgtatatgcaggtaaatccaagagacacaaagtagattctaaccaaaggaaggcggtgagggttaaatgaaggtaattcagttagtttttaggttggctggggcaagctgcatactgtgaacagattaagctactctttattcaatcaattcaacaagtctgaccacaaatccatttttggaagttgggagttaattcaattagtaagtacatacatttaataaatatctactgaataatcagatagatgcctagcattatggtaaatttaaaaataaatgctatggttcctgatctcaacagattcttctagggaacaagaactatacagggaacagagtaatagtgccccaaatgaacatatataggtaagtgctgtgggtcaacttgtcctctttttccagctgtatcagtgttttactagcaccaggaacaaagagatataggccaaaagacctataaatttcttatgtttgacttgtttctagaacttgaatgtgctttgattcaagcaacagcagggtgttttaaaatggaatggagatgacatgaattacctgttgttacgcaggtcatagcctctcaccattgcacattatcagaaaaggaatggtattgataaaagacatgcagcactattaaaaatatgtgatttcagaagttattatattaatacaaattcaggcttaaagatgttaaacaaacgtgtccataagcagcccaagagaaaagggaagggagtagggcccgacaattatcagggtacacagcactgacctcggagtgacatcccgcccctaagtagggttctggtggcacgtcccccacgtagtcctcctctgggcaagcctctctggattatgggtaggcctcgtcctccgattgctcccctggccagggcccctatgggtcggcctaaccgtgcctggatgttactcttacccaggcgctgctttaagctcttctggaagaaaaggtgttaggggattgagatcaaaaaagcaatccaacaggatttggcaactcaaagtgcagagaaaaagaagcaagtgagatgctggtgtgaagggagataaacctgttgtgggtgtcaaaaggatcccaaaccagaagcaagcctttgcctcagaacatgttatacaagcagcagaattttgatccagagcagaaactccaagaagctcaagtgtggtcccatgaaatgggcatctccacaaattacctcactagtttggctacagaagtcatacactgccagttgaaacttaagttttcgtaagaacattctatagttcaatcctggattgtactgcttttgaactacaggttgacaattatatgacttgattcatacctgcccatggactaccactgtcttcaaaggcttactcaaacaccataggaagttcatcacactctgggcaaaacttaaattacaagttcacttgagttcttgtgacttaagaacaagattgatttctcaaaaaggcccgtgtgctccatttttcctctgagaatctatttccagacggtccactttttaccttaagatgtaaataaacacaagaaagtcaaatctcctttccttacatttcttaaaaatccctaattccatgcctgcacttgcaaacagctcctttaaaacaatgatgaccttaaattaaaaataaacatgtaactcaaatgtatctccacagtcagccagccaaacgtatgttagaattattcaggtgatcacaaaactcagggccatatataagaacaagaacacactacagagatagggtatttttaagaatctgttctcaaaagaaaaccattaagactacatctcagagaattaaattccttcaaaggaaaaagggacagcaatagccctgaacacatccaagctcctagtaagcctggctgtccataaagccatcagtcaatctgaaagaaaataaattgtatagccccttcaggcttcaccc

SEQ ID NO: 9795 - DNA, 245 bp, Homo sapiens
tcccaggctgcccacacaatgaggcctatgactgggggctgctgccaccattaagggtcccagagctgtccagggcctgtctccaccttcaagagtcatcctgccctgcttcacaatgctcccctctccttccttccttgcccctggtacaggtggtcagccagggtccccagcacgtctgactgggtcactagccagggtgtgacgcaggtgggagagcccaccgaggcataagtgggagcctc

SEQ ID NO: 9796 - DNA, 469 bp, Homo sapiens
ccattttaggcctcagcccgcctgcacccaggcgctcattaaaacagcatgttgctccacatcgcctcgtgttgtctgttggcacgctctcgggattcgaaccgatacaagaaccttacaattttctttatgtaagagaatgtccttgttcttaagaaaagccagctgaaatatttagagagtaagtttgcaggatgtctataacttactgtcaagtgttttagacaggaagagaatcacataatggaaaatgtaaacaagtgaatgtgagaaaggagtacatgaaagtctttgaactattgttacaacttttctgtggaaatttacttttcaaaagtgcgtatagacatataggaagaacaattttagtaactaacatagttattttttagtagtgagatgatgggtagtatttcttttaaaaagatctgcttttccccaaatattctgtaacaagcatgaactatac

SEQ ID NO: 9797 - DNA, 458 bp, Homo sapiens
  SITE (431): n equals a,t,g, or c
aaaaattctgccacaaaagccacattcaatagaaaacatttttttaaaaaaatagctaggcatggtggcatgcacctgtagtcccagctacacagcaggccaaggcgggaggattgcttgagcacaagagtttgaggttacagtaagcaatgatcagctactgcattcccacctgggcaacatctctaaagaaaaatcaaacaaaaaacgacatacagaaagtatgcgctatctgatttcaaccccaagtttgtcctgctttaccaggctttctcctggggactggaggcagtggggacaagggcaggggtggggtgtgcaggggacagcagtgctccagcaataagagttacttgagagtacttcatgagggggtatacacaatagagggggagcaccagccaccaacatgcagaggaaaacaacaacancaacaaaacagaacccaagtatcagga

SEQ ID NO: 9798 - DNA, 466 bp, Homo sapiens
aaaaattctgccacaaaagccacattcaatagaaaacatttttttaaaaaaatagctaggcatggtggcatgcacctgtagtcccagctacacagcaggccaaggcgggaggattgcttgagcacaagagtttgaggttacagtaagcaatgatcagctactgcattcccacctgggcaacatctctaaagaaaaatcaaacaaaaaacgacatacagaaagtatgcgctatctgatttcaaccccaagtttgtcctgctttaccaggctttctcctggggcctggaggcagtggggccaagggcaggggtggggtgtgcaggggacagcagtgctccagcaataagagttcttgaagagtacttcatgagggggtatacaccaatagaggggaagccaccagccaccaacatgcagaggaaaacaacaacaacaacaaaaacagaccccaaggtatcaggagaag

SEQ ID NO: 9799 - DNA, 250 bp, Homo sapiens
gatatcttgtgacaggctcctccagtaaccagaggcaggtgagcgctgctctgatcaacaaacacaccgcatgtggtctccagctgcaataaacaagtggctgtgcacagccaatgtcctgtgtggtgaaggtgagaagagtgagggggagccaagctgcaaccctcagcctgaatgtggttggaattatgagagcagttgtcaaagttagtaccttgacatagtgcaatgtgcattaaagtgcacagtg

SEQ ID NO: 9800 - DNA, 2669 bp, Homo sapiens
cgcatggaggctgacaggacagtgaaggagaactcatccacgcgctgggcgagtggtgcaccccaactccacaggaacggaagctcctccagatcttgccttgtgttatctttccatctggctatttatttgcatcctttttaaatgtaagtaagtgcttccatgagttccgtgagctcctccagcaaattaatcaaccccgaagagggtgggtcatggtaaccccaacttgaagccagctggtcagacattctggaagcccagactcgtgactggtgggaaggagggagcagttctgtggaactgattcctcaacctgtggtttctgaggctatttccaggtagatggtgtcacagttgaattaactggtggacacccggctgtgtccactgcagaactaattgcttacttggtgtgtgggaagaaacccctacatattttgtcacagaagtcttctgtattattatggtgtaagagaacaggaaaaatgcatgttgactgttttttccacactcccagtccacaaaagttttctccacttatgaacaaataatgtgtgtgtgtgtttttttgtttttttgtttttttgtttttcctgagacagggtctcactctgtcatccaggctggggtgcagtggtgtgatcatggctcactgcagcttcaatctcccaggtccaagtgatccttctacctcagcctcccaagtagctgggaccacaggtgtgtgccaccatacccagttaatttttaaattttttgtagagacagggtctccctatgttgcccaggctggttttgaacttctgaagcgatcctctcacctcagcctccaaaagtcctgggataacaggcatgagccactgtgcctggccatgaatacaaagaattttaacagacacaagatgcagatatgaaggaatagatgaatgaatagacgcgtgctggacaggatggagtgaagggatgtgtgaaaaggtaggaatgagtgggtaagcggaggaggacagtgctgctcacagaagttcatgagctaaatggtaaagtgagtcctaggcctttgatggatacgagggaaagaaggtatgttactccctcagccttacccataggagaagtaatgtgaactgattttaggagcaaacaggaaacttacccccaaatctcactctagtatactagaaatcctttacttttgtatcttttaactaagagggaaataaataacattgtcagaccctcatttcacagatgaggaaacttaggcctacaaagggcaagtggtttgccaaaatgtaacaagtgggtttggagctacaatgggactagagcttaggtctcttaattcccattccttgctcttttcaccacccaaagctgacactagaaggaatgactacggtgcagaatttccaaaccctaatttgaggaaattccccaaggggactttttcatgcaagctggagagcctcaaaaatgcaatgaatgcctaggaaggttctaagggccctaatattctaacctgaacactagaaagcagggcaagcagcatagtggggaagcaggggactgggacccccgtccctgagaatggaagtaataggcaagaagccaaggggcttcccaggacaagctaaaaaagagcagatccagactacaactacagaatcctgtaagattctgaaactttgtcacttcctttctaaggcttccttcctaagcctctctgtgaaactctttgaaaaggggtatgtgggctagcctgcaaggacagccagaagggagaaggatcacatccccctccgtggccaggctctgagagacagaaatccagtgaaggacagagcatggggctgagtgtctgtagcccactgcattgagggcaggagagctcagggcaggtctgagtcatcaccattttctgtgtgtttcttcctaataagtgaaataatgtgtagtgtctagcacggtgcctgacagctcacagaaaatccccaacttcccctcccccaccgccatgccttctaactctcggtgagatgaacatctctactgggaggggaagccattgagggaagaaatgctggcaccttgacatttggggaaagaaagggaaggaattgttttccaagtatctactttgtgccagaaatggtgttgggcaatttactgattgcctcatttaatcctttgacgtatcctaggagttaggtattctcagccccatttccagaaagcaaaccaaggtgaaaaagagttaataatttgttcaaagacatatggaaaagtgccaggcatggtggctcacgcctgtaatcctagcactttgggaggccaaggcgggcagatcacttgaggtcaggagttcaagaccagcctggccaacaaggcgaaatgctgtctcgactaaaaatacaaaaattagccagaaatcacttgaatctgggaggcggaagttgcagtaagccaagatcgtgccactgcactccagcctgggcaacagagtgagactccatctaaaaaaaaaaaaaaaaagtcatacagaaagggttggatgtggtggctcacacctgtaatcccagcactttgggaggccaaagtgagaggatcacgtgaagctaggagtttgagaccagcctaggcaacatagtgagatcccctctttaggg

SEQ ID NO: 9801 - DNA, 366 bp, Homo sapiens
aacaaacctgattgctttttttgatagaattacaaaattaatggataaagggatgcagtaaaagtagaatatttggattttcatgaagtatgtaattcagtgtttcataaaatctgtcttacaatattaattcaaattggcttgaagatgattattctcagatggtgggaaaaccatttaaagagctataaacaaggggtaatgataaatggcaacagatagaattggggggaggaatgagctgtcaccaaggttgatttaggtctcgaattttagtatcttcattactaacatgcaaaatggaataaataacatgcaaatgcaattcgaaaatgacactaaattggaaggcaccataaacgcagg

SEQ ID NO: 9802 - DNA, 545 bp, Homo sapiens
tgcttctcttaggctaggggaagtgggagcttctgggggcacatttgtgctagtcctagccttctatctatcttatcccttgtgtgcgatttgctactcttgccaattagcttccattttctattactatctcagttacagttgaccatgcatatattctcttcagaatacgcgaataagccagtcacagcaatcagtgctatgcacatgcagactactactatggataactacagtgcgattcgttcatgactgagcgtggagcagagtccacacagaagttgatcgtggtacccaaggctgcttctcactcattctggaagcagaccgcaaaagtgaaaagcacacatcaggggaatacattcagttttcattattgacagttgtttttaaaaaagtatgatacgaaggcatttatacatttttgtgataggcattattagaaaaaacaatatccaggcactcctgaaccataagtttgtgagaactattatactgttagattaagaagcaaaagtatttattagacagataaatgtgaaaag

SEQ ID NO: 9803 - DNA, 545 bp, Homo sapiens
tgcttctcttaggctaggggaagtgggagcttctgggggcacatttgtgctagtcctagccttctatctatcttatcccttgtgtgcgatttgctactcttgccaattagcttccattttctattactatctcagttacagttgaccatgcatatattctcttcagaatacgcgaataagccagtcacagcaatcagtgctatgcacatgcagactactactatggataactacagtgcgattcgttcatgactgagcgtggagcagagtccacacagaagttgatcgtggtacccaaggctgcttctcactcattctggaagcagaccgcaaaagtgaaaagcacacatcaggggaatacattcagttttcattattgacaggtgtttttaaaagagtatgatacgaaggcatttacacatttgtgtgataggcattattagaaaacacaatatccaggctctcgtgacccataagtttgtgagaactattatagtgttagattaagaagcaagagtatttattagacagataaatgtgaaaag

SEQ ID NO: 9804 - DNA, 283 bp, Homo sapiens
caaagacccatggcccacaaagtttaaaatacttaaccttctggctctttacagaaaatgtgctaactcccggtttagccatgctgaacacagcactgaatatgttcccatactttcatacctttcctcatccagtttctttggtcgaggctgctgtccctgcatcttgcttgttctcagagttttgctttttcagttcttgtaacaccgtcatcatctcaaatatgtcactgtatcatacttaatcacacccaggtctttcctttagctaaaagaaatataa

SEQ ID NO: 9805 - DNA, 5401 bp, Homo sapiens
ttttgacatttttgtgcttcaagtgtttccagtgtcttgaacaaataaagaaatttttataactatttaaaatgaaaatgatagttttgaaaatgatagaagcataggaagtactctaattgtcctacaataaaggatacatctaactaacaagtaatcagtttcagattaaatatatatttatcatttcataatgatataaacaactgattgttacaccaggttaagaaaattactaaatgaaaaaaacagtagcataactaaagataacattaataaagtactcacagagatccttttactgtgaatatacctaagtatcataaaactgctaaaaagttagaaggtataaaattaccagtatggatcagattagtatttttgcttttacaggggtaatatcgttagcagcaataaagattacctttagtgctccgtaacttgaaatctgcagagcctttaaacactaaacaacaaaaagctacaaatccctagttttaagtatcagttcattttatgattaaggtttcttttttcattaaccctcattcttcagttagcttcatcttcagagcaaggtgatgatggcttgtgtgtgctagcaggatgaacgctatcttttcaaaacataatgccacagttcatgtacagctggcacatctatctgctttaccagcagtgtttttaaggatcatgcggattgaacagcaactacagcttaaggccctgacaaggtttactgctgacattcgtcttcatggagatggtcacccttatcgtacgctttattcgttacttattatcttgaaagtagaggcgacgtctcattgcatcctgatatcaccacatcatttttatcttctaatttaacaatttctcagaaacagctaacaagagtaatttttctagtttgtattgtactgtgactttatttacattttaattgatgttatataatatacactgtatattatataatttaaatatatatttcatgttttatactaaaatgttacattttaaaatacatatttattcttgcacatagtatcaccagaatcctaaaatattagcacgaaaagaacttcgggaatcatccaaaacaaacgttcttttcactaatgaggaaaccgaggttcagaaagacgaaacaatttatgcctaggatgatatgatttaaacatccaaatataaaacttacctactttggacatttttccagctacatgttttttttttgatgttgttgttttttgttttctttttttaagtacaagaactattaatttcatttttgcttttatatttaattaaaaattggtttgtctctggttgccttgcaaagttgtcttgtgttgtcaagactcaaaaagaacatgccacgtgttagcagaaaggtacagatgtaaacaaaagcttcataaatgttatttaaattgatttaccatcttacaaaattaaattttgtttcataaattaaagctttgcttagggaagtttaaaaaaataacatagttatcttttacttttatatgtacaagtatctctgctgatgtttcatcagaaattttatgattcatgatttgtgtatactctttttggttgttcaatatgatgaaattgtaaattaacaaaagaccaagtgattaaattatacggttagagaaaaaatatttttaggacattcaaatgacccacttcacgcatttgtttcagtccattcccttgtatttcccctacattaccattttaaatgctgatttaactgctgttctagccagcaatgaaaggaatgtctatgtaaatttaaaccacaaattaaagctttcagcatcttctctcaccctgaccctgttcccaacctaagcctcatctggttaaaggcactagtttagaaaaattgccctgatgtaaaaattacaattagttgaatacaattatgacattttaatgttatatttacatgtgctaatttagaatggaataacaaacatattgtattttccttatgttctatgttcagcacataataattttctttctttttcagctttttaattaaatgaagccaagtgggatttgcataaagtgaatgtttaccatgaagataaactgttcctgactttatactattttgaattcattcatttcattgtgatcagctagcttattcttgtgtactttttttaaactgtgggttttcctagtaaatttaatttacagaaatcaatggtagcatttagtaatctacaaaggaaatatcaaagtgtttttcaagcctgttatattcagtgtgtgccacaggattgaaataaatgacaatgtaattatgaattcatgttttagagctgtttactcattagtaaaggaccgcaatgttagtaaagaaaacctatgaaatgtatgttaaagattcttagtattgtacagggataaagcaaatgcatgaaaatatgtcatgtactgaaaattaaacttacttcagtttcagttataaaggacgtgcactgttacgaatagtgttttgttattaattataactagataaaggtatataggacagggaactggatgaatggtacctacaatttggatgcctaaccaaggactagagctccttcttgagatctaaatctaaagtaaatgtgcattaaagcagtgtgcttcaaaggcatcagacgatgaaagcaacataccacaactaggagttatttctcaaacttaaatgtcctctgggaatccagacttaaaaataagagcaaacttaacacactatccattttcgagcaaacttaacccactatatccattttgctcatgtgttttatgcaaccagctttccatcaaatcctcaatccttgaatccaggtaaaaggttaattttcctaggattagtgaatgattcaatgaagctttcttgaaaacaaacataggagtgtaatgtactattatgtttgtatcctgttttagtttataaagcactttcacatacattatggtatttcttcctcacaataaccttgtaaattagtcaggaaatgtaaattttatctgactcatagaactaatggaagctgaaagccaaaaataaagtttataaccaggccttcaaactctcaaacatggatttttatattctgtggagttatccaaattaattagggtttaggaaagcagttcttcttgagtcagttcaataagtgtttgctttttgtttttaaggtttgttatctaattttcattaagatttgagtaacagaccatggagaattgttttcattgggagttccagctatatagcctcaaacaagaaacgggtgtacaaccattgagtttacttacttaaatctgtgaatttcaatgaagaatgggaatataaaggcctactggggcatgtttatcaagttatatcccagggcaatgtgtatgctagcaggatgaatgctatcttttcaaaacataatattcagtgaaaattacgtaataattgtaagtttataatcatactcccaaatctgttactaaaaataacataaattctcctagttcatgtacttagatgaataaatttagttttggaatgacgtttatggaaaagcaatagatgaacttaatcatttgatcactgcctatcactaggcagaacttgacctgtaattcttaatccattgtagattttttacattttactcaaaacttcatacatagagactctcaggtcaaattttacaagtattaaacatttgttaattataatcacttttgtttgtatccttaaatctcagaattatcttgcagttaatatgcagctgattaaatgatattacaaattatctctaatctcactgtaaatcttttaatcatatcaaagtcaggtcatcctcagacactataactaagatagataaggagtactttactataccatattagtaaaggttttctagctcttattttctaatttcctctgagcatttaaaattacatccagtgataaaaacaatatttttttttcagaatttcatgctttaaaaagctgtggcttctctatagaccactgttacattagggaagtgattctagagcaaaatatactgcctcaacataagtcgttactgactggaaaatgctataggcagaattgcaaagagtggctcaaacatatagtttgcttgcagaatgtaacgtgcaaaatcacatacatgcgatgtatttacctttgctagacaatgagaattgaataattgatttgtacctggtatgttatatcctccagtgtcactttttaaccagattcactgtgcgttccaaactgtcataaaaattgattatatgtttaacaattgtttttctactacagtggagagaaaaatcccaattataaaattccacctaaaggagtttcattttgtaataacatctgattaataacttgttgcattttgcttaacatactgttcctggcattagatattcacatgagtaagcccagtagcattttgtgcttactgcagttttcttttacacacgaagtaacatcccttgtcaattacaattcagcaggcatggtgatttggggagacgactagatgttgctgtaaccgtagagcgtggcaagtattccctttcttgctatcacctaagcaaacctccctaagggtacgtgaagggagtggttattctaaataaggcatgacaaattacttttcaaccagtgacattaaacattgtgttttaaaaaggactggtcactggggcgaacacattagctggagcatgtggggacaaaatacttgaattgacgcttgaagactcaatgttctcaaagtccacagagctcattaagtttaaaatagtaaaacaaggtcttcttcatactccagcaatatgctatattggatcagaccaatatatgtaataatgttttctctaatagtaggaaaaggatgagcattgtagctagtcacactcaaagggtacaagtatgcattcattagctcctaaattccctgatgatataattcacgagcttctgccatttatgaattttcgatattcctctatgtctgaaatacatgcacatatttatatcatataccaagggtccaactactatacaaagatttaacaaagcatctcaccttccggccataataggaaaatcatgtcacatttacccaagtgtggatacatctatctatttccattaaaaattatgcatagatgtcaggaaaaatgacagcaaggaattccagggacatacctgtccttagaaaaacaggaaaaaaaaaaaaacactgtcacattccattttattggaaatttgtttaaaaaaaaaaagtttaccaaaccactgcttaaaacaagaaaatgcttaaattaaaaaagcaactgaaactca

SEQ ID NO: 9806 - DNA, 283 bp, Homo sapiens
caaagacccatggcccacaaagtttaaaatacttaaccttctggctctttacagaaaatgtgctaactcccggtttagccatgctgaacacagcactgaatatgttcccatactttcatacctttcctcatccagtttcttcggtcgaggctgctgtccctgcatcttacttgttctcagagttttgctttttcagttcttgtaacaccgtcatcatctcaaatatgtcactgtatcatacttaatcacacccaggtctttcctttagctaaaagaaatgtaa

SEQ ID NO: 9807 - DNA, 3936 bp, Homo sapiens
ttttgacatttttgtgcttcaagtgtttccagtgtcttgaacaaataaagaaatttttataactatttaaaatgaaaatgatagttttgaaaatgatagaagcataggaagtactctaattgtcctacaataaaggatacatctaactaacaagtaatcagtttcagattaaatatatatttatcatttcataatgatataaacaactgattgttacaccaggttaagaaaattactaaatgaaaaaaacagtagcataactaaagataacattaataaagtactcacagagatccttttactgtgaatatacctaagtatcataaaactgctaaaaagttagaaggtataaaattaccagtatggatcagattagtatttttgcttttacaggggtaatatcgttagcagcaataaagattacctttagtgctccgtaacttgaaatctgcagagcctttaaacactaaacaacaaaaagctacaaatccctagttttaagtatcagttcattttatgattaaggtttcttttttcattaaccctcattcttcagttagcttcatcttcagagcaagctgatgatggcttgtgtgtgctagcaggatgaacgctatcttttcaaaacataatgccacagttcatgtacagctggcacatctatctgctttaccagcagtgtttttaaggatcatgcggattgaacagcaactacagcttaaggccctgacaaggtttactgctgacattcttcatggagatggtcacccttatcgtacgctttattcgttacttattatcttgaaagtagaggcgacgtctcattgcatcctgatatcaccacatcatttttatcttctaatttaacaatttctcagaaacagctaacaagagtaatttttctagtttgtattgtactgtgactttatttacattttaattgatgttatataatatacactgtatattatataatttaaatatatatttcatgttttatactaaaatgttacattttaaaatacatatttattcttgcacatagtatcaccagaatcctaaaatattagcacgaaaagaacttcgggaatcatccaaaacaaacgttcttttcactaatgaggaaaccgaggttcagaaagacgaaacaatttatgcctaggatgatatgatttaaacatccaaatataaaacttacctactttggacatttttccagctacatgttttttttttgatgttgttgttttttgttttctttttttaagtacaagaactattaatttcatttttgcttttatatttaattaaaaattggtttgtctctggttgccttgcaaagttgtcttgtgttgtcaagactcaaaaagaacatgccacgtgttagcagaaaggtacagatgtaaacaaaagcttcataaatgttatttaaattgatttaccatcttacaaaattaaattttgtttcataaattaaagctttgcttagggaagtttaaaaaaataacatagttatcttttacttttatatgtacaagtatctctgctgatgtttcatcagaaattttatgattcatgatttgtgtatactctttttggttgttcaatatgatgaaattgtaaattaacaaaagaccaagtgattaaattatacggttagagaaaaaatatttttaggacattcaaatgacccacttcacgcatttgtttcagtccattcccttgtatttcccctacattaccattttaaatgctgatttaactgctgttctagccagcaatgaaaggaatgtctatgtaaatttaaaccacaaattaaagctttcagcatcttctctcaccctgaccctgttcccaacctaagcctcatctggttaaaggcactagtttagaaaaattgccctgatgtaaaaattacaattagttgaatacaattatgacattttaatgttatatttacatgtgctaatttagaatggaataacaaacatattgtattttccttatgttctatgttcagcacataataattttctttctttttcagctttttaattaaatgaagccaagtgggatttgcataaagtgaatgtttaccatgaagataaactgttcctgactttatactattttgaattcattcatttcattgtgatcagctagcttattcttgtgtactttttttaaactgtgggttttcctagtaaatttaatttacagaaatcaatggtagcatttagtaatctacaaaggaaatatcaaagtgtttttcaagcctgttatattcagtgtgtgccacaggattgaaataaatgacaatgtaattatgaattcatgttttagagctgtttactcattagtaaaggaccgcaatgttagtaaagaaaacctatgaaatgtatgttaaagattcttagtattgtacagggataaagcaaatgcatgaaaatatgtcatgtactgaaaattaaacttacttcagtttcagttataaaggacgtgcactgttacgaatagtgttttgttattaattataactagataaaggtatataggacagggaactggatgaatggtacctacaatttggatgcctaaccaaggactagagctccttcttgagatctaaatctaaagtaaatgtgcattaaagcagtgtgcttcaaaggcatcagacgatgaaagcaacataccacaactaggagttatttctcaaacttaaatgtcctctgggaatccagacttaaaaataagagcaaacttaacacactatccattttcgagcaaacctaacccactatatccattttgctcatgtgttttatgcaaccagctttccatcaaatcctcaatctttgaatccaggtaaaaggttaattatcctaggattagtgaatgattcaatgaagctttcttgaaaacaaacataggagtgtaatgtactattatgtttgtatcctgttttagtttataaagcactttcacatacattatggtatttcttcctcacaataaccttgtaaattagtcaggaaatgtaaattttatctgactcatagaactaatggaagctgaaagccaaaaataaagtttataaccaggccttcaaactctcaaacatggatttttatattctgtggagttatccaaattaattagggtttaggaaagcagttcttcttgagtcagttcaataagtgtttgctttttgtttttaaggtttgttatctaattttcattaagatttgagtaacagaccatggagaattgttttcattgggagttccagctatatagcctcaaacaagaaacgggtgtacaaccattgagtttacttacttaaatctgtgaatttcaatgaagaatgggaatataaaggcctactggggcatgtttatcaagttatatcccagggcaatgtgtatgctagcaggatgaatgctatcttttcaaaacataatattcagtgaaaattacgtaataattgtaagtttataatcatactcccaaatctgttactaaaaataacataaattctcctagttcatgtacttagatgaataaatttagttttggaatgacgtttatggaaaagcaatagatgaacttaatcatttgatcactgcctatcactaggcagaacttgacctgtaattcttaatccattgtagattttttacattttactcaaaacttcatacatagagactctcaggtcaaattttacaagtattaaacatttgttaattataatcacttttgtttgtatccttaaatctcagaattatcttgcagttaatatgcagctgattaaatgatattacaaattatctctaatctcactgtaaatcttttaatcatatcaaagtcaggtcatcctcagacactataactaagatagataaggagtactttactataccatattagtaaagg

SEQ ID NO: 9808 - DNA, 143 bp, Homo sapiens; identical to SEQ ID NO: 7702

SEQ ID NO: 9809 - DNA, 148 bp, Homo sapiens; identical to SEQ ID NO: 7489
  SITE (136): n equals a,t,g, or c

SEQ ID NO: 9810 - DNA, 116 bp, Homo sapiens; identical to SEQ ID NO: 7704

SEQ ID NO: 9811 - DNA, 96 bp, Homo sapiens
cccgaaaaaaaaaaaaaaaaaaaaaaaaaaaaaaaaaaaaattaaaaaaaaaaaaaaaaaacaaacaaaattaaaaaaaaaataaaaaaaaaaaat

SEQ ID NO: 9812 - DNA, 126 bp, Homo sapiens; identical to SEQ ID NO: 7707
  SITE (9): n equals a,t,g, or c
  SITE (10): n equals a,t,g, or c
  SITE (14): n equals a,t,g, or c
  SITE (20): n equals a,t,g, or c
  SITE (95): n equals a,t,g, or c
  SITE (107): n equals a,t,g, or c
  SITE (108): n equals a,t,g, or c
  SITE (110): n equals a,t,g, or c
  SITE (118): n equals a,t,g, or c

SEQ ID NO: 9813 - DNA, 151 bp, Homo sapiens; identical to SEQ ID NO: 7708

SEQ ID NO: 9814 - DNA, 130 bp, Homo sapiens; identical to SEQ ID NO: 7709

SEQ ID NO: 9815 - DNA, 165 bp, Homo sapiens; identical to SEQ ID NO: 7491

SEQ ID NO: 9816 - DNA, 724 bp, Homo sapiens
ttttgcgtttcttttctttgggggggtgggaaacaggaaagggataaagaatccaattagtgttaacaaatcttatcaacatgtctccaaatttagactctgccacacatgtggctggaaagcagtggccacccaaaacaactctctaaaaagtaaaacatgtagctctgaaaagtcagataaagcaaacccatgccctcaagaccccgcaggaatgccattagggggcaggaggcctgaatttggctgtaggaatttagagaatttggaggttctcttccattcaaattttttcctccaagtggtatatactttaccataattttcatcataagccaaaagtctgacattagcctgaaggactgtgtgaccattaaagttagtaaattaaactaacttattctttacaaaagagtaaatcattcttttatccaaagagtgactgaggtctacactgcactcagcactgaggggagcgccacggtggaagggaacacacgtgggtcacagtcaccgcacacaaggtacttatggtctagctggggatgcaacacagccacacgccaaccagggagtgaacaagacagcatgatacatagtaaaataatgttccaggttaaccaggaaagaagcaagtgcgactgtgcctttggttactatgtcttttccaactgatgacatgaactatactgtatatttttctgaataaaaatatttttcttta

SEQ ID NO: 9817 - DNA, 118 bp, Homo sapiens; identical to SEQ ID NO: 7711

SEQ ID NO: 9818 - DNA, 195 bp, Homo sapiens; identical to SEQ ID NO: 7492
  SITE (3): n equals a,t,g, or c
  SITE (30): n equals a,t,g, or c
  SITE (32): n equals a,t,g, or c
  SITE (37): n equals a,t,g, or c

SEQ ID NO: 9819 - DNA, 187 bp, Homo sapiens
tacctgacactgtggcctagggctctggtatattcctcagccactttctcattaatgtgtaacaacttgggagcctttgtgtgtcaccagatcaactgagcactctttgttgtctgaaatatcatctggaggtatatttataagctgctttcaaagacaggcccacaaataatgaccacattacatg

SEQ ID NO: 9820 - DNA, 1556 bp, Homo sapiens
  SITE (653): n equals a,t,g, or c
  SITE (1192): n equals a,t,g, or c
  SITE (1193): n equals a,t,g, or c
  SITE (1210): n equals a,t,g, or c
  SITE (1218): n equals a,t,g, or c
  SITE (1229): n equals a,t,g, or c
  SITE (1244): n equals a,t,g, or c
  SITE (1271): n equals a,t,g, or c
  SITE (1292): n equals a,t,g, or c
  SITE (1388): n equals a,t,g, or c
  SITE (1429): n equals a,t,g, or c
  SITE (1479): n equals a,t,g, or c
acgagctgagtcaggagagcttagggggagagcgggaaaggactgcagccggggagagcaggacgcgccatctccattggcaccctctcccgccccacttccatcgctagaaaactaaggattcggtgttgggaccactcctgccctgacctgccctgtgactccgtcatactctccaaaggccagaccctcctagaccagctggaaccaccatcaagatgtccccagccatgtcagactctggggccccaggcggagggcaaccagatgtcttcagctccaagtctggcctctcctcccagcaagcagccagtaagtcctttcaggtgcctaacttgcattcctcttgctgctagtccagtccctggttctaaggaaatggaatgactctcccctctcatcccccatggagcctctgatggccaacaggtgctgctgtgtgcccagatcaagaatccacctctgcggaattcaaaaccgctgagggttctgggacagcagggaggagagaggtggagacgcaacatgggttttctgtgttcagactgcagagaccttggaaaggatcaaccatatacaatgtccatttcctgctctctaacctggcaggggagcaaggcccagccaaggaggtaacagattcctccaacacnaaaccacaccttccttccccacccccaccacctccacacccagctgcctctgtggggacttcagggggagagtgcacacagtggggcctcaaaggttatgtagcttgaataaatgatcctccaggcctggggagcctctccgctccctcccccatttcctctgggaaaggaatgtggggtgggccccagagggtggtggcggagggggcccagggctgggaaataccaggcgtagctgagattctattccaagccttcctgcctagcatgagtcctccccccacgccctgcccagcttcctccccctgcatcagaaattaccctgctgagctgccccttccatccccctctagtttgaccagcttgcaaaatccattcaacctcatcttcctgagggtccctggggaggggcttgaaggctgcatccccaaagggagggcatccagtcttccctccttccaagagatcattgtcttttaccatttgaaagcactttcacttgttctcatttgacaccctaagaatcagataaccagagnnatttttttgatacccgntttttcangttacagaaanctgaggcttggccanggcgtggtggctcacacctgcaatctncagcactgggaggccaaggtngggcagatcgcttgagcccaggagtttgagaccagcctgaggaacatggcgaaaccccatctctacaaaaaatacagaaattagccaagtgtggtnggcacgtgtctgtagtttcagctactcaggaggcttaggtngggaggatcacctgagcctgggaggtagaggttgcaatgagcagagattngctctccagccagggagacagagtgagaccctgtcccaaaataaataaataaataagaataaaatttaaaaaagaaa

SEQ ID NO: 9821 - DNA, 331 bp, Homo sapiens
  SITE (11): n equals a,t,g, or c
aaaattaatcnggggaaggccgggcgcggtggctcacgcctgtaatcccagcactttgggaggccgaggcgggcggatcacgaggtcaggagatcgagaccatcctgggtaacacagtgaaaccccgtctctactaaaaatacaaaaaattagccgggcgtggtagcgggcgcctgtagtcccagctactcgggaggctgaggcaggagaatggcgtgaacccgggaggcggagcttgcagtgagccgagatcgcgccactgcactccagcctgggcgacagagcgagactccgtctcaaaaaaaaaaaaaaaaaaaaaaaaaaaaaaaat

SEQ ID NO: 9822 - DNA, 320 bp, Homo sapiens
tcctatcttacaaccttgaaatacatagttaattctgcagggtctcagacatcctactgagttgccaaatattgaacaccaagctgggcttgtcaacactcagggctacaaagaggagatctcaaaactaccatggcctcaggattctgaatgtgggtctgaaatccctacttcttactttggattaaaagctcacctgagctacacacatctgttgtcctagaatggatatttttatttagatatcaaccaattcaacttcactcctttattgagtcagtcaagaaatcaataaaattgacttcaaaaattgaaatcac

SEQ ID NO: 9823 - DNA, 1732 bp, Homo sapiens
ctggagtactagatacttaggtacttaagaaatagcctttaatcccaaggccttacttaaaacttaagtttaaacacaatctctgatgtgatgagtggaaataattcttttgtgttaaaacatacagacaaaacaaagctatatggccagaataataaccgttattgtatcttgtggaacaaaaaagggcatggtgattgctctgttcctcagggaaacacattgaatgtcttgttttcagacaccacatctgatgcatatacagatgtatgattggagtagattatttctaatgccccttaagctctactactcagattctttccttctccagagtaatggtaatggattttaagctgtgaaaaagcagttaagtactgccttcacccgctaagtaaaggcctattctaggctacttaccttgcacccattatgaggtgtaaaaccaaaaatgttgtgaaatcaaatttcactgaagtctcatataactttatggagatggttgagtatttcttcttggaaagaaggaggagaatcatcacttgattgtgattaattacaacataggaaacaagaaacaatagttttatcctaacctgtccttacgaacattagtaactgtgctgttcattatttttagtaacagcacataggtaatacaggtgttatatcatgttttccttcacactggaagataataacacattattcttatggatgaaaatgactgaagaatcaagaattactagcaactcttcttccagtagcttagaaaactgcctttttcaagacagatgcaattttacttaatatctctgaagcttagttttatcatctatgaatttaaggagatgagaattaatactaaatgattttttaggtccccttcagtttatgaagtactcctgcagtagaagttcatggccttgaaaaagcgtactcaaaattactctatttccacctagtggtgaaaccgtaatatttctctgaggctttacttgataaacgtgagtagtttttcagcttctcattctgtaatcacacacagctttggagcatattgtgtcatttttatttaaagacaacttcccagttaaagtttatgtacatagatgtgccttccacaaagttgattattgtatattagttcttcctaaggacagttaagtgttggtggcttagcaacaggcagttggtagagaaatggagagtactacattaaattattgcagagaatattcaaagtaatccattttcagggaactgagtcttctctaagtacatggccagatgatcaaaaaaggaaaaaaattaatcactaaggttggagaatatgtttatttaaacctagtgtctcccttaaattttataactagatttttgaccctcactcatctggctttccttgctatagacatgctttgcatacccagcttctagccacatcttccctaagaaaatttcacctggaatcagttccaaaagaaaatcttaagagatagagtatggatctgcatgttgtcagctacctaaagcagcaaaaattcctagatgagaataaaatcagggaaccttgcagtttaaggcacaccttaaatattaaatttttaatccttcaatgcatccagccaaaacaagaaattgcaaatagctaccatccatcaatgcaaggtttttttggtttgtttttcataataagattggttttaattaaagcacttataaagatgga

SEQ ID NO: 9824 - DNA, 606 bp, Homo sapiens
tcactgttaactctcagctaatcttgtctccatcctgccaccctccactccagattattttgaagcaaattctagacatcacttccttttattaaagcaagttgcgtttcatagtgacaatagaaaccatttactcttggcacaggtgctaaggtctgaatacaactttaaggagacagtgtctgcattgaagagcttatgttttaagaaaggagtttatgttttcactggatatactcggcgttcagggaatcagagactttcttcaagtttcccttgtcttttaaatagggacgtatttgcaagttcttatctgtttggaaattcctgtagcaagttcaggtttagtcattctgtactgctttggtggtgccttatctaaatagtattgaaaggaagaaagaattatttcaccaagagttggccttgaaaggagttagatgtattgggtatatttaggaagtaccccttcaacgctgtaataatataccaacttttaaagctacctcataatagctcttaaaaacacatttaaaacacttagaggtgatcctttttcctagccatcagtgggacaaattaattcctttttgagtaaaaaaaaaa

SEQ ID NO: 9825 - DNA, 606 bp, Homo sapiens; identical to SEQ ID NO: 9824

SEQ ID NO: 9826 - DNA, 606 bp, Homo sapiens; identical to SEQ ID NO: 9824

SEQ ID NO: 9827 - DNA, 3489 bp, Homo sapiens
aggtttcagagcttatggagaccaggtccttcagtcatgcctgatgcccctggtcttccagaagcaaaaacagctcgggaatgcgaaggcaccggagtccaaagttggcagccaacaacaacaacaacaaaagaaaaggccgggcacggtggctcacgcctgtaatcccagccctttgagaggctgaggcaggtgggttgctggagcccaggagtttgagaccagcctgggcaacatggcaagatcccatctttacatgcctgggcgtggtggcgcgtgcctgtggtcctagctactctggaggctgaagtgggaggattcccttgagccaggaattggaggctgtagtgaagtatgattgcaccactgcactccagcctgggtgacagagtaagaccctgaatcacggacagagggtactgttgggagccctggggagaaatccatgctcttggctgaagctctgagatccttgttgctgtcagggtgctgccccccgccccccggggaggggcttttgtctttgcatcgcctgcttttccagatagtctaaaaaaagacttctgaagacaaggacgttcacgaggaaaaacttgccattttgagctttttaagcagttgctgaaagcttggcagactgcctcaatttttcctaagtaggcgtcaatgaagtcaggtccaggccttggtgtgtctggaatgcttcaagcacattcgaacacttgatcgtaagggagagccggtactttggaaccggaactcacccgaggctgtggccaccgcatgggcaggctagctgggggacaagccccatatctttgggaacaagggtttgcacagccaccctgggatgccctgggactcctgaccgcacaggaccccagcagggaggccgcctggattggagggtctggtctaacagccggacttggtcttgaaccgtcgccctgtcccgcacaggcgcctgctgagcctggagccctggcagaggcgggtctggggagtggagctgccaggaggcctcccatttctcacagccttggtgttctccgggtcacccagaggaccgtcaaatgctggatttgacaaactatgtagaatgttctttgtgtctttaagatcttcttgtggtcctatttggacattttgtgcattttcagacacctgcgggtcacgtgggtggatgggaagctgggcacctggtgaggggtgaggatgttgagagccagagctgcgttttgtctctgttgatgtggcgaggccctgggttggtcactgggatttttttttttttttgagacggtgtctcgctctgtcgcccaggctggagtgcagtggcatgatctcggctcactgcaacatctgcctcccgggttcaagcgattctcctgcctcagtctcctgagtagctgggattacaggcgtcaccacacctggctaatttttgtatttttagtagagacagggtttcaccatgttggtcaggctggtcttgaactgatctcaggtgatccgcccgtctcggcctcccaaagtgctgggattacaggcgtgagccaccgcgcccggccggtcgttgggattttaacagccctgaggcccctcacgctgccaggtgccagcccaccctgcagccctgctcccctgcccacacgcagaagccaccagaggcttctggactgagcccccactgtcctgcagccgggctggcctgtccacaccacagggcgtgctcagctactgagcagaagcgtcacggacagggcagatcaggccaggacaaagctcttccgccacaggcgggggtctgaaggcatctcagagggcccccaaacaagggacgctgcctggaaaccccgggacaagatgacctcggttcagatcttagcaccttctggcaaccttagagaaagcttctggagggaggggctggttcccaggatgggcagaagccggaaagtctcagactgagtgaccctcgggggcttcagaaggcactgggtgggctctgccagagtgagaaggcagctgatggctgctggagccagccccgggagtgggggtccagctatggtctggagagggggacttgagggttgcagtggccacacagacggggcacaggagccaaaggaagggacacagcaaagcccaagggtaaaacggcgcgccgtggactggtctgagggcagaggctgtaggggagcgaggggcggtgtggctgacaggtggacacagggacacgtgtcctgtggacttggccgctcagtgggggtgtgtcccccagcagtggcgtgtgagggatggtcactctgatgggacactgaccacttggcctccagcaagatctaggcccaagtctaggctgaagccgcccactcagccccgggacatcgtccccggcagctctgctgagcacgccagctccggcactctccgggagtcatggccggaagtcaactgtcctggcttccagggccacaccttggccaggcctggtgatggtcatttccagccgctccagttgggctgatggggccacatgaggccggggatagaaggtggctgcgctcagacacccctcccggccccactggatgcccagggcgctgacctgcaggactcggatgggttttctcctgccacccctgcctggccggccaccatcccagcgccagcgccctcctgagaggtgcaggggccgcgtggggcctcccagagtggcaggttggcagcctgcacgccggtgacggcgtccttctccgtggtgaggcttggtccctcctcgccagaaacaccaattctctgacgtgagctgcacatccactgcccagccatgtttactcttctgcctcctgtagacgcagccgcggcggctctccctggcaggccacccgccgtcctgccttttctccgggtcaggccgcctgtctgccgggctccacgatgagcgcgttctcaagctgagcaggcgccagaatcccatagagaggcttgttgagacacagcttccccacccccagctcggacgcaggggcctggcgtggcctcctcacgggcacggtgtggaaacaccactggcggttaccgtggtctgccgggtgcatgagcccctggggtggccccgtcccttgtttctgaccagccggatcctctccagcggcaggagcagagagggcccggaggtccagacggtgctctctgcggccagcatgccgcggaggtggccgagtgagtgtggcccctcccttgcaggctgacccagctggatgttgacagccacctggcccagtgcttggccgaaagcacagaagacgtgacgtggtgagcgccatccaagagccctgcgcagagtgcagcgcccggacacgctctcccccgccagcagccccgcctctcggctcccccgccagcagccccgcctctcggctcccccgcatgcgcattaaagcagggcgggctcctgtctgtctctgtgatgtgatgcaa

SEQ ID NO: 9828 - DNA, 4741 bp, Homo sapiens
ccgctcccccacccccagtacccctcatctccgcactgtctgccccagcagcccttcccccaaccctgccggccacctcccgcaccatcgaatttccctctagtaccccccatctccccgctctctctgccccaggccctcccgggtctccccaccatagcgtttccgctactgagtaccccctgtctgccctctctgtctgccccaggccttctggcggccgcccctggtttctcctggggggtgatgagcgggagcggctctgggccgagctactgcgcacggtgagcccggagctgatcctggatcacgaggtgccttcactgcccgccttcccaggacaggtgtgcccactgggcccatcttagcgatgaaggggtttccagggcgggagccatcgctgggcaaggcccaacaactctgtgttgcaggagcccaggtgcggcccggagcccactgaagtcttcactgtcggacccaagaccttttcctggacaccctttccgccggacctgtggggcccgggccgttcctaccggctgcttcacggggcaggagggcacctggaatcccccgccaggtccctgccccagcgcccggcacctgattcctgcagggcccccagggtggagcagcagccgtctgtggagggtgccgcggccctgcgcagctgccccatgtgccagaaggagttcgcccccaggtgagtaggccacccctgcgcccggcccggttatccatccgtgtttggaaaccacagccgttcagaaggtcaagaggtggccgagctcagcgctggcttttaaagccctgtttcacactggaaaggtggcccagtgctgtggcctggcatgtccaggtggctctctgtcacgggtctggggtccacctgcttgccgtgctctgtgggcagggcaggctgggggcccacagaacagcacagaaggaaggctgggagcactggccccgggtccacctggccatcctggaatctggtggcaccagcgtccccaggcccagagcacaggaacaccttcccgagagtgcgtcatgggttttaaaaatgaagatcgtcttttttgtctggagatgctttttcttatttttgaaacccaacgtatatttttatgtattttttaagtaaaggggaatggaacccagttttgctaacaagataacccaaactgcccagtgcctggccttgtgtctggcgacctctgggcccttggcctccggagcaggtcctggggctggggtggtgtgaatgatgctggttcgtaacttttggttgagttaatgggcggcaggtttcagagcttatggagaccaggtccttcagtcatgcctgatgcccctggtcttccagaagcaaaaacagctcgggaatgcgaaggcaccggagtccaaagttggcagccaacaacaacaacaacaaaagaaaaggccgggcacggtggctcacgcctgtaatcccagccctttgagaggctgaggcaggtgggttgctggagcccaggagtttgagaccagcctgggcaacatggcaagatcccatctttacatgcctgggcgtggtggcgcgtgcctgtggtcctagctactctggaggctgaagtgggaggattcccttgagccaggaattggaggctgtagtgaagtatgattgcaccactgcactccagcctgggtgacagagtaagaccctgaatcacggacagagggtactgttgggagccctggggagaaatccatgctcttggctgaagctctgagatccttgttgctgtcagggtgctgccccccgccccccggggaggggcttttgtctttgcatcgcctgcttttccagatagtctaaaaaaagacttctgaagacaaggacgttcacgaggaaaaacttgccattttgagctttttaagcagttgctgaaagcttggcagactgcctcaatttttcctaagtaggcgtcaatgaagtcaggtccaggccttggtgtgtctggaatgcttcaagcacattcgaacacttgatcgtaagggagagccggtactttggaaccggaactcacccgaggctgtggccaccgcatgggcaggctagctgggggacaagccccatatctttgggaacaagggtttgcacagccaccctgggatgccctgggactcctgaccgcacaggaccccagcagggaggccgcctggattggagggtctggtctaacagccggacttggtcttgaaccgtcgccctgtcccgcacaggcgcctgctgagcctggagccctggcagaggcgggtctggggagtggagctgccaggaggcctcccatttctcacagccttggtgttctccgggtcacccagaggaccgtcaaatgctggatttgacaaactatgtagaatgttctttgtgtctttaagatcttcttgtggtcctatttggacattttgtgcattttcagacacctgcgggtcacgtgggtggatgggaagctgggcacctggtgaggggtgaggatgttgagagccagagctgcgttttgtctctgttgatgtggcgaggccctgggttggtcactgggatttttttttttttttgagacggtgtctcgctctgtcgcccaggctggagtgcagtggcatgatctcggctcactgcaacatctgcctcccgggttcaagcgattctcctgcctcagtctcctgagtagctgggattacaggcgtcaccacacctggctaatttttgtatttttagtagagacagggtttcaccatgttggtcaggctggtcttgaactgatctcaggtgatccgcccgtctcggcctcccaaagtgctgggattacaggcgtgagccaccgcgcccggccggtcgttgggattttaacagccctgaggcccctcacgctgccaggtgccagcccaccctgcagccctgctcccctgcccacacgcagaagccaccagaggcttctggactgagcccccactgtcctgcagccgggctggcctgtccacaccacagggcgtgctcagctactgagcagaagcgtcacggacagggcagatcaggccaggacaaagctcttccgccacaggcgggggtctgaaggcatctcagagggcccccaaacaagggacgctgcctggaaaccccgggacaagatgacctcggttcagatcttagcaccttctggcaaccttagagaaagcttctggagggaggggctggttcccaggatgggcagaagccggaaagtctcagactgagtgaccctcgggggcttcagaaggcactgggtgggctctgccagagtgagaaggcagctgatggctgctggagccagccccgggagtgggggtccagctatggtctggagagggggacttgagggttgcagtggccacacagacggggcacaggagccaaaggaagggacacagcaaagcccaagggtaaaacggcgcgccgtggactggtctgagggcagaggctgtaggggagcgaggggcggtgtggctgacaggtggacacagggacacgtgtcctgtggacttggccgctcagtgggggtgtgtcccccagcagtggcgtgtgagggatggtcactctgatgggacactgaccacttggcctccagcaagatctaggcccaagtctaggctgaagccgcccactcagccccgggacatcgtccccggcagctctgctgagcacgccagctccggcactctccgggagtcatggccggaagtcaactgtcctggcttccagggccacaccttggccaggcctggtgatggtcatttccagccgctccagttgggctgatggggccacatgaggccggggatagaaggtggctgcgctcagacacccctcccggccccactggatgcccagggcgctgacctgcaggactcggatgggttttctcctgccacccctgcctggccggccaccatcccagcgccagcgccctcctgagaggtgcaggggccgcgtggggcctcccagagtggcaggttggcagcctgcacgccggtgacggcgtccttctccgtggtgaggcttggtccctcctcgccagaaacaccaattctctgacgtgagctgcacatccactgcccagccatgtttactcttctgcctcctgtagacgcagccgcggcggctctccctggcaggccacccgccgtcctgccttttctccgggtcaggccgcctgtctgccgggctccacgatgagcgcgttctcaagctgagcaggcgccagaatcccatagagaggcttgttgagacacagcttccccacccccagctcggacgcaggggcctggcgtggcctcctcacgggcacggtgtggaaacaccactggcggttaccgtggtctgccgggtgcatgagcccctggggtggccccgtcccttgtttctgaccagccggatcctctccagcggcaggagcagagagggcccggaggtccagacggtgctctctgcggccagcatgccgcggaggtggccgagtgagtgtggcccctcccttgcaggctgacccagctggatgttgacagccacctggcccagtgcttggccgaaagcacagaagacgtgacgtggtgagcgccatccaagagccctgcgcagagtgcagcgcccggacacgctctcccccgccagcagccccgcctctcggctcccccgcatgcgcattaaagcagggcgggctcc

SEQ ID NO: 9829 - DNA, 311 bp, Homo sapiens
ggtggctctctgtcacgggtctggggtccacctgcttgccgtgctctgtgggcagggcaggctgggggcccacagaacagcacagaaggaaggctgggagcactggccccgggtccacctggccatcctggaatctggtggcaccagcgtccccaggcccagagcacaggaacaccttcccgagagtgcgtcatgggttttaaaaatgaagatcgtcttttttgtctggagatgctttttcttatttttgaaacccaacgtatatttttatgtattttttaagtaaaggggaatggaacccagttttgcta

SEQ ID NO: 9830 - DNA, 609 bp, Homo sapiens
gagacagggtctcgctctgtcgcccaggctggagtgcagtggtgcaatcacggctcattgcagcctcagactcctgggcttgatgatcctcccacctcagcctcctgaatagctgggactacaggcgcgcgtcaccacacccagctacttttagtattttttgtacagatggaggggtcttgccatgttgcccaggctggtctcgaactcctaggcccaagcgatcctcccgccttggcttcctgaagtgctgggattacaggcgtgagccagcagccccagcctctggtggcgttctttttgggttttttttttttttcttttttgagacggagtctcgctctgtcgcccaggctggagtgcagtggcgcgatttcggctcactgcaagctccgcctcccgggttcacgccattctcctgcctcagcctcccgagtagctgggactacaggcgcccgccaccacgcccggctaattttttgtgttttcagtagaaacggggtttcaccgtgttagccaggatggtcttgatctcctgacctcgtgatccgcccgcctcggcctcccgaagtgctgggattacaggcgtgagccaccgcgctccaccat

SEQ ID NO: 9831 - DNA, 612 bp, Homo sapiens
gagacagggtctcgctctgtcgcccaggctggagtgcagtggtgcaatcacggctcattgcagcctcagactcctgggcttgatgatcctcccacctcagcctcctgaatagctgggactacaggcgcgcgtcaccacacccagctacttttagtattttttgtacagatggaggggtcttgccatgttgcccaggctggtctcgaactcctaggcccaagcgatcctcccgccttggcttcctgaagtgctgggattacaggcgtgagccagcagccccagcctctggtggcgttctttttggttttttttttttttttttcttttttgagacggagtctcgctctgtcgcccaggctggagtgcagtggcgcgatttcggctcactgcaagctccgcctcccgggttcacgccattctcctgcctcagcctcccgagtagctgggactacaggcgcccgccaccacgcccggctaattttttgtgttttcagtagaaacggggtttcaccgtgttagccaggatggtcttgatctcctgacctcgtgatccgcccgcctcggcctcccgaagtgctgggattacaggcgtgagccaccgcgctccaccat

SEQ ID NO: 9832 - DNA, 632 bp, Homo sapiens
gaaaagtaaaccaggcctgggcacagtggcttatgcctgtaatactaacactttgagaggccaaggtaggaagatcacctgagctcaggagttcaaaaccagcctacgcaatatagtgagactcatctctatagaaacatttgaaaagttagtcaagtgtggtggcacacacctatagtcctggctactcaggaggaagtaaaccagacagatgacgttcctgacctcagagagcttaattctagaggcagggaaaaaaacacaaaattactaaattatgttacatgctaccaagaaataaaatggtttatgcaataaagagaaatgggagaacctatctagactaagtgttcaaggaaggccttctgaggtacatttaagtttatctgagctcacttgctatgtgactttcagcaagttactttcaactagagcttaggttcctcttctgtaaaatggggatgaatataatgccacttatttcacaaggttgcaatgaagattaggaatacaggtacaggctgagtgtggtgacacatgcctctaatcccagcacactgggaggcagaggcaggaggatcgcttgagcccaggagtttgagagcagcctgagcagcatactaagaccctct

SEQ ID NO: 9833 - DNA, 7398 bp, Homo sapiens
atgaggcagcagtttgtttggcaagtcagagttacaatccccaatctcagtaatctggtctttttctccttcgatttacacagaaaaccccactcaatgtggttctaatctctgtaacagtagtatctcaagggtgatacagtgcaaataggactgtctttccttttgttgagggaaaagtctccccgttctatttgagtctgttctcatgctgaaatgaaaccatccaaacacagctgctccgcccagcacaggatgtgctttcagtctactttgggaaaaagtggtaggcagtagtctgactttacccagcagatcccttcctgatgaatggagaagggagaacagaggtttgcagatacacagggagcagggcagtcgaggacaccagaggggactagcttggcaccggaagggttcatctctcctacccaaggcccaccgcagagatgtttttattgaaatgcatgttatgagtaacacatgaactccctctggcccaggtgggacttcttccctcataggtgggtcaggcccagtgggacagtcttggtggtggtaagaagggagccaagtgacagaaggtctccaaggcataggagatggtgtccggtgagtctggggaaccgaggattatgaagcctgctggaagcctggtatggtatggttcttctcagctgtggctgcagatttctcttcattggctgcctcctctgaaaacagactcctcttttctgcaattaatcttttaactcctaccatccactgactgacctcagtcacatggtcaaccatgagggagcggtggatgtcatctgctgcgtcccaccggtggcttgaaagctctgaagagagacgggggttgagcaagcagcctgtggtacaagagcttccatgcctcccctcccagtcaatcaaaatctcagcacctgctccagcatagccaaccacagcaggaaagggatttaggctataccaaagaacccacccataccttgcaccagtagagccattctcttctttacaggtattgacaactttcctccagcccactgttcctgcagcagtgccaggcgtcggctgatgtcatcacatacctgcttctaagagacagaagcccccctccaattcagtgctgccagcccaatgaggggaggagaggggaagacagcaccacataggaagcacctgctttctctggcccacactttagaattctggttctttacccaaagattagaggccccactgagaaactgatgaaaccttcctttccctgctgtcttcttctgacactgcctgatgtttcattgaaaagtagaggtcattaaacaggaattctctcatcttcccaccaccagtcttcctaacccacctcctactatgactagaattctaaaatttcaggggcttctcagactctcagaagctcatcctgtagcgttacttcacaaaaagaaaactaagcgccaaagaggtgaaatgaccatgctactttccctttcttttaagacattcttcagatctctttttctaagaactaagaaaacactatagctagaagaggtttctttctccctaactgggcacaatataaatttcctgagaataaaatcagcagcttctgctctgaatggcatggagatacagaaaatcaggttgttcactaataggagctgaattcaactcttgttcccacagcatcttctactgattggtcttcaaaagtcttattaatgctcctgaaatcctgtgttcatttctttgggaaggccttagcagattctgaaggagtccgtaactctcaaaggattaagaacctgtccactgggtcagagggtctatctctgggaaccattcctgcatttggctgtggatgggagccctctctaacctctgatgtgccagagcttacccttgtgtggccacggcagtcttccaatgcctgttccaaaggtctcagcacatcctccatcacagcctcagactcgactgggaaacttgtgggctccacgccagaggcaggaccactccccacaggtggggacctgggagccttacttgaaggaggtggaggccccattgggggaggcccaggagaagtctctgatgcggggactgaaaaggtacagcaggatcaagcaacatggcttaaatgggtaagaagcttaactctaaattcaccccttctaagaagggctactctctgagacaacttattcattcaaaaatatgcatttatgaagtccccactctacgccagacaatatgctaggcactaaagattagaaaagtaaaccaggtggccgggtgtgatggctcacacctgtaatcccagcactttgggaggctgaggcagacagatcacctgaggtcaggagttcaagaccagcctggccaacatggcaaaaccctgtctctactaaaaatacaaaaattagctgggcatggtggcacatgcctgtaatcccagctactcaggaggctgaggcaggagaatcgcttgaacccgggaggcagaggttgtggtgagctgagatggtgccattgcactccagcctgggcaacaagagtgaaactctgtctcaaaaaaaaaaaaaaagaaaagaaaagtaaaccaggcctgggcacagtggcttatgcctgtaatactaacactttgagaggccaaggtaggaagatcacctgagctcaggagttcaaaaccagcctacgcaatatagtgagacctcatctctataaaaaaattttaaaagttagtcaagtgtggtggcacacacctatagtcctggctactcaggaggaagtaaaccagacagattaagttcctgacctcagagagcttaattctagaggcagggaaaaaaacacaaaattactaaattatgttacatgctaccaagaaataaaatggtttatgcaataaagagaaatgggagaacctatctagactaagtgttcaaggaaggccttctgaggtacatttaagtttatctgagctcacttgctatgtgactttcagcaagttactttcaactagagcttaggttcctcttctgtaaaatggggatgaatataatgccacttatttcacaaggttgcaatgaagattaggaatacaggtacaggctgagtgtggtgacacatgcctctaatcccagcacactgggaggcagaggcaggaggatcgcttgagcccaggagtttgagagcagcctgagcagcatactaagaccctcttaaaaaaaaaaaaaaaagacagctgctagactagtatgtagcaaaaagtacaaaatgagctgtttttattaaattgagaactaccggatgagatagatgcagctatgaagagttgaaggaacatgtactaggtcgaggttagagcagtgcccaagaagcaggaaaacttttgatttgttcaagagacagtaatgaggcctgtatggctaaaaattattaccactgaagaaagtagtatgagctatcattagagaggtaagcagagggtccagaccctgtggggctttggaagagtttgatcttgagtcaatggtactgggaagccactgcaggtttgtaaaagcaaggggtgatgtgaccagacttatttttaaacatgtatgctctgtgaaaaactgatgaaaacaggtcaacagtggtggcaggaacaccagttgagaggttgagtagttcaggaaagagataatgctggcatggactagggtaaaagagtagacgaggggaatggagtagtctgagatttacttaggaggaagtagcaacaggagtggattgagagtgaggaagagagaagtcaaggtgactcgtagtttctgacttagtaatgggaaccactaacagaaagaagactggaagacaaaagtcaaaagtttacttttaggtaccaacatccacaaggatgattaattcatctaataatttggtgtttcagttgacctcttcactcacagggatcattttttacccaccatacatcagcctgtcatcccctgcttgttcacactatcacctccaaaatctgatcacccccttacccttccagctcagctactttgatttcaatgtacattaacatcacccccttataaatatttttacctcctttatctcctcccattgtcccactttcctggttaaacccaacttgcttgcacttgggagggaaaacagagccatgctgatagtttaaattcatggccacagattttaaaaggtaccaaatactgcctggacattttggctcattttttccactcttcagaacttctcttcctttccttgctatcttcttctgacactgcctaatgtttcattgaaaagtagaggtcattaaacagaactctctcatcttcccaccaccattcctcctaacccacctgcatctgtggccacttttcttcctcttgtaatagatgaaaaggttcctgctcctatcaaaagccatcttaccagctgtactctgcatcctagcctctcttgtcttctctagacttccctactgtttaactatcttctcttgcatcatcagctccccctctctactgaatcatcccgttagtgtacaaacatgctctagtatattactatcaaaacactcccttacttcatgttccattttcagatactgtcccatttcttatctctgcagcagcatttgagtgagctctttatagtcactctctctacttttcacattctctcctcagcccattccagctgtttctgttctcactactgcagagacttgctcttgttatgatcacgagtgactgctatgtttgtcaaatctactggttccttgtcgctctttttttttttattgagatggagtcccaggctggagtgcaatggtgcgatctcggctcactgcaggctccacctcccaggttcaaatgattctcctgcctcagcctcccgagtagctgggatttcaggtgcccgccactacacctggctattttttgtatttttagtagagacagggttttaccacgttggccaggctggtcttgaactcctgacctcgtgatccacccgccttggcctccaaagtgctggaattacaggcgtgagccactgcgcctggccccttgtctctatcttgatgtctcagcagcattcattactattgattcatgtctttacgctctcctattttctttttttattttggttttgtcacagaatatcactctgtcgcccaggctggagtgcagtggtgcgatgtcggctcactgcaacctccgcctcccaggttcaagcgattctcctgtctcaccctcccaagtagctggtattacaggcccagctaatttttgtatttttagtagagacagcgtttcgccatgttggccaggctggtcttgaacttctgatctcaggtgatctgcccaccttggcctccccatgtgctgggattacagccgtgactcactgcgcctggcctctccttttttgttctttggccatttcccaatctcctttgctgattccttctcaaccttgaaatgctagagtgccgtacggctatgtctctggccatattcaagcccatgacatcaaatgccatccgtgtaatggtgacttatttctctaattctggcctagaacattccccaaaagtaacagcctaaacttcacatggccccccaaaaaaactccccctccccaaaaccaccatccccagtcttcctatatcaagcaaaaaaattcagttatatggattcttcctaatctactcattcctactgaccttctccatctcatatccatccaactcctaccaccctgactcccacccttatgcaaatcattaaatcttgcctatattaccataatagctgtaatttgtctttccacttccctaaaatcttgttttcacacagcagacacagtgatctttccaaaatgtaaatcagtccctggttctcaagctaggaagatagtgcccacagggcaaatgtctggaaacacttttggctatcacaactgggtggatgctactgacatcttttgggtagaagtcagagttgctgattaacataagacacaggaaagtccctcacaaagaattatctggccacaacctatcaatactgctgagtttaagaaaccaagccttgtatcattcttctacagcaaaaagggtgtggagaatggagggccactgaaagaaccaaacctgagcccctttatgggggccacggcacagcccatttaatggcttggaaaattctcggggggaaaggtggctctcctctactttaaacttttcaatggcttctaactttatgtagattaaaatacaaattcctcatcctgctttacaaagcccactatgctgtagccagccactctgtatttcatcagtctctgaattggccaaacttattccttttgcagctgtttcttttgcttggaatgcttttgtacatgatctttgtgtggcttaaatgtcagcccctcagacacctcgttacccagtcatattacatcaccgcttattttctgtagcaccctcaccactatttcatctttcagcccatctccagtgctgcaacgtggacttcctgaaagcagagatcttttttttttttttctcactgctgtctagttcgccctcaaacagtgcctgacttatagaagtgctcagtaaataacagtgattaaatgaatgaaaaactgtgaagtctgacgattatcatatacctaagtgaagacagaatggacaaatgaatatgccactatacggttctggcaagaggtataggttaacaaagaaaaataacttcaggattaaaactatattaaaagccacaggtctggataagatcatctaggatgaaaaaatagtctttttaaatcaatacaccatttattaacctgagcagcagagaaggggctcggaaaagcacctgctctgagacccttactggagccccaaaacttctctccttaaggagccctcggggagagaaaaaagccttccaaacaggcttatgccttacacccccccccccccattctccgtctgtctccgagcacaggggccccacgcacctctgggggatccatcctggggtgcggcgaccctcttggtaagcagcgagcgcctgggtccgccggcctgggtctgcagcccgtatgagaactgcggcgggtcgttccagccgcgttccttgttgcctgcggaggcgagggatgtgtgaagcgagcccggaactccactgttagcttatactggggctgggggagacagagggtccatactaagcgccgcaaccgcccccagcctaggccggggcgacaacctagtgccctagcccggcggctgcgctcacccggcttcacgtacagctccgccatctccacttccgc

SEQ ID NO: 9834 - DNA, 14403 bp, Homo sapiens
atgaggcagcagtttgtttggcaagtcagagttacaatccccaatctcagtaatctggtctttttctccttcgatttacacagaaaaccccactcaatgtggttctaatctctgtaacagtagtatctcaagggtgatacagtgcaaataggactgtctttccttttgttgagggaaaagtctccccgttctatttgagtctgttctcatgctgaaatgaaaccatccaaacacagctgctccgcccagcacaggatgtgctttcagtctactttgggaaaaagtggtaggcagtagtctgactttacccagcagatcccttcctgatgaatggagaagggagaacagaggtttgcagatacacagggagcagggcagtcgaggacaccagaggggactagcttggcaccggaagggttcatctctcctacccaaggcccaccgcagagatgtttttattgaaatgcatgttatgagtaacacatgaactccctctggcccaggtgggacttcttccctcataggtgggtcaggcccagtgggacagtcttggtggtggtaagaagggagccaagtgacagaaggtctccaaggcataggagatggtgtccggtgagtctggggaaccgaggattatgaagcctgctggaagcctggtatggtatggttcttctcagctgtggctgcagatttctcttcattggctgcctcctctgaaaacagactcctcttttctgcaattaatcttttaactcctaccatccactgactgacctcagtcacatggtcaaccatgagggagcggtggatgtcatctgctgcgtcccaccggtggcttgaaagctctgaagagagacgggggttgagcaagcagcctgtggtacaagagcttccatgcctcccctcccagtcaatcaaaatctcagcacctgctccagcatagccaaccacagcaggaaagggatttaggctataccaaagaacccacccataccttgcaccagtagagccattctcttctttacaggtattgacaactttcctccagcccactgttcctgcagcagtgccaggcgtcggctgatgtcatcacatacctgcttctaagagacagaagcccccctccaattcagtgctgccagcccaatgaggggaggagaggggaagacagcaccacataggaagcacctgctttctctggcccacactttagaattctggttctttacccaaagattagaggccccactgagaaactgatgaaaccttcctttccctgctgtcttcttctgacactgcctgatgtttcattgaaaagtagaggtcattaaacaggaattctctcatcttcccaccaccagtcttcctaacccacctcctactatgactagaattctaaaatttcaggggcttctcagactctcagaagctcatcctgtagcgttacttcacaaaaagaaaactaagcgccaaagaggtgaaatgaccatgctactttccctttcttttaagacattcttcagatctctttttctaagaactaagaaaacactatagctagaagaggtttctttctccctaactgggcacaatataaatttcctgagaataaaatcagcagcttctgctctgaatggcatggagatacagaaaatcaggttgttcactaataggagctgaattcaactcttgttcccacagcatcttctactgattggtcttcaaaagtcttattaatgctcctgaaatcctgtgttcatttctttgggaaggccttagcagattctgaaggagtccgtaactctcaaaggattaagaacctgtccactgggtcagagggtctatctctgggaaccattcctgcatttggctgtggatgggagccctctctaacctctgatgtgccagagcttacccttgtgtggccacggcagtcttccaatgcctgttccaaaggtctcagcacatcctccatcacagcctcagactcgactgggaaacttgtgggctccacgccagaggcaggaccactccccacaggtggggacctgggagccttacttgaaggaggtggaggccccattgggggaggcccaggagaagtctctgatgcggggactgaaaaggtacagcaggatcaagcaacatggcttaaatgggtaagaagcttaactctaaattcaccccttctaagaagggctactctctgagacaacttattcattcaaaaatatgcatttatgaagtccccactctacgccagacaatatgctaggcactaaagattagaaaagtaaaccaggtggccgggtgtgatggctcacacctgtaatcccagcactttgggaggctgaggcagacagatcacctgaggtcaggagttcaagaccagcctggccaacatggcaaaaccctgtctctactaaaaatacaaaaattagctgggcatggtggcacatgcctgtaatcccagctactcaggaggctgaggcaggagaatcgcttgaacccgggaggcagaggttgtggtgagctgagatggtgccattgcactccagcctgggcaacaagagtgaaactctgtctcaaaaaaaaaaaaaaagaaaagaaaagtaaaccaggcctgggcacagtggcttatgcctgtaatactaacactttgagaggccaaggtaggaagatcacctgagctcaggagttcaaaaccagcctacgcaatatagtgagacctcatctctataaaaaaattttaaaagttagtcaagtgtggtggcacacacctatagtcctggctactcaggaggaagtaaaccagacagattaagttcctgacctcagagagcttaattctagaggcagggaaaaaaacacaaaattactaaattatgttacatgctaccaagaaataaaatggtttatgcaataaagagaaatgggagaacctatctagactaagtgttcaaggaaggccttctgaggtacatttaagtttatctgagctcacttgctatgtgactttcagcaagttactttcaactagagcttaggttcctcttctgtaaaatggggatgaatataatgccacttatttcacaaggttgcaatgaagattaggaatacaggtacaggctgagtgtggtgacacatgcctctaatcccagcacactgggaggcagaggcaggaggatcgcttgagcccaggagtttgagagcagcctgagcagcatactaagaccctcttaaaaaaaaaaaaaaaagacagctgctagactagtatgtagcaaaaagtacaaaatgagctgtttttattaaattgagaactaccggatgagatagatgcagctatgaagagttgaaggaacatgtactaggtcgaggttagagcagtgcccaagaagcaggaaaacttttgatttgttcaagagacagtaatgaggcctgtatggctaaaaattattaccactgaagaaagtagtatgagctatcattagagaggtaagcagagggtccagaccctgtggggctttggaagagtttgatcttgagtcaatggtactgggaagccactgcaggtttgtaaaagcaaggggtgatgtgaccagacttatttttaaacatgtatgctctgtgaaaaactgatgaaaacaggtcaacagtggtggcaggaacaccagttgagaggttgagtagttcaggaaagagataatgctggcatggactagggtaaaagagtagacgaggggaatggagtagtctgagatttacttaggaggaagtagcaacaggagtggattgagagtgaggaagagagaagtcaaggtgactcgtagtttctgacttagtaatgggaaccactaacagaaagaagactggaagacaaaagtcaaaagtttacttttaggtaccaacatccacaaggatgattaattcatctaataatttggtgtttcagttgacctcttcacctccagggatcattttttcccaccctacatcagcctgtcatccccctgccttgttcacactatcacctccaaaatctgatcacccccttaccccttccagctcagctactttgatttcaatgtacattaacatcacccccttataaatatttttacctcctttatctcctcccattgtcccactttcctggttaaacccaacttgcttgcacttgggagggaaaacagagccatgctgatagtttaaattcatggccacagattttaaaaggtaccaaatactgcctggacattttggctcattttttccactcttcagaacttctcttcctttccttgctatcttcttctgacactgcctaatgtttcattgaaaagtagaggtcattaaacagaactctctcatcttcccaccaccattcctcctaacccacctgcatctgtggccacttttcttcctcttgtaatagatgaaaaggttcctgctcctatcaaaagccatcttaccagctgtactctgcatcctagcctctcttgtcttctctagacttccctactgtttaactatcttctcttgcatcatcagctccccctctctactgaatcatcccgttagtgtacaaacatgctctagtatattactatcaaaacactcccttacttcatgttccattttcagatactgtcccatttcttatctctgcagcagcatttgagtgagctctttatagtcactctctctacttttcacattctctcctcagcccattccagctgtttctgttctcactactgcagagacttgctcttgttatgatcacgagtgactgctatgtttgtcaaatctactggttccttgtcgctctttttttttttattgagatggagtcccaggctggagtgcaatggtgcgatctcggctcactgcaggctccacctcccaggttcaaatgattctcctgcctcagcctcccgagtagctgggatttcaggtgcccgccactacacctggctattttttgtatttttagtagagacagggttttaccacgttggccaggctggtcttgaactcctgacctcgtgatccacccgccttggcctccaaagtgctggaattacaggcgtgagccactgcgcctggccccttgtctctatcttgatgtctcagcagcattcattactattgattcatgtctttacgctctcctattttctttttttattttggttttgtcacagaatatcactctgtcgcccaggctggagtgcagtggtgcgatgtcggctcactgcaacctccgcctcccaggttcaagcgattctcctgtctcaccctcccaagtagctggtattacaggcccagctaatttttgtatttttagtagagacagcgtttcgccatgttggccaggctggtcttgaacttctgatctcaggtgatctgcccaccttggcctccccatgtgctgggattacagccgtgactcactgcgcctggcctctccttttttcttctttggccatttcccaatctcctttgctgattccttctcaaccttgaaatgctagagtgccctacggctctgtccctggccatattcaagcccatgacatcaaataccatccttgtaatggtgacttatttctctaattctggcctagaacattccccaaaagtaacagcctaaacttcacatggccccccaaaaaaactccccctccccaaaaccaccatccccagtcttcctatatcaagcaaaaaaattcagttatatggattcttcctaatctactcattcctactgaccttctccatctcatatccatccaactcctaccaccctgactcccacccttatgcaaatcattaaatcttgcctatattaccataatagctgtaatttgtctttccacttccctaaaatcttgttttcacacagcagacacagtgatctttccaaaatgtaaatcagtccctggttctcaagctaggaagatagtgcccacagggcaaatgtctggaaacacttttggctatcacaactgggtggatgctactgacatcttttgggtagaagtcagagttgctgattaacataagacacaggaaagtccctcacaaagaattatctggccacaacctatcaatactgctgagtttaagaaaccaagccttgtatcattcttctacagcaaaaagggtgtggagaatggagggccactgaaagaaccaaacctgagcccctttatgggggccacggcacagcccatttaatggcttggaaaattctcggggggaaaggtggctctcctctactttaaacttttcaatggcttctaactttatgtagattaaaatacaaattcctcatcctgctttacaaagcccactatgctgtagccagccactctgtatttcatcagtctctgaattggccaaacttattccttttgcagctgtttcttttgcttggaatgcttttgtacatgatctttgtgtggcttaaatgtcagcccctcagacacctcgttacccagtcatattacatcaccgcttattttctgtagcaccctcaccactatttcatctttcagcccatctccagtgctgcaacgtggacttcctgaaagcagagatcttttttttttttttctcactgctgtctagttcgccctcaaacagtgcctgacttatagaagtgctcagtaaataacagtgattaaatgaatgaaaaactgtgaagtctgacgattatcatatacctaagtgaagacagaatggacaaatgaatatgccactatacggttctggcaagaggtataggttaacaaagaaaaataacttcaggattaaaactatattaaaagccacaggtctggataagatcatctaggatgaaaaaatagtctttttaaatcaatacaccatttattaacctgagcagcagagaaggggctcggaaaagcacctgctctgagacccttactggagccccaaaacttctctccttaaggagccctcggggagagaaaaaagccttccaaacaggcttatgccttacaccccccccccccattctccgtctgtctccgagcacaggggccccacgcacctctgggggatccatcctggggtgcggctaccctcttggtaagcagcgagcgcctgggtccgccggcctgggtctgcagcccgtatgagaactgcggcgggtcgttccagccgcgttccttgttgcctgcggaggcgagggatgtgtgaagcgagcccggaactccactgttagcttatactggggctgggggagacagagggtccatactaagcgccgcaaccgcccccagcctaggccggggcgacgacctagtgccctagcccgccggctgcgctcacccggcttcacgtacagctccgccatctccacttccgcttggccagcggggcagcgcgtcatttccggggcggcccctcacgcgggccagttgagacacgtccagggccaggcgggttgccggaatccgtggaggatggatgctggttcacaaccgtcgggagccgctgtggggaccctgcggcaactccctaagactcgaaggctccatctaatgaaccatcagggccctggtcacaaggcaccaaaggaggttgctgtccaggagccagtgctctaggaggcctcatcctctcaggagcaaattcaaacaaagaagctcctgccccacatacaccccgctgtgatctagccaggttgacttctacagcctcctcttgcattgccctgcacaatctccacattcacgtccggtagcctcactagtactcatcttccttcagttctcagttcagatgtcagttcttcaggaggccttctggaatgtctcaggccaggttaagtgtctcacttgagctcccacgaccctacaaccctctgagatttcgtaggtgtattacatcacatcttctgccttatttgactcttgttcgtttccctgtcggacagtcttagaaggtgggaccttgactattttattacattcccagtgcccagcttagtgcctggcacagggaactccttagaaaatatgtttgttgaatgaagtcagatctccatcacacccatgctgtcatgtgactacagagagccaccaacatcaagcacagacacaaagacactcatctcacacagggtgttagcccccagccctgtcccaggcccaatatactcacatccagtgaggtcactgagggatttttatttgcactgattttgctataaagtgttactgaggtagagccaactgtccagggttggacaggggcaaggaacacaaggacccaaggaaaggggagccagggtcctacgttgtggtgcagtgcctcccagtcatccgtataaacaataaattgggcaataaatagacggtggacaaggatcggagggacaggcagagaaggcttcaaggagtgacaggctataggccttgaggaataaaacggtacagagttaggcatggacccagagcctacttccccagccttcccagataagtttagggcatatggagcagagagggtttcagccggaaggcatcaagaaaagagaagacaccccgctttcgaggggttgcccctgcaccgccaacccctcctttgagcagggggaggggcaggggacctcctggggaatccatggagctggtccgcttgagccgcaggcgggcacgggcctgggcaccccaggccttgcctcgagctgcagaggccacaagacacttctggtactgaacctagggagaaggggaatgtgaggatccagctactttctgcctctagactccctgaaagcttctgcaggacagggaactggccaaagcttctgtctgataacaaggttggtagtcagccacatgtggagtttctagagcattcccaggtagctcaataacaaaatcataaaacatgtatcagacacttaaggagggcaggctggacactgctaagtgctttgtataattcagttatttatgaggggttattatccctgttttgcaaaagaggaaattgagattcagagagtatatgacttgcccaaggtcacacagccagagaaaggcagaaatggcattcaaacctagttctctctgattgcagagcctaaactcttaattacatgtaccactatgttgcctcttttccatctctcactggtggggactagtccctggcaaagcagattccctagtcaagggtaaaggtgtacaactcaaactccagccccaatgcaactgctcccagtcatctcatctgaacagctcaaaggtgtcctaatgggccttcatacatcctaatacgtcctccaaatcttttacccatactatagcttaagtggtcatcataatccataaccctgacttcactctcgggctccagtgcttcctagtgcctccagataaactcatcaccctgacctatgaggtcccccaaacctggcttctgtcattctctctgatctcacctctcactacgtcccccttgcatgccagatacactagattctttcagatactctcatccactaatatctctcaccttcacagctaaggttccctgtgcttggtacacctgccccactccccttcacctggctaacttccctcttggactgtcggatttctatcacctcttacaggtagccttcctgacccctaaaggggccacctcttccatcaaccagtggtgtacaacttatttctggtctatcttggctctatcctaagtgttttgtgaaggcaagggctgtgccctctacagcactaaattctcagggtcagctatggtgtctgggaccctgtaggcacccatatttgttgaatgaatgggcaaactgaactaacgaagtataagcaacccacactcaaatgcccacagatgccaggaaataaacctaaatgagacaaacaggaacaatgccaactctttagggcacagcttctgcacaactctggctgcatgctgacacttacacgtgtgaactgagtgccagagctcttgatattttaagaaaaacaagaatagcgattattatgtgaaatgtcctggcctttaaatattggcaactaattaaaacttactaaaaacaacatgagggccaaaacattaatgaaccagaatcagcccaggtttgtgatctctgaagaggctgccgacccggagcccaagtaaacagtggagagcagctgcagggcaatcccaccaacccattcccacccatgactcaccatacaggcagcctgcacagcttcagagagtccccctgcatggggctggcaccagaaggctgcgcactggaagctctgacggcccaggtcagcgatgaggccaaaggtgtgtgggtcgcggccaacaccaataaatgtcacaaggcgcacagggcactgccacaatggctcctcctctgtactggcctctgcctgcccacaccaggcctagtcactagagggccaagcacgggccagacccacttaacttttccgacagcaagcagtgacccctcagcatccctgctcacccctccaaagcccccaacttcaccctcttctggtacctgaatgggatgtgcagtcatgagagagtcagacacactgagcatggtggggacccaggcattccggtcccccctggcggtgagggtaccaatggcctcgttcagcacatccatgcctgggggaacatacccagcgtgtctcccagtgtaaaagaaagagtctgcagggagtgtctagccccctctcactgatttgggattcagagatagggaataggatagctggggcaagccttagaattctgatttgggaaggctggtagaccccaggccataacaaggccacgggaggactcttgagaaatgataacaggcctcacctcactcaccttccccttgcctcacacagcccaccacatgcagccccctcagtcctcacccatggccttggtgactggcagtgtccccatatacagtgcctcgtacttctgagcagcttggcttaccgcatccagcagctccactgaaatatacacaccaagttggcctggaagctctttcaattacccttttccccacccttctcaatgggccaggactcaggtcagagctggtgctggtagaagaaatggctcatagatgctcctccaactagtggcttgggatccctgagaccagacatctcagaaatttatccacagaagtattaaataaccagaaatcgcccccccacaaagcagcaccaaagcaccccaatgcagcaatgcaggtctcccctccccataccttgccgtggcaggtcttcaggagagatggggtctggggagcagcaagaggcatcaccactgacctctactcgctctgacaagatctaaaacacaatgaagccagcatgacccacagggagagaggggaattagggtaaaagggccaataccaccccaactaccttggaagcttcagacccaaccccttacccacattccctgccccacccctgacacttacctgggcacaaagcccatgtagggcactggcaatggccttggcagggacatcacagcgaaacacatggcacttgagcatacagctatctttgtcacttgccacaaaagcgaagtccctagcaggggcagagatggggctggggtagaggctggttagaggcaggagcctgcaggaggctggaaagtcaggctagggatatagcagggatggagtagggacatcagggatggggctcaggatacctggttttcactcacctgtcactgttccggaagcatgtgggagcacagaagggaatcagcccagcctctcggactctccccaaactgtccctgctgagctgggcccaccctccccaaccagggctggaccaggcaggggaagcagtcctgggtccacatcagaggatctgtgtccaggggttcaagtactggggatcagcatcagtggggatcacagcctgcagccgggagggagaagtagctcttgcttgggggatgtaggcatcctcaccggcccttggagctccccacgccccacacacggatgtgcaccagaggctggcagtggatcagactgtggtccaggggattcactaggctcatggcatccttcttcaggatcatcagcatgttctggccctgccaaggacagaggtcagcccagagctcagataaaggtcattgccatgagaaataggaaattcagggacagctacctctgctgggccctgggcccaaaccattaaagggcccagccaactcacctcaccccaggcaccatctggaggctggctccggctgcgggtctgggccagctgctggatacagttattgactgcaatactgctcttccccggtgccaggtcctcttcaggtacctctacccagcccagagagcggactgcaaagcactgacaggttgggggaagggacaggaattaataaggatggagtagggtggcaggtgccacaatacatactccctgtcttcacccttgatcacctctgttcagtccaatcccacccttgtctttcccttgggacctcccaatgccctcaggcccaagtcactaccttagcccctggctccatgctctggatgtaggattccccaccataccaggacagagagttactgaaacagagcagagctgttaagaggaccacatttcctacagtagggacactggtgaggcctagacaacttgataagcacaggatgaggggcaagacccagaatatagcaccagaaatataaaaccagagcagggtagagcccaggacatattaacgtaacataaagtgtgactcagaatttgagggaaaattcaggacataggacccagacacaggacatagaataaaagtcacaaggctaggtgcagtggtggctcacgcctgtaatcccaacactttgggaggctgagacgggtggatcatgaggtcaggatatcgagaccatcctggccaacatggtgaaaccccatatctactaaaaatacaaacattagctgggcatggtggcatgtgcctgtagtttcagctactcaggaggctgaggcaggagaatgacttgaacctgggaggcggaggttgcagtgagccaagatcgtgccactgcactccagcctggatgacagagtgagactccatctcaaaaaataaaaaataaaagtcacaaaatagaacagggtccaatatgtggaccagaaccccaaagtgggacaagagaccctagaacagaggacttaatggccaaggtctagaacatgataggttaggaccaagaatatgaaaaacatgtagctacaaacaagagcttagaacaagggataaaactcaaaatactgacagttaagaacctgggacagagccaagaacgtaacagaacccaaaacatgtgacagaatccagaacctgggctggaaagcagaccatgggtccagctgcatttttgaacaccatggaaccccaagcctttcattttgcctgggccacccgttacctccggtccagtgaactctccaggctggagaaggatctccctttggggggccgcagtccccagatcccctccgttccctgtagagtgggagttagtcagtttaacagcagacctaggtccacacatgggctcagacctcctcctcacactctacctaccgtgcctgggtcctctgcatctcctagttcccaggttgggcgctgccactgggtgctaccgctgggtacatgccagtagtaagtacctgcagcatcgtggatcttcctccagccaggaggcaggccagcctccacctccagactgtggtccccccacaagtcatctacaggaacaccggattagagaggagggagcatatgatttgtgagttcagaataacatgctgtcataatcccctctccatccccaaaatgggtcagttcttaggctgaagatccaggctcctcaatcttgaagacatcacatgtaaagaccgggttcattcgccccctggtccctacacagagaggtatcccccaccgtctttgagccccagagtagcctttcggattccctcgtcctccctcagctcctggtcttcccaccgggcccctccgtgcacaccatcgcagttgaccagaatgatggccagcatgtaatccttgcccagcataaccccggctgctccccgccagcctctgccggcccgcactctcagcccagcgcgacctctggagctactgcgcctgcaagcccagcctctctgcgccgcaggctgcggggccagctggcgccgcacaaatacggggcgggacacggggcgggacacgggccggtcccgggggagggcctgagccgcacagcccgcccaggggtggtgcgtgtaaacgggcgtc

SEQ ID NO: 9835 - DNA, 711 bp, Homo sapiens
aactaccggatgagatagatgcagctatgaagagttgaaggaacatgtactaggtcgaggttagagcagtgcccaagaagcaggaaaacttttgatttgttcaagagacagtaatgaggcctgtatggctaaaaattattaccactgaagaaagtagtatgagctatcattagagaggtaagcagagggtccagacactgtggggctttggaagagtttgatcttgagtcaatggtactgggaagccactgcaggtttgtaaaagcaaggggtgatgtgaccagacttatttttaaacatgtatgctctgtgaaaaactgatgaaaacaggtcaacagtggtggcaggaacaccagttgagaggttgagtagttcaggaaagagataatgctggcatggactagggtaaaagagtagacgaggggaatggagtagtctgagatttacttaggaggaagtagcaacaggagtggattgagagtgaggaagagagaagtcaaggtgactcgtagtttctgacttagtaatgggaaccactaacagaaagaagactggaagacaaaagtcaaaagtttacttttaggtaccaacatccacaaggatgattaattcatctaataatttggtgtttcagttgacctcttcacctccagtgatcattttttcccaccctacatcagcctgtcatccccctgccttgttcacactatc

SEQ ID NO: 9836 - DNA, 1911 bp, Homo sapiens
cgcctcagactcagagctgcgctcctcgacctcaacgccaggcggttactttgctgctcctcccgctcgctatgtcaacgtccactaagctgcccgattcccgggggccgggaccagctgcccgactgctacagcaccacgccggggggcacgctatacgccactacccccggaggtcagcgggccgggcaggggtccgcaggctgcggacatattagcgcgtgcgtgttgttgcggggcgggggtaggggagggacagacctaagacttgtccgcaggcccctctacaggttgtagctttgggggagaatgtttggagcggaagctcagttcccaaaaacttctaagtgatgcaacaaggccatgagcctagcttccgggtgtttgggctgtaatccttcactgtggcctgggttcttggagccttacacacgctccttacccctcgcgactttgcttcctaggaataggggccagggccccctactgagcgtgacctcagccggaagcaccgggtcttgagaagtggagtagttagaacagttggggcagttgctccgtttttgtgctgctggctggcgtctgtttggttgggcgagcagcctgggatcacgagctgctgggctcccgacccagggattcctgccacgcggaagcggaggggaggaacagggcaggaccctttgaggacattatgcgggccaagttcctctgagctagtgtgaaccttataggacctgggaggggtcaggattagaacagtacgtttctcctccctgcaggagatagcccaggtaacagcactgggtggaacccttcacaactgctatttcacttcttgaaccacctgaggctgttagtctaggtctcaccttcactggtgagaccaaagcagaggtttcagagtggtagaggagcagcatgaagtacctgaactcaaagtttggtgttcctcttagagccaagatctgaagctctcccaaacataaagcccctgcctataccagctgggatgccccccttgctttatacccacatcttggttaggtctggaagattttaagcactatgaaggcttgtctgctgagaacctagctgggcttcagagccgatgtcctttgatacacagggaaatttgacaccaccctcacctccaggccccaaaaggcctgagtctgggaccccagtcacctcggtacccaagctcctgactcttacctcagtcccaaccccttgacaggcaccaggatcatctacgaccgaaagttcctgctggagtgcaagaactcacccattgcccggacacccccctgctgcctccctcagattcccggggtcacaactcctccaacagcccctctctccaagctggaggagctgaaggagcaggagacagaggaagagatacccggtaaggaaagcaggaattaagaattgtcccagcctttgagttcaaatgccactgtgacacagtgcgggggttcagttccaagaggggtttctgcactgatgctgagcctgcagatcctcagaccagcaacctgtcttcctgccttttctctctccagatgacgcacaatttgaaatggacatctaatccagtgcagatgacctggcatgtggagttacagagggatccctcatgccactgctgccaccacctcttcctggggcatccaaaggccagctggcctcatctaatctggaagggagtgacttgttagttccaggcctcctttagttctgaggcagctagaccagggataggagtgggcaacttgccaagcccttaactctacttcctcttcagtctgtggtactcctcctaaccctaaaccctctatgctcaggggctggaactggggaatggagtaagtcaccttctgactgcttagtaaacattcaaagaaa

SEQ ID NO: 9837 - DNA, 2539 bp, Homo sapiens
atgaggcagcagtttgtttggcaagtcagagttacaatccccaatctcagtaatctggtctttttctccttcgatttacacagaaaaccccactcaatgtggttctaatctctgtaacagtagtatctcaagggtgatacagtgcaaataggactgtctttccttttgttgagggaaaagtctccccgttctatttgagtctgttctcatgctgaaatgaaaccatccaaacacagctgctccgcccagcacaggatgtgctttcagtctactttgggaaaaagtggtaggcagtagtctgactttacccagcagatcccttcctgatgaatggagaagggagaacagaggtttgcagatacacagggagcagggcagtcgaggacaccagaggggactagcttggcaccggaagggttcatctctcctacccaaggcccaccgcagagatgtttttattgaaatgcatgttatgagtaacacatgaactccctctggcccaggtgggacttcttccctcataggtgggtcaggcccagtgggacagtcttggtggtggtaagaagggagccaagtgacagaaggtctccaaggcataggagatggtgtccggtgagtctggggaaccgaggattatgaagcctgctggaagcctggtatggtatggttcttctcagctgtggctgcagatttctcttcattggctgcctcctctgaaaacagactcctcttttctgcaattaatcttttaactcctaccatccactgactgacctcagtcacatggtcaaccatgagggagcggtggatgtcatctgctgcgtcccaccggtggcttgaaagctctgaagagagacgggggttgagcaagcagcctgtggtacaagagcttccatgcctcccctcccagtcaatcaaaatctcagcacctgctccagcatagccaaccacagcaggaaagggatttaggctataccaaagaacccacccataccttgcaccagtagagccattctcttctttacaggtattgacaactttcctccagcccactgttcctgcagcagtgccaggcgtcggctgatgtcatcacatacctgcttctaagagacagaagcccccctccaattcagtgctgccagcccaatgaggggaggagaggggaagacagcaccacataggaagcacctgctttctctggcccacactttagaattctggttctttacccaaagattagaggccccactgagaaactgatgaaaccttcctttccctgctgtcttcttctgacactgcctgatgtttcattgaaaagtagaggtcattaaacaggaattctctcatcttcccaccaccagtcttcctaacccacctcctactatgactagaattctaaaatttcaggggcttctcagactctcagaagctcatcctgtagcgttacttcacaaaaagaaaactaagcgccaaagaggtgaaatgaccatgctactttccctttcttttaagacattcttcagatctctttttctaagaactaagaaaacactatagctagaagaggtttctttctccctaactgggcacaatataaatttcctgagaataaaatcagcagcttctgctctgaatggcatggagatacagaaaatcaggttgttcactaataggagctgaattcaactcttgttcccacagcatcttctactgattggtcttcaaaagtcttattaatgctcctgaaatcctgtgttcatttctttgggaaggccttagcagattctgaaggagtccgtaactctcaaaggattaagaacctgtccactgggtcagagggtctatctctgggaaccattcctgcatttggctgtggatgggagccctctctaacctctgatgtgccagagcttacccttgtgtggccacggcagtcttccaatgcctgttccaaaggtctcagcacatcctccatcagtcgagcctcagactcgactgggaaacttgtggctccacgccagaggcaggaccactccccacaggtggggacctgggagccttacttgaaggaggtggaggcccattgggggaggcccaggagaagtctctgatgcggggactgaaaaaacagcaggatcaagcaacatggcttaaatgggtaagaagcttaactctaaattcaccccttctaagaagggctactctctgagacaacttattcattcaaaaatatgcatttatgaagtccccactctacgccagacaatatgctaggcattaaagattagaaaagtaaaccaggtggccgggtgtgatggctcacacctgtaatcccagcactttgggaggctgaggcagacagatcacctgaggtcaggagttcaagaccagcctggccaacatggcaaaaccctgtctctactaaaaatacaaaaattagctgggcatggtggcacatgcctgtaatcccagctactcaggaggctgaggcaggagaatcgcttgaacccgggaggcagaggttgtggtgagctgagat

SEQ ID NO: 9838 - DNA, 193 bp, Homo sapiens
gcccacgaacgccagcgaaaccgctgacaccaccgcccaactatgaactcatcaggcgcctgaagaccgacacgccgaacatgcgccgcgcgcactcgcgcacgagtgagatcatcgcgccccggtcgtgagtgcgctcacacgcagcctgagactcgacgggagggggtcacgtggaagtatctgagagagg

SEQ ID NO: 9839 - DNA, 1910 bp, Homo sapiens
cgcctcagactcagagctgcgctcctcgacctcaacgccaggcggttactttgctgctcctcccgctcgctatgtcaacgtccactagctgcccgattcccgggggccgggaccagctgcccgactgctacagcaccacgccggggggcacgctatacgccactacccccggaggtcagcgggccgggcaggggtccgcaggctgcggacatattagcgcgtgcgtgttgttgcggggcgggggtaggggagggacagacctaagacttgtccgcaggcccctctacaggttgtagctttgggggagaatgtttggagcggaagctcagttcccaaaaacttctaagtgatgcaacaaggccatgagcctagcttccgggtgtttgggctgtaatccttcactgtggcctgggttcttggcgccttacacacgctccttacccctcgcgactttgcttcctaggaataggggccagggccccctactgagcgtgacctcagccggaagcaccgggtcttgagaagtggagtagttagaacagttggggcagttgctccgtttttgtgctgctggctggcgtctgtttggttgggcgagcagcctgggatcacgagctgctgggctcccgacccagggattcctgccacgcggaagcggaggggaggaacagggcaggaccctttgaggacattatgcgggccaagttcctctgagctagtgtgaaccttataggacctgggaggggtcaggattagaacagtacgtttctcctccctgcaggagatagcccaggtaacagcactgggtggaacccttcacaactgctatttcacttcttgaaccacctgaggctgttagtctaggtctcaccttcattggtgagaccaaagcagaggtttcagagtggtagaggagcagcatgaagtacctgaactcaaagtttggtgttcctcttagagccaagatctgaagctctcccaaacataaagcccctgcctataccagctgggatgccccccttgctttatacccacatcttggttaggtctggaagattttaagcactatgaaggcttgtctgctgagaacctagctgggcttcagagccgatgtcctttgatacacagggaaatttgacaccaccctcacctccaggccccaaaaggcctgagtctgggaccccagtcacctcggtacccaagctcctgactcttacctcagtcccaaccccttgacaggcaccaggatcatctacgaccgaaagttcctgctggagtgcaagaactcacccattgcccggacacccccctgctgcctccctcagattcccggggtcacaactcctccaacagcccctctctccaagctggaggagctgaaggagcaggagacagaggaagagatacccggtaaggaaagcaggaattaagaattgtcccagcctttgagttcaaatgccactgtgacacagtgcgggggttcagttccaagaggggtttctgcactgatgctgagcctgcagatcctcagaccagcaacctgtcttcctgccttttctctctccagatgacgcacaatttgaaatggacatctaatccagtgcagatgacctggcatgtggagttacagagggatccctcatgccactgctgccaccacctcttcctggggcatccaaaggccagctggcctcatctaatctggaagggagtgacttgttagttccaggcctcctttagttctgaggcagctagaccagggataggagtgggcaacttgccaagcccttaactctacttcctcttcagtctgtggtactcctcctaaccctaaaccctctatgctcaggggctggaactggggaatggagtaagtcaccttctgactgcttagtaaacattcaaagaaa

SEQ ID NO: 9840 - DNA, 1841 bp, Homo sapiens
aagcaccaactgtctagtggagttcttgtgtcctttctctgcaggtatttgaaatatctcaccaaaaaatatttgaagaagaataatctacgtgactggttgcgcgtagttgctaacagcaaagagagttacgaattacgttacttccagattaaccaggacgaagaagaggaggaagacgaggattaaatttcatttatctggaaaattttgtatgagttcttgaataaaacttgggaaccaaaatggtggtttatccttgtatctctgcagtgtggattgaacagaaaattggaaatcatagtcaaagggcttcccttggttcgccactcatttatttgtaacttgacttctttttttttctgcttaaaaatttcaattctcgtggtaataccagagtagaaggagagggtgactttaccgaactgacagccattggggaggcagatgcgggtgtggaggtgtgggctgaaggtagtgactgtttgattttaaaaagtgtgactgtcagttgtatctgttgcttttctcaatgattcagggatacaaatgggcttctctcattcattaaaagaaaacgcgacatctttctaagattctctgtgggaaaatgactgtcaataaaatgcgggtttctgggccattcgtcttactttcattttttgattacaaatttctcttgacgcacacaattatgtctgctaatcctcttcttcctagagagagaaactgtgctccttcagtgttgctgccataaaggggtttggggaatcgattgtaaaagtcccaggttctaaattaactaaatgtgtacagaaatgaacgtgtaagtaatgtttctacaggtctttgcaacaaactgtcactttcgtctccagcagagggagctgtaggaatagtgcttccagatgtggtctcccgtgtggggcccagcaatgggggcccctgatgccaagagctctggaggttcttgaaagaggggacacgaaggaggagtgactgggaagcctcccatgccaaggaggtgggaggtgccctggaaatagctgcctcatgccacttaggccatgactggatttaatgtcagtggtgtgccacagtgcagaggctagacaactgaaaggggctaccaaggctgggaaaaaaatgcaattgttgctgtgagtgactttgaaagactctggtgccttgtggtgcccttctgaaattcaaacagtaatgcaaaagtgtctgcattagaatttacggtgtctaaaattcatgtttttaaaagagcttgcctacagatggtttccacacttgaaattgtgccctgcgagttgcatagctggaagttcaatgctcagtcctaccttggctcccattaaacatttggtgctctgtggattgagttgaacgtgttgaggctttgcaatttcacttgtgttaaaggctctggcatttttccatttctatgcaaatttctttgaagcagaattgcttgcatatttcttctctgccgtcacagaaagcagagtttctttcaaacttcactgaggcatcagttgctctttggcaatgtcccttaaccatgattattaactaagtttgtggcttgagtttacaaattctacttgttgcattgatgttcccatgtagtaagtcatttttagtttggttgtgaaaaaaccctgggctgaagttggcatttcagttaaaagaaaaaaagaaactagtcccagatttgaaaacttgtaataaaattgaaactcactggttttctatgtctttttgaactcttgtaatcgagttttgatcatattttctattaaagtggctaacacctggctactcttactgta

SEQ ID NO: 9841 - DNA, 7115 bp, Homo sapiens
agcagtactgctgtgatggctgctggcccaacggctgctgcagcgcctatgagtactgtgtctcctgctgcctgcagcccaacaaggtatggggagttgatcctggttctgcggctccttttttctttcggcctctgttttatgatgagcattaggctcttcatgtgagattcctctgaaaataaaacttagaaaggagctttgtaggtgtcagaaattgctgcacaatagcttttatctaaggaaaggaggtggttcccagttgcttgaatggttcttttgcagaatggatcattgtattgctaatcacatatctaatgaataagatacccagggtgttttggcatgcacgtgtgtgcacgcgtgtgtcctttcccctccctccttttctcctcctcttccccccttccctgtatcagcattctcttagtttaggagagatagccaaggtcaccttgtgctggcttaggtaatttattacaggcactaacttttgtttccatagcaacttctcctggagcgcttcctcaaccgggcagccgtggcattccagaacctcttcatggcagtcgaagatcactttgagttgtgcctggccaaatgcaggacctcatctcaggtcagaagctgtgatgtctctagctgtgggatggcagctgacgggttagaaggaaactagaaaatacacactgtcgatccttttggtggggtggtaagggagaagagactcgaagccgtgtcacgctttgtttggtgtgatgatagtatttaaaatgtcaacgtgagatttatacaagttaggggaggtgaagcatttatattaaatcaaggtctaatcaactggcatctcttctatgtggttggtacatttgttccttaagtggaagcttaaaattatttttaagtctggtagagtcctaatagtcagcttctaagagaaggccctcctccctgtctttgaaatttgactaaggctttccagtaaccacttgtttagagtaagtagcaatttgttctgggatggagtcgctgtttattttaggattcaaggggatgaggcaggtgaatgtttaaaaatacacgaataaatctgtaggctgtcaggctctcaatacatattagcgtgctgtcattaaatgcttcactcttttggcattaaatattattgcacctgctgctgaaagcatctgaaagtcttttgccttttcatcactgtctcctcggctctcagctattgtggttgggcagttgtcatagctctctttgtaaaatcaccagacgtgtttattatacaagcacacttcttctggctcctattcatggtgtctctaagattttactggcttcgtctgagataacggactcatttgtcattctccaaagctcttgtaccctttgccagatttctgtagtccacctttggattttatgccccttctcatgtctctggtttgttctgcgagcattcagtatcattgggtaaatgtttcagggattataatgagcatttgaaaacattaagaaattcctgatggtcttgttttgcttgaagagctttccacttgaatgagctttaaaggaaatgaggaggaaggctgaacacatgactcattttgattcagattctctctcattctgagaaacgctagaaaaggcgaagtattttctttccttcactgataaaacccaggaattatttccagtcttcagtgaagctactatactttaggacttggtcttttttaccataaaaagatttcccaattgccatttgatttgttttgataaaagtatcccaagaaagagaagacttggctatatgtctgttaaattggatgaatatttacaagtttgttgcttagcattggtcttggactaattaatgaattctagactagccaaaaacccaagttgcttgtatgaaaacaaattgctgaaaaattagccatcaggaatgattgtctgctttaaatcacacttccaatttgcttagccaaatgaggcttgcatggtattgtaggatttggctcatgccccaaatttttaggtacataaactttatgaaagcaatttaaagtgcatctccttagtgtctctgcagggttccttacgggaactgagtgaagctcaggatcaggtgcaaaacacccattggatcttagactgtttcaagtaatttgaggaaaagtagttgtcttgagtcaccaggtcacagcaaagttatttaaaaactcactggtgtacataaaaagaaacagtcccacagcgatgttatgtctgtgttcatgctcttcattggcattctgggttgagcattcttctttgttccagaaagtgccctggagcctttagtgacatttggagatggactcggccagccccctgcagggagagtctgacagtcccgatccactctcactcttccgagagggaggtgtgtgaagctgtgctcgctctcactgcgctcttattttccttttgccaacagagcgtgcagcatgagaacacctaccgggaccccatagcaaagtattgctatggagaaagcccgcccgagctcttccccgcttgacgggtgcagcggacttgctccagcctgggtgaggaggccccgctgaagaactcgcctcctgggacccagcttcagccatcgggccaggctgcaggaagaagacaaaggcagcgtgaggaaaccttggctttgaccccttctcgtgttgtcatctttggcttcgctcaccacccgggcttaccagatggaactcttctgtaaagcagcttggcccctccagccagtcccattcgggaaagatgaaaccggaggccgggctcacggtggtggtggagttcttggatgactcagccctgggacctgcacagggacctgtgacttgtgttcatcgggggccggtgtcacttccagttttgatccaggctctttcactgtaaaattatttattggattcctttggagtaatgggaacattctaatgttttatgtaggaaaatgccttgccattctagttgaatatgttcaaggaaattatttttgttgttgttctgtgttctcgagtttcaggagttaaatcattcttccacccagatacaacattttctcttttaggacgtgaatattctctctaggcagttatttttgtttgtatttcgacagtatcaagcataggccctgaacgtgacctgttagccatatcctgacgtgtaaaattatctaaaaactcagacactcttccattctaatctaactgcacgatttctaacagtgggcaccatgtgcctgccctcaggttattttccagtggtagtcgaatgtgctcatataccctatggagagcactgttttagcagaaatctaatttctcttcctggaggaatttgttctcatttcttttgccacttaaaattaactgtgggctactcagccagggtacagtgggagcctcaggaaggtcagaggcaacctcctcccctgttctatcaatagaaacccaacgttgaggcaattcctaaacagacgcacctcgtagcttgctgtatgtgtttattctttattgctttcagctttggggctgtaacaggtacaaatatttggtttccctatgatttatagagaagaagaagaaacccagctttctatcagagcactgcaagagaagagtcttacacctgccctcagtgggagatgagaatggtcattatgacttagagaatgctacacgtgtaggttgctggtgtgtcctgaatccacaggcataaagcactccccatttttcctactgtaatgcagattctccggctcaaggtctagaatatttgatcctaagatcaagacatcatgcccttcgaatagtactgctctttgttttcaggagtcacgtgaacacacaactctcctatattcctcacgaacctcaggattgagcaaggtctttgtaatttttttggttcactttattgacctgggagcaaggtgctaattctgtggtcagtattcaatgtttttttcagtggagctttttctttgggccatatttgccttctaatacattcctgcaatatgtagtggtgatttcccttagcttcctcctactacctcttatactcatctccccaaattatttgcctcccttaaataagttttcctagaaggtaagctggtcaggcaatttgaaaaatattagatcccaagaaatctattccgtttgcattggacttctcggattccatgtgtttgcagcaggactacatcgaactctgatgtgccggattgtggcatgtctgcatgtctcatccatctattgtttttggtaactcagtttggaatttcagtgtctgtcttccctgggttgacattggaatcagcctctcctttgagcttattttaactcttgagcaacataacatagatttaatgtgaacagtttataccaaagggcagcctgtgcctgtttatggatcctctctgcctttgtacttgaagagcgcattttacatttccagtcctttcacagacaggagctccaaccttacgatggagaattaaacttgcttgtatttccactttgtggatgaggaactatgagaggtggagtgacttcctgggtccccgctgagacttagtgacagatcccagacaagaacttcatctctgactccaggtctagtcctcttccccctgtctcttgccaactccagccctgacaccgtgggcgtctcccctgagagcagatatatttcaattgtccaggccaaaagaggggcgaggcggcataaacacccaaattaggtggaggatccaaaagtcattttcatttggctgtggaatatgttttttgtatttcaatcagctaggggtgtgttcactgtttttggaaattcacagcgcttgagcctccataatgaagctgggctgcagagcacctggcacgtgctccaggctcccagctcccaacctaggacctctccctgccctccactctggttggtttgtggttccctcgaccgagggtttctagaatcagggaccttgtctaagttttgtttgcccagagcccagcgaagtgtgtgatacaccttgggagtttaggagatcacaaaagggatgaaaacacctttagaaaacatttcattggtggggcgtggtggcttatgcctgtaatcccagcactttggaaggctgaggcaggtggatcacctgaaggcaggagttcagaccagcctgaccaatatggtgaaaccccatctatactaaaaatacaaaaattagccgggtgtgggggcgtgtgcctgtttttgtgagactctgtctcaaaaaaaagaaaaaaatattgttaataagtgagtgttttcggctcaagggaattgagtcatacgttgcatctcccccagttctgcatcttatttgctgcgcttgctggagttgtaaagattggtcctaacagggaaagaagcacacaagagactgtgaaaagggctctgagacaagcaaggacaaaagagggagggaaataccttccacagggcctgggatctggcaatgctagagccttttttttttttttttttttttgcgatggagtcttgctctgttgctcaggctggagtgcaatggcgtgatctcagctcactgcaacctccccctcctgggttcaagcaattctcctgcctcagcctcctgagtagctgggatcacaggcgtacaccaccacacccagctaagtttttgtacttttagtagagacggggtttcaccatgttggccaggctggtcacggactcctgacctcagatgatctgcccgcctgagcctccgaaagtgctgggattacaggcgtgagccactgcgcccggcatggagctgctattgatgggtgagctccacagcttttgcagaagcagaggatatgacttgagagcagtgctgtcacctctcagcatgtccccaagcccaactggggcctcctggagatgcctcagtcggcactggccccaagggaatcgtggggaacagttgcacaatttgcaagtttctgagtgcagcttttcccatccttgggatcagcagataagttgtaaacacagggaggtactgcttattggatatacttttcataagtaggacagaattcttttgggactctagagttgggaactaccacttactagcggcgtggctgaggcagtcttcctcctctgtggctcaggcccttcatctgtgaaatggggtcacagcatctgcctctcagggtcactgtgaggtgtcgatgtgagcaaggcctgaggcttggcaagaagtcaatgtctgcaactcagcagggagcaatggcaggggcagtcaggggtcggctcggataggggtgggtgggctcctgaggttggaagggtaggaattacagagctcttgttactattgttgttactgtttttaaagatacgatatttcagataattcaggagcacgtaaggatgaaacttaggataacctaaaatcacacaacctagagagaagcgcatttttgtcttcccccattttctaggcaaaaatgaaagtactttgtcctcttgaaaaacaattctctaatgaatatcctatgttacatagaggcctgtgtaatgcatttgtgtggccacatggtgtcaatttcatgaatatacaataatattattaattccctgctgaggacattaactggtttccaaggctgcttgttgtttttgctactacaaataatgcattgatgataaatacttttacatacatggttgtatgtttatctgaactattttcaccaatatattcacctagtgtgtatggaagtgtccatttttgtcatacccctggtaaccctgtgatattatttttaaacattttgctaatggatctctgttcttgtttgaatgtatttaatttccagcagaatgagccccattccttattttgattggccatttatcatgtacatatggtgaaatgcctattcgtgacttagccaatgttgtttctttttcttactgattactacagtacatttttatatgaaagcagcctttgtccccttctcttgtttttcagccctgtgttagaaacaactaagctc

SEQ ID NO: 9842 - DNA, 461 bp, Homo sapiens
ctttaatgttttagtgctgggttgtgagcacagtttgtcatcttttatcatagctagtgaaagaatattcttttgattaatttgggtaagacagagactcttggactctttgagtaaaaaattccaggagtgaaggaatcaatcaattaataaaaatccaagagctataggttttatttttctccatgagtatgggtgaagtaagtagtttagtaaagaaagcatgtaagaacttatgcttcttagcaagcagatgccactgtgaatattgccggggtaacacattattaaataagatcatttgcatttacaaacttttcaaaggctggaagttaattttcaaggcaatagcaacacagtatgaggttgtgatcttacaggactccttgttggagataacgtttgagttagtagatgtctgatacaagatgagagttcttgatgagcttgctttcaccaag

SEQ ID NO: 9843 - DNA, 772 bp, Homo sapiens
gctttctaccctgctgaagtgctgctgattaaattaccctgaaatccccacaggacacattacttcctcacaggtctctactagcccagcgctgcctcaaggaatggcattattcctttgccactgtgtcctcaccgcactcttggactccgccgaatgcagacaccctcctgtctgcagaaggatctggaggggtagaacgcttcccctctacgacggattgactccccagcacctcaccagcagttctttgaatggagtggctttggaggtgggagttgaggaagaaatgtgagcctgtcattacaggttctgtttagaaaactagtcattctactaaaaaggtatcacataagtaagtaggagcaataaaaacaaagaagatagtgggactccgagaagctttccccgctctggcctgttagtctatcgttcgttgggcaaggctcttccagtgtgtgaccttttgcgtgttatcacagcatgagtgcagttttgtgtacaggcatccctatattcagcatgtatctgcaacatgccttacctcgtctgctgtcacagagcaaagtggagcaagtggtcgccgttggtctgcacctgagctgggagccgagtggtgacgtgcatatgggccgactgcgtctccacagaacctactcagtgatcttcctgtgtacgactcagtccctgatgttggagttgaactgtaggactgtctgtaaaatgaaagtgcagactttaatgtagtaaagagaatgacttgccagttaca

SEQ ID NO: 9844 - DNA, 24387 bp, Homo sapiens
caacggtatcgcccgcgccgtgcagttgacgaaattgaggttcggcttggtcgcttaaccagccaaaggtcattggcagcgccagggttcgaaccacgaccccttaatccccacccttcttcgcaggcccatcggaatcacgctgtccccccggacactccttcgggtggagggtggggaactcagtgaatgcaaagaaagtcaggtcccactcgttcttcaccaagcaaccgtttgttattacctcccgacctcctgctgatgtcctagaagcccccctttccccttgcaaacgaactgagattattcagtcagaatggcttggggtttggggtctgcattggggagtcagatgcatcagcctctgatttacgtctcccaacattgtgaggttgtcgcccaagtgcattgttcagattctagagctggaaactgggaaactgacttttagctccaggctcagagcctcagctcccatggtctctaaaggcctttcctcactcataactactgggacttagcaaatattaaatgaccgtgcctgtgcatgtcccgtgtgccacatgtctacttagtgctttatgtttcttcctagctcattgaaaccctctggtggccctacgaattgagaattctggtaattcctagtttacagatgaggaaactttgcatcaaaaggctcaactaccagccagccgtggtggcatggtcctgtagtcccagctactctgaaggctgaggcaggagaattgcttgagcccaggagttccaagctggagggggctatgatagcgcttatgttgggtctgtgccactgcatgcctgggcaacatagcgagaccctgtctctaaaataaaaaaatgttcaaatgcctagtccagggtgacagagctgggattgaaagccaggtctgcctatctccagatagttcagtggctcctcaaattagatttgcctggagaatttggataaaaccggattctaaagtcccaccctgggaggttttgatttagaagttcttggatataaccctggaatctgtgtatttgtcaagcagcgtggtggtcctgggccacactgagggaactctctcttccctcctctgacttcccgtgtagttgctggtcagaagtctttgggacttgccccacgtagggcctctcccaagatcctgcttctctcctcaggatgaccaactcttggatgatggcaagacactgggcgagtgtggcttcaccagtcaaacagcacggccacaggccccagccacagtggggctggccttccgggcaggtgagaggcccaccacccactgggctgggtggtagccaagcaggttgggaacactgttccaaagaaggtcatcagggagcctggagttgaagccttcagggcagtgtcttcctcgtgcctaaagggctggcaatatcctttcacaatgtgtttgtttcctcattttttttttttttaaaaagaagcaaccaaatgagatgcttacagaaaccaaagcttattttgtgaagccagctcacatttacaggaggctgagtgagtgcctggctccgtgctctgcatgttactctgtgtgtggcttccactgccctgtctcatcctctcagtagccctgggaagtccacataccatcatccgtgttctgcagatgaggacacaggcttaccagcagtcacgtagggagccacggttaggatgctgactgccgggcccttgctggagtcagacatcataccaggctctatgctgtgtatcaccgaaaccctctgcatctctgtgtggctgagatttggattttgccacttttcaggttcagtaaagtgagcctggggaggttaggtcatctgctgggactgccacatctaggattcagatccagagcctgggcttccatcagccataccccaccctgcccaagctttagaaacctggggattagggagtggtttactactcgccaagatatcttcttccacccaagagaaagggaggggagatttaaaatattttgtctctaggaacttgaagagaggttatagagctgtgttttcacagctgtggacccagcagctgtgtggatggctgagaaaacttggataaagttgtaaggaattcttatttttctgcctgtaagggaacatagcaaaggctgaagaggaagagtagagtcctagctccacctttccgttccgtaagttcaggctaggcctcagtctcagcagctatatcctctggccagctaccttgccctcctgcccctcctggccccagtgttcccttctccttaaaggggtgtgatgagactggcttcacagcaaggtggtgttgagtcctcatgcaccccaggtctggcctgctgccagtgcccaacagatgggaagcttcagagcctttctgtgggctctttctgcccagatggtgatgttaagagtcaggtgcagggctggcatagacacaggtcgtgccttgtacatgggtgcatttttgttgttgttgtttctgagacagagtcgcactccgttgtctaggctggagtgcagtggtgccatctcagcccactgcagccgctgcctcccgggttcaagcgattctcttgcctcagtggcctgaggagctgggattacaggcatgtgccaccacgcccagctaatctttgtgtttttagtagagatggggtttcaccatgttagtcaggctggtctcaaactcctgacctcaggcgatccatacatcccagcctcccaaagtgctgggattacaggcctgagcctcggtgcctggcccaggggtgcctgtctgaagagagcaggggagtgccaagagcatatctggtctgcttcgtgaaccgaagctgggctgtgttcccccagaagtgtccctttctctaatttcaacagtggtacccctagaggtttgctgtgacttggaagatactgatagacccattttgcagatgagaaaatgaaggctaaggaaggtgacttgtttttctcccacaacccctaatatggcatggaatgtggtggtgactccggagcccaggtcacatcatccctcttgcaggtgatggctgtcttgatagggggcacagcatgggctgtcagctctttgcttccccatggaatgcttgcagaaacacacttctgggtgcagctcaacccgtcatcatgttgttcccaggccttgaatgggtgccccaccctccgcctctcccctcccccaagcttaccactcaaggagatgagtatttcaaatcaaatgttaaagggcattgtcccggctcatcacaaaagaatgagggaggtagtgaaggcacgaattgtcacaggtttgtggcttggaagatggattagtttctgaacctcggcacagtgggcacattgggctggattgctgtgtgggttgccttgtgcaccatagcacgtggagccgtatcccaggcctctacccactagatagcgctggagcaccccacctccccatttgtgaccgccacaactgtgatcaggcattccagctttccctgggatgcctgatcagttgagaaccctgagccaagcagagatgggtctcctagctggaagaaagcacaagagaaaagctgtgggtttgtttgctgtgtgttggggtgacagtagggacaagacagggaaggcctttgccttcctggagccagtcaaaagggcagtttgtccagtggtaagtgcccctacgcccagagtgtcaggatgtcttgacttttgggggtgcgtggactggaggttcatctgaggaggtgacctgagttggaccctgaaagtccagaagcagccagccattccgagtgctgggaccagcaagtgcgaaggtctgagttaggaaagaacttacagaacatagagagccagagcctgagagcgtgggaagcagagggagagacagacggcaaggacttggtggtattcaggtcatgatgggaagccactggatggttttcagcaggggaggaatagtctagatagtctagtttgattttttttttttgagatggagtctgtgtcgcccaggttggagtgcagtggcgcgatctcagctactgcaagctccgcctcccgggttcacgtcattctcctgcctcagcctcccgagaagctgggactgtaggtgcccgccaccatgcccggctaatttttttttttttttttttttttgtatttttagtagagatggggtttcaccgtgctagccaggatggtcttgacctcctgacctcatgatctgcccgtctcggcctcccaaagtgtgtgaagggaacaaggagatatattctgggtgaagggtgatgctggctgcagatggtgagccctcagactcactagtggacatggaagatgaggaaaggggccccagcatggtcagtgggaagggctggggaccttcaggttgggcccacaggggtaggagacattaccgtggggccacgggggtagctggaacagggaggtcagcgctgtggagactacagccgtgtggaggggcgttcgcatggagatccccaaagctgcagatgatcacacgtgaacaccaaggccccagctggggcaagagctggaatacccccctgcagctctgctgcttcctccacagatgacacctttgaggccctgtgcatcgagccgttttccagcccgccagagctgcccgatgtgatgaagccccaggactcgggaagcagtgccaatgaacaagccgtgcagtgagacccccaagaggcccatttcccccaataaaagagatttgggagtctgcctggttgctgcctctttttcccgcccctccctgggatgggtcccactccctgtgggctccttttggggcttgtgcttggcagttcctgtgctgtcctgtctcccagatcctgagaccctggctgagaacttggcccagcctgctgcttaaaggcaccatggggacctgggttgccctcagacccaagccattgttagcagctagccagccacaccaaccacgccagggggaggaaagggaaggactgggagagacacaaagaccagagccagcctcagggacaagagattccagttttaggcctttctccttctaagtgccccccacccccatagcctgcatgtccactcccagacgatggccaagagcagaaacacaagctggagccagtgtcctggtttgacagcatgttcaacgagggaaccccaagacggacccacacaggtccacccacgctgggggctgtaatcacggagggaagtggctgcccccttaacacacctttaataaacagtctacagacccagttcctgcatttctcatttttatttgacagaaaaagttgctcttgctgtacagattttaaaaaaccaaaatgcctttaagaaacatgaaaagttggggggaggggttcacaacctcatgggggacagtagggaccaactaattccaactcctgccccttccttccaagaacaccttatacaacctccagtcccaaccaccatcacaatcacccctgggaacttctggatacaagtggggccatgcctccctggccctgactccaggctggggtatcctgaactgtatcctcccctcccccaactcccatctgcattccctcccaccccaaaccccccagaacacatgaaccaggaagaactcacggagattaacatttcacaggaacaaagaaaaaaaaaaggggagggaaagggagccctccatccaagggctgccaaggttcaaaggagagcagacaaggaccctcccacggctctgctggggaagaagggacactccttgtggctccagagcattgggtgtggtggaatcccccaaagacaatttatggagacctgcaagagaagatatgggtcaacagggagttcccaccccagccctcaaggccagtttctgggccactcccaaaatggggccgccacccaccaccacaactggctcccggaagggggcatcagccttccaggacacgcacctggaggagcggtgtctcatgggccgagggctaggtgtctccctcctgcgcttgtggctgggggagcggctgtccccacgctggcctctccgggaaccccgctcactgctgctgctgcaacacaggacagacatcaggccacagggtggcaccacctcaggcaccacatagccacaaccgcaaagctttcttctttgtagaaagcagtggcggccagacaggctgggtgctgacacctgcagttggccttacctctgctggtcccgtggtgagggctggggcgagggacggcgacgctccacaggcgagtagctgagggaccgagagtccctgagggagtctattggcttccgggggctgcgggacctggggaacacagtaggacccaatagcaccacaccctttcaagcacacgggccagcactcaggaccacccgcccaggtcctgaccaccaaacctcacaccacacagggccagcctcagacccacctttgtccgctcactcacccatccgcccgcacaccatccaccgagtgcccagtgggcaggcacagggtgcagcgggggatgcaaagataaagacagtccctgcccttgaaggagctcagtggtgaagaaaggcacgcacggccccgtgtgtgggaagcagggctggatgtgcgtggctctggggacccaagggagggggacatggggcaaggcagggaaggggcagggcagtcttctcgaaggtgctgttttgagcggagtcttgcagaacgaggagttcaccaggcggacaaggaaattccaggcagaaggaacagcatgtccaaaggcatgggctctccttagactgcaaggcgctgggtgtggctggagcacagggcatgtgtgggggcgggcaggaggagaacacagggcgggcaaggcccgttggtgaagagcctcacacgccactcccgcagaggtggggctttgtcctgcaggccacagggcgtcccgaaggatttgtggagtggagggaagtagccagatgtgcgttttagaaaggtccctctggctacatgtggaagagaatggcgtggagacggggagacagggaggaggctgtggacagagtcgggagaagatgatggtggccagaccagagccctggcagtagcaacagggagacaaagctagaaccctgggaacaggctatgtgttgagggagggagaggaagaaaccaaggaccccctggtcctggcctgagcgccgctgtggatggcgcagcccttcgccagaacagggtgcaacgagcatggggagaggagagcaagtgcctcctcccccacaaccagatgcccaaggccacgtgagacacccagcggggagctcacaccccagggccccttctctggacaagtcactcccccacccacctttcaactcaggcaagacagcactcacctccgctcgccagggggtggcttcttggggcttgcaggtttgggcaaggcctgagggccaggcttagcaggggaaggggaggaagacgacgaggaggaggaagatgaggaggaagaagaagaagaggaagaggaggaggaagaagaggaggaggaggaggaggaggaagatgaagaggaggagctggaactggaactgctagagcgcctcttccgtttggctggggttggctccggaggacgtccctctcgaacagcctcctttggggctggggtggggctggggaccctgtgggaggagaggagtgtcacaaggagacaagctgccccagccccaaccctaccttccttggcctggaggaacggcagtggggggaggggtgcctgagaaaggcgctgggagctctccgagccacgtgagccagcaattctctggagagcagtggtgcgagctgacccaacctctgctaacagaagcaacaggctggggcccgcagcataagggatcaaggttaaacctcaagaatgtccctgatggaggaataaggcctctgggctcaggtgtggaagctgaagctgggtcgtctccttcctcggagagccgcagcttggggaggcccctgtgagtgcaggttggctggggaaggggccgtcctgcctggaggcagggagagggatgggatgacctctgaagatccttccagcccagggagttcctcttgaggtctaactgccatccctcctgctgtaaaattaagtccatttcctctagttctgtcctctgtagagacggaaaacttatcattatcctctagagaatgaaccttcggagacttttatctgtcccattcctcctccctccgccccctgccccagcattctcttctacccccagcttgagggtcaaggtccccatacctcctccaagagccaagcacctgtgacatggtttctccctccccactccccaacccatccccaatacctcccccactgaagatttctaaaagtcaagctccctcacctcttcagtgccacctcaggttgcacaggaaggctagagccctctgagtcactagaactggagccagaggaggaggaggacgacgacgacgatgatgaagaggaggaggagctagaggacgacgacgacgaggaggaactccgccgctcctttgctggctgcagggcggctaatgcagaaggctgctgggccccagtagaggcaggtggctcccccacatcagagtggggcaccccaggggcagggacagagagcatgccattgtgatcaccagcagaggacgtggtcgttgccactgccccagaggaaagggactgagaccctgctacaggggtggtctgggcaatcaaacaacgggattggtctgaaaaagcagaaggcacaggagacctcggctgatcctgtgctggagggagaagagactgtgaaggagcctggcccattctagaggaaggggagggagcccgttcagaggtcatcctagattggcttggggcagacggtggtgttctggacctagctcggtcaaggagcggtggtgaggttctgccactgacacgctcgtaggcagaaaggggcaccctggggctggtgaggtttgcaccagacaatgctggagccatcctagcactggtgaggctcgcgggggccaaggctgcggcggttctggagccggcaatattcacaggagctgtggcatgtgcagaccgaggacccaccaggtttgcagaggctggagcctgtggtgttctggagctggagggatagtttgcagcagttggtggtgtgccagagcctgtgagactcagagctgccaaggcagctggggttctggcccctgctaggttcacagctggggctgtgggagtgcgagggtcagccaggttcacagccgaaggtgccaccgctgttctggggctggccaagttcatggccgctgctgcagctggcgttcgagagtcagccaggttcactgctgttggaatggcaggtgtcctggcgctggctaggttcatggctgccgcagaggctgcaggaatcctgctggcaaggttggctgctggtgcggttctgagactcatgagaggcaccggggctggaacctgggacattcttgcagcaaggccagcagcagacatggacggaggaggccgagcggtgccaagactgatagctgtcagggcaagtgcaatcctggactgagcatgattttctggcacagatgttctctggtggtcaggtattcggggacctggaccatccatcatggagccgccggcttgctgcaggacagacatgggtgttctagagctgccaaggggttcaagcattccaggtgatctgcagcgatcaagaggtgttggggacatgctaggacgactgaagcagctcattctggaactgttgagtgctactggaggtgtccgtgaaccagaatgatttcttgttgctggaggagtagcagatcgtgaacgatcagaactacttccagatgcagaacgcctgcggatggctggaggagatcttgttaaggaccgtttaccccgagctgttcgtggagtacgggatctggagcggcggcggatagcaagtggtgagcgacttcgagaacgtttgcgtggtaacagtggcgttcgagatctagagcggcgccgaatagctggaggtgtccgggacctagagcggcggcgtgtcactggtgaggttcgagagcgggaccttcttcgagttactggagatgtgcgagatcgagatctccttcgggtgaccggagatgttctggatcttgatcttctgcgagtgataggcgaagttctgcttcgagatcgcctcctggttactggtggagtcctggatctggaccttctgcgagtcactggtggagttctagaacgggagcggcggcgtgttgttggcgttctagaccttgaacgacggcgggttactggtggcgttctggatctggatcgccttctgctcactggggatgctcttgaccgggatcttcgtcgagtcactgaagtcctggaccttgaccgtctccggctgactggtgaagttcgagatctggacctacgtcggcttatcaggggggttctggacctggatcgccggtgagtggctggagaggctcgagatctagagcgtttccacggggctggtgatgtgcgtgagcgagaacgcttccgactggttgggggtgtccgagagcggcctcttcggcgtcgagaggaggtccgggaactttcctgccgggcaggtgaccttgagtgataaccagagcctcccctccgccgccgagtaacccgcgaccttgaccggctccgctgtcttcgccgagaggttgactgagaagatccagacctatctcgacgtcgggttgttcttgttttctctctccttgagcgggaacgggacctctggagtccacgaggctttggcgaaggagagcggcctctccttgaggttgtcttagtgcgtggagatgaagctgagcgccgtcggcgtgaagacctcgatttttcggctggctccggggaagacactgagggacttctccggtgccttgggggagttctagagcgagtttctggtgaggatgaggcagagcggcttctacgggacagtctggccttccttgttagctccggagatgatcgagagctgcgacgtcgaggtggtgtacgagacttggtcttgggctctggtgatgacctggaacctctgcgagcagttctggatttgggcggatgttcaggagaggactcggtactgctgcttccttcaggagaagggcctctgcctttgcttgatgaacctgatctgcttcgtctgggaagggcccgaggggctggagctttaggttcaggagaggaatcagaaccactctgtgccctgggtgctgctcttggcttatctttcacttcaggggaggaaccagacctactgcgccgaggggatagtcgagatttgctgtcaacctctggagatgatccagaccgactcctctgccgaagtggggttcgtgtcttggctttagaatctggagaagagtctgactcacttctttcctgaggggatgcactgggtttcacatcaagttcttgagaggatcccgaacgacttctctgccccaggggagtccgagccacagttttctgatcaactgatgattctgacccgcttctttctctctggggggtaagacacttgttgttgagctctggggatgatggagaacgactcctcggcctaggagtctgaggcaaagctttcggttctggggaagaatcacattcgcttctccctctagatggcgttctaggtatatctttcattccaggagaggacccagacaggctgtgcctcgagggagtcccagacccatctctaagtcctggagaagacccagacctgcttctccttgatggagttctgggtaaaccatctttcatttcaggagaagatgcagaactacttctttctctcgagggtgttctgggtacagcatcaagcacaggtgaagagatgctctgatttgaagacatccctgccttttccactgcatctggggataactcagaactgctgtgtccagaggatcttgtcgattgttctttcatgtctagagatggatctgtttccagctgattaagaaacggtccattcaaatcttctttaacctcagaagaaaatccagtattcatttctgtaccaagtgggcctgagtttctaaattctaaaggtgatccaaagctgttctccctgagtggggagttagacagttctttatgttctggagaaaaatgtggcccaccccaagatgaggccattgaagggacttctactgcttccaaagaagcctgtgactggctctgatcaagagtcaaagacacagcaggcctttcttctacttcaggagatgattcaaagttacttgtggacatttctttaagttctgaagacaaatgagacaggatttggcctgcgggttcttcagacttctctaccacctccattaactcttcatcttggcttgacgtaggcaatgcactattttgctcttttgtttctggagatgacccagcaccacttctttctcttggcggggttctaagtgtgtctttgaataccagtgaagactcaggcctatcctgtactggaaagggactaaatttgtctttctgtctaggaggtgatgcagtagcatcctcctgagggggtaaggccattttctcttttgattcagcagtctccaatctactctgccccaagagagaattcgagtccactgtaggatatgaagaagagtcagactggaacctgctctgctcaggagacattccagatttcaacataggactcgctgagaactcacctctatcttgtcttattggagatctggatgccagctcagtgactggagatgaagacctggaccgacctcccttaggtgatgtttgagatttgctctgcagagatggtgattctgaatgactctgtctcacttctggacttgaagtatcagatctgtggtctggtgaagtttgagattgtcctttcagttgcagagatgagacaccaaaatagctctcgcctggtggtgtgctagattttactcctgcacagagagagagggatccagggcaactttgaactagtgagtctttagacttctcttggggacatggtgactttgatccagaaagacttggccccggtggagtttgggcctttactttggggtatggtgaaatagaccctgagtgactttgtcttggcggtgtttcaggtttcactttggtatctggtgaggaggacccagaatgactgtatcttggcaacaatctggattccacattggagcagggagatactgatctgcttcgccgtggagttgttctcgacgtcaccctactaggacttggagaagaggagccagaatggcttctttgtcttggtgatattattgccttcactttgggttgtggagatgatgacctagatgggctctgtctgggaggtgtgctagatttcactctaggaggagaggaccctgagcagctatgtctagaaggggtcctagatttcaactcagggtcaggtgatgattcaaaacagctccgtctctgtggcgttacagattgctcattggcctggggacttgttatggacccttgcctcggtggtgttccagatttcactttaggatgaggagatgaactggaatgactttgtcttgatggtgtcttagatttctgtttaggtggcggagaagaactggagcgactgcgtctgggtggcgttctagatttagctttagtttgggaggatccagagcgactgcgcctgggtggtgtctgtgacttttgcttagggcatggggaagaccctgaaaggctgcgcctcaaagacaagcgagattttgctttggaccgtggtgaagagagagacctgctccgccttgaagaaatgcgagatttcttcatttctgggcttgaattggacctgcttcttctttgagatgttctggatttgtttttccgctctgaagatgagccagatctgcctcttctttgaggtgttctagagtgagatcttccacgtctaactaagcttctactgcgggatcttcctcgtcttggtgtcctagaccgagacctccctctcctggctggtgttctggagcgtgagcgaccactgcgtctagctggggttctagagcgtgagcggccacgtctggctggggttctggagcgtgagcggccacgtctagctggggttctagagcgtgacctgccacttctcctggctggtgatctactacgagacctgcgtcgtactggtgatcgggtcctagatctgcgcctagcaggtgttctagaccgagacctgcccctccgggctggtgttctagaccgagacctacgcctggtgggagttctggatcgtgatctccgcctggcaggtgttctagagcgggacctgccccggcgggctggtgttctagaacgagatctacccctagtggctggggatctagagtgggacctccctcgccttgctgacctagacctgcctcttctctgggtatttctgctcctagaccagcctggtcgctgaggagacctagagcggccacgtcgctgggggcttctagatcttccccacctctgtgcagacctggacctacgccactggggagatcgggatcgagaatgacctctcttggtaggggttcgagaccgagatcgccctctcttagcggtggcagggctacgggacctccccatcctacgggagggggtatgagaatgtgatttatcccgttttgctcggccatgtgagcgattcttagatgtgggagaagaagaaatctctcggtgggaccctggagctggagcaggtttaggactttctggggaagagctggcatgccgagaaactttggtaggttgaggggatggtgggctgctctctgaggaagaagactggggaagtttctcgggagacttaggtggtgaacggtcccgagttggagaggcctcagatggggggttcactggctcctggcttaagggggtggttgcaaggggttgtggggagccgccatgtcgctcagcaaggagcggagtgggagcaggtggttctgggcctgtgctgctcctttccggagaggggctaggtcgagttgcagatttctaagagtggaagagagagcagggatagggattcataaacgccaaaacttcacatcacccctaagatcccaacaccctttccaatgataacttttcttttacacaccctctgaccacaagcgatcactttcattcaataacaaggaatcatataaagcacagtggtgaaaacatatgaatatatggatagccagaatcttaaaactaaaagaaacacaaaatgcaaataactaatgcactactacatttaacaaataccactacaaaatgttataagaatggaaaaaaactatctttaaatggaaaaataagcagtttcctaaagcgaatggcaacttcacctttgaagaataactctattaaacgaaaagaaacagcatgaagaaagatgtgagaacatgatttgtgtgaagagtaaaaaagcagcccaggatgggtagagtacaggaaatgagaaaaagaccagactattaaaagccttaaatataattcaaaagcaataaggaagtagttaagtttctgaggtcaaccaacttgtaatttggaaaggtaaccctggatgacatggaaaattgatgatagaggccaagaattcagactgtaatcactaaagcaagaggaaatgattaatgcttaaaattggaacagaagactactgaagactatttcagtgtttcattcaaactattggtggcaacccaatggattaaaaagttttggtgagacatgaccagcatttaatgaaaaaagagaagaaactagaggcatcatacggagtacacagataagatacaacgtttgttccagttctatctatgtataaacaagacacaatataaaacctaacatccagtgagatttgattctaaagggttcacaattcagtctagtaacaacactaaaagttctgcagatgcagtaagagaactaggagagaactgcaggaaaaaaaactgaatttatttattttaataagttattacctctccctttcacatcacatgtctatcctaaatctatacatttgcaatccaatgaacatcaccaactcaggaacatacctccttcttgtctttatctttgtcttcataagggctgctaggctgtttcgtagcagtctccgggctactaggccgttgtgtgctggtagtacctggttcactgaaaggcgcatctccctccccgcgtcgccctgaagcaggggaaggacttcgcccagccaaggcagttgtatgagttttagctgcagcacttcgagacctgcaggagttaattgaggacgtgggagaggaaggaaatcagctcaaagggagaacagaaaaccccctccccaactcccatccacctttcctaactggacaaccctcttccaaaaagcctttagtcgcacaactcaaatcattcactgaaatgcaagtacagtccactttggttcttcttttcccaacacaatcccaaagagcgttctccctctacccctttactcacctcccccaaacatccccaaaccatccacccagcccactccctacccgcttcattcacaactcacctctgagcccacctccttcaggaagccttccccgattaaggaagccagggtaaggattccttcctcccccagacaccacgaacaaaccaccaccccccctattctggcagtccatatacatcagaacgaaacaaaaataacaaataaacaaaaacaaaaaaaaaaagagaaggggaaatgtatatgtctgtccatcctgttgctttagcctgtcagctcctagagggcagggaccgtgtcttccgaatggtctgtgcagcgcctagcacaccgtgggcgctcaataaatattaaattaattaacccatcattccctctccctcccttcctcctggactaccccttaccgactgcgggaagtatcggaggaggaagcagagtcagcagaagttgaacggtgggcccggcggctcttgggggctggtgttgtacttcgagacctgaaggaagaccaccaccacagctcagggtactgctgtacctgccctggattctcctcacgtatccctcaaccctttaccagtcagggacataactcattcaactccctcccactaaggtggcgttcacttacttcctaagcaaattccccacaaattcactcaccgctttcgctttttgtccttagatttacgtttgctctttggagtgggagacctgggaaataaggaaaggttgttaaaagtaacttctttaaaaaaggaaataaaaccaaaagtgaaatggaaagagggagtgttgacacaaggaagatcaaggaattgagcttcactccaagaaaaaaaaatcaccactccacatgccactgcgccccctatgagttaaagagctcttacctatgcttacgtttcttggactcagattctgacctgttggaaaaaagagaagaaaaaacataagaaacacctctgcctgaattcagcaaaccttctccagtcattcaagtattcccacctcatacctgtgcttcttcttctttgagcttttctttctctcccgtcgaggagagctgctctctgacctgctaaagatggattcaaaagcaagctcatcctgcttggcttctttcctggccctcccacttacaatctctctcctaaaaaggtttctaaaacacttgaatgtcctaatagcactaatgccccagacctaagcccaggacttatttcttctttctccaacaagcacaagtaactccttaagtcaacaaacctcaaaatgaaaaagaaaattccagaatccaaaatgctgctggccaatcttaattagcagaactgcaaactcaacacttccccactgagaaactcaggtatttcttctagttgaggcctcaatggtaactccctcctccctgacaactatctcctgctttgtggaagccagaactgtccacttccagagagaaaggtacaccacaggattggtcctctggctatcagagtcactttccaactaacttaccgtcctctatctttcttctttttcttcttcttctgctttggggttggtgagcgagaactgctagactcccgaacaaggctagggaaaaatgaaaagcagcagagatgggtggtagaacaaacattcctttcttttctttaaaagacagagtctaaaaaaatagtaataaaaataaaaaaataagaatctcgctctgttgcctcaggtggggtgcagtggcagcaacacagctcacaccgtaacctccaacttgtgggctcaaaagaccctcctgcctccacctctccaagcagcctggactacaggcatgtgccaccaaccagctttttttctttttgtagagatggggtctcactacatcgcccaggctggtctcaaactcctggcctcaagtgatctcctgcctgagcttcccaaaatgctgggattacgcgcgtgacccactgtgactaacccttggacaaatttttttggacacctcaacttcagaagaacaaaatctgaagagtttgggaagaaaccagcccgcaaaaagacaaaaatagagcatggagcttacaatcaagaaaagaagctgacagtggtttcttggccttgtatacctgtaaggtttgggaggctcaggagctggttgtttagcttctcgggcacgacgctgaggatcaaaagagctgccatctacgtaagaatcactgatgccaaaggcagcacggagtctttcattcttcttctcatttaattctgccaactggtgagtctccgtgaccctagagaaaagaagggcaaaagtctgaaggaaatataaaggacagagccatattcagaacacaagtataagcaggagccaaataaggcatgggaaaggcagacgaaagcagggaggaagtcccacgtaaggaaaaggacagcagcagcagccagcagccagagtagagtccagagtcatcgagggagagcgcaacactcacgctggcctctgccctggggtctcctccttgcccccagggttcacatccttctccagcaacatgagtcgaaaggtcgccactttttcctgaatttgctgttcctcgtacctgaagaacaaatcccttcagggttaagctcgacaggacactttccccagtcccaggtttccatttccctcattcccaaaaggggcccctccctctccatgcgcacacagaacttttcgctcacccaaaagtcccttctgtctgatcttttcccatcatctttcttccctctacttactactccctctagaacagtggattttaaatatactacacctcagggaccaaaagaaaaaagttaagcaagcagggttccaagtgctcctccccaacttcaacaagaatgtgccttttacttcctgggattccaaagtaagggatactgtataaaaggatcaccattgctgaagtttaaaaccactgctctaaaagagttttctgccttaatgtgctccttttccaaaatttcccttcccagcccatgattcccacttcttcacgtattcttctaattcctcttttcctgcctatgctactttccaaggcctcaatccttacatccatttatcttcttcttttctaccaatgacaacacctatcagcttacctagctcctctacctggtctctgctttcccatctcttccttaaaacacatttttgttcctcaatggcccctcccttctcccacgtgcctccatttagtacctcaggctcccatctatgccccagacacacagccttctcatttcccactctgcactgtcccttaactgttttcacttctctagagctcatctgcctcctcccctaccacaactctttgccaggcctctttcaaccaccctaagctccctatacatcccacctaacacccccagctctgcactcattcagtgcttgactctcccccagctctccctcacccctgctcttccatcatctcctccagctcgaggcatcgcagctcgacgcgccgcttgcgctcgtggtccaggatgtcaggattaggccgcttcaccagggcagcctccaggcgccgcagttcctcctctcccttgtagtcaggccgctcaccccggcggccccgcaccagggacaggttgcgctggacgtagccgttggtgccgctgccccggggcgtcggcagcccgatcccgttgtacatggccccgtgcccggggggggcaccaccgctcctgagggggagcggggagacacgggtcaggcccctggccccaaactaaccacttaccgccccacacccaagtccctgctctccttcatccctaattcaacattgatcttcacactaagtcttcgctgtataatgctccaccatcctcctggtctcccaagaaaaccacttctttgcccttccaaatttcctttctaccaaatcacagcccagttcttacagcctttctctcaatgcccttgcacagaattctaaataatccctccctacacctaaattttcttctttttccaccctaggcaaacaaggatcttgttcctctaaaatctctccacactgtccctttttgttctcctttggccccaaaatgcacaagtggtgtgtttaccaactactctaattcctaacctctggtaaccaaccaaagcctcctggtcacaacaaacaccagacacagatctgtggcacccaacggcctctagtccatgtccaaagactctcccaaaaacttacctaaggatttcagaccaccctatacgaatatgaaataaactacacagcccctaggtatctgaacagcagactagttggttcagaatgtgcagcctcacaccccaactaaaggccagcatgcacatcagaaacacacatgaaccttggataatcgtcatatacttcacctcccaggtaagggccatttccttgattccaaatatttaaagatcctatcaactatcctgatattttattccttcaatttccttcctctcaataggatttacaacaatttgcagttcctccctgtcttgccagctgtcaaatattacctgttttcaactctgctctatttaaacacatcaaaccagcctcctctgttccaaccgttcccataccttctccatataccttgccctaaatctatgtagaaaccctctctacaccccactttcattaatgtccaaccgttggctttccccaccaatcccctggatagcacttcctagtttttctctctcagccctgcctcttccttctctcctgtgttaaccccatgcctcctcccaggttctagcctttcaacttgtcccaaccctaacgtgattctgaaaaattctcaagtcccagctttcctggttagattccttggctacacatactctattcctttctcctattacatatactctctttctcaccctcatcctctccaagatagtttcctagaacatgcatatatgagaaaatactactaagaaaaaaccctaaggaatacgtaaagcggagagagtaatcaaagatgtaaaagaactggatagaagggaaggatgcatttagaaaattccagaatgaagaagcatcatacaaatgtttggaaaaatatactagcgcatgcgcctaaggatgggtccctacccaagcccagtagcagacccaatattgaaagcagaaggtgacagaagaggctaaacctggataaggcaagcagaaatccaggaaaaaatgaaaaactgtatggctcaaaaaatcaatttctctacaccccaatcctcattttcatcttctagtaccaatcctcctcacggtttaaaactaggtccttcttcgcctctcccctaccccacttaatttctgcttcccctgcagcatgtttttgacctgcacttaattcttcagcttaaccattcacccacacttccataccacctcacacaaaaatccccccactccttaagaaaggaaaaccaggccgggtacggtggctcacgcctgtaacacctgcactttgggaggccgaggtgggcggatcaccagatcaggagattgacaccagcctggccaacacggtgaaactccatctctaccaaaaatacaaaaattagctgggcggcggcgattgcctgtaatctcagcaactccagaggctgaagcaggagaatcgcttgaacccgggaggcggaaggttgcagtgagccgagatcgcgccactgcactccggcctgccaacagagctagactccgtctcggaaaaaaaaaaaaaagaaaaaccagtaggtgctaagcaaaggatattaggtcacaatgtttcggagaacttttagggaatgagccacctagtccaccccacaaaaaaagacgacgaccccacggcatctaaggggtgtgttaagacacagaaagtaggaagatcaacaccacacacaaatcaccaaaccaaacgatattacaaaactcttaaagtgggggccatagacagtggatatgcaaaagttacccaagttaaaagcagaaagtaaaaagtacaaaggaagacaaaaacacccttttctgttgggaaattatctgagtggtaagctaacaatgaagtagaaagatatatttaaattcaacagtaaaatatgcaaaaaagaaaacggtaccaaaaggggagaaaaaggggagacaagggttgtcgaaaaaaatggacatcagcaagcacagccagctcagcaccggggcgctccagagcggctgagtggacacaaagaacccagaaagctaaaatagtagcttttgaagagccctaagcccacgcacttaggatgaaagacaacacaacactctgaaattctgatccagattcgtcctaactgaagccgagtggaaaccaagcttcagaagagctgtgtgccaaagaacgcctgaaaccaaccagaaaacttatatatgagtctggcgttttcttcccaacgaaggtctccaaaagcctccttagtttgaacacgaattctcgggagacgttgaaaaagtgtaaaaagggaacgcacggtctaccttacaaatgtaaactgaacacgttcactttcttcacagtttttaagatttggggtttctccccgccactaacaactcaaaggctgatagccgggaatcctaaaccatttaaatccggcccacgaagttcaaggccctccccgcagcgccgggggcctattttcggccttgcggaatgggggagggggctgcgcggcgtcccgcagtctgggaggcccccgacacgggcagcccaacgccgaagagaagcccgaggaaaggagatctggaaccgggggcaagggtccaggagcaagccccccgccgccgccccttccccgccacttaagggccgaaaacggcagctgcaggaaggccacctcggcggcacatgttggggggaggagtgaagccgaggcgcgcgccctcccccctcaccaagggcgctcgcgaacccgagtacaggcggctgcgaacgccgttgtcatgggggaggggcgggggggggggtgaagcccgcgcgcgacaggaacggcgggaagggggaagggaggcgagggcgtccgcgccagcgaagggcgtcgagcgcgcgtgcgcgcggaggagctcggcggcctgggcagttctccgcgcgctttggcctcgcgccggggccgccgcccctcccccacccggctcgctggctccctcaccctctcacccgccgcctccgcccgccgcctccgagggggagaggtcttgccgccgccgctgctcgagctcccgagtccctcgggcctggggccgccgcctcgcctcgccggtccgcccgcctcagccgacgccgacgcctcctcgcttcctcaggggccgcaacgggctccgactgcgccactcgcaccccgcctgggccgcgctgcacgtcagcacgactaactgcgtgcgtcagcacgcaaacgcgcgtcgcggggcctgccgggaactggagtgcgccccgcggccttttgcgcaggcgccgaagccacaccgcgaagtaccgttttttcaggcacaaggaaggtttcaccccgttgccgaaagactaagcgtcccgttggccagtgcaacgaagaacggaggaagcgacgtaagacaccgcgtattcgtaggccttccgctgcggggaggagcacagggcctagcggcagcaaagcgacgcccgagcgcgtctcg

SEQ ID NO: 9845 - DNA, 942 bp, Homo sapiens
ctcgaatttggggctcaagcgatcctccgacctcagcctcccaagtagctgggactacccgtgcatgacaccctatctggcccttgttttttgttgttgttgttgttctttcttttttcacgtggtttcgcacttgtcacccaggctggagtgcaatggtgtgttgtcggctcactgcaacctgtctctcaggttgaagtgattctcgtgtctcagtcttccgagtagctgggattacaggcgtgtgccaccacgcctggctaatttttgtatttttagtaaagacggggcttcactatattggtcaggctggtctcgatttcctgacctcaggtgatctgcccacctcagcctcccaaagtgctgatattacaggcgtgagccaccacgcccggcccgcatccggctttaagatttgtttttcacttgcccgtgggaggatgtacttatctcagatgctagagccgggagaccctcccccccaccacccccatctcctgcaggagctctgatcgcagattggagtgtctgaactctgcatctatggacggtgcttctgtaagccggccgcaactctggagtggcatagtaaagtggcaaaggctttgcctttctggttaaagaccccagcacctccagtgagaccctttcctgtacccccactgatattctttatggaatgttttgtgcgtgagtcagcacatttaatgcccgtgaatagtgacaaaacatcgtttgcagtaccctaatgactgatgatgctgagaatcttttgatgtgcttgttggccgtttgtacatctttggagaaatttctcttcgtgtcttttgtctattttatttttttgggacagagtctcactcctaaccccgggctggagtgcagtggcacgatctccacgcactacaattcttgtacctcagcctcccaagtagctgggat

SEQ ID NO: 9846 - DNA, 2130 bp, Homo sapiens
gagaacaagaggctacctccagttaaccaggacataaagtccccagcggttcctgtcacacctgctcctccctccccagggtgcatccgtgatcgtggatgtttgcccaggggtgaccatgtttggctggcttggaatgctgtgcattctcagagctctgttagtgtcccctcttgggggtcagagatgaggtgtggcagggtctagaggaatgagtgtccaggcagagttcagaaggtaggaatgtccctcttgatagggctgaatcaagggattcctggctttagaaagggtctgctatctttgcaaaaatgtgcaagtatctgtagccagtgtaatgaaatcacttccaaatccagcctgttacctgacttttgtcattgttttcccaaaaatttgaggtatcattgaaacaggtcattttaaacaaatctattacggattctcagggttggaaataattcgatgattgcttagtcctcccccacccctagaacaccccagcacatctgaagatgagcgcctctccctgggtacctgcaagtgatcaccttggcctgcttgcatacctgggctgataggaagcgcgccatccccaaggcagctcctgctgtggttggacagtgctgactgttagacagttcttccctatattgagccaaaatctgtcctgccacttgctggatcttggttgcagaccttcccattcacccagttatatatctttgctttcaaaatagtcaccttgagagaccagacatttttctgaaaacatcattactcagaattcagattcccctctgggatctgtcttcagaatcaaagttagctcttttctatcccctgtaagtcagtccccttttgttgtagcttcacctcgtttgtgacccccacttcacccaccttccccaccatctgtggctccatatacctttcgaccattttctgttggaagaggaagattcacggcccctgaggagatccagaggaaagagacggtctccaagggtgctgtgcagcaaggagcccaggagtggtatgaaccgtaacagtgcccttagagtaaatgtgcggcccctaagaccctgccctcaggaaggcggccttcccctgcagtcctgtgtcccacccctgggtctctgtagggtgccatccagggcaagcaacccaagcactgcttcccaccgggtgatgagccatgcaggcctccaaactgcacgtcatgattcatccctaaagtgagtttggccttgagagtccccagggtcctcccccactgggcaggggtcctcaaagccaaggaagcctggtgacacaggcacccatgggaggtgggcccagaaaggggcttcccatagataggccctgtgagtagggagcttgtacactgggccatgggcagcgccagttcccttgagcagtaaaggcccttttccccctacggtgggacccaggagtctctctgacagcttttctgccaggcacagtggctcatgcctgtaatcccaacactctgggaggccgaggcgggaagatcacttgaggtcaggagttcaagaccagcctggccaacatggtgaaacgtcgtctctgctaaaaatacaaaaattagctgggtgtggtgacaggcgcctataaccccagctatttgggaggctgaggcagtagaatcgcttgaacccagatagcagaggttgcagtgagctgagagtgtgccattgcagagagactccatcccaaaaaaagacagctgtcccaggccaagggtacttgggagagcccctcatggagaacctagtttagaccaagtagcagaagctgtggtcataacaaaacaatttgaggaagaaatcttacaaatcaccactgccctttctccttttccataaaactgtccatcttttcggtgctccctaatccaagcagcttgactttagagaagttgcagaagcagtgaagccactaacatgctgtgtgactttatgcaagtcactcacctcactgagccacctccatttcttcatctgtgaaatgggcataacagtaatacataaccctacctacctcacagggctgttgtgaggatcaaatgaaataatgtaacgtgagaatacagtataaatgataaag

SEQ ID NO: 9847 - DNA, 5376 bp, Homo sapiens
gagaacaagaggctacctccagttaaccaggacataaagtccccagcggttcctgtcacacctgctcctccctccccagggtgcatccatgatcgtggatgtttgcccaggggtgaccatgtttggctggcttggaatgctgtgcattctcagagctctgttagtgtcccctcttgggggtcagagatgaggtgtggcagggtctagaggaatgagtgtccaggcagagttcagaaggtaggaatgtccctcttgatagggctgaatcaagggattcctggctttagaaagggtctgctatctttgcaaaaatgtgcaagtatctgtagccagtgtaatgaaatcacttccaaatccagcctgttacctgacttttgtcattgttttcccaaaaatttgaggtatcattgaaacaggtcattttaaacaaatctattacggattctcagggttggaaataattcgatgattgcttagtcctcccccacccctagaacaccccagcacatctgaagatgagcgcctctccctgggtacctgcaagtgatcaccttggcctgcttgcatacctgggctgataggaagcgcgccatccccaaggcagctcctgctgtggttggacagtgctgactgttagacagttcttccctatattgagccaaaatctgtcctgccacttgctggatcttggttgcagaccttcccattcacccagttatatatctttgctttcaaaatagtcaccttgagagaccagacatttttctgaaaacatcattactcagaattcagattcccctctgggatctgtcttcagaatcaaagttagctcttttctatcccctgtaagtcagtccccttttgttgtagcttcacctcgtttgtgacccccacttcacccaccttccccaccatctgtggctccatatacctttcgaccattttctgctggaagaggaagattcacggcccctgaggagatccagaggaaagagacggtctccaagggtgctgtgcagcaaggagcccaggagtggtatgaaccgtaacagtgcccttagagtaaatgtgcggcccctaagaccctgccctcaggaaggcggccttcccctgcagtcctgtgtcccacccctgggtctctgtagggtgccatccagggcaagcaacccaagcactgcttcccaccgggtgatgagccatgcaggcctccaaactgcacgtcatgattcatccctaaagtgagtttggccttgagagtccccagggtcctcccccactgggcaggggtcctcaaagccaaagaagcctggtgacacaggcacccatgggaggtgggcccagaaaggggcttcccatagataggccctgtgagtagggagcttgtacactgggccatgggcagcgccagttcccttgagcagtaaaggcccttttccccctacggtgggacccaggagtctctctgacagcttttctgccaggcacagtggctcatgcctgtaatcccaacactctgggaggcctaggcgggaagatcacttgaggtcaggagttcaagaccagcctggccaacatggtgaaacgtcgtctctgctaaaaatacaaaaattagctgggtgtggtgacaggcgcctataaccccagctatttgggaggctgaggcagtagaatcgcttgaacccagatagcagaggttgcagtgagctgagagtgtgccattgcagagagactccatcccaaaaaaagacagctgtcccaggccaagggtacttgggagagcccctcatggagaacctagtttagaccaagtagcagaagctgtggtcataacaaaacaatttgaggaagaaatcttacaaatcaccactgccctttctccttttccataaaactgtccatcttttcggtgctccctaatccaagcagcttgactttagagaagttgcagaagcagtgaagccactaacatgctgtgtgactttatgcaagtcactcacctcactgagccacctccatttcttcatctgtgaaataggcataacagtaatacataaccctacctacctcacagggctgttgtgaggatcaaatgaaataatgtaacgtgagaatacagtataaatgataaaggattgttattcttttgtgtctgcttgtaacggggaaaaacactggtcttgagtcacagtgacttgggtttgaatccagagctccaagcctctgtaaccttggacaagtcattgaacttctctgatttgtttgctcatcaggtaacaaccccttcctcccggggttatgcaacttaaacgagttggtgtctgtgaaaatcctgagctgggcctggcacccaagagctcagtgctcttgcaggaggtagtcatggtggactctggtgggggactaggagtcccaggagagtggagtttaacaagcccttacagagcatttgctgcgtgggccctgaggatgtgaacagccacgagtaagctaagttcagcctggagaaagtttagagcttcacacaacgtgctttgggaactcagggaaagggctcagttctcagaaggagccttgtggatggccaaggtgggcctctgagggtaggtcaggcttgacagaataagcaagagagtgccgtgggcacagggaacagcaagagcagagctggcaaccaggcaggaagggcaagcaagggagggtatgcgttcacaccacagctgcacaaggggaaggggggcacgcagtgcatctcgttgcctgcgtccaggttaggtgaactcagccttctgcttggcaaaagcatgagaaagacggagaacaaacgttcagcagtgatggcagcaccatcgacagacgggtgagtctgagtgcgaactgtgagcagggatgtgctgcttgtgagcccttcattgccctgggtgagaccttgtggtgatctcacctggacccagtttagccttttatcccgccaagggctccatcccagctgaaggagcaacgccgggaacacaacactcgtcagctctcagttcctgccctaggtgtggtcccctgcatgcagagggacagaatgggtgcttgagggaaccctaagcacccaccttggtgtgactccttcatgaggcccaccaccaaacagggaccctgcatgcttgaaggccagcagcaggcaccactctgacctcatgccctcagcacctccaaaagccctccaccctcttaagaagggcctagcctcatgaccctggtctgcctttgggccagatctccctgtgcaggggtggccaaggtccccacttgcccacacctcagaatttgcagcctaggatgcagccactcttttgtaaactgcaccctaaatcacacagcatttgtgtaaccacccattcaccccaaacttccagcttccttttacaaattactcttaaaacagtctgactttgggaggccgaggtgcgcggatcacgaggtcaagagatcaagaccatcctagcaaacatggtgaaaccccgtctctactaaaaatacaaaaattaggcatgttggcacatgcctgtagtcccagcaacttgggaggctgagataggagaatagcttgaacctgggaggcggaggttgccgtgagcccagattgcaccactgcacttcagcctggcaacagagtgagactccgtctcaaaaaaacaaacaacaacaacaacaaaatagtcatcaggctaggtgtagtcgctcagacctgtaatcccagcattttgggaggccagggtaggcggatcactttaggtcaggagttcgagaccagcctgatgaacatagtgaaaccctgtctctactaaaaatacaaaaataagccaggcataggggtgcgtgcctgtaatcccagctactcgggaggctgaggtacaagaattgcttgaacctaggaagcagagattgcagtgagtcaagatcacaccacttcactccagcctgggcgacagagcaagaatgtctaaagaaaataatctttaaaaaaaatccgtctgtcatcagtgggggcttagccaaggtcagtcctgggccaatttcttggcccaagaaatttcagcctatccctttcctgaattgcagtctctccaaactgactgcctacgtctgcctgtgtcccagggggctctgggctgatgggggtggctggctgggaaacgtggcctgtgatcagctccaggagcaaaacaaccctgataacaggcccatcaaagggagggacgagagtctggcagctctgtctgcccagacagcctggtgacctcagtctccttcagaaccttggggacagtgtggcaccaaccgagctgtggaaacagtccagtgacacactcgccccagtctggggcacagggaccaacgggggctcaccaagcaacccatggcacccaggaccccacccgacacaagggacagcaaaacaagctttgaggcggggctgtctggctctgaggcgcatgaaaaagtgcacgctcagcctgctctatctgacccctccccacttgttttcctagtcccgtttcctgccaacttccctgccactcccaccgccccaccaccaaaacacagggcatttcacagcctttgtcaacatttcccggttagctggcagccccagagtgttctagcctatttgcttccttacgccaagtccctctccaaagcctgggttcccctttaccaaagagttgggcaaaggccttgttgagccacatttgaaatccctagggatcctatcagctaaagagcaaaggttaatgtgttatgacatggatacccttccccagccctaattagttcactttatacatcctatgttggatttgcttactctacaccttttcgcttgacaccttgtattaagttgccaagtgccttcacatccacagtttcctttcacagaaccacaggatacgtcttgccatcccacacttgtctgggcctccctttaccactctgtcttcacagctcatccttcaatactgtgtaagccccgcctccttagctccacgcaataaagtcagtcccagcccctgctgtgccaccctatacctggtgagcactttcgtcatcacaccgcacttgttcacagctagtgctgtactggtaaacaaagccctgatctgtagtgtgggccaatttcccactaaataccgtcaccatcgtcagtttcaaagaaatactgccggccaggtgcagtggctcacgcctgtaatcccagcactttgggaggccaaggcaggcggatcacctgaggtcaaaagttcaagaccagcctgaccaacatggagaaaccctgtctctactaaaaatacacaaaaaaaaaaaaaaaaaaaaaaaaaaaaaaag

SEQ ID NO: 9848 - DNA, 5373 bp, Homo sapiens
gagaacaagaggctacctccagttaaccaggacataaagtccccagcggttcctgtcacacctgctcctccctccccagggtgcatccatgatcgtggatgtttgcccaggggtgaccatgtttggctggcttggaatgctgtgcattctcagagctctgttagtgtcccctcttgggggtcagagatgaggtgtggcagggtctagaggaatgagtgtccaggcagagttcagaaggtaggaatgtccctcttgatagggctgaatcaagggattcctggctttagaaagggtctgctatctttgcaaaaatgtgcaagtatctgtagccagtgtaatgaaatcacttccaaatccagcctgttacctgacttttgtcattgttttcccaaaaatttgaggtatcattgaaacaggtcattttaaacaaatctattacggattctcagggttggaaataattcgatgattgcttagtcctcccccacccctagaacaccccagcacatctgaagatgagcgcctctccctgggtacctgcaagtgatcaccttggcctgcttgcataccttggctgataggaagcgcgccatccccaaggcagctcctgctgtggttggacagtgctgactgttagacagttcttccctatattgagccaaaatctgtcctgccacttgctggatcttggttgcagaccttcccattcacccagttatatatctttgctttcaaaatagtcaccttgagagaccagacatttttctgaaaacatcattactcagaattcagattccctctgggatctgtcttcagaatcaaagttagctcttttctatcccctgtaagtcagtccccttttgttgtagcttcacctcgtttgtgacccccacttcacccaccttccccaccatctgtggctccatatacctttcgaccattttctgctggaagaggaagattcacggcccctgaggagatccagaggaaagagacggtctccaagggtgctgtgcagcaaggagcccaggagtggtatgaaccgtaacagtgcccttagagtaaatgtgcggcccctaagaccctgccctcaggaaggcggccttcccctgcagtcctgtgtcccacccctgggtctctgtagggtgccatccagggcaagcaacccaagcactgcttcccaccgggtgatgagccatgcaggcctccaaactgcacgtcatgattcatccctaaagtgagtttggccttgagagtccccagggtcctcccccactgggcaggggtcctcaaagccaaggaagcctggtgacacaggcacccatgggaggtgggcccagaaaggggcttcccatagataggccctgtgagtagggagcttgtacactgggccatgggcagcgccagttcccttgagcagtaaaggcccttttccccctacggtgggacccaggagtctctctgacagcttttctgccaggcacagtggctcatgcctgtaatcccaacactctgggaggccgaggcgggaagatcacttgaggtcaggagttcaagaccagcctggccaacatggtgaaacgtcgtctctgctaaaaatacaaaaattagctgggtgtggtgacaggcgcctataaccccagctatttgggaggctgaggcagtagaatcgcttgaacccagatagcagaggttgcagtgagctgagagtgtgccattgcagagagactccatcccaaaaaaagacagctgtcccaggccaagggtacttgggagagcccctcatggagaacctagtttagaccaagtagcagaagctgtggtcataacaaaacaatttgaggaagaaatcttacaaatcaccactgccctttctccttttccataaaactgtccatcttttcggtgctccctaatccaagcagcttgactttagagaagttgcagaagcagtgaagccactaacatgctgtgtgactttatgcaagtcactcacctcactgagccacctccatttcttcatctgtgaaataggcataacagtaatacataaccctacctacctcacagggctgttgtgaggatcaaatgaaataatgtaacgtgagaatacagtataaatgataaaggattgttattcttttgtgtctgcttgtaacggggaaaaacactggtcttgagtcacagtgacttgggtttgaatccagagctccaagcctctgtaaccttggacaagtcattgaacttctctgatttgtttgctcatcaggtaacaaccccttcctcccggggttatgcaacttaaacgagttggtgtctgtgaaaatcctgagctgggcctggcacccaagagctcagtgctcttgcaggaggtagtcatggtggactctggtgggggactaggagtcccaggagagtggagtttaacaagcccttacagagcatttgctgcgtgggccctgaggatgtgaacagccacgagtaagctaagttcagcctggagaaagtttagagcttcacacaacgtgctttgggaactcagggaaagggctcagttctcagaaggagccttgtggatggccaaggtgggcctctgagggtaggtcaggcttgacagaataagcaagagagtgccgtgggcacagggaacagcaagagcagagctggcaaccaggcaggaagggcaagcaagggagggtatgcgttcacaccacagctgcacaaggggaaggggggcacgcagtgcatctcgttgcctgcgtccaggttaggtgaactcagccttctgcttggcaaaagcatgagaaagacggagaacaaacgttcagcagtgatggcagcaccatcgacagacgggtgagtctgagtgcgaactgtgagcagggatgtgctgcttgtgagcccttcattgccctgggtgagaccttgtggtgatctcacctggacccagtttagccttttatcccgccaagggctccatcccagctgaaggagcaacgccgggaacacaacactcgtcagctctcagttcctgccctaggtgtggtcccctgcatgcagagggacagaatgggtgcttgagggaaccctaagcacccaccttggtgtgactccttcatgaggcccaccaccaaacagggaccctgcatgcttgaaggccagcagcaggcaccactctgacctcatgccctcagcacctccaaaagccctccaccctcttaagaagggcctagcctcatgaccctggtctgcctttgggccagatctccctgtgcaggggtggccaaggtccccacttgcccacacctcagaatttgcagcctaggacgcagccactcttttgtaaactgcaccctaaatcacacagcatttgtgtaaccacccattcaccccaaacttccagcttccttttacaaattactcttaaaacagtctgactttgggaggccgaggtgcgcggatcacgaggtcaagagatcaagaccatcctagcaaacatggtgaaaccccgtctctactaaaaatacaaaaattaggcatggtggcacatgcctgtagtcccagcaacttgggaggctgagataggagaatagcttgaacctgggaggcggaggttgccgtgagcccagattgcaccactgcacttcagcctggcaacagagtgagactccgtctcaaaaaaacaaacaacaacaacaacaaaatagtcatcaggctaggtgtagtcgctcagacctgtaatcccagcattttgggaggccagggtaggcggatcactttaggtcaggagttcgagaccagcctgatgaacatagtgaaaccctgtctctactaaaaatacaaaaataagccaggcataggggtgcgtgcctgtaatcccagctactcgggaggctgaggtacaagaattgcttgaacctaggaagcagagattgcagtgagtcaagatcacaccacttcactccagcctgggcgacagagcaagaatgtctaaagaaaataatctttaaaaaaaatccgtctgtcatcagtgggggcttagccaaggtcagtcctgggccaatttcttggcccaagaaatttcagcctatccctttcctgaattgcagtctctccaaactgactgcctacgtctgcctgtgtcccagggggctctgggctgatgggggtggctggctgggaaacgtggcctgtgatcagctccaggagcaaaacaaccctgataacaggcccatcaaagggagggacgagagtctggcagctctgtctgcccagacagcctggtgacctcagtctccttcagaaccttcgggacagtgtggcaccaaccgagctgtggaaacagtccagtgacacactcgccccagtctggggcacagggaccaacgggggctcaccaagcaacccatggcacccaggaccccacccgacacaagggacagcaaaacaagctttgaggcggggctgtctggctctgaggcgcatgaagaagtgcacgctcagcctgctctatctgacccctccccacttgttttcctagtcccgtttcctgccaacttccctgccactcccaccgccccaccaccaaaacacagggcatttcacagcctttgtcaacatttcccggttagctggcagccccagagtgttctagcctatttgcttccttacgccaagtccctctccaaagcctgggttcccctttaccaaagagttgggcaaaggccttgttgagccacatttgaaatccctagggatcctatcagctaaagagcaaaggttaatgtgttatgacatggatacccttccccagccctaattagttcactttatacatcctatgttggatttgcttactctacaccttttcgcttgacaccttgtattaagttgccaagtgccttcacatccacagtttcctttcacagaaccacaggatacgtcttgccatcccacacttgtctgggcctccctttaccactctgtcttcacagctcatccttcaatactgtgtaagccccgcctccttagctccacgcaataaagtcagtcccagcccctgctgtgccaccctatacctggtgagcactttcgtcatcacaccgcacttgttcacagctagtgctgtactggtaaacaaagccctgatctgtagtgtgggccaatttcccactaaataccgtcaccatcgtcagtttcaaagaaatactgccagccaggtgcagtggctcacgcctgtaatcccagcactttgggaggccaaggcaggcggatcacctgaggtcaaaagttcaagaccagcctgaccaacatggagaaaccctgtctctactaaaaatacaaaaaaaaaaaaaaaaaaaaaaaaaaaaaaaa

SEQ ID NO: 9849 - DNA, 692 bp, Homo sapiens
aggactacttccagcaacccagtctcctgccatgtccgaccccatcacgctgaacgtcggggggaagctctatacaacctcactggcgaccctgaccagcttccctgactccatgctaggcgccatgttcagcgggaagatgcccaccaagagggacagccagggcaactgcttcattgaccgtgacggcaaagtgttccgctatatcctcaacttcctgcggacctcccaccttgacctgcctgaggacttccaggagatggggctgctccgcagggaggccgacttctaccaggtgcagcccctgattgaggccctgcaggagaaggaagtggagctctccaaggccgagaagaatgccatgctcaacatcacactgaaccagcgtgtgcagacggtccacttcactgtgcgcgaggcaccccagatctacagcctctcctcttccagcatggaggtcttcaacgccaacatcttcagcacctcctgcctcttcctcaagctccttggctctaagctcttctactgctccaatggcaatctctcctccatcaccagccacttgcaggaccccaaccacctgactctggactgggtggccaatgtggagggcctgccagaggaggagtacaccaagcagaacctcaagaggctctgggtggtgcccgccaacaagcagatcaacagcttcc

SEQ ID NO: 9850 - DNA, 692 bp, Homo sapiens; identical to SEQ ID NO: 9849

SEQ ID NO: 9851 - DNA, 692 bp, Homo sapiens; identical to SEQ ID NO: 9849

SEQ ID NO: 9852 - DNA, 8217 bp, Homo sapiens
cgagaagcaaaaattcttccaggagctgagcaagagcctggacgcattccctgaggatttctgtcggcacaaggtgctgccccagctgctgaccgccttcgagttcggcaatgctggggccgttgtcctcacgcccctcttcaaggtgagtggaactgtggggtccagaaggctggctgggtgcacaggaactgccaaagagaaggccctggggtagggcaggctgtttagggcagacccaagcccatatgagcaggagcttcctgccagtgtctataaacaggtacctgaccagctgtcccctggggaggagagactctgccgctaaaatccttttttccacaaacctctggcttcacaaccctcagcccttcctccatttctccgggtctgacctgtgcaccttggttcccagggcccaggggattacctactcaccaccccactttgccctcctccctcctgactgcttagcactcagctcacctgacttctgggggctggatcttccaccctttcctcagaccccagcccgcctttttatgggcacctggcattccctgccctcctcaccttggggagaaccctttcatctgaaagacttgtcaggaggggagaagacaacaagcaagtcctgtatagctgagaacccccagaaattgcaggcagaatttctgcatatggcataaaggtacctgtttgtagggaggggcccagagctttcatcagcctcctgaaagaggccttgtcccagaaaggttaagggcaaggctgagatggaatatgggtagaggagctactgaggaaatgcctgcccccccctccgccatcacttcattcccaccctgggatatcagccccaggaatttagataagcccagcaaagtcagcccattcctgtgagcagctgaacccatcttcctgccctttcaggtgggcaagttcctgagcgctgaggagtatcagcagaagatcatccctgtggtggtcaagatgttctcatccactgaccgggccatgcgcatccgcctcctgcagcaggtgaggcctctgtaccagactctgtggtggtccacccagaccccaacctggtggctggggaggcacctgccctggctgcacagggaccccagaaaccccacccctgaacatacacacaactgagggacccaatgaggccaggctctcagaaagttggccacatacagggctccttggcagttttgggaatggccagcttgcccaggctgcagcgctctaatgccccctcctctcctggctcagtcactctggccctctagagtggggatacagtctttctcctgcaaccccagggcagctgggagcatcagacaagatggatgggatctaggaagtaccagtggctcccagtgccattccctctgtgaccaccaaacacaccagtcctcctcgtggcactgtgggcaggtggggaggagcagggaaggggtgataccctcatttatagaagaggctcaggctgggcgcagtggctcatgcctgtaatcccagcactttgggagggccgaggcaggcagatcacctgaggtcaggagtttaagaccagcctggccaacttggcgaaaccccgtctctactaaaaatacaaaaattagccaggtgcggtggtgggtgcctgtaatcccagctgctcaggaggctgaggcaggagaattgcttgaacctgggaggcagaggtttcagtgagctgagattgcgccactgcactccagcctcggtgacagagcaagactctgtctcagaaaaaaaaaaaaaaaaaaaatagaagaggctctgagagggtggccagatgagccggactatgagccaggccttcctagcgccctcctggcctttcctcactcctccacctgggcctgaggccaaacacctgggtggtggctcaggaggttgacctggctggccagtgcctgctgggtggaaaagctaagccaggagcggttccatggctatggggatagagtgggaagggctgaccatgttgacgcatcccaacctgggccacagatggagcagttcatccagtaccttgacgagccaacagtcaacacccagatcttcccccacgtcgtacatggcttcctggacaccaaccctgccatccgggagcagacggtcaaggtgggtgtggccaggcccagagtggctacccctggttttccaaggcttggaggggctcaccctagacacagaggccttggctttggcccatgggtccaagcagacactgtccttgctgtgtgggttcaggccgtgggtgcagctcggcagctggcgggggagcacgtcctccattcagcagacaacgagcatctgcctgttcctggcccaagccccatgctgggaggcagcatgcatgaggtgcccagccccctgcactcatggagcttcctttccagggcacagagggtgggcttgccagacaatacaacagaattagaaaatatgtattgttggctggtcacggtggctcacgcccataatccctgcactttgggaggctgaggcaagcggatcacctgaggtcaggagttcgagaccagcctgaccaacatggcgaagccctgtctctactaaaaagtacaaaaccatctggggatggtggcgcatgcctgtaatcccagctactcgggaggctgaggcaggagactcaattgaacctgggaggcagaggttgcagtgagccgagatcatgccgttgcactccagcatgggcaacaagagggaaactctgtttcaaaaaaagaaagaaaatatgcattgttggaaagtgtggggagaagagtttgtggttttaaaaacagtggtcaggggctgggcgcagtggcttacgcctgtgatcccagcactttggtaggccgaggtgggaggatcgcttgagcccaggagttggagaccagcctggtcatcatggccaaaccccatctctacaaaaaaatacaaaagttaggcgcgtatggtgatgcacgcctatagtcccagctactcgggaggctgaggcaggtaggtagcttgagcccaggaggttgaggctgcattgagctgtgatcgtgacactgcattccagcctgggcaacagagtgagacctcatctcaaaatttaagaaattattttaggccggggcctggtggcccatgcctgtaatcccagcactttgggaggccgaggcgggtggatcacctgaggcgatgggagtttgagaccagcctggccaacatggtaaaacatggtaaaaccccatctctactaaaaatacaaaaaatggctgggcccggttgctcacacctgtaatcccagactttgggaggctgaggtgggcggatcacaagggcaggagatcaagaccatcctggctaacatggtgaaaccccgtctctactaaaagtacaaaaacaatctagccgggcatggtggtgggcgcctgtggtcccagctacttgggaggctgaggcaggagaatggtgtgaacctcggagatggagcttgcagtgagccgatatcgcgccactgcactccagcctgggcaacagagcaagactccgtctcaaaaaaataaaataaaataaaaattaaaaaaattagccaggcatggtggtgggcgcctgtaatcctagccactcaggaggctgaggcaggagaattgcttgaacccaggaggcagaggttgcagtgagtagagatcacaccactgcactccagcctgggtgacagagtgagactctatctcagaaacaaaaaagatacggagacgagagtggctctgaggcttgtggcctgagcaactggaaggttaggagttgctatttactgagatgacacaagcatgttgggccccatcttggctgtttctgttaggcagctggatggagatgtcgagttggccactggttatgcatgtgtgaaatttagggaagtctgggctaggggtatgtgcctgggggttgtcagctcacaagatggcattgaaagccatgaaatggctgagatcacctagggcaagagtgttagatagaaaagagccctctagattggctccgggtgtgtgaacgttagagtctcagcaaaaggagcagccagccaggtcagaggagaaccaggagggggtggtgtcctggaagaccagagaccaaagtttcagggagggaaaactcaggggtgtcagaactgctgagggtcaagtttggtgaggatggagaactggctgttgaaattagtaccggggagggcatcagtgacctcaccctgagccagtttggcagagtgtggggctgtttgtgtgagtctaggtggagtgccatcaggagagcagagcagaggaaatgggaaacaggagtgcagacagactttggaggttttgctgtaaagggggacagaaatggggtccctttcttcaacatgctggacagggccaggcccaggctgggaggtggccttgcaggctttgatgggtgtgctctgggatgagggctgccaggaggctgttcctgcacaaggccctttgcccgccacagcccacagttcccactcatttctgccccacagtccatgctgctcctggccccaaagctgaacgaggccaacctcaatgtggagctgatgaagcactttgcacggctacaggccaaggatgaacagggccccatccgctgcaacaccacagtctgcctgggcaaaatcggctcctacctcagtgctagcgtgagtgtcctgcacaactgctggagcccggtccctgtcgcaggaccacagcctcctccagggccaggagtcttgtgtgtgggggccttcattctcccagagacttagaccctgcacgctgttggccccatatctgggttcccagaggaggagtgagttggccgaagtcacacagtcaggagggatctgggatctgaatccaggcgtgcttggccccatggcctgtgtgcatcccttcagccagggtttgtaagttcagttgcttgccgtgcccagacagttaacaggaatgaacggtcagctgggcagggaggaagggagcctgtgtccgagccctggggacagctgctgttgtggtcccatgccctgaggcagtgtggaacccagtgatttgggaagagaagcccaggtccagagttttaggtcaactctccccatttaagtgattcattcatatttttcagattctggggacctatgggtggtcccattctgggaagtaagggctggtggttctgggtcccaacattgaccctacactcaggagccctctttcctgccccatcgtagaccagacacagggtccttacctctgccttcagccgagccactagggacccgtttgcaccgtcccgggttgcgggtgtcctgggctttgctgccacccacaacctctactcaatgaacgactgtgcccagaagatcctgcctgtgctctgcggtctcactgtagatcctgagaaatccgtgcgagaccaggtgaggcacagctgggcctgggccctgggctggggctgtaggggatgtcagcccctagctggcctggtaggttcttgggaaccccagagaccccagctctgcctcgttaccccacaggccttcaaggccattcggagcttcctgtccaaattggagtctgtgtcggaggacccgacccagctggaggaagtgggtgagtggcttacactcgtgttccctctttccctgccatgtccttgactgtgacctgtttgtgtcccacccccactggagtttctgaaaggtcctagtgagcagacttgactcagctcccccttcacagatgggagaaatcaggcctggagaaaggaggggtggctgcagggcactgtcagttcctgctgtcctgtcacccatgggtgcctgacgtgcccatacccacctctctctcatgccactgcccagagaaggatgtccatgcagcctccagccctggcatgggaggagccgcagctagctgggcaggctgggccgtgaccggggtctcctcactcacctccaagctgatccgttcgcacccaaccactgccccaacagaaaccaacattccccaaagacccacgcctgaaggtgagtgtcctggcctagctgcatcagtggctgagagggctgagagctgcaggcacccaggaactcttactgtctgactcccccggggatggtgaaggggatataggagctgggtaggctccagtcaccctgtgggcttccttggtgccccttccccccagtagcccccttcccctagcagcctctgccctgtcccaagacccccctgaaagctcagtgagcctctgctccccaggagttcctgccccagcccccacccctgttcctgccacccctacaacctcaggccactgggagacgcaggaggaggacaaggacacagcagaggacagcagcactgctgacagatgggacgacgaagactggggcagcctggaggtgtgtggggctgagggagcctccccaggggaccccagctcaaatccacaggctgccattcagggagcttctgtggggcctggctggagttggcctgtcctcatcagcacagcatccctggcacgtaggcctcatggagtggccattgtaggccagagccagcagcaggccccattcaaccccagcggccccagggagcaggctaggcagatggtgcctggggcattccctgaacttcctcactcttacccacaccgtccccctttcccctcctccagtgcccacccagccatgggggtcagcaaggagaggccactcctgggtctagaaccagaccagttctgcttgggggatgggctcaggttgggctgagggaggactggggctgtcctcagaatggggcagagctgggggcccaatttccccatctggctgacagcagcagtttctggccctcaaggctgttggaaggggcatctagatctcattccccagccttaaagaggggtgagggcaggccagggtcagcgtccatttaatagatgggaaacagggcctgaggagcaaatgaggaggaaggcaaaagacagtggtggggcccgtggctgggatgatgctggggcgggctcacttgccctttagcatggggtgggagtcagtggtcccttcccacactgcagcaggaggccgagtctgtgctggcccagcaggacgactggagcaccgggggccaagtgagccgtgctagtcaggtgagctgggtctggtggggaggtgtgtgtatggggctctttcctccttgggcccagggctacttccccctcccgctcttctacaggtcagcaactccgaccacaaatcctccaaatccccagagtccgactggagcagctgggaagctgagggctcctgggaacagggctggcaggagccaagctcccaggagccacctcctgacggtacacggctggccagcgagtataactggggtggcccagagtccagcgacaagggcgaccccttcgctaccctgtctgcacgtcccagcacccaggtacccagcacaggtctggcgagagggtagagatggtggacctcagccagaagtgggccccactgcagcccacacttctctttacagccgaggccagactcttggggtgaggacaactgggagggcctcgagactgacagtcgtaagtgcttcccctgggtgggctgaagactagggctccccgactagcccgcccctacaggcccccggcaggcactggctggagagctgagaccggggctccccttcctgacgccaggacaggtcaaggctgagctggcccggaagaagcgcgaggagcggcggcgggagatggaggccaaacgcgccgagaggaaggtggccaagggccccatgaagctgggagcccggaagctggactgaaccgtggcggtggcccttcccggctgcggagagcccgccccacagatgtatttattgtacaaaccatgtgagcccggccggcccagccaggccatctcacgtgtacataatcagagccacaataaattctatttcacaccccttgtgccgggctcagtctagcccctgggaggcggctggggtctggcgccgccctgcgcagcccgcgcccacgtcagacgtgaacatcatttgcttcgaaagccaagggtaaagaggcacgatctgatttatcagtttctaggaacaccct

SEQ ID NO: 9853 - DNA, 485 bp, Homo sapiens
ccctctgtctcctcctttgtgaatggggggagtgacagcatcttttgaagggtacagcacaggagaggtgccaaaccagtgagtcagaccctcctctgaccgcttcttagctgtgtgactttggacaagctccttgccctctctgtgcctcagcttccttgttggtaaaatgtggattacattagcacctacctggtaaagttgtgaagaggactgagataatctgtgtaaaggttttagcacataatctgtgctccagaaatatgaattgggggtattatggcctcaaaggggggttaggaggactaaaggagaccgttgagcttacaggctggtccattttggctcagtgggaggatgaggtctgggagtaaagtgtacctaatccttgctttcccacggcctaccaggaacttcctgcccaatccagccagggcagggaaaccaagtaagccccttcacctctttgatcttcagtttcctcc

SEQ ID NO: 9854 - DNA, 6149 bp, Homo sapiens
gtccgtgttcaccctgggagcagcggccggaggcctgagtgccatgatcctcaacgacctcctgggccggaagctgagcatcatgttctcagctgtgccgtcggcggccggctatgcgctcatggcgggtgcgcacggcctctggatgctgctgctcggaaggacgctgacgggcttcgccggggggctcacagctgcctgcatcccggtaaggccaggccttcccacccaggcgccccaatgcctctgtattggtgctgagcctccatctgactaaggcctcccagcctccatgccttctgggcaatgagaattgtttgccttccctgcggatgcccagggcgcctcagctcacccccagcagggcagctaatttgggggaaattgtctccaggtccccagctgcccccactctggactttccaagccttctaccccgtttcttgaccggtcagatgtattactcaattggagaaaatccgcattgagcaatgggtaggagagggaagtccctgccctacaccctccccgggaccttcttatcttatgtggtactccacacggggcctggtggtgagcccagcagaggagacaaaactcactgggaggcatggactcacctgctcagccctgaagcctgggagccctcgggcctccttcccagcgtcatgctgcccatttccgagctgcgtacttccacccacgtcacagttagggaaactgaggacagagagagatcaggcaggccgcccaaggtcttgcagtgagtcatgaccaggactcagccccaccagaaagcctccacttcccactttccggggttcacaggggctgactctcccatctcggccgggcctaggaaccagtattttcagcaaaacctggtgcggcggctgtgtcttgcaggtgtacgtgtctgagattgctcccccaggcgttcgtggggctctgggggccacaccccagctcatggcagtgttcggatccctgtccctctacgcccttggcaagtatggccccgcactcctgtgtgcaggctggtgggaggggtgggtgccgccaaggtagacgtgggtggaaagggaatgatttgtcccagaacagatcctgggctgagaggcaagagatctggcatcccggccccactcagtcagcaccttgctgggcacctccaggcagggcctgcccctctagccacaggcccagtctctagctggggcagccagggcttctcctggacccacagtcgccagactatcttttaacggcagaaagcttccatcaaatgccatctcagatgggaagtccagatagaaaagaaatcacagtgcgtgcagctgctcagttgagggggcgtggaggtcttgggtggaggcctagggccttgcctgcccaacctaccccttcctcatcctgccctggccctaagactttccaaggacttcccactatgtgccaggggctgagcaatccctgcagccccaccctgcctggggcaatcagggtaggcttcctgtaggagatggcccttggactagaccttgaagggcagatgaggttattcagaggctccagagggaaggggctgtaccaggcctggacctggcccctcacccacccctcgcccccaggcctcctgctgccgtggcgctggctggctgtggccggggaggcgcctgtgctcatcatgatcctgctgctcagcttcatgcccaactcgccgcgcttcctgctctctcggggcagggacgaagaggccctgcgggcgctggcctggctgcgtgggacggacgtcgatgtccactgggagttcgagcagatccaggacaacgtccggagacaggtgcaggagggtgtgcgcccgaaccgggcaggcccacctccagcacttcagctgtgtgtggccgtggaggcttttcctggaagacaggaccacagtagttcccactaatccaagtgcctgggttggggtggggggctgttcccagagcctgggtggcctggtaagctggttctttcctggaggagggaaaaaggaggtctcccacacaacccctggcggtccagggcaggatggcgcctgctggagaggctggcccaacgccctcagcggcggccttgtgtttcagagcagccgagtatcgtgggctgaggcacgggccccacacgtgtgccggcccatcaccgtggccttgctgatgcgcctcctgcagcagctgacgggcatcacgcccatcctggtctacctgcagtccatcttcgacagcaccgctgtcctgctggtgagagcccagccccggccggcgcccacccacggggtcccctggaggctggcagggcaggggaggcagggcctgctcctgcacttacccaacccctggtcttacccacacctgctctgtgccgggtgtcagggatgccacagcaagatctgagatctgggccttgtggagacagttccagtgccttcacctgttctcagaatgtttttaagataagcttaagtgttttaaaataaaatactggcaaaatcccaacacgaggccaaggcgggaggatcacttaagcccaggagtgtgagactgcagtggccacgatctcaccactgcgctccatcctggtgacagagcaggaccctgtctctaaaaacatatagaaattttaaaaattaaataaaatacatgggattacaaaggaaaccagctttatagaaacgtggaccccttgaggccacagaccccaggttcagagccctgtggcatctgccacttaatgagggaagtcactttcccctctgaacctcaacttcctcctctgcaagatgaagatagcagcacatctccatcagcctgccccaaggctcaaagtgagatgagatttgaagattagtaacagcacggttcagcaagtcatcatcacgcctggattctgtgccagctgggcatagtggtgggcagagcagatgtgtccctgcccaggagccccataggctcggacagtatagatgcccagcacgctgcaggtgccaggccactcagtactgcactgagctgctggcctgagcccctgcaatgcctgccgggacaagctgggtcctggagggggatgggaacagcaggcaggtccctcagccctggtggtctccccccgatagccccccaaggacgacgcagccatcgttggggccgtgcggctcctgtccgtgctgatcgccgccctcaccatggacctcgcaggccgcaaggtgctgctcttcgtctcaggtaagcaccctgcaggcagccctcctgccccactcctccgcatgggtcagggctgggctgggtgtgcaggcctgcctcggggtggggctgtgtggctgggaactgcagagcacctgcctccctagcatcggcagggccctggcccaggccagtggtccagaaaggtccgctggggctccgagtggacacactggctgtgacactccacggtgggagcctaacacgcggctggagacagagcttgctgccctgctgggggtctctagtcccagacacgagctggaccacgcaagtatcaaggggctctgcagaaggagctctgagagaaacagctggctcagagggtcctggccccacgaggccacctgtctgtccacagcggccatcatgtttgctgccaacctgactctggggctgtacatccactttggccccaggcctctgagccccaacagcactgcgggcctggaaagcgagtcctggggggacttggcgcagcccctggcagcacccgctggctacctcaccctggtgcccctgctggccaccatgctcttcatcatgggtaggtgtggtggtggctcagaggggcaggctgtcttgggtgttaagggatgggtgatgtgtctggggtggctggagaggggggtctccagcagctcagcggagacagacacagccgcctccagtcaccccacagggcctgaacctgcctcctcctccgagcaggctacgccgtgggctggggtcccatcacctggctgctcatgtctgaggtcctgcccctgcgtgcccgtggcgtggcctcagggctctgcgtgctggccagctggctcaccgccttcgtcctcaccaagtccttcctgccagtggtggtgagtgttcagccccaggccccaggcccctaggccctcgctgactggccaggacccttctcagtgccaggggctgtgccaaggcctgctgtcaggaccctaactctcagtgaccctaggagatgagcacacaccccctgaactcagagaccccagagtggtcacgtgatagcctagcaaacgctcttcattataagaaacaggaacgggcgtaggcaactgttctgggaagtcaggttacctcctgggccagggcaggacatggcccaggaccctgccaggggccccggaagccacctccccaccgtgcctcatctcccgtcctcctgggcgctgggtctcagcagcagccacactcccccctcaaccccacccactccccctgcctcctggttcaaaactacgggccctgtgaccagccagaatctgtgaggcccagagtaagttcccatgagggagaagctggctagggcagcctaggccagcgcctaagctgtccctgcagtggtcagggcaggggggttgggggagggcaggcaacccagagtgagtccatcagcctagagggtccaagaagaacctgcgtgcccaccaggctgcagggcgggcctcctgcaggccgcggcatggaacagctgggatgccagcgctgggtagggggtgtggagggggtacctgagctgacgccagagggcccagcccctgaggaaggccgaggggcagacgggatgcagacttcaagggctacttcggatttgtcctggggacagtgggggagccctggtgtgggggggcggtctctgaacacaggaaggaccagatgaaggccccacagggctggtcactaccagcagcgcccacgagctcctctggggcaggaggaccctggagcttctccctgtgacccggccccgctcttcacccgcagagcaccttcggcctccaggtgcctttcttcttcttcgcggccatctgcttggtgagcctggtgttcacaggctgctgtgtgcccgagaccaagggacggtccctggagcagatcgagtccttcttccgcatggggagaaggtccttcttgcgctaggtcaaggtccccgcctggagggggccaaacccccagtggctgggcctctgtgttggctacaaacctgcaccctgggaccaagaggcagcagtcatccctgccaccagccagagcacaggaagagcagtgtgatggggcctcagcagcgggtgcccctggctcgggacaggtagcactgctgtccagccacagccccagcccaggcagcccacagtgctgcacgtagccatgggccgcaggagtgcatacaaccctgcatccagggacacggccctgctgggtgacctcaggcctagtccctttcccttgcgtgaaggacacgccccacagaaggctacggggaggactgagaggacagggctggaggcagccaagtaacgtagtcatatcatcgcgctctgatctggtggcatctggctgtgcaaggaagacccggctttgccctcacaagtcttatgggcaccacagggaacatcctggacttaaaaagccagggcaggccgggcacagtggctcacgcctgtaatcccagcactttgggaggccaaagcaggtggattacccaaggccaggagttcaagaccagcctggccaacatggtgaaaccccgtctctactaaaaaatacaaaaaagctgggtgtggtggcacacacccgtagttccagctacttgggaggctgaggcagcattgcttgaacccgggaggtggaggctgcaatgagctgagatcatgccattgcactccagcctgggcaacgagagtgaaactccgtccccaccccctgccaaaaaaaaaaaaaaaaaagccagggcaaaggacctggcgtggccacttcctcctgccccagcccaacctctgggaacaggcagctcctatctgcaaactgtgttcacccttttgtaaaaataaaggaactggacccgta

SEQ ID NO: 9855 - DNA, 8031 bp, Homo sapiens
gctgctggccccgggcggctgctccagtctgagcgccctccgctcgccccgagagagacccggccatgcaggagccgctgctgggagccgagggcccggactacgacaccttccccgagaagccgcccccgtcgccaggggacagggcgcgggtcgggtgagagtcgctaggttgggggctgcgggtggggcctgggggtggccctggttccctccagccggcggcaggctcccgccctgggcctcccctgacctagtcgccaccgaggggccatctggctccctcctgtcccagacacgctactcctatttaaggaactggtccccctaagggaaggaacgatccacgagagtaccgggcccagccccccactgccacagacagtgagactgaggccccagcgagcaggggttctgcctgaggtcacacagcaagcctccagccgccgccctgggggcagaaccagagcctcctcttccggagaaaaggccccagcaccagaggctcagccactgcggatgagctaacaatggcctgggaatttcccaggggagctggggctcaggccctgggaacgtgaatggccttggacccaggcgtccctagcactgcccgctgagccgggcagccactgggttcagaaaaggcaatggtccctggaggagggactcagagaccctggtctttttgtccgccaccatcaccaggaccctgcagaacaaaagggtgttcctggccaccttcgccgcagtgctcggcaatttcagctttgggtatgccctggtctacacatcccctgtcatcccagccctggagcgctccttggatcctgacctgcatctgaccaaatcccaggcatcctggtttggggtaaggaccatcctctggaggagggtgggtgcaggaaggagggacctgctgagccttatctccagctaggaacctcccaaattctccaccttgggggtccctccagggccctggtcccccctcccccagccatccaggccactagtgggtggggtaaagctacaggattcctctgaaatgaggaactgaaagccagtggagagggtgagggaaggagcaggtggggaggtggctgtcagggtctatactaggtggggctgaggcttccccgggtccccacacccacagttggctggatgggggcaagggtatcaggtgtcagtggggagaggcactggctggggcaaggagagtccgcaggacagattgtgggctgatggagaggaagatcccagagtcccagagtctaaaattataatcttaatagcctcatatgtagagttgttaacatagtagttaagataaaaattcccaaggtttactgagcacttcctatgtgccaggcatgtgttgggcactgaacgttcattgattctcagggccaacgccacgaggtagaacttgcgctctccccataagacagctgaagaaactgaggtgcagacaggctgggcaatgtgcccaggtcccactaccagttagcagagtccagagggggtcccagttgctgctgtacagggaacttaagaacctccaaatcttaaagcccagtaccttcaagtcacagaattctcctgtattaaaatattagacatttaaacatcaggctggacagaaccactgtggatatgtggcgcagcacctcttccttagagcagaattccccgtttgggcatccctaacaaatggctgttccttgaagacaggaggctccctgtttcaagtgcttgacttggccaagtgcttgaccagctcctggggtcggcctagggaagaagctgtccctggactctgatgagactggggtgccaagtgcccagacatatctgccctgcacccccttcccctgcagtccgtgttcaccctgggagcagcggccggaggcctgagtgccatgatcctcaacgacctcctgggccggaagctgagcatcatgttctcagctgtgccgtcggcggccggctatgcgctcatggcgggtgcgcacggcctctggatgctgctgctcggaaggacgctgacgggcttcgccggggggctcacagctgcctgcatcccggtaaggccaggccttcccacccaggcgccccaatgcctctgtattggtgctgagcctccatctgactaaggcctcccagcctccatgccttctgggcaatgagaattgtttgccttccctgcggatgcccagggcgcctcagctcacccccagcagggcagctaatttgggggaaattgtctccaggtccccagctgcccccactctggactttccaagccttctaccccgtttcttgaccggtcagatgtattactcaattggagaaaatccgcattgagcaatgggtaggagagggaagtccctgccctacaccctccccgggaccttcttatcttatgtggtactccacacggggcctggtggtgagcccagcagaggagacaaaactcactgggaggcatggactcacctgctcagccctgaagcctgggagccctcgggcctccttcccagcgtcatgctgcccatttccgagctgcgtacttccacccacgtcacagttagggaaactgaggacagagagagatcaggcaggccgcccaaggtcttgcagtgagtcatgaccaggactcagccccaccagaaagcctccacttcccactttccggggttcacaggggctgactctcccatctcggccgggcctaggaaccagtattttcagcaaaacctggtgcggcggctgtgtcttgcaggtgtacgtgtctgagattgctcccccaggcgttcgtggggctctgggggccacaccccagctcatggcagtgttcggatccctgtccctctacgcccttggcaagtatggccccgcactcctgtgtgcaggctggtgggaggggtgggtgccgccaaggtagacgtgggtggaaagggaatgatttgtcccagaacagatcctgggctgagaggcaagagatctggcatcccggccccactcagtcagcaccttgctgggcacctccaggcagggcctgcccctctagccacaggcccagtctctagctggggcagccagggcttctcctggacccacagtcgccagactatcttttaacggcagaaagcttccatcaaatgccatctcagatgggaagtccagatagaaaagaaatcacagtgcgtgcagctgctcagttgagggggcgtggaggtcttgggtggaggcctagggccttgcctgcccaacctaccccttcctcatcctgccctggccctaagactttccaaggacttcccactatgtgccaggggctgagcaatccctgcagccccaccctgcctggggcaatcagggtaggcttcctgtaggagatggcccttggactagaccttgaagggcagatgaggttattcagaggctccagagggaaggggctgtaccaggcctggacctggcccctcacccacccctcgcccccaggcctcctgctgccgtggcgctggctggctgtggccggggaggcgcctgtgctcatcatgatcctgctgctcagcttcatgcccaactcgccgcgcttcctgctctctcggggcagggacgaagaggccctgcgggcgctggcctggctgcgtgggacggacgtcgatgtccactgggagttcgagcagatccaggacaacgtccggagacaggtgcaggagggtgtgcgcccgaaccgggcaggcccacctccagcacttcagctgtgtgtggccgtggaggcttttcctggaagacaggaccacagtagttcccactaatccaagtgcctgggttggggtggggggctgttcccagagcctgggtggcctggtaagctggttctttcctggaggagggaaaaaggaggtctcccacacaacccctggcggtccagggcaggatggcgcctgctggagaggctggcccaacgccctcagcggcggccttgtgtttcagagcagccgagtatcgtgggctgaggcacgggccccacacgtgtgccggcccatcaccgtggccttgctgatgcgcctcctgcagcagctgacgggcatcacgcccatcctggtctacctgcagtccatcttcgacagcaccgctgtcctgctggtgagagcccagccccggccggcgcccacccacggggtcccctggaggctggcagggcaggggaggcagggcctgctcctgcacttacccaacccctggtcttacccacacctgctctgtgccgggtgtcagggatgccacagcaagatctgagatctgggccttgtggagacagttccagtgccttcacctgttctcagaatgtttttaagataagcttaagtgttttaaaataaaatactggcaaaatcccaacacgaggccaaggcgggaggatcacttaagcccaggagtgtgagactgcagtggccacgatctcaccactgcgctccatcctggtgacagagcaggaccctgtctctaaaaacatatagaaattttaaaaattaaataaaatacatgggattacaaaggaaaccagctttatagaaacgtggaccccttgaggccacagaccccaggttcagagccctgtggcatctgccacttaatgagggaagtcactttcccctctgaacctcaacttcctcctctgcaagatgaagatagcagcacatctccatcagcctgccccaaggctcaaagtgagatgagatttgaagattagtaacagcacggttcagcaagtcatcatcacgcctggattctgtgccagctgggcatagtggtgggcagagcagatgtgtccctgcccaggagccccataggctcggacagtatagatgcccagcacgctgcaggtgccaggccactcagtactgcactgagctgctggcctgagcccctgcaatgcctgccgggacaagctgggtcctggagggggatgggaacagcaggcaggtccctcagccctggtggtctccccccgatagccccccaaggacgacgcagccatcgttggggccgtgcggctcctgtccgtgctgatcgccgccctcaccatggacctcgcaggccgcaaggtgctgctcttcgtctcaggtaagcaccctgcaggcagccctcctgccccactcctccgcatgggtcagggctgggctgggtgtgcaggcctgcctcggggtggggctgtgtggctgggaactgcagagcacctgcctccctagcatcggcagggccctggcccaggccagtggtccagaaaggtccgctggggctccgagtggacacactggctgtgacactccacggtgggagcctaacacgcggctggagacagagcttgctgccctgctgggggtctctagtcccagacacgagctggaccacgcaagtatcaaggggctctgcagaaggagctctgagagaaacagctggctcagagggtcctggccccacgaggccacctgtctgtccacagcggccatcatgtttgctgccaacctgactctggggctgtacatccactttggccccaggcctctgagccccaacagcactgcgggcctggaaagcgagtcctggggggacttggcgcagcccctggcagcacccgctggctacctcaccctggtgcccctgctggccaccatgctcttcatcatgggtaggtgtggtggtggctcagaggggcaggctgtcttgggtgttaagggatgggtgatgtgtctggggtggctggagaggggggtctccagcagctcagcggagacagacacagccgcctccagtcaccccacagggcctgaacctgcctcctcctccgagcaggctacgccgtgggctggggtcccatcacctggctgctcatgtctgaggtcctgcccctgcgtgcccgtggcgtggcctcagggctctgcgtgctggccagctggctcaccgccttcgtcctcaccaagtccttcctgccagtggtggtgagtgttcagccccaggccccaggcccctaggccctcgctgactggccaggacccttctcagtgccaggggctgtgccaaggcctgctgtcaggaccctaactctcagtgaccctaggagatgagcacacaccccctgaactcagagaccccagagtggtcacgtgatagcctagcaaacgctcttcattataagaaacaggaacgggcgtaggcaactgttctgggaagtcaggttacctcctgggccagggcaggacatggcccaggaccctgccaggggccccggaagccacctccccaccgtgcctcatctcccgtcctcctgggcgctgggtctcagcagcagccacactcccccctcaaccccacccactccccctgcctcctggttcaaaactacgggccctgtgaccagccagaatctgtgaggcccagagtaagttcccatgagggagaagctggctagggcagcctaggccagcgcctaagctgtccctgcagtggtcagggcaggggggttgggggagggcaggcaacccagagtgagtccatcagcctagagggtccaagaagaacctgcgtgcccaccaggctgcagggcgggcctcctgcaggccgcggcatggaacagctgggatgccagcgctgggtagggggtgtggagggggtacctgagctgacgccagagggcccagcccctgaggaaggccgaggggcagacgggatgcagacttcaagggctacttcggatttgtcctggggacagtgggggagccctggtgtgggggggcggtctctgaacacaggaaggaccagatgaaggccccacagggctggtcactaccagcagcgcccacgagctcctctggggcaggaggaccctggagcttctccctgtgacccggccccgctcttcacccgcagagcaccttcggcctccaggtgcctttcttcttcttcgcggccatctgcttggtgagcctggtgttcacaggctgctgtgtgcccgagaccaagggacggtccctggagcagatcgagtccttcttccgcatggggagaaggtccttcttgcgctaggtcaaggtccccgcctggagggggccaaacccccagtggctgggcctctgtgttggctacaaacctgcaccctgggaccaagaggcagcagtcatccctgccaccagccagagcacaggaagagcagtgtgatggggcctcagcagcgggtgcccctggctcgggacaggtagcactgctgtccagccacagccccagcccaggcagcccacagtgctgcacgtagccatgggccgcaggagtgcatacaaccctgcatccagggacacggccctgctgggtgacctcaggcctagtccctttcccttgcgtgaaggacacgccccacagaaggctacggggaggactgagaggacagggctggaggcagccaagtaacgtagtcatatcatcgcgctctgatctggtggcatctggctgtgcaaggaagacccggctttgccctcacaagtcttatgggcaccacagggaacatcctggacttaaaaagccagggcaggccgggcacagtggctcacgcctgtaatcccagcactttgggaggccaaagcaggtggattacccaaggccaggagttcaagaccagcctggccaacatggtgaaaccccgtctctactaaaaaatacaaaaaagctgggtgtggtggcacacacccgtagttccagctacttgggaggctgaggcagcattgcttgaacccgggaggtggaggctgcaatgagctgagatcatgccattgcactccagcctgggcaacgagagtgaaactccgtccccaccccctgccaaaaaaaaaaaaaaaaaagccagggcaaaggacctggcgtggccacttcctcctgccccagcccaacctctgggaacaggcagctcctatctgcaaactgtgttcacccttttgtaaaaataaaggaactggacccgta

SEQ ID NO: 9856 - DNA, 8066 bp, Homo sapiens
  SITE (422): n equals a,t,g, or c
  SITE (700): n equals a,t,g, or c
  SITE (931): n equals a,t,g, or c
  SITE (936): n equals a,t,g, or c
  SITE (944): n equals a,t,g, or c
  SITE (970): n equals a,t,g, or c
  SITE (1188): n equals a,t,g, or c
  SITE (1204): n equals a,t,g, or c
  SITE (1206): n equals a,t,g, or c
  SITE (1309): n equals a,t,g, or c
  SITE (1445): n equals a,t,g, or c
  SITE (1448): n equals a,t,g, or c
  SITE (1450): n equals a,t,g, or c
  SITE (1455): n equals a,t,g, or c
  SITE (1472): n equals a,t,g, or c
  SITE (1723): n equals a,t,g, or c
  SITE (1778): n equals a,t,g, or c
  SITE (1779): n equals a,t,g, or c
  SITE (1839): n equals a,t,g, or c
  SITE (1883): n equals a,t,g, or c
  SITE (1902): n equals a,t,g, or c
  SITE (1905): n equals a,t,g, or c
  SITE (1909): n equals a,t,g, or c
  SITE (1916): n equals a,t,g, or c
  SITE (1960): n equals a,t,g, or c
  SITE (1977): n equals a,t,g, or c
  SITE (2038): n equals a,t,g, or c
  SITE (2341): n equals a,t,g, or c
  SITE (2709): n equals a,t,g, or c
  SITE (2716): n equals a,t,g, or c
  SITE (2867): n equals a,t,g, or c
  SITE (2871): n equals a,t,g, or c
  SITE (2986): n equals a,t,g, or c
  SITE (3046): n equals a,t,g, or c
  SITE (3066): n equals a,t,g, or c
  SITE (3070): n equals a,t,g, or c
  SITE (3136): n equals a,t,g, or c
  SITE (3244): n equals a,t,g, or c
  SITE (3251): n equals a,t,g, or c
  SITE (3259): n equals a,t,g, or c
  SITE (3272): n equals a,t,g, or c
  SITE (3329): n equals a,t,g, or c
  SITE (3350): n equals a,t,g, or c
  SITE (3385): n equals a,t,g, or c
  SITE (3635): n equals a,t,g, or c
  SITE (3641): n equals a,t,g, or c
  SITE (3658): n equals a,t,g, or c
  SITE (3727): n equals a,t,g, or c
  SITE (3748): n equals a,t,g, or c
  SITE (3756): n equals a,t,g, or c
  SITE (3767): n equals a,t,g, or c
  SITE (3942): n equals a,t,g, or c
  SITE (3994): n equals a,t,g, or c
  SITE (4115): n equals a,t,g, or c
  SITE (4132): n equals a,t,g, or c
  SITE (4154): n equals a,t,g, or c
  SITE (4159): n equals a,t,g, or c
  SITE (4177): n equals a,t,g, or c
  SITE (4209): n equals a,t,g, or c
  SITE (4243): n equals a,t,g, or c
  SITE (4546): n equals a,t,g, or c
  SITE (4555): n equals a,t,g, or c
  SITE (4656): n equals a,t,g, or c
  SITE (4675): n equals a,t,g, or c
  SITE (4680): n equals a,t,g, or c
  SITE (4905): n equals a,t,g, or c
  SITE (5068): n equals a,t,g, or c
  SITE (5087): n equals a,t,g, or c
  SITE (5090): n equals a,t,g, or c
  SITE (5158): n equals a,t,g, or c
  SITE (5302): n equals a,t,g, or c
  SITE (5323): n equals a,t,g, or c
  SITE (5331): n equals a,t,g, or c
  SITE (5372): n equals a,t,g, or c
  SITE (5478): n equals a,t,g, or c
  SITE (5549): n equals a,t,g, or c
  SITE (5613): n equals a,t,g, or c
  SITE (5625): n equals a,t,g, or c
  SITE (5628): n equals a,t,g, or c
  SITE (5672): n equals a,t,g, or c
  SITE (5841): n equals a,t,g, or c
  SITE (5877): n equals a,t,g, or c
  SITE (5908): n equals a,t,g, or c
  SITE (5914): n equals a,t,g, or c
  SITE (5929): n equals a,t,g, or c
  SITE (5932): n equals a,t,g, or c
  SITE (5938): n equals a,t,g, or c
  SITE (5939): n equals a,t,g, or c
  SITE (5996): n equals a,t,g, or c
  SITE (6024): n equals a,t,g, or c
  SITE (6080): n equals a,t,g, or c
  SITE (6087): n equals a,t,g, or c
  SITE (6134): n equals a,t,g, or c
  SITE (6150): n equals a,t,g, or c
  SITE (6161): n equals a,t,g, or c
  SITE (6347): n equals a,t,g, or c
  SITE (6367): n equals a,t,g, or c
  SITE (6393): n equals a,t,g, or c
  SITE (6413): n equals a,t,g, or c
  SITE (6415): n equals a,t,g, or c
  SITE (6417): n equals a,t,g, or c
  SITE (6473): n equals a,t,g, or c
  SITE (6560): n equals a,t,g, or c
  SITE (6757): n equals a,t,g, or c
  SITE (6761): n equals a,t,g, or c
  SITE (6775): n equals a,t,g, or c
  SITE (6792): n equals a,t,g, or c
  SITE (6809): n equals a,t,g, or c
  SITE (6840): n equals a,t,g, or c
  SITE (6860): n equals a,t,g, or c
  SITE (6867): n equals a,t,g, or c
  SITE (6876): n equals a,t,g, or c
  SITE (6881): n equals a,t,g, or c
  SITE (6917): n equals a,t,g, or c
  SITE (6919): n equals a,t,g, or c
  SITE (6935): n equals a,t,g, or c
  SITE (6938): n equals a,t,g, or c
  SITE (7026): n equals a,t,g, or c
  SITE (7131): n equals a,t,g, or c
  SITE (7382): n equals a,t,g, or c
  SITE (7405): n equals a,t,g, or c
  SITE (7444): n equals a,t,g, or c
  SITE (7610): n equals a,t,g, or c
  SITE (7696): n equals a,t,g, or c
  SITE (8008): n equals a,t,g, or c
  SITE (8024): n equals a,t,g, or c
cgctcgccccgagagagacccggccatgcaggagccgctgctgggagccgagggcccggactacgacaccttccccgagaagccgcccccgtcgccaggggacagggcgcgggtcgggtgagagtcgctaggttgggggctgcgggtggggcctgggggtggccctggttccctccagccggcggcaggctcccgccctgggcctcccctgacctagtcgccaccgaggggccatctggctccctcctgtcccagacacgctactcctatttaaggaactggtccccctaagggaaggaacgatccacgagagtaccgggcccagccccccactgccacagacagtgagactgaggccccagcgagcaggggttctgcctgaggtcacacagcaagcctccagccgccgccctgggggcagnaaccagagcctcctcttccggagaaaaggccccagcaccagaggctcagccactgcggatgagctaacaatggcctgggaatttcccaggggagctggggctcaggccctgggaacgtgaatggccttggacccaggcctccctagcactgcccgctgagccgggcagccactgggttcagaaaaggcaatggtccctggaggagggactcagagaccctggtctttttgtccgccaccatcaccaggaccctgcagaacaaaagggtgttcctggcncaccttcgccgcagtgctcggcaatttcagctttgggtatgccctggtctacacatcccctgtcatcccagccctggagcgctccttggatcctgacctgcatctgaccaaatcccaggcatcctggtttggggtaaggaccatcctctggaggagggtgggtgcaggaaggagggacctgctgagccttatctccagctaggaacctcccaaattctccaccttgggggntcccntccagggnccctggtcccccctcccccagccatnccaggccactagtgggtggggtaaagctacaggattcctctgaaatgaggaactgaaagccagtggagagggtgagggaaggagcaggtggggaggtggctgtcagggtctatactaggtggggctgaggcttccccgggtccccacacccacagttggctggatgggggcaagggtatcaggtgtcagtggggagaggcactggctggggcaaggangagtccgcaggacagnanttgtgggctgatggagaggaagatcccagagtcccagagtctaaaattataatcttaatagcctcatatgtagagttgttaacatagtagttaagataaaaanttcccaaggtttactgagcacttcctatgtgccaggcatgtgttgggcactgaacgttcattgattctcagggccaacgccacgaggtagaacttgcgctctccccataagacagctgaagaaactgaggtgcagnacnanggctngggcaatgtgcccaggntcccactaccagttagcagagtccagagggggtcccagttgctgctgtacagggaacttaagaacctccaaatcttaaagcccagtaccttcaagtcacagaattctcctgtattaaaatattagacatttaaacatcaggctggacagaaccactgtggatatgtggcgcagcacctcttccttagagcagaattccccgtttgggcatccctaacaaatggctgttccttgaagacaggaggctccctngtttcaagtgcttgacttggccaagtgcttgaccagctcctggggtcggcctagnnggaagaagctgtccctggactctgatgagattggggtgccaagtgcccagacatatctgnccctgcacccccttcccctgcagtccgtgttcaccctgggagcnagcggccggaggcctgagntgnccantgatccntcaacgacctcctgggccggaagctgagcatcatgttctcagcntgtgccgtcggcggccnggctatgcgctcatggcgggtgcgcacggcctctggatgctgctgctcggaaggacgctgnacgggcttcgccggggggctcacagctgcctgcatcccggtaaggccaggccttcccacccaggcgccccaatgcctctgtattggtgctgagcctccatctgactaaggcctcccagcctccatgccttctgggcaatgagaattgtttgccttccctgcggatgcccagggcgcctcagctcacccccagcagggcagctaatttgggggaaattgtctccaggtccccagctgcccccactctggactttccaagccttctaccccgtttcttgaccggtcagatgtattactcaattgngagaaaatccgcattgagcaatgggtaggagagggaagtccctgccctacaccctccccgggaccttcttatcttatgtggtactccacacggggcctggtggtgagcccagcagaggagacaaaactcactgggaggcatggactcacctgctcagccctgaagcctgggagccctcgggcctccttcccagcgtcatgctgcccatttccgagctgcgtacttccacccacgtcacagttagggaaactgaggacagagagagatcaggcaggccgcccaaggtcttgcagtgagtcatgaccaggactcagccccaccagaaagcctccacttcccactttccggggttcacaggggctgactcntcccatnctcggccgggcctaggaaccagtattttcagcaaaacctggtgcggcggctgtgtcttgcaggtgtacgtgtctgagattgctcccccaggcgttcgtggggctctgggggccacaccccagctcatggcagtgttcggatccctgtcccntctnacgcccttggcaagtatggccccgcactcctgtgtgcaggctggtgggaggggtgggtgccgccaaggtagacgtgggtggaaagggaatgatttgtcccagaacagatcctggngctgagaggcaagagatctggcatcccggccccactcagtcagcaccttgctgggcaccntccaggcagggcctgccccntctnagccacaggcccagtctctagctggggcagccagggcttctcctggacccacagtcgccagactantcttttaacggcagaaagcttccatcaaatgccatctcagatgggaagtccagatagaaaagaaatcacagtgcgtgcagctgctcagttgagggggcgtggaggtcnttgggtnggaggccntagggccttgccntgcccaacctaccccttcctcatcctgccctggccctaagactttccaaggacttcnccactatgtgccaggggctgnagcaatccctgcagccccaccctgcctggggcaantcagggtaggcttcctgtaggagatggcccttggactagaccttgaagggcagatgaggttattcagaggctccagagggaaggggctgtaccaggcctggacctggcccctcacccacccctcgcccccaggcctcctgctgccgtggcgctggctggctgtggccggggaggcgcctgtgctcatcatgatcctgctgctcagcttcatgcccaactcgccgcgcttcctgctctctcggggcagggnacgaangaggccctgcgggcgcntggcctggctgcgtgggacggacgtcgatgtccactgggagttcgagcagatccaggacaacgtccggnagacaggtgcaggagggtgtngcgcccgnaaccgggcagngcccacctccagcacttcagctgtgtgtggccgtggaggcttttcctggaagacaggaccacagtagttcccactaatccaagtgcctgggttggggtggggggctgttcccagagcctgggtggcctggtaagctggttctttcctggaggagggaaaaaggaggtctcccacnacaacccctggcggtccagggcaggatggcgcctgctggagaggctggcccnaacgccctcagcggcggccttgtgtttcagagcagccgagtatcgtgggctgaggcacgggccccacacgtgtgccggcccatcaccgtggccttgctgatgcgcctcctgcagcagctgnacgggcatcacgcccantcctggtctacctgcagtccantcttncgacagcaccgctgtccntgctggtgagagcccagccccggccggcgccncacccacggggtcccctggaggctggcagggcanggggaggcagggcctgctcctgcacttacccaacccctggtcttacccacacctgctctgtgccaggtgtcagggatgccacagcaagatctgagatctgggccttgtggagacagttccagtgccttcacctgttctcagaatgtttttaagataagcttaagtgttttaaaataaaatactggcaaaatcccaacacgaggccaaggcgggaggatcacttaagcccaggagtgtgagactgcagtggccacgatctcaccactgcactccatcctggtgacagagcaggaccctgtctcntaaaaacantatagaaattttaaaaattaaataaaatacatgggattacaaaggaaaccagctttatagaaacgtggaccccttgaggccacagaccccaggttcagagnccctgtggcatctgccacnttaantgagggaagtcactttcccctctgaacctcaacttcctcctctgcaagatgaagatagcagcacatctccatcagcctgccccaaggctcaaagtgagatgagatttgaagattagtaacagcacggttcagcaagtcatcatcacgcctggattctgtgccagctgggcatagtggtgggcagagcagatgtgtccctgcccaggagccccataggctcggacnagtatagatgcccagcacgctgcaggtgccaggccactcagtactgcactgagctgctggcctgagcccctgcaatgcctgccgggacaagctgggtcctggagggggatgggaacagcaggcaggtccctcagccctggtggtctccccccgatagcccccncaaggacgacgcagccatncgnttggggccgtgcggctcctgtccgtgctgatcgccgccctcaccatggacctcgcaggccgcaaggtngctgctcttcgtctcaggtaagcaccctgcaggcagccctcctgccccactcctccgcatgggtcagggctgggctgggtgtgcaggcctgcctcggggtggggctgtgtggctgggaactgcagagcacctgcctccctagcnatcggcagggccctggcccanggccagtnggtccagaaaggtccgctggggctccgagtggacacactgngctgtgacactccacggtgggagcctaacacgcggctggagacagagcttgctgccctgctgggggtctctagtcccagacacgagctggaccacgcaagtatcanaggggctctgcagaaggagctctgagagaaacagctggctcagagggtcctggccccacgaggccacctgntctgtccacagcggccatcatgtttgctgccaacctgactctggggctgtacatccactttggnccccaggcctcntgnagccccaacagcactgcgggcctggaaagcgagtcctggggggnacttggcgcagcccttggcagcacccgctggctacctcaccctggtgcccctgctggccaccatgctcttcatcatgggtaggtgtggtggtggctcagaggggcaggctgtcttgggtgttaagggatgggtgatgtgtctggggtggctggagaggggggtctccangcagctcagcggagacagacacagccgcctccagtncaccccacagggcctgaacctgcctcctccntccgangcaggctacgccgtnggngctggnnggtcccatcacctggctgctcatgtctgaggtcctgcccctgcgtgcccgtggcgtnggcctcagggctctgcgtgctggccagnctggctcaccgccttcgtcctcaccaagtccttcctgccagtggtggtgagtgttncagcccncaggccccaggcccctaggccctctctgactggccaggacccttctncagtgccaggggctgntgccaaggccntgctgtcaggaccctaactctcagtgaccctaggagatgagcacacaccccctgaactcagagaccccagagtggtcacgtgatagcctagcaaacgctcttcattataagaaacaggaacgggcgtaggcaactgttctgggaagtcaggttacctcctgggccagggcaggacatggcccaggnaccctgccaggggccccggnaagccacctccccaccgtgcctcatnctcccgccctcctgggcgcntngnggtctcagcagcagccacactcccccctcaaccccacccactccccctgcctcctnggttcaaaactacgggccctgtgaccagccagaatctgtgaggcccagagtaagttcccatgagggagaagctggctagggcagccntaggccagcgcctaagctgtccctgcagtggtcagggcaggggggttgggggagggcaggcaacccagagtgagtccatcagcctagagggtccaagaagaacctgcgtgcccaccaggctgcagggcgggcctcctgcaggccgcggcatggaacagctgggatgccagcgctgggtagggggtgtggagggggtnaccntgagctgacgccangagggcccagcccctgnaggaaggccgaggggcnagacgggatgcagacttcaagggctacttcnggatttgtcctggggacagntgggggnagccctggntgtgnggggggcggtctctgaacacaggaaggaccagatgnanaggccccacagggctnggntcactaccagcagcgcccacgagctcctctggggcaggaggaccctggagcttctccctgtgacccggccccgctcttcacccgcagnagcaccttcggcctccaggtgcctttcttcttcttcgcggccatctgcttggtgagcctggtgttcacaggctgctgtgtgcccgagaccaagggacggtccctnggagcagatcgagtccttcttccgcacggggagaaggtccttcttgcgctaggtcaaggtccccgcctggagggggccaaacccccagtggctgggcctctgtgttggctacaaacctgcaccctgggaccaagaggcagcagtcatccctgccaccagccagagcacaggaagagcagtgtgatggggcctcagcagcgggtgcccctggctcgggacaggtagcactgctgtccagccacagccccagncccaggcagcccacagtgctgcnacgtagccatgggccgcaggagtgcatacaaccctgcantccagggacacggccctgctgggtgacctcaggcctagtccctttcccttgcgtgaaggacacgccccacagaaggctacggggaggactgagaggacagggctggaggcagccaagtaacgtagtcatatcatcgcgctctgatctggtggcatctggctgtgcnaaggaagacccggctttgccctcacaagtcttatgggcaccacagggaacatcctggacttaaaaagccagggcaggccgggcacnagtggctcacgcctgtaatcccagcactttgggaggccaaagcaggtggattacccaaggccaggagttcaagaccagcctggccaacatggtgaaaccccgtctctactaaaaaatacaaaaaagctgggtgtggtggcacacacccgtagttccagctacttgggaggctgaggcagcattgcttgaacccgggaggtggaggctgcaatgagctgagatcatgccattgcactccagcctgggcaacgagagtgaaactccgtccccaccccctgccaaaaaaaaaaaaaaaaaagccagggcaaaggnacctggcgtggccacnttcctcctgccccagcccaacctctgggaacaggcagctcct

SEQ ID NO: 9857 - DNA, 10827 bp, Homo sapiens
gcagaagggagcagagggcaggcacgcgagccacggccacgctttattgcttaagacgcacacagaacacagaggaacaaacaagaaggaaagggcgccacacacagcccagaccaggcaggagcggcccagccgccggaagagacgttccttgcaaggcagggcccctgctggacagcacgccccctgggcgacagggtcagggaccccaggactgcacagctgcagacttgctgggaacctgggacaggtgacacgcccactctcgcctgtggcccagggccttccacctctgcatccagccatgcacccaccatttccccacagggtacaggggcagccttccttgatccacagccaacccttctcctgctgtctctggctgtcagtgagacccctctggaaagggcagaagcaggcaagccaggcagaagggggcccggggtcccactacctgggtaggaatgagcagagggcgggcagagcccttgctccttgtgggaggtagacaggtctcactgcatacatgggacagatgtgtgcacccacacacatatacatacacacacacacacacacacacacacagccctttgaacccagcactggcctgaggaaggtggccccggaggaaccctgaaggcacatgtccaccaggctataatgcccctgccaccctggggctcagctggccagactcccaggggtgggatgctgctgacccaggagcccaccaagtccccagggcagtactgggcagggcccagaaaaccccacgcccagcccaccagcctgccactcctggcctcagatgccactcccggcctcagatgccactcccagcctcagacgcagatgggcccgagaggtgttcctgggaaacagttcacttagcaagacccagtacctgcgctccagaagctcagcgcaggcccagcctggggttggccccagatggaatatcttccacacccgcccgcttctgccaagccccacctgggctaagccaggcccgaccaggcacctgcccgatggctgagagccagcctcacggtcagagaggccagcgggctgaggccacagggcagagggaatatgggggtgcacatcctgggcaccagctctctgcatcctccctgggtaggcctggctccggacagcctggcacccagggcagtggggacagctctgtgtggggaggtgactgtggcctctgcccagttcttaaaaggcagaagctccctgagggcagggcttgggcaggccagcaggagcacctgagtggggctgaggtcagacccgctaacccactaatggggctgggctgtggctgatgttgacggggccacaccagggagagggtgggcaccctcggtgccagggagagcctgctctccccacttccttagcaccaaggccagcaggggcggggggtgatgggcagaacctaggggccccagcaggcccagggaggaggggcagccgaggggccttgaggtggcctgtccaaggttcccagggccagcagggagcatcccccacccagctgtccagtcactgccaaggctgcagttccaggtaccggggtgcaccttaggagccctgtgggcttcttcagaaggcagggtgacagtgggcgctgcaccctaggcagcagtgggaggttgctggcagcggcaggctgtcccaggccctggggctccacctgctaagagagctgggggaggtccctctgctcagtgcccaggtggcagggtcccacttgcccctcccctcaagccaggaccagcatctccaggggaagctgctcccaggtcacagcaggtcacaggcagccctgtctgtggtgtgagatctgcagacccacccagcagaggagtagggctgggtagtgtccacacagctgctgcaggctctgcctcaagtccagcagcccagaccctcacaccagcagccagtggctcctggcttaagccagtctggagaaaggagcagaggactccaggtgtagggacacgtgcaaaggcccctctccaggctgtgcctcagcgtggacagtccaggcctcacttggacccacacagagccagaagaggggacagggagggaggggcgcccagcccttcacagctccccctccagggtctccgcgagcttctcctcatccgcctgctgcctctgctgctggatcctggcataggagatcgcatcgcccctggggagagagagaggcagcgtcacgtggagcaccagccccatgcccacagccctcctgaccactgcccggttcctgccctgtgacccaggtgtgacctgcaggcattctgatttccccagagacaactgctggggtggcaaaggcctgtcttgtcccctctgagaatggcccaggctccctgggatgctgggctgtgaaggaaccagcctcagtctgggctctgcaggagagagggtggcaactgagtacaatgcccggtgcagacctgggaggggaaggggctcccaccagccatgtttttgctatccttgctgcaggccgtgacggggcaagactgggccacgcagaagtgttgtaagtcctctgtcttcacccactcgagctgagccctggaggcaccaatgagttactgggacctctgcctcggtctccactagctaaaaggggccactctcagatcctcctcactgaaggacttcggggggcggagggaggaaggccctgcccaggggctgggcctggcagacgcactttttgcccagagcagagagtccgtacagcacccccgtagcaaaggcgatggcgttgcccagcagcgtggtcagggtcaggctgatgacgatgggaacgaccgccatcctggggggaaagcagaggtcaagggggcactccggccccacagccaccacatccttccccgcttcccagactcggcccagcatccttcctagacacccagggcacaggaaggatccccaaaaatcaactgagacacagcttcagaaagtccttcatcagccctgaacttgtctgtaaaactgttccattctgggaataggatccaaagctttcatcagatttttgaaggggtctgtgatcccaaaaagagctaaacagtaacgagatggtccagtgccctcactgtgagaaaaactggccagaaagtgcctgtgacagagaatctggcttcccatccaggacctactagcttcgcgggcaagttactcggaatctccaccgcggagaggggatcaaagcttgtccgaggtcagtcatgttacctacacaatgctgaccaccacaggcactaaataaatgctctgagttatagagtaacaccagccacatcgccacaagtaaggtccctggaattcaaccacatggaacacagggtctcatcatgggagggctgcaggctgcggggtctgcggggtcggcccagaccttgctgcagtttggcgtcacctggtggcagggtccactggggcttaagcgtccccggggctgattctccatcctggctggaatttccaggccagcagcaattcctgggctaactgggccaggaggatacctgcagcctggaggccagcgctctgtcctgtcgcctccctagaggaggctgcctgtgcaggaggacaagactcgtggccaattgcattctacctcagtttccattcttgtagacatgtggttgtgagatttttctgtcgttaaaaaatttcaaaatgataaaataataatagaaattacaaagaaaaagaccacggcggggaaccttctgacaaaaacaaaattaaaggcaaacaagagcctggaaaaatagttgcaggaaatacaaccaaggatcatgaaatctttaatacagaaaacacactgaacttgctaagcagaacactgaggttcccacaggttaaaaagtaaactcgaaaattttcatatcagaaaatgcaatggaaacacgtgggaaaatatttttccctcttagataacaaatagataaatgcgaatgtgaagtggtgtgcagccctgggctggggtgggggcgggggagagactcaagggacctctttggaaagcaacgtagccacgcatcttaaaatatttttaatgatcagaatctttgacccagtaattccacacctgaaaatagatattaaggaaatcatcataaacacagaaaaagttttagcagacacatgtttatcacacctcgatttacaccagttaagaaattaagaacagcatgatacatccagctgaatgaatattcctgtattgaaagaatgttataaagtctgtggtgatgttcaaatgcttatatcattactctaagtgaaaaaaggcaggatacaaacttattcataatggttataactgtgttaaaagcaggcttttaaaaaatgcctgcagacaggaagcacacacatcagaagattagcaggcagcgggcttcgagtaacattgttctatattccaaattattgtgaatgaatttctatgatgtctagcatttttaaaatacagttttttgaacccctaaggacatgacactgcgtgtagataagagctttgtgatcctgtgttcttcgtgatttagatatggcacaagatggctccagaactaagcatgtggcttgtgctcttaccatcaaaactaccgggcctctctgaaggggaagcaagcttgcatctagacttctttctaaagataacctagacaataatgaatacagctgccaccagcctcctatgcactagaggcattattctaggagtttccgtgtattaagcttatcctgaaattagttccttcttatgactgagaggagaagtattacatattgatttcattgttagaaatgggaaaatttttaacaagtgtatttagagggcaaccacattttctgctctgcaacctgcttctcccccttcacgtcaggacatctagatgaacccactcttcggaaaggctgcagagaaacatgtcctacagacctactatcatctggttaacaactcccagtggacggaccaaaattccagacgcttcccactttctctccactgcacggatgctgccacacatgctcatatacctctgaaccttccagtgactacggcacagcgacagctgagttcctgggcgcagaaccactggggcacgttttggcagctatgagcaaatcactgtgcacaaaggcaatcccagtttacacttccacagagaggaactgaatacactgcccaccctcacctgacttttgggtcctattttgtcagtggggttttggggaactgtgtcacgggaccctgcccagcaacccctcacccgcagtagaagacagccttctgccaggagcgcagccggtccaccttctccgccactgtgtttgcaaactcgatgaactggcagcagaagggcgcctcacacagcaacaagatgaaggcattcatgctgcagggaccagggcaggagaagagcagcgactgacaatcccaggaggatgagggcggcccccagtgccagtgccataaggaatgccacctccctcaccctcctgccctcatccctcctcctctgggaagccgcccggctgctccagggcacctgctcgtacccctcggagagcctctgctgaagactccagcactccccagctgctcctgcacacccatctccccagctgaactgaacactcctagagggaagcccctgggcttctgcttccctttatcctcctcctgtgtgacatggaggaaaggggaccccacatcatggcactgctacaacgctgcggcaggttcatccacagatggagcactggcagctgtgtcctctgtctgctgttagtattatcgccatggccaccaaaagccgtcagtggcaccagcaccaggaaggctgccccaccagggaggcagagagctggagccacgcagtcccgaaacagtcacggagagctgcccacacacctgatgccaccggccccaggcccggggacacccaggggaagcccacgctggggaggaagaactttagcaagtccttgcatccagccctatgtttggggtgggaacagctaagccactggtgacggaaggtgtctgctgtggtcttggtattctctatgcatggataacaatcagttagcagacactgagccaggcccttctgtccccaggcctgggagaaaagtgccatcattatgcctgtgtaacagaaatgcaggctcaggacacctaagagccaccccaagcccggggcaggcactctcttcacaactcttaaccactgcacccgccccgagcctcccacacaccaggcctccaagcacgggctcactctgtgctgggccagcccttccacttcaaactcggccaggctccgactccaccccctgaagctgggctgggcgcctctctgtccatcccccttccctatccaccactggccagcacaagcactgaggaccccaccacagcaggcccccgaggctctccactggccataggtcactggggacgggacctgaatctcgtctagctctgtacccctcaaggcaccaagccccatgaggacactcatcaattcctggtgcaccgccacttctcacgtgccccaagccacacgggcctgccctcaccccgccttcccttccgatgggatggcgaaaccctggcaggaggtgggcatggaacgcacatgagggtgttctgaccacgggttcccgtgacaactccgacccgcctctcccatctatctttggcacagctccgagctcgagtgccctctcccagcagaccattcaacccagtcctcagccagccccaatgaacagccttccccaccccagtcctgggagctcccagagggcgagggccccagtatagtggacttggcatctgcagtctcagtggatgctccagaaatgtctggagcactgatggccttgcccctgcaccggatgaaggccggggtgggcattccctgggccttgacctctcattaggaaactaaacatggtgggggtatgaaggggaagaagccgcatgctgtggccagaaactcacatgcccgaggcacccaggctggagccagtagccatggcaaccacaaggatgcccactcccacggcccctgccactcctctgtcccgggaggtgcccagcagattcccgaccagcaagacccccggggtgggacggccatgcattactcacatcatccacacgccggccgcgatgttcagagggtggatggtgatgcagttgaagaggccagagatcgcgcaagcttgaaacaagagacacgggcaggagtcagcagggaggcaggcggagcccgctgggaaggcggccttgggagatgactggaaaggacgagagtctctgcggatgctcagcacacagttctcacagcacccagaagcctgccctctatcgtctgagacaggtgaggagacgcagagaggtgcagtgccttgcttgccccaggccccacagcaaggtggcagcaaggtggcaggtggatctcacagcatcctctccccgtttcagggctcagaggagctggccctctgaccccagctacatcaatatccacctcaaagggaggttaggattaaagaaggattaaagagtgaatgtccctcaaggattcaggccagtgctcccccaagactcagccttcggtaagggtcacttgccaccattcacagggccggccacacaagaagtcctctgactcagaaaatgtggcttggattttggttgggacaaggggtgcctctctcagaacagagatgggaaccaggtaagactgagcagcagttccagctctaacttcctcaccagccctgtgccactggcacgctatcttcatcttcctagacccgtttctcctcttgcacatgagcaagtcccacagcccagccacccaccgctgaaatgccataaggccaggaaggggagggggcatcgttttccaccccagaacgtggcttctctgatgctcagatgtgcagccttgacgccccgcctcccagctgcacctcaccagcagggtctcttgcacccaactccctcctccacccacagcctgcagcctggcttcaccaggaactccaggagccttcaaggcaggtccaaggaggtggctgctgggcagggagcaagcccaggccatcactgaggggggccttggaggcagcaattagcacccagctcattaaacttgcagcagctcctctgcacctgatccctccacctgggtctggaattctgctgttttccattttcccaggtaaccttatgcagacagcaggcaaagaagccagataaagtgagccgaactgcaatgggactgcttcatgggcccccagggtctccttctaaaacaaaggactcaagcgttgcactgctcctcagcacagccttagacatctgccttcagacagcaaggtgttccagaaccacaggtacacaggggcctgcctgtcctagcagagtgcccaaagggtgacacggctccctgcctctctgctgtgcctggcctcacctgacagctcggctgtgcttcctgctgcagtcagcatttggcctccagctccaaccctaccccagctgtccaacccacagccagccttgggggaggaccaggtgtcaagccagaccagcaggctccagccaggaatcctttagcaataaagggctggaggatgtccacttgggggcctcaatgctgatatcttccacgtgagggggctgtcaccatgcaatcctgtcccctcccaaggtatcacctccagatgctcttaggacccagggtagaccctctccaggtactctctctgatcccctcaccctggaggaggaaaaccttacccaaggaccagcccggcacacaacccttgtctgaactcctgccgcatctctaaaacaccctgcatttttgcattctaccctgtaatacagcattttgatgttcacataaccatgcccccaaaaatctgcagatgcaactgacaactcagggcaatgccgcaagtttctcctgaagcttcatctgtagacccaacagagccccaggaactcccaggaaaggcagaggtacctcactttgagaggcacagaactgagtaagactccacagcaaatctgggagtcggcagggccactgaccaagaaggaaggaggtgtggcctacaggccatagtcaggacctttcctttctcaccactgaccatgtcaccccactgcactgcccaccctaatctgcagggaaaacagctaaccagacatgacaggactggatccaatgcctaacttcaaacccaccagtctctactacaaagtcaaaagcgtacttgccctgaagagcagtgacacaaactcggggcctttttgtgatttgggggtagggcctgccctaccgtatccgttgcctctggataagggcatgcctagcgagggcagcacactcctagcccagcaccctcctgcctcaacctccctccaccctctacccacctggaaaggctgtggaacccaaggtgaccctgaaaaggtggtccttctggcaggattgctgatggggcctgccctgcccaggcccagagctagccctctctgccaggcaggcactgtttaaaccctgcagacatcctcgacagacattctctaagaccttgcccactccagtaatccacaagattgagggcagacaggaaaggaaagggtatcactcagacagacttgtctttccctggaaggccagctgtacggcttccattcactcctggagctgacctgcctccctctttgtccttttctggctgtgcttaagagcctagcttccctggcagcctaaggtcagggtctgtgactgggatgcgtgcggagaaggggaggaaggccggtgacaggcggctaaggcagcagcaacgggggagatatgagagcggacagaggacccagggagaggccgggccctcagctcactgccccgcggccccaggggccacctgtgccctgacaccacctgaccctcagcaaacttccgcccagtggcttcctgccagaaatctagccagccgtgcacccgcctcccttacaaacaatccttgcccaaaggttagcaatgtggctgccgtcacctacgcccaagtcaacagttgacgctttagtacgggccaggtgggcatgcgccccgtgagcatcaccgagaaagtctcacaaaagcccctggggagcggggggagggctcagtcacgtgccccaggccggtgccccacccccgcccccgcccccgccgcccccccgcccccgccgcccccccgcccccgccgcccccccgccctggggtttctggtccctccgggaatgttcccagaagcgccagcccagcccagcccggggtaccaaggcgcccaggcccgagcgggtaaccatggcaaccccaggacgccggctcccggcggccccgccattcctccgccccgggaggcgcccggcagacccccgacccccagcgggtcctttcccctggggccgccggggcggggcggggcagggcagggcgaggagcgcatgcgcggcggggccggcccctctccccgactggatactcacagactgcccccagcaccccagacaggcgacacagccagcggtaccaccacgtcatgccctcttcctgcgcgggcggcgcagagctggcggacgccccgggcgccccacctgagctgctcatggtgccaccgtcaggcgcagctcacagccctcacaaagggctcggtagccggccgcgtccgagccggcgcgctgcc

SEQ ID NO: 9858 - DNA, 128 bp, Homo sapiens
gcctgtaatcccagctacttgggaggctgaggcaggagaatcgcttgaactcgggaggtggaagttgcagtaagctgagatcgtgccactgcactccagcctggccaacagagcgagactccgtctca

SEQ ID NO: 9859 - DNA, 10828 bp, Homo sapiens
gcagaagggagcagagggcaggcacgcgagccacggccacgctttattgcttaagacgcacacagaacacagaggaacaaacaagaaggaaagggcgccacacacagcccagaccaggcaggagcggcccagccgccggaagagacgttccttgcaaggcagggcccctgctggacagcacgccccctgggcgacagggtcagggaccccaggactgcacagctgcagacttgctgggaacctgggacaggtgacacgcccactctcgcctgtggcccagggccttccacctctgcatccagccatgcacccaccatttccccacagggtacaggggcagccttccttgatccacagccaacccttctcctgctgtctctggctgtcagtgagacccctctggaaagggcagaagcaggcaagccaggcagaagggggcccggggtcccactacctgggtaggaatgagcagagggcgggcagagcccttgctccttgtgggaggtagacaggtctcactgcatacatgggacagatgtgtgcacccacacacatatacatacacacacacacacacacacacacacagccctttgaacccagcactggcctgaggaaggtggccccggaggaaccctgaaggcacatgtccaccaggctataatgcccctgccaccctggggctcagctggccagactcccaggggtgggatgctgctgacccaggagcccaccaagtccccagggcagtactgggcagggcccagaaaaccccacgcccagcccaccagcctgccactcctggcctcagatgccactcccggcctcagatgccactcccagcctcagacgcagatgggcccgagaggtgttcctgggaaacagttcacttagcaagacccagtacctgcgctccagaagctcagcgcaggcccagcctggggttggccccagatggaatatcttccacacccgcccgcttctgccaagccccacctgggctaagccaggcccgaccaggcacctgcccgatggctgagagccagcctcacggtcagagaggccagcgggctgaggccacagggcagagggaatatgggggtgcacatcctgggcaccagctctctgcatcctccctgggtaggcctggctccggacagcctggcacccagggcagtggggacagctctgtgtggggaggtgactgtggcctctgcccagttcttaaaaggcagaagctccctgagggcagggcttgggcaggccagcaggagcacctgagtggggctgaggtcagacccgctaacccactaatggggctgggctgtggctgatgttgacggggccacaccagggagagggtgggcaccctcggtgccagggagagcctgctctccccacttccttagcaccaaggccagcaggggcggggggtgatgggcagaacctaggggccccagcaggcccagggaggaggggcagccgaggggccttgaggtggcctgtccaaggttcccagggccagcagggagcatcccccacccagctgtccagtcactgccaaggctgcagttccaggtaccggggtgcaccttaggagccctgtgggcttcttcagaaggcagggtgacagtgggcgctgcaccctaggcagcagtgggaggttgctggcagcggcaggctgtcccaggccctggggctccacctgctaagagagctgggggaggtccctctgctcagtgcccaggtggcagggtcccacttgcccctcccctcaagccaggaccagcatctccaggggaagctgctcccaggtcacagcaggtcacaggcagccctgtctgtggtgtgagatctgcagacccacccagcagaggagtagggctgggtagtgtccacacagctgctgcaggctctgcctcaagtccagcagcccagaccctcacaccagcagccagtggctcctggcttaagccagtctggagaaaggagcagaggactccaggtgtagggacacgtgcaaaggcccctctccaggctgtgcctcagcgtggacagtccaggcctcacttggacccacacagagccagaagaggggacagggagggaggggcgcccagcccttcacagctccccctccagggtctccgcgagcttctcctcatccgcctgctgcctctgctgctggatcctggcataggagatcgcatcgcccctggggagagagagaggcagcgtcacgtggagcaccagccccatgcccacagccctcctgaccactgcccggttcctgccctgtgacccaggtgtgacctgcaggcattctgatttccccagagacaactgctggggtggcaaaggcctgtcttgtcccctctgagaatggcccaggctccctgggatgctgggctgtgaaggaaccagcctcagtctgggctctgcaggagagagggtggcaactgagtacaatgcccggtgcagacctgggaggggaaggggctcccaccagccatgtttttgctatccttgctgcaggccgtgacggggcaagactgggccacgcagaagtgttgtaagtcctctgtcttcacccactcgagctgagccctggaggcaccaatgagttactgggacctctgcctcggtctccactagctaaaaggggccactctcagatcctcctcactgaaggacttcggggggcggagggaggaaggccctgcccaggggctgggcctggcagacgcactttttgcccagagcagagagtccgtacagcacccccgtagcaaaggcgatggcgttgcccagcagcgtggtcagggtcaggctgatgacgatgggaacgaccgccatcctggggggaaagcagaggtcaagggggcactccggccccacagccaccacatccttccccgcttcccagactcggcccagcatccttcctagacacccagggcacaggaaggatccccaaaaatcaactgagacacagcttcagaaagtccttcatcagccctgaacttgtctgtaaaactgttccattctgggaataggatccaaagctttcatcagatttttgaaggggtctgtgatcccaaaaagagctaaacagtaacgagatggtccagtgccctcactgtgagaaaaactggccagaaagtgcctgtgacagagaatctggcttcccatccaggacctactagcttcgcgggcaagttactcggaatctccaccgcggagaggggatcaaagcttgtccgaggtcagtcatgttacctacacaatgctgaccaccacaggcactaaataaatgctctgagttatagagtaacaccagccacatcgccacaagtaaggtccctggaattcaaccacatggaacacagggtctcatcatgggagggctgcaggctgcggggtctgcggggtcggcccagaccttgctgcagtttggcgtcacctggtggcagggtccactggggcttaagcgtccccggggctgattctccatcctggctggaatttccaggccagcagcaattcctgggctaactgggccaggaggatacctgcagcctggaggccagcgctctgtcctgtcgcctccctagaggaggctgcctgtgcaggaggacaagactcgtggccaattgcattctacctcagtttccattcttgtagacatgtggttgtgagatttttctgtcgttaaaaaatttcaaaatgataaaataataatagaaattacaaagaaaaagaccacggcggggaaccttctgacaaaaacaaaattaaaggcaaacaagagcctggaaaaatagttgcaggaaatacaaccaaggatcatgaaatctttaatacagaaaacacactgaacttgctaagcagaacactgaggttcccacaggttaaaaagtaaactcgaaaattttcatatcagaaaatgcaatggaaacacgtgggaaaatatttttccctcttagataacaaatagataaatgcgaatgtgaagtggtgtgcagccctgggctggggtgggggcgggggagagactcaagggacctctttggaaagcaacgtagccacgcatcttaaaatatttttaatgatcagaatctttgacccagtaattccacacctgaaaatagatattaaggaaatcatcataaacacagaaaaagttttagcagacacatgtttatcacacctcgatttacaccagttaagaaattaagaacagcatgatacatccagctgaatgaatattcctgtattgaaagaatgttataaagtctgtggtgatgttcaaatgcttatatcattactctaagtgaaaaaaggcaggatacaaacttattcataatggttataactgtgttaaaagcaggcttttaaaaaatgcctgcagacaggaagcacacacatcagaagattagcaggcagcgggcttcgagtaacattgttctatattccaaattattgtgaatgaatttctatgatgtctagcatttttaaaatacagttttttgaacccctaaggacatgacactgcgtgtagataagagctttgtgatcctgtgttcttcgtgatttagatatggcacaagatggctccagaactaagcatgtggcttgtgctcttaccatcaaaactaccgggcctctctgaaggggaagcaagcttgcatctagacttctttctaaagataacctagacaataatgaatacagctgccaccagcctcctatgcactagaggcattattctaggagtttccgtgtattaagcttatcctgaaattagttccttcttatgactgagaggagaagtattacatattgatttcattgttagaaatgggaaaatttttaacaagtgtatttagagggcaaccacattttctgctctgcaacctgcttctcccccttcacgtcaggacatctagatgaacccactcttcggaaaggctgcagagaaacatgtcctacagacctactatcatctggttaacaactcccagtggacggaccaaaattccagacgcttcccactttctctccactgcacggatgctgccacacatgctcatatacctctgaaccttccagtgactacggcacagcgacagctgagttcctgggcgcagaaccactggggcacgttttggcagctatgagcaaatcactgtgcacaaaggcaatcccagtttacacttccacagagaggaactgaatacactgcccaccctcacctgacttttgggtcctattttgtcagtggggttttggggaactgtgtcacgggaccctgcccagcaacccctcacccgcagtagaagacagccttctgccaggagcgcagccggtccaccttctccgccactgtgtttgcaaactcgatgaactggcagcagaagggcgcctcacacagcaacaagatgaaggcattcatgctgcagggaccagggcaggagaagagcagcgactgacaatcccaggaggatgagggcggcccccagtgccagtgccataaggaatgccacctccctcaccctcctgccctcatccctcctcctctgggaagccgcccggctgctccagggcacctgctcgtacccctcggagagcctctgctgaagactccagcactccccagctgctcctgcacacccatctccccagctgaactgaacactcctagagggaagcccctgggcttctgcttccctttatcctcctcctgtgtgacatggaggaaaggggaccccacatcatggcactgctacaacgctgcggcaggttcatccacagatggagcactggcagctgtgtcctctgtctgctgttagtattatcgccatggccaccaaaagccgtcagtggcaccagcaccaggaaggctgccccaccagggaggcagagagctggagccacgcagtcccgaaacagtcacggagagctgcccacacacctgatgccaccggccccaggcccggggacacccaggggaagcccacgctggggaggaagaactttagcaagtccttgcatccagccctatgtttggggtgggaacagctaagccactggtgacggaaggtgtctgctgtggtcttggtattctctatgcatggataacaatcagttagcagacactgagccaggcccttctgtccccaggcctgggagaaaagtgccatcattatgcctgtgtaacagaaatgcaggctcaggacacctaagagccaccccaagcccggggcaggcactctcttcacaactcttaaccactgcacccgccccgagcctcccacacaccaggcctccaagcacgggctcactctgtgctgggccagcccttccacttcaaactcggccaggctccgactccaccccctgaagctgggctgggcgcctctctgtccatcccccttccctatccaccactggccagcacaagcactgaggaccccaccacagcaggcccccgaggctctccactggccataggtcactggggacgggacctgaatctcgtctagctctgtacccctcaaggcaccaagccccatgaggacactcatcaattcctggtgcaccgccacttctcacgtgccccaagccacacgggcctgccctcaccccgccttcccttccgatgggatggcgaaaccctggcaggaggtgggcatggaacgcacatgagggtgttctgaccacgggttcccgtgacaactccgacccgcctctcccatctatctttggcacagctccgagctcgagtgccctctcccagcagaccattcaacccagtcctcagccagccccaatgaacagccttccccaccccagtcctgggagctcccagagggcgagggccccagtatagtggacttggcatctgcagtctcagtggatgctccagaaatgtctggagcactgatggccttgcccctgcaccggatgaaggccggggtgggcattccctgggccttgacctctcattaggaaactaaacatggtgggggtatgaaggggaagaagccgcatgctgtggccagaaactcacatgcccgaggcacccaggctggagccagtagccatggcaaccacaaggatgcccactcccacggcccctgccactcctctgtcccgggaggtgcccagcagattcccgaccagcaagacccccggggtgggacggccatgcattactcacatcatccacacgccggccgcgatgttcagagggtggatggtgatgcagttgaagaggccagagatcgcgcaagcttgaaacaagagacacgggcaggagtcagcagggaggcaggcggagcccgctgggaaggcggccttgggagatgactggaaaggacgagagtctctgcggatgctcagcacacagttctcacagcacccagaagcctgccctctatcgtctgagacaggtgaggagacgcagagaggtgcagtgccttgcttgccccaggccccacagcaaggtggcagcaaggtggcaggtggatctcacagcatcctctccccgtttcagggctcagaggagctggccctctgaccccagctacatcaatatccacctcaaagggaggttaggattaaagaaggattaaagagtgaatgtccctcaaggattcaggccagtgctcccccaagactcagccttcggtaagggtcacttgccaccattcacagggccggccacacaagaagtcctctgactcagaaaatgtggcttggattttggttgggacaaggggtgcctctctcagaacagagatgggaaccaggtaagactgagcagcagttccagctctaacttcctcaccagccctgtgccactggcacgctatcttcatcttcctagacccgtttctcctcttgcacatgagcaagtcccacagcccagccacccaccgctgaaatgccataaggccaggaaggggagggggcatcgttttccaccccagaacgtggcttctctgatgctcagatgtgcagccttgacgccccgcctcccagctgcacctcaccagcagggtctcttgcacccaactccctcctccacccacagcctgcagcctggcttcaccaggaactccaggagccttcaaggcaggtccaaggaggtggctgctgggcagggagcaagcccaggccatcactgaggggggccttggaggcagcaattagcacccagctcattaaacttgcagcagctcctctgcacctgatccctccacctgggtctggaattctgctgttttccattttcccaggtaaccttatgcagacagcaggcaaagaagccagataaagtgagccgaactgcaatgggactgcttcatgggcccccagggtctccttctaaaacaaaggactcaagcgttgcactgctcctcagcacagccttagacatctgccttcagacagcaaggtgttccagaaccacaggtacacaggggcctgcctgtcctagcagagtgcccaaagggtgacacggctccctgcctctctgctgtgcctggcctcacctgacagctcggctgtgcttcctgctgcagtcagcatttggcctccagctccaaccctaccccagctgtccaacccacagccagccttgggggaggaccaggtgtcaagccagaccagcaggctccagccaggaatcctttagcaataaagggctggaggatgtccacttgggggcctcaatgctgatatcttccacgtgagggggctgtcaccatgcaatcctgtcccctcccaaggtatcacctccagatgctcttaggacccagggtagaccctctccaggtactctctctgatcccctcaccctggaggaggaaaaccttacccaaggaccagcccggcacacaacccttgtctgaactcctgccgcatctctaaaacaccctgcatttttgcattctaccctgtaatacagcattttgatgttcacataaccatgcccccaaaaatctgcagatgcaactgacaactcagggcaatgccgcaagtttctcctgaagcttcatctgtagacccaacagagccccaggaactcccaggaaaggcagaggtacctcactttgagaggcacagaactgagtaagactccacagcaaatctgggagtcggcagggccactgaccaagaaggaaggaggtgtggcctacaggccatagtcaggacctttcctttctcaccactgaccatgtcaccccactgcactgcccaccctaatctgcagggaaaacagctaaccagacatgacaggactggatccaatgcctaacttcaaacccaccagtctctactacaaagtcaaaagcgtacttgccctgaagagcagtgacacaaactcggggcctttttgtgatttgggggtagggcctgccctaccgtatccgttgcctctggataagggcatgcctagcgagggcagcacactcctagcccagcaccctcctgcctcaacctccctccaccctctacccacctggaaaggctgtggaacccaaggtgaccctgaaaaggtggtccttctggcaggattgctgatggggcctgccctgcccaggcccagagctagccctctctgccaggcaggcactgtttaaaccctgcagacatcctcgacagacattctctaagaccttgcccactccagtaatccacaagattgagggcagacaggaaaggaaagggtatcactcagacagacttgtctttccctggaaggccagctgtacggcttccattcactcctggagctgacctgcctccctctttgtccttttctggctgtgcttaagagcctagcttccctggcagcctaaggtcagggtctgtgactgggatgcgtgcggagaaggggaggaaggccggtgacaggcggctaaggcagcagcaacgggggagatatgagagcggacagaggacccagggagaggccgggccctcagctcactgccccgcggccccaggggccacctgtgccctgacaccacctgaccctcagcaaacttccgcccagtggcttcctgccagaaatctagccagccgtgcacccgcctcccttacaaacaatccttgcccaaaggttagcaatgtggctgccgtcacctacgcccaagtcaacagttgacgctttagtacgggccaggtgggcatgcgccccgtgagcatcaccgagaaagtctcacaaaagcccctggggagcggggggagggctcagtcacgtgccccaggccggtgccccaccccccgcccccgcccccgccgcccccccgcccccgccgcccccccgcccccgccgcccccccgccctggggtttctggtccctccgggaatgttcccagaagcgccagcccagcccagcccggggtaccaaggcgcccaggcccgagcgggtaaccatggcaaccccaggacgccggctcccggcggccccgccattcctccgccccgggaggcgcccggcagacccccgacccccagcgggtcctttcccctggggccgccggggcggggcggggcagggcagggcgaggagcgcatgcgcggcggggccggcccctctccccgactggatactcacagactgcccccagcaccccagacaggcgacacagccagcggtaccaccacgtcatgccctcttcctgcgcgggcggcgcagagctggcggacgccccgggcgccccacctgagctgctcatggtgccaccgtcaggcgcagctcacagccctcacaaagggctcggtagccggccgcgtccgagccggcgcgctgcc

SEQ ID NO: 9860 - DNA, 186 bp, Homo sapiens
  SITE (112): n equals a,t,g, or c
  SITE (114): n equals a,t,g, or c
  SITE (135): n equals a,t,g, or c
  SITE (139): n equals a,t,g, or c
  SITE (172): n equals a,t,g, or c
  SITE (175): n equals a,t,g, or c
  SITE (183): n equals a,t,g, or c
ggagcagagggcaggcacgcgagccacggccacgctttattgcttaagacgcacacagaacacagaggaacaaacaaggaggaaagggcgccacacacagcccagaccaggncnaggagcggcccagccgccggnaagnagacgttccttgcaaggcagggcccctgctggnacnagcacgcnccc

SEQ ID NO: 9861 - DNA, 1948 bp, Homo sapiens
tatgtaaacattaatttaacatggctgttgcattttaattatcaaaaatgtttaaaatgctttaagatgacacatagagaacatacacatacatacaaattagtgcatttgtaatttgttaaatttgaaatgaactattaccttgaaatatagtctttaaaaatttttaatggttaaagattaaattgaatgaaactgtagtctaatggtaactgatgatctgaatccgtctctctgataacctcctttccattttgaaaatgtgtcttattatacatggaagctagtaactacgtgaatgctgttggcaggatgagggtctgggtacctcagtctcttgtcctgtttccttcccccaaatccaccattgtgaagttgccaaccccctgccgccttcccctgccaagtacatgttgtcagagtcagccctataatgttcatttcccctcttgtttgtgggattatggatctctgcagaaatctgcatgccaattaacccatttctaaagcagaatccattttgcatgtcacaatcaagatgtacttggcaatctaagacacactgggagactgtaagaggaattaatatagaaaagctcttaattataataacatttggaagaaatttttcctttgttttgtaaagtggctaaggttgtaggagtgtgtggtatttattaccttttaaatgaactgtaaatttgccttagaaatttgtttaaaaggctagcaagtgagacccttgaggatgatcatatactaataaagattaccaaaagaaacttcttgtcctgttaggtcagtgttatgatttaatggttttaattacttaaccaattttaagaattgacaatttttaaaaatatttttttctaccattctaaagtaatgtcttttgttgtgggtttatgtgtaactacaggattttggaacataaacattttgaaggatagtcaatggtatttagtcttggatataaaaatagagaaaatttatagctttatgttattaaaataatttatcacacagagtgatttgaggttttcgcagagtagatttgtttgactcatggtttattagtctggattacttaagaacaatatgttgattttaatgttaattcccactaaatatataatattgataaatacatgtgaaattaatattgtttggaaaatgtagaggacacagctgggaattatgaatgcttttttcttaataggtttggtgtgtgtggctttgaatggttctgctgatgcatcatggaaagacagcagggaactgtagcctgccatcaaaactgtatcaactcttttaatgagcatgtgactgtattaggtacattttgaagaatataagtactgatgataaagtctagtatgcataataggattttggaggcatttcaggaattttccttttatagtatgctttttaggcatctgtatgtgtaatatcatagtatcatttattgctgggatggatcgaaaagcactgcttttacttttctgataagtatcaaaatgattttccagtaccaacttgactggcttttaattattgtcacacacacacaaaattcaactcctcaaggtttgggaaaattgtgtatttttttgtatacaagataaaagtgtcataaaaaggaatggatgaattgttgataggaacattagcagttaatttttacctgatactgagtttactgtaaaataggaaatgcataggaaggaatacctcctaaataatatgccttatagaatgatgaaatcttaccatagttcatactgaaaatgttgtttatttaaaagtattgtggagtgttgaaaataaagatacacaataagtattttctgaagagaaaattaatgaaggtatttaatgatataggaaataagtgacaagttaaagtccattttgtttcaataaaggagttgtgcaaactcaa

SEQ ID NO: 9862 - DNA, 193 bp, Homo sapiens
ggaaaagctatggggatgtattgagtatctctttgcccaatgacgtattagtcgtattaaatatggaaagtgcctttgattcgccgtgcccatgggagaaggcataggaatggccttttcccacctgtaatcagagagcaggtgtttcaagaacgcctcaatatgtttgcgatctctcacgcagcctttcagg

SEQ ID NO: 9863 - DNA, 193 bp, Homo sapiens; identical to SEQ ID NO: 9862

SEQ ID NO: 9864 - DNA, 1417 bp, Homo sapiens
actgaatgagtattcttttaagggtggtggacaagcaaaggtttggtagcatcacatttttaatttcacagggaaaatgggtatgaaacatcttcccaagtacatcttagactgccagctgacagcaagccataatgctccccagctcttgggccctacaccccctctcccccatccccgctttagttctttgtcattgctcatggacagctggtttggggaccaggtgcagatgatgggaggtgtctgaaaaacagcaagtgagaaatgctagttttgttgttttaagttgcactgatgactccagtagttatctgtgctgcttgtgataatttataaggcaatgataacgaattaaacatacaaaagattattatcttccacaggaaaaaaaaactgcaaacttgtgacaccatttatgatccacttagtcttgagatactgagtaatagaactttctccttttaggctgagttatgaacttcggtttggtttctttctgcaatccctgcagggccataaattcttggcccttaagactgggtggcccataacagactcagtgataccatcagtaaccacaattcacactggagtcaagttatctgattcccacaccagttggagaactggagattccttagaacttttaactgtcatgttttcaaagttgacatggaaaattttacatgaagcttaaaaatacaactaatctgtggtgatagagacgagaagagttaagctctaaaattagaagagcagttcgttttgaggcagcactgattgggagggagcatggagtatataattacacatttctatgtaatgtaaaaatgtatagatttaagatttatgcattttatgtaaattttactacaataaaacgaaaatgaaagaagacagatcatagtttaatcaaatattgtgtacaaagtaatttctgttaaacatttatatttttatgtgtatatgtatcttttacatgtatgtgttaaggatatgcattaaaatggtaataacttcctctgcctgttgggataatggagagttttgttactttttgtctttttttaaaacatgttcttcaataataatgtattgcttttgtaattatgaaaaacaaaagttattttgtaaatctttgttactgataagagatgggtattctgttaactactcaattctcatgtaggaaaacaaaataaataatgtctatttgataaatcgagaaacagaagcattacttagaaatctgagttacctctaaaataatgactggcatttgaagttgaggatgggtcttgagttcctgtgattttaagctcttggatatgagggttgggtgagttcctctttttctcttttaaaatatatgtatgtttaactttgctaaataaaatttaaaagatgcaatgta

SEQ ID NO: 9865 - DNA, 772 bp, Homo sapiens
agaagggccttgtctgccccggtctgaataccccaggcggggtcggaaagcgggtcacagaagagcccagtaaactgcaggggtgcagctcgtctccaggaaccggcaacccccagggccgcacaagccggtaacaacccataatccgatcctgtcttcgggatcagaagagaggacagctggcccgcgcgccagctcagttcctcctccgcattcttcaggaggagccccagaaacgcacttccgccgcgcgggcctgcctccacgcagggcgcgtcctaggccggttcatttccgcccagcgctttctgtggctaggggagtcaggggtttccttttcccttattcgggctcttatgttacccccgttttccgttgaacccttttctcccctcttgccctccaaaaaagcagtctgctgccgctcccgacttttctcgctgagacaccgtcagctcactccgagcccagcacagcggccatcttcggtaaattctggcagcagcccgcctgttcattgtcctgtgtgcccagaggaaagaactactcatttttcgtgatcaagctaggggaggcaggagcaataatggccctgctataggactggcttttatttgaattccaactcttctgccaccttaaccagctgtatccagattttaaaagttaatctatccgagcctcttattaaatattaggttgatgagatgatgcatgcaaagcgcttagaacagtactaggcataaagcgtccgacataaaggttaagtaaa

SEQ ID NO: 9866 - DNA, 1417 bp, Homo sapiens; identical to SEQ ID NO: 9864

SEQ ID NO: 9867 - DNA, 772 bp, Homo sapiens; identical to SEQ ID NO: 9865

SEQ ID NO: 9868 - DNA, 1771 bp, Homo sapiens
tgccggttggccaggaagtaggccacttgagttacaagacatttctgtttgaggtttctgaactgctgtttgttctctgccagctgggggcgcgatttcttgttgatttctagaatgttcatctctgccttctcaccggaccaagggccggcagataccaccatgctgacgtttgtggcagaagaggtggggccagggactggggagaagacacccaaacacacgatgggttaaaaactggtgaaatcaaataggtttaatcaggactgagggatgtcagtaactgaaattcttaacttactgttgagaaaaatgtgatcagtccccgcagcactttaggatccttaacgacaaaaacaatgttcgaggtgcctgagctcagagctgaaggcactgccaatagctcagtctccgacaagagtgaggccagtgtgccaggtaacggtctgcagttgcaataacagattagaaggtgggggtgtcatggaatcttaggagccctgcattccaattgcccaggctttgctgaaacacaggcaccctcgtctcacctgagggtcaccaccaatggggatcattcctctaaaattcactctcagtgttcgtgtacccttgtgacaatgccacagacccatctctttcccaatacatctaagcacattcctcattgtttatcgcttgtttgtacaacaccatccaggcagaaccagtttcccaacaggttatattttcttaacggtagtcatgaagtcaccccacctgctctcagttaaaacagatcttaaggcttttccacaagtgtaagatatcaaacttttagcctgccctgatttcctctgggtcttctgcagttttgtctgtatccactagaaagtgaatgaataactcatttgtaaaaaatgttgtctttcctgtctcagtattcttcttgctgattcccattgttacgttgatttcttttttctcactggggcaccatctttgcttttcattacactctagaccagtttgacatccctatgtccagagctcttcctctatgtgggttgatttggtttttgatgtcactgagcgctacattttatactcgtcacttatggatgtcattctagtatcacaagagctcttttcaaggtatcaagtgaccaaaatcatttatatagagatctcctgaacacatgtgtgaccatctatcttgggaagtttcataaacctgatgctattttgttgtttccattttgttttcccatatactgaaaagaacagggccatgagcggcggttcttatggaatgtggtttgatatctatttcgttgggttggactaacaccattgatttttggtttcattccactaacagaacatggcaagatcaaggttatggtcacggttggttggtgatcctcagtgttgcagtagagggtgagtttgagatgagaggaatgagtaggaaagagtgatcccctgaaccacctcctcactttctcagctttcatccccacctaggttttgtgagcctggaacttgggagactgttctgtagcccaggtctcctaagattggctgctggacttgcctgagttgagggtgcagtgagtgtgatcctgggctgcccagcattcatgtggtagtgaaggaaggaggactggatcaatcccatttcaaagcatgtctctctgcactccacgctgtcctccaatgacactgtaaggaaaccgctttaagacgtatcaacggctttaagtaaatgtattttctggcatctgggaga

SEQ ID NO: 9869 - DNA, 1772 bp, Homo sapiens
tgccggttggccaggaagtaggccacttgagttacaagacatttctgtttgaggtttctgaactgctgtttgttctctgccagctgggggcgcgatttcttgttgatttctagaatgttcatctctgccttctcaccggaccaagggccggcagataccaccatgctgacgtttgtggcagaagaggtggggccagggactggggagaagacacccaaacacacgatgggttaaaaactggtgaaatcaaataggtttaatcaggactgagggatgtcagtaactgaaattcttaacttactgttgagaaaaatgtgatcagtccccgcagcactttaggatccttaacgacaaaaacaatgttcgaggtgcctgagctcagagctgaaggcactgccaatagctcagtctccgacaagagtgaggccagtgtgccaggtaacggtctgcagttgcaataacagaattagaaggtgggggtgtcatggaatcttaggagccctgcattccaattgcccaggctttgctgaaacacaggcaccctcgtctcacctgagggtcaccaccaatggggatcattcctctaaaattcactctcagtgttcgtgtacccttgtgacaatgccacagacccatctctttcccaatacatctaagcacattcctcattgtttatcgcttgtttgtacaacaccatccaggcagaaccagtttcccaacaggttatattttcttaacggtagtcatgaagtcaccccacctgctctcagttaaaacagatcttaaggcttttccacaagtgtaagatatcaaacttttagcctgccctgatttcctctgggtcttctgcagttttgtctgtatccactagaaagtgaatgaataactcatttgtaaaaaatgttgtctttcctgtctcagtattcttcttgctgattcccattgttacgttgatttcttttttctcactggggcaccatctttgcttttcattacactctagaccagtttgacatccctatgtccagagctcttcctctatgtgggttgatttggtttttgatgtcactgagcgctacattttatactcgtcacttatggatgtcattctagtatcacaagagctcttttcaaggtatcaagtgaccaaaatcatttatatagagatctcctgaacacatgtgtgaccatctatcttgggaagtttcataaacctgatgctattttgttgtttccattttgttttcccatatactgaaaagaacagggccatgagcggcggttcttatggaatgtggtttgatatctatttcgttgggttggactaacaccattgatttttggtttcattccactaacagaacatggcaagatcaaggttatggtcacggttggttggtgatcctcagtgttgcagtagagggtgagtttgagatgagaggaatgagtaggaaagagtgatcccctgaaccacctcctcactttctcagctttcatccccacctaggttttgtgagcctggaacttgggagactgttctgtagcccaggtctcctaagattggctgctggacttgcctgagttgagggtgcagtgagtgtgatcctgggctgcccagcattcatgtggtagtgaaggaaggaggactggatcaatcccatttcaaagcatgtctctctgcactccacgctgtcctccaatgacactgtaaggaaaccgctttaagacgtatcaacggctttaagtaaatgtattttctggcatctgggaga

SEQ ID NO: 9870 - DNA, 317 bp, Homo sapiens
ttttttttggtttttgtgatgctggaagaatgaccagaatgagtcataggaagagtatacattcctgtagtattgtccaggacagaggtgtgacctcctagagtactgggaccaaaattcccaagtgtctgcaaccttgctttaacagtatggggagatcacctctatcacctggaattcccctggaactctggaatatacaagagaagtatgagacttgggtctttccttggctgggtttaattcactcttctagggaataccagtgattctcactaagactttggccttttcataagcacatgtgcattttatgg

SEQ ID NO: 9871 - DNA, 98 bp, Homo sapiens
tgagacggagtctccctgtcacccaggctggagtgcagtggcatgatctcagctcactgcaagctccgcctcccgggttcacgccattctcctgcctc

SEQ ID NO: 9872 - DNA, 1282 bp, Homo sapiens
tttcctttttttttttggtttttgtgatgctggaagaatgaccagaatgagtcataggaagagtatacattcctgtagtattgtccaggacagaggtgtgacctcctagagtactgggaccaaaattcccaagtgtctgcaaccttgctttaacagtatgggagatcacctctatcacctggaattcccctggaactctggaatatacaagagaagtatgagacttgggtcttcccttggctgtgtttaattcactcttctatggaataccaatgattctcactaagactttggccttttcataagcacaatgtgcattttatggagaagattttacacttgtgctctatatagaaagaataaatatgagcagtggtttaggttttatgccctggacttaatatatttctgattcctgttttgagattaaattctcatgtaaatagaaaaatgcttattatttctcataaggccaagtgtgttattagtttggatttttgaagatgaagcacaaacttttgattttatctttgtctgtctcttgtcagcgccactcgttgtctctcagtatgacctggacttgcccctgcacttaccctcgtcctgctgaaccatctccatgcactgtccgattccatcagtgattcgggctcctcccaaggctccctgaaaagggcatggaggtcaggacgttaggcacattccggacacaaaggcaacccatactgtagagtgggcagctgtgtttccacttccctaatattccagtggtgtcctaaaactgaaaggaacactttccctttttaggggtctgttcttcatgtctcagtgcctctgatctagtgaacacaactgtcctgaatgtgaaagaacttgctaaatttctagtttcttgttaggtggctaaaatacatttataagacttccttactcacccatgactgctgaagtttgaattcttagcagtacgattctttttcttgtaaggtcagcagcttaagaaagattggccatcttcctgtgcaaaaagaggcaaacttcatttctactcaaagcatgcttgaatttggaattagggcttccactcttccgaagttggagtgtcactgcgacaggcatgtgtcccgaaaggctcgtgtctctgctatactcaaagtttaaatggagcccagcaagccagatgtcctttacttctaggttccctcaaaagtttctcctctgcttcagagactgcattgaaaatattcttgttctgctgttgtgttttggctttggaatgatg

SEQ ID NO: 9873 - DNA, 496 bp, Homo sapiens
cctgcaggccctgggcgctttcctcctggcagctgtgcccccacccgaccggaccgctccctgcaaccagagagccctcacaccagcaacaccccccagcctgctccctcctcgtgtgcgcgaaactcatggcactggcttgacggctttctctgaaaccctctgattccgcctggcccatccacactgtcccttcccggccagggctcatctcctatgcctggaccaaacagcgtagtctccagtctccctgatctccccacacgtggccccacccatcctctgaagcagccccaggaggcagcagtgacttcacacttctagtgcccggccctcccggccctcctctctgggcttgcttgccagggtcctcccaacctgactgctgcctcccacctcctctccgcccctggagctctccagccgcagccgcggggcctgcttgggattctcctctgctggcatcatccctgcctgcctcagccttcccaggccc

SEQ ID NO: 9874 - DNA, 485 bp, Homo sapiens
ctccttgataacgtttcataagctcgggcttgggccccagcgtctttcctttcctttgtccctgtgcgatttaaaacatcccgcccagggagccctggtctgggccctgtgggcgctggcggcccggctcagagggcagctctgcggcctgattaatggccccgagtgaccctgggccgctgtggggatggagccgcgtgagctcacagccgctctccgcccgtgtttcaccccctagagttcacacagtaaatgaggaattgtctacgactcaacaagcaggtgttttcaatacatctacttataagctagctacttttttgaaaggtctatgctactatttaacctggtgactaagtcgattggaaacaatgaaacaaattattacaggaatccagacgacatccctccctccccctttcctgcttcctcacccgctgtagcaagcaggtgtggagtcgagtcggaggcaggcgctggctgcg

SEQ ID NO: 9875 - DNA, 1433 bp, Homo sapiens
ttaacttatctgagcctctattacttctaaaaagtgcataaagtgcagactaagacagtttttttggcaaaattcagtcagactacatcaagtaaactccctaagtctcctagtataattcatggcacaaaaaattggggaaaaaacagggaggatatgattataagttcagtttatgttttttgttgagtgaatgtctccagtcatagagatgcaagtgtagatacacagtaagagtagtatgaatgggagacaccttggaaggctatttcttccttccttcattcagttggtcactcagtgaactatcatgaattgagcaccgcctctgtttcttatcaacaaaggagactgcggaaaagaagagtgactaagatctctgaagaagggaaaagctagatgactgggccacaagaggaaaaaaagcagcaagacagttacaatggtttctggtcccacttttataaacacacacacacacacacacacacacacacacacacacacacacaaaatcatttaatcatttttaagtatttaatcattttttaaaaatctgtgatgctttacctgggcatgtctaggcaggtcctcctttgctaggacgtgcccttttctgtcccggaatactctaaacttggcattttggcagcgtgaagttttcccgttgtgactttctccttgttcccttttctcctccttctttgcagacaatgagtagccactgctgtttgccctggcccatcaatgagaagatctgctcttagagccctgctttcctgctgaaggccctgaaatcacctgtgttccaggccacctgctaacaataaataatgctgccctgatgtggggaattagctcaagtggtagagcgcttgcttagcacgcaagaggtagtgggatcgatgcccacattctccaagctttattatttagacatcgtgtctccaaacactcaggtctccaaacccaagttagtgtctgagaacaggatgctgctttggttcaagacgtaggagcagcaataatagagggctggtgatggctccctcttggcattcagtatagtgtagatctaccatgtaattaattctctgtttctttgaggagctgtgaaaccaagggacatatacaactgctcttttctccctgtttctacctgcagctttgtcctaaatgtgagacaattatgaaaagtgcagcgcagagccacttgggtaaatacagccccggctttctgctcaggggacagagtttgaggcactgcagaggaaccggccaaagtatgagacccatatattgagagtaacagagtgtaaagttcaaaaaaatcaaaatatttaaagatttatcatgggtcttgatgacatgatggaatctctctactctctggacttattatgtgtggtaataaatttactttttaaaagcca

SEQ ID NO: 9876 - DNA, 4406 bp, Homo sapiens
ttaacttacctgagcttctattacttctaaaaagtgcataaagtgcaggctaagacatagtttttttggcaaaattcagtcagactacatcaagtaaactccctaagtctcctagtataattcatggcacaaaaactggggaaaaaacagggaggatatgtttataagttcagtttgggttttttgttgagtgaatgtctccagtcatagagatgcaagtgtagatacacagtaagagtagtatgaacaggagacaccttggaaggctatttcttccttcattcattcagttggtcactcaatgaactatcatgaattgagcactacctctgtttcttatcaacaaaggagactacggaaaagaagagtgactaagatctctgaagaagggaaaagctagatgactgggccacaagaggaaaaaaagcagcaagacaggtacaattgtttctggtccctcaagccagaaggtcctatcattatgtgaatactggaaacgggtggactccacctgtcctgagtggggaattcttccagtgcagcactggctgataagcagtgatttccaagtagcattgattgtgttctttaaaagctaggaattgataaagcagcagtgtgtgggaaatgagatttaataatctggatctcagctcttaggaacagttgctctcttagagcagcaggccacctgtcaatctcgtattctgaaggtcctgagtttgaacatcagacaaggtacagcttttgccgctctttccgttaagggaaatgaaataggtgtgataaataatgtaacacaaatgctatgagataatgatttcaagacagtccaaatattagcttaaaatttaaaaatgagcttttcttttttctttctttctttctttctttctttctttctttctttctttcttcctttcttctttctttctttctttctttctttctttctttctttctttctttctttttctctttttccttcttttggcttcttagtggtttgaatacaaggcatggtgaagagatataaattacacaagaaactacaagctatgtcatatgtctacctctctagctgacaagggaagcaggggaaatttctcttccaattgtctgctctgaaggtcatccaaacataattatcaggtggggtgggtgaactcttttattcttttaatcatccaacaaatatttctcaagcgcataccttgttaagagactgttttgggtacagtaattcacagtgaataaaacacagatattctcacctttgtgatactacgtcatagttgcaaggagtggggagaaacagacaggaagcaaagaagaaaaataaacaagaagtcatgtgataatatctactgggagggactcattaggcagtaaaggactcggcagtgtggaggtgacacattcagttttcagtagaagaatcagggaagttgtcactttgaagctatcatttagcttccctttctttcaatcttctttctttacatgggaaataaggattgtgggatatttttgggtggatcacagcacctagagatggacctgatcaataagaactgctcagtaagcattagctactgcttcggttgccttccccctgtggagtgctggcctcttggattgagcttgcatcataggtgttcagtaggagcttgcttagtggatttataggttgaggttagaacccactggaattctcttcctggaaagaacaggcttctctttaaggtttcatacagaccctggttgaggaaagagccctaaattgcttgaaaaattgaatgctctatgggcaaagcaggaagccctcctatggaagggcatcatttgggcatatatcagggtctcagtaaaaacatgagtgctcaggaagtcaagatggttaagcagagaatctgaccagaatgttcatggtgcgaagaaataatcttgttgggtgtaggattacaacaactgggaaattagaatacaggctaaatgagattcaaaaataatacaacaagaatcaggcacaaatcctttactactacattcttttgtacaaatccattttgcctagaaaatcgtaccttactatacatccctattgtgtttctccaccatctattttactttttaaactttatttcatttttgtcatcacagaagcttgttgctacaaaataaatgagcaaatcagccaatggcaacaaagctgcactgatctctctccttagaccttcagaacattttccttaaaggtgaacaatactccacgttcaaggactttttcagcactatgtgctagaaactatgctgactgtttattaatttttatgtaagttggtcgatatagtttctcagcttccccaagtattattaccacagtactatagatgacactgaagctcagagcagttaaaccattttcctcagatcacataactttaaagagggaaaccagatatgggaagcagatttctttctaaatgaaaaaatcatgagctcttgctttcacttagcacatagtctcatcatctgttttcttcacaccagctcactcatgtaacattcattcatttaccaaatacagataaatgagtggatttattcttgctttcatcagatactaattcaaaatcgcttctgtgtctgctacactgtgctcaagacttgccagtgcctttgtctcctctccctcaaatctctccacccaatgtcttgacaaatactgtagattcttcctgcataacctctccagaatcttttccttctgttatccatgctacagtgtttatggaggatgttttcttcacctatgaagtgtgatgggggctgaagctgcagcaagactcatgctgttcacctcaggagctgacacagtaaatgtggataaacctcaatcctttaatatctttatgacttctttcccagttaccccagcgaatttacagattgaggttaaaaccacaacaggattatcttcctggaaagaataggcttccctttaaggtttcacatagatactgggtgaggaaggagccctaaattgcttgaaaaattgaatgctctttgggcaaagcaggaagccttgctatggaagagcatcatttgaacataaatcagagtctcagtacaaacagagtgctcaggacatcaagatggttaaccagagagcctggccagaatatctgcggtggagagaaacgatcttgttgggagaaggatgacaataattggggacttagaataaaggctaaaaatgattcaaagagaatgcaaaaagaatcaggcacacatcctttactctgttgtgcaaatctcaccttactgtgtgtttgtattctattcctccacaatctttattttattttatttttatgttcacagagatttgttggtgccaactaaatgagcccaacagccagtgacaacagaactgcactaaaaaaagtccctcatcagctcttgagagcaggttccttaaaggtgaacaatattccacatacaaggactttttcagcaccatgcattagaaatggaagtgaatgtttattattttttgtataagttggttgatacggcttttcagcttccctcagtatcattatccaaattttgtagatgacactaaagctcagaggagttaaaccattttcctcaaatcacatagctttaaataggaaaaccagatatgaaaagcagatttttttctaaattaaaaaaaaaaaaaaaacttgagctcttgctttaccctagcacatagtctcaccatctgttttctccatgccaggtcattcatgtaacattcattcacataacaaatacaaataaatgagtggattcattcatcagctattaattcagaatctcttttgtgtctaccacactaggctcaagacttcccagtgtctttgtctcctctccctcaaatctctccacccaatgtcttgacaaatactgtagatccttcctgcacagcatcaccagaatgtttttctttcttttcattcacctctgtcatcatccatgctatggtgtttatggaggatgtattctgcagcaggaagtgtgatgggcactgacgctgcagaaagactcctgttgtccacctcgggagctgacacgataaatgcgggtaaatctcaatcctttaatatctttatgacttctttctctttctcttcaatttctattttctcatgttcaagctctgacattcaaaactaaacacctttctctaacatgttgctttaattatttaagcattctgcctgggattttttcaattactcttgggagttttcataaaactctcccaacatatctccaagtggccaggcttttcaatcactgcttccctccgtgtgtatttcacacacacacacacacacacacacacacacaca

SEQ ID NO: 9877 - DNA, 1425 bp, Homo sapiens
ttaacttatctgagcctctgttacttctaaaaagtgcatgaagtgcagactaagacatagtttttttggcaaaattcagtcagactacatcaagtaaactccctaagtctcctagtataattcatggcacaaaaaattggggaaaaaacagggaggatatgattataagttcagtttatgttttttgttgagtgaatgtctccagtcatatagatgcaagtgtagatacacagtaagagtagtatgaatgggaggcaccttggaaggctatttcttccttcattcattcagttggtcactcagtgaactatcatgaattgagcaccacctctgtttcttatcaacaaaggagactgcggaaaagaagagtgactaagatctctgaagaagggaaaagctagatgactgggccacaggaggaaaaaaagcagcaagacagttacagttgtttctggtcccacttttataaacacacacgcacacacacagacacacgcacacacacaaaatcatttaatcatttttaagtatttaatcattttttaaaaatctgtgatgctttacctgggcaggtctaggcaggtcctcctttgctgggacgtgcccttttctgtcccggaatactctaaacttgacattttggcagcgtgaagttttcccgttgtgactttctccttgttcccttttctcctccttctttgcagagaatgagtagccactgctgtttgccctggcccatcaatgagaagatctgctcttagagccctgctttcctgctgaaggccccgaaatcacctgtgttccaggccacccgctaacaataaataatgctcccctgatgtggggaattagctcaagtggtagagcgcttgcttagcatgcaagaggtagtgggatcgatgcccacattctccaagctttattatttagacatcgtgtctccaaacactcaggtctccaaacccaagttagtgtctgagaacaggatgctgctttggttcaagacgtaggagcagcaataatagagggctggtgatggctccctcttggcattcagtatagtgtagatctaccatgtaattaattctctgtttctttgaggagctgtgaaaccaagggacatatacaactgctcttttctccctgtttctacctgcagctttgtcctaaatgtgagacaattatgaaaagtgcagggcagagccacttgggtaaatacagccccggctttctgctcaggggacagagtttgaggcactgcagaggaaccagccaaagtatgagacccatatgttgagagtgacagtgtaaagttcaaaaaaatcaaaatgtttaaagatttatcatgggtcttgatgacatgatggaatctctctactctctggactgattatgtgtggtaataaatttactttttaaaagcca

SEQ ID NO: 9878 - DNA, 1425 bp, Homo sapiens; identical to SEQ ID NO: 9877

SEQ ID NO: 9879 - DNA, 461 bp, Homo sapiens
acaaatacaaaaattagccgggtgtggtggtatgcatctgtagttccagctactcaggaggctgaggtgggaggatcgcttgaactcaggaggtggaggttgcagtgaacagagaacgcaccggtacctggacaacaaagtgagaccctgtcataaaataaaatagttaaacccaggccaggaggggtggctcatgcctgtaatcccagcactttggaaggccaaggtaggctgatcacgtgacgtcaggaggttgagaccagcctggccaacatggtgaaaccccgtctctactaaaaatacaaaaattaaccaagcgtggtggcaggcacctgtagtcccagctactctggaggctgagacaggagaattactagaacccgggaggcagaggttgcagtgagccaagatcttaccattgcactgcagcctgggcgacagagtgacactctgtcgaaaaa

SEQ ID NO: 9880 - DNA, 84 bp, Homo sapiens
gatcacctgaggtcaggagtttgagaccagcctggccaacatggtgaaaccccatctctactaaaaatacaaaaattagctggg

SEQ ID NO: 9881 - DNA, 536 bp, Homo sapiens
ttcagtatagtgtagatctaccgtgtaattaattttctgcttctttgaggagctgtgaaaccaagggacataaacaattgctcttttctccctgtttctgcctgtagcttgaatgtgaggcaactgtgaaaagtgcagggcagagccacctgggtaaatacagccctggctttctggtgagaggactgaaaccaggatgtgtcaagtaactagaatgtgcctggacagatactgtagaaagcaaacccataaagttgttcatgagcttgtggacgcacctgccagctgtgaataagtgggtctaatcccaaacaacttacctaaaaagagcctgaggactgaactaaacaatggtccactttccagtcctcactgaccactggttgcacacactccagagatctctcatccgcagtgtcaaggctttcaaatagagttatctgtgaaacaacaacacatggaagtctggttggtacttggagcttaaatacaaggcaattgtgtgcctgcaaaaacaaaaagagcaatattatcct

SEQ ID NO: 9882 - DNA, 459 bp, Homo sapiens
aaatacaaaaattagctgggtgtggtggtatgcatctgtagttccagctactcaggaggctgaggtgggaggatcgcttgaactcaggaggtggaggttgcagtgaacagagaacgcaccggtacctggacaacaaagtgagaccctgtcataaaataaaatagttaaacccaggccaggaggggtggctcatgcctgtaatcccagcactttggaaggccaaggtaggctgatcacgtgacgttaggaggttgagaccagcctggccaacatggtgaaaccccgtctctactaaaaatacaaaaattagccaagcatggtggcaggcacctgtagtcccagctactctggaggctgagacaggagaattactagaacccgggaggcagaggttgcagtgagccaagatcttaccattgcactgcagcctgggcaacagagtgacactctgttgaaaaa

SEQ ID NO: 9883 - DNA, 395 bp, Homo sapiens
gcccggcgctcgccctcggggaaggacggacgcctcgcgacggccgcggacgcaccagcgcaagtggttccttggaatctcccccatgtaattccacatgagattaaatttttaaagcgcctcatactcgtgaccatctagcaaccattcagtggctgaatcctcagacaggcactctgcatccccagagcctaggggcatgccatatgcccccacataaagatttgttgaatgaatgaaggtgtctaactccattgtcttgccctattaaagatgtatactttctctgcctagaccattatggtaataccctgaccttcctcatgatctttgcactcaattctcaactctgtgccctattggaatggtactgaaatgcaaattcagttacagtg

SEQ ID NO: 9884 - DNA, 395 bp, Homo sapiens; identical to SEQ ID NO: 9883

SEQ ID NO: 9885 - DNA, 459 bp, Homo sapiens; identical to SEQ ID NO: 9882

SEQ ID NO: 9886 - DNA, 11888 bp, Homo sapiens
agctttccaaggaatcccttcaatctgtggatgtcctccgagaggaagtgagtgagatcttagatgaaatgagtcacaaactgcgtcttggagccattcggttttgtgccttcaccctgagcaaagtatttaaacaaattttctcgaaggtgtgtgtaaatgaagaaggtattcagaaagtgagtattgattattaaaaaaataaagaaataaaagtctcatcttaaaattaaacaaaaaaaaaaacagtctctttttcaacccctcacaatttaatcaactcaaggacagctcacttggtcaatcaaaagcctagggcctaatcatcaggcctccagtctaggcagaagaggatgtgcatctctgaaggttgttttctgtttttttgtttccttttaactgcagacctacaggcttcagactaacttagtcaagtaagacttatagactaacttaatgccagatattcagtaacgttacaaaagaaatacaaagaattcctgtatatacttcacctagattcccttacagcatttcctttatccttttcctaatactctgctgtgtttttcctataattaagggcattatcttatggtacaagtatcaaaataaggaaattaacattgaacaaatactagtaatactgacctgactcatatttcaccagttgtcccagtcatgtcctgtctagctaaagaaaatcgtagctcatgtgttgcgctagaaatcctagaaagtgttcaactttcttctgtatccacttccatattagactcttttaatctaaaataattccttagtatctgtatttgtgtttcatgctaattttttttttttttaaagaacaggctaattattttgaagtgtgaaatggtttgaatttgagtgatgttatctcagtattgggctcgggttgtgtacctttgctaggaacaccccggaagcgatgcattcttctcagtgggtcgtgtcagcaatgcatggtgcctgtcggtttcattactggagatgtttcacttccatcagttggttatcgttatgactgccaggtttctctgctgtaaagttattattttttccctttataattaatgaatatcttgtgaaaagactctttgaaaatggctaaataccctgttttgcatcatactttaccccactcgtttttgcacccactgatgatttttgcctgaattaattattatgttaatgattgccaaatgatgacttttctaatttcataaagagctttccttatgaagagtatttttacttatttgtgttttatatttttttcttctaggaaagctcttaacttcacttgccttcctcctcatcccttttaatattttgttttaattcagtcatttactttcctgtcaaatatttcttcttcctactgactgttttcgagattgctgacttataccctgaatctgtcagagaatgttacagtgtttgggaccaagggtggtggtgagccatttcttaagtgatgatcacagattacctggcctctgttacatttagatttcaaaaaaacagataacacatggataccagtgaatcttgagattgatggcctgaggagtatatttggaaactcaaattatccctcccagccacatgacacccattcaccctggcagtgagtccagcacatagagaaataccattcttctcaccttgtcctatgaatttgtagattttttttaatctctccaagagaagctttgttttctcttactacaaccaaccaattcaatacagtggttaacagttggctttttaagtcagactgacttgggttccattcacagctctgccatttattggatgcatgaccattttacaaacaagaaagctaaggcttagaccttgttaattatgtggtattaaacaaagcacgtaagatagctgtatataaaatgatgctaatatagtgcccaactaatatatgttagcgatcatcactgttattattctgatccataaaaatttacatttttaatattcttgcattatgtgaaattgtttaactagaaacagtacttttaccttatcagagcaaatcgtttatgtgtatggcaaaaaggcagaaaaagaggatgggtattccctctaaatatagacttattcttccgttttctgatttgagatgtgatttgataacatgacaactgaaattattcaaaatgtaacatttactttcaagctacaaagagccatccaggagcatcctgttgttctgctgcctagtcatcgaagttacattgacttcctcatgttgtcttttcttctatacaattatgatttgcctgtgccagttatagcagcaggaatgggtatgtattgtttttctgtttttttaactgtaaaaattaaaaagttcactggcatattctagcagtactgaggtatttgaagatgatgatgaaaatagcctctcctcctttcttccagtcctagcactgaataacttgagttatgtcctttgtcctgtgctttactgtgcctgaacagacatctgcaggagttcatgcacacagggttctttggtgtaggcttaaaaaatgagactgcactacttacaggtattagctgccttttgctttttttatttgataatatattaatggctacctctctaggcaataaatagatctaactttttaaagtttatttttaattgtgataaaatacatataacatcaaatttgccatctaagtcatcttcaaaaatatagttcagtggcattaagtacatttacattgttgtgctgctatcaacaccatccatctccagaactcttcatcttgcaaaactgaaatggtacccattcaacacactccccgttctaccctccccctgaccctgggcaatcagcattctactttctgtctctgtgaactactctagatgcttgatataggtggaatcatacagtacttgtccttttgtgactggcatatttcacttaacagaatgccctcaaggttcatccatgttgcagcatgtgtcagaatttccttcctttttgaagttggaaatgcatctgctcaagaccctgctttccatttttttatatatatacaaaaatggtatatatggaattgctgggtcttgtggtaattttttttcattttttgaggaaccaccatactgccttccttagcagctgcaccattttacattcccaccaaaagtgcacaagagttccagttgttctacatccttgccaacacctgttattttctgatatgttttataataattttaatgagtgtgaagtggtatctccttgtagttttgatttgcatttccctaatgattagtgatgctgagcatcttttttgtgtgcttattggccatttgtatatctttggagaaatgtctgttcaagtccgttattttttaattaggttgtttggggctttttttgttgagttgtaggaattgtttctacatcctggatattcaccccttatcagacagatgatttgcaaatattatcttccatttcatgggttaccttttcactctgttgattgtgttatttgatgcatggaagtttttaattgatgtagtccaattgatctatttgtttctttggttccctggttccctgtgcttttggtatcagatcgaagaaatcattgccaaatccgaggtcatgaagcttttcccttatgttttatcctaagagttttatggtttcaggtcttacattaagatctttggttttttgagttaatttttgtatatggtgtaagttaagggtccaacttcatgtctaacattaattttaatagccatataatattcagcagtgtggatatttcataatttagtagttttgctgttataaacaatgtcataatacatttttatattggtgcttttattcctgtaagatcgattcctaaaagtgggattgctaaggcatataagttgtttatccactcccttttagggtagccaggaaagccaggattcaagtatacacgtttgttaataaatgcagtgaatggtaaggttaaaactgccaagaacttaagcactttaaaagcattttcatctgaacaaacttgtgaggaagttatttgaaaactaggggaaatgaagagaaagactattttaaaactgctggtagcaatcttcctttcttacaagatttgccttatttaatctcttccaacaaaagtaggttgatgttttttcctggtaggcaaaagatgagagcgggtttggcctggctgtccagagcatgaagggcacatattggtctgttgtcaggctcagcagcatggctgactaaagacattgacatcatgacattgtcatgttgctctgctgttgcccctggctctagctggcctacttgtaaagggagtggtgcatggagaagcacaaggtaacctcccagtgagcacctggcccacagaatcccttcttttctataattctattaggtatctcttatgtattttaatgtcaaagtataataatatcataggggtgtcttacatttatgaaatctttcttaataatgtttgagtttaggccaggcacagtggcttatgcctgtaatcccagtactttgggaggccgaggcaggaggactgcttgaggccaggaagtttgtgaccaacctagccaacatagcgagaccctgtctcataaaataaaataataaaatataaatgaaaaataagcatgtttaagtttagatctttatagaagatttcaagatctgcaaataaatattatcccctcttttttagacttcctgggaatgaaaatggttggtgagctgctacgaatgtcgggtgcctttttcatgcggcgtacctttggtggcaataaactctactgggctgtattctctgaatatgtaaaaactatgttacgggtaaatgcaaataattcccaactactcttaagccatattttcttcactgatgtttgctcatttaaactcttaacttctgaatagaacacttagctattttgctttccctcaagaactgcttataacctcagcaattggtttaatctgtgtgactctcttgtttaattttcactgtaagctgtgtttgttcaggaagcttgggagggagcttgggaaaaggaatcaaaagaagcatttatcattttgagagtaggcaatgggttttgtgttttgtttgttttctctttaaagaatggttatgctcctgttgaatttttcctcgaagggacaagaagccgctctgccaagacattgactcctaaatttggtaggtcactacagattaaaaggaaaaatacaaacccaaagacatcagctgctacataaaacttgacgctttatttaacaagatattcttttcaagtgtaaatgtataactgttgatatttacgggattagtgtataatgtatgcttttagtattttccgtttatgtgctcatgtttgctctgctcttcaatatgttgatgaagcatttctccctgtgttttgcaggtcttctgaatattgtgatggagccattttttaaaagagaagtttttgatacctaccttgtcccaattagtatcagttatgataagatcttggaagaaactctttatgtgtatgagcttctaggggttcctaaaccaaaagagtctacaactgtacgtgagcttgattttagcttaattgagagaatgtgctgactgacacatcaactaatttctaaatttactgcttttcgttttcttccccccctgttatggtactattaggggttgctgaaagccagaaagattctctctgaaaattttggaagcatccatgtgtactttggagatcctgtgtcacttcgatctttggcagctgggaggatgagtcggagctcatataacttggttccaaggtgtgacctgtgttttaataactgtcttagaaatgaggattaaaatccaaaggtgtgagttgcaatgctggagttgaccacttctcttgatttacttaagattacagagaaaatgatcagaaatgctgttatcattccgttttcatcagtggaaaccttcaattaaagaagaattatgtgtttgtcccaaaaaaagataagctgtgagatatgtatgtcaaatatgcaaaatcagacaatgatcatgtttctcaagggaactaaagtgggaataaataatgccattattaacaagtatatgtgcaggaattgttgagcactattggtaagctagccaaagtatgtactattatttttgaccctagaaaggattgcataatggtaatgaatgggagtgagtccttagtctctagagagttatagttttataggcaagaaaatatattaggttctttcaggataaagaacacagatacacatttgagttttcttaattaggagaaatatacctggacaagtaagggagacaaaccatctgcccctccaggcctcatgtgctgcaacatcatttgtaacttatctgtagctttagcagtttcccagcagctacattagtcatcacagacgcttatgttagtttttttcctgacacaggctctctctttagatctcaaattggtttggctggctattacctagtacagggcacccttactggctgcatctttcacattaagccacctgtgtggcaatttttaggtcatgtgtgtatctctgctccagccagctctgtgcaggccttattgtactattcaaagtttggtaatccatgcatgaagtcagacaaactgaatggcacccattcagtataaaatagttattatataatctgttaagtgtgttctacaatggagatatgttcagcgtgctatgcattctgaaaagatagtaatttagtctactggggcaggcatccattctcagagaaacgatgtatcctatttaggaagcaacaaaagttttttgcctggaaccaggaataataggaccctggaccccttcagtatttttaccatctctcaagaggatattccagaaatgtatggtcagattacactatagtaaagcaaaggaatactgtttgcacctgacctgagagaattcagttggcacaaagtatgagaagccttctaaaacgtctagagtctttttccatccccatttgtctaagtaacagaactgtaatttgttgctctgtgctcttccttttagatacattcctcagaaacagtctgaggacatgcatgcctttgtcactgaagttgcctacaaaatggagcttctgcaaattgaaaacatggttttgagcccctggaccctaatagttgctgttctgcttcagaaccggccatccatggactttgatgctctggtggaaaagactttatggctaaaaggcttaacccaggcatttggagggtttctcatttggcctggtatgtaggtaggacatatgtgttgagaatgcttgcttaatttggaagagttaaaacctggacctgaaaaatctatagaggacttgagcaaaggattgctcagaaagagaaaggacaggccgggcgcggtggttcacacctgtaatcccagcactttgggaggccaaggcaggtggatcacgaggtcaggagattgagaccatcctggctaacgcggtgaaaccccgtctctactaaaaaatagaaaaaattaaccaggcgtggtggtaggcgcctgtagtcccagctactcgggaggctgaggcaggagaatggcatgaacccaggaggcggagcttgcagtgagccgagattgtgccactgcactccagctaggcaacagagcgagactctgtctcaaaaaagaaagaaaaagagaaaggacaccaaatctgtttttatcactataggacacagtgaacacagcacgttgattatttgagaataattgtttacatgtcatttcccactacgagactctgaatatcttgaggactagaataccatttccttggcacctagtacggtggaaaataaagtcatgaatcctagccaggcatggtggtacacacctataatcccagctacttgggaggctgaggtgggaggatcacttgagcccaggagttcgagaccagcctcagtaacatagtgagaccccatctccaaaaaaaaaaaaaaaaggccgggcgtggtggctcacacctgtaatcccagcactttgggaggctgaggcgggcggatcacgaggtcagcagttccagaccagcctgaccaacatggtgaaactccgtctctactaaaaacacaaaaattagccgggcatggtggcgtgcacctgtaatcccagctactcgggaggctgaggcaggaaaattgcttgaacctgggaggcagagattgcagtgagccaagattgcgccactgcactccagcctgggtgatagagcgagattccgtctcaaaaaaaaaaaaaaattgtacaggctacagttggaaatgcgtttttttttaaagaccagataattatttgaagtcaagtacctactgttctttgatcaacccaatactgaatacctcctctgtgctgggtactaccagggatatgaagatgaacaagatgccatccccatcctggacgttcccctgggttgcagagggcagggtgggtgggtaatgtgtaaacaagttgtgagggttcagtgaacagagacaaggagcaacatgcatgctgcagagggttcctgagagtgctgcagaggaaagggaccatactcaggaagacttcacagaagcgacttttgaacccttcaggaagaccaggagaggatcctcgccaaggcagggatgaggaatgcaagatgggaggcttgggccccagagattcatcagtgatattaaagtgttggcccagatggggtggtgggtagatggaaaataaagatggacctccccgcctcctccccaccatccaccatcagaagactggaggtatagaaacaagttaggaggctgctctgtcccaatgagaaatgcaggatgcctgagatgcctgagccgcagcagtggaggcactcagggcacagccaagagatgaggaggatttactgacaaaaatgccagtcaccaagagagagacaaatcagacacctgttctcagtgctgtgatgggctgggtctggtaggaggcaaaggatgtgttaattatgatacaagtagcaagtgttggatgtcatgagaaatagctaaaagggctcaaacccatcattgtttggcccaggaacatatgaaaacataggtacttgtttttctaaagtgttttgctttttcaggatgggataaatgccataactaatccataactaagagtatctgttcagtgtcactacagttctgttccttttttctttttttatgcagattaccccacattcctaagcatgttcatatctcaagctttttatgatcatttcacataaaatattattcaattgagcaagctgagacaaggcaagttgttcaagaatgaatgtgatcaagtccaggaggaagccatacctctcacttgtccctgccttgaagcagtagcagaacttgccacccaacttgagcagtgtgccactgccagccagctctttggctcaggttaactgcagaataattttccgtgctgagaatatttgttaaatatcaccatctcttcattatgcttctgtaattctacctgcctggcagctgtctgcaggccaatatgtcaggtgataagctaccaactgccatggagctgcccctttagttatctttgatttggggaaaactgcaaagtgatatttttaccattttagtatgggtctaagcaaggggtgtgtgtgcatgtgtgtgtgtgttgtatgttttaatgtattcatacactaatcatgggcctttttcttagtattcttacattcccgtgcatgtgactttccagttatgtaacttgctgttagaaaactttagattcccttggttcctgaagtacacagaagtggtgttcattttcagagtagaaactgatgtgcctttcagaatggctgacaaattttgggggtaagaaagtatgttacatgtccttagagagagagaaagaattgatttatgaaatagtacttttaaatttttcttcagatttggtatcattaccgtaattggtagacagtaaaacctgtcacttgaaaatgagcatctgtcacgttaccattaataacgttaacgtacgctaggcctaagactccctgcagtgacccatcttgtttgaatgaattgtctttgtgtgtagataataaacctgctgaagaagttgtcccggccagcattcttctgcattccaacattgccagccttgtcaaagaccaggtgattctgaaagtggactccggagactcggaagtggtcgatgggcttatgctccagcacatcactctcctcatgtgctcagcttataggaaccagctgctcaacatttttgtgcgcccatccttagtagcagtagcattgcagatgacaccagggttcaggaaaggtaattttcaggaatgcaatcttgacttttagaagaggtctggccattccattccatttagggagccacatttgaagccttgtaatgttcagcctcacgccggtgaagagcaggcctatcactgagaaaaagttagctttgttccccaaatacttgttcatctgcttcgaattttggaattgggaggacctggaaataatctaaacctttccttctataaatatggaaaatgaggcctagaaagttgcataattactgagagaaggatctggcatttgagtacagttctccacttcctggtctgcggcactgttttggctgtgccagctccctgatccagcaaaggcaggtgggcagatgagcagtcagcagtcgatgagtactcccgagatgcatggtcttgttctaattgtatcaggagtataaaaatgagtacagtacacgtcatgttcacaggagcctgtagtcaaggccagggggttctgtcaaggccctatgttagaattactaggggagtgagccccaccccaaagtttcttcagttgacctggggtatgggccagccattggtgtttggttttggttttggttttggcttttcaaagctccacagtgattctaaggaaaagtgctacagatataataaagataccaggaaatatgaatatagagggaaattaagaaatcagtacctttccttccctactagggagccatggggtagggaaaaatgaagcgtcctggcctctaaggactgtgatgtctcgctgagtagaagcctggttgtaggttagagtcaatcatttaaaaactatgctagggccgggcgcagtggctcacgcctgtaatcccagcactttggtaggccgtggtaggaggatcacgatgtcaggagttcgagtccagcctgaccaacatggtgaaaccctgtctctattaaaatacaaaaattagctgggcatggcggcgagtgcctgtaatcccagctacttgggaggctgaggctggagaatcgcttgaccccaggaggcggaggttgcagtgagccaagattgcaccattgcactccagcctgggtgacagagcgagactccatctcaaaaaacaaaaaacaaactatgctagaccgtagtttgctctgtgggtaagatttgggtttaatttagcttccctcaggggacttaattcttgtccctgttacatgaataaaatatgcctttgaaatacattttgtgatagtaaggacttcctggtactcccttaaagtttaaagggcaatgttgtaattttacatgatgcatttatttccagaggatgtctacagttgctttcgcttcctacgtgatgtttttgcagatgagttcatcttccttccaggaaacacactaaagg

SEQ ID NO: 9887 - DNA, 6637 bp, Homo sapiens
ctctgccaagacattgactcctaaatttggtaggtcactacagattaaaaggaaaaatacaaacccaaagacatcagctgctacataaaacctgacgctttatttaacaagatattcttttcaagtgtaaatgtataactgttgatatttacgggattagtgtataatgtatgcttttagtattttccgtttatgtgctcatgtttgctctgctcttcaatatgttgatgaagcatttctccctgtgttttgcaggtcttctgaatattgtgatggagccattttttaaaagagaagtttttgatacctaccttgtcccaattagtatcagttatgataagatcttggaagaaactctttatgtgtatgagcttctaggggttcctaaaccaaaagaatctacaactgtacgtgagcttgattttagcttaattgagagaatgtgctgactgacacatcaactaatttctaaatttactgcttttcgttttcttccccccctgttatggtactattaggggttgctgaaagccagaaagattctctctgaaaattttggaagcatccatgtgtactttggagatcctgtgtcacttcgatctttggcagctgggaggatgagtcggagctcatataacttggttccaaggtgtgacctgtgttttaataactgtcttagaaatgaggattaaaatccaaaggtgtgagttgcaatgctggagttgaccacttctcttgatttacttaagattacagagaaaatgatcagaaatgctgttatcattccgttttcatcagtggaaaccttcaattaaagaagaattatgtgtttgtcccaaaaaaagataagctgtgagatatgtatgtcaaatatgcaaaatcagacaatgatcatgtttctcaagggaactaaagtgggaataaataatgccattattaacaagtatatgtgcaggaattgttgagcactattggtaagctagccaaagtatgtactattatttttgaccctagaaaggattgcataatggtaatgaatgggagtgagtccttagtctctagagagttatagttttataggcaagaaaatatattaggttctttcaggataaagaacacagatacacatttgagttttcttaattaggagaaatatacctggacaagtaagggagacaaaccatctgcccctccaggcctcatgtgctgcaacatcatttgtaacttatctgtagctttagcagtttcccagcagctacattagtcatcacagaagcttatgttagtttttttcctgacacaggctctctctttagatctcaaattggtttggctggctattacctagtacagggcacccttactggctgcatctttcacattaagccacctgtgtggcaatttttaggtcatgtgtgtatctctgctccagccagctctgtgtaggccttattgtactattcaaagtttggtaatccatgcatgaagtcagacaaactgaatggcacccattcagtataaaatagttattatataatctgataagtgtgttctacaatggagatatgttcagcgtgctatgcattctgaaaagatagtaatttagtctactggggcaggcatccattctcagagaaacgatgtatcctatttaggaagcaacaaaagttttttgcctggaaccaggaataataggaccctggaccccttcagtatttttaccatctctcaagaggatattccagaaatgtatggtcagactacactatagtaaagcaaaggaatactgtttgcacctgacctgagagaattcagttggcacaaagtatgagaagccttctaaaacgtctagagtctttttccatccccatttgtctaagtaacagaactgtaatttgttgctctgtgctcttccttttagatacattcctcagaaacagtctgaggacatgcatgcctttgtcactgaagttgcctacaaaatggagcttctgcaaattgaaaacatggttttgagcccctggaccctaatagttgctgttctgcttcagaaccggccatccatggactttgatgctctggtggaaaagactttatggctaaaaggcttaacccaggcatttggagggtttctcatttggcctggtatgtaggtaggacatatgtgttgagaatgcttgcttaatttggaagagttaaaacctggacctgaaaaatctatagaggacttgagcaaaggattgctcagaaagagaaaggacaggccgggcgcggtggttcacacctgtaatcccagcactttgggaggccaaggcaggtggatcatgaggtcaggagattgagaccatcctggctaacgcggtgaaaccccgtctctactaaaaaatagaaaaaattaaccaggcgtggtggcaggcgcctgtagtcccagctactcgggaggctgaggcaggagaatggcgtgaacccaggaggcggagcttgcagtgagccgagattgtgccactgcactccagctaggcaacagagcgagactctgtctcaaaaaagaaagaaaaagagaaaggacaccaaatctgtttttatcactataggacacagtgaacacagcacgttgattatttgagaataattgtttacatgtcatttcccactacgagactctgaatatcttgaggactagaataccatttccttggcacctagtacggtggaaaataaagtcatgaatcctagccaggcatggtggtacacacctataatcccagctacttgggaggctgaggtgggaggatcacttgagcccaggagttcgagaccagcttcagtaacatagtgagaccccatctccaaaaaaaaaaaaaaaaaggccgggcgtggtggctcacacctgtaatcccagcactttgggaggctgaggcgggcggatcacgaggtcagcagttccagaccagcctgaccaacatggtgaaactccgtctctactaaaaacacaaaaattagccgggcatggtggcgtgcacctgtaatcccagctactcgggaggctgaggcaggaaaattgcttgaacctgggaggcagagattgcagtgagccaagattgcgccactgcactccagcctgggtgatagagcgagattccgtctcaaaaaaaaaaaaaaaattgtacaggctacagttggaaatgcgtttttttttaaagaccagataattatttgaagtcaagtacctactgttctttgatcaacccaatactgaatacctcctctgtgctgggtactaccagggatatgaagatgaacaagatgccatccccatcctggacgttcccctgggttgcagagggcagggtgggtgggtaatgtgtaaacaagttgtgagggttcagtgaacagagacaaggagcaacatgcatgctgcagagggttcctgagagtgctgcagaggaaagggaccatactcaggaagacttcacagaagcgacttttgaacccttcaggaagaccaggagaggatcctcgccaaggcagggatgaggaatgcaagatgggaggcttgggccccagagattcatcagtgatattaaagtgttggcccagatggggtggtgggtagatggaaaataaagatggacctccccgcctcctccccaccatccaccatcagaagactggaggtatagaaacaagttaggaggctgctctgtcccaatgagaaatgcaggatgcctgagatgcctgagccgcagcagtggaggcactcagggcacagccaagagatgaggaggatttactgacaaaaatgccagtcaccaagagagagacaaatcagacacctgttctcagtgctgtgatgggctgggtctggtaggaggcaaaggatgtgttaattatgatacaagtagcaagtgttggatgtcatgagaaatagctaaaagggctcaaacccatcattgtttggcccaggaacatatgaaaacataggtacttgtttttctaaagtgttttgctttttcaggatgggataaatgccataactaatccataactaagagtatctgttcagtgtcactacagttctgttccttttttctttttttatgcagattaccccacattcctaagcatgttcatatctcaagctttttatgatcatttcacataaaatattattcaattgagcaagctgagacaaggcaagttgttcaagaatgaatgtgatcaagtccaggaggaagccatacctctcacttgtcactgccttgaagcagtagcagaacttgccacccaacttgagcagtgtgccactgccagccagctctttggctcaggttaactgcagaataattttccgtgctgagaatatttgttaaatatcaccatctcttcattatgcttctgtaattctacctgcctggcagctgtctgcaggccaatatgtcaggtgataagctaccaactgccatggagctgcccctttagttatctttgatttggggaaaactgcaaagtgatatttttaccattttagtatgggtctaagcaaggggtgtgtgtgcatgtgtgtgtgtgttgtatgttttaatgtattcatacactaatcatgggcctttttcttagtattcttacattcccgtgcatgtgactttccagttatgtaacttgctgttagaaaactttagattcccttggttcctgaagtacacagaagtggtgttcattttcagaagtagaaactgatgtgcctttcagaatggctgacaaattttgggggtaagaaagtatgtcacatgcccttagagagagagaaagaattgatctatgaaatagtacttttaaacttctcttcagatctggtatcattaccgtaattggtacacagtaaaacctgtcacttgaaaatgagcatctgtcacgtcaccattaataacgttaacgtacgctaggcctaagactccttacagtgacccatcttgtttgaatgaactgtctttgtgtgtagataataaacatgttgaagaagttgtcccggccagcattattctgcattccaacattgccagccttgtcaaagaccaggtgattctgaaagtggactccggagactcggaagtggtcgatgggcttatgctccagcacatcactctcctcatgtgctcagcttataggaaccagctgctcaacatttttgtgcgcccatccttagtagcagtagcattgcagatgacaccagggttcaggaaaggtaattttcaggaatgcaatcttgacttttagaagaggtctggccattccattccatttagggagccacatttgaagccttgtaatgttcagcctcacgccggtgaagagcaggcctatcactgagaaaaagttagctttgttccccaaatacttgttcatctgcttcgaattttggaattgggaggacctggaaataatctaaacctttccttttataaatatggaaaatgaggcctagaaagttgcataattactgagagaaggatctggcatttgagtacagttctccacttcctggtctgcggcactgttttggctgtgccagctccctgatccagcaaaggcaggtgggcagatgagcagtcagcagtcgatgagtactcccgagatgcacggtcttgttctaattgcatcaggagtataaaaatgagtacagtacacgtcatgttcacaggagcctgtagtcaaggccagggggttctgtcaaggccctatgttagaattactaggggagtgagccccaccccaaagtttcttcagttgacctggggtatgggccagccattggtgtttggttttggttttggttttggcttttcaaagctccacagtgattctaaggaaaagtgctacagatataataaagataccaggaaatatgaatatagagggaaattaagaaatcagtacctttccttccctactagggagccatggggtagggaaaaatgaagcgtcctggcctctaaggactgtgatgtctcgctgagtagaagcctggttgtaggttagagtcaatcatttaaaaactatgctagggccgggcgcagtggctcacgcctgtaatcccagcactttggtaggccgtggtaggaggatcacgatgtcaggagttcgagtccagcctgaccaacatggtgaaaccctgtctctattaaaatacaaaaattagctgggcatggcggcgggtgcctgtaatcccagctacttgggaggctgaggctggagaatcgcttgaccccaggaggcggaggttgcagtgagccaagattgcaccattgcactccagcctgggtgacagagcgagactccatctcaaaaaacaaaaaacaaactatgctagaccgtagtttgctctgtgggtaagatttgggtttaatttagcttccctcaggggacttaattcttgtccctgttacatgaataaaatatgcctttgaaatacattttgtgatagtaaggacttcctggtactcccttaaagtttaaagggcaatgttgtaattttacatgatgcatttatttccagaggatgtctacagttgctttcgcttcctacgtgatgtttttgcagatgagttcatcttccttccaggaaacacactaaagg

SEQ ID NO: 9888 - DNA, 175 bp, Homo sapiens
cacagccgggcgcagtggctcatgcctgtaatcccagcactttgggaggccgaggcaggcggatcacgaggtcaagagatcgagaccatcctggccaacatggtgaaaccccgtctgtactaaaaatacaaaaattagctgggcgtggtggcgcatgcctgtagtcccagctact

SEQ ID NO: 9889 - DNA, 175 bp, Homo sapiens; identical to SEQ ID NO: 9888

SEQ ID NO: 9890 - DNA, 11618 bp, Homo sapiens
ttggcagaagacaaaagcaggtttattagggccctggggccaggaatgcctaagatatgagttaaggccagggccgtgagaaaaggtgactctcctgaggccaaacctttgcatctcagaagccctggctggagaccttaggagtcagttctgggagggacctggggatacagaggggtctctcctgaccctgggatctttgggcttttgccaggattggggaaatgatctggggggcagggagccttgaatccacagccttcatttcaataacgaccatttaatttgttccttggcagactgaagaacctggggtggggtgggggaggttgagagagaattgagaatgtcaaatgcctccatacacagtcatggggaggtccacagcccaccttgccgaagcgcccctgcaaccaccggtcactaggtggcagcagcttgtctccacttggcttaaacgcggccaaccctccaagtcagaaagcgcagaccaaaccggctgcagccagctcccacctcaggcccaagcctgcccagacctctggctcctgcatctgcagcgtgggtgtggcagcagcctgtctccccgctgtcatgccatgagagttcccgcccacagtgccacgtccaggcggagacggggcccaggcctgacactccctgtgctcagacgcctcagcaaacccctagctctggccatggctggcaatgtgtcctcaacaccccaccgcaacccactgctgatgtggcatagctggcaaagggtggccagccagaccctgcggtgggatgcctggtggaaagtctcagcccagtgcttacacaaatccatataagtgcacacgtgcatgcacaataccaaagcaggagagggggacaggactcaggtgtgtccctcagattgtccctccagccactcagccttattcccctctagagaaggagggaacgctgtgtctcctcctcctgcacagtctccctcctctcttggggacagtggcttagggttcccctgattctcctagccagaatctaactttgtcctcattttatcccccattggctacctgtagcttcctttgtttttactcaagaattccatcaaaaatgctatgttttcattctttctccctttggagaaatactgatggttattcagcatgtgttaactggcttggagccctactaagagcttgtcacgcattggctcattgaattctcataactccatgaagagggtcctgttattatgtgaggcccagagaggttgagtaacttgccctaggtcacccagctttaggtggtaaggtagaacacgtaccctgggatgactcccatgagcacctgtgttcttatctgctctgcttattactccctaccctctttccactctaaaaattgccttgcagctgcattcattccagcatggtatgaggaaacatggggaatcagaggggagggcgaagcagagtgagcgctaagggcagtgcaggaaaatgggcgccacacctgggactccacacgagacagcacaggctcatctcggtagggccaccacagcacgaggagttagcgccagggcgggaagttccatacaagcaggattagtctgagcagagagacctgcaggtggacagaagagaggtcaagacagtcgtcctgaactagcaggaagtttgtgcagctggggaactgatcaggcttcagagccaggaacctccccctggccttacgctctgcaagcacctccagataagaccatgcagggttgtggcaggttcttccatagccaggtcactcaggggtaaggtgacaagtgatgagtggggaaagtcagatcctatcatgggtttgagagtcccttaacaatcccagtgtgcaccctaagtggcaaggacaggggttaagagccaaactcctatttggtaccctttccaggtttcggtagagggcgcatcagaggcctgagttcccagatttttggggtgcacaagtgacccagccatctccaaggtaggcagctcatcctagtttcaatccaactaaaccaagccaggagatgaggtgggctgatggtaacatgcccatccatccattagtacccagctcccctgagttggagagcccggaggcctccagtgagtctttccaagatatgacctgtcactgcctcatcccttcccttctcacccctgatttttcagacttgataacttcactgggtccccctaggatgctctaggatgctctgctccccgtatctctctagaccatttctagccaaggcagatgcaggggggcctacctgggccacactctgttcagtcaagccgccatcatctgcctgtaaggaagcagagtcaaggggtggggtagggccagcatgagggtcctgggtcagggaggtgaaggaaaggggcttgggggtatgggtgaggtggtgcagtggttagggtgattcagagctgcacctgtgtcactggttaatagaagtcctgcagcctgtcatttggaagccaggacctctgggattgtgctatggtgcgtggagggtgagggaagatgggaagaaagatgggaagaaaggtttcatccagacatgagaaagccaaacaaggcagggaggttctatccatacccctgacccccaacctcaaggccaaggcagccacctagtgcctctttgaagatgtatttatttccccagtctatacttcctaccaggaaagaggtgaggtacttgtgctcctagccggggagaggacaggaagatttcttccattaactggcatcccacccagaaactgctgctcatctcacccctaacaagtgtgtcagcccagtggttggcttctgctagaggagcttgggcttctaccatctaggccctagcagccctattcccagggaggacaggaagggcagcctaaaagaggaggtgtccaggaagactcttaccctaaaattcaccttctggatcacttgctgggggtcactctccagaatcacactacaagatgagaggaaaaaccaggaggcaaatcagtggcacaatcctcccctccgccccttctccttgccaagcctcttccctctccgaaggcatcctgcaacatctccaccttccaggtcccttcccactgatagccctcaagtcagaactctccctcagcatggagagccctcagctctgattctttgatgcttcaacccagtggtccacatgctttgtcatccctgggcaaaatctttgaaactggataagaacagtctggtctaggatgatcaggttgtcaaaagcagggactctcaaaactcagagctcttgaaagttcacttcactttctgggtataggattggattccctgtgaaaagagttaggaagagaggccctgggggttcttatcttgttgcactgttattttatggcatggggtcatgccctgcataaaagaaatgaaactccaaaaatcagcatctaccttctcccctacttcctccctttttttttttttttaaggctgggcacggtggctcatgcctgtaatcccagcactttgggaggccgaggcgggtggatcacctgaggtcaggagttccagaccagcctggccaacatggcgaaaccctgtctctagtaaaagtacaaaaatcagccaggcatggtggcacacattgtaattccagctaattgggagggtgaggcaggagaatcgcttcaacccgggaggcagaggttgcagtgagccaagattgcgccactgcactccagcctgggcatcacagtgagactctgtctaaaaaaaaaaaattttttttttaaatcttcccttttaggccaggcacagtggctcacgcctgcaatcctagcactttgggaggctaaggtgggaggatcacaaggtgaagagttcgagaccagcctggccaatatggtgaaaccccgtctttactgaaaatacaaaaaaaattagccggtaatggtggcgcacgcctataatcccagctactcgggaggctgaggcaggagaattgcttgaacccaggaggcagaggttgcagtgagccaagatcacgccactgcactccagcctgggcgacagagtgagactccatctcaaaacacacacacacacacacacacacacacacacacacacacaaagaaacaaacaaaaaaattcccttttgatagacccaaatattgtagcttttctcagagagcaggcgctccttcgtgaggccttggggttatgtacagggtacatgggcgtgagggcctgtcactgcggcaggacaaagatgacaggatctgagtgtacctccttacccactgagactcctccaaggcagaagctttgtttctctttgttactaaatcactggaaatgacaaacatttcttgggagcctcttccagtccccatccttgggctgagcaccccctgtcccaagctccctaaccaggggtcctgtaatccataaagaaagagcatcccaggccaaggctccagtttaggcgttgcctcccgactggcgcttccccagtttttcttggcaggaaactgagttcctcagaggcagagacgggaagcttgtgaagcttacacctcaggcatcctcctttgcacagccatccagagccctgcatcttgttttgcatttatagttttgtgtgtgtttgtgtaaagttttccttcaagagggttcaccaaattgtatatgcttctggctccccaaaacctggcgttaccccactcccttttgggtcccagaaatctgcaggaggcattccttagtgccccaggcagtccagtacagtgccatagaaacagcatggcctctggaactattcacatggttttagatcttggccctgccactccctagctgtgtgagagacctccggcgtgtcacttgaaactttgagcctgtttcctaatgtataaaatgatgtaatgatagagggatgtatgtttttaaggagctcaagaaatttctattggccggggatggtggctcacacctgtaatcccagcactttgggaggctgaggtgggcggatcacgaggtcaggagatcgagaccatcctggctaacatggtgaaaccccgtctctactaaaaatacaaaaaattagcttggtgtggtggtgggtgcctgtagtcccagctactcaggaggctgaagcaggagaatggtgtgaacccgggaggtggagcttgcagtgagccgagatcacgccacttactgcacaccagcctgggtgacagagcgagactctgtctcaaaaaaaaaaaaaaaagaaatttttattatcctttgccccagagccagaacttctttttctctctgaatattgatcccctgatggaaattcacaagccaacttttctcaaaagagctcctagcttcctaagaatatactagcataccaataggaggcaacatctattgaatgagaaccacaagcttcacatgtatcttctcacacatgtatttaatccccacaatcccttattacctccatcctaaagatggagaaagtaagcctcggggagggtcagtaattgacccaggtcacgcatctagcttgtgttggaattgagccctaagagcaggacatgtggggctggtgggactgtctgaagtccttccagagagggccagcatctgtgccagtgcttcccctgggcattggagaccaaactggattttccccaaaccctgcctattcaacagtctcccatagtttgacatcaggttagtctcttgtttggcttgactttggctaacattgaaatcaacttctatcttcatgagtggggcgctagtaaggggaagggctaggggaatgggatccctgggaatatgctgggggaagggagtgagaagttggtcagagttctagccatgctgggtgccatctggggctgatgattatcaaaggcactcctgctgtgagtgtccctgactgtcccctcctcacccgccatccacaatctcgtccagcaccaagaaggctccgtccatgttctccagcaaccagcgcttctccacgttcttcctgaaggtggacacaagctcctgagcctccctgtggctgggaggaactgagtccctgcctaggtgaggctgaccccactctccaaagactgcctcattcacccctcaccaaacaaggactgggaaggagaatgtgaagggcagtgagcacagagcccatgcaaggcatttctgagcaaagggcagttctgcttccttacaccctaccttgtccaacctcccatactttgggccttgacaccctggcacccaccacaggaccccagatgcgtttcacaactaggttagatgctatagcacagccctactttcgttcattgtgtcgactgtgaacttttctttttggattatcttagtcttgtggggacttcaggagaaaaacagggaggaagggtcctgtgacatatcagggccagggggatggggcctcggagggcagagaacctcactcaccttaacatgtggttcagagactcaaacaggcaggtgagaacagacatgagcatcagctgggatgggcagatacgggaggaggaaaaggagagtttgagattgagaaggtcaaaagaagcacttggagcccacctgtgcgggcagcaatggagagtttcagaggcctgggctggagactgactgcggtgtgacattagagggaacttccatgtgtctgggctgggaaactggagttctccactgggagacattgagtgtatccttctctagttatgtttaagaaggacaaagcctcccttgaagatgaagtgattacttcattcctggttcccaaggaaactaaggggcatcgaagatacacattgtcccagaaagaacccttctggctgccctcctctaccccatggagcctaaaagaaggggtccaatggtgagcctccaggtcccagcctcaagcccagattccaaataacaacatttccccatagacagacccttcttactgccccaacctcctgaattcacctcattctcgtaggatgagcccaccacgtataggaagaggtcaatgctgttcttgtagacgatggtcatacccccaaaaaatgcaatctcacctagaagtggagggagctttcagtcctggccaccttgcctggtcctagcctagcccctcctcctcatgtatgactctgtgactctcctatttccttctcccctttctggagaacccttggaaagaccagcactagggacactaccatcaggcagccccgtgtccttccccttatctgctactctatttctagggactgcctcaggccaaggagtcaacaagcccagttgttgacccgtttacctcctgcccacgctcccaccctgtgcagcaccttgggaccagatccaggttgggaccacaacacagttggcctcctcagctagagagaggcctggggatgctggggggttgggtagttgggggaactggagagtgacagggagtggaggttccctggaggaagggagtggagaacagcagggaaggagaggacaaaaagcctctgaagaaagggaaatggcctgtgggtgtgcaaggctgatggggacagatgtgtccagatggagaagatgacagtgtgcatctgatagtctgctggaggaagagggggacacttactctcagtccggctggtcttgttgaagacatttttctcgaaaaccatctgctccttcatggaggggaatgtgtcatcataatactatgagaaagggaaggagaaaggaccatagctttccacacagcctggatcctccctagattggggggcaggaaagagtaggcgctgggcaagcgggatcctgcttccctgccccatctctccattactgcaccctaggcctgcaggctcattacttcctccaaaacaaattattcttttttagatggagttttgctcttactgcacaggctggagtgcagtggcacgatctcggctcaccacaacctccacctcccgggttcaagcaattctcctgcctcagcctcctgagtagctgggattacaggcatgcgccaccacgcccagctaattttgtatttttagtagacagggtttctccatgttggtcaggctggtctcgaactcccgacctcaggtgatctgcccaccttggcctcccaaagtgctgggattacaggcatgagccactgtgcttggccccctccaaaacaaattctgagcaaagaaagtcccaaaaagtagagggatattgaggcctgcttttggagtcccctcctggtttcttggaggatcttgtacattcagcagatgtgcagggtgctaaggattggcatggtcacgagggcacactaattctacagcaccctgagtctctacaggaaagacggcaaaaccaggagtccttcttaaacaataataatgataataacaacagctactttattatccccattacacggatggggaaaccgaggcatcaagaagtcaggtaatggcctggcatggtggctcatgcctgtaatctcagcactttgggaggccgaggcgggtggatcacctgaggtcaggcgttccagaccagctttgccaacatggtgaaaccccatctctactaattatacaaaataaattagctgggcatggtggcgggtgcctgtaatcccagctacttgggagggtgaggcaggagaatcgcttgaacccgggaggcggaggttgcagtgagctgagatcgcgccactgaacttcagcgtgggcagcagagggagactccgtctcaaaaaaaaaagaagtcaggtaacttccccaacatctcacagttgtgaggccaaagctgggtttgaccactaaggacggtctgactgcagacagggttatagtgaagattaaatatctaagaaacaattcctcacacatatcccataactaaattaatgttttttgtttgggaatggtgagcctctctctctgactcagtttcttaatctgtagggaggaaaagcctttggccttgctgatccacctctgaccatctgctggggcaaggtgtggtcagctcagttttcaattttctggatgtggattttgccacttaatactcaatccgcaggcagattagccatctccctagtggccgctgcttatttgaatttcataaaaacaaaaaactttcagttccaaataaacaaacagaaaatctattttttgggatggggtctcactctataacccagattggagtgcagtagctcgatcatggctcactgcagcctcaacctctcgggctcaggcaatcctcccacttcagcctcccgagtaggtgggactacaggcacacaccaccacgcccggctaattttcgtttttttgttttttgtttttgttttgttttgttttttgtagagatggggtgtgccatgttgcccaggctggtctggcactcctgggctcaagcagtccacccgcctcggcctcccaaagtactgggattacaggcatcagccactgcgcctggccttacaacacatttcttttctttttcttttctttttttttttttttttgagacagagtttcgctcttgttgcccaggctggagtgcaatggtgtgatctcggctcactgcaacctctgcctcccaggttcaagcaattctcctgcctcagcctctcgagtagctgggattacaggcgcccaccaccatgcctggctaattctttgtatttttagtagagacagggtttcaccatgttgtccaggctggtttcgaactcctgacctcaagtgatctgcccgccttggcctcccaaagtgctgggattacaggcatgagccatcacacctggccttataatgcatttcatagctaatgcagatgctatagctcccctacaattaattgtgttgacagcagaaatttatttttggattattttagtttggttcgctcaggccatgtttgctaggatagataacagctaattgaatgggggtacagtgaaaaccaccttgagcttcatgtcaaaaaacccgagtttgcctgtgaaacctgtgaaatgggagaagtgaaaaaattaaataagtaaataaataaaatttgagtttggatctgttaggatattaatacttgtgacctcaggcaactcacttagcttctctacccctcattttcttcatctacgaaattaaagagttggattatacagtttctaaaatcccatctggttctaaatccttagactccttagactaaatcgttagtgtttaccaagctgtagaacaaaagtggaggtttagagacaaaccccaaagaacaaaagaacttgtgtgggggtttggggactaagactcctgggtcccaggctcaacactccactgacccattaggcagaaccttcccatgcccaggtccaactggccagtagcaggatgataaggaaacatttcagggaacatgagtagaaatagaggagacccctcatttcagggagcagcaccttgacaaggcaggaggatgagaaggacctctggaggggtctaagctgagctgccctgagtcacagagatcacagtggagtttctcctgagacaggagtgtcagctgagtgggaactgtgtccctcatgggtggggtcagaggttaccttggccagcagccggcgcccgtcattatctaggatgaaaacagccttgatggtgtagagggaaggttcctgcaactgacaccggagaggagagttccgtttggcccctgactcgaggtggacaccctgtgtctatgggatctgctggccctaggatacatcctcaggccccagcaaccccagtcctcaaggtccacagctggttctgcccagccctgtgccacatgggccaacccaggtgcccactccactcccaggcagatgttccactgcaggccccgagtgggcgctgtgcccgttgggtgcagaaggtccttccgggcccaagttctgtcatgcactgactgctccagagcccgagtcggagtgtatcacagaacctgggccgggggggacagcgggccgagcctccttcttccagctgatccctggccgggctggacctgcgctatcagcgcgcccccaggccctggcccgggtagactccagaagcatgcccatcacccaccggtgatgggagccgagtctgggacggacaggccactccttaccctccccgcggaatcgcaactcacccgccacccccactccaaacggacccagaacttcagccccgcgccgacggactcaggacaggcctcctctccggtcggcgctgggacgaacttttcctcccgggtcctggggccagtcaggggtgacacaaagttcccagccgccgggcgcgcgagttctgagttggctgctccccctaaccctgctctgtccctgcccagctcccgccgcccgggatccccgcgcccgcccgctccgtacccgcagccccgagggctccccggctcgagcaggcggcgccggcccccggcctgccgccgcggccccctcccccgggtgcggacgtggccagcctcgggccgctgcattccgctcgccg

SEQ ID NO: 9891 - DNA, 22635 bp, Homo sapiens
gttcctgacgtcagtcgaaatggagatccgtttgtagctacctccatcgtggaagcgattgcgactgttgacagagctataaactcaacccgaacacatttgtttgacaggtatcgtggggctgtaaacacgctgaccctcaaatcactgagctttagggtgaaggtgggagtgattaaagaatgcatgcagttctaatatatgaattttgatttgattatctgatgatcaaaatgtttaatttaaaaatcatgaacaacatgggcatctgagttttctgggggttgaaataacagaaggatgtgtgcttttcaaatagaatttggctatgatccacaaccaaaacattctttgaaaatttcaactcattcctttggcttatgactaaatgatttggcaaaaacaaatagtttaaaagtcattagtgtatttgttcacgttgctgattccaaagcagtttttctgcatcttatgtgaaatgcaatatctgtgattttctctattgacttaattaattatttgtttttagtgtcttccggtttttgtctgtttgttttgtttttgttttgttgcctcccacttcggatgaggaaggtatagtacattatgttgtagaaagtagccgtagaaatattaatagcaatgattatattttggggtactatgaattttatcttcagtaatttgtttcattcttcctttcttccccctaaactctggttagccgtcctcgttctccaaatgatttgctggccttgttccggtatccgagggatccttacacagttgaacaggcacgggcgggagaaatctttgaacggacattgcagctcattcaggagcatgtacagcatggcttgatggtcgacctcaacggaacaagtcagtgccaaagccttttcttcctcctccatggcctgagtaacggggttgaacacgcctcagttaagtcacattcctagggaagagttccagcattttctttcccactgtgcttatgaactgtgaaattatttccttaaactgtgattcctcttgagccctacagccctgtcgctctcactttggtttaataggaatctctgggggacgtgaagtcccttggagtgctgatcaggctacagcaggtccacctgccctgagtgggttatgccatcctggccagggtgggttatgcaagcccagtccctctgcaacaaatgagccataagggaggacttggcagcgtgcttgctccctgagtgacgttgtgtcctgggaatgcggtgccacgcgtattaggagggttgttttggaagagtcccgggtctgtgaaaccagctgatgagatcacctcgggctggtgtggagatgctgttgggggaggtatgtcccccactcactctgctctggcactttgccgttgcccagtaaataacagatgcctttacatgtcacgattgtccttgctggtagtagtactattgatgaacccatagaagaccctgactttctcatgtaaaaacatcattttcagcagcagctggttactcatggttctgtacacacacacacacacacacacacacacacacacacagagcacggaggagaatgtaacagtagctgtccctgtgggatgaaagaactgctttataatttttcagttttccaaattgttttcattgagcataacttttacgattagagcaaaaaatgttcttcaatggttaaatgaaagagacgtggaattgagacctgtagggtgatatatgcccgtcttcggagtagagtgttgctctgagccagccccgtcctgttaggttttggagccctgttggtgctgaagcctgggcaccagccaatgtgaagctgtatgttccgcagctcctgcttcctgatcctctcctggcctctcgtggctgggggcgggggtgggggcagggcaggaaatgttggagttggagacctctggatgtttctgcttttctcgatgggtgaaactccagcctcacctcccaggcacattcttggggagaagcatcagagcccattttgttatttcaacaagtatttattgggcactttctgcttgtcaggtgcagggggagactaggatgagaggtaccaggcatgggtcccagccccttcccaagtccctggtgccagtctcctggtagaaaggccatgttctcttctccagagaatgaagagggagttactaagtgtaatttcttgctactccctacctttcttcatttagttacaggatcagatctttaaacattactgtggcagcccagcaagtgggttctgccgccaccacagaaataaagccatctggaaatgtctcctcaaaggcaggctgttggaagctgttccttgtgaggaattgcatgtccattgtgtgtcattacatgccaattatagaaagatttagactcagggaaagacagaaaggaaagagtaaaatcaccccaacaatgtgaaatcattttatacatttgctgtttacccaagcagcagttaggtgcacatgcaggcactcatttcttcacttattcgttccacctgcctgtcagggcacaccctctatgccagtcattgtcctgggccagggcctacagtcacaaacggaagaaataaaaacctctgccctcaaagatcagaccttccagagaaatgcagatggaaaaccagagagaggcccctgcacataagaagccccagcgagtgacccagagagaaacagcaggcgggaggtgggtggtgccctggctgggatggggtgctgttccccatgggcgaaggtgacacgtgagcagggaccccacaagggcgagggggcctccctggagcatctgaggggaccacacatgcagagtcttggaggtggggcacgttggagcatagtggaacagcaggtggtcactgtggctggaaagggggtgaggaagggctgataaagttaaggagatttgtgctccaccagaaagggcctgggagcgaatataaggatatgtcgttggctgtgtatgaaatgggaaccttagggtttcctgcagagaagcaacatggtttgatgcattttcaagcatcgggctgggtgaccactctgcatggggtgaggacagatgtgggcaaaccagtcctgggaaactggggccagggtcggtgccacctgctctggttggcgggtctggtctgcctctgaaccaatggccaacgccacggaaaaagtgaacattctggaggaaagcccggagaccagccccacagcccagccaggcatttgggaggaagtgcttttcctcctggcactctgctttcttggctctatggatgttcaagattgataattctgtaggacttcccaagagtagctgtgaaaatagggccagatgtttcagctcactgtttcagcctctgggaaaagtcagacagaacagaaccaggggctgaggggagcccggggttcatgttccctgcacagacctttcccacccaacacaccagggtgtgtgtttctgacttattctccccagcctggaaaatgcctcacttccaattctttgcattcttatgtgggtgttatggacaccgctcccccacagaaaaggggctgtctcttgttttctttaaaggtgtccatagtgatacctgtgatcttgacaagcagaaatgggctggagaaactttagaaaaaagaagcagtgatggcttggaactctgtgagtatgtgcacacgtgaaagtgtgagtgtggctctgtaagcatgtttgcatgtgagtgtgtgcatgtgtgaatggaaaacatttaagcgtgcatgtgtgtgtgcgtgtgtgtagcttttcggcaggcatgacatgtgcctggaaaggaggagtgttgaggaaggtgaaggcctaggatgtatgaatatgtggaggaagcactttggcgaacacagagatctgagtgtgtctgaccccaggacgtggagtagctgttgcttggagcaggtgtcttgaaggcgaagactaggatctgaacttaggaagatctctttcatctgtggagtgatggcccaggctaccatgtttggaatttcttctgtagctagtgggcaaagacagaaggtctctgagcaagaaggtgacctagtcggagcctgtgccaggctcatgggagcgtgcgcttgctgtggggagggcgtgtggatgacctccaccaggcaggaggcccttctggaattgaaggccagtgccatggaaatcagtcccaggattctgccagagaaatggagaggagggcgcggcggctaggaacattttgaggtagcgtgaaaggaagtggcactcttttggacgttgagggaacagcatgaagcctcagtggaccgagatgtgcagtgacaggtgtcaggaaatgccctgctcggcagcctgtggagaccgatggtgtgcactcgtgtggaggtgtggtgactgtctcttacacggggcgtttaaagtgaggttggaacagtgtcagcctggactggtcaacgtgggtcgggctccatcggttaggggtctcccagaggagagctgctggttgaaaccatgagactgctaagtggggaggggagacagggcccagaaactggggctgtggagagaatacctgtgtttggggctggaggaggggaggagcagttttaccaaacaggaggtgagcaggtttccagcaggaagcgcttgttgcatggcgcacaacaggtttcatgagctgggggtagatagccccatgtcagcggcagaggtgccaaggggtaccgggccctcacacatcctccaggggaattgagtgcgtcttgcttttctccacgtcccaggttaccactacaacgacctggtgtctccacagtacctgaacctcatcgcaaacctgtcgggctgtaccgcccaccggcgcgtgaacaactgctcggacatgtgcttccaccagaagtaccggacgcacgacggcacctgtaacaacctgcagcaccccatgtggggcgcctcgctgaccgccttcgagcgcctgctgaaatccgtgtacgagaatggcttcaacacccctcggggcatcaacccccaccgactgtacaacgggcacgcccttcccatgccgcgcctggtgtccaccaccctgatcgggacggagaccgtcacacccgacgagcagttcacccacatgctgatgcagtggggccagttcctggaccacgacctcgactccacggtggtggccctgagccaggcacgcttctccgacggacagcactgcagcaacgtgtgcagcaacgaccccccctgcttctctgtcatgatcccccccaatgactcccgggccaggagcggggcccgctgcatgttcttcgtgcgctccagccctgtgtgcggcagcggcatgacttcgctgctcatgaactccgtgtacccgcgggagcagatcaaccagctcacctcctacatagacgcatccaacgtgtacgggagcacggagcatgaggcccgcagcatccgcgacctggccagccaccgcggcctgctgcggcagggcatcgtgcagcggtccgggaagccgctgctccccttcgccaccgggccgcccacggagtgcatgcgggacgagaacgagagccccatcccctgcttcctggccggggaccaccgcgccaacgagcagctgggcctgaccagcatgcacacgctgtggttccgcgagcacaaccgcattgccacggagctgctcaagctgaacccgcactgggacggcgacaccatctactatgagaccaggaagatcgtgggtgcggagatccagcacatcacctaccagcactggctcccgaagatcctgggggaggtgggcatgaggacgctgggagagtaccacggctacgaccccggcatcaatgctggcatcttcaacgccttcgccaccgcggccttcaggtttggccacacgcttgtcaacccactgctttaccggctggacgagaacttccagcccattgcacaagatcacctcccccttcacaaagctttcttctctcccttccggattgtgaatgagggcggcatcgatccgcttctcagggggctgttcggggtggcggggaaaatgcgtgtgccctcgcagctgctgaacacggagctcacggagcggctgttctccatggcacacacggtggctctggacctggcggccatcaacatccagcggggccgggaccacgggatcccaccctaccacgactacagggtctactgcaatctatcggcggcacacacgttcgaggacctgaaaaatgagattaaaaaccctgagatccgggagaaactgaaaaggtgagctgaagaggctgtgtgggatggctcgtgtacctaggcacctggaacacctgaactgtggtgtgtgtgttatttgtctctgtgtgtgagttttgttcgtgtcgtgcagaggtgagatgaaggtcaagtccatgaaggtcaagatgggaacctgcagcctcccgtggctgcgtggttgtggggagggggcagagccaggggtggatggacggtggagggcccttccaccggcctgttttgttccaagagaggagctttgctgagctgtggcacattttcagcttagagatgagctatacttttctggcagaggggttgactgcagggaaaaatacactgttcgcaccagaaaacaccaaaactgacactgtggctgttgggcagcttcgggttcctgctgttgtatcaggggcagagagagaggcagagcttggtgtctgcagatccgggcccttggggccaccagcccctaaggcttggcctgtagcatcttccatactcactgtgttgcccagacccaggcctgtggggccacctgcccatgaccgccacagatggcgccgcttctgagccacagccttgatcacctgtgggtgcggttctccttgttctgccacaaaggcaaaatgggacgctgtcacccctgagacaagggaagctggccaggtagattaggagacctcggaccctgtggggtggaaaaaatggcaaagttttacaggcaaagcagtgaccacagcactacccaggcctaggactggggtaggatcagggctgccgggtccatagccagtccccttcccaggactcggtgccacagtggggttctcattaactcagaattccccaaagtggagacattcagcggctctcctttttgctagatattcacatcttttactcactaccttttttttcatgttatttctaccagtttatttgctttttgtattttaaggaaatagaaataattgcagccaggcccggtggctcatgcctataatcccagcactttgggaggctgaggtgagtggatcacgaggtcaggagttcaagaccagcctggccaagatggtgaaactccacctctactaaaaactacaaaaattagctgggcgtggtggcaggcgcctgtaatcccagctactcgggaggctgagcaggagaattgcttgaacctgggtggcagatattgcagtgagccgagatcacgctactgcactccagcctgagtgacagagaccccatctcaatcaaataataataaataaaaataaaataattgctcatcagtgttttcccattgtgattcttctcagtccttggattatgaatcagattcacaggtcactgtgtattaggagatgttattcccattcaaaaacattgttttaaaaagaagaaaaaccctttcttcttaagactgtcttcctgtatttgatggactctgcagttgactcctaagttacttaacgctgaagttaggacataccctgttaggatctgacctgtgccttctaggggaaagtgattttttacttgtaatttattgtaagttatgactaaatgaacatgatgtcctattaaatttaatatgttccagtattcatttaaataatgcgcttaaattactggcatttggaagtgtgtgcgcactccgttaatccagtgtaatttttttatcatggttttgctgaattaggactgatgtgaactgtctgtgttttttatgtgcttaaatatcctcctttgttcttgtccaaactgacacagattactctcccagatgattctctcttttgccaaacttatttcaaaacatttcaaaagagctagatgtggagcccagcgccaggtggaccgcggctgtgttgcatgctaggtccctggtaaagaagttaaggatgttacccacacactgagcccctcgtctctttatttatgttttcctgtctcagcccattgctgactaaggggaaatgaaacataaacatgagaaaagatgcatgaccatcagagaccatggggccaggaggacttcacagggcagaggggttgccttcggcagactgtagagattgtgtagttctcatctactttgtgtttcacggccgcacggcgagtggatggcgtggcgttggcctgggctcgcctctgctgcccatccccagccgtgggacattccggaactgcgaggtctcttccctggaggaagctccttggattcaggtggaggctttagactctggtgagcctaaggaatgtgactattccagcccctgtgagtccctcccagcggtgggggacagaagagagcaggcacccagagcaggagccgcccggagcaggagggagtcctctgggaaaaggtgtggacgcttctggtggccctagtgtgctgtcctcagccacagaccagatgctgccagggtcctcccgaccaagtttcactcccaggggacatcttagagctagaagttcaacctgaatgtcattgaacttagaagaaaaagggacaatttgtctttgaaagactaaatgctagtttacataaaattgtgtttattctacggtaagaccaatggccagtgaggacacagccctgtgtgcatcctgttcagtaagcaacaaaatctgtcttgatcctagggttcagttggtggtcactgatttgagttttgtagaaaagggcagtgagaattatagaatatatatatgttaaaaatcgagtagagctttgaatagcagttgaaacaggcatcatctgctgcgtagtcgagttctaagatgagattagctgattcgtagtagaagttgtgacatgttgcttataagcctatatttctaaggaattggaagaagtcgatgaaaatgtttgttcttgaacacataaacctaagttttttgccctatctttgcttagcagatattttctttatggcaaatatattttcaatatatagtagaatcaaatgttattctttaaaaatgtatatacttttaaaaatacacatgaacaataaactatatacatttagctatatatagtttattgttcatatgtttattttaaaaagattggaagggtatacattatgatgttacgtgtggttatccctgaatagttggaaaaggtgtggcttaaattttcttccttatcttttcttggcttttctaaatttgttataataaatgcgtttgtgtgtgtgtgtgtctcacatatataatagaaagtagggaaaatcctttaaagcattgtggagagatgcagcaaagaagtaaatattttctttgttaagtaaaattctaaataatgtaaaatagtgatagaaagaaagaactgtttttatatttgctgtattttttaccacgtgcagctttgttaggtagatttcagttttctctttattttttaggttgtatggctcgacactcaacatcgacctgtttccggcgctcgtggtggaggacctggtgcctggcagccggctgggccccaccctgatgtgtcttctcagcacacagttcaagcgcctgcgagatggggacaggtgagcacgtgcaccagaaaggggagcacgctcctaagccaccttcttagggactccagaggagaagagctgtcctggttgagactgagggaggcacgaggccctagtgtcttctgtgtgtccccggttgagaatgaggaaggcactgaggccctggtatcttctgtgcaccgccttgggcttacatgtccttgcagcctcaaaactcaaccacaccaggttcaatgatgcttttcccaccccttcatttataggaatatttctgttcctgtaaacctgttggacagtccatacagctaaaccactgtgggactttagaggagtttgggcttcgggcaagatctttgttttatctctagtctactgttattactttactttaatgtagtggaaaggcagaccctacctattacaaactatttcagcagacctgaaataactgccatgccagttttgttttgtttttttaaagttgcccatcgtctttgttgctagtcagaagagctaacactgtcgttctttttttttttttttttttttttttttgagacagagtcttgctctgtcacccaggctggagtgcagtggcgcgatctcgactcactgcaagctctgcctcccgggttcaccccattctcctgcctcatcctcccgagtagctgggactacaggtgcccaccaccacacccggctaattttttgtagttttagtagagatggggtttcactgtgttagccaggatggtctcgatctcctgacctcgtgatccgcccacctcggcctcccaaagtgctgggattacaggcgtgagccactgcacctggccaacactgtcatttttacaccagattgtctgcctttggttttgttatggggtaggggatgtgagcagtgtgtgagtccatttttaagtgacacctaatcaaacctagtggtttctgtattgctgtgaactaagcaggggagattttaactcagctcctagtgacctgtgagtctcctgcccttctctgatcctgctttcattttgggggatccaggttgtggtatgagaaccctggggtgttctccccggcccagctgactcagatcaagcagacgtcgctggccaggatcctatgcgacaacgcggacaacatcacccgggtgcagagcgacgtgttcagggtggcggagttccctcacggctacggcagctgtgacgagatccccagggtagacctccgggtgtggcaggactgctgtgaaggtgcgtgccaggggcaccatgtctgttcctttttcatccctggttttggtgactgcttggcgggtgcttaatgacctgcagatgtcatcctaatcttgaaaactgaaaacaaaatattcagctttagatttaaatcgtgctgtatccatgctgagatggactgcggagccaaaaatatgaacaaagttggtgattctgaggaattggcagtgctgtgggagaacattcagaataactaaaacactaagagaaacagaaacccaggcttcagcaagatgtgcccctaatttttccttaaagcctaatgtatgtctagcttccagtacttgtgtagccagataaaagacgaaaatcaaaatatggaagaagcatatcaaatatatcaggttttcttaaaagttaatctgaatgttgtaaatatctgtaacataagtgactgaagatagatgttatcaaatatctcgtgaggagccctgcaggtaggaggtggtctcatgattggcgcggggggccctgtagctgagggacgccctgatatcaatcccacagccccggcactcgtgccctggagtgccagctccgtcttccctgcagaggcgtcagtggcctgctgtgtgaggcgatggttctcctggctgagttcctgcttcgcattcctaactcccagtcttggttaacctccatttccattactaatttgaacataattttggctttattcaaactatgatcagatccccataaaataccaaactggggatgtttagaacccaagttgtggagcactcactcttgtggtgagagaagcagggcccaccacaatggggggatctggggacctgcggtgagcgtgaccgggaggtggggccagatcccggcctcacccggcaatctgtggagcttgtggtgtctgtggacacttggtagtttaagaagagacacacaaagtacagacactgtccacatattctccaccacctcatttttcctgaagtaatagttctggccaagagcttatttaatttagtaagcgttgaaatctgcactgataatagagctgtgttttagcagcttcttctaagagagtgcgtgcctctgtgtctgtgtgcgactgtggggtgtgtgtgtggagtgtgtgtacctgtggggtgtgtggggggtgtgtgtgatctaatcctgcatctgcctcctcatctgcaccccccaccacccacacacacatgcatggaagtatatatgataggagaattcacataaaaaataaaattatgcttgctaggtacccaattttccaaattatttacatgcttgttattacatctgttggaaacttatatctgttttttgttttattgttttgttttgtttttgtttttgttttatatcctcactggtttatccaattcaaaatgcttttctacaagcatggtagaaaatttgttctgtttgtagaaaattgttctcttgaaaatgattaggaaaagccaatgatacaaaaacccattttctgataactttaccaggcccctgttagctgcttattaagaagtacagccaggctttctgttcttttgctaagaaaatccaaagtcctttgaaagacttcatctttaaagccagtctttgttccccgcatgttacaagcccctcctcctctcagggcactgtgggagaggcttagctgctgaagcaattgctgacattgtttcttccggacacttttccctcttaaaataccaggcatggccttaagctgacacagcttagagaatacttgataagctttacctgtttttattttaccccaaaagccatatctaaatacagcagaaaaatacgaaaacagaactcagatttgacagaaccaaatgtcaattgctatttacttttcaattaaactttttaaaaagacacattgggggctgggcggtggcacatgcctgtaatctcagcactttgggaggccgaggcaggtggatcacctgaggttaggagttcgagactagcctggccaacgtggtgaaacccgtctctacaaaaatacaaaaattagccgggcgtggtggcgggcacctgtaatcccagctacatgggaggctgaggcaggagaattgcttgaacccaagaggcagaggttgcagtgagctgagatcgtgccattgtaccccagcctgggcaacaagagtgaaactgtctcaaaaaaataaaaaaataaaaagacacatttaaagcgaacgtccttgagctacaacttttcatcatttgcttcgttgatgcctacaacaagtgctgtgtggggtctgcactaggtctgggaagccagcctgctcctggcttggccagcctgggcagcacagagcaggtgcaggccaggccgctgagcaggtgtggcccagccgtgccctggggtgtgaggaagagacggccatcctggagggacggaggtcccatcaaagagttctggggttggggctggtgtgcgctttggcagggaccccacagtgcctgggaccgtgtcctggccctgctgcttccctgtcgccctgtaattctaccagggacccaccccagacctgcacagccctgggtggaccccacctgccagtgaggctcattcttgaccccaggtgttgctgggaggggctgcggtagtctgggaggcagctgctgttttatgatgtatttgtgtgcccaggagttttaagaaactctgctcttctctgctcctgagacgatttgtgggtggaagaagcgaggggtccagccagctgggtttactcagaagctgtatagttaactgcggaaataaacacattcagtgggactgtttgtgggctccgctgtgggggcagagggagctttaggtctctgtcttgaagatactctttccagccagtcagacaaatgctagaccagaaggagccggccgcccttcaagggagacaggaaagctagcatggggtctgaggtgtatgctgcacgtgcctcttctcttctcatagaatttctactccagtggcttcctgagacattagcattttgcaaaggtccatatttgcccttcactttcgtgctctgccacagctttcttgggtggggatgatgtacaagacagactgaacaccccattacttcgttagatagtgtgtccacagggcccaggtgggacacggcactgagggcccctcactcacccggggaccaggagggacacggcactgagggcccctcactcacccggggaccaggagggacacggcactgagggcccctcactcacccggggaccaggagggacacggcactgagggcccctcactcacccggggaccaggagggacacggcactgagggcccctcactcacccggggctcaggtgaggcatagcactgagggcttctcagtccaccacaggttgagaaggaagccactcctaggcagggaggtgtttgggctacattcaggagaagcagggtcaggccgcctcttgtctgacactggggctggcagtgtgacgtagggagtgtagcataattttaaggcactccagagtgcagattgtcatctggccatcggggagggacccccagaaacagcagactctgatctccgaggcagagtgcctgagcctccatctgtgggtggagggaactccgcgagggtgtggttagatggcgtggtgagcctcctcagtgtgcccagctgtcctcagggcggccagcaccaggaggtcatgagggctggggcacaggtggagagaggcttggcccctcagaccaggagagggtaagagccgcagaccagctgccaggttgcctcactgaaatgtgccacagtttgttccacgggcagccagtgaagacttcatagttggcaggatgtgcttaatttccccgaggtcagagccttcagagctgacattctgctttgtgcttccattttagactgtaggaccagggggcagttcaatgccttttcctatcatttccgaggcagacggtctcttgagttcagctaccaggaggacaagccgaccaagaaaacaagaccacggaaaatacccaggtatggtggtctctgaggtcaaatgatgtgcagaggggccctcgcaccgcgggcgtcgggcagtaggaccggcatcctgctgtgggcctgtggcgaggatggttcctggcagggacgtcccagggcactgggggccaggccgcagcctgcgtcctgctgtgctgcccactcagagcatcaggggcggtgcacacccaggaaaccttgaaatgagacccagctcagagcatcaggggcggtgcacacccaggaaaccttgaaatgagacccggcgtgacctgccaaggttatatttccctcctcctcctttcccctcaccacagtgttgggagacagggggaacatctcagcaacagcacctcagccttcagcacacgctcagatgcatctgggacaaatgacttcagagagtttgttctggaaatgcagaagaccatcacagacctcagaacacaggtgaggtgcctggcggcctgtgtccccccactccaagattccacagcagcacagccctgcccgaaccttctgggtatagcattttattcccaggcaactgttcaactgcccacacaggacccagaccctggagccttgggggtgtcatttctgcacgctgggtcaggccgggccatgtgccactggtgtccctgggtttcccagcagatgggggtcaccaggcaggggcaatctgtgtcacggccgtgtgactgccagccaggtgaccttgctggagggaacacaggattaggatgctgtaggagagttcagacatgaagtcctgttcttaagcctcttattcaggaataactctgaatcatctctcccagggcgtggtaaggaggcacttccaggtcagccctccacaactgatccagcctctccgggtgtgaggaaagtcctggtgtctgtggtacgaccacagggattttcagacggggctcttctctggcgctctgtggaaatgagttctgtcctctccttcctatcccaggaacttacttctgctttcttcagtgcctgtggtgggggttatctctgggattttacgtaagggggtggagattgagacctatggctaaatagaaggaagtgcgctcactccgctggtgtggatgggattcccaaggtgcgcaggtcctggctgtctgcagcacatttaatctgtaagcacagctcctttcctactcacaggactcttagcccttaggtttgggagaaacttccatcatctcctagtgtagccccaaggtaacccccagccacagggagaggtaccctgactactcctgtgcctgccccctcatcccgtgcagctgcaggtcctcctgcctctgcagccttgagaccaggtgcaagtccccaggcagctgtcagagtggacgacatgtggcaggtcctcctgcctccgcaacctagagaccaggtgcaagtccccaggcagctgtcagagtggacagcatgccgcaggtcttcctccctccgcagcctagagaccaggtgtacatcccccaggcagctgtcagagtggacagcgtgtggcaggtcctcctccctccacagcctagagaccaggtgtacatcccccaggcagctgtcagagtggacagcgtgtggcaggtcctcctgcctccacaacctagagaccaggtgcaagtccccaggcagctgtcagagtggacagcgtgcggcaggtcttcctccttctgcagcctagagactaggtgtacatcgcctggcagctgtcagagtggacagcgtgcagcaggtcttcctccctccgcagcctagagaccaggtgcacatcccccagcagctgtcagagtggacagcgtgtggcaggtcttcctccttctgcagcctagagactaggtgtacatcgcctggcagctgtcagagtggacagcgtgtggcaggtcttcctccctccgcagcctagagaccaggtgcacatcccccggcagctgcccaagtggacagcatgcagtgttcactcagctccacctggcactaggagagaagcagagacaaacccaggctgacccttggggtccgtgctggggcctgggtgccctaggggggtccactggggaggggggtctgtgaaccccaaggtcattcagggcaggccttgtgcacaggtgaccctggacagcatagcagaggcagagggggaccagccaccccacctgtgtcggcaaataccaacgccctatgccctcccatgttgctgattctgtccacaatgctggacttccttccaccctcaggatgaacgggcagctccctgggtggcagcgctgggtctgagaaatgtggatgttccttgtgattttgcagctgctgacagcacagggtgtgtgccgtctgtggtcatttccctgcaccccatgtgtgcagaggtgttcgtgtatcttggtgactgcagaggcacacacaggccggcgtggtcactgcttctctctggctgtgaattaaagcaggtcagccgcagacacagaggtgacatgcaggtcacctggaacctctgcagaccgtcctggctgccacccctaagtgctctctggcccctgtgccactgttcctgaggcttcctttttttttttttttcccccatggtttcagctagaaagttctaagctttgataacttaagtgccagttgctaatgaatgaggcatgcaggaaagatggctttcatttagaagccgtatctgaggcatttcccaaagtgagtaactgtttggctagttaggtcctagatgtccagctgtcattatgaaatgcagatggtacggtgaggggacgtccacctttttcagcatgatgtgtgcataggtgagacactgctgctgcacaggttggggaccacacacttatggctgacaggagatcaaagaagatgttttaattgacatgagtaagtgggtggcttgctgaagttattcacagccatcatcagacagccttacctgtggctgagcatgctttatgaaggcttattagaagaattgggatatttatgataaataatttgtgttcatttcagacatcacagacagtttaggttcaaatgcaagggacggaaaactccaaatccaggatggttttaatgaggtgcgagtttacttttccctcagtcgtggagattgctggaccctccgcagtgcagggtccctgctgcagcttggtgctgtactgtgggtggcctcttcccaaggtcacctcatggcccaggcatttccggccactgtcaccctgtctgccccccggccctgcaagatgcaagagagggtttgaggaaggagacccttccaggaggcttctgctacccctgtgcatggcacagcggttggaaaggtcaccttgttatggggccccgtgcttccagagaaaagccagtggtgttgttactcggaaaataaggcagacttgactctggggattctgagtgatcatcgttcgttctggtggaagtgtaggtgcaggacgttctcgtcatctggttgaatcttgctcccacagtcctctgagaacgtcgcctttgtgactacggtttttatttgacagcacggtggtgggaatgtcttccattggggcgtgtggtcagctgccgccagtctaataaggacattggagattctgtaaaagttcttcagaaatattcccctcaaatgttgtttattttaaggcattattttcagtgaaataacatcttttaatacaagagccaagctgttactctgaagtgcccaatgaatgaatgttctttgcattgctgcagataaagaaacttgaatcacggctcagtaccacagagtgcgtggatgccgggggcgaatctcacgccaacaacaccaagtggaaaaaagatgcatgcaccatttgtgaatgcaaagtgagtatggggggctctatcttcatgtcctaaggtatacgcaagtccgagagtcccatgtgaccactcaggtgggtggcccagatgtcagggccaggcccctccccgcctacctgtgctggcctccatccctccttcactcctatggaagcaccaggcaagcccagctctctgtgcacagaggacgtgctaggaggcccagaacctcagcatggtccaaccccacagagggcgggcagcccctactctgtgcagggccacctggggctgcttgtgtgcactggcttcacctcccaccagctgtggcaggaatactcatgccatggaaacccatgaatggggtagatcagctcctccctgcagagctggtgggtaaacactgacctgcccaccactggccctgtcccatctccagtcagagctgggggtgttacagaggtcactggagtccctgcaaagggagactggtggcaggtggagggtgccctggtgccggcaatggacagacgtctggctggaaccaggctccgtggaaagcttggggcatagtgtgaggaggcaggatggggaggacagcgcgccagcccgggcacttctcttgccatggccattgggagaggacgcgcatcagtgtccctgagctggtcaggtttgggaagggcagaccggggaagagcaaagccctgtcccttcccccctctctctagtcccatcctgcttcctgacaacgcccacccccagacacagtccgaggggatccaggtgtgaggtgggaggatgtgtccagctggtggtcttggcccctcagggtgagaggaccgtgggcatggacggaagggtgggacgggagcctcagggagacttgttatgggggctcccattaactcatacctgtctgcaactatgaaatcctaagagaaccacaaaatccatgcccacagggcaagtacagcgggcaaggcaggggcctcagggcaaggcctgactcatggccgtggctgacacctgtcccggagctgacaggctttgctcacctgaaggccatcccagagctgacaggctgtgctccgtctctcttctccaggacgggcaggtcacctgcttcgtggaagcttgcccccctgccacctgtgctgtccccgtgaacatcccaggggcctgctgtccagtctgcttacagaagagggcggaggaaaagccctaggctcctgggaggctcctcagagtttgtctgctgtgccatcgtgagatcgggtggccgatggcagggagctgcggactgcagaccaggaaacacccagaactcgtgacatttcatgacaacgtccagctggtgctgttacagaaggcagtgcaggaggcttccaaccagagcatctgcggagaaggaggcacagcaggtgcctgaagggaagcaggcaggagtcctagcttcacgttagacttctcaggtttttatttaattcttttaaaatgaaaaattggtgctactattaaattgcacagttgaatcatttaggcgcctaaattgattttgcctcccaacaccatttctttttaaataaagcaggatacctctatatgtcagccttgccttgttcagatgccaggagccggcagacctgtcacccgcaggtggggtgagtcttggagctgccagaggggctcaccgaaatcggggttccatcacaagctatgtttaaaaagaaaattggtgtttggcaaacggaacagaacctttgatgagagcgttcacagggacactgtctgggggtgcagtgcaagcccccggcctcttccctgggaacctctgaactcctccttcctctgggctctctgtaacatttcaccacacgtcagcatctaatcccaagacaaacattcccgctgctcgaagcagctgtatagcctgtgactctccgtgtgtcagctccttccacacctgattagaacattcataagccacatttagaaacaggtttgctttcagctgtcacttgcacacatactgcctagttgtgaaccaaatgtgaaaaaacctccttcatcccattgtgtatctgatacctgccgagggccaagggtgtgtgttgacaacgccgctcccagccggccctggttgcgtccacgtcctgaacaagagccgcttccggatggctcttcccaagggaggaggagctcaagtgtcgggaactgtctaacttcaggttgtgtgagtgcgttaaaaaaaaaaaaaaaaaagaatccctatacctcatttgtatttttaaaatgcgtgatgttttatgaaattgtgtccattttttaggtattagatatggcagaaaaaccatttccactatgcaaagttcttttagacgtcagtgaaaatcaactctcatacctcatggtctctctttaattgaccaaaaccttccatttttctctaaatacaaagcgatctgtgttctgagcaacctttccccgaacacacagcttcagtgcagcacgctgacctgagtatccaccatgtgccaggcacagtgctgggcacacgaggcaccaaggtccgggccacctgcccgcagcaaggcccagctgaggtggtggagggagcccctgaggtcaggggccgtttcggttcagggtggcaggtgtccagcactggggtatggcgtcgaggcttccatggggtgggggaggccagcttccttctgacaggatgggcgcatacagtgcctggtgtgatttgtgcacaacccgtgttccaggtgcacatcctcccaaggagacacccagacccttccagcacgggccggccaagttgctgcggcggaggcagcatttcagctgtgaggaaggtcattggattcatgtgttttatctgtaaaaatggttgtcttaacttcttaacctcatattggtaagtgattgataaaaattggttggtgtttcatgacatgtggacttcttttgaaatagcaagtcaaatgtagtgaccaaattgtggaagagatttctgtcaaataggaaatgtgtaagttcgtctaaaagctgatggttatgtaagttgctcaggcactcagatgacagcagattctgggttctgggagtgttctgtgcctcttacatgccctggaggcctcatggtctcagtgctgaggcggcacacctgtagcacacctgcgtaatgtgcggtctgggccagtcacaaggaattgtgttgtctaagccaaagggggaagctgactgtgatttaccaaaaaaaattctgtaattcaaaccaaaatgtctgcggaatcaccagtttgatactctctgtaatcagaacagtgggcagtgcctgggtgaacgtgtctagcagccactgtgcgggatcgctgtaacaggagtggaatgtacatatttatttacttttctaactgctccaacagccaaatgccttttttatgaccattgtattcagttcattaccaaagaaatgtttgcactttgtaatgatgcctttcagttcaaataaatgggtcacattttcaaatggagaatggctttat

SEQ ID NO: 9892 - DNA, 1087 bp, Homo sapiens
cgtgaagtgttcgccgtcagtgctgttgggtgcctggagccgcgtcccccgtcccgaaaactgtccttgacagtacttgcgcggcccaacggccgccggcgcccccgcgtctccatggcgacggcctttttccctgcgaggaccccggcggcagggctgccccgcggcgcctgcttggcgcgacgctctagcggttaccgctgcgggctggctgggcgtagtggggctgcgcggctgccacggagctagagggcaagtgtgctcggcccagcgtgcagggaacgcgggcggccagacaacgggctgggctccggggcctgcggcgcgggcgctgcgctggcagggcgggtcggggcgcgggctgcatccgcatctcctccatcgcctgcagtaagggcggccgcggcgagcctttgaggggaacgacttgtcggagccctaaccaggggtatctctgagcctggtgggatccccggagcgtcacatcactttccgatcacttcaaagtgtaaggggggccctactgacccttggaatttaggggggctaccctaggcggcatccacaacagagagaattcccttggagaggggaccctggtgctcggctgtccctctcatccgcgtagaaagtccctcatctgggggctcccgaactcagccctctcacattgtggccggctttactgaccctcacagacccaggctgggccctcccgatagaggccagccaaaggttcactcagcctctctttcaaggctggtgtatctctaaatcttagaccctcctccgttaccgtcagccaggtgggatgcccacgttttggagagaaaccgttctgaggaacccgggcctctgggtcccagctggctctccggcccccaggttatgtattctgggttggccacaaacagtggaattctaggcactcccgggacagggtgggactgctgtcctcattcatgcaaccagcaaatattcacggcaccttgtttgtgccagacagcagaccgaggacacggttgttaccaagaccaggctgttgccttggaagagcccagagcgtgtcaagggagacagccacatc

SEQ ID NO: 9893 - DNA, 11991 bp, Homo sapiens
tttttttttgagacagggtcttgctctgtcacccagcctggagtgcagtgaggtgatcatagctcactgcagccttgacctcctgggcttaagtgatcctcccacctcagcccctcaagtagctaggaccacaggcatgcaccaccacacctggctaatttttaaaattttttgtggagaggaagtctgtgttgcccaggctggtctcaaactgcattcaagcagtcctcctgcatcggcctctgaaagtgctgggattataggcatgaaccaccacacctgacttcccccatactttcttattaattaccatactgtatatttttattttgtttaaacatcttttcttcccacttttatcgtttttacttgagtgcttaattcatcttcctaaattaatttaaaaactcatctttaagactgtgaattttcttccgaatatacctttggccacagttcagagactttgatgtgttactcttttggcattggttctaaaatgtcaatcattcttttttttttttttttgagatggagtcttcttgttgcccaggctggagtacagtggtgcgatcttggctcactgcagcctacgcctcctgggttcaagttcccctccctcagcctcccgagtagctgggattacaggcacacaccaccatgcctggctgattttcgttatttttagtagagatggagtttcaccatgttggccaggctggtcttgaactcctgacctcaggtgatctgcctgccttggcctccctaaatgctgggattacaggcttgaggcaccatgcctggcctaaagtgtcagtaattctgatttcggttttctcttttagaagttttgatttccacagacttacaaagctaaggaagttttatgtccttgctctggctacactgcagtgttactgaatatcacctgcacaacctttactgcttgcagttttttttttcctgttgctttgtacatgatccgttattcaaatggccttataggcattcaataaaggtgaaatgttaaatacaaaatcacttgtctattaaattttattcaaggttctatataagatctgataaatggaactttgtgatggaaatgttttatatggtagccactagtcacatatagctattgaacctttgaatcatggctagttttagagttttatattttaattttaattaaatagacgtgtctagtggcaccatattgtacaatgcagttctcattcaataaatcttaagtacttaacaatgcatcgtgtactcttctatgtactgggtagacagcagtgagcaaaacaaagtccccgttctcatggaactaatgttctaatgacaactattaattacataccatgaaatgtctcaaactcctgggctcaagtcatcctcctgccttagcctcctcaagtgctgggattataggtgagagccactgcacctggccagaagcacgaacttctaacttaggcttttattaattatcttccttgcagaataatcaacagaagaccctttagacaaagaacttgcactatgaggtttaattggaaacattaaaatggttaactcataatgaattataaaactttgatagttacattgtactatcatttatgaggcatttatttttcattatttacacctgaaagaaacttcatacttgtgtgttctgttccccatctcagagcaagattatgaagagaaggtctaaactacttatataaatcaaaacccaactgggctagaaatgaagtataaagagaactaaatctatacacagctgtgccataagagcattaggtggttttagctcttatctggggtatgaaagcaatttagctcatctcacagaaacaaaagcaggtgctgaatcatgaaaacctcaattatttttagcatgcctcttaatttttctttcccctggtttcttgtcgtctgtgcttgattcttgaacaggtaaccacttgagaggatgccggcgatagatgggccatggaggaagtgtcagctgggccagaaaagaggaaatgcataaattatagctattaaaagtttaaaaaatcattacgtataatgccaggttcccaaatgactcctatgctgagggaacaaaaaaacaaaaaaaaaaatccatattcctataaaggctctgtgccaccatccatgcaaaatactgtatgatgatgggaacaggctcactgcctatacaaatggctttaagacctaaaagaaaggtgggggccaggcgtggtggctctcgcctgtaatccaagcactctgggaggccaaggtgggcggattgcttgagaccagcctggccaacacagtgaagccctgtctttactaaaaatacaaaaattagctgggtgtggtggtgggctcctgtagtcacagctactcgggaggctgaggcaggaaaatctattaaacccgggaggcagaaggtgcagtgagccgaaatcgccccagtgcactgcagcctgggcaacaagagtgaaactccgtctcaaaaaatttaaataaataaataaataaaaggtgaagggacaacgtgagcaccatgaaaactcctgctggctttgaccttaagattattagccagagtagccgccaaaggaaataagctgtgtccttttatatagttcgcaccatctgacactattttggcattctacttttccaatgatagcaaagggaaacgctgtttggaaggatgagggaaacgttggctttgggtctcactactgagtaggtctaaccaaaccaacccgactcacaaaacccaagctgccactaatacccacaaatttcttaccaaacatgaaaaagcaaatccggccataactatatagacagtccacccgaactgttcagccacgtacccgtagataaatccaactatctagagacaaatgaagtatattaaacacactcaaactgagggttgggagggaggcgggggcggagattaaatgtaaaaccaatacttactgcagaaaaaagaataattccctgaaacatctgttcagctagcttctggcccttgtaatcctggggtgaagcagaggaaaaaaagaattggttccaccgccgagaacatacaattcctgccctgacctcacaactctggcacagggtaaccccaacatcagggtctcccgctctcctaagggcctgggcaagatattaaattctgggcttcccgggaggaactgaaacaccctcacggagaatggacaggagattctcgcggagtagaagagaaggggacccaggaggcaattcgggaaagagggtggacggtaaccatccgggcccggaacagcgcagcaccgggtcggtgctccaacatgggcttcgaagctgccaggcacaagaacggcgtgcagaggtccccgggttgcgccctcaccatctgcgtgggcagcgagctcagatgctccagcatggctggctgaggaggcgggcagctgagcgcgggtggcaggctgcgaggcgagggcgaccgagacttaaggaccgtgaggggtaaggtctggcactgcgcgtcagtagccgggccttctaagcccgggagagcgatggcggcggccccggaagcggaagtctccgacgggccggtacagcccgtgtccccgccccgcgccatcgctaggcgacgtgcgcttttgccgcgccgtgctgcccgcgagggcagctgaggtggtggtggcggccgccttgtcgaggcatcgcgcgcccgtgaagtgttcgccgtcagtgctgttgggtgcctggagccgcgtcccccgtcccgaaaactgtccttgacagtacttgcgcggcccaacggccgccggcgcccccgcgtctccatggcgacggcctttttccctgcgaggaccccggcggcagggctgccccgcggcgcctgcttggcgcgacgctctagcggttaccgctgcgggctggctgggcgtagtggggctgcgcggctgccacggagctagagggcaagtgtgctcggcccagcgtgcagggaacgcgggcggccagacaacgggctgggctccggggcctgcggcgcgggcgctgagctggcagggcgggtcggggcgcgggctgcatccgcatctcctccatcgcctgcagtaagggcggccgcggcgagcctttgaggggaacgacttgtcggagccctaaccaggggtatctctgagcctggtgggatccccggagcgtcacatcactttccgatcacttcaaagtgtaaggggggccctactgacccttggaatttaggggggctaccctaggcggcatccacaacagagagaattcccttggagaggggaccctggtgctcggctgtccctctcatccgcgtagaaagtccctcatctgggggctcccgaactcagccctctcacattgtggccggctttactgaccctcacagacccaggctgggccctcccgatagaggccagccaaaggttcactcagcctctctttcaaggctggtgtatctctaaatcttagaccctcctccgttaccgtcagccaggtgggatgcccacgttttggagagaaaccgttctgaggaacccgggcctctgggtcccagctggctctccggcccccaggttatgtattctgggttggccacaaacagtggaattctaggcactcccgggacagggtgggactgctgtcctcattcatgcaaccagcaaatattcacggcaccttgtttgtgccagacagcagaccgaggacacggttgttaccaagaccaggctgttgccttggaagagcccagagcgtgtcaagggagacagccacatcacgccagaaatacatgacagctggattagccctgggagagggaggcccagatgtgggagctcaggggaggtgcagctcaacgtggagtttggaggaggctaccttgacctttgaatgccaagtgggagccagccagatgaaagggtaggagaaagtgtttgtatatcctcagtgccctttcatccttgcacgtggcagagaccaaacagtaaaatgcagacacgtttgacacttttctgacctcagaaggactcaggacgtgtagaaggcagaaagagggatgggcaagagtttattcctgtttccttctcatgctctgtatttcttggtgtgtttgaagagactttctgttgtgtgtataaatagatatatctctgtgtggtctttttttttttttttttttttttttgaggcgaagactcgctctgttgcccaggctggagtgcagtggtgcgatcgcggctcactgcaacctccgcctcctgggttcaagggattgtcctgcctcagccttctgagtagctgggattacaggcatgcgccaccacgcccggctaatttttgtgattttagtggagacggggtttcactgtgttggccagactagtctcaaacgcctgacctcaagtgatccacccacctcggccttccaaagtgctgggattacaggcatgagccaccgcgcccggccagtgcggtcttttttttttgtatccacagttttgtatccttggattcaaccaaccacggactgaaattacagatacagagggctgactgtaatatgccattttacataagggacttgagcatccgtgaatttttgtatacatggggagtcctggagccaatccccgactgatactgaggaccaactgtgttgctaatcaaattgtacacaattatatactcttacgaaaatgtagttaactattacagatccagcgtctgtgtgcaatttcgttttgagaattccttctaaccagatcaggaaagctctcttaccaggaatagccccaggaaagacaatatggattagacgtactccatgataactggcgttttgcatgtaggtaactgtggaagttttaggagcaactggtttctgccttgccagtctacttaagtatgtcagatacttgatagaattgtgtttttcttgtttccagccaagtgtgcctcttgatcccgtaactgctaactggaagtcaagaaactaaaaacattatctcttgtaccattaattaagtgggatttatttgagtgcaagatcgttttctcagtggtggtggaagttgcctcatcgcaggcagatgttggggctttgtccgaacagctcccctctgccagcttctgtagataaggtcagcccataatgtgatagaggcatatgacttagggtatatactgatgtatatacttctctttttttttttttttttttgagacagagtcttactctgttgcccaggctggagtgcagtggcacggtctcagctcactgcaacctccgcctcccgggttcaagggattctcttgcctcagcctctcaaatagctgggattacaggcacctgccaccatgcctggctaattttttgtatttttagtagagatggggtttcaccatcttggacaggctggtctcgaactcctgacctcttgatccacctgccttggcctcccaaagtgctgggattacagacgtgagccacggcgccctgatgtatatgagaagaagttcactgacacgttgtacttcatatatactgctttggaaaggtgtgtgtgggctgggcctggtggctcaggcctgtaatcccagcactttggaaggccgaggcaggtggatcacctgaggtcaggagttcgagaccagcctggccaacatggtgaaaccctctctctattaaaattagctgggcgtggtggcgcacacctgtagtccctgctactcgggaggttgaggcacaagaattgcttgaatctgagaggcagaggttgcagtgagccaagacggcaccactgcactgcagcctggctgacagagccagactctgtctcgaaaaaaaaaaaaaaggaaagaaagaaagatgtgtattttccccctaatttgtaatctggcctgtgatcccatttttaaaaaaaattttttttagatatggggttgggggatggtcatactatgttgctcaggctggtctggaactcctgggctcaggcagcctcccaccccagccacctgaatagttgggattatgggtatcagccacagtgcctggctgatccacagtttttattgctttttattttttatttttttgagacagggtgtcgctttgtcacccaggctggagtgcagtggcatgaatatggcttactgcagccttgacctccctggctcaggggatcctcctgccttagcctcccaaatgcttgggactacagatgcacgtcaccatgcctggctaatttttgtatattttgtagagatgagctttcacaatgttacccaggctggtcttgaactcctcagctcaggtgatctgcccgcgttagccttgttgttttcattttgggattataggcatgagccacagtgcccagcccccaattttttaaacagtttttcaacatatttctcttctttacaaaggccttgagaaattaagtgcctggtaggcacacaattttcccaggatgaagttaattcaaacttactttgtctgtagtccctgctacttgggaggctgaggcaggaggcttgcttgagcctaggagttagaggccagcctgggcaacatggtgagaccctgtctaaaaaaacaaatgaactaacttgcattgcaatacgctatgtttgaaagtgctttgtaaaattaatagccttatgtaagggttgggtactactatgggtgaagatgaagtaagaaagggttaaaaggtaggttcacgatatcttggttggtaaaatgtctttaaggaaacattttatccagagcttgttgaaggaatttattttttaaataaatttagttccacctactatcttgtttccactgaattgttttgaaaaagtgaaggtcagatgagctgaggaggaccaaccaggacattgtgacaattagacaccaccttcttaagagatgaatagctagctaacagagatggtttttgagaatagcaccttaaatgtttttttggccgggcgtggtggctcacgcctgtaatctcagcactttgggaggctgaggtgggcagatcacgaagtcaggagttcgagaccagtctggccaacatggtgaaaccccatctctactaaaaatacaaaaattagctgggcgtggtggcgcacacctgtaatcccaactattgggaaggctgaggcgggagaatcgcttgaatgcgggaggcagaggttgcagtgagctgagatcatgccgctgcactccagcctggacgacagaacaagactccgtttcaaaaaataataaactaaaataaacctttttttttttttgctagttacaatggctagaaatgtactccacacttttgatatcgattggattttgtgaatttttgtagctttttctgtgctgtgggtttgtcaagtgaatttggataatattcttttctctgaggacactcatgttaaaggtgaatgggatacaactctgaacaggcatgtttttactgatgaggctaagacctcaggttacttggtcatagacaacgtgaatccatgtctactttaggaattttaagtagaaacttaattatgttatgtaattttttattttaaagacagagtctcactctgtcgcccaggctggagtgcaatggcatgatctcggctcactgcaacctctgttgcccaggttcaagcgattctcctgcctcagcctcctgagcagctgggattacaggcccctgccactgcacctggctaatttttttgcagtttttagtagagacgaggtttcaccatcttggccaggctggtcttgaactcctgacctcatgatccaccccactcggcctcccaaagtgctgggattataggccagaccctgcctggctgaaacttaattcttaaatgtttcttttgcttttcatcttgtgatgtataatgtacaaggctaaggctgtttctccaacttatttttaagttttttattaatgagtaccacaaaaatttcagatcccaaattgggttcttgggaactgtgaattcaaaatgagtttctggcggaatactgtatatgcctcttgtttcttcctgaattaaaaaaaaaaaaaaagtgttagggcattttgatgtcccttctcatgtgcttactgactttgggggcttgtttttgttttgtagggttaaaaactaatatttatatgacagaagaaaaagatgtcattccgtaaaggtatgctctttctacaagttaagttgtttttatacctggtcaaagataaagaggtataacataggttttccctatctatttcagtaaacatcatcatcttggtcctggctgttgctctcttcttactggttttgcaccataacttcctcagcttgagcagtttgttaaggaatgaggttacaggtatgcgagcacttattaataatgccttagaatctgttgcggacctggtattctctgtgtcacacatcctaagttgttcttcttccggtagtactagcagttgtttgttaagggtttgatctgacagaatattccttttcaccaaatcagaggccttaggagagcctctgagggctgccatctgttcacatgtcagcaggacagggcttcagaaagtgagggcataccagtgtccttggtgtttgatgcctgctctagtcactagagtgtcagtctagttactttccttcagctgtgcagctgcatcagtgggactgtagcaataaaagtttgtcaagtgatttttaaaaatcactgtgttgtataatatatcgcacagtatattgaattagtcgttcatactgttctcccttggtactgagaaatgtttgaggcttgagtgtttgtcaaaaatcatttttggattgccacccaccatagctgaccagagtgagagactgtaatagctttcccctgactttcacggagtgctctgatagcatgttttatcacgtgtatatatgtatgatacatataaagtaatgcatgttcctggtaggaaagtttataaaaaagagaacagcggccgggagcagtggctcatgcctgtaatcccaaaactttggtaggccaaggtgggcgtctcacaaggtcagagatcgagaccatctcagcactttgggaggctgaggtgggcagatcacgaggtcaggagtacaagaccagcctggccaacatggtgaaaccccgtctctactaaaaatacaaaaattagctgggcgtggtggtatgcgcctgtagtcccagctactcgggaggctgaggcaggagaatcgcttgaacccaggaggcggaggttgcagtgagccaagatcacgccactgcactccagcctggtgacagagtgagtcttcgtctcaagaaaaaaaaaaagagacaacagtatttaagctccatgaaggcaatttgtgtactgttttatcttctgtgcctatggatgatggctgatactagctgttcaataaatattagttggttgaatgatttcatttacaattttggcttagtaccttccagttttttcctacacatctttttttctgtacagttgagattgtactatatataaactgtacatgacatgtttttctgtatatcatgtcactgtgatggtagaaactcttcatacataatcttaatgtctattaatttgtttccacaggataacatcttttgctacaacagctttcagactttttgatggcagccctacaataggaaatacattacatgtagcacatgtacatacatgtgtatttgcttattggctgtctatcctcagaaagttagggatgttttattcatggctgtaaccccagtgcctagatattgcctggcacatagtaaataccagggttcaatgaggaataaaaaaaaaaaaatgaaaggcaagaatgcatacaggacagtaattgcagtttccttgtgtgatacactatgttttctttggtattctaattcagttttctttttttttttttgagatggagttttcctattgctgcccaggctggagtgcagtggtacagtcttggctcactgcaacctccacctcccgagttcaagcgattctcctgcctcagtctcccaagtagctgggattacaggtgttcaccactacacctggctcattttgtatttttagtagagatgaggtttcaccatgttggtcaggctggtctcaaattcctgacctcaagtgatccacccgcctcagcctcccaaagtgctgggattacaggcgtgacctaccatgcccggcctctatttcagttttctattgcaatccagaaactttttctgtataaattgattgtgactcactcaattggtttcatgcctacttgtgattcgtgacttgaaaaacattgatttagtttgctgctaagttttcacaatttaaataaaattctttcttttgattatatttcagattttgtccttaggaaactcttgatacaaattgccataatacattctaacaggttctgttattttcctaccagtagtgtaccaaagtgctgtcagtgtattttaaaaaatgcttcctccacttttccaaaagcttatttacatacagggaaagtttcagggctatatgcttcagtttaatgggggagaatgaggtagatcagtaccataatccttaccttccctttttccatgtcttggactctatatcaaaagcccatgagattgtaatcacagtgccttccttgtgttttcagattcaggaattgtagggcctcaacctatagactttgtcccaaatgctctccgacatgcagtagatgggagacaagaggagattcctgtggtcatcgctgcatctgaagacaggcttgggggggccattgcagctataaacagcattcagcacaacactcgctccaatgtgattttctacattgttactctcaacaatacagcagaccatctccggt

SEQ ID NO: 9894 - DNA, 3734 bp, Homo sapiens
tttttttttgagacagggtcttgctctgtcacccagcctggagtgcagtgaggtgatcatagctcactgcagccttgacctcctgggcttaagtgatcctcccacctcagcccctcaagtagctaggaccacaggcatgcaccaccacacctggctaatttttaaaattttttgtggagaggaagtctgtgttgcccaggctggtctcaaactgcattcaagcagtcctcctgcatcggcctctgaaagtgctgggattataggcatgaaccaccacacctgacttcccccatactttcttattaattaccatactgtatatttttattttgtttaaacatcttttcttcccacttttatcgtttttacttgagtgcttaattcatcttcctaaattaatttaaaaactcatctttaagactgtgaattttcttccgaatatacctttggccacagttcagagactttgatgtgttactcttttggcattggttctaaaatgtcaatcattcttttttttttttttttgagatggagtcttcttgttgcccaggctggagtacagtggtgcgatcttggctcactgcagcctacgcctcctgggttcaagttcccctccctcagcctcccgagtagctgggattacaggcacacaccaccatgcctggctgattttcgttatttttagtagagatggagtttcaccatgttggccaggctggtcttgaactcctgacctcaggtgatctgcctgccttggcctccctaaatgctgggattacaggcttgaggcaccatgcctggcctaaagtgtcagtaattctgatttcggttttctcttttagaagttttgatttccacagacttacaaagctaaggaagttttatgtccttgctctggctacactgcagtgttactgaatatcacctgcacaacctttactgcttgcagttttttttttcctgttgctttgtacatgatccgttattcaaatggccttataggcattcaataaaggtgaaatgttaaatacaaaatcacttgtctattaaattttattcaaggttctatataagatctgataaatggaactttgtgatggaaatgttttatatggtagccactagtcacatatagctattgaacctttgaatcatggctagttttagagttttatattttaattttaattaaatagacgtgtctagtggcaccatattgtacaatgcagttctcattcaataaatcttaagtacttaacaatgcatcgtgtactcttctatgtactgggtagacagcagtgagcaaaacaaagtccccgttctcatggaactaatgttctaatgacaactattaattacataccatgaaatgtctcaaactcctgggctcaagtcatcctcctgccttagcctcctcaagtgctgggattataggtgagagccactgcacctggccagaagcacgaacttctaacttaggcttttattaattatcttccttgcagaataatcaacagaagaccctttagacaaagaacttgcactatgaggtttaattggaaacattaaaatggttaactcataatgaattataaaactttgatagttacattgtactatcatttatgaggcatttatttttcattatttacacctgaaagaaacttcatacttgtgtgttctgttccccatctcagagcaagattatgaagagaaggtctaaactacttatataaatcaaaacccaactgggctagaaatgaagtataaagagaactaaatctatacacagctgtgccataagagcattaggtggttttagctcttatctggggtatgaaagcaatttagctcatctcacagaaacaaaagcaggtgctgaatcatgaaaacctcaattatttttagcatgcctcttaatttttctttcccctggtttcttgtcgtctgtgcttgattcttgaacaggtaaccacttgagaggatgccggcgatagatgggccatggaggaagtgtcagctgggccagaaaagaggaaatgcataaattatagctattaaaagtttaaaaaatcattacgtataatgccaggttcccaaatgactcctatgctgagggaacaaaaaaacaaaaaaaaaaatccatattcctataaaggctctgtgccaccatccatgcaaaatactgtatgatgatgggaacaggctcactgcctatacaaatggctttaagacctaaaagaaaggtgggggccaggcgtggtggctctcgcctgtaatccaagcactctgggaggccaaggtgggcggattgcttgagaccagcctggccaacacagtgaagccctgtctttactaaaaatacaaaaattagctgggtgtggtggtgggctcctgtagtcacagctactcgggaggctgaggcaggaaaatctattaaacccgggaggcagaaggtgcagtgagccgaaatcgccccagtgcactgcagcctgggcaacaagagtgaaactccgtctcaaaaaatttaaataaataaataaataaaaggtgaagggacaacgtgagcaccatgaaaactcctgctggctttgaccttaagattattagccagagtagccgccaaaggaaataagctgtgtccttttatatagttcgcaccatctgacactattttggcattctacttttccaatgatagcaaagggaaacgctgtttggaaggatgagggaaacgttggctttgggtctcactactgagtaggtctaaccaaaccaacccgactcacaaaacccaagctgccactaatacccacaaatttcttaccaaacatgaaaaagcaaatccggccataactatatagacagtccacccgaactgttcagccacgtacccgtagataaatccaactatctagagacaaatgaagtatattaaacacactcaaactgagggttgggagggaggcgggggcggagattaaatgtaaaaccaatacttactgcagaaaaaagaataattccctgaaacatctgttcagctagcttctggcccttgtaatcctggggtgaagcagaggaaaaaaagaattggttccaccgccgagaacatacaattcctgccctgacctcacaactctggcacagggtaaccccaacatcagggtctcccgctctcctaagggcctgggcaagatattaaattctgggcttcccgggaggaactgaaacaccctcacggagaatggacaggagattctcgcggagtagaagagaaggggacccaggaggcaattcgggaaagagggtggacggtaaccatccgggcccggaacagcgcagcaccgggtcggtgctccaacatgggcttcgaagctgccaggcacaagaacggcgtgcagaggtccccgggttgcgccctcaccatctgcgtgggcagcgagctcagatgctccagcatggctggctgaggaggcgggcagctgagcgcgggtggcaggctgcgaggcgagggcgaccgagacttaaggaccgtgaggggtaaggtctggcactgcgcgtcagtagccgggccttctaagcccgggagagcgatggcggcggccccggaagcggaagtctccgacgggccggtacagcccgtgtccccgccccgcgccatcgctaggcgacgtgcgcttttgccgcgccgtgctgcccgcgagggcagctgaggtggtggtggcggccgc

SEQ ID NO: 9895 - DNA, 453 bp, Homo sapiens
ttcaaccaaccacggactgaaattacagatacagagggctgactgtaatatgccattttacataagggacttgagcatccgtgaatttttgtatacatggggagtcctggagccaatccccgactgatactgaggaccaactgtgttgctaatcaaattgtacacaattatatactcttacgaaaatgtagttaactattacagatccagcgtctgtgtgcaatttcgttttgagaattccttctaaccagatcaggaaagctctcttaccaggaatagccccaggaaagacaatatggattagacgtactccatgataactggcgttttgcatgtaggtaactgtggaagttttaggagcaactggtttctgccttgccagtctacttaagtatgtcagatacttgatagaattgtgtttttcttgtttccagccaagtgtgcctcttgatc

SEQ ID NO: 9896 - DNA, 322 bp, Homo sapiens
ccgcctcccaggttcactccattctcctacctcatcctctcgagtagctgggactacagttgcccgccaccatgcccggctaatttttttgtatttttttagtagagacagggtttcaccgtgttagccaggatggtctcaatctcctgacctcgtgatctgcccgcctcggcctcccaaagtgctgggattacaggcgtgagccaccgcgcccggcacacttaacagatttttatttagagtttactgtgtgccaggttctctgccaggagctggggatatagtggtgaataaaacaatacttcctgcccttttacagtgc

SEQ ID NO: 9897 - DNA, 1128 bp, Homo sapiens
gtctataacaaatttttacacttttacatttgtgaaatctatcatatagaagagagcattcagcatgtacaatttaatgagaaataaagttataaaacagatactcatatacccaatgctcaggttaagaaatgtacattgccaataccttagtaagctcctatgtatcctttcctggtcagtttcctgaatcaccccaagagagagaaccaatattctgcttgtaatgcaaataatcttttctttgtatttttaccaattaagtatactggttgtcacactttttaaaacataatttctaaaccatcataaaatgatacttttgtaaatacaaaatcatgtacttgaatgcattggcactgtcagtttactatcagcatttctaaatgtttatgcatgtttgctcactttatgtgcttatctctccatcagccaatgacagttgatcaatatgggatcaatatgggaccacacttcgagtagtactgatgtctacattccttaaaaatagtctaaacaggtagaagtaaacattaataaaatttaataaagtattaaattctatttaataaatagaaatgtcactttttttgtgacttgctgaacatttagtgccatccctgatgatgcatatggctatagtttttgttactgtgtttattattaacataccaccactatgtatttcttccatgaaggcatttggatcattctaccttttttgctattttgaacaaagccattatgaacattcttgtgtatatatgtcaggttgtacatgtgtatgatctcttgagaatacatccagcaatggaattggtgggtcataggatatgtatatcttcaaattaactaggtaatacctaacttttccaaagtaattagtgctttcaccagcagcattaaaaggttccacatttggtattgttagactaaaactttggaaaatctaggcttgtaatggtacctcgttgcttaatttgcatttccatgaggttaattattttttctacaaatttatttaccatttggatttcccctttttgcaaagttgctgtttaaatcatttgcccatttttaaaaattttattgactttttggttaataaaattccttcatatactgaga

SEQ ID NO: 9898 - DNA, 1830 bp, Homo sapiens
gggcaacagagcgggactcggtctcaaaaaaaaaaaaaaatgaataagacagtagtctcacctccaggaacataacctagatggtgtagataggatagctgtatgagcaactaatgttacacaggtaatgaagcagagtggactctaagggtctaagatatttacagggtgctagaggaagaagagaatatataggtccaaagacttatttcttagggagttttacatcatctccccacagcagaagccctggttatgtgactatgccagtaattgagtggtttaatctccagtttagggatatgggtattaaccagtccctgttgctacagattgaaagacatattctttaattttgctaacaataaaggtgatgtttgatctcctgagtaacttctccatctcaggagtttccaaattctggaggaaaatacaaggatgttatcctatttttatcattaggaatcagcttccttgctgaaatttagatacaaaagtgacactggtctggcatactctgtttttagtgctggatgattcctaatgatcactactattttgaaaaggcaacagcataagaatttgattaataatgaatggttcaaagaacaaagtctacccagaatttcatcattcgttttggtgtatttcagttatttttatagatatttgtgtattgtttaaagaaattggtattgtactgtctataacaaatttttacacttttacatttgtgaaatctatcatatagaagagagcattcagcatgtacaatttaatgagaaataaagttataaaacagatactcatatacccaatgctcaggttaagaaatgtacattgccaataccttagtaagctcctatgtatcctttcctggtcagtttcctgaatcaccccaagagagagaaccaatattctgcttgtaatgcaaataatcttttctttgtatttttaccaattaagtatactggttgtcacactttttaaaacataatttctaaaccatcataaaatgatacttttgtaaatacaaaatcatgtacttgaatgcattggcactgtcagtttactatcagcatttctaaatgtttatgcatgtttgctcactttatgtgcttatctctccatcagccaatgacagttgatcaatatgggatcaatatgggaccacacttcgagtagtactgatgtctacattccttaaaaatagtctaaacaggtagaagtaaacattaataaaatttaataaagtattaaattctatttaataaatagaaatgtcactttttttgtgacttgctgaacatttagtgccatccctgatgatgcatatggctatagtttttgttactgtgtttattattaacataccaccactatgtatttcttccatgaaggcatttggatcattctaccttttttgctattttgaacaaagccattatgaacattcttgtgtatatatgtcaggttgtacatgtgtatgatctcttgagaatacatccagcaatggaattggtgggtcataggatatgtatatcttcaaattaactaggtaatacctaacttttccaaagtaattagtgctttcaccagcagcattaaaaggttccacatttggtattgttagactaaaactttggaaaatctaggcttgtaatggtacctcgttgcttaatttgcatttccatgaggttaattattttttctacaaatttatttaccatttggatttcccctttttgcaaagttgctgtttaaatcatttgcccatttttaaaaattttattgactttttggttaataaaattccttcatatactgaga

SEQ ID NO: 9899 - DNA, 1934 bp, Homo sapiens
tagctatcttgatttcactacagctcagtagcagttcagtgctttggctttggagtcacagccaagttcaagtcatggttgtgtgactttggattttattaactatatatttctgttttccatctgctgctaaggtgatgccatctggtataatgagaatgaaatgagatgtttattaaacactgaggatcagtgcctagcatatacaagcacttagtaattatatttttatcattagtctaattctggtctcttgatctttctttagttcctaaagtccttactatggtttctattcatgtggctcttacatgaacaatacatgacacaaatatgatagtgtttgaatgtctgtcatgcacataatagtctgctagaaatttcgaaaatgaataagactggctgggcacggtggctcatgcctgtaatcccagcactgttagaggtcaaggcgggcagatcacctgaggtccggcattcaagaccagcctggccaacatggtgaaaccctgtctctactaaaaatacaaaaaatagtggggcatggtggcgcattcctgtaatctcagctactcgggaggctgagacaggagaatcacttgaacccgggaggcagaggttgcagtgagccgagactgcaccactgcagtccagcctgggcaatagagcgggactcggtctcaaaaaaaaaaaaaaatgaataagacagtagtctcacctccaggaacataacctagatggtgtagataggatagctgtatgagcaactaatgttacacaggtaatgaagcagagtggactctaagggtctaagatatttacagggtgctagaggaagaagagaatatataggtccaaagacttatttcttagggagttttacatcatctccccacagcagaagccctggttatgtgactatgccagtaattgagtggtttaatctccagtttagggatatgggtattaaccagtccctgttgctacagattgaaagacatattctttaattttgctaacaataaaggtgatgtttgatctcctgagtaacttctccatctcaggagtttccaaattctggaggaaaatacaaggatgttatcctatttttatcattaggaatcagcttccttgctgaaatttagatacaaaagtgacactggtctggcatactctgtttttagtgctggatgattcctaatgatcactactattttgaaaaggcaacagcataagaatttgattaataatgaatggttcaaagaacaaagtctacccagaatttcatcattcgttttggtgtatttcagttatttttatagatatttgtgtattgtttaaagaaatgggtattgtactgtctataacaaatttttacacttttacatttgtgaaatctatcatatagaagagtgcattcagcatgtacaatttaatgagaaataaagttataaaacagatactcatatacccaatgctcaggttaagaaatgtacattgccaataccttagtaagctcctatgtatcctttcctggtcagtttcctgaatcaccccaagagagagaaccaatattctgcttgtaatgcaaataatcttttctttgtatttttaccaattaagtatactggttgtcacactttttaaaacataatttctaaaccatcataaaatgatacttttgtaaatacaaaatcatgtacttgaatgcattggcactgtcagtttactatcagcatttctaaatgtttatgcatgtttgctcactttatgtgcttatctctccatcagccaatgacagttgatcaatatgggatcaatatgggaccacacttcgagtagtactgatgtctacattccttaaaaatagtctaaacaggtagaagtaaacattaataaaatttaataaagtattaaattctatttaataaata

SEQ ID NO: 9900 - DNA, 2487 bp, Homo sapiens
tagctatcttgatttcactacagctcagtagcagttcagtgctttggctttggagtcacagccaagttcaagtcatggttgtgtgactttggattttattaactatatatttctgttttccatctgctgctaaggtgatgccatctggtataatgagaatgaaatgagatgtttattaaacactgaggatcagtgcctagcatatacaagcacttagtaattatatttttatcattagtctaattctggtctcttgatctttctttagttcctaaagtccttactatggtttctattcatgtggctcttacatgaacaatacatgacacaaatatgatagtgtttgaatgtctgtcatgcacataatagtctgctagaaatttcgaaaatgaataagactggctgggcacggtggctcatgcctgtaatcccagcactgttagaggtcaaggcgggcagatcacctgaggtccggcattcaagaccagcctggccaacatggtgaaaccctgtctctactaaaaatacaaaaaatagtggggcatggtggcgcattcctgtaatctcagctactcgggaggctgagacaggagaatcacttgaacccgggaggcagaggttgcagtgagccgagactgcaccactgcagtccagcctgggcaacagagcgggactcggtctcaaaaaaaaaaaaaaatgaataagacagtagtctcacctccaggaacataacctagatggtgtagataggatagctgtatgagcaactaatgttacacaggtaatgaagcagagtggactctaagggtctaagatatttacagggtgctagaggaagaagagaatatataggtccaaagacttatttcttagggagttttacatcatctccccacagcagaagccctggttatgtgactatgccagtaattgagtggtttaatctccagtttagggatatgggtattaaccagtccctgttgctacagattgaaagacatattctttaattttgctaacaataaaggtgatgtttgatctcctgagtaacttctccatctcaggagtttccaaattctggaggaaaatacaaggatgttatcctatttttatcattaggaatcagcttccttgctgaaatttagatacaaaagtgacactggtctggcatactctgtttttagtgctggatgattcctaatgatcactactattttgaaaaggcaacagcataagaatttgattaataatgaatggttcaaagaacaaagtctacccagaatttcatcattcgttttggtgtatttcagttatttttatagatatttgtgtattgtttaaagaaattggtattgtactgtctataacaaatttttacacttttacatttgtgaaatctatcatatagaagagagcattcagcatgtacaatttaatgagaaataaagttataaaacagatactcatatacccaatgctcaggttaagaaatgtacattgccaataccttagtaagctcctatgtatcctttcctggtcagtttcctgaatcaccccaagagagagaaccaatattctgcttgtaatgcaaataatcttttctttgtatttttaccaattaagtatactggttgtcacactttttaaaacataatttctaaaccatcataaaatgatacttttgtaaatacaaaatcatgtacttgaatgcattggcactgtcagtttactatcagcatttctaaatgtttatgcatgtttgctcactttatgtgcttatctctccatcagccaatgacagttgatcaatatgggatcaatatgggaccacacttcgagtagtactgatgtctacattccttaaaaatagtctaaacaggtagaagtaaacattaataaaatttaataaagtattaaattctatttaataaatagaaatgtcactttttttgtgacttgctgaacatttagtgccatccctgatgatgcatatggctatagtttttgttactgtgtttattattaacataccaccactatgtatttcttccatgaaggcatttggatcattctaccttttttgctattttgaacaaagccattatgaacattcttgtgtatatatgtcaggttgtacatgtgtatgatctcttgagaatacatccagcaatggaattggtgggtcataggatatgtatatcttcaaattaactaggtaatacctaacttttccaaagtaattagtgctttcaccagcagcattaaaaggttccacatttggtattgttagactaaaactttggaaaatctaggcttgtaatggtacctcgttgcttaatttgcatttccatgaggttaattattttttctacaaatttatttaccatttggatttcccctttttgcaaagttgctgtttaaatcatttgcccatttttaaaaattttattgactttttggttaataaaattccttcatatactgaga

SEQ ID NO: 9901 - DNA, 576 bp, Homo sapiens
gtctatcaacaaatttttacacttttacatttgtgaaatctatcatatagaagagagcattcagcatgtacaatttaatgagaaataaagttataaaacagatactcatatacccaatgctcaggttaagaaatgtacattgccaataccttagtaagctcctatgtatcctttcctggtcagtttcctgaatcaccccaagagagagaaccaatattctgcttgtaatgcaaataatcttttctttgtatttttaccaattaagtatactggttgtcacactttttaaaacataatttctaaaccatcataaaatgatacttttgtaaatacaaaatcatgtacttgaatgcattggcactgtcagtttactatcagcatttctaaatgtttatgcatgtttgctcactttatgtgcttatctctccatcagccaatgacagttgatcaatatgggatcaatatgggaccacacttcgagtagtactgatgtctacattccttaaaaatagtctaaacaggtagaagtaaacattaataaaatttaataaagtattaaattctatttaataaata

SEQ ID NO: 9902 - DNA, 157 bp, Homo sapiens
gaaataactataaatataggttaacatttattgaatgcctaccttgtgctaggtgctgtgctgagtatttgtattgacacatttaatctttgcaatgattctatgaaataaaggtattatttccattttacagatgaggaaactgaggaatagaggg

SEQ ID NO: 9903 - DNA, 1431 bp, Homo sapiens
ctttgtattgcttatattgcatctgagattgtttgtatcttttttccttgactagtcttgctagaggtttatcatatttattgtttttgctttacaaagaagccaatatttttgtttttcttctttgttatattttctctattttgttgatttcagctttttcttttctatgttaatatgtcatattattgtagtggatggttagctcttcaaattttcaactttctattctgatttacatatttaaagctatagatttccatgataatgctactttatctcttgcgttagttttctatgctgggtaacaaattaccacaggtttactggtttataacagcataattttattatctcacaatttcttggggttaagagtttcagcatggcttaactgggtcctctgtttagggtctcacaaggctgcagtgaagtcagctgaactgcattgtcatctggagctcacagttctcttctaaattaatcagattgttgataaaacttagttccttgaagctgtagaactgaggtcctcagctacttagggctgctcttttatataagcagtgtaacgtgacatgcctttttaaggtcagcagaacttctgactagaatctgtttcagagaaggccagaaagagttcacttggttaggtcagagtcacctgggatagtctcccttttgattaagtcagagtcaactaaataggcaccttaattgcatctgcaaaatcctttcacttttgccatattctcttactaaatgtaacaggcgttgtccacacaaaggtatggatatggggcttggaaaggatttcaggaaccatcttagaattctgcctactactaactccattctacaagtctcaatatctagcattttagttattcactaactgcaaagttttttatttcattatcattactactttgatccatagatactatttggaactataatttccaaacatgaatatttaagttttcctttattgttgatttttaacataattgaattgtgatcagatgatatattctctatatgatttaaattctttgaaatgtgttaacagttgctttatgacataataagtggctggtttttataaattttaggatgcttgaaaagagttctacagttatttatgttcattaatcattttagtcatgttcattaattttcaagtcttcagtatccttagtgatgatttttttgtttttggtatatatctcttgattactaagagaattgtgttaaaatgtagctagcatgattttagatgtgtttgtgtgattctttcaatttctctctttttctattttgtattgggatacaaatgtataattgttatattttccaggttaattgaaagaagctttatcattacaaaattatctttatttccactaataaattttgccttaaaattaa

SEQ ID NO: 9904 - DNA, 243 bp, Homo sapiens
tagctatcttgatttcactacagctcagtagcagttcagtgctttggctttggagtcacagccaagttcaagtcatggttgtgtgactttggattttattaactatatatttctgttttccatctgctgctaaggtgatgccatctggtataatgagaatgaaatgagatgtttattaaacactgaggatcagtgcctagcatatacaagcacttagtaattatatttttatcattagtctaa

SEQ ID NO: 9905 - DNA, 157 bp, Homo sapiens; identical to SEQ ID NO: 9902

SEQ ID NO: 9906 - DNA, 914 bp, Homo sapiens
ctttgtattgcttatattgcatctgagattgtttgtatcttttttccttgactagtcttgctagaggtttatcatatttattgtttttgctttacaaagaagccaatatttttgtttttcttctttgttatattttctctattttgttgatttcagctttttcttttctatgttaatatgtcatattattgtagtggatggttagctcttcaaattttcaactttctattctgatttacatatttaaagctatagatttccatgataatgctactttatctcttgcgttagttttctatgctgggtaacaaattaccacaggtttactggtttataacagcataattttattatctcacaatttcttggggttaagagtttcagcatggcttaactgggtcctctgtttagggtctcacaaggctgcagtgaagtcagctgaactgcattgtcatctggagctcacagttctcttctaaattaatcagattgttgataaaacttagttccttgaagctgtagaactgaggtcctcagctacttagggctgctcttttatataagcagtgtaacgtgacatgcctttttaaggtcagcagaacttctgactagaatctgtttcagagaaggccagaaagagttcacttggttaggtcagagtcacctgggatagtctcccttttgattaagtcagagtcaactaaataggcaccttaattgcatctgcaaaatcctttcactttggccatattctcttactaaatgtaacaggcgttgtccacacaaaggtatggatatggggcttggaaaggatttcaggaaccatcttagaattctgcctactactaactccattctacaagtctcaatatctagcattttagttattcactaactgcaaagttttttatttc

SEQ ID NO: 9907 - DNA, 679 bp, Homo sapiens
aaaaaaacagatgcaaagaagacaactttattaggtgctttctctcccttatgagaaggatttggttctttcaggtgaagttccaaatcactagacaatacccagtttccttcagttgcaacaagttcatcccacggtgggtgctctgaaaagcaccttgagggcgaatgggtctcaggccattcaggatcaggtccgatgcttttgttgaagattcttcccgtgtcacctcttagaagcagttcggtgtccccctccaaagagcccaccacctggctgcgccccacctccatttgtcccccagttgccaggtaagggtacccagctaccaggtaacggtgagtggttcagaaggtgccgctgcgggggcagccaggccttcacacgcaatcactggggaagaggcgaggacacgggtggatgctggaggcgcgcacgtgcgcaggtgctcgcgcatccacacacacacacacacacacacacacacacgcacacacaggcacggggtgcggggcgagcagggggaggggacggccttaccagatcaatgaacgtcaggaatttccagctccctccgtaggtctggtgtgagggcatttcgatggccttgtagttacacaggatagagcagtaagacagcaggattgccatccgcagcacctggcaggggacaagcgcc

SEQ ID NO: 9908 - DNA, 1410 bp, Homo sapiens
gatcttggttaggctcactgctgtacccaaccccctaacacagggcctggtgtgtaggttttcagaaagtatctgtaaaatgcatgggtggaggagggagcattttccttctggcactgctggggaaaaagaacctaaggccctccactcaccagggttccacattctctgtagtccagctgggaaatgctattaaaaggaccattctcgtagccttgatggtggacccagcatctggcaatcaggagggccttgaagtactctgcctagggaatgtcccaggaccatatacagtctgcagaaggaggcagtgaacacacttggcctaggccccatctcaggagccttcacatctccctgggacctgcacaatcaagtccaaaatctttgtctgatgtcaaggctagggcttttgcaaataggatcccatacatcttccagccctcatactcctccactcccttttcatttcctgaacattccaacttctatgcctttgctcttgtgggctccctcatgtaattaggataatttccagccaggtattccctcacccttgttttacaactgaatcccactttctctgggactccactgcttggtcactctgccctgtgctttgagaggaggttgggtggagcatgggacatgggccatttactgccttcacatttccctggtcacggtgatttttttaggggtgggcacatgacctaggtagagccaatgaagtgcaatatcactagaacatgtgagaagagaggcatgaaaccgaagctgagagggtttgagatctggagctactccttcctccacccaaacttcagaaggtgaaggagatagtgcatgtgagtgagcagatcccgagggcactgtttgagcctcagaatcaaagcacttctgaagctagtcccaatcttggattcgacagttacaagaaccaataaattcctttccttgtggagtcatgttgttttgttacttgcaacctaaagattcctgactgatatactgtgcccagtgcttttctcttcatatctctaatgcttggcattctccctgccccctgacacatccactgagaagcctttccccagggagctgcctgcccacatggcatctctctctcccgagcttctaaagcacccactgctcttcccacctcatagaactacctggtgcaacctgcccacgtcccagcatgtctgccctgcacaattgaacgtggaacctggcacacaggaaaggaaactttttggtggatggaatggagggtaggagaacagacggctgggtgaatgtaagctccatgagagcagggactttgccatgtgtaaactctgcatcccctgtgcttcaacacatgctcagagcatagtagactttttttggaatgaatggataagtttt

SEQ ID NO: 9909 - DNA, 844 bp, Homo sapiens
agggtctcagtatgttacccaggttggactggaaacccttggctcaagcaatttgcctgcctcagcctcccaaagtgctgggattacaggcgtgagccactgcacagggccagattcatcatttcaaagttactttctatatgcggccggaacagggtggttgacatcagttttcttcaggttactttttaataatgattaaaacggggaacttcattatcatgagcatggttactgtctgcattattacgccaactgaaactgtcatgtttgggaatttggctgttaactctgtctccaggagtctcaaaggtcagataacaacttagttttggtttgaggacatggaactttaatacgacagattccattttggtttggtctggtcagctgggacctagtgcaggaggttagtccaaaacaatggccttccatagtttttacttaacaagcccaactccttacggtaatcctttaaggcctatgtgatctgccctcaccctggctacactctttgcccttatgtccaccagcctccagtgctccagacacaactgatctcaaatactcctgacacatccccctggggattcctcttcctggattgctctcctctcagctgtctgcttggctcactctctcaccttctgaggtcttagctcagataccacctttcactcacctgtccaacctatttaacacaaactggcccatctctgacgctcctgatcttcctgatgctctatttttaaattttttcaatagtgcttatttctttcagacattgtatatgtttctcctatttgtgatgttcagtggctactgtccccacccacattgtccc

SEQ ID NO: 9910 - DNA, 919 bp, Homo sapiens
catactttcaaagtggtttgggtattcatatgaggttttctgtcaagagggtgagactcttcatctatccatgtgtgcctgacagttctcctggcactggctggtaacagatgcaaaactgtaaaaattaagtgatcatgtattttaacgatatcatcacatacttattttctatgtaatgttttaaatttcccctaacatactttgactgttttgcacatggtagatattcacatttttttgtgttgaagttgatgcaatcttcaaagttatctaccccgttgcttattagtaaaactagtgttaataacttggcaagagatgcagggaatctttctcatgactcacgccctatttagttattaatgctactaccctattttgagtaagtagtaggtccctaagtacattgtccagagttatacttttaaagatatttagccccatatacttcttgaatctaaagtcatacaccttgctcctcatttctgagtgggaaagacatttgagagtatgttgacaattgttctgaaggtttttgccaagaaggtgaaactgtcctttcatctgtgtatgcctggggctgggtccctggcagtgatggggtgacaatgcaaagctgtaaaaactaggtgctagtgggcacctaatatcatcatcatatacttattttcaagctaatatgcaaaatcccatctctgtttttaaactaagtgtagatttcagagaaaatattttgtggttcacataagaaaacagtctactcagcttgacaagtgttttatgttaaattggctggtggtttgaaatgaatcatcttcacataatgttttctttaaaaatattgtgaatttaactctaattcttgttattctgtgtgataataaagaataaactaatttctatatctctctttatt

SEQ ID NO: 9911 - DNA, 918 bp, Homo sapiens
catactttcaaagtggtttgggtattcatatgaggttttctgtcaagagggtgagactcttcatctatccatgtgtgcctgacagttctcctggcactggctggtaacagatgcaaaactgtaaaaattaagtgatcatgtattttaacgatatcatcacatacttattttctatgtaatgttttaaatttcccctaacatactttgactgttttgcacatggtagatattcacatttttttgtgttgaagttgatgcaatcttcaaagttatctaccccgttgcttattagtaaaactagtgttaatacttggcaagagatgcagggaatctttctcatgactcacgccctatttagttattaatgctactaccctattttgagtaagtagtaggtccctaagtacattgtccagagttatacttttaaagatatttagccccatatacttcttgaatctaaagtcatacaccttgctcctcatttctgagtgggaaagacatttgagagtatgttgacaattgttctgaaggtttttgccaagaaggtgaaactgtcctttcatctgtgtatgcctggggctgggtccctggcagtgatggggtgacaatgcaaagctgtaaaaactaggtgctagtgggcacctaatatcatcatcatatacttattttcaagctaatatgcaaaatcccatctctgtttttaaactaagtgtagatttcagagaaaatattttgtggttcacataagaaaacagtctactcagcttgacaagtgttttatgttaaattggctggtggtttgaaatgaatcatcttcacataatgttttctttaaaaatattgtgaatttaactctaattcttgttattctgtgtgataataaagaataaactaatttctatatctctctttatt

SEQ ID NO: 9912 - DNA, 918 bp, Homo sapiens; identical to SEQ ID NO: 9911

SEQ ID NO: 9913 - DNA, 239 bp, Homo sapiens
tcatgaaagcctctcacttcctcttgctatgtgctggaggcttctgtcaggttttagaatgagttctcatctagtcctagtagcttttgatgcttaagtccaccttttaaggatacctttgagatttagaccatgtttttcgcttgagaaagccctaatctccagacttgcctttctgtggatttcaaagaccaactgaggaagtcaaaagctgaatgttgactttctttgaacatttc

SEQ ID NO: 9914 - DNA, 239 bp, Homo sapiens; identical to SEQ ID NO: 9913

SEQ ID NO: 9915 - DNA, 239 bp, Homo sapiens; identical to SEQ ID NO: 9913

SEQ ID NO: 9916 - DNA, 6573 bp, Homo sapiens
gcaggggtctgggactgacagggagcaccccaggcccttggtacccccagggcgaccccttctgccaagtgtcccaaaatgattgctaaatgcctggctcccccactctttgactccatctcttggttccctctttctgctgccagctcccccgactcttccctggggactcctctctgtgtcccccttctcccctgcccctactgccaggcagatcccctcttcttccatacccatcactgcctccctgctcggccggtccctccatccccgcagcagtgagaagccttaatttctggtactgtgtgagcactctgggggtgtccccctccccccttcaggggcagctagaggatgaggggggaggatatttagcactggggcctggagctttttccccacttctgtaccctatcacccctaaagttcaaatgcaaaacacttgaagcagcaactactgtacctgggccccaatcctgcactctcccctggctcctcatatgcaaatcaagggctggttctgcccccacagcctgccccctccccattccctcccactcctagcctggcccctaaccacgcactttaaccttgcttctttcttttatcttcttttgggagggcagagcctgtggtcattcctgccctggctctccttcccttgaactttgaggcttgtcatgaatttttaagtaagcgttttatcctttaggggaagaaacaaattaatttcctgcccatttcaaaaccacagccctagtatgtccactgtgtttcaggcatgtgtttgcatgtatatggagggagggaccatgttcttcctcctgtgccgccaagcccatagtttatctgtgctccctatctgcctccaccttccgttatgtccaagagtacccactgccccagtcactcctgatctgaagccaaagatggtaggaggggcagggccgacaagggaccgtggctactcgggacccaggcttcccctccagtgtgaggaagaagctctgacctagagagagatgaataggtactggggcttggtccctgccttcccagcagggaggaaagatgggattgagctgggggctgcactgataagatttctaaagtcgcaccccaaaagccaaactgggctggagtgaagagggggcagttttctctctaaatgtagcattgaatttggccctggtccctttaagtgctctgtccacccatctcctagtgcagcctcctggacagttggacccactcctgcagcccagtgttcccttcctcacactcaatacctcagccaggggccaagacacagaacttgaatagaggtcatgccccctccgcccccacactgcatccttgcccagtttggctgccatcagtattgtcccctgagaactggacaggcttcgtttacacagtacagggtctcccctgaggggggatccttcagcctccctcccctactcaagtttgctttattcacagtcttacccatcttttagttgtataccctgaatgtcttgccacccttgtcaagggtgggctgaggggaggggggcgtcccaggaccccctccctccccaacggatacctttaaccatacctcatgctggtttccagaagcctggggtgttgtccaagtccttatcttttcatggtcccttttgatcccctgtctctctgtgttttgcttctcccaaccctcagttcctaaatcatttcaaggcttccaaatgaccattattgatgagaaggattgtgcagcttttagtttttatttttattttcaaagccaaagggccttgtgacgcccctcttgcccacctccctccacaccgtgtcctcccctatatgacaatcaatgtgacctctcttaagggctgcagcccccatccccaaccctgctggctctgcaaagcttgccttcccttcaattctctctcctgaaatcttcccattccaccccctccctctcatcttggtgctgggaattaggtggtggggggcaaggggagtgagaagatgggtcctccagagagaacttgccgggtgtgagtcgtgttctcctttcgtgatgtttggtgatggcgggaagcgtctgagtgtcagagccccgttgtcttgctagatgagatttctgggggctgtctgcgccctgctgccctcagcgcactgtcagcagtgctgggaggtggtggggagtcctctgtccctccatatgtggctgtgaggaagcctgggggacaagcagcctcctctccttatgccaaaggaaaccccacgccccaccctgggctccccagccctagtgttttttgaagcattttgaccattctcatggccactgcatatttattttaatgttaagattttttttaaacctctttgacttaaacgggtgtggagaagtaaaacaggcagaatgccccccagtcttcatgggggagggcggggagggaacagcgccttccctttgccctccccctcccccctctccccaccgcagccctaaagcacttgcttcaagtaataagcacttttgtgaaaaggcctattttaagcgaggaccctgggagcagccccaggtcccagcaaaggaaacagagcgagggcgacataggagacagggaaacagacgtgtgaatcagagggtgagatggaaagagccagtttttagtttctgattttgggggagctatttctgattgggcggtggctctggtagggtcatatactatccttcagaaaaacgaatggcacaaaccgtgggtcccaggaaggaccagcagacccgggtcactgccactgtccactgagactgacgggccacctcccctgccccgtggccccctgagccataggactgctgaaaaccactgaatgtacagcccaggttggggtggggagcagcccctgggggagggggcttctccttttgtttggtgctgtggggcgtgggagagaaaagactgagggactgccaccccacgtagatgtgtttcttggggtggaggggctgaggagggcctacctccctctccaaccccagccatggcccctcttccttcctcacccctatccgttttgactgtaagtccagctcacctttgccttcaatatgtaaccaaaggaaaactcaatactgtttccaccactgtctgcccacccgagcaccttcttactccctggacctagaaggggagaagaggctggaggtggggtggatggggccagagtgaacggttctacagctgtatccccagaacctcctccagggtcttggaaggagtcctgagaggtgggattggggccgggctggcagggctgagtttgcgcactgtgtatcttatgcacatgagtgtttttgtctaaatgactccagtgactgctccagcggggaggccccttcctccttccctctcagccatttctcacccacttcccatacccagtgttcatcccctacctccccttcccaccgcaaaggaaaatagccttacagaccctagcccagaaaccctactcctggggcaaaccagtatgggcccccatcccgcctagtttgaaccctaccttttaagaaggagggataaggaacaaagcagccccttcccctctaattgtggtggctccagccttctgcagccttgacccaggttgggcaagggcggaggtgaggaatctttgaggaccaagcccagtggtctgggaatcgggaggtagagagggaagggtctgccttgggggctccctcctcccaacccaacccctagagaagcgaccaaatcccagagatggggtgaagctggggtggggagggtctgctctttgaattacttgaaggtactgactccaaggctgctgttgcccacttaggtgtgagggggacactgtcactgcatttgggagggcagagggtggcgggtaaccagaggatccaccttggccctcacccactcctgctaggccctttccctggggaatctggaagcctgactttgcccccagggaagttggggaccgccttccctcccttctccacctctcactctgggcaccctctccaattgcactaaagtagctgttgtgccagtctgccccccacaaggggggaggtctctgcttccagtcttcttcccccgctgcctccgctcccaccctggacaatctccttgtttcccttgtgttcctggatagctcagctttgtatgtgtgtttggggggtgggggtgggttctggcttgagtgggtttggcaggggtttgggaagggttaggggaggatggaggatgaagtctcctacccccttctccagctccaggccacagaagcctgggaagggagggtgcctactctcgctgctgtgtgtcttgcagatgtgccaaaatgggggtgggtgggaggggagggtgcctggcagagcagcccctggggtggctctctcaaagcaatatagttcccctgcgggggacagcaagacaggggagagggttggggtggggacctgggggttccccatgtacagctatgtatattcaggggtgttctccgtctggtacccgctgtgggcatctatgtgtgtgtgaacctccccttccccatgccctgcatgacctgtgatgctgcagacaccaccatcctgtgtgcaggtgtgtgttggggggcacggaggggcatgttccatgtcctgttgcaccctccaccctgtgacccatgtactcggttgtaggaagtaaagagaactgagcacaattcactggattctagtggaatctttctctaagcaattttcccattcctgcctctccctgccccggaaccacctgtggtgctagtgttgggatcgggggcgtttaacgctggtgggcagcaataaggggcagatgtgcccagatgcctgcatccccagggtgccgagggcagcaggaaaaagtggggacctcggtgcatttgccccacccctcccctccctgggctaaagcacaatgttctccccgcagattaatgaccctgcaccctccaggcccctactcacatcctcccccaaccggcttcgggtcctcccaccacactctggttttctatgctgttttggtgcaagtacaactgtcgtagtcatggctttgggatgggttctgtttattaaaatcctattgctcctactggccctgtgtcccgcctccattcctgtggttggggggaaggaagggcaacccgacccctttccactggccccatcagccctcagtggtcacgggcagtagccgctcctccagcagggttatggcaagcatgaggccgccccccagcagcagccccagcccctgcaggagcacatggggcgtaggcaggggctccggaggacgaagcagggctggtagctgaaagaaaaagaggatgtcaggattctggccttgcccctgacctctcaactccagaggaatggtgtcagaaagcatcagcagcccccacccaaacaccttagtcccttgtttctcagacttttgcgggcctatggtctgacgcccttccaggagctaatggtagaggcggagggactgctacctccctctccactcccgcctccccactgcccttgatttctctgctctacccgacatctctcaccatgtccacaagggccacatagaggaagaccccagcagtgaccccaaacacccagggagtgagggggacagggcccaggctgagccccacccccaggactgcaccccccaatcccagggctccagacacgaggctcagcagcagcagccgccgaaaggacagccctgactggagcagcatggcaaagtcacctattggagacagaggacaggatgggagggagtaagctggggtgcccctcatccatgccacccaccagcctccaagctctaccccttggagctatctcctttctggagtccaccccaccctgctcctgccattcctacccagttcgtggggcagctcatggcagaagaccgctaaggtggtactgaggccgctggagaagccatcagagaaggcagcacctggggccagcagggtcggaagttgtcagtccagaagaaaagtctcctcagaagcaggttcctgtgttccgtggtcctcccgtcctctccccatcttcctgacggccctctcctagccccagctgataactaggagccctggcctcccctcggacctgcttccctccgttcccacccctcacacctatggccagcccatcagtgaggttgtgtagaccatctcccaggaggaccatccacgtgatatcagtgccaccctggtgcccatgactgtggccttggtgcccaggaggggccagagctggtgggtgctggctgttcttctccctctggccctgagcccctggctctgcgggaagaagcacaggacagtgttggtggctgcaagtaaggactgtgagcttggaacctactcttcaaattttctcctctagtcacctggagctgcctgtaggggctgaagggccatcccactgccattctccggatccaagttgcgtgtttcgagattccttcgttttcgcctgcagcatct

SEQ ID NO: 9917 - DNA, 1090 bp, Homo sapiens
ggacatgaagattgtctggagttgttacttgaacacagcccgttttcgtacctggaaggaaaccccttcactcctttgcactgtgcagtgtaagtcccttctgctgcatcagcccttctcgcgagggcccatgacttgagcttaggacaggtagtctacttcccttgtccttcctgatgacccctcctccctcttcctctaggattaataaccaagacagcaccacagagatgctactgggagctctgggtgccaagattgtgaacagccgagatgccaaaggacggtgagtgatggaagacttgggaagaatcccagttgcctctggcttcccctttctgcttgggcagtatactcttccctattttaatctaccctgatccctgccttacaggaccccccttcacgccgctgccttcgcggacaatgtctctgggctccggatgctgctgcagcatcaagctgaggtgaacgccactgaccacactggccgcactgcgctcatgacggcggctgagaacgggcagaccgctgctgtgggtgtgtaggggccacttgtggaagggaggagctcccctggggcatttgcaggatgggtcagccctgcctgtggaggctggctggggctggggttcagaaagcaagagggttgtctttggatgtctcgccatctgcagacgggatgcaaagtggagagccaggatggctactgctctggagggaggggtcagtccctctatcacatttctctcgtagaatttctgctgtatcgagggaaggcagaccttactgtgttggatgagaacaagaacacggccctccacttggcttgtagcaaggtacttacctgaagtgattgggggactgcataaggggcagagcttgatgaagagaggtaagtctcggttgcagaggggactggggcagaagtgaggattgtccagcctatccgactggttgggcagctgtttgtcctcctgttactctccccaactcctgccctgcaccctgccacatttctacttcacaagtctccactctctgttcccctccctcagggccatgagaaatgtgccctcatgatcctggc

SEQ ID NO: 9918 - DNA, 5881 bp, Homo sapiens
aagcgattctcctgcctcagcctcctgagtagctgggattacagacacgcaccaccacgcccagctaatttttgtatttttagtagagacagggtttcaccatgttggtcaggctggactcgaactcctaaccttgtgatctgcccgccttgggctcccaaagtgctgggattacaggcgtgagccaccgcgcccggcctggcccagttcttgactgggactctggtctcagcagaaggaggagaaaagggtatcactcactggcctgagccctcggtgccgcaaaagccccagcatgttctccagcacaaagagcaggaagaggcctccgagcactgacagccccgggcccaggtccttctctggtagtccgccaggtcctgcgtgccgcccttcttgtgcctgacagagagaaggtcagggcagactctggaagcccctatacccaacaacatccccttgcatggatggtggcaagccttcgctcatatgctctactagaaggcagctgtgggctgaagccaggatctgggagtaggatatgggagctgatggaaaggcggaggggatgtcctatggctggggacaccttagatccatggaggccaggggtacaaggaaggggcttcacatacatgcggtagcagatgtagcagtgcatccccacaaagagtgcccaccgccagggcccccaggaagcccagcaagggccgtagtagacgaggtcccaggagccgcagcagcagcagggataggggagaagggaggctgagcaacaggactgccagggcactctgaagcagggctggggagaatcaggggctgaagttaggtcagggcaagaggagggtcccacacgtaaggtggagcagagagaacactacaaggagaggcaggaccccagtgagcctcctttttggcatgggccccacttccaggattcagggtgtcccccacccactcctacttgctgaccagatagtagatcccctgggggtgcaggggccggagcgccgatgcagacgcggctgtcgatctgataaagcagggctgggcacagcagagcaaactgacgaggggtcagaggagcagcggggctcaagccaaaattgaccagcagctgggagccgttcagacactggagaattgagggtcatacattggagaatcaccaggaactatgactcagatctttaacacctggccaggtgtagtggctcacacctataatcccagcccttgagaggcccaggcgggtgtatcatctgaggtcaggagtttgagaccaacctggccaacatagtgaaaccctgtctctactaaaaatacaaaaattagctggggatgagccgggtgcggtggctcacacctgtaatcccagcactttgggaggctgaggtgggtagattgcctgagctcaggagttcgagaccagcctgggcaacatggtgaaaccctgtctctactaaaatacaaaaaattagctgggcatggtggcgtgcacctgtgatcccagctactcaggaggctgagacaggagaatcgcttgaacccaggaggcagaggttgcagtgagccgagattgcaccagtgcactccagcctgggcgacagagtgagactccatctcaaaaaaaaaaaaaaaaaattagctggggatagtagtgaacacctataatcccagctactcgggaggctgaggcaggagaattgctttaacccaggaggtggaggttgcagtgagccaagatcacgccattgcactccagcctgggtgacagagtcagactctacctcaaaaaaaaatatatatatatatttaacacctgtccttccattgcatagactcctgggtctctcccagggtcccctttgctcctactggcaggtaccttggggactagggccaagggtacttataatcaatgtgtattattagtgaatattcagtccaatgcaggtattcaatttgatgcaaactgggtgctagtgagcattgtcatcatcttccctgcaaactctgatcatttcaatcattttgttgatttgataaatgaagctggttggaaaactagagctctccatgccagaatcttaaaagggaaaagaccctgaaatgccatctaatctccctctcaacagccctgtcgatgttcatccagcctcagcttgaatgcttcctgcaatgggcactcactggacctccatcagggttaggcagctttgtctgccctctggtgtaagtggaatatattctctgtctttctggatgaagacagccatccattccctgcaggtctcctctccaggtgaccatccagatcctaccctgggctgcttctctagattctctgctttgccatctattcccctaaactgagtcttggagctctggatatgggctcacctgctctgatcccagagggaacatagttcactattgaaataacatcccctaagaccacagtgagatattttttttttatttttttattttttttattttcatttttgagacagagtctcgctgtgttacccaggctggagtgcagtggtgcaatctcggctgactgcaatctccgcctcctgggttcaagtgattttcctgcctcagccttccgagtaactgggattataggcatgtgccaccacgcccagctatttttttttttttttttttttttttttttttttttttttttgagacagagtctccctcttgttgcccaggctggagtgcaaatggtgccatcttggctcactgcaacctctgcctcccaagttcaagcaattttctcacctcagcctcctgagtagctaggattacacacacctgttaccacacccggctaatttttgtattttttagtagagatggggtttcaccatgttggccaggctggtctcgaactcctgacctcatgtgatccacccacctcggcctcccaaagtgttgggattacaggcgtgagccaccacgcttggtccacgttgggatttaaaaacaaaacaaaacaaaaaactactgattatttaaacatttcaggccatctaatcccatggctccttcccctctagagaccgtcagactcacatcctcattcaggtggtcagccaatgagtggtccagcaacagaagcctgtgaaggaggtccaggcccgagggggctggcccacggggtaggtgaggggcctttgactcttccaggtcaccccaccctgagggacccagaggcatccctgcccagacatccacactcagctcagggttctgtggcctggaatggatgagacagcaagtcagcctcccttgtgttctctatcaacccgctttgagaggctcccagggattttagggggaatggggggactagccactgactggagatcctgggacccagaaaccatggaatgtcattcttaggaagatctgtgagttgtccattttctgccactgggggggacagaaaaaaaaggacgacaaccaaaagggctacgaatggctgggcacggtggctcacgcctgtaatcccagcactttgggaggctgaggtgggtggatcacctgaggttggaagttcgagaccagcctgaccaaaatggtgaaaccccgtctctactaaaattgcaaaaattagcccggcgtggtggtgtgtgcctgtaatcccagctactcaggaggccgaggcaggagaatcgcttgaaccggggaggcagaggttacagtgagccaagatcacaccactgcactccagcctgggcgacagagcgagactctgtctcaaaaaaaaaaaaaaaaaaaaaagaaaagaaaagaaaaaagaagtctacgaatttggagccaaatcagcccagagacactgaacagtgatactaagagcaagaaatttaagggcttagagatttggaggaggagagaattagaaggcaacggagggctagggtggtagttcacatctgtagtcccagcactttgggaagctgaggcaggcagatcgctgagctgagcccaggagtttgagaccagcctgggcaacacagcgaaacccttgtctctttaaaaaatttttaaaattagccggctgtggtggtgtgtgcctatggtcccagctgctcaggaggctgaggtgggaggatggcttcagcctgggaagcagaggttgcagtgagccgtgaatgtgtcactgcactttagcctgggtgacaaagcgagacccccagtctcaagaaaagagagagaaggcaatagaagcatgagaggttttgaagagataccaaggagctcggttctgaagaatttgtaactccagggatctcgtgaggaagccagaacgaggcaactgggggcaagcactgagaggacctgggagatgtggccctgtggagtggaggaaggggtcagtacctgtgtgtggaattgtctgcagctggggatgcagcccgtccagtcagaggcccatgctgtcccaggcgaagcccctgaactcggcctagccccaggctgtggagaagccgcgccaagccccctgcagtcagcgtcccattctcgccgtacaggccaaacagctgggccaggtaatggttctgctcctgctcagcagggcccaggttggggactgagccccctacccagcccaagacgacccacacacagaagccggccagcagatgactcactggggaccccatcattggtgaggggaatggcttaggggctcaggttctggctcctattctccccgaaacatcctgaggactgtgccctggaagaatgaggaatgggctggagctgcgctctgctctccagctcaggtccatgggggagccagagctccttgcacctgctccccaccgagtccagcagcagcccctactgcagccttctttctcccttcacactgcctcctgcgggagcagcctcttgtttgctggttcctggagcacctccctgagtcagagctctcctcatacttcatccagagctgaccgtccattccttgtcccctaaaccccacccctcaactttgccccacctctttatcccccctcaatccccagggcctcacccctactggcaacataagagctgtcacctcaggtcccctattaggccttgctgtagacgttaagcagttcctgagtcagggaagggggaatccaggcttagcctccaggtgtccaggtggatcggaggccacgtcacatagaaggctgagatggacatgcaccccctcctagcccacctgccttggggcggggtcaggggtggggccagtgtgtgaaggctcacataagagaggagttaatggttcactggtctctggggtagggatcaaaagtcagtctctgctgggcccctgggtagggaggggccaccctctgccctgggaaagccacatggctaaggagaacctgggcctagtctttttcctcttaaataattcaccctatccttaacaccattagtaccattttagccctttccctcatgtacttccaccccacctaccttacagtctagcactaaacttcatctccaacccccatccccatattccttgggaaggttggacccaggtgtccctaacctggggaggaggggggaaaaggcagatcagtggcaagcccagatgcatgcatgggaaataaactgttcttagcagtttctcaccccaagaagagaaagagccagagctctagggatcgatgaccaagaaaggggaagccctgcggggggagaggaaacaaggatctgggctctcctctgatgtctgacctggcctaaaatcaggcaagcaaagtctgatcggggtgactggtccagggggttgaggttggcattacctgatagcaggagacaaggacacccagaggaaggggga

SEQ ID NO: 9919 - DNA, 749 bp, Homo sapiens
gtccccaagggcccgcctccgtgtctccacagcacaactcgggcccaggcctgacaccactggagagaccccaggcccacttctagccaggcctgtgccttcctagtcactctaactcccagagagaataagaatgcatgtaatagctataccaaccgcgcatccggctttcacatgcactgtctcccctccctccacaccccacttcttcacttcaattggcagcgccacatccaggcgtcagcccccattcactccaggaacactttcttatccccacccctttgctcctcttctgcaaagccaatgcaggtggcaggaaggtgaggggtagtggaccaatggcaaccctctgtgggaacaaggggccgaggccacgctgcctgcatctcgtgctggggacctgcatgcgccagcaccagggcttggactggatcttactcagtccatggtgcccagcctctgccccaacatgccctctgcatgtgaccgtcatgccctggatggagccactcctggctcaccccacctgcactgcactgtccccagagagccacccctccacccactcagagacagctgtggagagggccaggagaatgggattaccctatgaccaaggagacatgggaagaagccctccttccttccacgatcgaggttccgccatcaactcggttctcggatatgcaagtacctcactttgttaacttattaacttattggtttcattaaagttttcaagagga

SEQ ID NO: 9920 - DNA, 548 bp, Homo sapiens
caggaccctgccacaaggcaggtggacaccatatatgcaaaccatgttaaatatgcaactttggggacccccatggggtctctctgtccctcccccattgggagctgggcccccagcagtagctggtctcaggctgcttggccaccaccctgtccctattctttggcttatcactccttcccctcccagcatggggcctgtttctcccctgccctctcctaagggcaatgcctgggcctttcttcccatttgcaagtgtcagctcccaggggctccctcctcctgctgggtggccactcccctccttggccctccagacaccactcatagtcagcacaggtttctgtatcctccccaaaactcccagacagtgcttcgtggacgatcgcacaaacatagccttttagtttctccagacaggaagaaagcctctcacacttaaacatgcaatgacgtgacacacttggagacatgagtgcagagccactcagccgctcctgggcctctgcagcagatgccagtggactggccttgcagggtgacgacca

SEQ ID NO: 9921 - DNA, 2696 bp, Homo sapiens
actctgctgagctcctctgcacctgcccagcaccatggtgatgtctggtggccaagtctgggcccccatcagctgtattctctaagagcttggggatgggggctggcaccaagggcccctcctcaggcccactaagggcatgaaggagttaggccagggcagcctcgtctgccattctgatggccaggatagctactagggcttcttattcctgcttggggtggtggggatgaggagagttcctggttaaaagagggttgaggggcctaggagctctgggagtgtgcatcatgtttacgggcatcatagtctgtgaatcattgtgtgttgcaggcacaaaattctctgtgcattgggtgtgtgaatcctcaggctggctttcctgtgtgtaactgttagtcattcatttaatatgtattactgagtatctgctaagtgccaggcaccattctaggtgcttgtgatccatcaatagacaaaataggcgaagagcccagctgtaattaatgatgcttacattgagggaggatatgccgctgggaagggactcagacaacaaatataagtatagaatatagtaagttagaaagtgcaggccaggtgtggcggctcatacctgtaatctcagaactttgggaggtgaggcgggaggatctcatgaggccaggagtttgagaccagcctgggctacatagcaagactccatctctacaaaaaattaaaatttagttgggcatgattgtatgcacctgtagacctagctacttgggaggctgaagcaaaaggatggcctgagcccaggagtttgaggctgtagtgagctatgatcccgacactacattccagcctggaaggcaaaagaaggccttgccttaaaacaataaaataaaataaaaagaaagaaaagaaaaaatagggcaaaaatagagcaagaaaaagagcaagatgaggggtttggttgcaatattattttatttatttatttttttaaatcgtagagacggggctctctgtcttttgcccaagctagtcttgaactcatgggctcaagcagtcctcccacctcggcctcccaaagtgctgggattacaggcgtgagccaccgcgcccggccaggttgcaattataaataggggtgtcagggtaggatccatttaaaaggtggattttgagctaatgcttacaaggggagacagagctggccatgaggatgtctggaggaagagtcttccaggcagagaacagagtgaccgtcattttgcgggaacagcagggagaaaggagggggataagcaaggagtttgcgggagagagggcagtgaggttagggagctgaccaatggctttatgccgtcctcatgcgtccaccttagggtgtgtctcctcgttcgtttttttttttttttttttctttttcttttttttttttttctttttttgagacgaagtctggctctgttgggcagggtggagtacagtggcgcaatctcggctcactaaaacctccacctcccgggttccagcaattatcctgcctcagcccccagagtagctgggattacaggcgcccaccaccacgcccggctaatttttgtatttttagtagagacggggtttcgccatgttggccaggctgatcttgaacgcctgacctcaggttatccgcccgcctcggcttcccaaagtgctgggattacaggcgtgagccaccgcgcctcgatgctctgcctgcatcaccgggcatgtccaggtgtgtaccattcctccgagcaccaggatgtcccttaaggcgtccgtgctctggtgtgtgtcccagaaatagacacgaccctcggtctgagcgcccctgcaccccagcctgcccaccgcgcggaacacctgcaagctccggtccgggtgccgcgctgaccacagccccggcatcacgtgacctcccgcggctctgtctgccccgccccctccagacgcctgctctgcgctgcgcattcgctctggccatagcgggcctcgtgtcgctgctgatgcagcccgagggcgccctcggcgaggagctgcaagtgccgcagcccagggccgccagttggctgaacttaggctccatcaagaagtacttggggaagctcttcaacagcaggtgggccggcggagggtgtgaggaagggagggagggagggaggaaagcggggggtggggggggcgcgggggggggacacggacgccaccaggcacccccacgcacatcgcggcctgagctgggctcggggagcggcctcatgactgcaaagacttgttcccagcccgaagaaatctaaaaaccacaagaaaactgcgaacgccacggacacctccccatcaaaagccacgaaacccccaccatggaccaccacgaacccccagtggctgaacacctcggaaccccgaccaccgacctcctcccggggccccaggtaggacagcctggatgctgggcaccgagccaggggcctcggggctgggggcagcttgggtgctagcgagaggaagttcctgggggcgggcatgcggggagacacagcacccctgtggggggggcttctttctccaggctgggccttggcctccagacgcctctctgcccaccaacccctttgtattgagaggggcctcgacccctcctcatcccctcagtgaaaacaataaagacaaatttttgttgc

SEQ ID NO: 9922 - DNA, 358 bp, Homo sapiens
cacggacacctccccatgaaaagccacggaaacccccaccatggaccaccacgaacccccagtggctgaacacctcggaagcccaaccaccgacctcctcccggggccccaggtaggacagcctggatgctgggcaccgagccaggggcctcggggctgggggcagcttgggtgctagcgagaggaagttcctgggggcgggcatgcggggagacacagcacctgtggggggggcttctttctccaggctggccttggcctccagacgcctctctgcccaccaacccctttgtattgagaggggcctcgacccctcctcatcccctcagtgaaaacaataaagacaaatttttgttgc

SEQ ID NO: 9923 - DNA, 2696 bp, Homo sapiens; identical to SEQ ID NO: 9921

SEQ ID NO: 9924 - DNA, 852 bp, Homo sapiens
tggctttgacttgctttattgagcctgtgtgggagcagggagcaagctttggccagagccaagggtgcagaggggagagctgggctggcgctgctcatggagtcgtaggagacagaaggtggcattataagtccagcgggctgagctccctgtgaggacagggcagaacatggcagtgtagggggtaggcctcgtgccctcaggaggcctcaggctggccctgggctcctgttctccctcttccaccccccactacacctttccaagccctgattcagtcccaccacccccatttcagccccagggagctggacagacagggcagggagtcaaactcacctggggacagcagcatgcggggacccccactccgagaaggccagcgtgtcctctttgtgtcttttcccatacctgggagggaagaggcagcaggggcaagcactgtgcccaggtgccagcccacctgtttcatatctgcctgtaggcaccatcttgcccagggcacattggtctaggcctgttgagcacagatgccctgttttcccaagagcaggcctggaaggggctggggctggggctggggatagggtgtggccaggaatgtggagtgggcccagggtcccaggggctgggatctctctccccaactgtggcacacacctaggcctggtcagcatgttgatgtatctacggagatcagctgcatactgggccatctgctctggtgtggcattgtcccctgggtacactggctccagtggggctccctgggcacccagcagtggctgtagtaacagagccacgcaggtggacaggagcagcagggagaggcagaggcgtgcggcagccatc

SEQ ID NO: 9925 - DNA, 852 bp, Homo sapiens
tggctttgacttgctttattgagcctgtgtgggagcagggagcaagctttggccagagccaagggtgcagaggggagagctgggctggcgctgctcatggagtcgtaggagacagaaggtggcattataagtccagcgggctgagctccctgtgaggacagggcagaacatggcagtgtagggggtaggcctcgtgccctcaggaggcctcaggctggccctgggctcctgttctccctcttccaccccccactacacctttccaagccctgattcagtcccaccacccccatttcagctccagggagctggacagacagggcagggagtcaaactcacctggggacagcagcatgcggggacccccactccgagaaggccagcgtgtcctctttgtgtcttttcccatacctgggagggaagaggcagcaggggcaagcactgtgcccaggtgccagcccacctgtttcatatctgcctgtaggcaccatcttgcccagggcacattggtctaggcctgttgagcacagatgccctgttttcccaagagcaggcctggaaggggctggggctggggctggggatagggtgtggccaggaatgtggagtgggcccagggtcccaggggctgggatctctctccccaactgtggcacacacctaggcctggtcagcatgttgatgtatctacggagatcagctgcatactgggccatctgctctggtgtggcattgtcccctgggtacactggctccagtggggctccctgggcacccagcagtggctgtagtaacagagccacgcaggtggacaggagcagcagggagaggcagaggcgtgcggcagccatc

SEQ ID NO: 9926 - DNA, 22238 bp, Homo sapiens
tttgcggcccagcgcctggactggaccttggcgttgggccgcagttgcccggagtttttggggcccccgggaacccgcgcgccgaggccggctaagtttggcagactctctgagctctcggaattcgactgcctccattgttgctccttctggcacccacagaccgtaacgtggccgtaattgtttcccggagagcttagcttccctctgagcacctccctcccctttttaaagtaccttcccactcgcctgcgtttcctcgcgttagtggtgcaggggcctccgcatttggggaaataacaaacacccacttccgccccccaccccaaccgggatccccagataatgagaaatagatggtggccctctgtttgtaagctgttcatttgcataggtcggaaccgcgcaccacagcttgaagctaggaattaaaatatcggtgggaattaaataagtggctggcttaaagaacatcttcttaatttatccccaaatgtagacatctcttcagtggaccccctgataggccggtttgctccaggtgaggtgtgctcacagcaactgcaaccgtgtttctttcagaccatgggcgtgagcagaacctactatgcgcccctgctgcctgggctgtgctgttcagtttggggccaccagccccacatggctcctgagcacttaaagtatggctagtcggaatcgagatatatgcattctttaccaaataatgttcaaaaaattgttacatgttgaagtgataaactttttccatatattgggataaaagttttatttgtttattttttagtgtgggttctacagaattttaaatgtcacctgtggcctgcattatattgccattgggcaggctgatctagggcttgcatgcctgtgatccttaggtgcaccctgtgaggtaggtgctttaactgtgtgcaccctgtgaggtaggtgctttaactgtgtgcacattgtgaggtaggtgctgaaactgcttcctgttttttttttttttttcttttgagacggagtctcactctgtctccaggctggagtgcagtggtgcgacctgggcttactgcaatctccgcctcccaggttcaagtgattctcctgcctcagcctcccgagtagctgggattacaggggcacgccaccacacccagctaatttttgtatttttagaagagacggggtttcaccatgttggccatgatggtctcgatttctgaccttgtcatccgtccgccttggcctcccaaagtgctgggattacgggcgtgagccaccgtacccagcctgcttcctgttttaacagacgaagaaatggaataacttccaacaagtaagtagccagtaagtgaacaactgagatttgaacccacgtagtctggctttgaggctggtgtgctcagtcattactgtgctaaaattttgataatatatttactatgaattggcttaaggtttcacttgaaagtagcatatttatgggcaaaattaggaagtaggatgctcctggcagacccatgtatttaaaaaagtagtttcttatatgtcaagcacggtgagcatgtcatacctttaagaccccagtcatacatataaggttttctttgtagctaggaattaaaatatcggtgggcgttaaataagtgtctggcttaaagaacatcgtcttaacttatccccaaatgtagatatctcttcggtggactccctgataagcctttatgagaaggacagcatctcagtatgggggtaggcactggactctattggcagtggaaatttgtgggctggtacaacttcagcccctctggttgccctcttgcaatctgtcaagactagccaggctgcttgttccatcagcaggtatacctgatttttttatttttttaattttatgtatttgtttttttcttttttgaggcagagtttcactcttgtcgcccaggctggagtgcaatggcgcaatctcgtctcactgcaacctctgcctcctaggttcaagcgattcttctgcctcagcctcccaagtagctgggttacaggcatgtgccaccacgcccggctaatttttgtattttcagtagagacggggtttcaccatgttggccaggctggtctcgaactcctgacctgcctcggcttcccaaagtggtgggattacaggcatgagccactgcgcctggccggtttgtctgatttttatcaatttcagtttttatttttaaaataaatagtatatccatattattcatttatcagaaagcctataaaagatacacagtggaaaaagatgtccctcacacctgtcctagtgtcacaaataggtgaccactgtttcctgctcattcttcaaaatgtttatgtatatatgagccaagatatgccctttgtgttccttgtttagaaaaatgccggcatgccatacatatttactccaccttgtgttttttacttaatgtatccggggggcatgtttatagtaacacatagagagctccttgctgttttttcaacccccttaacatattattgcaggtatatccataccataatttaccaattctctattgatggacatttagactttaagtcttttggaattaaaagttgatccatttggaatcgatttaatatatagggtgaggtatagatccaaattaatttttttgtccaggtggctacacagtcatttattgagcagttcacttctggactctgtatccgttctaatggtctatctattcatgctccacttgctggtttgttttaaatccagagacataaaatcttgtaagggatattgtttcacactttgtttggatcactagaaatcttaaagcctatatttcagcccgtgttaagcaacggtatagtaccatgtggcatgcattttctatgggctaatttttattttcccttagcccctattatttccacaatttggtttattttttgtagaacaagccaggatttaaatatacctttaagactctctgtttgcaagtaacagaaaccaagctgaactagcgcaaccaaaaagggagaatttaccataatgatataggtgcttctcacaaaagcccagaacaggaatacagccacatcttagcaaaaactagaaccagtcattgaaaagcttccaggaacccaaaaggtactctctgtgccccttgtgattgttttctatgtatctctgctaacttgttctctctgcttttccatctacatgggagaatatagtcactcccatattggactgggctgtcagttcagtgaggagtctgagcccaaagaaggaaggtggggcagcagccctgcaaggccagacagctgattacatacaggagaactacacaaagaaaaactatattgaggctaatgggagccagatttttccctgttggagaagggagttacaagtacagaaataagaaaagcaagaagtttgtgtgattggattggaattggagatattcatgtaaagtcatggttcttaatacatgtagatataaaaataaatataaatgtaaaagtgtgtatctatatattttgtgagattctgaaatatatatttggtctttgacctcattttctggtgtacaactcctaaatttcttacaaacaccgaagtgatgtcttttgtatgctaatgagttggctcgtggctgggagcccctaggtagctttaggatggggttggtcatcagaaagaccaaggcaggatcagagggttggaccttcagcctatcaccaacttcttggagaagagaagggttgaaggtcaggttatcaccagtggccaatagtttaatcagtcatcccttatgtaatgaagcctgcataaaaacccatgaggacagggttggagagcttctagatagctgaacaccaggaggttcctgggagggtggtgcacccagggaaggcatgaaaggtctgagccccttctcccacacctcatcctatttatcttttcatctgtattgtttgtaatatcttttgtaaacataagtgtttgcttgagttcagtgagctgctctagcaaattaatctaacccaagagggggtcatggcaaccacaacttgaagcctgtcggaagttctggaggcccagacttgggactggtcagtggccagggacagagtggggcagttgttgggatgtgttggggagtgagcctcaacctgtgggatctgatgctatctccaggttagaagggaattggaggacacccagttggtgtctgctgcagaatcgattgcttgcttggtgtgtggggaaacgccccccgacatttggtcactgaagtcttctttgttaattgttgagggtgagggaatagggtgtgtaatttttccacagtcagttatatacacacacatgtctataaatgtatttacatatatttcctaggcctaaccagtgagaaggtcttggtgcagcaacaccacattagccaagagaacacctaacacctagctctaaacacctttctccatgaaaaggaaccagggcgctttagagaaatggctgattttagggttgggccagagaaagtatagtatgagactggaacatcttgtgctagaaagtgtggaaatgctcaagaaatggtggagacagttcaaaaggacaaagcaatcagcttgaaagggctcctgttggccaaatctgggacaatttgaacatcaaaataaatcacagtagcaggagattatatcccatgggttaaaatggaatctatgagtccacactttcaaaaaaaaaaaataaatggcaataaagagctctttagaatagaattcaataatatatttagaaaaaagaatggaattgtaacccagtcataggttcagcagcccactgcttacagagcacaattaacaagagtgaggtctgccgtaaagaaagtgactttttattccaaagcttaacgtagggggaaaagtgcaggttcctgccttaaggtactgatttgcttttggggcagaaagcaggggcttttaaagtgggacttggcatgaatggcatgcaggggagggagcaagcaggtgaggatctacatgactctccttagcgcttttatctaccgggtgtttgagctggcaccatggcaggcaggactagattgtaaagtggccattgtctgagatgctctccaagtgggacagagtttcctagcaggcatagtttagattgtaaattgactgttgtctctccaggcagtctcctggtgggagagatttctggcttagaaccttctaaaagcacatggttaaataagcttgccctgtaaggagtgtctggtgaagggaaggtaaagattataattgcatttctaaggaactaagtgggaagtgggagaaaggagaaaaggagaaaagaaaaaaaaaatgttttaaaacacagttatctttctcttagaaaaatgggggtactcagtaaacagaattagaaaatcaccatttggcaatcatcagacaagaaatatcaatgtttgctaaatctagtggggaaaagttgaataaggaatgagttacttacataggttcaaagcatctccccatgaaattcttatttaaaaaaacaggaactttacaaaagaggaatctagtagatatcgtcttactcatgacaaaaaaaaaaatcagcattaatcaggctgcactttgacccatttatcagttgctgaaagtcacacagcactctagatactgaccagttgcatccgcagttgttcctatcaatagaatttccaactttaggatcatgactatttaacagttgattttcatctctattgttcctatagatagaatctctgacattaaaaccataaggtttttgcttaaggatcagttaagatgtttacagaccctgaattccataagcattttgaagcgcagaatcagcatgagaagacagcttcctcatctcctgccctatgacttcaacctgcactgttcaaccaatgaatgatctctgcccttcggcccactccaaaaccctaaaaaaccctaccccaaactccttaaggagatggatttgaggttccctcctgtctccctgttctgtgacactacgactaaacctctctgctgcagcctggtgtctccacatgttgacttgctgaatgcattgggcactggaccaattatggttacaaccttatcaagtgctgacaagggtatagtacaactggaactcgcatacattgctgatgggaatgcagatgctgtaaccactgtggaaaacagtttggcagtttcttatcaagttaagatatattttccataaaacctagtatattgtctctctagagaaccctaatacacatatatatacatatatgtatatgtagatatacacatatacacatgtgtggatgtacacatagacacgtgtgtggatatacatatatacacatgtgtatgtgtgtatatacacgcacatgtgtgtggatatacatatatacatgtctacatagatatacaattatgtgtatatacatgtatatgtatgtatatgtgtatgtagatatatgtgtgtttgtgtgtatgtgtatggaagttaatttgttagggagaattggttcccatgttcacaaaggtgaagtcccacaattaggcaagctggaaaatgaaagaagccaatagtgtaactcagtccaagtgtgaaagcctcaaaaccagggaagccaacactacagcccccattctgaggctgaaggtctgagagtccctgggaggctgctagtgtaagtcccagagcccagaggttgaagaacctggagtctgatgtccaagggtgagaggcagaaaagtcttcttgctccagaagtgtgagagagcaaaaaaggaaagccaagcaagctgaatgtcccttttcttccacctgctttattctagccacatcccaatgtgattggatggtgcccacccacattgagggctggtctttctttttcagtccactgactcacatgccagtctcctctggaaacaactcatggacacaccatgagttgtggacacacccagcaacagtgtgtcaccagtgacctaggcattcccaatccagtcaagttgacgactaatattaaccatcacacctagcattcctactcctagacatttacctaaaagaaatgaagccaaaatctagaaacaactccagtatctatcagttggcaaatggaaaacaacttgtggcacatccatataatgggacactatgcagcaataaaaaagggatgaaatactggtatatggaacaacactgttgaatcttataagcaaagtgaaagaaaccagacacaaagggttatataatgtaggattccatttctgtgactttctgaaaaaaagcagagctatagggaaagaaatcagatgtgtagctttaggggttataatggggagaatctttttggggtgataaaaatgtcctatatcctgatcgtgcctggttgttacacactgcaaacatttgtcaaaactcattgaactatacactacattttatataattcaaattagacttcactaatcctgatttcaaaccaaaatctatgactctccagtgtagctcacttatattttcagggtcaccctaggctctgggcaagtaaggcaccaaccacctttgcctcacatctcattgacttggacatgaaacccatcttccctccattgtccaatatgctcattcatgctctctaaggtaacacttactaaaaatgcaagaggatattagcaggaaggtgggataggaagaaggagagtttgccttgtatcaatgaacacaacttaagtaaaatagaaggtattgttctcaaagtgtcttctggaccccatcatggtagagttcctctgtgacttcacctttcttctctttcttccgctctcctctttggtaattacttgtttattcatttattgttttttcatctcctggaggctgagaataaaagtttgtacctctgccctcccagaacaatgagtatttgttttgttctgctgctgtaacaaaaaaccccccagaaacagccggattgatcaactctaactattacacaggtttttgaaaactggccagtcattgacaacgccaactttctgagacagccagttaacaagtctcagcccaataaccatgcttccatagctaatgatcagtcaatccatagatattcctgtttctgaaaatccagcaatccctgaactctaaaattcctaaatacgtatttaggatatgcaatgtgctttaattagaaagactgtatgatatagtttggatgtttgtcccctccaaatctcatgttgaaatgtgattcccagtgttggaggtggggcctggtgggaggtgattggatcatggggcgggggtggttcttcatgaatggtttacccattccctgggtgatgagtgagttctcacttggttcatgtgagatctggttgtttaaaagagtttgggaccttccccttctccctctcttgttcccattctcaccatgtgacacactggcttcccttcaccttccacactgattgaaagctacctgaggcctcaccagaagcccagtagatgctggcatcatgcttgtgcagcctgcagaactgtgatccagttaaacctttttctttataaattacccaacctcaagcattttttatagcaatgcaaaaatggactaatacagaagatcagtataaggagtggggcattactgtaaagacagttgaaaatatagaagtacctttggagctgggtaacaggcagaggttggaagaggttggaaggctgagaagaagagagaaagatgagggaaagtttggaacttcgtagagacttgtaaagtggttatgaccaaaatgctgatagagatatggacagtgaaggccaggctgaggaggtctcagatagaaatgaggaaattactgggaactggagcgaaggtgacctgtgttacatcctagcaaagagcttggctgcattgtgtcctaggaatctgtggaaggttgaaattaagagtgatgacttaggttatttggcagaagaaatttctaagcagcaaagcattcaagaagtggtatgactgcttctaacctactatcagatatgggagcaaagaaatgacttaagttggaactcatatttaaaaggaaaccagagtgtaaaagtttggaaaatgtgcagcctggccatgtggtaaagaaggaaaaagtgtttttcagcagatgaatctgaccacttgctagagagatttgcatgaataaaagggagccaagtgctaatatccaaggcaatggggaaaaggcctcagaggcctttcaaaaatcttcgaggcagccctttcaaatgcccagaggcctaggaggaaggaatggtttcaggggccaggcccaagacacttctgcccagcacagcctcaggacgctagtcctggcatcctggccactccagctacagctgtagctcaagggactccaggtacagcttgggctattgctttggagagtggaagccaccataagccttgatggcttcgatgtggtgttaagccagcaggtggacagaatgcaagagtgaaggaggctttgcaacttccacctagatgccagaggatgtatgagaaagcctgggtgtgcccaggcagaagcctgctgcagggccagagtcctcatggagagcctctaataaggaaacaccaaagggaaatatgggattggagcccaaacatagagtccctcccggggcactgcctagtgaaactgtgggaaagaggctgttgccctccagaccccagaatggtagagccaccagcagcttgcaaactcagtgtggaaaagctgtaggtactcaactcaaagccatgagagcagccatgggtgctgcaccctgcaaagccacagggtagaacggcccaaagccttgggagcccactccttgcaccagtgtgccctgaatgtgggacacagagtcaaagattattttggagctttaagatataatgacttccctgctgggttttagacttgcagggggcctgtagcccctttatgttagctgatttctcttttttggaatgggagtatttacccagcatctgggtaccaccactgtatcttggaagtaaataacttggtttttatttcacagactcaggtggaaagaatggctctccagatgagacttgggcctagggatttttgagttaacgctggcaaagtaagactttggggagttattgcaaatgcatgatatttttaaatgtaagaaagacgtaagactcgggtccaggggtggaatgatatagtttggatgtgtgtcctctccaaatctcatgctgaaatgtagtccgcatgttggaggtggggcctggtaggaggtgattggatcatggaggtagatccttcacagatggtttagcaccatcccttttgtggtgactgagtccttagttcacatgagacctggttgtgtaaaagagtttaaggcccccttctccctctgtttattctgctctcaccatgtgatacactgactccgtcttcatcttccaccatgactgaaagctccctgaggcctcaccagagccaagcagatgctgatgccatgcttgtatagcctccagatctgtgagccagttaaacctcttttctttataaattgcccggcctcgggtatttctttataatggtgcaaaatgggctaacatactgtgccttataagtacagatcttcttaagcaaacaataaattcagcctttttattcaaatactaaggggtgccctcttccttggacagttctcagtgcctgctaacatcccaaactagcaaggacacacccaccctgatcagatttaaggggatatttcccccaagagagttcctttcctgggggaattctgagtgccacctgttaaaatattttttctcgtttgttcagtaagtattcattgagcacttcctttgtgtgagaaattatctcaggggctagagctacaaagttgaaaaaataagatgtgttccctatgttcatagaatttacagtacagcaggagcaaaataacaaataatatcagtaaagtttgatgattgctatgatagcaaatgcacatggatggatatggggccacataattaggggactctaacatagtccatggggtcaaagaaggtcttcctaagtaaagaatctacctgtaacactgagacctgaagtactagtagccaggtaaagggcacagagtgttccaggtagaaggaacagcatgcccaaagtccaaaagcaaggaggtctgacttattcaaagaagtccagtatttacccaatgtagtgcaagagataagagacaggaaaacggcaccaaaacacaaaggaactcatgtatcatgttaaggttttgttgtttcatctaaaagagaaaagccattgaaaggtgtttcagtgaaaggtgttcaagcaaaaggtgatatgatcagatttacatttttacaagttaattccagccactgtagaaaatagaggagaacaaaattgaagtgtgtgtttgcaatagtgtaaaacagcaatccccaacctttttggcaccagggaccagttttgtggaagacagttttttcacagggaaggggagtatggtttctagacgaaactgttccacctcagatcatcaagtattagagtctcataaggggcgtgcaacccagatccctcgcatgcgcagttcacaatagggttcacgctcctatgagaatctaatgcccctgctgatctgacaggaggtggagctcaggtagtgtgatggttaatgctgaatgtcaacttgattgtgtcgaaggatgcaaagtattgatcctgggtgtgtctgtgagggtgttgccaaatgagattaacatttgagtcagtgggccgggaaaggcagacccacccttaatctgggtaggcaccatctattcagctgccagcatggccagaatataaaagcaggcagaaaaacatgaaaaggctagactggcttagcctcccagcttatatctttctcccatgatggatgcttcctgcccccaaacatcggactccaagttcttgagctttgggactcagactggcttccttgcttctcagcttgcagacagcctattgtgggaccttgtgatcgtgtgttaatacttcttaaactcatatatatatatatatatgtatatcctattacttctgtccctctagagaaccctgattaatacaggtagtaatgcttgctcatctgccactcatctcctgctgtactcagttttgaacaggccatggactggtaccagtcaatggcctagatggggactcctggtgcaaaagatgtagtagcggctttgaggatagtcttaatgggagagagaaatatctgaatcagagacatttgagcagtaaacgtgtgaatggtttactctcctttttttttttttttttttttttccgagatggagtctcactctgtcgcccaggctggagtgcagtggcgcaatctcagctcactgcaagctccacctcccgggttcacgccattctccttcctcagcctcccgagtagctgggactacaggtgcccgccaccatgcctggctaattttttgtatttttagtagagatggggtttcacaatgttagccaggatggtctcgatctccttacctcgtgatccacccgcctcggcctcccaaagtggtgggattacaggcgtgagccaccgcgcccaacctactctcctttttcatagttgtggtttcaaggcccccaagactctttatcttctagaaagtagaagatgcaattagggtacaacattgccaggcattaagagcttggaaatctgaccaagggccttcttcatcataattaagataaacagtcttgcccaggtgctgtggctcatgcctgcaatcccagcactttgggaggctgaagtgggcagatcacttgaggtcaggagttcgagaccagcctggccaacatggtgaaaccctgtctctactaaaaatacaaaaattagccaggtgtggtggcagacatctgtaatcccagctacttgggaggctgaggcaggagaaccccttgagcccgggaggcagaggttgcagtgagccaagattgcacttggtgacagcctgggtgacagagtacgactctgtctccaaaaaaaaaaaaaagattaacagtctttgccaaaggggtaaacttcttttgttgttgttatttagttttgtttttaataaaataattaaaacagcaaaacataaaccttaagctattcaaatagcattttcagttagaaataaaatggagaaaaatgacatatagtatcgataaagtttgatgattgccataatagcaaatgcacatggatggttgtgtctcctcacctgcctcatcattgtctaagctgctgagtgctttcttatgctttatgctttcgttgcctttttccactgtgtcaacacgaaccctgggtgataagaactattttactatctgcattttacagatgagctatttgaaatctaggaagatttttaatttgctcaagtttacacaatcagtaagtgtaggaaaactgagtttcaaaaaaagatgttttgattccagaatatgttaaaaagccagattcttaggacaagtcccagagagtcttaccaaataggtctggggtgaggcctgggactctgcaggtaacgctgattcaggtggcctcccatggaccccagtagtggaagcccctctctgtcctgctcctagagcacttctgaacccccaaggactcaggatggacaagcatcactgtgaaccacatctggggtcccacagccattgctgccttgggccatatttcatccaagcagacaccctgaatccctactatttgtgagcactgtgtttactaggtactggggccactgtggcaagtactgctcacaatcctggccctcccagatctgtgctcacccttttctccccctactgtttgctccttgaagaccagaatcagatctttcatagtcaactttgttttctgaggttctggccatggtgcctggcatgtaattaaagccttgcaaagcttaaatagtttgttgttctttcatgagcttagagggtgcttgttttttgtgctaccttacctgcaacttaactttcctgcccatctctgccttacacatcttttactagagggttgttcacaaaagtttgaaacttgtatgtatgcagtaaaggacacattttatcatcagtttggttgctctttgattatctacaggtacaaaatgacccaaaacattaggagataccctgttatttctattaaccataaggaaaaagagttcattataagatatattttatctttgtaaattatcattaatctttcaagattggccaagacaagcaggtaattaccaagcttccaccttacctggtcaagggctaacctggactttgcattgtcccataccctttctgaaaggctacctaccttcttggtttgcaaaatatgaaactcaacccacagtccctatataatcttttcccgctcacctttcagaatgaacatttgaacctatgtttaccattttaaggtcaacttcaattttgacacttcctatagcatctactcagccaagctgtccttcagccaaaatctctttgatgagtctagagttgagaaaactgctcaggagagggaaagtgcggtggcttcacttcagctgcctctggataggatgcagactcacccttgttcattgtagattctagtatctaagtgtctgtcaaagtcgttctgtcatcccatggctggatcatttggccactttctgagtctgagacacattatgtttaattcaaaagaaagattcttttcaaatatttaattattcttcttgttccattcattcattccttcattcttcaacaaacatctttggagcactggtcatgctctaagactgccctggggactggggacataatggagcgtaagccctagtgtgtccagtgggagggtaggatgttacgacccctagtttacctctgtcccctgccctcccactggactatgagcttcccagagtcacacagacttattctccattgtgactccagtctctcagagagtcataggcacaagttacaaaggcgcttttctaagggttaatgatcttaaaatcagtaaaccagtttttttagtgatctctggtagtttgcttaatataaagaaatctaattatataactttcctaaaggttatctgtttaaaaagtcagcaaaagatgacttagtttttgagataaataataatagtagtgatacagtaatgataaataacatggatagagcattttttcccttagagatggggtctccctgtgtggcccaggatagagtgcagtgcttatttacaggcatgatgatcgtgtactacagcctcgaactcctgggctcaaacaatcctcctgcttcagcctcctgagtagctgggactataggcacatgccaccacacccagcagacagagcactttttatgtgccatatcttgtatcaacagatggatcgtaatcacctgatcatttcttctcccgaatcttatcttggttaaaagtgctgcccaagtccagttcgtggcccagtacggtgcatcccactggtaaatttgaactctctcttgtgacagagaaaattctgtttcctcctctttgtactgttattgcctggttctggttctctatttctctattttctgtctctctaacctgcagtcctaatctgctaccatccacactctcctttgttgcaagcaaagcctattgcctgctgtcctgtccctgccctgcatcaaaactctcaatgtctccccagtgtctgcagactttttaatctagagttcaaagtcttcagatgctggttcctgcttatgtaacttcttgcattgctaagaagttagtcttctaacaccttactaagctttagccacatcaggctgcactgtttcctacacacatgatgaaactttgcacctccatgcaattgttcatgcttttcctcttgcccacaatgcccttcctctttctgtgccctagaaatcctgccattcttcagtgcttatctcaactggtctcctcctttgggaggttgtcccattctgtgacctgataccgtacttgctccagaccctactccctgcagcagaaagaatttcttccttctctctacttccaaggcacactacatatacttttattctaacacttatcacagggtatggtttttcttgagtatccatttcatctaccagacaatagttccttgaaagttctcttagttcagaaaatgaaatctggcctgtgctaggcacaactgctgtaaacaaatgacctggtccttcaaggaaagggaagaccctttccttgccctccgatggtggtcagcctgggataaatgggagcaccactggcctctccttaccctttcccctgcatttcctttttcctgcccatctctcttaacactttccaaacgtccttccccaactcatcacttaattttatcccactccagtgattatgattttaggtaaagcagagtaactcttttacactctaaaaccttggcttttctgagtcagcataaagtcagcagatcaccaaatgtcagcctggactaggggctgccctcatactgctcacctaggagctccttgagggcagcatcctcatgttaattatatttatatccctcagagtctagcaaaaggctctgagcatgacatcacttacaaaactcctaaattcattatgaaagtaagtccgtaaagacaaaagctggagatatccaattcaaagtatttacagtagatggagctatctatttcactgtggtccactctgtatttcatgtatcatgtgaaattattaacattctggcaattaatcagttcatactttttgaagaagcatattaaaaaccatgagacttgccctgtttattcttgtaagctataagttgctagaaaatattagtttccctaaatattgtattgttattaaaagcaattgatataagtaattgaagacattagaagccagagatacaatgaaatcttcaagacttcaatagatgaaatgtgcaaaggacatttacatttcctgtaagggcagccaacttatacatggagagttcaaccctcccacttgtcatctttaaaaaggcaagaaaattattcttttacaaatatatttctaagatatgttttctaagttgaccaaaagtgtaagtgcccaaatctgataaagttctgttgaaactgttacattcgtagtaatgataattgctagtcttttggaaatcaacttggtaggaaaaataaaaataatccttcttttgaactgctgtgcttttgttaagaaataatctaaaaggaaaaagtcaaattcatgaggtcatttgttacagcattttttatcgtaaaatattcaaacaaccgaaataataaaatattaagtgactaagtaaaatatgatattagaattatttgtcatcctgtagccattagaatatgtatgcaatcaatttagaggtagggaaaaatgctcatgagtgagggggggctggaccaaactcagaatataatcttgtatgtattctctgttaggctttctaaaaattatacatagataaaacaaggattgaattaaatggaaaaattaaaattgtatatatatgttaagtgattactagtgaaatttttttttattatactttaagttttagggtacatgtgcacaacgtgcgggtttgttacatgtgtatacatgtgccatgttggtgtgatgcacccattaactcgtcatttacattaggtatttctcctaatgctatccctccccactcccccaaccccacaacaggccccagtgtgtgatgttccccaccctgtgtccaagtgttctcattgttcaattcccacctatgagtgaaaacatgtggtgtttggttttctgtccttgcgatagtttgctgagaatgatgatttctagtttcatccatgtccctacaaaggacatgaacgcatccttttttatggctgcatagtattccatggtgtatatgtgccacattttcttaatccagtctatcattgatggacatttgggttggttccaagtctttgctattgtgaatagtgctgcaataaacatacgtgtgcatgtgtctttatagctgtatgatttataatcctttgggtatatacccagtaatgggatggctgggtcaaatggtatttctagttccagatccttgaggaatcgccacactgtcttccacaatggttgaactagtttacagtcccaccaacagtgtaaaagtgttcctatttctccacatcctctccagcacctgttgtttcctgactttttagtgattgccattctaaatggtgtgatatggtatcacattgtggtttgatttgcatatctctgatggccagtgatgatgagcattttttcatgtgtctgttggctgcataaatgtcttcttttgagaagttgtctgttcatatcctttgcccactttttgatggggttgtttgtttttttcttgtaaatttgtttgagttctttgtagattctggatattagccctttgtcagatgagtagattgcaaaaattttctcccattctgtaggttgcctattcactctgatggtagtttctcttgctgtgcagaagctctttagtttaattagatcccatttgtcaattttggcttttgttgccattgcttttggtgttttagacatgaagtccttgcccatgcctatgtcctgaaaggtattgcctaggttttcttctagtagggtttttatggttgtaggtctaagatttaagtctttaatccatcttgaattgatttttgtataaggtgtaaggaagggatccagtttcagctttctacatatggctagccagttttcccagcaccatttattaaatagggaatcctttccccatttcttgtttttgtcaggtttgtcaaagatcatatggttgtagatgtgtgctattatttctgagggctctgttctgttccattggtctatatctctgttttggtaccagtacaatgctgttttggttactgcagccttgtagtatagtttgaagtcaggtagcatgatgcctccagctttgttcttttggctcaggattgtcttggcaatgcgggctcttttttggttccatatgaactttaaaggagttttttccaattctgtgaagaaagtcattggtagcttaatggggatggcattgaatctataaattaccttgggcagtatggccattttcatgatattgattctgcctatccatgggcatggaatgttcttccatttgtttgtgtcctcttttattttcctgagcagtggtttgtagaaagaaaggatgatgctgctgcaattccatgaacattagtgcttgctttatttattgggtatttttacagacggtagctcatttcagttctcgcagggggactatttcttttaagctttaatctctagaggtttaatttggttacttaaatttttaaaatttttatggttactagtaggtgtatatatttatggggtacatgagatattttgatataggcatacaatgtataataatcacatcagggtaaatggggtattcatcccctcaagcattttttttttatgttatgaactttccaattatactttcagttatttttaaatatacaataaattattgtagtcatcctgttgtgctatcaaatactagatcctattcattctatctaactatatgtttgtacccattaaccatcccccacccctccactactacccttcccagccttgggtagccatccttctactctctgtctccatgagttcaattgttttgatttttagcccccacaaataagtgagaacatgagaagtttttctgtgcctggattatttcacataatatccttcagttccatccatgttgttgcaaatgataggatctcattcttttttatggcagaatggtttttcattgtgtatatgtaccacatttcctttatccattcatttgttgatggacacttaggttgcctccaaatcttggctgttgtgaacagtgctgtaataaacatgggagtgcagagatgtcttcaatatactgatttccattcttttaggtatatacttggtagtaggattgctggatcatatggtagctctattgttaggtttattttttatttaaaaaaacatttttttgagacagtctcactctgttgcctaggctggagtgcaatggcgcaatcttggctcactgtaacctctgcctcccaggttcaagtgattctcctacctcagcctcctgagtgcctgggattacaggtgtgtgccaccacacttggctaactttcgtatttttagtacagggtttcaccatgttggccaggctggtctcaaactcctgatctcaagtgatccacccgcctcagcttcccaaagtgctgggattacaggcgtgagccaccatgcccggtcctattgttagttttttgaggaacctccaaaccattctccatagtggttgtactaatttacattcccaacaacagcatacaagggttcccttttctccacatcctcgcccccattccttattgcctgtcttttggatagaagccattttaactggagtgagatgatatctcattgtggttttaatttgcatttctctgatgatcactgatgttgagccccttttcatatgcctgtttgctattttttttttttttttttcagaaatgtctattgagttctttttcctatggggactgttatgatttgcattcacagttgagggaactgagggctgggaatgttgagacttttcagaggtcctaaaagaatggacccctgagtcaatggcacacgaagctccctgtccagctttcttccacatggcaggacgtaggcctcagactggaaccctggcagtcatttttgccctgtgggtctctctgagccctgcccaccagaagcagctgcagatcccatggcccaggtcacattctcttgggggccacttctggggacacacaaggaagactgatgtgccagaaacattccagtggccccgggttcctattccaactctgcctgcactatcttcattcaatcattccttccagcctcaaccttctcatgggaaggacgcaaccacccaccacaaaactcactgtgagagtcttgtgatagtatagtatgttcatagcctagcgcctgggagagtgctcaagaatgggtagctgtgagcctggcaggtagtgcacacctgtagtcccagctactcaggaggctgaggcaggaggctcccttgagctaaggagttcaaagctgcagtgagctatgatcgtgccattacactccagcgtgagcaacagggtgagacactgtctcaaaaaaaaaaaaaaaaaaaaaaaagaaagaaatggtagttgctctgggtgaactccttcagaggatggatttgatttcattaccatctctaagccccagacaccctgcaggccttccatacaggtatgtataaggaacaagctgcccacatcacccctgacaaccaggacttagacaaatgtcaccaaggctgctagatgcctgctgccaaccaacagcccttctaacttgtaattcatttagcacaggttggagctgaaggagtgcccaggctgcggatggaggaaggacgtgctcgggagaaggtgaagatgggagagaagcaagatcttctgtgtttggaccaaggacacatttccttactccatagcagctgtggtcagtggcttagctcggacaaggagatgagagcccatgtgttgtgagggttcttctgggaactctgagaaggcaggagccgcccccgcccttcactgcctctcttccattctgcagcatggaatatggatgtgtggtctggatgtacagacaccattttggaccataaagacaaggacgattgtctaaggatgacacagccagagcactgagagtggcgagaaggacaggggagctgctgtgccaagcaggactgtctctcttaagagaaaaataaaatttattggtgtttaaacca

SEQ ID NO: 9927 - DNA, 22237 bp, Homo sapiens
tttgcggcccagcgcctggactggaccttggcgttgggccgcagttgcccggagtttttggggcccccgggaacccgcgcgccgaggccggctaagtttggcagactctctgagctctcggaattcgactgcctccattgttgctccttctggcacccacagaccgtaacgtggccgtaattgtttcccggagagcttagcttccctctgagcacctccctcccctttttaaagtaccttcccactcgcctgcgtttcctcgcgttagtggtgcaggggcctccgcatttggggaaataacaaacacccacttccgccccccaccccaaccgggatccccagataatgagaaatagatggtggccctctgtttgtaagctgttcatttgcataggtcggaaccgcgcaccacagcttgaagctaggaattaaaatatcggtgggaattaaataagtggctggcttaaagaacatcttcttaatttatccccaaatgtagacatctcttcagtggaccccctgataggccggtttgctccaggtgaggtgtgctcacagcaactgcaaccgtgtttctttcagaccatgggcgtgagagaacctactatgcgcccctgctgcctgggctgtgctgttcagtttggggccaccagccccacatggctcctgagcacttaaagtatggctagtcggaatcgagatatatgcattctttaccaaataatgttcaaaaaattgttacatgttgaagtgataaactttttccatatattgggataaaagttttatttgtttattttttagtgtgggttctacagaattttaaatgtcacctgtggcctgcattatattgccattgggcaggctgatctagggcttgcatgcctgtgatccttaggtgcaccctgtgaggtaggtgctttaactgtgtgcaccctgtgaggtaggtgctttaactgtgtgcacattgtgaggtaggtgctgaaactgcttcctgttttttttttttttttcttttgagacggagtctcactctgtctccaggctggagtgcagtggtgcgacctgggcttactgcaatctccgcctcccaggttcaagtgattctcctgcctcagcctcccgagtagctgggattacaggggcacgccaccacacccagctaatttttgtatttttagaagagacggggtttcaccatgttggccatgatggtctcgatttctgaccttgtcatccgtccgccttggcctcccaaagtgctgggattacgggcgtgagccaccgtacccagcctgcttcctgttttaacagacgaagaaatggaataacttccaacaagtaagtagccagtaagtgaacaactgagatttgaacccacgtagtctggctttgaggctggtgtgctcagtcattactgtgctaaaattttgataatatatttactatgaattggcttaaggtttcacttgaaagtagcatatttatgggcaaaattaggaagtaggatgctcctggcagacccatgtatttaaaaaagtagtttcttatatgtcaagcacggtgagcatgtcatacctttaagaccccagtcatacatataaggttttctttgtagctaggaattaaaatatcggtgggcgttaaataagtgtctggcttaaagaacatcgtcttaacttatccccaaatgtagatatctcttcggtggactccctgataagcctttatgagaaggacagcatctcagtatgggggtaggcactggactctattggcagtggaaatttgtgggctggtacaacttcagcccctctggttgccctcttgcaatctgtcaagactagccaggctgcttgttccatcagcaggtatacctgatttttttatttttttaattttatgtatttgtttttttcttttttgaggcagagtttcactcttgtcgcccaggctggagtgcaatggcgcaatctcgtctcactgcaacctctgcctcctaggttcaagcgattcttctgcctcagcctcccaagtagctgggttacaggcatgtgccaccacgcccggctaatttttgtattttcagtagagacggggtttcaccatgttggccaggctggtctcgaactcctgacctgcctcggcttcccaaagtggtgggattacaggcatgagccactgcgcctggccggtttgtctgatttttatcaatttcagtttttatttttaaaataaatagtatatccatattattcatttatcagaaagcctataaaagatacacagtggaaaaagatgtccctcacacctgtcctagtgtcacaaataggtgaccactgtttcctgctcattcttcaaaatgtttatgtatatatgagccaagatatgccctttgtgttccttgtttagaaaaatgccggcatgccatacatatttactccaccttgtgttttttacttaatgtatccggggggcatgtttatagtaacacatagagagctccttgctgttttttcaacccccttaacatattattgcaggtatatccataccataatttaccaattctctattgatggacatttagactttaagtcttttggaattaaaagttgatccatttggaatcgatttaatatatagggtgaggtatagatccaaattaatttttttgtccaggtggctacacagtcatttattgagcagttcacttctggactctgtatccgttctaatggtctatctattcatgctccacttgctggtttgttttaaatccagagacataaaatcttgtaagggatattgtttcacactttgtttggatcactagaaatcttaaagcctatatttcagcccgtgttaagcaacggtatagtaccatgtggcatgcattttctatgggctaatttttattttcccttagcccctattatttccacaatttggtttattttttgtagaacaagccaggatttaaatatacctttaagactctctgtttgcaagtaacagaaaccaagctgaactagcgcaaccaaaaagggagaatttaccataatgatataggtgcttctcacaaaagcccagaacaggaatacagccacatcttagcaaaaactagaaccagtcattgaaaagcttccaggaacccaaaaggtactctctgtgccccttgtgattgttttctatgtatctctgctaacttgttctctctgcttttccatctacatgggagaatatagtcactcccatattggactgggctgtcagttcagtgaggagtctgagcccaaagaaggaaggtggggcagcagccctgcaaggccagacagctgattacatacaggagaactacacaaagaaaaactatattgaggctaatgggagccagatttttccctgttggagaagggagttacaagtacagaaataagaaaagcaagaagtttgtgtgattggattggaattggagatattcatgtaaagtcatggttcttaatacatgtagatataaaaataaatataaatgtaaaagtgtgtatctatatattttgtgagattctgaaatatatatttggtctttgacctcattttctggtgtacaactcctaaatttcttacaaacaccgaagtgatgtcttttgtatgctaatgagttggctcgtggctgggagcccctaggtagctttaggatggggttggtcatcagaaagacgaaggcaggatcagagggttggaccttcagcctatcaccaacttattggagaagagaagggttgaaggtcaggttatcaccagtggccaatagtttaatcagtcatcccttatgtaatgaagcctgcataaaaacccatgaggacagggttggagagcttctagatagctgaacaccaggaggttcctgggagggtggtgcacccagggaaggcatgaaaggtctgagccccttctcccacacctcatcctatttatcttttcatctgtattgtttgtaatatcttttgtaaacataagtgtttgcttgagttcagtgagctgctctagcaaattaatctaacccaagagggggtcatggcaaccacaacttgaagcctgtcggaagttctggaggcccagacttgggactggtcagtggccagggacagagtggggcagttgttgggatgtgttggggagtgagcctcaacctgtgggatctgatgctatctccaggttagaagggaattggaggacacccagttggtgtctgctgcagaatcgattgcttgcttggtgtgtggggaaacgccccccgacatttggtcactgaagtcttctttgttaattgttgagggtgagggaatagggtgtgtaatttttccacagtcagttatatacacacacatgtctataaatgtatttacatatatttcctaggcctaaccagtgagaaggtcttggtgcagcaacaccacattagccaagagaacacctaacacctagctctaaacacctttctccatgaaaaggaaccagggcgctttagagaaatggctgattttagggttgggccagagaaagtatagtatgagactggaacatcttgtgctagaaagtgtggaaatgctcaagaaatggtggagacagttcaaaaggacaaagcaatcagcttgaaagggctcctgttggccaaatctgggacaatttgaacatcaaaataaatcacagtagcaggagattatatcccatgggttaaaatggaatctatgagtccacactttcaaaaaaaaaaaataaatggcaataaagagctctttagaatagaattcaataatatatttagaaaaaagaatggaattgtaacccagtcataggttcagcagcccactgcttacagagcacaattaacaagagtgaggtctgccgtaaagaaagtgactttttattccaaagcttaacgtagggggaaaagtgcaggttcctgccttaaggtactgatttgcttttggggcagaaagcaggggcttttaaagtgggacttggcatgaatggcatgcaggggagggagcaagcaggtgaggatctacatgactctccttagcgcttttatctaccgggtgtttgagctggcaccatggcaggcaggactagattgtaaagtggccattgtctgagatgctctccaagtgggacagagtttcctagcaggcatagtttagattgtaaattgactgttgtctctccaggcagtctcctggtgggagagatttctggcttagaaccttctaaaagcacatggttaaataagcttgccctgtaaggagtgtctggtgaagggaaggtaaagattataattgcatttctaaggaactaagtgggaagtgggagaaaggagaaaaggagaaaagaaaaaaaaaatgttttaaaacacagttatctttctcttagaaaaatgggggtactcagtaaacagaattagaaaatcaccatttggcaatcatcagacaagaaatatcaatgtttgctaaatctagtggggaaaagttgaataaggaatgagttacttacataggttcaaagcatctccccatgaaattcttatttaaaaaaacaggaactttacaaaagaggaatctagtagatatcgtcttactcatgacaaaaaaaaaaatcagcattaatcaggctgcactttgacccatttatcagttgctgaaagtcacacagcactctagatactgaccagttgcatccgcagttgttcctatcaatagaatttccaactttaggatcatgactatttaacagttgattttcatctctattgttcctatagatagaatctctgacattaaaaccataaggtttttgcttaaggatcagttaagatgtttacagaccctgaattccataagcattttgaagcgcagaatcagcatgagaagacagcttcctcatctcctgccctatgacttcaacctgcactgttcaaccaatgaatgatctctgcccttcggcccactccaaaaccctaaaaaaccctaccccaaactccttaaggagatggatttgaggttccctcctgtctccctgttctgtgacactacgactaaacctctctgctgcagcctggtgtctccacatgttgacttgctgaatgcattgggcactggaccaattatggttacaaccttatcaagtgctgacaagggtatagtacaactggaactcgcatacattgctgatgggaatgcagatgctgtaaccactgtggaaaacagtttggcagtttcttatcaagttaagatatattttccataaaacctagtatattgtctctctagagaaccctaatacacatatatatacatatatgtatatgtagatatacacatatacacatgtgtggatgtacacatagacacgtgtgtggatatacatatatacacatgtgtatgtgtgtatatacacgcacatgtgtgtggatatacatatatacatgtctacatagatatacaattatgtgtatatacatgtatatgtatgtatatgtgtatgtagatatatgtgtgtttgtgtgtatgtgtatggaagttaatttgttagggagaattggttcccatgttcacaaaggtgaagtcccacaattaggcaagctggaaaatgaaagaagccaatagtgtaactcagtccaagtgtgaaagcctcaaaaccagggaagccaacactacagcccccattctgaggctgaaggtctgagagtccctgggaggctgctagtgtaagtcccagagcccagaggttgaagaacctggagtctgatgtccaagggtgagaggcagaaaagtcttcttgctccagaagtgtgagagagcaaaaaaggaaagccaagcaagctgaatgtcccttttcttccacctgctttattctagccacatcccaatgtgattggatggtgcccacccacattgagggctggtctttctttttcagtccactgactcacatgccagtctcctctggaaacaactcatggacacaccatgagttgtggacacacccagcaacagtgtgtcaccagtgacctaggcattcccaatccagtcaagttgacgactaatattaaccatcacacctagcattcctactcctagacatttacctaaaagaaatgaagccaaaatctagaaacaactccagtatctatcagttggcaaatggaaaacaacttgtggcacatccatataatgggacactatgcagcaataaaaaagggatgaaatactggtatatggaacaacactgttgaatcttataagcaaagtgaaagaaaccagacacaaagggttatataatgtaggattccatttctgtgactttctgaaaaaaagcagagctatagggaaagaaatcagatgtgtagctttaggggttataatggggagaatctttttggggtgataaaaatgtcctatatcctgatcgtgcctggttgttacacactgcaaacatttgtcaaaactcattgaactatacactacattttatataattcaaattagacttcactaatcctgatttcaaaccaaaatctatgactctccagtgtagctcacttatattttcagggtcaccctaggctctgggcaagtaaggcaccaaccacctttgcctcacatctcattgacttggacatgaaacccatcttccctccattgtccaatatgctcattcatgctctctaaggtaacacttactaaaaatgcaagaggatattagcaggaaggtgggataggaagaaggagagtttgccttgtatcaatgaacacaacttaagtaaaatagaaggtattgttctcaaagtgtcttctggaccccatcatggtagagttcctctgtgacttcacctttcttctctttcttccgctctcctctttggtaattacttgtttattcatttattgttttttcatctcctggaggctgagaataaaagtttgtacctctgccctcccagaacaatgagtatttgttttgttctgctgctgtaacaaaaaaccccccagaaacagccggattgatcaactctaactattacacaggtttttgaaaactggccagtcattgacaacgccaactttctgagacagccagttaacaagtctcagcccaataaccatgcttccatagctaatgatcagtcaatccatagatattcctgtttctgaaaatccagcaatccctgaactctaaaattcctaaatacgtatttaggatatgcaatgtgctttaattagaaagactgtatgatatagtttggatgtttgtcccctccaaatctcatgttgaattgtgattcccagtgttggaggtggggcctggtgggaggtgattggatcatggggcgggggtggttcttcatgaatggtttacccattccctgggtgatgagtgagttctcacttggttcatgtgagatctggttgtttaaaagagtttgggaccttccccttctccctctcttgttcccattctcaccatgtgacacactggcttcccttcaccttccacactgattgaaagctacctgaggcctcaccagaagcccagtagatgctggcatcatgcttgtgcagcctgcagaactgtgatccagttaaacctttttctttataaattacccaacctcaagcattttttatagcaatgcaaaaatggactaatacagaagatcagtataaggagtggggcattactgtaaagacagttgaaaatatagaagtacctttggagctgggtaacaggcagaggttggaagaggttggaaggctgagaagaagagagaaagatgagggaaagtttggaacttcgtagagacttgtaaagtggttatgaccaaaatgctgatagagatatggacagtgaaggccaggctgaggaggtctcagatagaaatgaggaaattactgggaactggagcgaaggtgacctgtgttacatcctagcaaagagcttggctgcattgtgtcctaggaatctgtggaaggttgaaattaagagtgatgacttaggttatttggcagaagaaatttctaagcagcaaagcattcaagaagtggtatgactgcttctaacctactatcagatatgggagcaaagaaatgacttaagttggaactcatatttaaaaggaaaccagagtgtaaaagtttggaaaatgtgcagcctggccatgtggtaaagaaggaaaaagtgtttttcagcagatgaatctgaccacttgctagagagatttgcatgaataaaagggagccaagtgctaatatccaaggcaatggggaaaaggcctcagaggcctttcaaaaatcttcgaggcagccctttcaaatgcccagaggcctaggaggaaggaatggtttcaggggccaggcccaagacacttctgcccagcacagcctcaggacgctagtcctggcatcctggccactccagctacagctgtagctcaagggactccaggtacagcttgggctattgctttggagagtggaagccaccataagccttgatggcttcgatgtggtgttaagccagcaggtggacagaatgcaagagtgaaggaggctttgcaacttccacctagatgccagaggatgtatgagaaagcctgggtgtgcccaggcagaagcctgctgcagggccagagtcctcatggagagcctctaataaggaaacaccaaagggaaatatgggattggagcccaaacatagagtccctcccggggcactgcctagtgaaactgtgggaaagaggctgttgccctccagaccccagaatggtagagccaccagcagcttgcaaactcagtgtggaaaagctgtaggtactcaactcaaagccatgagagcagccatgggtgctgcaccctgcaaagccacagggtagaacggcccaaagccttgggagcccactccttgcaccagtgtgccctgaatgtgggacacagagtcaaagattattttggagctttaagatataatgacttccctgctgggttttagacttgcagggggcctgtagcccctttatgttagctgatttctcttttttggaatgggagtatttacccagcatctgggtaccaccactgtatcttggaagtaaataacttggtttttatttcacagactcaggtggaaagaatggctctccagatgagacttgggcctagggatttttgagttaacgctggcaaagtaagactttggggagttattgcaaatgcatgatatttttaaatgtaagaaagacgtaagactcgggtccaggggtggaatgatatagtttggatgtgtgtcctctccaaatctcatgctgaaatgtagtccgcatgttggaggtggggcctggtaggaggtgattggatcatggaggtagatccttcacagatggtttagcaccatcccttttgtggtgactgagtccttagttcacatgagacctggttgtgtaaaagagtttaaggcccccttctccctctgtttattctgctctcaccatgtgatacactgactccgtcttcatcttccaccatgactgaaagctccctgaggcctcaccagagccaagcagatgctgatgccatgcttgtatagcctccagatctgtgagccagttaaacctcttttctttataaattgcccggcctcgggtatttctttataatggtgcaaaatgggctaacatactgtgccttataagtacagatcttcttaagcaaacaataaattcagcctttttattcaaatactaaggggtgccctcttccttggacagttctcagtgcctgctaacatcccaaactagcaaggacacacccaccctgatcagatttaaggggatatttcccccaagagagttcctttcctgggggaattctgagtgccacctgttaaaatattttttctcgtttgttcagtaagtattcattgagcacttcctttgtgtgagaaattatctcaggggctagagctacaaagttgaaaaaataagatgtgttccctatgttcatagaatttacagtacagcaggagcaaaataacaaataatatcagtaaagtttgatgattgctatgatagcaaatgcacatggatggatatggggccacataattaggggactctaacatagtccatggggtcaaagaaggtcttcctaagtaaagaatctacctgtaacactgagacctgaagtactagtagccaggtaaagggcacagagtgttccaggtagaaggaacagcatgcccaaagtccaaaagcaaggaggtctgacttattcaaagaagtccagtatttacccaatgtagtgcaagagataagagacaggaaaacggcaccaaaacacaaaggaactcatgtatcatgttaaggttttgttgtttcatctaaaagagaaaagccattgaaaggtgtttcagtgaaaggtgttcaagcaaaaggtgatatgatcagatttacatttttacaagttaattccagccactgtagaaaatagaggagaacaaaattgaagtgtgtgtttgcaatagtgtaaaacagcaatccccaacctttttggcaccagggaccagttttgtggaagacagttttttcacagggaaggggagtatggtttctagacgaaactgttccacctcagatcatcaagtattagagtctcataaggggcgtgcaacccagatccctcgcatgcgcagttcacaatagggttcacgctcctatgagaatctaatgcccctgctgatctgacaggaggtggagctcaggtagtgtgatggttaatgctgaatgtcaacttgattgtgtcgaaggatgcaaagtattgatcctgggtgtgtctgtgagggtgttgccaaatgagattaacatttgagtcagtgggctgggaaaggcagacccacccttaatctgggtaggcaccatctattcagctgccagcatggccagaatataaaagcaggcagaaaaacatgaaaaggctagactggcttagcctcccagcttatatctttctcccatgatggatgcttcctgcccccaaacatcggactccaagttcttgagctttgggactcagactggcttccttgcttctcagcttgcagacagcctattgtgggaccttgtgatcgtgtgttaatacttcttaaactcatatatatatatatatatgtatatcctattacttctgtccctctagagaaccctgattaatacaggtagtaatgcttgctcatctgccactcatctcctgctgtactcagttttgaacaggccatggactggtaccagtcaatggcctagatggggactcctggtgcaaaagatgtagtagcggctttgaggatagtcttaatgggagagagaaatatctgaatcagagacatttgagcagtaaacgtgtgaatggtttactctcctttttttttttttttttttttttccgagatggagtctcactctgtcgcccaggctggagtgcagtggcgcaatctcagctcactgcaagctccacctcccgggttcacgccattctccttcctcagcctcccgagtagctgggactacaggtgcccgccaccatgcctggctaattttttgtatttttagtagagatggggtttcacaatgttagccaggatggtctcgatctccttacctcgtgatccacccgcctcggcctcccaaagtggtgggattacaggcgtgagccaccgcgcccaacctactctcctttttcatagttgtggtttcaaggcccccaagactctttatcttctagaaagtagaagatgcaattagggtacaacattgccaggcattaagagcttggaaatctgaccaagggccttcttcatcataattaagataaacagtcttgcccaggtgctgtggctcatgcctgcaatcccagcactttgggaggctgaagtgggcagatcacttgaggtcaggagttcgagaccagcctggccaacatggtgaaaccctgtctctactaaaaatacaaaaattagccaggtgtggtggcagacatctgtaatcccagctacttgggaggctgaggcaggagaaccccttgagcccgggaggcagaggttgcagtgagccaagattgcacttggtgacagcctgggtgacagagtacgactctgtctccaaaaaaaaaaaaaagattaacagtctttgccaaaggggtaaacttcttttgttgttgttatttagttttgtttttaataaaataattaaaacagcaaaacataaaccttaagctattcaaatagcattttcagttagaaataaaatggagaaaaatgacatatagtatcgataaagtttgatgattgccataatagcaaatgcacatggatggttgtgtctcctcacctgcctcatcattgtctaagctgctgagtgctttcttatgctttatgctttcgttgcctttttccactgtgtcaacacgaaccctgggtgataagaactattttactatctgcattttacagatgagctatttgaaatctaggaagatttttaatttgctcaagtttacacaatcagtaagtgtaggaaaactgagtttcaaaaaaagatgttttgattccagaatatgttaaaaagccagattcttaggacaagtcccagagagtcttaccaaataggtctggggtgaggcctgggactctgcaggtaacgctgattcaggtggcctcccatggaccccagtagtggaagcccctctctgtcctgctcctagagcacttctgaacccccaaggactcaggatggacaagcatcactgtgaaccacatctggggtcccacagccattgctgccttgggccatatttcatccaagcagacaccctgaatccctactatttgtgagcactgtgtttactaggtactggggccactgtggcaagtactgctcacaatcctggccctcccagatctgtgctcacccttttctccccctactgtttgctccttgaagaccagaatcagatctttcatagtcaactttgttttctgaggttctggccatggtgcctggcatgtaattaaagccttgcaaagcttaaatagtttgttgttctttcatgagcttagagggtgcttgttttttgtgctaccttacctgcaacttaactttcctgcccatctctgccttacacatcttttactagagggttgttcacaaaagtttgaaacttgtatgtatgcagtaaaggacacattttatcatcagtttggttgctctttgattatctacaggtacaaaatgacccaaaacattaggagataccctgttatttctattaaccataaggaaaaagagttcattataagatatattttatctttgtaaattatcattaatctttcaagattggccaagacaagcaggtaattaccaagcttccaccttacctggtcaagggctaacctggactttgcattgtcccataccctttctgaaaggctacctaccttcttggtttgcaaaatatgaaactcaacccacagtccctatataatcttttcccgctcacctttcagaatgaacatttgaacctatgtttaccattttaaggtcaacttcaattttgacacttcctatagcatctactcagccaagctgtccttcagccaaaatctctttgatgagtctagagttgagaaaactgctcaggagagggaaagtgcggtggcttcacttcagctgcctctggataggatgcagactcacccttgttcattgtagattctagtatctaagtgtctgtcaaagtcgttctgtcatcccatggctggatcatttggccactttctgagtctgagacacattatgtttaattcaaaagaaagattcttttcaaatatttaattattcttcttgttccattcattcattccttcattcttcaacaaacatctttggagcactggtcatgctctaagactgccctggggactggggacataatggagcgtaagccctagtgtgtccagtgggagggtaggatgttacgacccctagtttacctctgtcccctgccctcccactggactatgagcttcccagagtcacacagacttattctccattgtgactccagtctctcagagagtcataggcacaagttacaaaggcgcttttctaagggttaatgatcttaaaatcagtaaaccagtttttttagtgatctctggtagtttgcttaatataaagaaatctaattatataactttcctaaaggttatctgtttaaaaagtcagcaaaagatgacttagtttttgagataaataataatagtagtgatacagtaatgataaataacatggatagagcattttttcccttagagatggggtctccctgtgtggcccaggatagagtgcagtgcttatttacaggcatgatgatcgtgtactacagcctcgaactcctgggctcaaacaatcctcctgcttcagcctcctgagtagctgggactataggcacatgccaccacacccagcagacagagcactttttatgtgccatatcttgtatcaacagatggatcgtaatcacctgatcatttcttctcccgaatcttatcttggttaaaagtgctgcccaagtccagttcgtggcccagtacggtgcatcccactggtaaatttgaactctctcttgtgacagagaaaattctgtttcctcctctttgtactgttattgcctggttctggttctctatttctctattttctgtctctctaacctgcagtcctaatctgctaccatccacactctcctttgttgcaagcaaagcctattgcctgctgtcctgtccctgccctgcatcaaaactctcaatgtctccccagtgtctgcagactttttaatctagagttcaaagtcttcagatgctggttcctgcttatgtaacttcttgcattgctaagaagttagtcttctaacaccttactaagctttagccacatcaggctgcactgtttcctacacacatgatgaaactttgcacctccatgcaattgttcatgcttttcctcttgcccacaatgcccttcctctttctgtgccctagaaatcctgccattcttcagtgcttatctcaactggtctcctcctttgggaggttgtcccattctgtgacctgataccgtacttgctccagaccctactccctgcagcagaaagaatttcttccttctctctacttccaaggcacactacatatacttttattctaacacttatcacagggtatggtttttcttgagtatccatttcatctaccagacaatagttccttgaaagttctcttagttcagaaaatgaaatctggcctgtgctaggcacaactgctgtaaacaaatgacctggtccttcaaggaaagggaagaccctttccttgccctccgatggtggtcagcctgggataaatgggagcaccactggcctctccttaccctttcccctgcatttcctttttcctgcccatctctcttaacactttccaaacgtccttccccaactcatcacttaattttatcccactccagtgattatgattttaggtaaagcagagtaactcttttacactctaaaaccttggcttttctgagtcagcataaagtcagcagatcaccaaatgtcagcctggactaggggctgccctcatactgctcacctaggagctccttgagggcagcatcctcatgttaattatatttatatccctcagagtctagcaaaaggctctgagcatgacatcacttacaaaactcctaaattcattatgaaagtaagtccgtaaagacaaaagctggagatatccaattcaaagtatttacagtagatggagctatctatttcactgtggtccactctgtatttcatgtatcatgtgaaattattaacattctggcaattaatcagttcatactttttgaagaagcatattaaaaaccatgagacttgccctgtttattcttgtaagctataagttgctagaaaatattagtttccctaaatattgtattgttattaaaagcaattgatataagtaattgaagacattagaagccagagatacaatgaaatcttcaagacttcaatagatgaaatgtgcaaaggacatttacatttcctgtaagggcagccaacttatacatggagagttcaaccctcccacttgtcatctttaaaaaggcaagaaaattattcttttacaaatatatttctaagatatgttttctaagttgaccaaaagtgtaagtgcccaaatctgataaagttctgttgaaactgttacattcgtagtaatgataattgctagtcttttggaaatcaacttggtaggaaaaataaaaataatccttcttttgaactgctgtgcttttgttaagaaataatctaaaaggaaaaagtcaaattcatgaggtcatttgttacagcattttttatcgtaaaatattcaaacaaccgaaataataaaatattaagtgactaagtaaaatatgatattagaattatttgtcatcctgtagccattagaatatgtatgcaatcaatttagaggtagggaaaaatgctcatgagtgagggggggctggaccaaactcagaatataatcttgtatgtattctctgttaggctttctaaaaattatacatagataaaacaaggattgaattaaatggaaaaattaaaattgtatatatatgttaagtgattactagtgaaatttttttttattatactttaagttttagggtacatgtgcacaacgtgcgggtttgttacatgtgtatacatgtgccatgttggtgtgatgcacccattaactcgtcatttacattaggtatttctcctaatgctatccctccccactcccccaaccccacaacaggccccagtgtgtgatgttccccaccctgtgtccaagtgttctcattgttcaattcccacctatgagtgaaaacatgtggtgtttggttttctgtccttgcgatagtttgctgagaatgatgatttctagtttcatccatgtccctacaaaggacatgaacgcatccttttttatggctgcatagtattccatggtgtatatgtgccacattttcttaatccagtctatcattgatggacatttgggttggttccaagtctttgctattgtgaatagtgctgcaataaacatacgtgtgcatgtgtctttatagctgtatgatttataatcctttgggtatatacccagtaatgggatggctgggtcaaatggtatttctagttccagatccttgaggaatcgccacactgtcttccacaatggttgaactagtttacagtcccaccaacagtgtaaaagtgttcctatttctccacatcctctccagcacctgttgtttcctgactttttagtgattgccattctaaatggtgtgatatggtatcacattgtggtttgatttgcatatctctgatggccagtgatgatgagcattttttcatgtgtctgttggctgcataaatgtcttcttttgagaagttgtctgttcatatcctttgcccactttttgatggggttgtttgtttttttcttgtaaatttgtttgagttctttgtagattctggatattagccctttgtcagatgagtagattgcaaaaattttctcccattctgtaggttgcctattcactctgatggtagtttctcttgctgtgcagaagctctttagtttaattagatcccatttgtcaattttggcttttgttgccattgcttttggtgttttagacatgaagtccttgcccatgcctatgtcctgaaaggtattgcctaggttttcttctagtagggtttttatggttgtaggtctaagatttaagtctttaatccatcttgaattgatttttgtataaggtgtaaggaagggatccagtttcagctttctacatatggctagccagttttcccagcaccatttattaaatagggaatcctttccccatttcttgtttttgtcaggtttgtcaaagatcatatggttgtagatgtgtgctattatttctgagggctctgttctgttccattggtctatatctctgttttggtaccagtacaatgctgttttggttactgcagccttgtagtatagtttgaagtcaggtagcatgatgcctccagctttgttcttttggctcaggattgtcttggcaatgcgggctcttttttggttccatatgaactttaaaggagttttttccaattctgtgaagaaagtcattggtagcttaatggggatggcattgaatctataaattaccttgggcagtatggccattttcatgatattgattctgcctatccatgggcatggaatgttcttccatttgtttgtgtcctcttttattttcctgagcagtggtttgtagaaagaaaggatgatgctgctgcaattccatgaacattagtgcttgctttatttattgggtatttttacagacggtagctcatttcagttctcgcagggggactatttcttttaagctttaatctctagaggtttaatttggttacttaaatttttaaaatttttatggttactagtaggtgtatatatttatggggtacatgagatattttgatataggcatacaatgtataataatcacatcagggtaaatggggtattcatcccctcaagcattttttttttatgttatgaactttccaattatactttcagttatttttaaatatacaataaattattgtagtcatcctgttgtgctatcaaatactagatcctattcattctatctaactatatgtttgtacccattaaccatcccccacccctccactactacccttcccagccttgggtagccatccttctactctctgtctccatgagttcaattgttttgatttttagcccccacaaataagtgagaacatgagaagtttttctgtgcctggattatttcacataatatccttcagttccatccatgttgttgcaaatgataggatctcattcttttttatggcagaatggtttttcattgtgtatatgtaccacatttcctttatccattcatttgttgatggacacttaggttgcctccaaatcttggctgttgtgaacagtgctgtaataaacatgggagtgcagagatgtcttcaatatactgatttccattcttttaggtatatacttggtagtaggattgctggatcatatggtagctctattgttaggtttattttttatttaaaaaaacatttttttgagacagtctcactctgttgcctaggctggagtgcaatggcgcaatcttggctcactgtaacctctgcctcccaggttcaagtgattctcctacctcagcctcctgagtgcctgggattacaggtgtgtgccaccacacttggctaactttcgtatttttagtacagggtttcaccatgttggccaggctggtctcaaactcctgatctcaagtgatccacccgcctcagcttcccaaagtgctgggattacaggcgtgagccaccatgcccggtcctattgttagttttttgaggaacctccaaaccattctccatagtggttgtactaatttacattcccaacaacagcatacaagggttcccttttctccacatcctcgcccccattccttattgcctgtcttttggatagaagccattttaactggagtgagatgatatctcattgtggttttaatttgcatttctctgatgatcactgatgttgagccccttttcatatgcctgtttgctattttttttttttttttttcagaaatgtctattgagttctttttcctatggggactgttatgatttgcattcacagttgagggaactgagggctgggaatgttgagacttttcagaggtcctaaaagaatggacccctgagtcaatggcacacgaagctccctgtccagctttcttccacatggcaggacgtaggcctcagactggaaccctggcagtcatttttgccctgtgggtctctctgagccctgcccaccagaagcagctgcagatcccatggcccaggtcacattctcttgggggccacttctggggacacacaaggaagactgatgtgccagaaacattccagtggccccgggttcctattccaactctgcctgcactatcttcattcaatcattccttccagcctcaaccttctcatgggaaggacgcaaccacccaccacaaaactcactgtgagagtcttgtgatagtatagtatgttcatagcctagcgcctgggagagtgctcaagaatgggtagctgtgagcctggcaggtagtgcacacctgtagtcccagctactcaggaggctgaggcaggaggctcccttgagctaaggagttcaaagctgcagtgagctatgatcgtgccattacactccagcgtgagcaacagggtgagacactgtctcaaaaaaaaaaaaaaaaaaaaaaaagaaagaaatggtagttgctctgggtgaactccttcagaggatggatttgatttcattaccatctctaagccccagacaccctgcaggccttccatacaggtatgtataaggaacaagctgcccacatcacccctgacaaccaggacttagacaaatgtcaccaaggctgctagatgcctgctgccaaccaacagcccttctaacttgtaattcatttagcacaggttggagctgaaggagtgcccaggctgcggatggaggaaggacgtgctcgggagaaggtgaagatgggagagaagcaagatcttctgtgtttggaccaaggacacatttccttactccatagcagctgtggtcagtggcttagctcggacaaggagatgagagcccatgtgttgtgagggttcttctgggaactctgagaaggcaggagccgcccccgcccttcactgcctctcttccattctgcagcatggaatatggatgtgtggtctggatgtacagacaccattttggaccataaagacaaggacgattgtctaaggatgacacagccagagcactgagagtggcgagaaggacaggggagctgctgtgccaagcaggactgtctctcttaagagaaaaataaaatttattggtgtttaaacca

SEQ ID NO: 9928 - DNA, 573 bp, Homo sapiens
acactacgctgggctcagagtgtagcactgaagcagcaaaagaactagcacagcccactccacgtttgcttaaggggcctttccccactcctgcacataggctaggatgattttagagcactgaagtaataacgcaaaaacagcaatcatgtccttcttgaaaccaactctgggatgaaagaggaaatgtgtaaacagctaactaggttttattaaagatttgcggccgggcctggtggcttatgcctgtaatctcagcactctgggaagcggaggcaggcggatcacttgaggtcaggagtttgagaccagcctagccaacatggtgaaaccctgtctctagtaaaacagcaaaattagccgggcgtggtggtgagcgcctataatcgcagacactcgggaggctgaagcaggagaatcgcttgaacccaggaggcggaggttgtggtgagctgagatggcgccactgcactccagcctgggcagaaagagtgaaactcttgtctcaaaaaaaaaaaaaaaaaagaaagaaaaaaaaggtttgtgggagcactatgacctggccaagggcaa

SEQ ID NO: 9929 - DNA, 164 bp, Homo sapiens
gaggtggtgattcaccaggacttacaggacttaatatatagctgtactcatggcaaacatttattacagtgaaaacacatataaaacaaaatcagcaaagggaaagacacatgggatgaagttcataaaaaaaaaaaaccacacacaagtttccaagagttctc

SEQ ID NO: 9930 - DNA, 1132 bp, Homo sapiens
gtgggaaccctcttgaaatccaacttcccaagtggtcaactgagggccaaccttgcaagtggtcctttctaagaagagcagtctaaagtgtgctgccttaaactcttttctacacaacgatgatagtatttcatatgttttggaagtggtcgttaatgtagtcacctcagaggaacttggtctcaaaggaggatttgtcagagaaccatatataaaaataggatctctgaggaacatgtgttgccctttagttgaatttttaagaaatttttcagttgaatgctccacattcagactttcatacttttaagatcaagaattttattttgaattgtaagacaagttttctgctacatttagtaccacttctgaagatactattaataatatggaaagatgcctttgacatttttactgttgattcttgcacaagatgagtgctttaagaatttttgtgttttaaatttttaaattctatacttctgatagtcaaggtgtatgcgtactggtggggaaaatatcatttgacttaaggatgccagttctggaaaaaatggtagtaataattttaagtaccctttttcttcttgactaataaagttgaaacaaagagttaaggctatatttctttgttaaatttaaaacaaaaatagatactttactttctttatccttgttacaagatatgtttcactttactgttgagcaatgtgttggatatgaggctattataatcaaaatttaagagattagactaattatatttaaattctagctggaagttcatattctttatgaaatttaatggcataaaaatgtaagtttgctttgaaatagtgcatctacactcatttcaagaacttaacaggttttagaaatttaggcagcactttatgaaaaaaatgtagaagtttaaaatataaataatttataatgaagtgatcctatttcagaaaaagtatttaaattgtaaattatgattgtatatcagttatcttaaattatatcccttttatataatttggttttatttgcaggtcctaatctacccatggctacagttgatataaaaaatccagaaatcacaacaaatagattttatggtccacaagtcaacaacatctcccatacc

SEQ ID NO: 9931 - DNA, 106 bp, Homo sapiens
ctggagtcagtggcgcaatctcagcccactgcaacctctgcctcccaggttcaagtgattctcctgcctcagcctcctgagtagcagggattataggcacacacca

SEQ ID NO: 9932 - DNA, 8925 bp, Homo sapiens
gatggcggcgggttgctgcggggtgaagaagcagaaactgtccagttcgcccccctctggctcgggtggcggtggtggcgcctcctcctcctcccactgcagcggagagagccagtgccgagctggggagctgggactaggaggcgccggtacgcggctcaacgggctgggaggtctaaccggaggaggtagcggcagcggctgtaccctctctcccccccagggctgcggcggcggcggcggggggatcgccctgtcgccacctccgagctgcggagtggggaccctactttctaccccggccgccgccacctcttcctcaccctcctcatcgtccgccgcctcgtcctcatcgccgggctcccggaagatggtggtgtcagcagagatgtgctgcttttgcttcgatgtgctctactgtcacctgtatggataccagcagccccggaccccccgattcaccaacgagccctagtgagtaccgtgccctccgccgccctctcccttgcgctcgggatggggctcagagttgaggcaaagtgcgagtccgcctcccggccggcggatgcccctgccctctcgctgcccgggtccccggagctactcaactgaactaagggcaccctgcgctttttgccctccgaggcaggcaccccacacttggagcagggtgctgctgcaaggaatggccccgtggctcctagaggtgttagctttctctttgcgatgacttcgaggagttttgactcctttacttgtctccttcaccacccccaccacccctcaccctgccccggttttggagatctgggttactcaaggtgttgacctctcctcactttggtttccattaccccaagtgaaagccccgccagtattcccgccccgcgtatcttgcacatggagaactactatcccattgcaggatgaaaaatagcaactatccaacttctgttagtgatggaacttagctctggagcttgtgaggttacccatcttctcctctgggttttcttgtgccctgggaaggggggaggtttcttaaaacacatttttcccttactacttatttttatccaaatacacccattaaaatgtgtttctcgtgtagcgagcgcactgccggcttcctcacatttgaagagtgcgaccttttttttttttttttccattccaccgtctggataatagctcattcaaagagaactgtccccacagagccacggtcagtttgtacattaagcgtgcattcgcttttgtgtcgatttcactttttaagaaatccatgttatacttgatgatttgagaacagttaaatagtaaatgtgtaggaattgttatggtttcctttggttttgtatcttaaattattttacccttcaagtgtgtggttgaaaaattttaaaatagcactgttacagctaaaagccaggttaattctaatccctgtccatttggatgtgtgggaggtggggcatatggttttttttttttaatgtgtaaactgaatgtaaactgactttttgcgttaaatgctagacagaatgtaaagaccaagagagggcagaatgagaaaaagtgcaattgcttttatttgagtacttagcatcaacaagaaaaataatacagaaaaaatttcagtgaaactcgtactgaaaggcatcagccccttttccagctaagacaagtgccccttgtcccccatatcataaatacctgaattgatgttcttttaaaactgctccttttcattttgtgagattagaggattggactactgttgtataagtataaacatttctgcctagactaaaatattaaattaatatgtaaagtggaaattacaataaagtgtcctggaaattgtgcatttgtactgtttgttttctttggctttcattctttaaatgtctttaattttgtatgactcttctgtggtctgtgcattttcttttagacttggttaatctttgggcattggtttatgagaagtgcatgaaagagcatccaggagaacacttcgtcaaataaatatctttataaatttcatagtgttaattctagaagcttaaatcctaagtccacacttttatttagccaattcatttttttggttaagaagtaaaattcattttgaaaagactgccatgtaaaataaatctatgaaatatttattagcttgagtcacttatttgtgacttttatgccttctcttggatgtctgtgatgtattaaagctagtcctgggatgatacttaggttggctctgcaaagtcatgggactgcaaaaattcactcctgtttagttcttgagctgttaacatgagtttggcaaaggctgctttagtattcacgctccattgctccaaagcatatgagaacacactttcaggaggtgctattttcacacattttacagtgagtttgggttaactcaatgactataacaagaattttaaaaggaaagtgagcttgaccagttcatacagaaaatgcttttgaaaatatcattttaacagtagccactttgcacacgtatttagatattattctattcaaacaccccagcccctggatttctttttcatggaattaagcagatgataggacacactttgaccactgtggatatgttgaaacggtggtggaagaataataactattatcatctagcagaccttgaatgtgtcatgtattctataaaacaactaatgtagagtagacactaaacatgaccaagtggagaatgaaagttcacttaagtggaaaatggactgtcttatttccatttatcttcaactcatttttgaggtgtactgtggaaaattcaggaaaacttcctgattatgggagggacataactaagcatttcaacagtgccttagtaactaccacacatttgtctttctgttttacatatttaacagcattgtgtacttattagtgttgctttatcctaagtgccataagacataaacagacatattgggatttttttttctcatagttattatcatgtcatgagcagtgtgtttcaggtcatgtctctgcccaccagatgttgtgcttttgacagttttaacttctcatacgtaaacgcacactcttttcatcctttcccaggacttttctctcagaatgtctgtaactggtgaaatcctcgttttatgggtttagaagctgtagatccatcagttagttatccttccactcagtattgaggggatgtcaatatatgaacaagctgtatggatacaaattcttcactgttgcccccatgttttgattacctacccaattgcagaaagcattgtacaggcaagtttgtgcacagaaatctggttaaagacatgaggaaaacttaactttactgcattttgatattcaaaatcagcactcttggatttatgtagggagcccagatagctattttataggaacctgtttgctactataaagggatccactgtgccaggtgttgagctagttagactccagagcagtcattcttaactttggctgcacattggaatcactgggaagttattaaaaatatggatgcctgagccccaactccagagattctaatttaattggacttgaatggggtcttggatggggcctgggaatcaggattagtaaaagctcaccaggtgagtttaatgtgcagccaaggtggcgaaccactggttatagtctactgaatctttctcttgagatttggataatttgggctagggtagtgccttggaatctgaattttatgagcaccctaaatttcagtaaacaaccgatttgagaaactcttgcattgtggtctgcagaagacatcacctgggaaatcattacaaatataggctctcaggccccgcctcagacctgctgaattagagtctgcagtttaacaagctcctcaggtgattcttacgcacattaaagtttgagaaggactggttctcatactttggagtacatcataatctatagtgcttgttaaaacacaaattgttgggccccattcccggagtttctgattcagttggtgtggggtgggactgtgaatttgcatttctaacaagttccctggtgatgctgatgctacagttcccagggccacacgttgagaacctctggagagagaattgaggacctgaataagtacttgagcgactgtaatggaatggcaattttcaaggccagttttcagtataaaacttcctgcttctgtgtcactatgctttagcatgttcattctaacctagcacccaggagattgagtgctgccgagagtataagagtctgaggttcttgggatggttttagttgaggggtgagggtgactcttggaaacctgtggtatgattttaggtcctttttcagaaattgttaaatgtaagggatacattttaggagttaaaagcattacaaatatgataccttaaggtgaattatattgattttaataagtaaagccccctttgttcccataaaatgctcttatgattctttcactaaagtattgtgaaaagattttaaaagcttttacttatgcctatggttgctggatttcattttaagactttccctctgtaacaaaaatatgaaaggattctgctaaggcactgggattgttcagtcttatatctttaatgctgctgcgtgtcacgttacttgaactttttattttaatcatcctaccacctttgaagttaacgtaatactacattttgtatagaccatagcacatagaagattctttattattaaagtacatcagtaagtgtggttttaaattgcaattaataaaatgtattttaaaaaaatccactcccgcatatgcagattttgagactctgaagaggtgttttaacagttaactctttctcgtcttgccaccgtagtcaagttgctgtttttcagtgtgcttgggaggaattgggttgtgttggggagtaggcattttgtttcaacagaactgtggcaatcctattgcattatcaaaaagatgatttgatagtgctgctcaggttaaaatgatattaaatttgtattttaaatataagccattatatttctgttatatgttttctgatgaagattgaccagaatagccagaagatgtatctgtctatcgcagatgatgccatgaggccatgacagatttccttatccacactaacataacggtactaacttgcattctctggtcataatgtatagtttttcttataaaagcaaaacactgtctgaacaattgagtcattttgaaggtataatatggttgtttttttttaacaatgttgattcccattggaagacaatctgatgtcgtatcttatggatagaaaagaaggcaggcatgtccccagttgtcagttgttctgtaaaagccatcagtgactgagctagaaggatggagaaatataaatcacaaaattgtttttatatccatgcataaaggtgtatgtgggacaaggtatatttagttaaaaagaaaatgcttattttgctttctcccccatatggccaaagggagtgataatttagcccataatttttcttgcttatgaattatgtttgtgctatactcaggtttcagttagcgggtggcagccaagtaggaatctctgctgaaatctctcagtccaatgggaagaaagaccactactgaaaaagtaaaaaatggtctgttaacccatgcatgagttgtttttctaagtatgtatttctcaggcacatgctaacatgtgtgttgttgtctttttaaaaactgtatgctttttgaaaccaaatttgtgttataaatactaaaaccttagctgtagtggattatatttttgaagtgaattgcatttcctatttatagacagttttactttttgagaatttatgtgtgaaacactaaaacttgtgtaatgagattagtcagttcccaagttttcctgatttcaataggcattattatgtactctcgatgtcacacatgcttggctcttataaagcagcacaatgaccagggcttttacatttaaattttgttaaatagtctctttttcaaacttgtgtaataatgtctctttttgatactgttctgaatcaattaagctaagtaagtgaggaccagcagtaaaacccagcatctgccaagaatggaccctcaatgtgtaagctgtctttccacaatcagtaattgggcagttgctcacaggacactggagacagtgtgggaaaccagtggttgtgtaggtggaaagagtagattcccaacagtaagcttatttagagtttagcttctgtagttagtgttgctaagagcaaaaatgacccacagtttatgtagtataaagaaaataacccaaaggaagaagtacagtgtaatagtatagttggttgggtggagcatgttttatgttcagtccaactataagtggcatcttttgtatcaagtgtgggtgtattttctacagctcttaatgtttcagacattgaaacttgctcaaagttaaaaatgttagtgttgaatagctgagtggaaattatatgtcattggaaaaaaaaaccctgtttttgtaaaaaatatacattatcctgagtttcatggttggaaaccagaaaaatagaaggaatagtcctatcctcacagagcttacagtcctgttcaagatatgatactattatcaaagttgcttgaaatacttacaaagcaatatatacatgattgtagattaataaaatacacataaaatgcatacacatggaaatgacatggaataaaggagtggtcagggagaaggctatagggagggaataactggaaccaagttttgaaatggaggaggtacagaaattattggtagagtctgtttgaccagtagatcttgaagtcttacttggttgttcttaaacccgttgctgtcaccaccacaccccttgccacagtacttggggattcccagcagctgtcttcagtcagcaacttgcactctcagcattcttcatatcactccccttgctctggtctctaagatcataaaacttcaaggaaattaaaagtggcctttgtgttgagaatcctctggggaggctggataagagatcttgtatctgcttatagtttcttgtattaggaagagaacaggatttgcagaagagtcctctagagtatcagatgaattgggagaagagtctcaagataggggagactaactaggcttaaggttatgagggcagtaggaaaactggcattggaaagtgggaaagccaccccaggggcagagtttgtgaatataggaatgttgcaaaattgagaattggaagaagttatcagcatatgcaagggttcatactctagggccaggttttgtgtaggagtggaaagattgtagctcacctgtttttggcttccatcattgcctcttcttttcttggctctgtgcctagctattcttgtgctcagaaaaagtttgttaaacagctctgttgaaatggctatgaaatttgatcacaggcataagaactctcctcccctttccctcttcacctattcccagctgtatctaatttgggagaaaggatgagaggacacatcggtttatagaatttgtatcaaatataaagatagctggaatagcttttggatgaggacctgtgattaggtgactacatgtgcatggagaggcactgcaggaaaaaaaaaaacaaattctggttgcttggcagaagtaaaagaagagaggctttgaacatgattcagagttcataagcctggggaaccatgaggatggtggtgccattaaaaaacatggggggaatatgggaagaaacaaatggttgggcaggtgaaatcagatttcttactatgtgtagttccaagtgttggcagttatcaaatgttatttctttttgaattaccagaaccacagagcagcaacagagctattgtgatgttttagttggccccttgggatcactcccccactttgtgactttgaatggctcagataagtagatatcagtgatagttttcagctttgtactgctagtaaaaatacctggcagaattttgggtttctttaatgtaggtttttacattttcttagtcttcaggcttatcaatttgtaaagcaggcagtgatccttttatttccttatgtgtatatcatagtacagccttgagcaagataaagcctcgtggcaggccatctcaggaattcataatttcagaactaaagggaaatttttgaaggactagaagtgcctttggtacaagattctaggttgtgtgtcctaaagcttagaaagtaaaatagattgaatcaagctggatctgttttgtggctttgctcaatgatgaaggatggatgttatgaactgatgggatcagccatattgctttaggatctttgcgatcttcagtggatgggcaaaagtgaaaagttctgcttgagtaaagacctactaatactagtttttttcaataaagtctgtgatagtcttgatgattcttgccttttccctatctgtttcattttacagataatccacattgttacccaaagccacatgcagtgccgggagagcacagttgactgttttatgcagtatcctgccagaagatgctgaccagttctctagtaatagaaagtagtgagattgaattaagagcctatatagttcaccttgccattcgatatactttcactgtgatctgtaagcatattacatacaactttagtaacatattttctagtgagatcttggattgctgcaaggtggtaacagattctctgctttgcttcaggtgttagtggatctttgagtaattcctatggaatggagtctctgaaaaattggttttgatgctgttagcctaggggtcccacagcactgtatctgcctcaaataaatgcttatgtactagttaca

SEQ ID NO: 9933 - DNA, 6839 bp, Homo sapiens
gccgccgcgcgtcgcggaggcacgtgtggagccccggcagcaggagcgtcgcaggtgagactccgcggggtacagggtggcagggcgcgggtgagggtgacccgggccgggcacggcgcgcagggcctgtccctccagcctcgcatgggcggcccccgccggcccggcctggccccttgttgcctctgcatcggctgggcggtgtttgcgtggacggccagctccgcgtccccagccccttactggggagccctgaatcctctgtcataccctgccacctagcccccgtgggggagactggggtgaggaatcaagcctggcttggaggtgacctcattgaccatttgcctctcccccgccggtggacacctcgcaaaggcgcttcctcatctcacatcttgggaatgggagtcaagctcctggagaagggtgatgggagggtcgggtcctcactccgggaatccttgggaccgaactccgccattgccaagcctcagtcttttcatctctgatttaggctcatagtccctgtctcttgtcctagaccaagaaaggcttcagaggccaggccagagtgcagcgctattgggctccctgtcaggcagtggcagagactgaggctgagctagccacaccccgcccatgcccactgctgggatgtaggcctcgaagccttctacctagaccctaggccctcatcctgcctcctgacttgctcatgcctacacacacccctccccaggtccttggcccttgccagacattagcaccatgagcttcgtggcatacgaggagctgatcaaggagggtgacacggccatcctgtcactgggccatggtgcaatggtggcggtgcgtgtgcagcgtggggcacagacccagacccggcatggtgtcctgcggcactcagttgaccttatcggccgccccttcggctccaaggtgacgtgcggccgaggtggctgggtgtatgtgctgcaccccacgcccgagctctggacgctgaacctgccgcaccgcacgcagatcctctactccacagacatcgccctcatcaccatgatgttggagcttcggcccggctctgtggtctgtgagtctggtgagttcctcaggctgcctcagtttaacgcagaaattgacacaaaggtggaggtcagagcctccagcctgcccttcctacagacacatgtggctcctcagtttctattttcacatctttccgggatgctgacagcagggagtgaaggtggaggcagagaagcccgttaggaggctggtgctgtaactggagtgagaggtggtgggaaatggaccaggaggagctggggaggactggtgctctagtgagggtcctgcttgccttggtggggcgtggccagcttgatgcttggcgctgtcctaggtactgaccgtcaacctctagtcctccgtgctgatggtgaagcagagagagttgccccttctggaaagaggccagggctaccccgaggagctcactgtaggtggggagccttccccatcctcatccatgatcagatcctcacctgctaccaatgaatgtgagcaccattgttgagtccagggcctgggctgtgggaacccctgcacatatacaggtgctggggccgcccagtgtggcgattgaagccaagattggccccaggcgctgatgcatctaggttgttggtggcgtgttcctcccgggcaggagagctagggtccaggttcacgaagagtgcctagcactgccatgctggctttctgagggctgcaggtcaccatgtccctccctggggtgtctgggtgggaggggtggagagcaggacttagccaactccatcagctgctgctcctgtgcatcctgtggtgggtgctggcctctccgcccctgccccactctcgcgagagagctcaatcaagcagcaccttctcctggcctcctcagatatgccaggtcccctcctaggaaccgtgaactagagagaccaggttcctgccctcgaggagggggacacagcctaggtgagcatctcagtgccgctggttgctgtgaagcctgtgagacagggctgcgtgtctgaggggtacccagagtggggactctccagctaggccaggcagggaagacctctctgaggaggggacatttgagttgaaaatgatgaggagggacctacgaagagccaagggacagctctgcaccaaggaggagccgtgccgaggccctgcagttggagcatgctgccgagtcaggctcagtgggggaggcagaggggctgggagtgaggttggaggggaagcgagctccaccccggaggctaacaagtctgacttgccccttagtgggaagggggcatggccaggctttgcagaggggcgaggcagcaggctgggggcacccaggggaggggctggacaggtggggagaggggctggcccctgaaaggaatgtgggaggtggcaggacgtgggacgggatagagggagtggaggcacctccatgggtctggcccaagcacttgcgatgctcagcgctatttgggttccaggcatgggtggcaagtgtgcagtggctgctctagcaggagtctccagtggaggggcctggggatgggagtggcatcaggtagatggcccctgaagctggagtgggaggagggatgcaagccttgaccctctccataagacaggaagtcaagcagaggggccatcttgagggaagctggggagggaagctgggggcaggtgcgctggggaggactggggccgtgtggctggtggccaggccctgcgtcctgagtccaaccaggccagggcagagccccagcccctgtgtggtgggggcaggtttgggcaggcttggtgggggtgggctgtctcaaggggaccaaggagcttctggggagaggtgggcatgaggaccggcagggtgggccactgttgacggggattgaggaagtgatgggccatgcatggaataagacagggctgagtgatgggatggcctccctgtcccccttgcacagatttccccggaggctccaggcagctgggctgctctcattccctatacctgcgctaggcaggatagggcagggttgccactggcctcgcctgtgcccacaacagacagcacggcatacacagcctgtcaaccccagctcacccctagacagggtgcccaacccagggctagcctggggctttaggcagccaggaccatacagccctggaatgacgcccacctgtagcttggggtcctcccaagccctgtgtgggtctccagggtgaggtgggggttgtttcctgggaggctgtgggtcccgagcagtcccaactgatgccttgcccatcccttcttgtcctgccaggcaccggcagtggctctgtgtcccacgccatcatccgcaccattgcacccacgggtcacctgcacacggtggagttccaccagcagcgggcagagaaggcccgggaggagttccaggagcaccgtgtgggccgctgggtgactgtgcgcacccaggacgtgtgccgcagtggctttggcgtgagccacgtggccgacgccgtcttcctggacatcccatcaccctgggaggccgtgggccacgcctgggacgccctcaaggtcgaaggtgcatccggggttccgggagaggtacagcctgggtgggggtggggcaagggtgcaggactgagctcctgggatctcagaggggtccagagaccaagccacaccatggcagtggccaggccagggccccactttggcctgaggtgaggagtgggtcaggctggccaggggaggcagagctggggaggatggtccctggctgggccctgctcctggtctctggcctctcccaaccccctgatggaggaaggtggcagcgccacccaagtgcagggcaggcccggccggaggagtctggagtcccctccctgctgtttcccaaaacctctcctcccccaggctctggagcccagggagctggccccttttagggaagatgctgggtgcggaggcggggcagccctggggaaggtcgggcctcaagccagggaggtggctgggaggcccagggtttttcccttttctggagaaggagcagctcaggcagcaggggccccttccttcttcccagctgagagttgtattctgagagggttgaagggtggaggtgctgggcgccccaccccacctcaaagatgagccgaggcctggtgcgaacagcaaggctgtggccgggggtcccctgctggctccagcccagccctgactcctgggtcctggtctctgctgaggtgggtagctgtggggatctccacaccctgcctcctaggcttcctgctctggggacacttctgggcctggaccatagtcccagggaggctgaacccggcagagcctcccctggggcccccctgctgcctttgtgactccttcctccagcgtggctcggggaacccgcgcctgcctctgggacctgtccctttccctgcgagctcccccttctgggtccaaaggctcctggctcattcatgggcccggcatctcctgccggccacgggagcccgctggggaggatgcggcatgctcagcctctgtgccctgtctaggctgttgtcacacagcaggtgcctcctctaaccccgaacctcctggcggccccgtgttagggtacagctgaggagaccaaacctcagggacgtttgaggacacttgcctgggccacatacctctacccggccctggcttccccaggtcctccctgccaggacagggacccgggctgggttctcattcactgcaggccaggccaagtgaagcccgtggctgccctggtgggaggcggcagggaggggctgtcatgctcgggctctgcttcgagtaggcgcctcctgttcccgggagcagcgacagcctctaatttcctgtgacagcagcggcccccgcaccgccccacgctgccgtgctgtcagagctgctccgggcccagagctccagcagccctgtggaaggcaggagagcagtgcccgctgtgggccaagtgagacaatggcagcgcgggcttgacccggtgcctggcacatgggagggcctggcatggctaagctgggtgacatgaacagcggcgccaggccccatggggggctgtcagttgagggccaggcccctctgccctgcagtcccagctcttggagagcttgcagtctgtgttggggctgtcttaggctggcctcagaccctagggtgggagtccagggatgctagggccagacgggccaggctctgccacccctgccctctgaccctcgggtcctgtttcccacaggcgggcgcttctgctccttctcaccgtgcatcgagcaggtgcaacgcacatgccaggcgctggcagcgcgcggcttctcagagctgagcaccctggaggtgctgccacaggtctacaacgtgcgcactgtcagcctgccaccgcccgacctgggcacaggcacagatggccctgccggctccgacaccagccccttccgcagcggcacgcccatgaaggaggccgtgggccacaccggctacctgaccttcgccaccaagaccccaggctagggggccgcctcccagggcaccagggagctgggagcactgaagggctgggcagggaggccagaggcaccttatatggtcagcgatgcctgccagacacagacggtggggtggggcttgggggcctcctgggtggccagagtgggacagcaggaagggcggctgtgatggaggagcagtgctggggctgggcctcagccattcctgtccagccctgtggcccatcccagctgctgtttgttgccaatatgaagtatccactgccacaggctcccctgggtgttgaagccaaagggtgcaggtgggggagtctgaccccctcccaggtgggcctaagcaggaagggggtggaggagggaggggggcattgaccctgagaccacgctgcgtctgacccctgggcccccacggccctggctgccccacggggcctgagaccatctcgtgcttctccagtccccgggccgaggctccagccttggccagaagctggggtgagctgacccagaatccctgccctgctctccccagcgctaggagaccaggccagcccaggaaccagggaggtgaccctgctctctggcctcctggctgatgtcacagcactgagctcagcccaggccttcgtccactcatgtccaagaggcggggcatcccccacccagccagagcccctgacatgggctgcactcgctgaggccaggcagcgctgcggagaggagcggcagagtgggttgtctgccgcaggcaaccaggcaagtgtgtcggggctggggtgtgaatgccagcctgtgagtcccggaactatgtgggtacccctacccctcacagaagccaagggcatggaggaggtccctccacagtgacaacggtgtggggtaggggaggtgcattcaggacaccacccagggacagtgcctatgtgatcacctcttaaaggctaagcttaggggcatttcccaaagtggggacagagggcaggacgcccaggctgggggctctcctcgcccgccctggtgtctgacagcctcaaggaaggagcagtgcctgtgtcagccatggggcccttggagctgccgctggtgcctagggggcctgggtttctgcccaggcagccagtggctgttgggagcctctgtttcccctgtgctgggggccttgagtgctatgctagcaggggcctggccccaagtgtgagtgatgagcaataaacgtaccgtccccctct

SEQ ID NO: 9934 - DNA, 6838 bp, Homo sapiens
gccgccgcgcgtcgcggaggcacgtgtggagccccggcagcaggagcgtcgcaggtgagactccgcggggtacagggtggcagggcgcgggtgagggtgacccgggccgggcacggcgcgcagggcctgtccctccagcctcgcatgggcggcccccgccggcccggcctggccccttgttgcctctgcatcggctgggcggtgtttgcgtggacggccagctccgcgtccccagccccttactggggagccctgaatcctctgtcataccctgccacctagcccccgtgggggagactggggtgaggaatcaagcctggcttggaggtgacctcattgaccatttgcctctcccccgccggtggacacctcgcaaaggcgcttcctcatctcacatcttgggaatgggagtcaagctcctggagaagggtgatgggagggtcgggtcctcactccgggaatccttgggaccgaactccgccattgccaagcctcagtcttttcatctctgatttaggctcatagtccctgtctcttgtcctagaccaagaaaggcttcagaggccaggccagagtgcagcgctattgggctccctgtcaggcagtggcagagactgaggctgagctagccacaccccgcccatgcccactgctgggatgtaggcctcgaagccttctacctagaccctaggccctcatcctgcctcctgacttgctcatgcctacacacacccctccccaggtccttggcccttgccagacattagcaccatgagcttcgtggcatacgaggagctgatcaaggagggtgacacggccatcctgtcactgggccatggtgcaatggtggcagtgcgtgtgcagcgtggggcacagacccagacccggcatggtgtcctgcggcactcagttgaccttatcggccgccccttcggctccaaggtgacgtgcggccgaggtggctgggtgtatgtgctgcaccccacgcccgagctctggacgctgaacctgccgcaccgcacgcagatcctctactccacagacatcgccctcatcaccatgatgttggagcttcggcccggctctgtggtctgtgagtctggtgagttcctcaggctgcctcagtttaacgcagaaattgacacaaaggtggaggtcagagcctccagcctgcccttcctacagacagatgtggctcctcagtttctattttcacatctttccgggatgctgacagcagggagtgaaggtggaggcagagaagcccgttaggaggctggtgctgtaactggagtgagaggtggtgggaaatggaccaggaggagctggggaggactggtgctctagtgagggtcctgcttgccttggtggggcgtggccagcttgatgcttggcgctgtcctaggtactgaccgtcaacctctagtcctccgtgctgatggtgaagcagagagagttgccccttctggaaagaggccagggctaccccgaggagctcactgtaggtggggagccttccccatcctcatccatgatcagatcctcacctgctaccaatgaatgtgagcaccattgttgagtccagggcctgggctgtgggaacccctgcacatatacaggtgctggggccgcccagtgtggcgattgaagccaagattggccccaggcgctgatgcatctaggttgttggtggcgtgttcctcacgggcaggagagctagggtccaggttcacgaagagtgcctagcactgccatgctggctttctgagggctgcaggtcaccatgtccctccctggggtgtctgggtgggaggggtggagagcaggacttagccaactccatcagctgctgctcctgtgcatcctgtggcgggtgctggcctctccgcccctgccccactctcgcgagagagctcaatcaagcagcaccttctcctggcctcctcagatatgccaggtcccctcctaggaaccgtgaacaagagagaccaggttcctgccctcgaggagggggacacagcctaggtgagcatctcagtgccgctggttgctgtgaagcctgtgagacagggctgcgtgtctgaggggtacccagagtggggactctccagctaggccaggcagggaagacctctctgaggaggggacatttgagttgaaaatgatgaggagggacctacgaagagccaagggacagctctgcaccaaggaggagccgtgccgaggccctgcagttggagcatgctgccgagtcaggctcagtgggggaggcagaggggctgggagtgaggttggaggggaagcgagctccaccccggaggctaacaagtctgacttgccccttagtgggaagggggcatggccaggctttgcagaggggcgaggcagcaggctgggggcacccaggggaggggctggacaggtggggagaggggctggcccctgaaaggaatgtgggaggtggcaggacgtgggacgggatagagggagtggaggcacctccatgggtctggcccaagcacttgcgatgctcagcgctatttgggttccaggcatgggtggcaagtgtgcagtggctgctctagcaggagtctccagtggaggggcctggggatgggagtggcatcaggtagatggcccctgaagctggagtgggaggagggatgcaagccttgaccctctccataagacaggaagtcaagcagaggggccatcttgagggaagctggggagggaagctgggggcaggtgcgctggggaggactggggccgtgtggctggtggccaggccctgcgtcctgagtccaaccaggccagggcagagccccagcccctgtgtggtgggggcaggtttgggcaggcttggtgggggtgggctgtctcaaggggaccaaggagcttctggggagaggtgggcatgaggaccggcagggtgggccactgttgacggggattgaggaagtgatgggccatgcatggaataagacagggctgagtgatgggatggcctccctgtcccccttgcacagatttccccggaggctccaggcagctgggctgctctcattccctatacctgcgctaggcaggatagggcagggttgccactggcctcgcctgtgcccacaacagacagcacggcatacacagcctgtcaaccccagctcacccctagacagggtgcccaacccagggctagcctggggctttaggcagccaggaccatacagccctggaatgacgcccacctgtagcttggggtcctcccaagccctgtgtgggtctccagggtgaggtgggggttgtttcctgggaggctgtgggtcccgagcagtcccaactgatgccttgcccatcccttcttgtcctgccaggcaccggcagtggctctgtgtcccacgccatcatccgcaccattgcacccacgggtcacctgcacacggtggagttccaccagcagcgggcagagaaggcccgggaggagttccaggagcaccgtgtgggccgctgggtgactgtgcgcacccaggacgtgtgccgcagtggctttggcgtgagccacgtggccgacgccgtcttcctggacatcccatcaccctgggaggccgtgggccacgcctgggacgccctcaaggtcgaaggtgcatccggggttccgggagaggtacagcctgggtgggggtggggcaagggtgcaggactgagctcctgggatctcagaggggtccagagaccaagccacaccatggcagtggccaggccagggccccactttggcctgaggtgaggagtgggtcaggctcgccaggggaggcagagctggggatgatggtccctggctgggccctgctcctggtctctggcctctcccaaccccctgatggaggaaggtggcagcgccacccaagtgcagggcaggcccggccggaggggtctggagtcccctccctgctgtttcccaaagcctctcctcccccaggctctggagcccagggagctggccccttttagggaagatgctgggtgcggaggcggggcagccctggggaaggtcgggcctcaagccagggaggtggctgggaggcccagggtttttcccttttctggagaaggagcagctcaggcagcaggggccccttccttcttcccagctgagagttgtattctgagagggttgaagggtggaggtgctgggcgccccaccccacctcaaagatgagccgaggcctggtgcgaacagcaaggctgtggccgggggtcccctgctggctccagcccagccctgactcctgggtcctggtctctgctgaggtgggtagctgtggggatctccacaccctgcctcctaggcttcctgctctggggacacttctgggcctggaccatagtcccagggaggctgaacccggcagagcctcccctggggcccccctgctgcctttgtgactccttcctccagcgtggctcggggaacccgcgcctgcctctgggacctgtccctttccctgcgagctcccccttctgggtccaaaggctcctggctcattcatgggcccggcatctcctgccggccacgggagcccgctggggaggatgcggcatgctcagcctctgtgccctgtctaggctgttgtcacatagcaggtgcctcctctaaccccgaacctcctggcggccccgtgttagggtacagctgaggagaccaagcctcagggacgtttgaggacacttgcctgggccacatacctctacccggccctggcttccccaggtcctccctgccaggacagggacccgggctgggttctcattcactgcaggccaggccgagtgaagcccgtggctgccctggtgggaggcggcagggaggggctgtcatgctcgggctctgcttcgagtaggcgcctcctgttcccgggagcagcgacagcctctaatttcctgtgacagcagcggcccccgcaccgccccacgctgccgtgctgtcagagctgctccgggcccagagctccagcagccctgtggaaggcaggagagcagtgcccgctgtgggccaagtgagacaatggcagcgcgggcttgacccggtgcctggcacatgggagggcctggcatggctaagctgggtgacatgaacagcggcgccaggccccatggggggctgtcagttgagggccaggcccctctgccctgcagtcccagctcttggagagcttgcagtctgtgttggggctgtcttaggctggcctcagaccctaggtgggagtccagggatgctagggccagacgggccaggctctgccacccctgccctctgaccctcgggtcctgtttcccacaggcgggcgcttctgctccttctcaccgtgcatcgagcaggtgcaacgcacatgccaggcgctggcagcgcgcggcttctcagagctgagcaccctggaggtgctgccacaggtctacaacgtgcgcactgtcagcctgccaccgcccgacctgggcacaggcacagatggccctgccggctccgacaccagccccttccgcagcggcacgcccatgaaggaggccgtgggccacaccggctacctgaccttcgccaccaagaccccaggctagggggccgcctcccagggcaccagggagctgggagcactgaagggctgggcagggaggccagaggcaccttatatggtcagcgatgcctgccagacacagacggtggggtggggcttgggggcctcctgggtggccagagtgggacagcaggaagggcggctgtgatggaggagcagtgctggggctgggcctcagccattcctgtccagccctgtggcccatcccagctgctgtttgttgccaatatgaagtatccactgccacaggctcccctgggtgttgaagccaaagggtgcaggtgggggagtctgaccccctcccaggtgggcctaagcaggaagggggtggaggagggaggagggcattgaccctgagaccacgctgcgtctgacccctgggcccccacggccctggctgccccacggggcctgagaccatctcgtgcttctccagtccccgggccgaggctccagccttggccagaagctggggtgagctgacccagaatccctgccctgctctccccagcgctaggagaccaggccagcccaggaaccagggaggtgaccctgctctctggcctcctggctgatgtcacagcactgagctcagcccaggccttcgtccactcatgtccaagaggcggggcatcccccacccagccagagcccctgacatgggctgcactcgctgaggccaggcagcgctgcggagaggagcggcagagtgggttgtctgccgcaggcaaccaggcaagtgtgtcggggctggggtgtgaatgccagcctgtgagtcccggaactatgtgggtacccctacccctcacagaagccaagggcatggaggaggtccctccacagtgacaacggtgtggggtaggggaggtgcattcaggacaccacccagggacagtgcctatgtgatcacctcttaaaggctaagcttaggggcatttcccaaagtggggacagagggcaggacgcccaggctgggggctctcctcgcccgccctggtgtctgacagcctcaaggaaggagcagtgcctgtgtcagccatggggcccttggagctgccgctggtgcctagggggcctgggtttctgcccaggcagccagtggctgttgggagcctctgtttcccctgtgctgggggccttgagtgctatgctagcaggggcctggccccaagtgtgagtgatgagcaataaacgtaccgtccccctct

SEQ ID NO: 9935 - DNA, 680 bp, Homo sapiens
tatttaacatctctgagtttcagtttccccatctgtaaagtgttccctccctcctaggatcctggggagaagtcaatgagatggcacagctgggcatatacagcatcagctcttgttaggggagccccaatacaaactctgcacagggaatcatcagctgaggtaggggggattggttctgcttgaggactcaggctggggactggggcaggctcagatggagcaggtgggcagggctgaggaggctgcctggaggaaggggcactggaggagttgaccagccagtaatagacagagaggcaagagggaagtcggaaccaagggaaaccaccgccgagtcaccaagtcctaccttaggcccttataggcacccggccctgactccacaccaaccacagctgagaggctggggaagagaaacccaagagaagtggaaagtcagaatcccccaggggagaaattagggggtgactcaggcgggtgcatcatcaagggagagaagcatccgctggaacacaggttcgggagctgtggagggggctgtttcaacgttgagagcagaaggcagggaggctgtaaggcagaagtagaggcagctggtggccagcgtggtggccccacagggacaggagcccacagagagtgggaggccatggaaggcctctcaccagcttactcct

SEQ ID NO: 9936 - DNA, 535 bp, Homo sapiens
tgctgtctaggccagccctacctgcgctctgcccctggtccctgctcctccctgtcctggtttggcatgataggcgctccagtctccaggacaaaggggcaaatgtgtggccacccccatctggctgcagaaaaggccactccttcctggggttggggtggtccaggagtgctgggccttcttccacagtcctgggctggaattcagtgtggctgcctgggttacttgtatgcgcccctgaaggaagggtccactccaggccgcctggtccctgcgaagtgtcacactgtgggtcaccgggggctgtggctaatgtggtccgggaggcctgtgtccctgagagttgctcagccctgctccgagggcttgtcctctccttccaggacccagcttcccttctaaccttgttactcacctggggcacagaggaggggcccccagtcaggttcaacatggaagtgggtgaccctaatgccaggagctttggggtcaggctgtccctggggtgtcatgaactgggtgacgcacacccctg

SEQ ID NO: 9937 - DNA, 680 bp, Homo sapiens
tatttaacctctctgagtttcagtttccccatctgtaaagtgttccctccctcctaggatcctggggagaagtcaatgagatggcacagctgggcatatacagcatcagctcttgttaggggagccccaatacaaactctgcacagggaatcatcagctgaggtaggggggattggttctgcttgaggactcaggctggggactggggcaggctcagatggagcaggtgggcagggctgaggaggctgcctggaggaaggggcactggaggagttgaccagccagtaatagacagagaggcaagagggaagtcggaaccaagggaaaccaccgccgagtcaccaagtcctaccttaggcccttataggcacccggccctgactccacaccaaccacagctgagaggctggggaagagaaacccaagagaagtggaaagtcagaatcccccaggggagaaattagggggtgactcaggcgggtgcatcatcaagggagagaagcatccgctggaacacaggttcgggagctgtggagggggctgtttcaacgttgagagcagaaggcagggaggctgtaaggcagaagtagaggcagctggtggccagcgtggtggccccacagggacaggagcccacagagagtgggaggccatggaaggcctctcaccagcttactcct

SEQ ID NO: 9938 - DNA, 4029 bp, Homo sapiens
ctacttcagcgtccggcgaggaatgccaggaaaactcatcaagatcaacattatgaacatgaacaagcagagcaagctgtattcccaggcatggccccctttgtgcgcacactgcccacccggccacgctgggaacgcattcgagaccggcccacctttgaggtaagttctccatgaggaggaaagaaagacttgggtgctaaaagtagagaggaaagtaaagcgtttttttttccttgatacaagtatgaagcaggtgggacaacaggtttaagtatcagctttttctccagtgttagctagagtccaagatgagcccctgcctcaggaagcctagaaggagccacttttcatatagaaagtgtcacagggagggaagttggtaaaggtgataagggtgtgaggtcagttcctggtggtcccagtaggagctcagttctgacaatggcatgttgcccctccctcttcctcctctgctcttcagatgacagagacgcagtttgtgttatcctttgttcatcgtttcgtggagggccgtggggccaccaccttcttcgccttctgctaccccttctcctacagtgactgccaggaactgctaaaccagctagaccagcgctttccggagaaccaccctacccatagcaggtgccagccccattcttactcctgccacacagtcctggatcagacagcacctccactacttctggaatttgctcttagagctctgaaccatactttcatccgtcttttttctgtacagaatgtacagacaggactttgggtacctttgaaaactatgtttctgtatgaccctgatctcagcatatcgacacctgccctccactctttcacctgcccagttcagacctcttactagcccagctcccattaattatccagagtttagccagcattatgtgactcagtataccttttttatctgcccccacggagaacaactccgactacattaagtaatctattctaggaagccacaaactggggaacaacaagttcaccctgtcctgtactcttcattctggcaatgtaaacccactcaaatccttagcctcatttaacattgtgagggactataaggccccaaaggttagggtgaaggaccagattttacagatcctgggctggtgacaaggcctacctcttactaggactttagggacttctcctggcttaatttttttttccctgtagccccctggataccatctattaccatcgggagctcctttgctattctctggatggacttcgtgtagatctgctgacgatcacttcctgccatgggcttcgagaagatcgagagccccgtctagagcagctatttcctgataccagcacccctcgaccattccgtttcgcaggcaagagggtgagtggaaatagcataaaggtagttctttggcttttctctagcaccaggtactgtttatagctaaagactatgttatctctaggcatcttggacatggcctccgcccgcagcgtgcggcaagggtgatggcccctgctccacttgcagattcagccagctggaaatccagcggctattcctgcctcatccatgacaccccccatatactgtcaaagtagaactacagggtaactgacttaatgtctgctctcctctctacctcagatattcttcttaagcagtagagtacacccaggggagactccatctagctttgtcttcaatggctttctggacttcatcctccgacctgatgatccccgggcccaaaccctccgtcgcctcttcgtctttaagctgattcccatgttgaaccccgatggtgtggtccggggacactaccggtaagtggcttccccagcctgtctggactgttcccatttcccctcatgccctgcatctcagtgaaattctgtcagccttctggcttctgtgttcccagtcctcttgcaccctaataaaggcaagcccatctcatcttcctgagaaagcatgagatcatatctagtggcactcccagaaaggaaccaaactaggatgactgcaggcccatctgggtggaggcagctaccctgaggaagctccttagggttctatggtaagggtgacagcagatcaaagagaggccctgtcttcaattctttctttcctaacatagcttcagcctctcatttgataagtcagtctcctacggtctccttttcatctacactagtgtctccttcactggcccagtcctctagaacctgcttcagtccttgttttcctacagcacagactcacgtggagtgaatctgaaccgtcagtacctgaagcctgatgccgtcctgcacccggccatctatggggccaaagctgtgcttctctaccaccatgtgcactctcgtctgaactcccagagttcctctgagcaccagcccagttcctgtctccctcctgatgctcctgtttctgacctggagaaagccaacaatctccaaaatgaagctcagtgtgggcactcagctgacaggcataacgctgaagcctggaaacaaacagagccagcagaacagaagctcaacagtgtgtggattatgccacaacagtctgcggggcttgaagagtcagcccctgataccatcccccccaaagagagtggcgttgcttactatgtggacctgcatggacatgcttccaaaaggggctgcttcatgtacggaaacagctttagtgatgagagcacccaggtgggaatcctaagaatgtcatgtgagtgtgagaagtgttacaggttaggagatggggttaggccatgaacagaaggaagatagccttaggtagctttctggaaggaaggcctgtgtagactacctctgaaaaagctttgaagggccaagaagagatggcacagggggataatgtctcaattgttacatcatgaccttttattaaggaaagctaactgcattatagtctgctagagtctgggaatccagagaaggaaaattttgcattgttggagggaggaagctaaaagcttaaaaaaaaaagaattgcttcccaacacctagaagtaatgtcaaactgagaattcaggcagcactgattactgttaatggttgtgatggtatctgctgtgtattaagtcacatggtcacatacttgctatctcttccttgcaccttgtcccttctgtctctccttctgagttgacttttcttccccaaacaggtggaaaacatgctatatccaaagctcatctccttgaattcagcccacttcgacttccagggctgcaatttctcagagaagaatatgtatgcccgagaccgtagagatggccagtctaaagagggaagcggccgtgttgcaatctacaaagcctcagggataatccacaggttgggtggaagctgagatatagttgatgaaatagcttccctaaagaaaacaccgtagctgggtgtggtggtgcatgcttgtaatcccagctactgaggaggctgaggcaggagaatcgcttgaacctgggaggcagaggttgtggcgagccgagatcgtgccattgcactccagcctgggcaacaagagcgaaactccgtctcaaaaaaaaaacaaaaaacaacacccagttcagggtgtttgagagggagggaaccaccttagtcttcttaaaagagaacctcacaattagcattattgtctttagtctaggactctaccttggggggactctctgggtatatggtacagtaccaaggtcagctgctagttgctatggattattagcactttcatttgtgttcacttttttccaagtgattgcctcctttgaccacctaagttgtcctctatggttctgtcctggtatctgttcaggcgggacactgataaaggtctttatgtcttagctacacacttgaatgcaactacaacactggacgctcagtaaacagcatccctgctgcctgccatgacaatgggcgtgccagcccccctcccccgccggctttcccctccagatacactgtggaactatttgagcaggt

SEQ ID NO: 9939 - DNA, 5690 bp, Homo sapiens
ttctctggcttccctgaggctgcaggtgttaatctggggggccctgggccctgagccggcagcagaaatatgaggacccagagccttctcctcctgggggccctcctggctgtggggagtcagctgcctgctgtctttggcaggaagaagggaggtgagtgcgggaaatccctctgctggggggaccagattgtctctacttctctagggagagtaagggtttgggggaaggcaggtaatgccctgtggggtgtgtgtgcgcgtgtgtgtgtgcgtgcgtgcgtgtgtgtatgtgtggatgcctgattcttagtgctttcagaagcctgtgtttttatgtgtgtacatttgtgcctgtccacctgcctgtgttggtatctgtaagtgtcttttctgccagtttctcggtgcttgtctgtgcctgtctatatgtcagggggtggcagggcggggaatgcatgtgcctgtgtctgtgtagacatgtgtctttgcgtctgcttgtctgtgcaaagctctgtctgcacacgtacacttaggaatggctgcacgcatgtgtctgagcttggtgcctgtccatgtgtgtctctgtgccttcaggtgtggggagggaccctgtctgtgcctgctgggctgtggtgtgactgggtcagtgggtccaccaccccatctgtggaagggacttgggaattgaggagagggtgtggcttctgggatctgggctttgtggggaggaagctctgtctctaactctcatcgcccccaacctcctgtccccattcccacccctgacaaggctggggctggcctgctgacaggtgagggagggctgctgagtggctagacaggtgactcctgatctgggtgaggcctccacctgcgtccttttctggggctggaacactccaacctacattcacctgtgcaacccttgccctgccttaaagaaaggggacagtaatggggacaggctgaggaaggaagtacactggtgagctccaaggctggaccctgtgttggctgtgattcatgcaccatcatcacgtaactcctcgacaaggtgctgtgaggacaggactattttcatccccattttgcagatgaggaaaattgaggcatagcggggaaccacttaacaaggtcaaagactgactctgagttagtgccaaatgtggcatttgaatgcaagtatttgaaatcagaaagattcaccttaccaactattacagcaaaaacccaggactgtacaggacaatgcacccccaacataggaaggagctgagagaccagagaatgacttagacaaggccagattagcaagtgcatgagtgcaagtatttgaaatcagaaagattcactttaccaactattacagcaaaaacccaggactgtacaggacaatgcacccccaacataggaaggagctgagagaacaaagaatgacttagacaaggccagattggcaagtgcatgagtttattaggacttccaggcaggacactcctggaaggcaacaggacaggtctggagacttactccttgtaaaatggggtcccatgcctctctctcaggagtaaatggtgtctcgaggaataagggcctggcacacagtaagcacagcataagtgggtgatttgggggagtcattgtgttcccagggagcacaccccaatattcagcccagctgctcagaggcaaagagctggcacagcagaaaccgagcctgcgcagggccactctgcatgggcaggtgtgacaagcttgtctctcccccagttcaccacaccttgtcccccactggtttctctcctgtaagacattgccgagctgttggtagaatttcagacaatggaggaaggtgacgaagccaagggaagggaagtctcagtttgttgcctgtggaagcccagccgcctctgtttataagagctccccattctgcccccttctcactcaaacgtctgggtgtctctgatacaaagagcctggcatagtccctgataaacagcaagtgcctaattaaatgctgtcagtggttatgtggtattgggaagatatatgtgtctgtgtagctctgtgcatatgattctgtatatatgactgtgtatgcttatgtatgtctctctgttcacatacatatgctatatatttatatatttatatacataactgtgtgtgtctgagtgtctatctgtgtgtatgtatctatgtgggtaggcatgtgtaaatgacagtgattatgttccagctcatatgtacatacatgactgcctgtttatatatgtttataaatatattgcatatatataactctctgatatatgtccatatgtatatatgtgtgtattaagttgaaccatgtaaaattgctacttttgtagataaaacagttgactatctgcagtttcctactgttaagcctgtagctaattgtgtgtctagatctaaatgtgcttgtgtatttgactatgtgtgtatcgtctgtgtgtacaagtgtatatatttaaccatgtttggatacgattcttttgctctctaagtctacacacccatggcgcatgcatctggatgaccatctgtgtgtgtgactgtctcgatgtacacatctgtgagtggagaacctggtttggagggactgttaggaaaggcaggcaaacagagtgagtgtgaccacccagagcctctcacgccggctctgcacacgccaggcttttatccccacctccacattgcagctatcgcagttcttccactggaaatgccagctgtcatgccccatccctatctgtccattccccaaggccagccccaggcccctcgccacagaagctctccctgcctgacccacccggctccaccggctttgagtgcacgcagctccgtttggcccaccctttgaggcctgcgcacctttgacttggacttgtgaattcagggctaaaccttggacctcagacagtttcccaggaaccctcccatcacccccaccaccccaaacccacactttttccccctccccacgccaagcctctctttctccagcagggggcagcaatttaatttaaaccaacccgatgtgacagctgaagttgacttagcgcacgtaggatgtgagcaaggtgcctacttatgtgtgcagccagcacccaggcagggggctgagggggaggggcggacacagaggtaaagtcacagaaccagatccagctgcccctcggaactcttgaacattttctctgatgctggattgaattgaagacctgggacctgctccatccctacagctcaaagacagctcagggtggacactcacagaggtcagagggagccgggccctgggagtcctaagcccagcccatgtgggtctggacaagtcactgcccttttcaggccttgatttcctcctctacatggaggaggatactgatttccagctttgtgcatgaaatatgaacatggcccaaaatcccagcaagaagaatgttaggtaagctctgggacaggacactctataccattcagaggaacgcctcagagacagagttaacgcctgatcctcgaaaccatgccatttgcaacagtgatgaacgcaacggtgcagaagacgtggccagctgtggctgtgacagtgcaccaggctggccactgctgacgcacgtgcaatgctgggcctcacttcaaaaccctttctttccaagtcactgagccctactgctgtgcgccaagggctgtgatatggaccaacggtgagcaaagctggcagggtgtctactctcctcacctccagccaagtgagagacacagacaaacagatgcagcatcacaaactctggaggaaagaaatgagtgtgtgtgtgggggccggggtgggggggcgctgacctagttaatgtggggtcagagaagtagggtcttctgaggatgcgatgtttctgctgagtcctaatgagctgaccaggcgcatggagtacaggagaagtgcactaggcaaaggatgcggcccgagcaagagccctgcagagagagctggcttggagcagatcaggaggcactgagtgggagggcagtagaggatggggctagagagatgggcagggcccagaccaggcatggccttattggccacagtggagatgttgggcttcattttcccctgtcatttgtgccatctgagtctcaaactagcccagcttcccatttcacagccagaaaactgaggcttggagtcattataaacaaacaaacaaacaaaaataacaactagccaaaagacaggcaaaaagcaagggatggagaattcagtcttgtcattcccaggtcagcgcttattacataaccgtgagcttcctccagctgcaatattaggagattctcttacagagaaatcggggggctgcccgccagatgatgggccctgcctcctatcggtgcctgaccagtgcgtggaagacagccagtgtcccttgaccaggaagtgctgctacagagcttgcttccgccagtgtgtccccagggtctctggtaaatgcctcccctccaccttgctgaccatccaagccccaagcttcagggccagtgggcaaggacggagctcacccagttccctgtgttgcagtgaagctgggcagctgcccagaggaccaactgcgctgcctcagccccatgaaccacctgtgtcacaaggactcagactgctcgggcaaaaagcgatgctgccacagcgcctgcgggcgggattgccgggatcctgccagaggtacggctcctgggtgcccagggcaggtgcctcccctctccgagcccagctctaatactttcttcattgctacaagcttaacaggatgcctccccagaagtcaggacctcccatggccaggattaggaaactggataggggttggaggagtcctgctaggatgacagaggacccgggagtccttggttctcttcttgagcttgctgtggcacctggatgacagccctaaactgctctgggcttctgtttgcccttttgaagggggcagaggaatcctgccttggtggcaaccagagctgagctggtggggcatggatgggagaccaaggccagaaaccagagccctattatgggaaggaattaaccctttctttctccctcctcaggctaattctgatttaggatctgtggctctgcacctaagctggggaccaacggaaagagttcacgatgggaggcctggggccctgcccgctggacagcactatctctaccagcggtggttccagccttctgataatcactggcctgctgacacttccctgcaacccatccacccctggtttctcctcctgggagtcaaagtccatagcctgagctcggaggaaggcctctgtatcaccccagtactctgcaccactgccatacgagcttcccacccttcctaacgctttcacaccaatccgtacatgctgcttcctccaccaaaaatgcccaattcaggcagaccctgacctctccctcaggcagcccaaccatccagaatgaatattcttgcagagttttccaaacatcagtcattcacctctttcatgattttcaccatacctacaaaatagcaccatgataggttgcacgctgcctgtaccaccatttacttaatgttttctttaaatggctcacttttgtatataaataaattcatttcaaaagaaaa

SEQ ID NO: 9940 - DNA, 196 bp, Homo sapiens
ctcacgcctgtcataccagcactttgggaggctgaggcaggcggatcacgaggtcaggagatggagaccatcctggctaacacggtgaaaccctgtctctactaaaaatacaaaaaattaactgggcgtgatggcgggcgcctgtagtcccagctactcgggaggctaaggcaggagaatgtcgtgaacccaggag

SEQ ID NO: 9941 - DNA, 1196 bp, Homo sapiens
gttggaccaagtggaaatctgagtctacttttatgagagtaggtagatgggtgtttaaatgatattttctaaaatatctttcttcagacatctttttggtcagcaatttttaaaagagatgccgtgaactggaagtacttggcacatgggcaatcatttggaaaagaacaaaatagtactggaacatgggggtaaaataggtttcaattttttaacataaaatatccatcataatccacataataagcaaaatctttcaaaggagcttaacttagaaaaaatactttttttaaagctaaaaacatagtgaaatatatttttgatttaaagcttgtaacagcatgccactcaagtcattgaaggaacacagaagtcacattagggacagaggctgtgatccattgtggggtaaacagttccttatattgttgttatttatattatgcaaatctgtttcttatatagaaataagaccaaaatttaatttataagccaatcctgcagattttgggggaaaattaaccttacaaggcctgtggaaagccactgaagtgttcatttcacttattttaagattttattataagagcaaaaaaacaaggacatatatagtttgttgccattaattgcttagtttttggatattaacacagtctattaactcagtaaaaaccagaatatagttaatgttattctttgttttaaaggatattattagtgaagacttgggttatgtttgaattttgaatctttttctttcttcttgctacagttgtctcaggctttgaaccattgctgagggagatttccttttaagtttgaagagcttgtaagcatccgaggagacaacttctgggtcacttagtggctgagcaaggcctattcctagactctgattgttgacttggggcttctaaccttgtgttggggccggttttgggagcacagaggtggggttagataggctgcaggagccaccagcctgcctgcgctcgctctggcaggatgactgatgccaggaggatgggaatgaggactagtgaccttcctctctctgttccctttttctcccttgggggaaaaactagtatagtaaaagctcagcactcgttttgaatataggtgtaatttgctgcgttaacagtttcagtttattgtgtgttttggtggcgttattcctgaaagcttcttaaaat

SEQ ID NO: 9942 - DNA, 1196 bp, Homo sapiens
gttggaccaagtggaaatctgagtctacttttatgagagtaggtagatgggtgtttaaatgatattttctaaaatatctttcttcagacatctttttggtcagcaatttttaaaagagatgccgtgaactggaagtacttggcacatgggcaatcatttggaaaagaacaaaatagtactggaacatgggggtaaaataggtttcaattttttaacataaaatatccatcataatccacatagtaagcaaaatctttcaaaggagcttaacttagaaaaaatactttttttaaagctaaaaacatagtgaaatatatttttgatttaaagcttgtaacagcatgccactcaagtcattgaaggaacacagaagtcacattagggacagaggctgtgatccattgtggggtaaacagttccttatattgttgttatttatattatgcaaatctgtttcttatatagaaataagaccaaaatttaatttataagccaatcctgcagattttgggggaaaattaaccttacaaggcctgtggaaagccactgaagtgttcatttcacttattttaagattttattataagagcaaaaaaacaaggacatatatagtttgttgccattaattgcttagtttttggatattaacacagtctattaactcagtaaaaaccagaatatagttaatgttattctttgttttaaaggatattattagtgaagacttgggttatgtttgaattttgaatctttttctttcttcttgctacagttgtctcaggctttgaaccattgctgagggagatttccttttaagtttgaagagcttgtaagcatccgaggagacaacttctgggtcacttagtggctgagcaaggcctattcctagactctgattgttgacttggggcttctaaccttgtgttggggccggttttgggagcacagaggtggggttagataggctgcaggagccaccagcctgcctgcgctcgctctggcaggatgactgatgccaggaggatgggaatgaggactagtgaccttcctctctctgttccctttttctcccttgggggaaaaactagtatagtaaaagctcagcactcgttttgaatataggtgtaatttgctgcgttaacagtttcagtttattgtgtgttttggtggcgttattcctgaaagcttcttaaaat

SEQ ID NO: 9943 - DNA, 1196 bp, Homo sapiens; identical to SEQ ID NO: 9941

SEQ ID NO: 9944 - DNA, 1196 bp, Homo sapiens; identical to SEQ ID NO: 9941

SEQ ID NO: 9945 - DNA, 379 bp, Homo sapiens
gggaggggtgtgtttcaagctgtgattctagtgttgtgaggcttaggagaagatgttgataaaagtgtctcagaggaagtctggaagaatgaggaagactttgctggtgagagaagaagtgatcctgggatagggccagttccttgttagtgaaaatagaggggatgcccattcctgagagatactgaagtagacaatgaggtcagttaacagtcaaggtcatttagatggagcatattaattatggtgggaactggtgatttatattgcctttgcctcagtgattaaaaatgaaatgaggttatttattgttcaatatcatttaaaacagaaaatagtactagtttagcagttaacttctagcagtagatcacttggt

SEQ ID NO: 9946 - DNA, 379 bp, Homo sapiens; identical to SEQ ID NO: 9945

SEQ ID NO: 9947 - DNA, 379 bp, Homo sapiens; identical to SEQ ID NO: 9945

SEQ ID NO: 9948 - DNA, 379 bp, Homo sapiens; identical to SEQ ID NO: 9945

SEQ ID NO: 9949 - DNA, 3894 bp, Homo sapiens
tcttcctctcaggctccgagacggccccagcagcgtccaccgctgtccatatgccaggagggtggctgggcaggctgctgtctaggccaggctaacccctgcggtgggcgtgggtgtcaccagggccgatggcgcttgtgcagaaacccacgtctctgagctgccagcagccaagctgtcctgatgacattcccgggtgggcgcacaagcctgcactgtccgtatagaatcggcccaggctgtgcagcaggggaacccggagcccggaccccgccacggaggccaggctgccgtgcaccatcctgggtgtcctcgtggtgctccgggcgcaggtggcagcagccatggaggagctggaccggcagaaggtggcttctccttcttagttggtggggctcctcctacacccccaacccctcaggctcagggaaggaggcctctcccggtgtggggagctcgtggggacgctggtgcccggctagacacttcctgttagcggcattttcttctccgctgagtctgtgccggctgctgggccagaggcacattagcaggcccagagaaggtagatgccggagacgaagattctttcctcccgaaaatggtagggtttttaaaagtctcagcggaagtcccggctctgggcgggttgctgagggcaggaggcccatcctctggcgtggttggcaggctggcgagctgcgctacccgagccacctgttctctggcgtttctcactccgccgcgccctgcgggctttcttttccaggcctctgctcctgggtcctgcctccgaggtcaggcagggcctgtggttcctcccgacatgtcgcagaagccctagggactgttccgcagctctagatggcccagtggggaggggctgccctgtgggcattgctgtctgatggcctgaaggcaccgcttggagggacacatgcctggggacagtgggctcacagatgtcttgctgctttgccaccgagcctcacagccatctgctgacctctcagagcccagcaggcccctgcccgggggttcgtggaatgcccctgggggtctcagacccactgctcagctcttggccaggctccgtatctctctagattggaggattctggagggaagtcggtgtggcctccgatcaaagcctggtgctgacggccccgaagcgggtggagggcttgttcctcaccttgagcgggagtaacctgaccgtgaaggttgcatataacaggtaagaggcctgggggctgctggagaggaagaggcatgcatggccggggactgggcgtgggttgctgcacccgctgcagcgtggggtctgggctgagtgccgtcccgctggtgggccagcactcccggtgcccgtctgcctgagccctcgacccccaggctcctggatctgcattttatcccaaatataagcatagtgttttaatgaagccccgtgaacttagaaggaaggaaaaggggtgtgggacaggtgactggctggagggaacagaatccccaggggaaggccccacctggcacattccccgcctcatcctgctccaggcctgggatactccacagtgctgcctgtgcccttcctaaagacacagccccactccgggaaggagcccagcaggcgggacacaggctagcattttaccgatgggcactttgctgcctttcagctcaggaagctgtgagatagagaagatcgtgggctcagaaatagacagtacgggaaaattcgcttttcctggtaagtgcagttgccctgtgatggcaggtggaacccggctgtgcacacagctaggccttattgttccccatgctgttccctgcactgttccccatgctgttccctgcactgttctctgtgctgttccctgcactgttccccatgctgttccctgaactattccctgtgctgttccccatgttgttccctgcactgctccctgcactgttccacatgctgtttcctgcactattccccatgctgttccctgcacttttctctgcgccattccccatgcgttccctgcactgttccctgcactgttccccatgctgttccctgcgctgttccccatgctgttccctgcactgttcctcatgctgttccctgcgctgttccacatgctgttccctgcgctgttccccatgctgttccctgcactgttccccatgctgttccctgcaatgctccctgcactgttccccgcactgctccctgcactgttccccatgctgtttcctgcactattccccatgctgttccctgcacttttctctgtgccgttccccatgcattccctgcactgttccctgcactgttccccatgctgttccctgcaatgctccctgcactgttccccgcactgctccctgcactattccccatgctgttccctgcacttttctctgtgccgttccccatgcattccctgcactgttccctgcactgttccccatgctgttccctgcactgttccccatgctgtttcctgcaccgttccccatgctgttccctgcagggttccctgcactgttccccatgctgttccctgcacatttcatgccccagaccttcccattctcccaccaacacactggatcatccttcaaaagcttctgtagtgtctccaaccactcaagtgctgggactgggtgggggcaggatggagttagaccctgcagaccctggccttcgaggtccgtccccctcagacgtctcccccaacgccatggccggctcttgaaggccacagagagatccacgtgctggacaccgactacgagggctacgccatcctgcgggtgtccctgatgtggcggggcaggaactttcgcgtcctcaagtactttagtaagcttggccctggggggctctgcccagctgctgctctcccagggactgcccgcccagcccccctgtgccccacagctcggagccttgaggacaaggaccggctggggttctggaagtttcgggagctgacagcagacactggtctctacctggcggcccggcctggtgagcccaggggccttggggtggaggctgggctgggccctgtgggctgactctgcagctcctcatgctggcctatcctgcagggcggtgtgccgagctcctgaaggaggtgagcctgacccccgaccctggcctgtgctgaagttcccgggcccctggcccagtccctggccctgtcaggagcccccgtggctccgcctcccggccctgggctgggccttctcaccccttcctgtgaacaggacaccaaacaccactggtgggcagctccagagatgagtctgtctcctggtttggaaagagctggaacctccagggtggtgaccctaggctgccaggcagggaccctgggaggctggggtcacggggtgcagagctgggtggggcaggggagcagaaatggcgccttttcttcggtgttctgtgcaggactgccggctgcttctgcccccgaaggtcccgtcggcggcggggcacagatcctgcgggcgctgcctcagggctcccatgttgggcactgcgagaacccagtgtctccctcacctcgctttgtcttggccctagaggctgggcctgttaccccattttgcagattgagaaggcgctcagggagctgggtgctttgcgcaaaaccaggcagcgaggacagaagtcccgccgtgtggccctcatcgaagccccgtggggcctccagagaccacacgggcctgagcccctgcacttctgtgtcgcaggagctgatttaatggagttcctgcctcagaccacaaggttcggagcgcccgcccacccctgcccctcctgggcaccctgcccaccaggtcacctgcacctgctctgaataaactgtgaagtcaagccac

SEQ ID NO: 9950 - DNA, 412 bp, Homo sapiens
ctcaccgttctggagggtggaagtccaagattaaggtgccggaaagtgcagtttctggtgagggcttcctgcccattcgcagaaggcagcccctcgctgtgtcctcacctggcagggagcgctctctgggtgcctctttttctcctaataaggacatcagcctgttaaattagggccactccctttgacctcacttaatctcgattgtctcctaagagtcccatctcctgaaacagtgaccatgggatctggggcttcaacgcaggaattttgggagggcagaattcatcccagaacaaaagtcagtgctgtttagagggtgacagtagatgcagggctgccgtcatcaacaacgtcctgcccaaaagtcactggacgtccaaagacacagaaaagtatgacctatgttaaa

SEQ ID NO: 9951 - DNA, 1367 bp, Homo sapiens
ttctacctgtattgtctgacttctcaggaagatcgtgaacataactgagggcatgagtctcactagcacatggaggcccttttggatttagagactgtaaattattaaatcggcaacagggcttctctttttagatgtagcactgaaatccttgctggagggaagagaggggatgaactcaagttttccacatcctgggacacctgtccctcttttcctaactgcctaagataacccatttcttccaaccatctgaggacagtcccgtcgtctcagaggccctgcaccggggagagactgggctctgcagcagccacatcagcattcacagcttcatgtggcttcactgtctgaaaatctaccgactccaacatggccccacggtgacaacagacctgtgacaggaagcccaaagctcacatagaaatggtggacagatcaaagtctctatagtaagggaaaaaaagagaggtggcaggcatgagccccctgcacccagtggctcgtgtccatactgagtccagaccctgatcaaggcctgacttagtgtcactggcagtcccactaaattacacttccttacactggcccgatgcgacaaatcaggtggctcccttctgtcacgtggagcacacagtgttttccatcatccatagctttcttcctgatggtgtttgcattattgcgccttcccaatctgcatgctgcgttgggcttgcggtgcctgaacaaggtttgctcccatgagctcaggcaccctaggatcccctgttagactattaggctgtccagcatggtctcctttcccttcttggtggtggtcttttccctttccagaatagaacagtgattcttaaaataagttagagcaggccgggcgcggtggctcatgcctgtaatcccagcactttgggaggccgaggtgggtggatcacgaggtcaggagttcaagaccagcctggccaagatgatgaaaccccgtctctattaaaaatacaaaaattagctgggcgtggtggcaggcacctgtaatcccagcttcctgggaggctgaggcaggagaatcacttgaacccggggggcagaggttgcagtgagccgagatcacgccactgaactccagcctgggcaacagagtgagactctgtctcaaaaaaaaaaaaaaaacaaaaacaaaaaagcaagatcatccactacacatgaacatgaatcacagtattatttgcacaggaagggtgtaacaaaatatgaatgtatcaaaaaatagaaataaagtctttgcagaaaaagtctgtttttctctgaagtgtgttgagattatctgacaactctaagattgtacttaaattgtcaataaagcatcaaaa

SEQ ID NO: 9952 - DNA, 1330 bp, Homo sapiens
ctgaaattgtccgaatttggccagtgtattatattaagtgatagcaaatggagagaaaagaagaaaatgaatcttgacgagtgagctgccatcatttctgtggcagtctttaccaatactgttaaatttctacccattggatttttcaggcttctaattattggtatgtatattatatgtggtgtttgtgtagccactcaggattttaaatttgctttggtttggtttttttcatgttgaattaggtgggaatgtttgaaataaacaagaagataagggaagggctcttttctttccttttaagttccaggatacatatgcagaacgtgcaggtttgttacttagggatacgtgtgccaaagtggtttgccgcacctgttgacccttcctctaacttccctcccctcgccccccacctctcagcaggccctggtgtgtgttgttcccctccctgtgtccatgtgttctcattgttcaactcccacctatgagtgagaacatgcagtgtttgtttttatttctatttgtggccatcttcttggatcccgtcagccaaactggtcttttctttttctgaatccgtgtagcagtttaactgtatgtctattaagattcctcagtgttgtagttacatgcgtgaacctctcttctctaccctgttagcctgttgactaccctgttcttgcttcctttttttacccgcactcaatgcatctagccaaaaatagctttgttgttgttgcagttgttcttaactgttctggctggctgaatcacatttagaatggctttaataataaggaaggcttcttgttgactttaatgaattcattcaagatataatgtgtatggtaggtacagatgtcacagtcttaaagagggttaaagaatatcactgctttgtatggtatagagcttgatggtgtatggccacactctgacaatatcctggaaggttctctggatttcttgctgtaattctttctagtttattgtctgtgtataattagacagtgctttctaagtagcaaaacttggttgtagatactgatgcagcttagcaaaaaatgttctatgatggcagttagtccaacttttatcttcttcagggccatcaggcctctgtaataattagaatccataaaaactggctatattctagactaatataaaagttttatgttcttcagtgatgtctcaagcacatcataaagcatcagtgatctttccaacaatgttcctttgtgccggtgatttgggtgatcggaaaagtttgccagtggaagaaccacttgctgccctgataaggaaccaatattactatatttca

SEQ ID NO: 9953 - DNA, 520 bp, Homo sapiens
cccagcaacatggatgaccctggagcacataatgttgagtaaaataaaccaggcacagaaagataaattctgcatggtctcacttatatgtggaagctttaaaagttgatctcataggagtagagagtagaatagtggttactagaggctggaaaagtgaagggaaatagccaaaggttggttaatggatacaacagcacagctagataggaagaataaattatagtgttctataacactgtggggtgactataatttacagtaattgattgtatacttgtaaatagccaaaagagcagcttttcagtgttctcaacacaggaagtaagtgtttgaggtaatggatatgccagttactgatctgatcattacacattgcatacatatcttaaaatagcacactacctcataaataggtacaattatttgtcaattaaaaatactaaaaagcaagaataatcacttaattagaaaatatattttttcctctatactagagtgtaagctcctttgggtcaag

SEQ ID NO: 9954 - DNA, 596 bp, Homo sapiens
gcatcaggggcagaccagaggacagagttacttacggaagagaaaatgcctgatcggaaggtcaaggatgggttcctgccatcacaggtccagaggcagctcaagtcttttccttgccctggcccttgaaacaaaggcgggttgctgggagggaggagatggagcagatgcatcgctgccatcacttctggctgagaactcttcacaaccccttgaacagcaagtcggtagcaccgtgctgagaagtctgggcatgccagggttgagcagaagcctgtgtggggtcacggtcgcaggttatgacaaggcagtgaacaccccacagctcacaaagcagaagtgcagttacataggccagtgagggtcccgtgacaggggtcaagaaagggattccgaggccaataagccctcctttctcttggcattttgggaatgccatctctgctgctccgtggtcccgcagagagctcggggctatgctgagccgaggcctcccagggtgcctgctgtgccttcactgtttcagtcagggacttgccagctatggaatgccattaaggtcacctttcccgggcctccaagaaccttgcaattat

SEQ ID NO: 9955 - DNA, 621 bp, Homo sapiens
tctccctccgtcctggaggaagggggcatcaggggcagaccagaggacagagttgacttacggagaggaaatgcctgatcgggagggtcaggatgggttcctgccatcacaggtccagaggcagctcaagtcttttccttgccctggcccttgaaacacaggcgggttgctgggagggaggagatggagcagatgcatcgctgccatcacttctggctgagaactcttcacaaccccttgaacagcaagtcggtagcaccgtgctgagaagtctgggcatgccagggttgagcagaagcctgtgtggggtcacggtcgcaggttatgacaaggcagtgaacaccccacagctcacaaagcagaagtgcagttacataggccagtgagggtcccgtgacaggggtcaagaaagggattccgaggccaataagccctcctttctcttggcattttgggaatgccatctctgctgctccgtggtcccgcagagagctcggggctatgctgagccaaggcctcccagggtgcctgctgtgccttcactgtttcagtcagggacttgccagctatggaatgccattaaggtcacctttcccgggcctccaagaaccttgcaattat

SEQ ID NO: 9956 - DNA, 618 bp, Homo sapiens
ccctccgtcctggagaaaggaggcatcaggggcagaccagaggacagagttgacttcgagaaaggaaatgcctgatcggaagggtcaggatgggttcctgccatcacaggtccagaggcagctcaagtcttttccttgccctggcccttgaacaaaaggcgggttgctgggagggaggatatggagcagatgcatcgctgccatcacttctggctgagaactcttcacaaccccttgaacagcaagtcggtagcaccgtgctgagaagtctgggcatgccagggttgagcagaagcctgtgtggggtcacggtcgcaggttatgacaaggcagtgaacaccccacagctcacaaagcagaagtgcagttacataggccagtgagggtcccgtgacaggggtcaagaaagggattccgaggccaataagccctcctttctcttggcattttgggaatgccatctctgctgctccgtggtcccgcagagagctcggggctatgctgagccgaggcctcccagggtgcctgctgtgccttcactgtttcagtcagggacttgccagctatggaatgccattaaggtcacctttcccgggcctccaagaaccttgcaattat

SEQ ID NO: 9957 - DNA, 185 bp, Homo sapiens
accccatctctactaaaaataacaaaaattagctgggcatggtggtgggcacctatagtcccagctactcggaaggctgaggcacgagagctgaacctgggaggcggaggttgcggagagctgagatcatgccatggcactctagcctgtgggcaaaagagcgaaactccgtctcaaaaaaaaaa

SEQ ID NO: 9958 - DNA, 358 bp, Homo sapiens
aagaacagcttcataagaccacagccccacctttgccaagaattaatgtcaacatgggataatagactgggtacaaactgtgaccccacaagatgtttaaagcatcccccactgactttattggcgggtctttgcctcccttatgggcattgtgcctgggaaggaggaaaggtggccgcttgtgtactgccctccactgctcctcctttcccctttgtgcggttgatgattaaccctcaaaagctgagtggctgggcacggtggctcacgcctataatcccagccctttgggaggccgaggcacgaggatcccttgagttcaggagttagagaccagcttggccaacatagtgagacc

SEQ ID NO: 9959 - DNA, 358 bp, Homo sapiens
aagaccagcttcataagaccacagccccacctttgccaagaattaatgtcaacatgggataatagactgggtacaaactgtgaccccacaagatgtttaaagcatcccccactgactttattggcgggtctttgcctcccttatgggcattgtgcctgggaaggaggaaaggtggccgcttgtgtactgccctccactgctcctcctttcccctttgtgcggttgatgattaaccctcaaaagctgagtggctgggcgcggtggctcacgcctataatcccagccctttgggaggccgaggcacgaggatcccttgagttcaggagttagagaccagcttggccaacatagtgagacc

SEQ ID NO: 9960 - DNA, 185 bp, Homo sapiens
accccatctctactaaaaatacaaaaattagctgggcatggtggtgggcacctatagtcccagctactcggaaggctgaggcacgagagctgaaccctgggaggcggaggttgcggaaagctgagatcatgccatggcactctaggcctgtgggcaaaagagcgaactcccgctaaaaaaaaaaa

SEQ ID NO: 9961 - DNA, 2695 bp, Homo sapiens
taaaaacaactcttaaggataaaacaaatttcagattaattatgaaaacaagaatgtggcagggcatggtggcctacacaagcaatcctaacactttaggaggccaaggtagaaggattgcttcagcccaggagttcaagaccagcctgggcaacacagtgagatcttgtctctacaaaaacaattttaaaaattagcctacatggcacaaacatcattttgtttgtacactacctatctgagataaatgacttgaaaatgtgatattatcagctggatcagtcatctgatatgagctataaacgtgcagcacaaatgtcactcagagactgaaaaatgagtaaaaatcaataatttcttagggaaaaaagactgcctagaatcttattaaaaaacattctgggggtctatcagttagaaatattttggttacactgacagataaccaaattcaaatgggcttagagcaaaaaatgggagggcataggggacacttacttgttcacataactggaaagctccaaggtcagttggtttcaggtaaggcttgatccagcagttcagcagtattactaaggacttgcctttacccatattcttccccatgcctgaatgtccaggtaagagtcattggtcattgtaaagatttgtccagcttccattcttcattcctaatctgagtttgttttccttttagagaataactccctagtgtgtttaatcttagtaagaaggtaattattccaggcaccagtttcatctctactgaaagggaaagaaacagatttcacctctccctttgcccttcccttcccttccccatccctaagtttatgagcagacatatgacttaagcttggtcaggtagatgctgtcttctggactttggatcttgacagagttccacgggatggaaggaacaggggcagccctgcagcatagcctttgctcctccccactgtcaaacctgctgtccatatctaatcaatcctggaagtcctacaagcatttccctttgcttaggttgcctatgtcctgctgtttgattgatagagcaacagagcctttgcaggaaagcccgtgcaaaggagaacctcccaccttgtgtccccagggcactaagtatcatatcttttgatgtgcccatatcgataaacattgtactactgacttagcaatctgtgttccccaccctactgagctctctaaaaacagagtacttagcttatgcttagcccagtgtctggtcaatattagatatttagaaaaatctgtgtgaatgaatgaatgaatgaatcactttagggagaaaggacatgcttgtattaaacagttcttaaatttaagtcatacattatcaagcacaaataataagggctctttacaaagtatcgaactgccataaggaacatttttaggctattttatgaggacttattctttgaggatctatatacctgtcaggatgaatcttggttcatccctgaaatttaatctgaaggcttcttcagtgcagattgctccctatctaataggggataaatatccattatgccaccaggaaatgcctctgacatttaaatgcatgccttatcctaactgaaataaaggatctcaattctccccagtttgcctgcagcaccactcccaggagccaagccctggcctggccaatgacaccacatgtgtagaaagatacactgggttttgcaggtgcgtcgggacgctctgaggaggggagggtaagacggtgacacgcactcctgccactcttacatcgaagcctgacccctgcactgtgtgatcacatacaggctcagcctcctgcaggggcacccgcattccagcctggcacggtgggcacccagcacctcccaggggagcagggcagtgcaccgagagtcgagatgctccagcaagggtgggcataaaccagggctggtcttcctctacccttctccttcccttcccctccgagtaatgtgtgtctagccattaggtgagacagaggatatgggtgtgtgcccagagcaggacactgccctgagtccagtggggaggtcgggagggagccccctcagggccaagggtggcagaggagcagggaggtcgctgtcatatgggggactgaccaaagaagtcaatctattaagcatcacagaagccaggtttcttgtcagaaaacggagttgaaaatatgaggagggagaaaactagaattatcccttcaggtggagttggaatctgacccacccatctgaactggtggttttctaggtggctggtgtgttcatttcctacagctgctgtaacaaattgccacaaactgcggggctgaagacaaattgattctcccacagttccagagcccagatgtcagaactcaaggtgttggcagggccgtaatccccaaaagctctaggggagatttccttccctgcccctttcagcttctagtggctccacaacactgagtcctcacatggtgacctcgagagaaaggaaaaaaaaaaaaaaaaggcaaagagggcctacgtagatagtactctccagccctgttacaagggcactcactaatacattcatgtgggcagagccatcgggacttatcacttcccaaaaggtcccacatcttaaaactgtcacattgggtcttaggtttcaacagatgaattttggagggacacatacattc

SEQ ID NO: 9962 - DNA, 427 bp, Homo sapiens
gaggcaccagcatggcctttggagctagaactgggcaccactcccatctctcccacttcccatgtgtcctctgcaccacatgcatcaacttcctagcccagctgaacaagagccagactttctagatttgaatcctgactctactacttcctagttatgtggtcttgggcaagttccatcagtttcctcatctataaaatgggaattgtagtagtttgtatacttcatagggatgtgtggcatgttgtaagtgcttatgaattatctgggcttgatttcccagctctttaaagagaatattacttgcaaggttgttgtgagacttgaccctccataaatagcagttatcatgattccatttgataatactttctatgatctaatcacaactttatgaaatagggaaagcatccctattttgttaaaa

SEQ ID NO: 9963 - DNA, 516 bp, Homo sapiens
caaggaggcagttgccagatcacatagggcatttcgggaaaaaatcctttgaaagtcattttataaaatctttgttagtctatggttcattatagacattttcccttaattggtgggcaaggacttgaaaaggtgaggcttgttggtggctgaccaacctgcctgatttgaggacgcactgatgagtcttcaggtttctgcatctttagcacagtcatttatagctcatatacatatatatgtatatatgtgtacatatacatatatgtacatacatatgtatgtatatatatacacacacatatatattttatatttgaattcggtttcaaatagttttgtattttacattaggtatgtttggagaattatgctgcaacaaatatacataaattatttggaaacagaaatatctttaaattgggttttcttaatgaaggctccttaaaaagaataaaattattttctttatgtttcaccattctatataataaacctttacctgtttcaatggta

SEQ ID NO: 9964 - DNA, 1152 bp, Homo sapiens
aaagtgtgtgagttgtgtggttctgagatctgaacaggcaccatctggtgacactaggggctgaaggagctcggtggctgcaggtggactggagctcaccatcaggaagtagccagattctcacccctcagtgtcaccgagtgttctggctttagaggaaggactccgtggtccccaagccacaaggtgtcgaggtctgagtctcaacgccatgactcagtgtgaattaacttagcaggtatcacaacatcagatttgggttgtggttccctgctgggtctgtactttagattgatgacaaagcccgtcctcagccttatttcagcccagatctcggtatttatgccacagatactgttgagctcctctgggtgcgtgctgaccctgaggtcacacagatgagccaggagtggccctggctttcaggaaacgtagtgacgtaaaaggtcccggctgctgcgggataagggccagggcagaggtgtgaacgcagccgtggaagacttgggccaggaagccatttgttctgctgctaacacttccacagctccacgtgtccagactgttgccagagacgtctttggtctacaggattcaggagggaatctgaactttagcctggagcattatcaactcatagatgagtctgaaacaaacttagtgaaatctgatgttttttgtagttttccagtacagtttttcccatcgctggaatcctggtttggttctgcgggaatcgagtgcttgagtgggacccagacagacaggaagggcgctcctgctcagttagccccagtaagctcactgaggcacacaggccccatgtccacagccgctcctggctgaggcgtggttcctaagacgacccttactgttgagggctgccaggagggagagacacattcagccccgcaggtcctctgggaatccggtgagcgtcggcaccgggctggggccgtgctgattcccggcagcgtgtgggaatgtgcgggtgcctcgtggcctgctgacatcgcacacaggtcacagcctgtccagttcaggacatcagggccaagagtgaagtgagaatacggaggcacctctgtgtgctcaccctgctgaccgtcacccagcctccggggggggtcacagctggcccccaggaagctg

SEQ ID NO: 9965 - DNA, 150 bp, Homo sapiens
atccaggacctgagcagaaggcacgacgtcctttctgaccaaacctcagaagtcacactgaggctctcaccttctccttcaggttacaccatgtgagagtcaatcacgtggggatgtgagctccaggacacaggggagaggaccactggg

SEQ ID NO: 9966 - DNA, 20907 bp, Homo sapiens
  SITE (4477): n equals a,t,g, or c
  SITE (4480): n equals a,t,g, or c
  SITE (4483): n equals a,t,g, or c
tcggactgcgcggaacatggcgttctggggttggcgcgccgcggcagccctccggctgtggggccgggtagttgaacgggtcgaggccgggggaggcgtggggccgtttcaggcctgcggctgtcggctggtgcttggcggcagggacgatgtgagtgcggggctgagaggcagccatggggcccgcggtgagcccttggacccggcgcgccccttgcagaggcctcccagacccgaggtgcccagggcattccggaggcagccgagggcagcagctcccagtttcttcttttcgaggtattttgggcaaggacaagcacttcttgcgtgttcgttgtcgacacctcgcccactctttctcaccttgccgtgtttcctttgcggcatgtctgggagtttacgtgcgttccaacaccggggcctccgtctttatgctgatctgtggacgtcccttatgggggttttgtcgtttatttcaccattccctcattgaaatacgttctaacctttagttattgtgcatcatgctgtggtgaataaccttgttggcacctcactgtttgcataaattcctagtactgggattgctaggtccaaaagtatatgcatttaacgctttaatgatccctcataaatgttgtgcggttaatactcccactggcatgtgatcgtacccgtctccatagtaattgcatctaagaactgaggctacataggaaaaaatcttaaggtccatggttgttaggtatcagatgccctataatggatgaatatttaagtaaataatggcacattgacttgctgtctgacacaactgctgaaaatgttggtgaaaagtgagtctcgaagtggtagctcacacttgtaataccagcactttcggaggctgagacggggatcgctcgaggccaggagttcaagagcagcctgggcaacataacgagacccccatctctaccaaaaatttaaaaattagccgggcatggtggcgcaagcctgttgtcccagttactcctgagactaaggcaagaagatcccttgagtccaggagttcaaggctgcagtgagctatgattgagccactgcactccagcctggtgacagagcaagactcttatctacctgtgagaaaaaaaaagaaaaaagtttaatagatcctgaagagttggccgggcgcggtagctcacgcttgtaatcccagcactttgggaggatgagacgggtggataacgaggtcaggagttcgagaccagctgggccaacatggtgaaaccccatttctactgaaattacaaaaattagccgggcgtggtggcgggcgcctgtaatcctagctactcaggaggcggaggcaggagaatcacttgaacccggaaggcagaggttgcagtgagccgagatggcaccattgcactccagcccgggcgaaagagcaaaaactccgtctcaaaaaaaaacaaagatcccgaagagtcagtcgttcatccaagaagccctgactgagctcttattctgtgccagactctgttctaggtgctatggatggagcagggaccaggacttacaaacatgtggagcgcattctaatatctgtgatactctgcaaaactgttaaaacaaatccttgcggccgggcgcggtggctcacgcctgtaattccagcactttggaaggccgagacgggcggatcacgaggtcaggagatcgagaccatcctggctaacacagtgaaaccccgtctttactaaaaatacaaggaaattagccaggcgtggtggcgggtgcctgtagtcccagctactcgggaggctgaggcaggagaatggcgtgaacctgggaggcggagcttgcagtgagccgagatcgcgacactgcactccagcctgggcaaaagagcgagactccgtctcaaaaaaaaaaaaaacaaaacaaaacaaaacaaaaatccttgctaccactggccctaaagcaggaggcatagggctgcgtgtgaggagtagtccattgcatgggcttcttccagtttggctttggatttttgagctctctgaatttgttgtttgtgtcctttgcacagtgtccctcccaagttgcacctgtgcctgcccctcagggtcccccactcccagtgaatttcacaccatgcagcatgtactttaagccatacatcttacgtatgttccagacatttggtaaaacgccgtttatgtgtttttcagtgactcacaaacattttatttacgtagatgaggaatgtactcaggcacccttcgtgataccttgccctcagcaggcactcaacagcaataataactttcattccttttgtgcttctcttaacagttcgtgtttagtaggagcacagtagctgtttggggaacgaccttaagtgaatagatgtctgaaatgctgtgtgaagtggggcgcttaataggtggtgagatggttttagaaccagggttttccctctttgcttcttgactccttaaccagttttcattaggagacccctttggaggtttgcagtcagtcagagttgagtgcctactgagtgtactgaattatgaaatgagcacagttcccattaacctgaattttttgctcccaagtaagtcttgatttctgatttatgactgctttttgttgtaccccaatagtcgtctaagaaaggtgattattttgagaggcctggggagacacacatgctcattctcgagggtggcggtggtgcagagggcagagccatgctcgttcttgctatcctgagattggttgctatctgtttcctttgctgctgtgtttttttctgtcagtattaaaggtggaagaaggtccatatctttttctgtgggtgcttcaagtgttgttggaagtggaggcagcagtgacaaggggaagctttccctgcaggatgtagctgagctgattcgggccagagcctgccagagggtggtggtcatggtgggggccggcatcagcacacccagtggcattccagacttcaggtactgcccacagtcccacctgccttctgcgctcccctcacctgactcctgccctccccactgcccagtttattccacttccctgtcctcttccaaaggcctcagagcctttcttctctccctgcagatcgccggggagtggcctgtacagcaacctccagcagtacgatctcccgtaccccgaggccatttttgaactcccattcttctttcacaaccccaagccctttttcactttggccaaggagctgtaccctggaaactacaagcccaacgtcactcattactttctcgggctgcttcatgacaaggggctgcttctgcggctctacacgcagaacatcgatgggcttgagagaggtgagccttctgtgagtcgcacacattctttttctcccacggaggctcgggtgcctgtttctccccagggaggctcgggtgcctgtttctcacaggggatgctcgggtgcctgtttctggggacggccgaaacctatcgcttatgcttcttccttgggactttttttgagccaactagttagggctttgttcccaaggaaaatgtcctctgggtgtttaaaggccactgcttgttctcctgcatacctgcagagctgtgtattttgggcagaagttgacattgttttgccaatctggtgtgatgatctctttttttcttctctcttttaagaagtgtattatggaatttttttgagcacacacaaagagagcaatgtaacgaaccgtcctgtcctcatcaccagcacacagccagttcttcctgcgtcctcaccaccttcttccaaatccccagattattttgaagcaaatctctcacatcatgaatttaatatagaaataatctataaacacatgaatggatagctctagagaatactttaaaaacaactccggccgggtgccagattacaggtgtgggatcacacctgtaatcccagcattttgggaggccgaggcaggtagatcacctgaggtcgggagttcgagaccagcctggccaacgtggcaaaaccccgtctctactaaaaatacaaaaaattagccaggcgtggtggtgtgtgcctgtaatcccaggtactcgggaggctgagacaggagaatctcttgaacccagcaggcggaggttgcagtgagccgagatcgtgccacttcactccagcctgggcgacagagggagattctgtctcaaaaaaataaataaaaataaaaataattaaaaaataagaacaactctgatagtgattcacactgaagaatcactagtaattccttaatatggtcacacttagtctgtggtgatttcttgaccgtatccatatggtgcccaaaccagcgattcacaggttgtgccaacttctggccgtgcacctaacggaagcacttggtggggccttttccttacgtgcagtgatgcagacaggtgctgggacagtcagctctccgggagccangancantctcctggctcccgggagagactgctgatgtgttgtcagttaaaaagaggtggcaccttggctccaggaatgtgtttccttgccagaaggatcccctgacttggaaccacagaggcagcagtggatgccccatgttggtgggctcttctcccagagtgcagcagggcaggccttgtgggaaggtgggagctcctggctgtgagattcagcactgctgagttagggcagcgacagggacttgggaagcctcctgcagctgggaccctggctgtgccaccgcagcctttcagaaccagttaatactaacacaactttcataagaagtcactttttgtctgtttctaccaagcaattcttttggaatttatgatatttatatcctcattttaacttggtatctgtagaatagaagatatgttcctggatattagatataaatttttgagacagggtcttggctctgttgcccagctagagtgcagtggcatgatcatagctcactatagcctgaactcttgggccgaagtgatccttttgcctcagcctctggaatagctgggactacaggcatgcactaccatgcctggctaattaaaaaaattttttaagacaagtctcactatgttgctgaggctggtctcaaactcctggcctcaagtgatcctcctgccttggccttccaaagcactgggattacaggcatgagccactgcacccagcctggtattaggtgtaattttttttttttttttttgagacagaatctcgctctcttacccaaactggagtgcggtggcacgacctcagctcactgcaacttccacctcccgggttcaagcgattctcctgtctcagcctccccgagtagctggcactacaggtgcctgccaccacatctggctaatttttgtatttttagtagaggtacggtttcaccatgatggccaggccggtcttgaactcctagcctcaaatgatctgcccacctcggcctcccaaagtgctgggattacaggcgtgggccactgtgcccggctggatataattttatttgagcttttatcaaatggtttttcgtactgagttttgacaggctttgttttaaccgtgatttggctccagctaggcgcccctttgctcccctgccttattctggttgatggcgcatgtaggtgatacgggcatgaaaaccaggcttgaggacatcacaaccccaaggggctgtgcctccttccaggagtcctgccaagcccagaagttgtgctcttggccttgcgtgctcatctcggaggcggcagcaacacttcgctttggcttgaatttcagtgtcgggcatccctgcctcaaagctggttgaagctcatggaaccttggctctgccaactgcacagtctgccaaagacccttcccaggggaggacattcgggtgagttatcctgctgttggttgtccttctgcagttagatgttggggtgatctggaaaagtagtattttattagcattgtctcaaaaggacagttgaacaataatagtgtgaaacattttatttgtaaattagaaaatcaatacatgcttgtaaaaaaatttaagacaatatagaaatatgtagggaaaatgaatctcccttcagccaattccagctgcccacttttttttttttttttttttgagattgagtctcactctgtcgcccaggctggagtgcagtgggcgatctcggctcactgcaacctccgtctcccgggttcaaggaattcttctgcctcagcctcctaagtagctgggattacaggcgtgagccaccacgcccggcaatcagatggccttttgtgccgagcttatttcctgaaaatgtttctcgctccttcgccttgtagcttgtgttagtatttcatcctgttttatggctaaatgttccactgatgtatgcaccacagttggtttgtttgtacatggatgggtgtttgggttgtcccacctttctgctcttgtgtatagttctgctgtggagcatatgcaagtattcgtttgagagtccttgttttttattcttttgagtatgatacctacaagtattgctgggtaactccacgtttagctatatttatttatttattttttgagacacagtcttacactgtcacccaggctggagtgcaatggcgcgatttcggctcaatacaacctctgcctcccgggttcaagcgattctcctgcctcagcctcctgagaagctgggattacaggtgcctgccaccatgcccagctaatgttttttgtatttctagtagagatggggtttcaccatgttggccaggctgctcttgcattcctgacctcaggtggttcacccgcctcggcctcccaaagtgctaagattacaggcgtgagccaccatgccctgcccatgtttaacttttttgtttgtttgttttgagacggagtctagctcttatcaccaggctggagtgcagtggcgcaatctcggctcactgtaccatccgcctcctgggttcaagcgattctcctgcctcagcttcctgagtagctgggactacaggcacacaccaccacgcccggctaatttttgtattttagtagagacggggtttcaccatgttggccaggatgtctcgatctcttgacctcgtgatccgcctgcctctttctcccaaagtgtgggattacaggcgagagccactgcgcccggcccgttttaactttttgaggaacgaatatactgttatctgcagaagctggaccattttacattccaccaacagtgggcaaaggtttcatcttttccacatcccaacacttactttccattttttaattacagctatcccagtgggtgggagctgtacaccccactgtagcactgattggcattttcctaatgattcatgatatcaaacatctttccatgtgctttttggccatttgtatatctttggagattgaagtcctttgcgcattgtttaattgtgttgtcttttttattgttaagagagtcctttatatattctggaagctagatccttatcagagacatgatttgcaaatattttctgtcattctgtaggttgtcttttttactttgttgatgtcttttgatgcatagaagttttgattttgatgaaatctagtttgtctatttattttctcactcttttggaatcatatctgagaaatggtattgttttactcctgttttcttataagagttttatagtttaaagcttttacatttagttctttgatccattttgagttaatttttgtgtgcgctgtaaggtagggatccagcttcattttcttttatgtggatatgtaattgttccagcaccatttgtttaaaaaaactgtggtcttggcattgttgttgaaaatcagttggccataggtgtatgggttatttctagagtctcaattctattccattgttatctgtatatccttgtgcctgcactataatgttttggttactgtagctttgtagtaagttttgaaattaggaagtgtgagtccagcacatagtagaaacttgatatatacgtattattgttttggtcaactcattcattgaatgaccaatttattcaacaaatagtttagtctcctcagtgccaggccctttgctgggttctgtggatgtgaatagaaattaaaataaggtggagtcatccaacagttacaactgggtgccatacgaattttactataaatatgtactggacactacactgactcagctgtaggaacagagtaggctgggaagcacctttgagatgaggccgtctggatgtaagagtctgtttctggcagcagagacctggagtgtgggaggcctgcttgctctgttagggtttgaactgtatcctgacgatcatgggaggcattggaggatttttaggcaggaaaatgatgtgaagggatttgcatttaaaagagattatttgggactgggcacagtggctcacgcctgtaattccagcactttgggaggcctagacaggcgggtcacctgaggtgggaagcttgagagcagcctgccaaaatggtgaaatcccatctctactaaaaatacaaaaattagccaggtgtggtggtgcacctgtaatcccagctactcaggaggctgaggcagaagaattgcttgaaccagggaggcggaggttgctgtgagctgagattaggccattgcactccagcctgggaaacaagagcgaaactccatctcaaaaaaaaataataataataataattgtaggccttccttaagaaaaataaaataaaattctaggctgggcgcggtggctcctgcctgtaatcccagtactttgggaagctgaggcgggtggatcacctgagttaggagtttgagaccagcctggccaacatggtgaaaccccgtctctactaaaaatacaaagatgagccatttgtggtggcacccatctgtaatcccagctactcgggaggctgagacaggagaattgctggaacccaggaggcagaagttgtagtgaaccgagatcatgccactgcactccagcctgggtgacagagcgagatgccatctcaaaaaaataaaatataaaataaaattctaagccctgcaaccaactgaatggagccctccccttggtcaagggaaccccagagaaaccttggaagcttgagttcctggccgtagcaggagaggatgtcagacgcgcctcactgtacccctccctccccagccaccattaggcttcttcactaagggctaaacagaaaccagcccttttcaaagactctacactgctaatgtggattactggtttatcttcccatatacagattaaagacaagatgagattaatggttccttcacccttccctgagaggtctgcttagttctcttcctctgtttccttctatcttaggtaaaatgtacatttactgggcacttactgaagtctcacaagtacgtaaccactcacctcacagccaccctccctctttgaaagaccacatgtaattactaaacctcctgagaacctcttgggacagaaacaagcacagatgtgccgtgactcatgtttttcctgtgggcaccctcaggctggctcagtagccctcacttgcttgagatcctgaatctgcgggttggcgtctttcatggttgctggatcatactctgccgttatctcttcggatatgagttgcccctagcccactatctggcccctctctttagggacctctgattgaacatacattagaccttctctctcctgctgttcctgatcactcttctgtcctgtaattgctgcttcttgtgctgcattctgggtaatttcttctggtcttttttccagtttactaatattgtattctgttataaggtccttccattgagtgtttctttctttcttttttcccaaacagcaactcaaaacagacattgagttttaattttggttcctgtactttttatttctagaagttctatttggttatttttcaagtctgctacattattacataattttttaatagttttatatctttaatagatagttttttgttttgttttgttttgttttgttttttgagacagagtctcgctttgttgcccaggctggagtgcagtggtgcaatctcagctcacagcaacctccgcctcccaggttcaagtgattcccctgcctcagcctcccaagtagctgggattacaggcacgcatcaccacgcctggctaattttttgtgttttagtagagacagggtttcaccatgttggccaagacagtctcgatctcctgaccttgtgatctgcccacctcggcctcccaaagtcctgggattacagagctgagccactgcgcctggcctttgatagatatttcaagttcatcttttttttttgcttccttaatttttttttttgctataccccatgcctccaagataacagttttttctttttaatttaaatataatacagttttactgtgtatccaagaatatctgaaatctttcgtgggtctctttcttttgtcttttgtatctgttgctttttgctgggctgagcctgcttaaaacaagccccgttagctgtaaaggtttaccttagaaagtcaggtgtcttcctctgtaactctctcccttttccatctgctccaaggcatttatttatattaatcttgacgcaaagggaagttgtgtccacttcaccttggccagtaaggaagcagtgtttggcagatgttgttactcctaataatgccagccagtgagtgaagctgacctgaatgcctcccagggctgaggcaatggcatgatcaccgaagctcaaaccagagacagtttcacctttctgactgaatagtgttcggtgtaggccaaatgcctgcagactactgtttgaggactggtgtggtctaccaggtgtttccttagcgcctggatgtctctggctgccatcccagggatagagcatggtgttagatacgctagatgcctgccgaagtaattatgggtgaaacatatgatgtccaagatttgcttttaaaggctccaatacctcctcccagattccggagggctgtgaaacaattagctatgaaaactggtaattcctgaagctgggtacatgggggttcatgatccctctctcaccttttttgggggagaatgtttgagactttaataagaacttgttgccttttccttttacagggtgttgcaggcatcttcctcaggcctgttttctctgttttccaggctgacgtgatggcagacagggttccccgctgcccggtctgcaccggcgttgtgaagcccgacattgtgttctttggggagccgctgccccagaggttcttgctgcatgtggttgatttccccatggcagatctgctgctcatccttgggaactccctggaggtttgtcagcaggcctgtgcagggaggaggctggagggcaggggaagggaggggtacaggagtcatctcatgggctgtcggcaggcctgtgcagggaggaggctggagggcaggagaagggaggggtacaggagtcatctcatgggcccttccagggctggtgccactttgggaaggtgaatggattcagctggggttccaggctgagggagcagcagcctgtgcaggagacaggaaggtgggaagctgctgggctttggaggtggtataggtgtgggtggggcacacgtgtgaggagaagggagaaggatgggggtgtgggggagagatggaggggcagggcatcccaggtcagatcaggaatactgatgttgcagtgggaggagtgataaatccacagagactggcccggggacgtagctgcacccttggggtcagggaggcctttggggagtggagagtggagcaagcagtgccaggaggctggtcctggagaaggtggagctgtggtcgcctgagggatggcgaggagggggactggactcgcagtctgtgatgttttggggacgtgagaaggaggcgtctggcttggtctgtaaggtcagggcacttgctggtgaggcgtgatttgggagggaggatgcccagctcggttctgtgcgtgtctgaggtgtcgggaaacatgccctggatgtgttcaagcagctgttctgcgtctgcgtctgcagctcaggaaattcctaaaagctgtgatgagagcaagaaatgagaccatgaagtcagtgtgtgcgtgactggatgtaggcaccgagggcagaagggccagaaagacctgtgctcagaggggcccagggcagccacaggggcccagagcatgtgtttgttcaggcattcattgtgtgctgggccctgctccagtgctttggacatacacggtcagatgtcagtgtaagaagttatatagtttgttaggagatgattgatgttatgagaaagataacaagtaggatagaaaggctagaagggttgggacccagctgcagtgtcagttcaggcaggtggagttggatctaagagtttaccgaggtgaggaggttttgcaggggaacattgcacaggtgacaagcagcaaggagggtggggcgaagtcagcattgatgcccacggggctggagcagagaagaaggtggggcacaagtgtcatctcatgggaggctggcgccacttcagaaggtgaatgggttcagcttggtttccaggccagagtctgaagttgagaggactccgttgggtgctgggctgtgagcccaccgtgggggcaagactgggagcagcagacccagcagggcccttgtaggtaatcaccggctggcactggctgggggccaggtaaagccagcagaggctgaggggtgctggagtctgggtgtgtgtgaacgcagagtgggtacgctggcacagtgcatgggaggccgtggattcccaaggaccccagggctgtggctggagcagctggaaagacggagccgccgcttcctgagatggagaagcttggtaggtgggtttgggggagctcaggaattcagccttgtttccacggatttgaggatgtgctgcggactggaggtgttgagcaggtggacatgagtctggagtccaggaaggcccagaggcaggagctggggtgctggagtgagcagacaggagagcccagggtgtggacagacatgagaatgccatgctaggcataggatggagggacagacacaggaggagcagtcagaggggccatggtggtcagcacagtgtgggctgagaccagctgaccgtgctggccaccaggtgtggacacttgggccaccagaccatctttattgttgaagtgaaatgaaaatggcctttttcctgattataagtgtatcatgtgtgtctttgaaaagattcgtacattatataaagatataaagcaaaggatctactttttaatcccaccaactgttagcattttattctgtgtcctctcagctttcttttttttgtacaaatgcatacgtacagatggtaattttaaactaaaagttggacagcactgtacattctattctgcagcctgctgttttcacgtaacaatgtgagtccatggagatgtgctgcgttgttaatgccaacagtttcccttacacggatatgaggtcccaactgagaaacccatgtctgtaaggctggtgccatcatgaactgaatgagctggtgtcacgcacagactctatctcacgtgctttgtggacgaaatgttaatgtgtttgactgtggagtaccactccagatcccctttaggtgtgacataacgtgggatgtaaaccatatgatcttttctaaaatctcaaaaattctgaaacatattcagccacaagagctttaacatagattttgtggatttaatacaaaatttatgtaagcaatttcttactgatggacaatgataataaatagtatataatttttacattaaaagtaatgctgggccaggcaccgtggctcacacctgttatcccagcactgtgggagccaaggcaggaagattgcctgaagctaggcatttgagaccagactgggcagtatagtcagacctcgtctctacaaaaaataaaaagatagccaggcatggtctgtgtagttgcagctatttgagaggctgaggaaggaggattgcttgagcccaggaatttgaggttatggtgaactatgatcatgccactgcattccagcctgggtaacagaatgagatcccgtgctgtagtgaatatccctgtgtatcatccttatctactcatgcaagtactcctgaagggtaaatgctgtagtgaatatccctgtgtatcatccttatctacccatgcaagtactctggaagggtaaatgctgataaatactgagaacttgccttccggtgaatatccctgtgtgtcatccttatctacccatgcaagtactcctgaagggtaaatgctgtggtgaatatccctgtgtatcatccttatctacccatgcaagtactctggaagggtaaatgctgataaatactgagaacttgccttccggtgaatatccctgtgtgtcatccttatctacccatgcaagtactcctgaagggtaaatgctgtggtgaatatccctgtgtatcatccttatctacccatgcaagaactcctgaagggtaaatgctgataaatattgagaacttgccttccagaaagatgtaacaattacactgccacaaactgtgtttttatgtagccattttatcacatcctcaccaaaaccaaaatcacacaaatcaaattggttaaaaaatgcatgtgtgtgtgtggaggggggtgcggattttgcctttctgtagtaaagaatgaagttcatcttttcatgtctattgccagttgtgtttcttctctttggattgtatatttgtacctcttgaccatttttcattgggtcattataaattagcaatataaattagttttaattttaatataaattaaataatataattacattttaatgttaatataaacttctttcttttttttttttttttttttgagacagagtcttgccctgtctcccaggctggaggttcagtggcgcgatctcggctcactgcaacctccacctcccaggctcaagccgttctcctgcctcaacctcccgagtagctcggattataggtgcgtgccaccacgcccagctaagttttgtatttttagtagagacgtggtttcactatgttggccaggctggtcttgaactcctgacctcagctgatctgcccgcctcggcctcccaaagtgctgggattataggtgtgaaccaccatgcccagctgttaatataaatttcattataaattagcattataaattagttcataaattatatgtttataaatgagtttatcaattagccatataaactattgtcatatgttgtaaatatttttgcagtttatgatgatgagaggtttttaaaaattttaaattttctacatagtagttttatgtagataccgagataatagtatttacatagtcagatctgtcattttcctttgccttatctgacttcagtttttgcgcctaaaacgttcttccctatccttacttgtaaatccttagttttcttcaagaactgttttgtttacattgaaacctttaatccatttgaattttttttcagtgggaggtaggaatggagtattttcctcccagataatgagccagttttaatgccatttattaatgtatccattttttaccttgttcctcttaaaagaagctttgagagctgtatgaagaagcctgatggcaccgagctaggcctctctagaggctgggcggggaagaccatggagagacgtaacagtaactcctgctcgggggcaccagctcgtctgggtgcccgatgctggtggtggctgtcacagcaagcagggctagccagaggagatggacgagtctgtgctgttgtccctctgtgtcatgctgggagacagcgaggtggggagggacagggagaacagaacgtgctcacaaagaggaggcagggaagttggatccctgatgagccttggaacggaggtggggaaaagcaaggatgtgtggaaacagcaagaagtgggagagagagagagaggcggaggggagaaaaccgtcacggaggccaagcggcaggagctcagctgaagaaatgagattggtggtgggttttccctatatcgcaggctctgactgccaatctgctgctcctccaatgcctcggtggctgtggcatgaaacatcctgaggggcttgtaaagtggacactgtgcccctcacgtttggcccatttttcaggtggagccttttgccagcttgaccgaggccgtgcggagctcagttccccgactgctcatcaaccgggacttggtggggcccttggcttggcatcctcgcagcagggacgtggcccagctgggggacgtggttcacggcgtggaaagcctagtggagcttctgggctggacagaagagatgcgggaccttgtgcagcgggaaactgggaaggtacagactgctgaggaggaccatccaaggggctgcccttctcactgctctagggtatggtccacctgatatggagccccgttggttaacacagtaacagtaatagctgatgatgctgtgaatcctgcaccaggcactacctggacctgactgggtgttactttcaatacctccatttagagatgaggaaacagatgctaacaggccaagcagggacacggtccagacactcagggctgatgagtctgtattcttaacagactataggcgttaccttcactccctaaaataaagcagccaacagtgtccctctaaggcctggtatgtgattctaagatgatacgggttaaagaactttgagaagctaaagttctctgcatctatgtgggatgaaggctacatgagtgatgcttttcggaagtaattggtatgagagccattgatcaattataatccgctgaggaaagccaaagagccttgatgctttctaagagatttcaaaccgcctataaacaagtgaagttacagaaaatgcagtttcccataagaatcatgtagcatgtgtagccttgatattaagggttttcaatgggaggtggtagcattaagcatttaaagtccagtgtcatgattacaggcaggtgtaacactgtccaaaggggatttcaccagtgtattagtctgttctctggctgctcataaaggcatacctgagactgggtaatttataaaggaaagaggtttaatggactcacagttccatatggctgtgggggcctcacaatcatagtggaaggcaaagcaggagcaaagtactgtcttacaaggtggcaggcaagaggacgtgtgcgggggaactgccctttataaaactatcagatcttgtgagacttattcactatcagaagaagagtgtgggaaagacccgcccccatgattcagttacttccacttggccccacccttgacacatggggatgattacaattcaaggtgagatttgggtggggacacagccaaaccatatcaactacaatatatcacagttgatgctcctcttgccttccaaggcagatatcttaggaaatcctgatcctttttccttgtccacagctgtggctgcctcatggctcagggccatggggtcagcactctcctcacctccaccagtccaagacctccaacctctggttgcaggctgattttttaccaatcatggtcacttcattatggaggcagggaacccagctaacaatgaggcttaaacgctgagaggcgagtgcctcctggccagctcacaaggcagcggagatcttagatcagcccagcaggcttttttgagggatccttttcctgctccaacttcatattttcttttttttgtaatggagtttcactcttgttgcccaagctggagtgcaatggcacgattttggctcactgcagccctgcctcctgggttcaagtgattctcctgcctcagcctcctgagcagctgggattacaggcatgtgccaccatgcctggctaatttctgtacttttattagagatgggatttcatcatgttagtcaggctggtctcaaactcctgacctcgggtgatccacctgcctcagcctcccaaagtgctgggattataggcatgagccagcaggcccggcccaacttcctgttttcatagaaaagcaggttgtaactctggtagctcctgtggagttttggaagtggcttaataggatttgaactgtataatctagtttcagagaaatgtatgtaaaatgggttatgatttcattttctgttttttacagcattactatccaaggggttacttttccaaatagtgaatgcttttaagcacatgagcatcagtacatattgatttgggtactttaagacccatagaatgaggctctccatttagccaccctgttctgcccaggcctgctgggatcctcttagcccagcacagcagcagcagtatttgcagaaagcagcttgttttgtgaaatattttgcatgtctgcagctagagctgtttgaacagagatctgctggcctgcctgggtgtgtaaacagatagctgataccctctgtcttctgtattccagcttgatggaccagacaaataggatgatggctgcccccacacaataaatggtaacataggagacatccacatcccaattctgacaagacctcatgcctgaagacagcttgggcaggtgaaaccagaatatgtgaactgagtggacacccgaggctgccactggaatgtcttctcaggccatgagctgcagtgactggtagggctgtgtttacagtcagggccaccccgtcacatatacaaaggagctgcctgcctgtttgctgtgttgaactcttcactctgctgaagctcctaatggaaaaagctttcttctgactgtgaccctcttgaactgaatcagaccaactggaatcccagaccgagtctgctttctgtgcctagttgaacggcaagctcggcatctgttggttacaagatccagacttgggccgagcggtccccagccctcttcatgttccgaagtgtagtcttgaggccctggtgccgcacttctagcatgttggtctcctttagtggggctatttttaatgagagaaaatctgttctttccagcatgaaatacatttagtctcctcaaagggactgcaggtgttgacatgagttggaaagggaaccctgggatacgtggcgtcccctctattggaacagtctgaggactgaaggcatttgtccctggatttattggagacggcccagctcctccctctgaaggtggtcacattctgttgactctccatactcagcctctcctccagaaacagatctgttccagaacattccagcactttctatctggcctccttgtccccacactacgcccccccaccctcgccagggcttcctctagtgacactgttagagctaatctctgagacagggaaggcattactcacttaaaacccaggctgagtcctggccacctgctggattgtgacataggaggtggaatccactgaactgctacttctgcacaggctccttctcctggggctgtacccaggcccagccctgatggctcaccctgtcaggcaccagctgctccctcctgggctctcacccacctgcacatcctccttcctagcatcacattacctgcgtgtttccccagacaaaagcacttcccattcttgaaccttgcctaccctgggctgagctgacggcaatagatttaatgacagtgactcccaggaagggggtcctgtgactttgcgccttaataagaacaaaaggtggaattggtgacctaggaaaactgttgaattctaaaaagaatgaagttagtttctaaccctagttaatgttccttttttattttttgagtcttgccctgtcactcagggtggagtgcggtgttacgatctcagctcactgcaacttccgcctcccgggtttaagcgattctcctgggtagctgggattacaggtgtgtcccaccacacctagcacatgggcatatttgtaatagagacaaggttttgctatgttggccaggctggtctcgaactcctggcttcaagtgatccacccacctcggcctcccaaagtgctgggattacaggcatgagccactgtgcctggcccctttatttgataatttacacatacatttttgtccaaaactcttctttatttcaagatgatgtttctgtggctatgtgtggtatgtggtataaatctcaatctatggtcacacgaggggcattttccttgttgtaagtgtagtctaaaccagtaggaaggaggtttaattgccaaaaccagcgagaactcgggcactgtggatactacagtgggcagctgaacgaggaccaaggagaatgtctaagaggcctccagccctgcgctcagtgaagacaggacaggaacaacagagcatacataccttggaagggtgtgttctgatatactcgtatggaaagttctgacaggttttctccctgggaagtgcagcacataccccaacacactggctctgccagtgtgccaatcccagatggtgcttgttttgtgtgcacccacacccaaacccctgccctcccatatgctcttctgtgtgcccaggtaggccctgccctcaggcagcagcttctgaacacattcctcttggcgcagacaaaagaaagtacttcgtctgtggaattcgaggctgagcctgagttctagcacaagaagaccgttgcagtccagagatgagaaactggaccagaggcaaatcatgaacagaacgggagtcaagagaaggggtttctaagatggagaagtgggggcgggtgt

SEQ ID NO: 9967 - DNA, 19929 bp, Homo sapiens
tcggactgcgcggaacatggcgttctggggttggcgcgccgcggcagccctccggctgtggggccgggtagttgaacgggtcgaggccgggggaggcgtggggccgtttcaggcctgcggctgtcggctggtgcttggcggcagggacgatgtgagtgcggggctgagaggcagccatggggcccgcggtgagcccttggacccggcgcgccccttgcagaggcctcccagacccgaggtgcccagggcattccggaggcagccgagggcagcagctcccagtttcttcttttcgaggtattttgggcaaggacaagcacttcttgcgtgttcgttgtcgacacctcgcccactctttctcaccttgccgtgtttcctttgcggcatgtctgggagtttacgtgcgttccaacaccggggcctccgtctttatgctgatctgtggacgtcccttatgggggttttgtcgtttatttcaccattccctcattgaaatacgttctaacctttagttattgtgcatcatgctgtggtgaataaccttgttggcacctcactgtttgcataaattcctagtactgggattgctaggtccaaaagtatatgcatttaacgctttaatgatccctcataaatgttgtgcggttaatactcccactggcatgtgatcgtacccgtctccatagtaattgcatctaagaactgaggctacataggaaaaaatcttaaggtccatggttgttaggtatcagatgccctataatggatgaatatttaagtaaataatggcacattgacttgctgtctgacacaactgctgaaaatgttggtgaaaagtgagtctcgaagtggtagctcacacttgtaataccagcactttcggaggctgagacggggatcgctcgaggccaggagttcaagagcagcctgggcaacataacgagacccccatctctaccaaaaatttaaaaattagccgggcatggtggcgcaagcctgttgtcccagttactcctgagactaaggcaagaggatcccttgagtccaggagttcaaggctgcagtgagctatgattgagccactgcactccagcctgggtgacagagcaagactcttatctacctgtgggaaaaaaaaagaaaaaagtttaatagatcctgaagagttggccgggcgcggtagctcacgcctgtaatcccagcactttgggaggatgagacgggtggataacgaggtcaggagttcgagaccagctgggccaacatggtgaaaccccatttctactgaaattacaaaaattagccgggcgtggtggcgggcgcctgtaatcctagctactcaggaggcggaggcaggagaatcacttgaacccggaaggcagaggttgcagtgagccgagatggcaccattgcactccagcccgggcgaaagagcaaaaactccgtctcaaaaaaaaacaaagatcccgaagagtcagtcgttcatccaagaagccctgactgagctcttattctgtgccagactctgttctaggtgctatggatggagcagggaccaggacctacaaacacgtggagcgcattctaatatctgtgatactctgcaaaactgttaaaacaaatccttgcggccgggcgcggtggctcacgcctgtaattccagcactttggaaggccgagacgggcggatcacgaggtcaggagatcgagaccatcctggctaacacagtgaaaccccgtctttactaaaaatacaaggaaattagccaggcgtggtggcgggtgcctgtagtcccagctactcgggaggctgaggcaggagaatggcgtgaacctgggaggcggagcttgcagtgagccgagatcgcgacactgcactccagcctgggcaaaagagcgagactccgtctcaaaacaaaacaaaacaaaacaaaacaaaacaaaaatccttgctaccactggccctaaagcaggaggcatagggctgcgtgtgaggagtagtccattgcatgggcttcctccagtttggctttggatttttgagctctctgaatttgttgtttgtgtcctttgcacagtgtccctcccaggttgcacccgtgcctgcccctcagggtcccccactcccagtgaatttcacaccatgcagcatgtactttaagccatacatcttacgtatgttccagacatttggtaaaacgccgtttatgtgtttttcagtgactcacaaacattttatttacgtagatgaggaatgtactcaggcacccttcgtgataccttgccctcagcaggcactcaacagcaataataactttcattccttttgtgcttctcttaacagttcgtgtttagtaggagcacagtagctgtttggggaacgaccttaagtgaatagatgtctgaaatgctgtgtgaagtggggcgcttaataggtggtgagatggttttagaaccagggttttccctctttgcttcttgactccttaaccagttttcattaggagacccctttggaggtttgcagtcagtcagagttgagtgcctactgagtgtactgaattatgaaatgagcacagttcccattaacctgaattttttgctcccaagtaagtcttgatttctgatttatgactgctttttgttgtaccccaatagtcgtctaagaaaggtgattattttgagaggcctggggagacacacatgctcattctcgagggtggcggtggtgcagagggcagagccatgctcgttcttgctatcctgagattggttgctatctgtttcctttgctgctgtgtttttttctgtcagtattaaaggtggaagaaggtccatatctttttctgtgggtgcttcaagtgttgttggaagtggaggcagcagtgacaaggggaagctttccctgcaggatgtagctgagctgattcgggccagagcctgccagagggtggtggtcatggtgggggccggcatcagcacacccagtggcattccagacttcaggtactgcccacagtcccacctgccttctgcgctcccctcccctgactcctgccctccccactgcccagtttattccacttccctgtcctcttccaaaggcctcagagcctttcttctctccctgcagatcgccggggagtggcctgtacagcaacctccagcagtacgatctcccgtaccccgaggccatttttgaactcccattcttctttcacaaccccaagccctttttcactttggccaaggagctgtaccctggaaactacaagcccaacgtcactcactactttctccggctgcttcatgacaaggggctgcttctgcggctctacacgcagaacatcgatgggcttgagagaggtgagccctctgtgagtcgcacacattctttttctcccacggaggctcgggtgcctgtttctcccagggaggctcgggtgcctgtttctcacaggggatgctcgggtgcctgtttctggggacggccgaaacctatcgcttatgcttcttccttgggactttttttgagccaactagttagggctttgttcccaaggaaaatgtcctctgggtgtttaaaggccactgcttgttctcctgcatacctgcagagctgtgtattttgggcagaagttgacattgttttgccaatctggtgtgatgatctctttttttcttctctcttttaagaagtgtattatggaatttttttgagcacacacaaagagagcaatgtaacgaaccgtcctgtcctcatcaccagcacacagccagttcttcctgcgtcctcaccaccttcttccaaatccccagattattttgaagcaaatctctcacatcatgaatttaatatagaaataatctataaacacatgaatggatagctctagagaatactttaaaaacaactccggccgggtgccagattacaggtgtgggatcacacctgtaatcccagcattttgggaggccgaggcaggtagatcacctgaggtcgggagttcgagaccagcctggccaacgtggcaaaaccccgtctctactaaaaatacaaaaaattagccaggcgtggtggtgtgtgcctgtaatcccaggtactcgggaggctgagacaggagaatctcttgaacccagcaggcggaggttgcagtgagccgagatcgtgccacttcactccagcctgggcgacagagggagattctgtctcaaaaaaataaataaaaataaaaataattaaaaaataagaacaactctgatagtgattcacactgaagaatcactagtaattccttaatatggtcacacttagtctgtggtgatttcttgaccgtatccatatggtgcccaaaccagcgattcacaggttgtgccaacttctggccgtgcacctaacggaagcacttggtggggccttttccttacgtgcagtgatgcagacaggtgctgggacagtcagctctccgggagccaggagcagtctcctggctcccggagagactgctgatgtgttgtcagttaaaaagaggtggcaccttggctccaggaatgtgtttccttgccagaaggatcccctgacttggaaccacagaggcagcagtggatgccccatgttggtgggctcttctcccagaggtgcagcagggcaggccttgtgggaaggtgggagctcctggctgtgagattcagcactgctgagttagggcagcgacagggacttgggaagcctcctgcagctgggaccctggctgtgccaccgcagcctttcagaaccagttaatactaacacaactttcataagaagtcactttttgtctgtttctaccaagcaattcttttggaatttatgatatttatatcctcattttaacttggtatctgtagaatagaagatatgttcctggatattagatataaatttttgagacagggtcttggctctgttgcccaggctagagtgcagtggcatgatcatagctcactatagcctgaactcttgggccgaagtgatccttttgcctcagcctctggaatagctgggactacgggcatgcactaccatgcctggctaattaaaaaaattttttaagacaagtctcactatgttgctgaggctggtctcaaactcctggcctcaagtgatcctcctgccttggccttccaaagcactgggattacaggcatgagccactgcacccagcctggtattaggtgtaattttttttttttttttttgagacagaatctcgctctcttacccaaactggagtgcggtggcacgacctcagctcactgcaacttccacctcccgggttcaagcgattctcctgtctcagcctccccgagtagctggcactacaggtgcctgccaccacatctggctaatttttgtatttttagtagaggtacggtttcaccatgatggccaggccggtcttgaactcctagcctcaaatgatctgcccacctcggcctcccaaagtgctgggattacaggcgtgggccactgtgcccggctggatataattttatttgagcttttatcaaatggtttttcgtactgagttttgacaggctttgttttaaccgtgatttggctccagctaggcgcccctttgctcccctgccttattctggttgatggcgcatgtaggtgatacgggcatgaaaaccaggcttgaggacatcacaaccccaaggggctgtgcctccttccaggagtcctgccaagcccagaagttgtgctcttggccttgcgtgctcatctcggaggcggcagcaacacttcgctttggcttgaatttcagtgtcgggcatccctgcctcaaagctggttgaagctcatggaacctttgcctctgccacctgcacagtctgccaaagacccttcccaggggaggacattcgggtgagttatcctgctgttggttgtccttctgcagtttgctgttggggtgatctggaaaagtggtattttataagcattgtctcaaaaggacagttgaacaataatagtgtgaaacattttatttgtaaattagaaaatcaatacatgcttgtaaaaaaatttaagacaatatagaaatatgtagggaaaatgaatctcccttcagccaattccagctgcccacttttttttttttttttttttgagattgagtctcactctgtcgcccaggctggagtgcagtgggcgatctcggctcactgcaacctccgtctcccgggttcaaggaattcttctgcctcagcctcctaagtagctgggattacaggcgtgagccaccacgcccggcaatcagatggccttttgtgccgagcttatttcctgaaaatgtttctcgctccttcgccttgtagcttgtgttagtatttcatcctgttttatggctaaatgttccactgatgtatgcaccacagttggtttgtttgtacatggatgggtgtttgggttgtcccacctttctgctcttgtgtatagttctgctgtggagcatatgcaagtattcgtttgagagtccttgttttttattcttttgagtatgatacctacaagtattgctgggtaactccacgtttagctatatttatttatttattttttgagacacagtcttacactgtcacccaggctggagtgcaatggcgcgatttcggctcaatacaacctctgcctcccgggttcaagcgattctcctgcctcagcctcctgagaagctgggattacaggtgcctgccaccatgcccagctaatgttttttgtatttctagtagagatggggtttcaccatgttggccaggctgctcttgcattcctgacctcaggtggttcacccgcctcggcctcccaaagtgctaagattacaggcgtgagccaccatgccctgcccatgtttaacttttttgtttgtttgttttgagacggagtctagctcttatcaccaggctggagtgcagtggcgcaatctcggctcactgtaccatccgcctcctgggttcaagcgattctcctgcctcagcttcctgagtagctgggactacaggcacacaccaccacgcccggctaatttttgtattttagtagagacggggtttcaccatgttggccaggatgtctcgatctcttgacctcgtgatccgcctgcctctttctcccaaagtgtgggattacaggcgagagccactgcgcccggcccgttttaactttttgaggaacgaatatactgttatctgcagaagctggaccattttacattccaccaacagtgggcaaaggtttcatcttttccacatcccaacacttactttccattttttaattacagctatcccagtgggtgggagctgtacaccccactgtagcactgattggcattttcctaatgattcatgatatcaaacatctttccatgtgctttttggccatttgtatatctttggagattgaagtcctttgcgcattgtttaattgtgttgtcttttttattgttaagagagtcctttatatattctggaagctagatccttatcagagacatgatttgcaaatattttctgtcattctgtaggttgtcttttttactttgttgatgtcttttgatgcatagaagttttgattttgatgaaatctagtttgtctatttattttctcactcttttggaatcatatctgagaaatggtattgttttactcctgttttcttataagagttttatagtttaaagcttttacatttagttctttgatccattttgagttaatttttgtgtgcgctgtaaggtagggatccagcttcattttcttttatgtggatatgtaattgttccagcaccatttgtttaaaaaaactgtggtcttggcattgttgttgaaaatcagttggccataggtgtatgggttatttctagagtctcaattctattccattgttatctgtatatccttgtgcctgcactataatgttttggttactgtagctttgtagtaagttttgaaattaggaagtgtgagtccagcacatagtagaaacttgatatatacgtattattgttttggtcaactcattcattgaatgaccaatttattcaacaaatagtttagtctcctcagtgccaggccctttgctgggttctgtggatgtgaatagaaattaaaataaggtggagtcatccaacagttacaactgggtgccatacgaattttactataaatatgtactggacactacactgactcagctgtaggaacagagtaggctgggaagcacctttgagatgaggccgtctggatgtaagagtctgtttctggcagcagagacctggagtgtgggaggcctgcttgctctgttagggtttgaactgtatcctgacgatcatgggaggcattggaggatttttaggcaggaaaatgatgtgaagggatttgcatttaaaagagattatttgggactgggcacagtggctcacgcctgtaattccagcactttgggaggcctagacaggcgggtcacctgaggtgggaagcttgagagcagcctgccaaaatggtgaaatcccatctctactaaaaatacaaaaattagccaggtgtggtggtgcacctgtaatcccagctactcaggaggctgaggcagaagaattgcttgaaccagggaggcggaggttgcggtgagctgagattaggccattgcactccagcctgggaaacaagagcgaaactccatctcaaaaaaaaataataataataataattgtaggccttccttaagaaaaataaaataaaattctaggctgggcgcggtggctcctgcctgtaatcccagtactttgggaagctgaggcgggtggatcacctgagttaggagtttgagaccagcctggccaacatggtgaaaccccgtctctactaaaaatacaaagatgagccatttgtggtggcacccatctgtaatcccagctactcgggaggctgagacaggagaattgctggaacccaggaggcagaagttgtagtgaaccgagatcatgccactgcactccagcctgggtgacagagcgagatgccatctcaaaaaaataaaatataaaataaaattctaagccctgcaaccaactgaatggagccctccccttggtcaagggaaccccagagaaaccttggaagcttgagttcctggccgtagcaggagaggaggtcagacgcgcctcactgtacccctccctccccagccaccattaggcttcttcactaagggctaaacagaaaccagcccttttcaaagactctacactgctaatgtggattactggtttatcttcccagatacagattaaagacaagatgagattaatggttccttcacccttccctgagaggtctgcttagttctcttcctctgtttccttctatcttaggtaaaatgtacatttactgggcacttactgaagtctcacaagtacgtaaccactcacctcacagccaccctccctctttgaaggaccacatgtaattactaaacctcctgagaacctcttgggacagaaacaagcacagatgtgccgtgactcatgtttttcctgtgggcaccctcaggctggctcagtagccctcacttgcttgagatcctgaatctgcgggttggcgtctttcatggttgctggatcatactctgccgttatctcttcggatatgagttgcccctagcccactatctggcccctctctttagggacctctgattgaacatacattagaccttctctctcctgctgttcctgatcactcttctgtcctgtaattgctgcttcttgtgctgcattctgggtaatttcttctggtcttttttccagtttactaatattgtattctgttataaggtccttccattgagtgtttctttctttcttttttcccaaacagcaactcaaaacagacattgagttttaattttggttcctgtactttttatttctagaagttctatttggttatttttcaagtctgctacattattacataattttttaatagttttatatctttaatagatagttttttgttttgttttgttttgttttgttttttgagacagagtctcgctttgttgcccaggctggagtgcagtggtgcaatctcagctcacagcaacctccgcctcccaggttcaagtgattcccctgcctcagcctcccaagtagctgggattacaggcacgcatcaccacgcctggctaattttttgtgttttagtagagacagggtttcaccatgttggccaagacagtctcgatctcctgaccttgtgatctgcccacctcggcctcccaaagtcctgggattacagagctgagccactgcgcctggcctttgatagatatttcaagttcatcttttttttttgcttccttaatttttttttttgctataccccatgcctccaagataacagttttttctttttaatttaaatataatacagttttactgtgtatccaagaatatctgaaatctttcgtgggtctctttcttttgtcttttgtatctgttgctttttgctgggctgagcctgcttaaaacaagccccgttagctgtaaaggtttaccttagaaagtcaggtgtcttcctctgtaactctctcccttttccatctgctccaaggcatttatttatattaatcttgacgcaaagggaagttgtgtccacttcaccttggccagtaaggaagcagtgtttggcagatgttgttactcctaataatgccagccagtgagtgaagctgacctgaatgcctcccagggctgaggcaatggcatgatcaccgaagctcaaaccagagacagtttcacctttctgactgaatagtgttcggtgtaggccaaatgcctgcagactactgtttgaggactggtgtggtctaccaggtgtttccttagcgcctggatgtctctggctgccatcccagggatagagcatggtgttagatacgctagatgcctgccgaagtaattatgggtgaaacatatgatgtccaagatttgcttttaaaggctccaatacctcctcccagattccggagggctgtgaaacaattagctatgaaaactggtaattcctgaagctgggtacatgggggttcatgatccctctctcaccttttttgggggagaatgtttgagactttaataagaacttgttgccttttccttttacagggtgttgcaggcatcttcctcaggcctgttttctctgttttccaggctgacgtgatggcagacagggttccccgctgcccggtctgcaccggcgttgtgaagcccgacattgtgttctttggggagccgctgccccagaggttcttgctgcatgtggttgatttccccatggcagatctgctgctcatccttgggaactccctggaggtttgtcagcaggcctgtgcagggaggaggctggagggcaggggaagggaggggtacaggagtcatctcatgggctgtcggcaggcctgtgcagggaggaggctggagggcaggagaagggaggggtacaggagtcatctcatgggcccttccagggctggtgccactttgggaaggtgaatggattcagctggggttccaggctgagggagcagcagcctgtgcaggagacaggaaggtgggaagctgctgggctttggaggtggtataggtgtgggtggggcaccacgtgtgaggagaagggagaaggatgggggtgtgggggagagatggaggggcagggcatcccaggtcagatcaggaatactgatgttgcagtgggaggagtgataaatccacagagactggcccggggacgtagctgcacccttggggtcagggaggcctttggggagtggagagtggagcaagcagtgccaggaggctggtcctggagaaggtggagctgtggtcgcctgagggatggcgaggagggggactggactcgcagtctgtgatgttttggggacgtgagaaggaggcgtctggcttggtctgtaaggtcagggcacttgctggtgaggcgtgatttgggagggaggatgcccagctcggttctgtgcgtgtctgaggtgtcgggaaacatgccctggatgtgttcaagcagctgttctgcgtctgcgtctgcagctcaggaaattcctaaaagctgtgatgagagcaagaaatgagaccatgaagtcagtgtgtgcgtgactggatgtaggcaccgagggcagaagggccagaaagacctgtgctcagaggggcccagggcagccacaggggcccagagcatgtgtttgttcaggcattcattgtgtgctgggccctgctccagtgctttggacatacacggtcagatgtcagtgtaagaagttatatagtttgttaggagatgattgatgttatgagaaagataacaagtaggatagaaaggctagaagggttgggaaccagctgcagtgtcaagtcaggcaggtggagttggatctaagagtttaccgaggtgaggagggtctggcaggggacactgcacaggtgacaagcagcaaggagggtggggcgaagtcagcattgatggccacggggctggagcagagaagaaggtggggcacaagtgtcatctcatgggaggctggcgccacctcagaaggtgaatgggttcagcttgggttccaggccagagtctgaagttgagaggactccgttgggtgctgggctgtgagcccaccgtgggggcaagactgggagcagcagacccagcagggcccttgtaggtaatcaccggctggcactggctgggggccaggtaaagccagcagaggctgaggggtgctggagtctgggtgtgtgtgaacgcagagtgggtacgctggcacagtgcatgggaggccgtggattcccaaggaccccagggctgtggctggagcagctggaaagacggagccgccgcttcctgagatggagaagcttggtaggtgggtttgggggagctcaggaattcagccttgtttccacggatttgaggatgtgctgcggactggaggtgttgagcaggtggacatgagtctggagtccaggaaggcccagaggcaggagctggggtgctggagtgagcagacaggagagcccagggtgtggacagacatgagaatgccatgctaggcataggatggagggacagacacaggaggagcagtcagaggggccatggtggtcagcacagtgtgggctgagaccagctgaccgtgctggccaccaggtgtggacacttgggccaccagaccatctttattgttgaagtgaaatgaaaatggcctttttcctgattataagtgtatcatgtgtgtctttgaaaagattcgtacattatataaagatataaagcaaaggatcaactttttaatcccaccaactgttagcattttattctgtgtcctctcagctttcttttttttgtacaaatgcatacgtacagatggtaattttaaactaaaagttggacagcactgtacattctattctgcagcctgctgttttcacgtaacaatgtgagtccatggagatgtgctgcgttgttaatgccaacagtttcccttacacggatatgaggtcccaactgagaaacccatgtctgtaaggctggtgccatcatgaactgaatgagctggtgtcacgcacagactctatctcacgtgctttgtggacgaaatgttaatgtgtttgactgtggagtaccactccagatcccctttaggtgtgacataacgtgggatgtaaaccatatgatcttttctaaaatctcaaaaattctgaaacatattcagccacaagagctttaacatagattttgtggatttaatacaaaatttatgtaagcaatttcttactgatggacaatgataataaatagtatataatttttaccttaaaagtaatgctgggccaggcaccgtggctcacacctgttatcccagcactgtgggagccaaggcaggaagattgcctgaagctaggcatttgagaccagactgggcagtatagtcagacctcgtctctacaaaaaataaaaagatagccaggcatggtctgtgtagttgcagctatttgagaggctgaggaaggaggattgcttgagcccaggaatttgaggttatggtgaactatgatcatgccactgcattccagcctgggtaacagaatgagatcccgtgctgtagtgaatatccctgtgtatcatccttatctactcatgcaagtactcctgaagggtaaatgctgtagtgaatatccctgtgtatcatccttatctacccatgcaagtactctggaagggtaaatgctgataaatactgagaacttgccttccggtgaatatccctgtgtgtcatccttatctacccatgcaagtactcctgaagggtaaatgctgtggtgaatatccctgtgtatcatccttatctacccatgcaagtactctggaagggtaaatgctgataaatactgagaacttgccttccggtgaatatccctgtgtgtcatccttatctacccatgcaagtactcctgaagggtaaatgctgtggtgaatatccctgtgtatcatccttatctacccatgcaagaactcctgaagggtaaatgctgataaatattgagaacttgccttccagaaagatgtaacaattacactgccacaaactgtgtttttatgtagccattttatcacatcctcaccaaaaccaaaatcacacaaatcaaattggttaaaaaatgcatgtgtgtgtgtggaggggggtgcggattttgcctttctgtagtaaagaatgaagttcatcttttcatgtctattgccagttgtgtttcttctctttggattgtatatttgtacctcttgaccatttttcattgggtcattataaattagcaatataaattagttttaattttaatataaattaaataatataattacattttaatgttaatataaacttctttcttttttttttttttttttttgagacagagtcttgccctgtctcccaggctggaggttcagtggcgcgatctcggctcactgcaacctccacctcccaggctcaagccgttctcctgcctcaacctcccgagtagctcggattataggtgcgtgccaccacgcccagctaagttttgtatttttagtagagacgtggtttcactatgttggccaggctggtcttgaactcctgacctcagctgatctgcccgcctcggcctcccaaagtgctgggattataggtgtgaaccaccatgcccagctgttaatataaatttcattataaattagcattataaattagttcataaattatatgtttataaatgagtttatcaattagccatataaactattgtcatatgttgtaaatatttttgcagtttatgatgatgagaggtttttaaaaattttaaattttctacatagtagttttatgtagataccgagataatagtatttacatagtcagatctgtcattttcctttgccttatctgacttcagtttttgcgcctaaaacgttcttccctatccttacttgtaaatccttagttttcttcaagaactgttttgtttacattgaaacctttaatccatttgaattttttttcagtgggaggtaggaatggagtattttcctcccagataatgagccagttttaatgccatttattaatgtatccattttttaccttgttcctcttaaaagaagctttgagagctgtatgaagaagcctgatggcaccgagctaggcctctctagaggctgggcggggaagaccatggagagacgtaacagtaactcctgctcgggggcaccagctcgtctgggtgcccgatgctggtggtggctgtcacagcaagcagggctagccagaggagatggacgagtctgtgctgttgtccctctgtgtcatgctgggagacagcgaggtggggaggacagggagaacagaacgtgctcacaaagaggaggcaggaaggttggatccctgatgagccttggaacggaggtggggaaaagcaaggatgtgtggaaacagcaagaagtgggagagagagagagaggcggaggggagaaaaccgtcacggaggccaagcggcaggagctcagctgaagaaatgagattggtggtgggttttccctatatcgcaggctctgactgccaatctgctgctcctccaaggcctcggtggctgtggcatgaaacatcctgaggggcttgtaaagtggacactgtgcccctcacgtttggcccatttttcaggtggagccttttgccagcttgaccgaggccgtgcggagctcagttccccgactgctcatcaaccgggacttggtggggcccttggcttggcatcctcgcagcagggacgtggcccagctgggggacgtggttcacggcgtggaaagcctagtggagcttctgggctggacagaagagatgcgggaccttgtgcagcgggaaactgggaaggtacagactgctgaggaggaccatccaaggggctgcccttctcactgctctagggtatggtccacctgatatggagccccgttggttaacacagtaacagtaatagctgatgatgctgtgaatcctgcaccaggcactacctggacctgactgggtgttactttcaatacctccatttagagatgaggaaacagatgctaacaggccaagcagggacacggtccagacactcagggctgatgagtctgtattcttaacagactataggcgttaccttcactccctaaaataaagcagccaacagtgtccctctaaggcctggtatgtgattctaagatgatacgggttaaagaactttgagaagctaaagttctctgcatctatgtgggatgaaggctacatgagtgatgcttttcggaagtaattggtatgagagccattgatcaattataatccgctgaggaaagccaaagagccttgatgctttctaagagatttcaaaccgcctataaacaagtgaagttacagaaaatgcagtttcccataagaatcatgtagcatgtgtagccttgatatataagggttttcaatgggaagtggtagcattaagcatttaaagtccagtgtcatgattacaggcaggtgtaacactgtccaaaggggatttcaccagtgtattagtctgttctctggctgctcataaaggcatacctgagactgggtaatttataaaggaaagaggtttaatggactcacagttccatatggctgtgggggcctcacaatcatagtggaaggcaaagcaggagcaaagtactgtcttacaaggtggcaggcaagaggacgtgtgcgggggaactgccctttataaaactatcagatcttgtgagacttattcactatcagaagaagagtgtgggaaagacccgcccccatgattcagttacttccacttggccccacccttgacacatggggatgattacaattcaaggtgagatttgggtggggacacagccaaaccatatcaactacaatatatcacagttgatgctcctcttgccttccaaggcagatgtcttaggaaatcctgatcctttttccttgtccacagctgtggctgcctcatggctcagggccatggggtcagcactctcctcacctccaccagtccaagacctccaacctctggttgcaggctgattttttaccaatcatggtcacttcattatggaggcagggaacccagctaacaatgaggcttaaacgctgagaggcgagtgcctcctggccagctcacaaggcagcggagatcttagatcagcccagcaggcttttttgagggatccttttcctgctccaacttcatattttcttttttttgtaatggagtttcactcttgttgcccaagctggagtgcaatggcacgattttggctcactgcagccctgcctcctgggttcaagtgattctcctgcctcagcctcctgagcagctgggattacaggcatgtgccaccatgcctggctaatttctgtacttttattagagatgggatttcatcatgttagtcaggctggtctcaaactcctgacctcgggtgatccacctgcctcagcctcccaaagtgctgggattataggcatgagccagcaggcccggcccaacttcctcttttcatagaaaagcaggttgtaactctggtagctcctgtggagttttggaagtggcttaataggatttgaactgtataatctagtttcagagaaatgtatgtaaaatgggttatgatttcattttctgttttttacagcattactatccaaggggttacttttccaaatagtgaatgcttttaagcacatgagcatcagtacatattgatttgggtactttaagacccatagaatgaggctctccatttagccaccctgttctgcccaggcctgctgggatcctcttagcccagcacagcagcagcagtatttgcagaaagcagcttgttttgtgaaatattttgcatgtctgcagctagagctgtttgaacagagatctgctggcctgcctgggtgtgtaaacagatagctgataccctctgtcttctgtattccagcttgatggaccagacaaataggatgatggctgcccccacacaataaatggtaacataggagacatccacatcccaattctgacaagacctcatgcctgaagacagcttgggcaggtgaaaccagaatatgtgaactgagtggacacccgaggctgccactggaatgtcttctcaggccatgagctgcagtgactggtagggctgtgtttacagtcagggccaccccgtcacatatacaaaggagctgcctgcctgtttgctgtgttgaactcttcactctgctgaagctcctaatggaaaaagctttcttctgactgtgaccctcttgaactgaatcagaccaactggaatcccagaccgagtctgctttctgtgcctagttgaacggcaagctcggcatctgttggttacaagatccagacttgggccgagcggtccccagccctcttcatgttccgaagtgtagtcttgaggccctggtgccgcacttctagcatgttggtctcctttagtggggctatttttaatgagagaaaatctgttctttccagcatgaaatacatttagtctcctcaaagggactgcaggtgttgacatgagttggaaagggaaccctgggatacgtggcgtcccctctattggaacagtctgaggactgaaggcatttgtccctggatttattggagacggcccagctcctccctctgaaggtggtcacattctgttgactctccatactcagcctctcctccagaaacagatctgttccagaacattccagcactttctatctggcctccttgtccccacactacgcccccccaccctcgccagggcttcctctagtgacactgttagagctaatctctgagacagggaaggcattactcacttaaaacccaggctgagtcctggccacctgctggattgtgacataggaggtggaatccactgaactgctacttctgcacaggctccttctcctggggctgtacccaggcccagccctgatggctcaccctgtcaggcaccagctgctccctcctgggctctcacccacctgcacatcctccttcctagcatcacattacctgcgtgtttccccagacaaaagcacttcccattcttgaaccttgcctaccctgggctgagctgacggcaatagatttaatgacagtgactcccaggaagggggtcctgtgactttgcgccttaataagaacaaaaggtggaattggtgacctaggaaaactgttgaattctaaaaagaatgaagttagtttctaacccta

SEQ ID NO: 9968 - DNA, 727 bp, Homo sapiens
ttacaggcatgagccactgtgcctggcccctttatttgataatttacacatacatttttgtccaaaactcttctttatttcaagatgatgtttctgtggctatgtgtggtatgtggtataaatctcaatctatggtcacacgaggggcattttccttgttgtaagtgtagtctaaaccagtaggaaggaggtttaattgccaaaaccagcgagaactcgggcactgtggatactacagtgggcagctgaacgaggaccaaggagaatgtctaagaggcctccagccctgcgctcagtgaagacaggacaggaacaacagagcatacataccttggaagggtgtgttctgatatactcgtatggaaagttctgacaggttttctccctgggaagtgcagcacataccccaacacactggctctgccagtgtgccaatcccagatggtgcttgttttgtgtgcacccacacccaaacccctgccctcccatatgctcttctgtgtgcccaggtaggccctgccctcaggcagcagcttctgaacacattcctcttggcgcagacaaaagaaagtacttcgtctgtggaattcgaggctgagcctgagttctagcacaagaagaccgttgcagtccagagatgagaaactggaccagaggcaaatcatgaacagaacgggagtcaagagaaggggtttctaagatggagaagtgggggcgggtgtggatc

SEQ ID NO: 9969 - DNA, 280 bp, Homo sapiens
tgcaacccacttcccgcgcacttggctgtgccattgaagcgttaaagaatttaggcgcctgtggtctaaccggctaaggaatagctatgtgtgttcagcctttgtgacccagtatagctcctgtcaaatgaggatcttcccagtagtcgttttaagaggattaggtgtaaatataatgcctgaccatagtaaaagcgctcagaaagtattaactatcaccgccatccgggttgaaaaaggtgtgagcgcagggtacagaaatgctggctccaggtttgac

SEQ ID NO: 9970 - DNA, 280 bp, Homo sapiens
ttgcagcccacttcccgcgcacttggctgtgccattgaggcgttaaagagtgtgggcgcctgtggtcgaacccgctacggactagctttgtggtgtcagcctttgtgacccggaattgctcctgtcaaatgaggatcttcccagtagtgttttgcgaggattaggtgtaaatataatgcctgaccatagtaaaagcgctcagaaagtattaactatcaccgccatccgggttgaaaaaggtgtgagcgcagggtacagaaatgctggctccaggtttgac

SEQ ID NO: 9971 - DNA, 12575 bp, Homo sapiens
gctccagcgcacatcggaattgcctggagtctcccagggctccctctgggtcttctgaggggagaggctcctgtgtgctctggtgtggcggcacagccaggctaagaagctgcatcctggcctcggagtgtggctgtcgatcaggaatcttcctcaacctggaggtattcccaggctgggctaggaggcacctggaggggcagggtggtctctggaaggtggtctgggtgggtggggtgcagcggagccctggctgaagaagccttacgaccaaggcctggaggagtgagccggctcttcagatggctgggcagggcccatgagtcccaggagagggcggcccccactcacaggctgggcagcaggggcagggcaggtggggactcacctcagcgctctgtatactagaggccgtggggcaggtgcaaccctgtgggacaccagactcaccccagagcccctctcccctagggaagtctgttttcaaaaactccctgatgattctgaggccaggcctttggggactgtggccctggaggaggctggcacaggtggccctctgtcctggtgactacatgtcctggtcactgctgcatcccacccagtgcctggccggacctgctcaaggatgtggtcaggacaggccgggggttgagcggctgcatgaaggagggagggcatggagctgatgggacagtttgcttccgatggagcaatggagggctgggcgtgtgcagcgttccatggcagaaaaaagcgactcctgctgtcttggcagaacaggccagaatttttaaagagtctgtggactgggaagccaagtgtattagtttccttctgctgtgtaacaaattcccacacacttagggcttaaaccacacaaacttactatgtgacagtttctgtgtccaggaggctggatgcgggggcggggtctttgcttagggactccccaggctggaatcaaggtgcctgctgggtgtgagctcacccaaggcgtggtcctccactctttcgggttgctggcaggacgcgggtccttgaggcccagctcctggtggcctccccgcagcacagcaggcagctctgtggctttggcttttggtctctctggcttctagacccttttggaaaggcctacccagggtcacctcccttttgattaactcaaggccagctgattaggacctgaattctatttgtgaaatcccttcaccagagtgatttcctcgaggcaggtgcctggggtagccactgggcggggtccatgagggcagctggagagtaaggggtggggggacacttaggacagggaagctggcataggctttcctgggcacaagggcccccagctgctgggaaggaaggagggagaggggctgcagttcggcaagagtgggtccaggccctggtagaccaggctggtctggcacctgaggggctgtggctgggaaggagggaagaggcaccctccccatccccaaagcacacacggccaggaagtctggaaggagagtgggtgtcagcctgggattcccaggtgctaggggtgctgggatactgctgcctgttgtccttggcctgcccgtgaggcttgagcctatcccactgtttacaggtcgtgaggaggcaggagagccatcctgcccctcctgctttctaccatctgcttccctgtttgtaaaacaagacagactctctctcagctattgatgggttctggaaacactttggaaaggtgacgtgttattcaaatgctcagaattagtgcagcgtcaaagcccgaaattcaagccctttgatggtctcgggggttgcatagatgaacattttttgttttagtagttacatgcttattttaatatgtcttggaaaagaaatgagcccatcagacgactcatttcatggctagcgtcgtgtagctgagatggagtggaaagagcgagtcactccaagcctggggtgaaggatgtggagtacatggcactcaggccacacatggatgtggacgacgttgcggagacaccccaggatgatcaaagtcagggaagtgtttctggtcggctgcagatagaaacgggacaggcctgtcccaggtggggccgtgtgcctctggcctggtgtgtggcccaggactgctggctggggacagggcggggacactgagggcagtgatgccccctccccacctccaccccagggtttccgggattttatgggagcagagtgcagacagcctcaaatcacattaatgactgaaggttcaatccaggtcttaaaaatagaacccaaggcaaatgaatgagtctccgttccccacccctagtgcggaatacttccaagggaaattgcgtcctatattacctcattctgttagggagcttgtggtcacagagctactcatccatccactaattttccctgtggaatggacggactgtgctttcctggcttaatggaggagctagaacactgtcgattgcctaattcgggccatgagattccagtaaacctggaatctagaatcagagtgtatttgactgggtaaggggccacttggtgagaacgccagggaggagctcagcccagttcctctgccgactctgagcaaatgacccacagagcattgtgccaggagccagcccaggctgtcatctcagagaaaggaaaggaaaggccccaggactggggccgtaggcggaggagcagctgggggactgagggtcaggtctggggcaaatctggggcctctcccacccgctccctggccccggatctgcccttcatcaggaatctgcttccaagcagatctgatttgcctactgagccatgcccccagggaagctgggccctgaatgagctgggcttttgggccacaccagagggaggaagttccctttcatctgctgcctgcttgtgtgatgcagatgaattctggcagaggaaccctgagcatggggtatggacccaggcctggctcgggtctccgcaggagggggtaagagcgacagagtctccgtccagagtgaccctccagcgtctcgggcctggcctctgcgcccaccccctattgcagcacctggatgggtctccctggttctgcattttccacagcaggcagagtgcattccaaaccctgccgggccgaggcctgcaccttccctgctccatgccctgccccagactctaaggcacacctccctgctatttcctctttctggaatgctctcccctgttcgcccctcccaacccctgtctgttttctggtccccactgcagtggcagccaaggagccagatgcttgcaggggagccatgctcctgagcagggccggcacccttcctttccctcccactccaccatctgcaggcaggagagtggagggtgccaggcaggggagaaggtgtgcctggatcgtggcaccacactgggtgtgcatgtggccacctgattccatggcagcccgtgaccctgagccaatcccagaggctcggcctggagctgcggggtgaccctgagcccgggcagcagcaggatcagggcagggcactggtgggtggagagctgggggtatgggcagcatgaccggcagtgggtttgccctgacacccgaatgccgctgtttaacaggtcggtgtgcccgcctctgccaccgggtcctggtggctttgtccacaggcccttctccctttctccctggctccttctctgctcttggggatgggaggagaaggaaggagcggctactgcttctctccagtcgatgaatatgcactaaacatccattctgtggcctgggccaagtgctggggggatacgcagggaaggaggagcaacttctgttccccaagagctcccagtcaagctggaggaaggagttccagggaggcataaagacatgtctgtatgtccttagctcagcataaggagtttcacaacaatctgaattcaccaatgaatggaacgagtggatgaagatgggggcttcaatctgcttgaaagagcctagcaaacaaagatacttcatggtggatggatggatggttgtgtgggcagatagaggatacattgatggatggaaggatggatagctggacagatggatggatgtgtgggtgcatagaggatagatggatggaggaaggatgggtggtggggtggatggtaagctggccctgctgggagatgccgtctacagactgggtgtgaaaggcgctgccctgcgtgaggtagcagatctccatgtctcttctgtgttgtgattattgtgagcatgggaagagcacatttggtcacacatgtccgtgctcccacacacagcctttcctgtgagtgtgcctctcatctagcacccagggcccccttcccaccagcgcccgctcccctgtgatgaggcctgggtacatcagcacatgcctagcccctgtgccctccctgcaccagcccctcagttctccggagccaactggagaacctgagcctctagacccactgctgtcatagtcacccccttttggtcacgccactgccttttctttttttcttttttcttttgatactaagtctcgctctattgcccaggctggagtgcagtggtgtgcaaactccgcctcctgggttcaagcgattcttgtgccccagcctctcaagtagctgggattccaggtgcccaccaccacacccagctaatttttgtattttgggtagagacagggtttcaccatgttggccaggctggtcttgaactcctgacctcaggtgacccgcccacctcggcctcccaaagtgctgggattgcaggcgtgagccaccacacctggaccccactacctttttacaaggccttcagtggtttggcccaaagggagcctagtgggggaattcaggtgtggaggaggacattaagggcccccaaagtgcctttaaatgcaagtcaagccacccaggatgtggccagacccacaggggctgtggaagcgcaatccctagcacagagcatgccccaggcctcggggcactgagtctgttggggaatgggacacctgggcctgccctgcaacctggcacctgcgtctttcctgagcctcactttcctccatagtatgagttgctcattggacaggatgagagtttgcaagctggtggccttcgggctgaatccagcctgctcacatgcagggtctaaagtggctttcatgaattgtctatttctaaaaattaggatatttcacatacgagtcaggatttctggcttctcttgaaaaaatttaaaaatctgacaggcctgggcccctccctgttactgtcacccacctcccaggtggactggaccccacctgctgcctgcctggcctggcagccctgggctggctactctctaagggtccctggggagagggcgagaagatgaggtcggcctcctcccgggctgtgacatcctccctggccatgacgtcctccctctccatcccctgcccacagcttcacgcaggccatgctgagccagcccaggatggagagcctggacacccccgcggcctacagcctgggcctcgcgctcctgggactgggcgtcgtgctcgtgctctccagcttctttgcactggggttcgctggaactttcctaggtaagaccctgagggctggggtgaccctgagcaggaccgctggagccccagggaggtgcagggccaggtggctgctgccctgctatccgtgacatcggtgggagtgctaggggccccctccatcggggcgtctttgctcctccaggcctggcttgtctgtggttagaacaggaggctgggctccaacagctcctcttaccccagcgtgctgagcggctgcctcctggggagtgaaggcagctcctgctgcttctctccagctaatgaagatgcactcaatgcccgttctgcggcccgggctgggtgcaggactccttgagtccagctccagcaccagctcccccttgcagaagactctcaggccttgttgcacagaagcctgaggtggtggtgagtcagccacctctctggcagctcccggcacgcgtggctctcaggccaggcaggattgtggtttgtgccgtgtttggccgcaggcagggctggtgtaggtctggggaggggtgaggggtggaggcaccttatcccttctccatttccctctgcctgtggctgaggtgctttcaggctgtgagcccagtgctggcctggctagacgcccaccaatgaccctgatgatggcagcaacttccagctccttggaatctgggaaagaaaagcagccatgggaaaggcagtaggggtcggggtgggaggggagatgggggcaggggtgggggacaagagggggccttcggaacctggaaggagagaaggaggcagtccctgtccaaggggagcccctcccagtgagcagggagttggtccagctggccgcattgcccgctctccgtcatgggtgggaaggcccacgtcttcctccccatcagccctggccagtgcaggagcttggaagtcactcggcttcagtggcctcagtagcctcctgggaccaacggtgtcctgaggagctcccgggcctgcctgccatccccatcctcagatgccggctacagctccttgggcccagcccccagggcaccgtgggctgtcacagggcactccaagttctcaaggagcttgtgcctgccagtaggggtccccccgagggaggaagtggcatctgtgggtgcagcattctggatcgcccatggccaggcctctctgggactgtggggggcacccacaggcagttcagtgcttcctgctcaggcagacgctgtagggagtttggtccaggaagggggacagcagccaggagcgtctggatctgccaggtgggggcaggtgcgggcaggtaggaaagagaaaaaagccttggtgcaaggagagggaggttgagggcagagtagctggcagctggaggtggggggcagctggactggccgcacaggtgctgtcggttgggacagggcaggaggatgagccgaggccttgaaggccatccaaggggctgaggctccatccccagagaggtgggagccatagggggggtcccagcaaggaagaggttggaccgatggagccaggatcagaggtggggctcaggaggagctgtggaggggcccttccaggatgtgagggcggtgagggccccatgggaagggggactccgggctgtgcaatcaggtcctgtgggagaccagcggcgggggccctccagtggccagtgctcgggtggatctggacagggagggctgcagaggcagcgtaaggagagccaggatggtgggtggagcccctcagcagtggaagaacaagctgggggtcctggacagtcagagggagggaaggagcctgcaaacaccagtggccacagcctcctggcggccctgccagcagacatggcctagaaacaccgaggaccagcagcgcggtatgtaggcaaaggtggtcacttcctgctgtgactcagctcgaattgggtttctgtgccatctacgcacaccctgtgccccacttcctgcttcctgggaagaaagaactttccagtggtcctgggccctgccccgtgtccccagatggtgatgaagctcctggacccctcctgcccatgctgcccattgtcgggcagctgccctactttccgccttggatgaagctccattgtcctctgggaggagagacaaatgaggggtttctggggacagaaggctgggaggaacgaagccacaccctttatggagcggttactctgtgtccagtgggactgtcctctgtgggcctgggacagacactgtgactgtgaccccggccactcccttatggctcagagcagctctgccgggggacgccttgtggctgtgcggctgacgggtgcatggctggcctgtctggaacaggctgttcaatagtcaccctctctccactgggtctagctcctctgggcagctgagtgagaaaacaataccagagctgacctcccagagcaacgggaggcgtgctgtggccaggccctggtgccagagccacacagcctggggtgtggagcagagcagcccttagcaaccagctgaggcccctagagggagaggaactcaccagagcgaggaagagtgggaggtaggacaggaagaggaagggtctgcataaagaggcgccatgagcagagggcgaagggcctgaggaggaaaggcgctctctgtacagagagcagggaaaggcatcgcaggggagggaacagcgtgtgcagagccaggaagaagaggaaggccagcatggctgggtcagagtgctcgagaagaggagcagtggggcaggggcggtgctcagcaccttagtccttaggccccacgccctctgctgtctgcgtgcctgttgggtccctctgactctgcccattgttgaactctctgaagtctcctggagggcagggccctgtctcacctgcaggtctcgccacagcccgctctggggcctccctcagtgatggtgtggccagggctgatgaatagccgagggaccctgccttgcctcatccacaggtgattacttcgggatcctcaaggaggcgagagtgaccgtgttccccttcaacatcctggacaaccccatgtactggggaagcacagccaactacctgggctgggccatcatgtgagtaccaggcttgccacccctctgccctgctggccacctcccggagaggagctggtgcagctcaggacgcgggggccagggcccctggagagagagaaaggaagaacgtgtcatttgtgggggcctaggcgccctggttctccctttctcagaagcgtcttatctatggtaacagaaacaacatcccagaacagggtggtcagcttctccaaagagggctggagtgtggaggctcaaaggctgcaggcaggtcacagctgctcagccctggtcctgccacacaaaacagctgcagacgcaggaaaatggatgcgcgtctttggcgccagcacagctccacttacagacactgaagcctaaatttcagattcttttcacgtgtcatgaaacattctttttgatccttttgcttttaaccgtttaaaaatgtaacaggcgttcttggcccctaggccgtagtttgcggacccttgtgcggggacatcagggctgggaccacccgacccatcttccccgcaggaggggttggccagagccgccagggcccagctcacccgcagctgacagaactccctgtgccccaatagcctctgcccatgtggcagataccccttcccacagagggggccccgtgccatgagggaagcctagaactgctgtcggcctcagccaggtacgggtactgacaaggtatggagatgtgctcccccggcgggtcagaggacctgcggtcaaggatggcacagcgggcgctgccctcggcttcatacccagcccccaccccagcagttctagtttagccattttcttccatagaaggttttttggcagacagtgttccactgcttttgtttaacacttgaaaaccactggcctagaatttacaggttctccacaagacctgaggatcccaaaggagtgaatcgtaaacagtgaatgtcaagcgcaagatgttgcctcctggctcccaccttcagcagttgggaccgtagcagcgggggttggagacagcagaagctagaaggggggctgtgggtctggctgggacccaccctacccccaccccacgtccaggccaggcagtccccagggacacgtcctacctgccttctagcctggtccctctgcctgctaaggcccagactatgtgcccccaggctcaccggccatggagcacccccactggggccacaggatgagcccaaactcaaaacaatcccccccacccaggtcgtccctgcaggcttagggttcccaacacacctggctcccccctctcctctgtgtgcacaaacacatgcatgtatgcactcacacactgttccctcgcctagaaccctcccacttatgccccttgtcagtccttccaaacccaacgtcaagtgttccctcctgcacgaatccctccctaaccccccaaccttcggtgcctccccagtggcttagtgtccccagcagtgtcttgtgccctggagtgagagtcacccttgggctcggggcagccaggccagggctctgggggacgcataagccgcctccagaggacatcagccatgcagcgtgctgagagatggcatcaatggtccaggagctcattagagatgagccattatctggccagacgctgacacagcggggacccccacaggcctcccacggcccatctgtctctcacctgccagggccccggagatgggcttccaggtgtctgagctccccggcatgtaggaccccagcaggctgtgtggcagtgagcccgatgccaggggacagatggcagaggtggtggcctggctgtgagggacaggtgggcctcctgcttcgtgttgtgcaatcagggactcctgtccccctcggcgcccacagtggggtcgctgctggttgccaggcctggggttggagcctgggcttggatctttgcttacgtctgccctgcctcctgcagctcccagacaggcagaccagtgtgaggtccaggggtggaaggcagtgggcagggcagagggtccccacggggtccacaggtgtcctccagccctcacctcgatccagccctgcctgaggttcttgtgatggtttggctggggagggggcagcttggcacaggggcagccaaggagggcacagcccctggcccaggcctgcccatgcgccctctgtgcccgccagacagctcctttcctccctctccttcctctcttcctccctccctccctcctccctggcagcagcccagcacctgcgggagctgtgggatcagaggtaactatagaaatagattgggggacagcttgacggcagctatttctggaaacccaaagcagctgcgcccgggctccttggtgccgtcactgacgagctgccgctgcttactggtgtggcggggtcaggagctggtcaccagcaaagagcccctggcgatgctccatccggccttgggcctgctgtatgctctgcctggggcctcccgtcctctgggctggggtgaccgggggctcctgggcgtggggctgctgtcccaccacctgggagagcccaagctgggctaggtgttgagggctgggcggggcggcagctcctaagcccccttccccacagccagatcctcccagggcgtggccatggggttgcacctgtggccaggggctggggactcagggtggaccaaactggctttgggggaccctggactcatttctagaaaacagcctttgttcctcagagcatggtttctgggagacgggagcactttgccccagaatctcctcctgtgcgggaatgaacagccctagccactgggactcttccgcctggggctgcgttcccagctctgggctggcggctggagacccggaaagagtgagcaggccccaccctgagggaacccagccaggccagacaggcagacaatgatgataaatggatcaggaccgagaacatggggaccctggtcctggcacaaaagccagactcaggaaggggcagtgctgcctgggctcggtcggcccaagtggcccagcgtcggccggaaggccagggtcacgttaggaagggccagcctgggcaggtcggccgcgcccctgagagaccctggctccagccaggcctgacctgcctctgtcctttcaggcacgccagccccacgggcctgctcctgacggtgctggcggccctcacctacatagcggctctcctatacgaagagtgagtaggggctgcggcgggtgggggcgtggctgcccgactggccctgtctctccctctagaacctttccttgtggccagggcaggctcaggacaggctgccgtcagccaggcccactccagggctcccaggtcagagcggccatggtagcttacaatgcggcctgcaggacccagcaggcagccggcccctctcccctcccctctcccgcctgcgctctgaaggctccaagtcagtgttgccccagtggctctgggggatgaaggggatcccggtcccatctggacaccctcaagctgatggacgcagagctctggtgcgggcagtgggtcacccccaggacctgctgaccgaagcctctccccgctgcccggcaggcccttcaccgctgagatctaccggcagaaagcctccgggtcccacaagaggagctgattgagctgcaacagctttgctgaaggcctggccagcctcctggcctgccccaagtggcaggccctgcgcagggcgagaatggtgcctgctgctcagggctcgcccccggcgtgggctgccccagtgccttggaacctgctgccttggggaccctggacgtgccgacatatggccattgagctccaacccacacattcccattcaccaataaaggcaccctgaccccaaca

SEQ ID NO: 9972 - DNA, 11987 bp, Homo sapiens
cacagcttcacgcaggccatgctgagccagcccaggatggagagcctggacacccccgcggcctacagcctgggcctcgcgctcctgggactgggcgtcgtgctcgtgctctccagcttctttgcactggggttcgctggaactttcctaggtaagaccctgagggctggggtgaccctgagcaggaccgctggagccccagggaggtgcagggccaggtggctgctgccctgctatccgtgacatcggtgggagtgctaggggccccctccatcggggcgtctttgctcctccaggcctggcttgtctgtggttagaacaggaggctgggctccaacagctcctcttaccccagcgtgctgagcggctgcctcctggggagtgaaggcagctcctgctgcttctctccagctaatgaagatgcactcaatgcccgttctgcggcccgggctgggtgcaggactccttgagtccagctccagcaccagctcccccttgcagaagactctcaggccttgttgcacagaagcctgaggtggtggtgagtcagccacctctctggcagctcccggcacgcgtggctctcaggccaggcaggattgtggtttgtgccgtgtttggccgcaggcagggctggtgtaggtctggggaggggtgaggggtggaggcaccttatcccttctccatttccctctgcctgtggctgaggtgctttcaggctgtgagcccagtgctggcctggctagacgcccaccaatgaccctgatgatggcagcaacttccagctccttggaatctgggaaagaaaagcagccatgggaaaggcagtaggggtcggggtgggaggggagatgggggcaggggtgggggacaagagggggccttcggaacctggaaggagagaaggaggcagtccctgtccaaggggagcccctcccagtgagcagggagttggtccagctggccgcattgcccgctctccgtcatgggtgggaaggcccacgtcttcctccccatcagccctggccagtgcaggagcttggaagtcactcggcttcagtggcctcagtagcctcctgggaccaacggtgtcctgaggagctcccgggcctgcctgccatccccatcctcagatgccggctacagctccttgggcccagcccccagggcaccgtgggctgtcacagggcactccaagttctcaaggagcttgtgcctgccagtaggggtccccccgagggaggaagtggcatctgtgggtgcagcattctggatcgcccatggccaggcctctctgggactgtggggggcacccacaggcagttcagtgcttcctgctcaggcagacgctgtagggagtttggtccaggaagggggacggcagccaggagcgtctggatctgccaggtgggggcaggtgcgggcaggtaggaaagagaaaaaagccttggtgcaaggagagggaggttgagggcagagtagctggcagctggaggtggggggcagctggactggccgcacaggtgctgtcggttgggacagggcaggaggatgagccgaggccttgaaggccatccaaggggctgaggctccatccccagagaggtgggagccatagggggggtcccagcaaggaagaggttggaccgatggagccaggatcagaggtggggctcaggaggagctgtggaggggcccttccaggatgtgagggcggtgagggccccatgggaagggggactccgggctgtgcaatcaggtcctgtgggagaccagcggcgggggccctccagtggccagtgctcgggtggatctggacagggagggctgcagaggcagcgtaaggagagccaggatggtgggtggagcccctcagcagtggaagaacaagctgggggtcctggacagtcagagggagggaaggagcctgcaaacaccagtggccacagcctcctggcggccctgccagcagacatggcctagaaacaccgaggaccagcagcgcggtatgtaggcaaaggtggtcacttcctgctgtgactcagctcgaattgggtttctgtgccatctacgcacaccctgtgccccacttcctgcttcctgggaagaaagaactttccagtggtcctgggccctgccccgtgtccccagatggtgatgaagctcctggacccctcctgcccatgctgcccattgtcgggcagctgccctactttccgccttggatgaagctccattgtcctctgggaggagagacaaatgaggggtttctggggacagaaggctgggaggaacgaagccacaccctttatggagcggttactctgtgtccagtgggactgtcctctgtgggcctgggacagacactgtgactgtgaccccggccactcccttatggctcagagcagctctgccgggggacgccttgtggctgtgcggctgacgggtgcatggctggcctgtctggaacaggctgttcaatagtcaccctctctccactgggtctagctcctctgggcagctgagtgagaaaacaataccagagctgacctcccagagcaacgggaggcgtgctgtggccaggccctggtgccagagccacacagcctggggtgtggagcagagcagcccttagcaaccagctgaggcccctagagggagaggaactcaccagagcgaggaagagtgggaggtaggacaggaagaggaagggtctgcataaagaggcgccatgagcagagggcgaagggcctgaggaggaaaggcgctctctgtacagagagcagggaaaggcatcgcaggggagggaacagcgtgtgcagagccaggaagaagaggaaggccagcatggctgggtcagagtgctcgagaagaggagcagtggggcaggggcggtgctcagcaccttagtccttaggccccacgccctctgctgtctgcgtgcctgttgggtccctctgactctgcccattgttgaactctctgaagtctcctggagggcagggccctgtctcacctgcaggtctcgccacagcccgctctggggcctccctcagtgatggtgtggccagggctgatgaatagccgagggaccctgccttgcctcatccacaggtgattacttcgggatcctcaaggaggcgagagtgaccgtgttccccttcaacatcctggacaaccccatgtactggggaagcacagccaactacctgggctgggccatcatgtgagtaccaggcttgccacccctctgccctgctggccacctcccggagaggagctggtgcagctcaggacgcgggggccagggcccctggagagagagaaaggaagaacgtgtcatttgtgggggcctaggcgccctggttctccctttctcagaagcgtcttatctatggtaacagaaacaacatcccagaacagggtggtcagcttctccaaagagggctggagtgtggaggctcaaaggctgcaggcaggtcacagctgctcagccctggtcctgccacacaaaacagctgcagacgcaggaaaatggatgcgcgtctttggcgccagcacagctccacttacagacactgaagcctaaatttcagattcttttcacgtgtcatgaaacattctttttgatccttttgcttttaaccgtttaaaaatgtaacaggcgttcttggcccctaggccgtagtttgcggacccttgtgcggggacatcagggctgggaccacccgacccatcttccccgcaggaggggttggccagagccgccagggcccagctcacccgcagctgacagaactccctgtgccccaatagcctctgcccatgtggcagataccccttcccacagagggggccccgtgccatgagggaagcctagaactgctgtcggcctcagccaggtacgggtactgacaaggtatggagatgtgctcccccggcgggtcagaggacctgcggtcaaggatggcacagcgggcgctgccctcggcttcatacccagcccccaccccagcagttctagtttagccattttcttccatagaaggttttttggcagacagtgttccactgcttttgtttaacacttgaaaaccactggcctagaatttacaggttctccacaagacctgaggatcccaaaggagtgaatcgtaaacagtgaatgtcaagcgcaagatgttgcctcctggctcccaccttcagcagttgggaccgtagcagcgggggttggagacagcagaagctagaaggggggctgtgggtctggctgggacccaccctacccccaccccacgtccaggccaggcagtccccagggacacgtcctacctgccttctagcctggtccctctgcctgctaaggcccagactatgtgcccccaggctcaccggccatggagcacccccactggggccacaggatgagcccaaactcaaaacaatcccccccacccaggtcgtccctgcaggcttagggttcccaacacacctggctcccccctctcctctgtgtgcacaaacacatgcatgtatgcactcacacactgttccctcgcctagaaccctcccacttatgccccttgtcagtccttccaaacccaacgtcaagtgttccctcctgcacgaatccctccctaaccccccaaccttcggtgcctccccagtggcttagtgtccccagcagtgtcttgtgccctggagtgagagtcacccttgggctcggggcagccaggccagggctctgggggacgcataagccgcctccagaggacatcagccatgcagcgtgctgagagatggcatcaatggtccaggagctcattagagatgagccattatctggccagacgctgacacagcggggacccccacaggcctcccacggcccatctgtctctcacctgccagggccccggagatgggccttccaggtgtctgagctccccggcatgtaggaccccagcaggctgtgtggcagtgagcccgatgccaggggacagatggcagaggtggtggcctggctgtgagggacaggtgggcctcctgcttcgtgttgtgcaatcagggactcctgtccccctcggcgcccacagtggggtcgctgctggttgccaggcctggggttggagcctgggcttggatctttgcttacgtctgccctgcctcctgcagctcccagacaggcagaccagtgtgaggtccaggggtggaaggcagtgggcagggcagagggtccccacggggtccacaggtgtcctccagccctcacctcgatccagccctgcctgaggttcttgtgatggtttggctggggagggggcagcttggcacaggggcagccaaggagggcacagcccctggcccaggcctgcccatgcgccctctgtgcccgccagacagctcctttcctccctctccttcctctcttcctccctccctccctcctccctggcagcagcccagcacctgcgggagctgtgggatcagaggtaactatagaaatagattgggggacagcttgacggcagctatttctggaaacccaaagcagctgcgcccgggctccttggtgccgtcactgacgagctgccgctgcttactggtgtggcggggtcaggagctggtcaccagcaaagagcccctggcgatgctccatccggccttgggcctgctgtatgctctgcctggggcctcccgtcctctgggctggggtgaccgggggctcctgggcgtggggctgctgtcccaccacctgggagagcccaagctgggctaggtgttgagggctgggcggggcggcagctcctaagcccccttccccacagccagatcctcccagggcgtggccatggggttgcacctgtggccaggggctggggactcagggtggaccaaactggctttgggggaccctggactcatttctagaaaacagcctttgttcctcagagcatggtttctgggagacgggagcactttgccccagaatctcctcctgtgcgggaatgaacagccctagccactgggactcttccgcctggggctgcgttcccagctctgggctggcggctggagacccggaaagagtgagcaggccccaccctgagggaacccagccaggccagacaggcagacaatgatgataaatggatcaggaccgagaacatggggaccctggtcctggcacaaaagccagactcaggaaggggcagtgctgcctgggctcggtcggcccaagtggcccagcgtcggccggagggccagggtcacggcaggaagggccagcctgggcaggtgggccgtggccctgagagaccctggctccagccaggcctgacctgcctctgtcctttcaggcacgccagccccacgggcctgctcctgacggtgctggtggccctcacctacatagtggctctcctatacgaagagtgagtaggggctgcggcgggtgggggcgtggctgcccgactggccctgtctctccctctagaacctttccttgtggccagggcaggctcaggacaggctgccgtcagccaggcccactccagggctcccaggtcagagcggccatggtagcttacaatgcggcctgcaggacccagcaggcagccggcccctctcccctcccctctcccgcctgcgctctgaaggctccaagtcagtgttgccccagtggctctgggggatgaaggggatcccggtcccatctggacaccctcaagctgatggacgcagagctctggtgcgggcagtgggtcacccccaggacctgctgaccgaagcctctccccgctgcccggcaggcccttcaccgctgagatctaccggcagaaagcctccgggtcccacaagaggagctgattgagctgcaacagctttgctgaaggcctggccagcctcctggcctgccccaagtggcaggccctgcgcagggcgagaatggtgcctgctgctcagggctcgcccccggcgtgggctgccccagtgccttggaacctgctgccttggggaccctggacgtgccgacatatggccattgagctccaacccacacattcccattcaccaataaaggcaccctgaccccaacatctgctccagcctctgtctgtctgtgtggggaaggagcaggcctggggcacgaatatcaggtcaaatagctcccgagcaaggctggctccagcctttctgtcttgaaatctcagagctgaggggtgggcacctctctccaggcctcccagtaaggtacttaggaggcgtcaggggctcacctggccatggccatggtttcatctccaggagacttggtgtcttgtgtcacctgctcccacccctgccccagcacacccaagacagcccctctgctgcctcttcccttggaggatccagccccgtgtccgtcagcatgagggtggagaggtgtgggcatgttgtccttggccaccccagtctagctgggcagatgacactgtcattcctaaatgaatggccttgtgctgaccagcagctggacacatgctgggcaccctatgtgtctgtatgggggtgaggggtgggccctgcaagggtaagcctcatctgggggaggcagggcacagtgaccaggagtgtaggctcagccattgccactgggactcctgaggtggacagaggggacaccctccccctctcctcctggcatccatgccgccacttcctgttttcatcccagttctgctgctggtggcagggtcacccctcagcccccaggactccaggccccctgactggggcaggtcgaggacttctatgcttggtgggctttggggtgattctccccggggtgctagaggccctcagcccttcagctttggtcaacattatccctcagggtctctctgtgagccccgaaggccagtcaggggctcccggaggccgtgtggggattagggttctgcggggagaggcctccacctgttccagcccctctcctcttccacctgtgacctcaggcagatcaccgccctcctccagctccaggggtcctcagtcaagctcagagacagtggccgagggccggctttcccttgacctcccgttactttcgctcagggctgcaaagccacggcctgaatggatatttacaaagcgccctcaatccaggatcttcgtgctcacaccgccaagatggggtcccgggccgcattcctgagccttccaggcaagcctggccctctccttggagggctggaggcgggtgcaaggagactcaccccccagcacaggagtccccaggccagagctgtcagaagccacagggcttccgaggagtgaacctgaccctttcatcacacggcctcttgtcccacttccttggcccccagggcacatggtggaggcagggctgccagccctgaactcctcttgccccagccccagccccagccccctcgcccctggacctgggcaggttccccaacttcccactctgcatatggaggtagagtggatgatggtgccagggttgctgggcaaggctgaccctcacctgtgtcttcgctatcccaggtgcccagttgaccgggccccacagcccaggcaggtggccttcagggtctgggccacagagcctctccatccctcagctgtgctggctccttctctctctgggcctccttccctgtctccccagccaggatgctcggcctgggatccgggccatgggtgggaggtgccagaaagtctcagcctgagcactgctcatgttcctaggcagttccctgctccccacctccactccccatcagtcccagcccccactggggggctttatttttaggtaccacttactcagcacccagctgtgtgtgcagccggaggaagcctggttccctggcaaccggcctggctcagtccagtgggcccctcccctcagggctcccacctcctgcccactccccactcacccctgcgcttcaccctcacaccaccccccctgccaaatgcaaatggggtcaggacaccccctcaaccccctgttgtcctcagaaggaagtcttggcccattaaccctggggcccaggacttattctctccccagagcctgtcccaccgcggcctccttccctccatctgggctcctgcgatgtcttcaggtctcagatcacctccgcttattcctgcgtctactctcgccattccctccacctggacacccctatccatctatccgtccatccatctatccgtccatccgtccatccatccatccaacaatattgagttagtccttctatgacacaggcaggggactcactcagctatgagcatggttttcatgccctgccctcaggggcacgccaccccttgggacaagccactgcaggatggggacagggcgggatgttttcctctcatcgctgccatgatcgatctgcgtcctcaggctctgcagaatcattctcgctggtgaggtgagttttgaagtcagatctgggtgtgagcaggtgtcaggaggtgaggcagtggggtgggtgaggagccttcccgcccaagggaacagcatgtgccacggctgtggtgggccgacccaggagagggtccagggctcccgagtgtcccttgcaacaggcaggcctggtgagggactcaggttccaagaaacaaatgaagtatgggaggaaagtgacaggttccccttggctgcagggtggaaacagggtctcctactgtgaggaggcccccagggtggggaggcccctacagagttgttctgggcagtggtgatggtgctaggccctggacagaggcgtgaggtgggaagagggaacatgagagatgtgtaagggggagaatgtccaggatttggggatgaatggggaacaaaagggtagcccccatggtgggcgggtccaggggagctggagagatcctgagtccctctgcaacaggcaggtggctgccgggtgtcgtgagagggctgggctggaaccagtacctgttcatcagggggcgagattcacgcttctcaacctggagcacacagtcctgccacctggccaattttatggtttcatttctattataattttaacatctttactgagatataattcacaagccatacatacaattcacccatacatacaattcacaagccatacacacaattctgtgagtttttgtttatccaaagagttgtgcaagcatcaccacaatcatgaaaacattttcgtcactccccagagagacccctgtacccctgagctgtcacccccgactcctctccagcattaatcgccaccaagccgctctctgtctctatggatttgcctctcccggacacttcctataaatggaatcacggtatttgtccattggtgtccggcttctctcactcggcactgtgtctttgaggttcagctgcgtagtgccatgcctcagcactcgtcatttttactgctgaacagtgttccactgtgtggatggagatgctgtgtttatccatcaggcaatggacacttgggttgctctcaccttcgggctgttgtgaagaatgctgctgtaaacacttgtggacagtttttgtgtagacacgctttcattgcttttgggcaaatacctaggtgtggaattgttaggtcatatggtaactcacacattggacccactgaggaacttctagcctgtttttcacagcacgtgcatcttcttacatgcccaccttgatgataattttttatttttatttttatttatttatatttgagacggagttttgctcttgttgcccaggctggagtgcagtggcgcaatctcagctcactgcaacctccacctcccagcttcaagtgattctcttgcctcaagctcctgagtagctgggattacaggtgtctgccaccacgcccggctaatattttgtatttttagtagagataggatgtcaccatgttggccaggctgctctcgaactcctgacctcaggtgatctgatcgcctcggcctcccaaagtgctgggattataggcgtgagccaccgcgcccagccccgatcattttttttaattgtcagtgtactctggaccccctggatggccacctctcatgcagtcctgccatttgggattggctggattgtttccttggggagaaatggtgcatttccgtaggtggggggccacttatgatgcagcagttccaccctgggtctccccacagacacaagtgcctgggagcaccaactaacacccatccccactgcatcctgtctcctgaaacccccagcattcgccagcgggacagtggacacacacgtcgtggcttagtcacgcaatggtctcccctgcagcaaggaaaggaatgagtggccggtacctgtggaaggatgtcgtggacctacgatgcattgaaaccagacacaaaaggcaaaacggatctacggtggtagaagccagtgtagtcggcagaggcttagccaggtgagggcgcgagggagcttttcagaactggaggtgtcctgtgcttggatgtggtgctgccacaggtgtgcacagaggggaaccttcaagctgtaaactttccatctgtgcaccctactatagccaagtcatatcaagttggaccatataaagttgccaatactgcatgtgaccatttctaacttagaaaagcagtattattcagccgggcatggtggttcatgcctgtaatcccagcactttgggaggccgaggagggcagaccacgaggtcaagagatcgagaccatcctggtcaacatgtgaaaccccatctctactaaaaatacaaaaaactagctgggtgcggtggcaggcgcctgtagtcccagctactcaggaggctgaggcaggagaatcgcttgaacccgggaggcagaggttgcagtgagccgaggtcatgccactgcactccagcctggcgacagagcgagactccatctcaccaaaaaaaaaaaaaaaaaaaagaaaaaaagaaaag

SEQ ID NO: 9973 - DNA, 428 bp, Homo sapiens
ggagcagtgtgaatagtatgaaccagaaaatgatcagtgacaaccatcacacaggaaattttggaagggacacatggcagtgtgacctgttttcgctagggtggtcaagtgggcctctctgaggaggtggcatttgagccaagacccaacttcaagaagaagcaggagggaggaagagcctccgggcatcgggagtggcaatgcaaaggtcctgaggtaaaatacaaaaattagccaggcatggtggcatgcaccagcactcccggctactctggaggctgaggcaggggaatcgcttgaacccaggaggcggaggttgtagtgagccaagatcacaccactgcactccagcctgggtgacagagcgagaccaaggaaaggcatggtgtggcactgggccagacggacactgcacacactgaccctgc

SEQ ID NO: 9974 - DNA, 2470 bp, Homo sapiens
acttaactagaattctagttaagatggtgatcccatggcttatttgcaaacaggaaggataaagagatcagcgttttagtcatggagctcatctttgcccattcctactcatttgctttttcataggagttttttgttgttaaacagtttctctcaagccacatgcattctatgctggctgaaaattaatagtgatgtagatgttcatccgacaagcttttccccatgtgattggttttagccagagtttatcacaggtacaaaattaggcggtatgactgtgcatgttctctagctgatgttgaaacttgtactgtcttgatcatttaaaactatgtttttgtaaatatcaggtttagtccgctttcgggaatatctgcatgctatggaaagagagaaaaaaaggatagataatgaggaatttggtttaaaagtgtgataaaaatccttggcattctttgttctgatattaattgtatttaaataagtcaacccaatgtaactcattccagatcttagtccagctgccctgttcagcctgatgccttttaaaggtttaaaggtgttaatgttttccttttcaacatggcaaacattttttaaaacctttttggcacaatggtgccactgtcctcatagtgttatttctttggtcatgaattttcaggcccttccagtaagaggagaaaggcacttaactggttaacagccccattattatacattgctctaaggaaaaaaaaaaaaaaaaaactttgaatatatcaagaatgggctattccagaggcttctcctcaggagaaactatgcactaggttcccaccaaatacaatgtgacctttttttcccctttctctgtacacaccccagatatgtgccaagcaaatgagaatgagggccgttgacaattaaagcataaagaagctagtcaccagattgagatggacatgctgctaactgctgacagcttgacctgagcagtcctaacttgtatctggtctgttagcattgggttagattgactaacagagtaaataaaattcacctgtcataagacacgctacatctgctatcatcaagaaacaaatcatccagaagaaactttttttcatcctgtggtcacacccttttcttaagagcttcttttttaaaattatgacaaacgaatttcattctttaaaatcacttatcttctcccaaacttgaagtatttaaattaggtggttttgcttttccctctcattgtttattttttggggatggatctaaatgagtaagatgagcaataaaagataccagaaagactggagggatcacagtgttttcatcagaactaagtagagggtcggttcctgcctggttttggggtagctagaaaaggaaatcatgaatgcactggaaatgttggctcgagagaaaagactggcatagctctgcctcgcagtgggtgagagcgtattgatcgtagggacctgcagagttcctatgaccaggtgagtcggctctgaggaaggggttaggaaagcaagtacagctgcatgaaatagctgaagttcctttggggtcaggaagagccgacaattgtggggttttggttgcttttgctttgtttttgagtgggaagtgttgctggaatcccctgagaaccgaaagatgccaggggtcagcaaggctatagaaaaggccagtggtaacacctcgttttcatcctaacagaggagtaggtgcgaatggcaccagcatggatcgttcctttcttgatcattactcatgcttgccactgtagcaacacaacaaagccatgattgtaattaatactaggctaaagaccttgatcaaaatgggagctcatttactgttctatgaggtatgtaagtaacttctcttcacattttccctcagagataaaccacacgtggtagtcttgtttgcgttagtactaaggtcatgtttgatctgtcccagacgagtcgcatatttcctgtagctggagtgttgctcaccataaatggtcattttcaaaaagtattgtgtaattccagctgtacaactgaccagtgagttatctgtcatcactgttgcccacatacccgtccttccttgtgtagtttcatcatcctcatccttcccacatcttgcgcaaaatgattttctgtgctcattcggcaataactatgttattcggcatactgtctttttggcatttgttgaaaaatccaaatgcttttaatccaaaagattaatccaaatcttttttaatccaaatgattttaatccaaatccaaataacaggaggttaaaaaaaaaaaaaaaactaagcatttttacatgtacactgaattggatcagcattattgttcattataatgctatatatatttttggagcaacatactatagttgtcataaaactatctttattcttctcctctaaagtgctgttgtaaattcatttgacctttactgcagg

SEQ ID NO: 9975 - DNA, 313 bp, Homo sapiens
atgtgtatagccagttagaaaaagtccagaagtaatgagattctagaagtagagtttcccttgcttggaaacatgaatgtgttcacctgtgttttgtcagagaagtggcaataagtcctggacagctgacactttttaagtatctcccctatttgctactacttttgtgcctcaagtgcccagtcgttacggtggccttctaaatgagtaaataacattttccaatataaagcctatttgcttaaaagggacaggggagtggatggatgtagtacatgcaatggaaaatcataaaatgtacaattcttctgtt

SEQ ID NO: 9976 - DNA, 735 bp, Homo sapiens
agaaatcactgcctaacccaggcctcaaagatttactcttatgttttgttctaagagttttatagttttagctcttccatttagctctttggcccattttgagtttattcttttatatgttctgagactgagacttaatgagtttgacatcattttctttgcatgtctatttctatttgtcccacaccatgggatgaaaagagtattctttctccattagattgtcttggtacccttactggaaatcagttgaccataaaaaaatgatgatttgtttctggactctcaattttgtttcattgatttctttgtccatctttatgctgataacacactgtaggtaaacctactatttactgtaggatctgaaatcagaaagtatgagtcttcctaactttattcttctcattcaatattgttttggctatttttgtatttttttttttttttttttttttttttttttttttttgtgacggagtcttgctctatcgcccaggctggagtgcagtggcgtgatctgggctcactgcaagctccacctcccgggttcacgccattctcctgcctcagcctcccgagtagctgggactacagacgcccaccgctgcgcccggctaattttttgtatttttagtagagacggggtttcacgtgttagccaggatggtctccatctcctgaccttgtgatccgcccgtctcagccttccaaagtgctgggattacaggcgtg

SEQ ID NO: 9977 - DNA, 979 bp, Homo sapiens
ctccatcctgtttgacagcgatgataacatcaagtgggtctgccaagatatggggctgggggattcacaggactttagagactatatggaaagtctgcaagaccagatgtaaactcctttcttatgtttgtattcacctttatgccttctgttttttgaatgctggagcagtgagtttgatcagcaataggggatgatttaacaaagtttgatttgtggaggtctggtgggattcatttctaagcaggtaaaagaggtttggagagctatagaagctgggttttaagtttggaaatgcctctaaaacagccacatgtggggactggagaaattctaagacaacagttttatggactgcctggtacgagctcagtgcaaatgtattaaacctgaccccacagacattgttagtcatctcgtgacaaatggccatgtggaattagaaaagatttgggtgttgatttttctatttctagaccttttaaagcacagtggacacttattgccccttggcctgagtttagacatacatgaaagatgactgaatgtagctatcctgatttgtcatgagcgctgctcattatttttatatacatttgcacctgcacctgttcctttgacctctggaattctttttgaaacatgaagagaagaaatttcagtcttttccttgagctctgtttgatttacacatgagttttcttccctgggatttgccatgccatgttatttcctgggtctccatgcaggatgtcaggtttttccagttttctgcacttcatcatctagggatggtatccaagaagcttattctcactttgttttttccttccttttgttgttgaactttcttgtataacactgggacaaagggttttacttaaaatgttaatatacagtgagggagggccatctctttactgttttctatgtgaagtttcaaacatttggaaaaaagttgtcaatcacaaacatttat

SEQ ID NO: 9978 - DNA, 331 bp, Homo sapiens
tgaaatggtggtgtctgtccaggcaaaccttgagtccaaatggccaattgtggttgcagagggtgaaggacaagggcctttgattaagttagaaatgatgataagtgaaccttgtcagaagaccaagaggaagagtgttcttgccgtgggtaaaggaaatgtcaaggtcaaattcgaaccaagtagtgatgagcaccaaggaggcagcaatgatattgagggcataaatcgggaatataaagaccacctcagtaattccatagagcgcgaaggaaaccaggagagagcagtccaggaatggttccaccgtggcacacctgttggccaagag

SEQ ID NO: 9979 - DNA, 396 bp, Homo sapiens
tccatacaaataaatgactattccagaactcaagaagcagctattatagaaaaaaaaattaaaaaccacagctattgaaaaattaaaacggcaagagaaaaaaagaaacaactcctgcataatgtttaaataaaaatgttattttaatagcatcatgaatggtcttaaggcaaaaatttcagattagcaaaatgtgatgacatatttattaagattgtattattggaaatgtagacactggactagtatgcctcattatgagctttactgagccatttgcatctctaagaaatatgattttaaaggcccaaagtaggaaggatctgcagggggtcacctgaagcagtgccctgactccaaatggctgataactgagctaatccaaggagaggcgtt

SEQ ID NO: 9980 - DNA, 2096 bp, Homo sapiens
  SITE (922): n equals a,t,g, or c
atacctaggagttgaattgctgggacatatgatagttgtgtttcacatttttagaaactgacaaactattttccaaaatgactatgtcattttacttccttatcagcaatatagaaggttctagtttctccacattcttaccaacacatggtaccatctatctttgattacagtcattctagtgggtgtgaagtatgatttccctaatgactaatagtgttgagtatctttttatgtgcttattggccatttatcctcttaggagagaaataactgtataaatacttcgctcatttaaaaattacattttcttactaagttgtaagagttctttatatatttgtgtataagtctcatatatgattggcagataatttctcccattctgtgagttttttcattctctcagtagtgcaatcacctcccacccacccccacccccacccccacaggcaccttttgagatgaggtctttctgtgttgcccagactggtctcaagtgatcctcctgagtagctgggattacaggcttgcaccaccatgcacggcttcagtggtacctattgaagggcagaaagttttaattttgatgtagttcatttttttccttgtatggtttatgcagtttcctggattatgtgagggtagggagttcaagactcatccttttccacgtggacagcgaattggtcccaatatgtgatttatttttcgagacagtgtctcactctgtcaccaggccggagtgcagtggtgcggtattagctcactgtaacctctgtctcccagggtcaagtgatccccccacctcagcctaccaagtagctgggaccacaggtgtgcaccaccatacccagctaatttttgtatttttttgtagtgatgagggtttcactatgttgcgctagtgcctaagtctcanaactcctgtaagctgtaagcgatcctcccgtctcgccctcccaaagtgctaggagtacaggcatgagccacagtgcccagccagtcatttagtttttattgtaaattttttttttttttttgacaggtcttgctctgttgcccaggctggagttcagtggcaggatcttggctcactgccacctcacctcctgggttccagagattcttgtgcttcagcctcctcagtagttgagaatacaggcacacgccaccatgcctggctaatttttgtcttttagtagagatgggatttcatcatgttggccaggctgttctcgaattcctgacctcaagtgatccacctgcctcagcctcccaaagtgctaggattacaggtgtgagccaccactcccagcctgctgtaaacttttaacagcactttttgcttccatcagtatagtctaaagcgttttaaaaaatagtgatctcttaagtggtttagtcttagaattgaagagtattcatatctagaatttatttttgtttttttgtagttaaaagcaggtatttttgcagaaatgacatacccttactgtattccttaaataaccacatggttcggcataactaaaagatgttgaaaactacgaaagcaaagaaagttaatagtttatacccttagattatcatattattattctgtaattgctttgtataaactgatttttttttaacttaaaaagtcttacatcttctaagagcaagcttagggctaagttacatttattaacagcccagttgattgacttgactttttgccagttctagaacctcatttaattctaagacagtggaaaactgggttatatctcctcttggataacttttgtggaatttatttataatttcaacttctattttaattaagaacataagctacatgaggccaaacattttgtccatcttgttcactatatctagcacctagaatggtgcttggcacattactttgcttaaatttgttaaatgaatgagggaagtaaatattgcagtatttttctacctgttatgtaaatctgtagtttttttgaggaatattttaattttactttttatttctaattttttcaaatgttttaatagtttatatttctcctgccaagggttatggctgcccccttaaaaacaaaaaa

SEQ ID NO: 9981 - DNA, 1301 bp, Homo sapiens
gatatggctacatttatttcttttaaaattggagcagttttcaattactttttaacagaattgttttcaacacagcattttgcagtgcccataaaccatagcaactttgtcctgatcgatacatatttttctgcattattattcattagcctctttgcaaactcactaaaatagaatagtattaaagtatgaatatatagagaacaattattaggttctacatatttatttaggtaaaccaatgttattaaaattaaaaacatgtgcctggcatataagtgcttcttcaggaattcttttttggatgcatagttattattttttaaacaaactcagattttcaaacactgattttcttctctgaacgggcattgcattgttttaaacagtagctcctggaataatgccacctttagtattttagactttcaaacaacaattggaattggataaatgctttcagctgggagcactttcctaatacctttgtaggtaatgggattctctatttgtgctgggtgacaaacggacagtgccctggacagactgcctaccctctgcagaatctaccaaaaagtagagttttcccatgagactgcttgtggtccatctaaaaatgaaaaaataatcagagaaaatgcgcaaagccttttctaactacagttatgaaatgatggcttaaagaggtatttagaaaataagagtggagtaatacagaaacaaaatctgaagaagaaagtttgcttaggagctgatgctctttgtctacaaacaagagggtaaggagctggatccaattgaattgaattgtttttgtttgcttgtttgttttcttccattcagtgcctttcaaactgttttttactggatgaagaaactcacccaagaaaatatatgtcgattcttgtatatgggacaatattagctgctgtgatttttaatactagcataaaatataagaatctttttattactgtgatattgttttttcctaaatgaatgcatagtgtaacaattggtgtcaaaaagcattgaatttttttcagatggattaagctggaataataaagtatatctatgagatgatttctgtaaactctgacttgctgagaaaaaagtgaaaaagctttttctggaagaaacatggcaacttaaccgttattaatctggactaaataaaacaggaaactgcttctttacatttctagtaattttttctgcttttccaaacattgttaagttctatgcaacttgtgctattcaagtaaagatgatgtcagtaataaaattacagaatctaa

SEQ ID NO: 9982 - DNA, 569 bp, Homo sapiens
gctacattcgatttagtttgtaaggtttcaggcccctccccgacccatgtaatatgtaacaaggattatcaaataataaggtcttggatgtgaagtctgctttacacaagaattcaagaaagataggcaggacttgagtaattatgttacaacttcatattactttccaaatgaatacccattttcttctcatgtcaacttctagagatgggatgctgaggcagagaaatatttttatgagactctggagtacatactaaaatgtgcttccttattatttaagaatgtgtaaggtatggacctacatttgtttgctggtggtcataaaataaattcatagccattgtggccaataagcaatctccttcacgctttaaaagtttttggtttataatcccacctggattgtattttcactattctgtatcaccctcctattgcaatattttggttctcaatcttatgtaaagcaaacctcagaaatgatcgtttccataaaattgtgcaatggcaaagccacagaataatattttgagtccatatagccgtgcatgctcatctatatagct

SEQ ID NO: 9983 - DNA, 102 bp, Homo sapiens
gttcaagtgattctcctgcttcagcctcccgagtagctgggattacaggtgcatgccaccatgcccggctaattttgtatttttagtagagacagggtttct

SEQ ID NO: 9984 - DNA, 3740 bp, Homo sapiens
acaagcaattcagagagctgaattttgggcattatcccagcaggaaaaccattgcgggcacctatactaataggtaaatggcttagctttccatggctttaattatctggctgtactcatggcttgttctatctccaagtgcctccctgcttttgatgttggtggtactgcaggatgccaattcttggctggtcccttctactttctgaataaggtcacacgttcactaagctctcttgggttttgacattaattgatttccaattgctttattcaaccaaaaattcatcatattctgattcataccactgaggttttcttgtttctctggatttgtttttatattctttatgtgattttagaaggaagaaaaaataagtgtgtgtgttctctagtctatgttgaatttgaagtcattatgcatttttatgtgccaaataaaacagcatggaaatatgtaaatataaaaaaagcaaaagaacctatgagacagtaataaaaaaaatcaatagtagtggaaggttacaacaactatcaacacttaacagatcaactagtctaaaaggaaaagagaaaatgtatataatcgatattaatctaataactgtaattcaagttccattctctaagaaaagaatattttattttcaaatagccctgcctactccacgtcaagaagaggaaaagaaaatatctgctgttgtaaatagagccccatccttccttgccctgtcccatctggaacttttgtaggctttgctcaaatagtcaaggccaagtttttgtattagtttttccataaaaccacgctgagccaatcagtaatttcaaggttttgtttgtttaaaatctaagagtccaaactttcacaatctattaaaacttggctgtaaaatgacaaaccttcttaaagcctattttctcaaagcttctattcctgctcagattaagagttgacacaatactctctgaacctacttgtaccaatgagctacaaacactagttttaaatgcttttgtttttaaggcttagcttgatgtgaggaaatgcacacattctaactagttttcagatatttaaagcagtacagcctccttaataaagtactgccatttaatgcattcaataatttagcaatatccatgttcattccataacattctaccatatatcataatggaatgagtaaaacaactcaactctttggatcactcttttatttcatagtgaaaaactttaaaatagcttattagtttttgctgaaattctgaaaagaaattctattcacgtttcctctactgaagtattctacctttagttgcagacttagttcgagcagtgtgagaaacacttgatgtaatcaaaggatgaagacaggattctgacatggtatcaagtggagatttagactacattgtacatggaataaatgaaataaaaccatcctaggtaaaatttttaaaaggttaatttctgtcaaatgcagtacatgatgaagaaaggtttaagtatcagaaactgttttcttatacatttcctttttcttgcacctgctacctttcccaaaattgggcatttaatttatctctgaactagtcattaacatagttgttaacttagtaagttttcttatcaaaccccttctcaatgagcaatatgtctccttgtattagaaaatctttctggccgggcgtggtggctcacgcctataatcccagcactttgggaggccgaggctggcggatcacaaggtcaggagatcgagaacatcctggccaagatagtgaaaccctgtctctactacaatacaaaaaattagccaggcgtggtggcacgtgcctgtagtcccagctactcaggaggctgaggcaggggaactgcttgaactcaggaggcaaaggttgcagtgagccaaattcatgccactgcactccagcctggtgatagagcgagactccgtctcaaaaaaaagaaagaaaagaaaatatttttctgatactgtattaggatttggggtttttttaaattagtgcagtctcgctttcatgttactttattcaagctaattatgtgctttccttcattttctggtaactagttgtaaaaatcatgccttgcaggtttacagttttcaaaacactctaaattttttttttttttttcagacggagtttcactcttgttgcccaggctggagtgcaacatcgccatctcagctcactacaatctctgcctcccaggttcaagcaattctcctacctcagcctcccaaaagtagctggcatttacaggcatgcaccaccacgcctggctaattttttgtattttttactagtagagacagggtttcaccacgttggccaggctggtttcgaactcctgacctcaggtgatccacccgcctcagcctcccaaagtgctgggattacaggtgtgaggcaccgtgcccagccctaaatattcttaaactatgatctttcttaacataattgtcttgccaactcccttgtcactgatcaccaacgctgtaatttgacccatattgaccatactatatctcacctacatgaatgcatacttactattattgcttttcctaaatacattactttcggcctatgaggttctgtaaactcagtgttaacacttacagtattctctgtataccttaagcactggcaagaatataacactgggcctttcaacaactagaacaaatattttaaatggacagttccagaattgtggggtatttttacattgatcttttgctaatgcaatcagcaatgtgttttgcacatggaatttaataaatcctttaatcattaaaaaaataataaaagaaaagaacaagctgggcaatgcaggggcaggtttgaaatacgcctgcttctcaaaagaccaacaacaggcatgctccaggttgagtatcagcaaccattaatttcatgaccattctctggagcaaagctagggagccagctaatttttaccccaaaaaaatctccaaaccaagctttttccagggggttgggaagacaataaaatacaagataataatctaaaagaggggaagaaactgggagaaagcacaaacatatacaatttgaaataagaaaaaaaaaaaacagaaaaaaagaaaacaacttgtatgaaaatggtctagaattctacactagcacagtgacggaaaatgtaaattaccagcattaactcaataaaagaaaacccgatcgtaatgaatttttttttttttttttttcttttttttaaaagagggggcctgggcacagtggctcacacccgtaatcccagcgctttgggaagccaaggcaggagatcacttgcagcaaggagttcaagaccagcctggacaaaatagctagactccatcttgacaaaataattttaaaaattagctaggcggccgggcatggtgactaatgcctgtaatcccagcactttggaaggctgaggtgggtggatcacctgaggtcaggagttcgagaccagcctggccaacatggtgaaaccccatctctaccaaaaatacaaaacttagctgggcgtggttgctcgcgcctgtagtcccagctactcaggaggctgaggcacgagaatcacttgaacccaggaggcagaggttgcagtgagccaagatcgcgccattgcactccagcctgggcgacagagtgagactctgtatcaaaaaaaaaaaaaaaaaaaaaaaaaaaaaaac

SEQ ID NO: 9985 - DNA, 175 bp, Homo sapiens
ttgtctttctactacactctcagagaatccctgaattctttcttctaagctagctaatttgatctccaccccatctactgaatttttctttaaaagttcatattttaattctaatagtttcttttccatagcaatcttttcttttttgggtggacacggtatcttcccaaatctc

SEQ ID NO: 9986 - DNA, 343 bp, Homo sapiens
tcatgtaaaaaaaaaaaaaaaaaaaaaagcacatccatgtacatgtacacacacacacacacacaccacagaccttggcacagtatgggtactctagaattcaaggatggagccaaataatggcccaaattaataggtcaaaaaaaaaaacgcctgatattctcaacagatgctgaaaagttgaaactgaacgcctacttttgatttaaagcaaacttttgagtcaaattgggatagatattttaacagttaacaaattaaataaataggatacacgctaaaacatggatgaccttgaaaacaatatgctaagtgaaaggagccagacacgaaagaccacgtt

SEQ ID NO: 9987 - DNA, 501 bp, Homo sapiens
cgccttccctcagtccctctcatctcgtttagattccatctcccgtgatccagtgacatgaacttgggaagaggctgcactgggcatggtcctgggaagggctcacacccagacatggatggagacggggtgagggtcctgtggtgtcagtgctgttgggcagcagggattgctcaggggccgcatctggatgcactgtcagcgctgtgtaaaccatgataacagaagctgcccatgaagtcaggtgcacacgtacctgctcactggcatagaaaagaacactaaggggaaagctttcctgcctcattggtaactgcatttgaagccgaacaagtgagtcattgggtttccgactccaaactcgtaaagactgggaacagaatggaaagtttagacactgacattggagatagatgattctttcattccatcatccattttaatgtatgacgtcaacataaatgtgtaacaagattcattaaactagtctcagaagctcta

SEQ ID NO: 9988 - DNA, 501 bp, Homo sapiens
cgccttccctcagtccctctcatctcgtttagattccatctcccgtgatccagtgacatgaacttgggaagaggctgcactgggcatggtcctgggaagggctcacacccagacatggatggagacggggtgagggtcctgtggtgtcagtgctgttgggcagcagggattgctcaggggccgcatctggatgcactgtcagcgctgtgtaaaccatgataacagaagctgcccatgaagtcaggtgcacacgtacctgctcactggcatagaaaagaacactaaggggaaagctttcctgcctcattggtaactgcatttgaagccgaacaagtgagtcattggatttccgactccaaactcgtaaagactgggaacagaatggaaagtttagacactgacattggagatagatgattctttcattccatcatccattttaatgtatgacgtcaacataaatgtgtaacaagattcattaaactagtctcagaagctcta

SEQ ID NO: 9989 - DNA, 452 bp, Homo sapiens
catcccttttcctgtccagccttccaccctccctcacatcttagtggggagccactgttctcaattctgtgggaagggtcagtgcaagtcctgtagaaatgtattttgacatcattatgagatttaaacaaattcctcagtgaatgtttggttgtgatatgttaacctgcaagttttgaacattgacatgttttcgtgttaggaaacaggagctcacttttctacatccttgttggagcatgctgggaatgaagacaggtggatcttttaactttctcacttctataaagaatgccacacagggtgctgcatggtggctcacacctgtaatcccagcacttgtggaagccaaggtgggaggatcatttgagccccagagattgaggctgcagtgagccatgatagtgccactgcacttcagcctgagtgatagaacaagaccttgtctcaaa

SEQ ID NO: 9990 - DNA, 309 bp, Homo sapiens
aaccctggcttcatattagagtgcctaggcgttttgcagaaacatctcttgtgcccccttgacgtattttcatttcagtgttttagagcccagctgagtaatatttaaagttgactctattctgtagccagcatagtaccaatcactgtcttttgtttctgaaggctgagctcagcctgggatccacagagaggtgaggggggctgtgttctgcatggggtttggtcagggctgggtctgtgtcctaaaggggagctcagtccagcccagctccccactgctgcagtgtgtgtgggcttctccaggagg

SEQ ID NO: 9991 - DNA, 309 bp, Homo sapiens; identical to SEQ ID NO: 9990

SEQ ID NO: 9992 - DNA, 452 bp, Homo sapiens; identical to SEQ ID NO: 9989

SEQ ID NO: 9993 - DNA, 1246 bp, Homo sapiens
tatttttcagttcagtttaacaagtttccactatcactgtggatttatgaatttctccttgcaattatgtcagtttttactttatacaaatagaggttgttattaagtgtctacaagtattgctatttttctcagttaatttttttcttattatttagttaccttttatcccaaataatgctttttgccttaaatcaattttatgtgtaaaattgactatagttacatcagctttattttggtatttgcctgctataatttttccatccttttgttttcaacattttggtatctttttaatagtatacagttggattttttttattttatacaggttgataatttctgcttctttttaaaaactagtttagtccattagtatttattgtaattaaaaatagatttagaagagaaaagatttgaacagatttgggacaccaaggaagatatatggatggaataaaagcacttggaaagacgctcaacatcctaagtcattagagaaatacacactaaaaccacaatgagataccactgtgtacctattggaatagcaacaacaaacctgttaatgccaagtgctggtgaagatatgaagacaatgaaacttgcatacattgttggtgagaatgcaaaatggtacaaccactttgggaaacagtttgggagtttcttataaagttaaatatatacttgccacatgactcaccaatctcactcctgtgtatttacccaagagacatgaaaacttatgtttacaaaacctttatatgaatctgtatagcagctttatttataatctcaaatgtctggaaacaaacattcttccattggtgaatgaataaacaaatcgtggaacatctttcaatgaaatattactcagcaataaaaaaggaatggagtatcgataggcacaacaaggaagaatttaaaatgcattgtgctaagagaaataagccagcctccaaggggtacatacaaattataaaattacattcatagaccttctaaaaatggcaaaactgtaggtctggagaacatcattggttgctagggaatggtgttggggaaaagaattgaccacaaagatatagcatgaggaaatttttgggagtgatgtatctgttttgtttcttagttgtggtgtgattacataactgtatgcatttatcaaaactcatataactgtacaccaaaagagtagattttactgtttataaattgaaaataaagtttttaaaagaaa

SEQ ID NO: 9994 - DNA, 1246 bp, Homo sapiens; identical to SEQ ID NO: 9993

SEQ ID NO: 9995 - DNA, 2256 bp, Homo sapiens
tcctggctgcttcaaatcatcatgcaaaaagtattcacgggttcagaagattggtgaagacaatgagaaatcgacctgaggagcaaaacaaaggcatcagctcttacaccaaaagagttaacgctgtaaccaaaggtatagttttgttttttattttaggagaactgactggtaaatgaagaaatggaccaaattttgtgtaaacgattagaaagatgaacaaagtattgccctttgactggttttcttcttcatcctgagaaagatacattctcttgcagctcttcattcattggtgacaagcccccaccccgggactttactaatgagcttgttaaagaggtgccaaagaacatattcctcctttctttattctttctccaccaaaaccctctacttcagaattttttcaggatatttttcagcccaaggtcagaagaatgtgttaatattttaaataaaatatctggacatctacagccactgtgtaaatagaactgcctaatgttgagagtggtttttagcattaggtttagcaagggggagatccgtgggttgtgcgtcagctttgggtgaattttgtttctaccctgtcacggggaaagttcgggttgagtccaggagtgcacactgctgctgccacccaatgcgctacatatcacttttttttgttttgttttgttttgtttttaaaagatcattttatcttaaaaaggaaagctgatccaagtaaacacgaaagtatttgacacaccccacagattttacatgtgtgtaaatgtttcactttaaaatctctatgacagatacacaggaaacatgagatggtttctgctaatgagtggcccttgagtacacacttagatgctgtctgccctgtaaatttggatctggtgccccagggcagtcaactcttctagcacaggctgaaaacacgtgtgtgtcaactgaggttcacaccacttggggaatgagcctgttttctttccaggtcaggccctggtgtgagatcaattttagggctcctaattggagcacagaaatgtatttggtcaaatttcattgaaggtgatttcttcctttttctgttgtactttatggaaaaaccaagatggaacctgaaagttaatgtatccttgcttttagcaagagactcagtttcttataactagtcctaaggacatatgccgcaattgagtaattttacttttaccctatgaaaataacatggtgctgcactataatatactctcggaatcagtgtgttagttacagctatacagtgaagggggataactgtttctaaatttctttaaggtgatgccaaaaaatggattaaaaaatctgatcagatttaatgttaccagatttagtgcattatttaatgctattggatcttttggataattcttggcttaatttcttagctacttgaaggttaatttgcaagacttttaaaaccttagaaaagttttaaggttgcaaagttatcaacactggggcagagggtggagaggccaatgcgggtagaaggaggcagttatgtttatattgaaggtgaaatttttctttcatttagaatggaaaacatccccaaatgtatcattataaactagtcagccttgactacacaaaattgacctttaagttgcttgagaaaaacacaatgcaaatcgttcagaagggtcaacatcctttggtgctaaaatcttgtgtatgttttcagaatggctttttctgtatgttatagaataatcactaaaggaaaggtagttgaatttaaagtcatgaagcaagactctttaattcagttattttaaacaagaattaaaaccccaaacatccttggcaggctttgaagcacacagaattttctagtatttcttattaaatacaccaataataaacatatacttagtttacctgatgagtttagacataattctatataatgttcgcttatattcatttattaactagcaacacttgtgcaagaacaaggtattctgcttgaaaacactgatttttaagttcctgttgcccgattgtaaagaaaatcatctgacacagaagcctggattttgctctcctaacactggtgttttccttgagcctctaattcaaataaaacaaactgatacaccttacagccttattcatctgtgtctggataactcacttttcatctattgaataagaaaaagtgtttaaacttaataaaataaaaaattgtgcaccaattactacagatccttg

SEQ ID NO: 9996 - DNA, 9404 bp, Homo sapiens
gacttcctcttcagcggtcacacggttacgctgacactgacttatttgttcatcaaagaatgtaagtaatagcccattcccactgaactgatagctgtagtgggagggatccctgggccctgaaattgataggagcccttattctcttgggattgataagctgtgaaagagacggatgtgtgtgtatatatgtatgtgaatgtgaatgtgtgtgtgtgcgtgtgtgtctgtatatatataaaatataaaatttcaactagtcatatgtgatttgaaccctgaaggcttaaaacctggccctggcttctctctagcatttaacatgcctctaaaacatctcccttcttggttagtacttcttaaggtatgaaaagctatcttaatattggaattaattgttaattttattgcaaaaaggattggtacattctaaagacagatgtaatgacctttgaattatttgtaggacacttccattctagcattccaaataattcggttaatgtgttcccctttttaaaacatttccaagtcccactttattctaatttcatcatcatctagcactttctgtgctttcataggagtcttcatggaccattttgccaataccgattattttcttctcaataagaaatgtggtggcaagaaataaaaatctctttctatatttgtatgcttagttcacattatacaaaatccttgggttttctagtaggttttatggccaaaatcatgtcttgttctttgtagggttgtactgttttagctgcccagtaggtctcatttttatatatttcggaggatttgtatatttaggcctattacctcaaaatctttttgaagtaataatgcttcttccttcatgtttgcaaagctggtcagtattacccttcatatttagttccaagttacctcatggcagtattttttggaggtttatcttaatccttttcactgggcatatttaaaagggggtctttcagcagagagcagcagaaggcagcttcccctcccctgtcctccttgttcttccctcctctcttggccctttgttcatccaaatagatttatcctaattggtggtgtggaagtcaagggttatcttcagtggtgcagaagtgaattattgcccctttgattacctggggtatttaagttctgctttgagggtaagatgacaagagttgaggttctctgtagtagatgaagtcaagtcttttttgtgagaattgtagcgtctttttgttgcttcctttgtaaattctacatacagacctgcagtagggagaatagtgggatacatgtggggtcttcatacttgacttaaaagctttttccttatttctgttctcacactcttgtggtggtggagtgggtcctggatctgtctctgcaccatcatcagaggatggtctcttccttaaatttagtcactccatttctaatattgagttattggttctggggggttggatggaaggatatatgttgctttggttctaactctaattttcccaaggaaagttccatgagtatgctatgtaagatcagtcattttctagtgtagatgtacatttgagtttaggatcttctctataatctgaggatcataaaaaaattacagaagaagatggggatgagggtggaggtgggggaagaggtgcatttcagagtgaaggcactgtaggtttaaagtaataaaaacacccccaggaaacttagattcagttttctaaaataactgaaaaccaactgatattaactgtattagtctgttttcacactgttgataaagacataaccaagactgggtaatttataaagaaaaagtggtttagtggactcacagttccacgtggctgaggaggcctcacaatcatggtggaaggcaaaaggcatgttttacatggcagcagacgagaaaatgagaacgaagcaaaaggggtttccccttataaaaccatcagctcttgtgagacttatttcactaccacaagaacagtatgggggaaaccacccccatattcagttatttcccaccaggtccctcccacagcacatgagaattatgggagctacaattcaagatgagatttgggtggggacactgccaaacctcataaacaataatagcaaatagacataatactctgtcccaggcactattctagggccttgatgtaaattaactcatttgatccttacaaccaccctctgaggaatgcagtattttttcccatttttcagatgagtaaacttaagcttagagaaagtgacttggccacagtgcagagccatcattttgagaagcaggtattcatgttgaaggaggctgaatccaggggttttgcttttaatttcttggctctgtttagaactttggaaattcaagctggctaactctatcgtattgccaaggaatagtctacttatctataagcagggacattgctcattattgtacattctttcatctcagagcaacagcaaggcaacttgtgattgattttatactttaatgaaggcctctcagtatgtagagacattttttcccaagacatgattttgactagaggtttctaaaattgtgtacatttatatatagtgtgcaaggaataccattctgctttctccaatatttgattagaaatagagggacaaatctgtaatacttaacacaaactcagtttatagtcagttctgtatgtaagcagagcattccatgtttgtgtctgtttttttctatgcaattaggaaaaacatttatcttctaaattataccatatgttcttgttctgagtaagcagtggttccagtggtttctttgaaaagtctgcttctagaattagatgtatcatttatatatatatttttttactttcccgccttttgatcagtttgggctcttttccttgtttgctctgttgtcatgagtagatttaaatttagttgtgagagcacatgaagatgtggcaccaggaccatttcggggttagcaagggagggcttcatacagtcgtgcaaatattataattggggggtaggttcatgataaaattagcctggagaaatcagactagctgttagtgccaatcatctggctagtagagaacagttttttggttttttgttttttcacctggccaccctaccaagtctctattatttaatgagccctagggctagaattccacacagacagtgatgttagctattatttgtgtcatcatctagctcattgttatccctatgggatgaatgagaagaggattaccattttgccattctatttcaaaacagcttctattcaatcttttctttgggtcagccagtgttctcagttaatgagtggtgggcccaatgtggtagcataacaggaaatacatttttatgagaaagcactgctggggtttccagccgttcctaaaacctcacttgcaattccgtgagtagtaaaaagaagattcaggccacctctggacctacttcaactttgcttcttgtgaataaacaaatgcaaaatagttctagtttgcctaaacattttgaacttctaaggtaaatcccagatgacctgtaagttgggaagcagggttgctaagagaccttgggggtgggaggcgggtagggtctgaggtgctgggaaacgcatatttagtgagacctccagatttctcaatgttcattcaatttttaatgtcctgagtctaacacaacagttatggggactggatctggctcctaagactgcaagagtaaggcctctcccattaaaattctgagattccatgagttttcttccagaacttagtggcagaatgaagtaactgacaagtaataaggaatatatccaaaattagaaaatcagactttcaaatgccatacaggtttattttcttactgtgtgccatttgggaccaacagagcaacggctagttttaccaagagattatatttgaatgatacctgatttggtatttcatttaaagttctggaaatgggctgggcgcagtggcccatgcctataatcccagcactttgggaggctgaggcaggcaggtcacctgaggtcaggagttcaagaccagcctggccaacatggtgaaaccccatctctactaataatacaaaattagccaggcataatggcgcacccctgtaatcccagctactcgggaggctaaaggaggagaatcgcttgaacccaggggacagaggttgcagtgagccaagatcgtgccattgaactccagcatgggcgacaagagcgaaactccctctcaaaaaataaataaataaatataaagttctggaaatggatccttttgctattcaatcatctttctacatgtgaatgtaaatatcactataaatgtaaacatagttaaatatgaaatcaatttcagtttattggattaacttttattgtgagctaatacagctttaaaataaaacagatcaccaagctgctagagatgaactctggtttcagttatatttgtcattaacacttgtgtgagaaggggaggaccatcatgtttaaaccagtgagtgccacagttgtctcttacagctagtaagtagaatgaacttttaagtggctttaccaggaaggctgagtccataagtgaatggttaggaaccctaacctttacagagggaatgttttatagtttctattggcaataacagtgtaaaattgctgagaatcaaaatattgctagccacaatgccattccttctgacccccttaccctacacatacccctggagaaataatataaatttaaaacctgaaattactcctgctttcccatttccccccttattttcatagaccaccaccttttcttttgatccctactatctttctttccagtgggaaagtggctcctttatgtgagccagtatgcagcaattccagcaaacctaataagaaacaattctgttctttcttactaaacagcttattcacgtgggtaaggcctagaatgtctagtgttaccagcttccccagtgaatgactattacgcccgctgccagggagcccctctgcctccctcctacctgagcagatcctgggcagttcatagtgactcagtttaggttatcagttttatccttctggtgacttcctgatcctgggttattctacttaaggtcgttaggacagactgtaatcattacattcatctctgggaatcttattaactctgtaatttttctactgtccagattcgcctcgtcacttctggtggtatcatttaatctgctggctgctgagtgctgccgggatcatctgcattcttgtagcacacgaacactacactatcgatgtgatcattgcttattatatcacaacacgactgttttggtggtaccattcaatggccaatgaaaaggtgagagcagtgaagatgcttggataatttcttttctttgaatgcagtggacccttttcatgtcgtggggttttagatagcctaatggggataaccgatgttgccacattcacttaaacatatatccattactgctttttaaaataaagcaaagaacttcacaaatataaatgccatttatggataaaaatgccataaagttatggagcacagtgcattgctaattcaggtaacttaaactagaatgaaaaaatatatgtactaaattaaaatttaggaaccttctctgtaaaagcattgtagtgcagctgggtaagacataatcctgccttcaacttaaattaattttaaggagaaggtaacagctattttttttaattttttttttttttgagacagagtcttgttctattgcccaagctggagtacagtggtgcaatcttggcttactgcaacctccaccttccaagttcaagcgattcttgtgcctcagcctcccaaatagctgggattacaggtgcacgacaccacgcctggctaatttttattttgtatttttagtagagacagggtttcaccatgttggccaggctggccttgaactcctgacctcaggtgatcctcccacctcggcctcccaaagtgccaggattataggcgtgaaccaccgtgcccagccgatagcagctattgtttaaaatcacacaaaataaatagcttatgaatgactggatttggtatatcctctggtgataatggtgctctctggcttcccttctgattcttcctcatttgctactgctgcttccttgtttccagatgccttttctttcttctcccattgaaacttaaagagctagctcaaatgccacctcttccaggaagctgtctctaactcttgctctcttcctctggtccgaaggcagaattattcctcccagtctctcttttctcctagtcttggtatgtgtccttggtgtaatagagttggtctgtgtaccatgacttacttatctttgaatagacttgccatattgtcaatttggagaatttgtgagcaattgaaatattacatttccaaaggatctacgtccaactcttggtgtccactaataaatgctctttctttggattactttatttctctttgtagctctgtttcctattttgtagtctcccatttccatcttccttcttacacttccatctagttgactactgacaccactgaaccaaaattttcatctttcctcttaaatgtgttcaacttctgagctcttctttcactctttgacttgcttggcccctagatttgatcactcacacatcctgaaaattattcctcctgaataattctgaaatccattcccagagtctccattcttactggaattgcaggcagaagaaattgcatgagccacaaaggaaagaaagacacctaggtgtgttaggggagcggagtcatggtagagttagggaaaggacatgaaaatcattactgccatgtgattctgaattctgttttccctaggttacagtgaatgacaatttaagaaaataattgggatgcaaattgagaaagatatgtctcatttaaatttttttctaccatttacagaacttgaaggtctcttcacagactaatttcttatctcgagcatggtggttccccatcttttatttttttgagaaaaatgtacaaggctcaattccttgctgcttctcctggccgctgtcttggcctcctggctgcttcaaatcatcatgcaaaaagtattcacgggttcagaagattggtgaagacaatgagaaatcgacctgaggagcaaaacaaaggcatcagctcttacaccaaaagagttaacgctgtaaccaaaggtatagttttgttttttattttaggagaactgactggtaaatgaagaaatggaccaaattttgtgtaaacgattagaaagatgaacaaagtattgccctttgactggttttcttcttcatcctgagaaagatacattctcttgcagctcttcattcattggtgacaagcccccaccccgggactttactaatgagcttgttaaagaggtgccaaagaacatattcctcctttctttattctttctccaccaaaaccctctacttcagaattttttcaggatatttttcagcccaaggtcagaagaatgtgttaatattttaaataaaatatctggacatctacagccactgtgtaaatagaactgcctaatgttgagagtggtttttagcattaggtttagcaagggggagatccgtgggttgtgcgtcagctttgggtgaattttgtttctaccctgtcacggggaaagttcgggttgagtccaggagtgcacactgctgctgccacccaatgcgctacatatcacttttttttgttttgttttgttttgtttttaaaagatcattttatcttaaaaaggaaagctgatccaagtaaacacgaaagtatttgacacaccccacagattttacatgtgtgtaaatgtttcactttaaaatctctatgacagatacacaggaaacatgagatggtttctgctaatgagtggcccttgagtacacacttagatgctgtctgccctgtaaatttggatctggtgccccagggcagtcaactcttctagcacaggctgaaaacacgtgtgtgtcaactgaggttcacaccacttggggaatgagcctgttttctttccaggtcaggccctggtgtgagatcaattttagggctcctaattggagcacagaaatgtatttggtcaaatttcattgaaggtgatttcttcctttttctgttgtactttatggaaaaaccaagatggaacctgaaagttaatgtatccttgcttttagcaagagactcagtttcttataactagtcctaaggacatatgccgcaattgagtaattttacttttaccctatgaaaataacatggtgctgcactataatatactctcggaatcagtgtgttagttacagctatacagtgaagggggataactgtttctaaatttctttaaggtgatgccaaaaaatggattaaaaaatctgatcagatttaatgttaccagatttagtgcattatttaatgctattggatcttttggataattcttggcttaatttcttagctacttgaaggttaatttgcaagacttttaaaaccttagaaaagttttaaggttgcaaagttatcaacactggggcagagggtggagaggccaatgcgggtagaaggaggcagttatgtttatattgaaggtgaaatttttctttcatttagaatggaaaacatccccaaatgtatcattataaactagtcagccttgactacacaaaattgacctttaagttgcttgagaaaaacacaatgcaaatcgttcagaagggtcaacatcctttggtgctaaaatcttgtgtatgttttcagaatggctttttctgtatgttatagaataatcactaaaggaaaggtagttgaatttaaagtcatgaagcaagactctttaattcagttattttaaacaagaattaaaaccccaaacatccttggcaggctttgaagcacacagaattttctagtatttcttattaaatacaccaataataaacatatacttagtttacctgatgagtttagacataattctatataatgttcgcttatattcatttattaactagcaacacttgtgcaagaacaaggtattctgcttgaaaacactgatttttaagttcctgttgcccgattgtaaagaaaatcatctgacacagaagcctggattttgctctcctaacactggtgttttccttgagcctctaattcaaataaaacaaactgatacaccttacagccttattcatctgtgtctggataactcacttttcatctattgaataagaaaaagtgtttaaacttaataaaataaaaaattgtgcaccaattactacagatccttg

SEQ ID NO: 9997 - DNA, 2086 bp, Homo sapiens
gtaaaacccatttacatgtaggaaagaaaagttgagcttcaacccaatgtgccactttgatataaaacaagtatgatatatatataaactgaagatataaaacaagtatgatcttgcctttgaaatcataaatgtttggggtacctgttctttgccagttaagatacatatcttattatctttgtttttttcaagtctatgctcctgtttgaagcttttcctgtaatttaggttgtctgtgaaatacctataacatataattcctatagagtatgccacattttttttctaactcatttcaaatgaaattctctcagattctagtttttgagcttgtccactagatctgaaaataaagcatcctttcctgagtccacttgaactaattgtgaatttgttacttaatttactggcatcttgggaaacaagttttgctgtggcaggaaggctgttttgagagtgagcgttgagtctactctggtttgtggatgacattgcattagggttatttcctgtattaccagtgcccccttgtggcaatatactttatgacttggaatgcaaacaccacttttaaaagcctgttttcaagtttttgaaaggcatttgttttctgttgtttgccaataatctgaaagtatcatgtgaaaggaattattttaaaagcattttaaacctttcccaaaggtaaaatgtgctcagattataggcacttgtaattctaaccttgtatccatttgatcaaagaaaatttgtagaacatttttacctctcatgatcacaatcattagtgtctccctttataacgacctatgttttgtttactttgaaacaccaaatttgttgtcttggttttttttacatgacagaactcatgcagtttcttttttagttgaaagttcacatcttgccccttgaatagtttgaacatttctttcttaattcttttttgtttttgttttgcactgtaaaactgatgaaaactttaagccaatcttaatgcactagcctctgtagtgtaaggaagtgtgagaaggagtttcttaatgagtttacacgtttaaatcaagcatattataagttatatgccatgtgttgaaggcttttctatttatatatataaagatttttagtatttgtttttagtgtccttgtgttgcaataatttaactcctttgactcagttgctgaaaatatttcttctattaagaagtgctcttgacttcaacacccaaacactgaaaatcatgtcaatgttacccaaagataagtttttatacagatacacaccttataagttctgatttattttcttactcattatgctgtgttctaaataaatcatgaatgagaagagtgctttattgtgaaattatttaaaactgtcctttaaaagaaaaagaggaaacgatgaacaaaaactaatctaattgccaagttagaattcattatttaatttacctcctatgcaatgattaatgctgcaaaatgtatggttatgttaccgtatattcacaaaagaaatattattacaaggtttcagaggtagccaattgcattcttttggaaatttactgtactgtttcaatgtgttaagtgccttgttgtaaagtaaaattttaagtctagattcattattttcctgacatatatttttcattatgatatctactgtatgctattgtgatagttttatgaaatgcttacattttaatcaaatatgtaaatttcagaagctcttttttcctacccaccagtaccttaatcattggtttatcacattggattcaaattcaggttccttttttgataaagaggaaatttgttttccatgcttgtgattttgtgtttgtaaacatttcaggaggaatttaggagtgtaactatagtttatacttctataatgttgtcttacatttacatttttaagtgcctaattgttaaaactgatttatgtttctcttctaaagaggatatgtgtacttggtttctaatctctttggttttgctttttaaatatgcaagagcctatactttgtaattacctaataaaccacagtgacatcaacagtcttttcaaaaataa

SEQ ID NO: 9998 - DNA, 426 bp, Homo sapiens
ataagtgttggccccattattataaaaggattatgtgaaatgatttagctttgcaaacctatttttccacatacaagaatgtttggctgggagagcaacattcccttccctgagaaagctttctagggcgagctatccctcatcttggccataggtggccaaacacttacctccttcttcttcttttttttttttttctgagatgagttttgctcttattgcccaggctagagtgcaatggcgcaatcttggctcaccgcaacctccacctcccaggttcaagtgattctcctgcctcagcctcccaagtagctgggattacaggcatgtgccaccatacctggctaattttgttttttccttttttttttttagtagagacagggtttctccatattggtcagattgatcttgaactcctgacct

SEQ ID NO: 9999 - DNA, 797 bp, Homo sapiens
tgctctcttcctctggtccgaaggcagaattattcctcccagtctctcttttctcctagtcttggtatgtgtccttggtgtaatagagttggtctgtgtaccatgacttacttatctttgaatagacttgccatattgtcaatttggagaatttgtgagcaattgaaatattacatttccaaaggatctacgtccaactcttggtgtccactaataaatgctctttctttggattactttatttctctttgtagctctgtttcctattttgtagtctcccatttccatcttccttcttacacttccatctagttgactactgacaccactgaaccaaaattttcatctttcctcttaaatgtgttcaacttctgagctcttctttcactctttgacttgcttggcccctagatttgatcactcacacatcctgaaaattattcctcctgaataattctgaaatccattcccagagtctccattcttactggaattgcaggcagaagaaattgcatgagccacaaaggaaagaaagacacctaggtgtgttaggggagcggagtcatggtagagttagggaaaggacatgaaaatcattactgccatgtgattctgaattctgttttccctaggttacagtgaatgacaatttaagaaaataattgggatgcaaattgagaaagatatgtctcatttaaatttttttctaccatttacagaacttgaaggtctcttcacagactaatttcttatctcgagcatggtggttccccatcttttatttttttgagaaaaat

SEQ ID NO: 10000 - DNA, 2087 bp, Homo sapiens
gtaaaacccatttacatgtaggaaagaaaagttgagcttcaacccaatgtgccactttgatataaaacaagtatgatatatatataaactgaagatataaaacaagtatgatcttgcctttgaaatcataaatgtttggggtacctgttctttgccagttaagatacatatcttattatctttgtttttttcaagtctatgctcctgtttgaagcttttcctgtaatttaggttgtctgtgaaatacctataacatataattcctatagagtatgccacattttttttctaactcatttcaaatgaaattctctcagattctagtttttgagcttgtccactagatctgaaaataaagcatcctttcctgagtccacttgaactaattgtgaatttgttacttaatttactggcatcttgggaaacaagttttgctgtggcaggaaggctgttttgagagtgagcgttgagtctactctggtttgtggatgacattgcattagggttatttcctgtattaccagtgcccccttgtggcaatatactttatgacttggaatgcaaacaccacttttaaaagcctgttttcaagtttttgaaaggcatttgttttctgttgtttgccaataatctgaaagtatcatgtgaaaggaattattttaaaagcattttaaacctttcccaaaggtaaaatgtgctcagattataggcacttgtaattctaaccttgtatccatttgatcaaagaaaatttgtagaacatttttacctctcatgatcacaatcattagtgtctccctttataacgacctatgttttgtttactttgaaacaccaaatttgttgtcttggttttttttacatgacagaactcatgcagtttcttttttagttgaaagttcacatcttgccccttgaatagtttgaacatttctttcttaattcttttttgtttttgttttgcactgtaaaactgatgaaaactttaagccaatcttaatgcactagcctctgtagtgtaaggaagtgtgagaaggagtttcttaatgagtttacacgtttaaatcaagcatattataagttatatgccatgtgttgaaggcttttctatttatatatataaagatttttagtatttgtttttagtgtccttgtgttgcaataatttaactcctttgactcagttgctgaaaatatttcttctattaagaagtgctcttgacttcaacacccaaacactgaaaatcatgtcaatgttacccaaagataagtttttatacagatacacaccttataagttctgatttattttcttactcattatgctgtgttctaaataaatcatgaatgagaagagtgctttattgtgaaattatttaaaactgtcctttaaaagaaaaagaggaaacgatgaacaaaaactaatctaattgccaagttagaattcattatttaatttacctcctatgcaatgattaatgctgcaaaatgtatggttatgttaccgtatattcacaaaagaaatattattacaaggtttcagaggtagccaattgcattcttttggaaatttactgtactgtttcaatgtgttaagtgccttgttgtaaagtaaaattttaagtctagattcattattttcctgacatatatttttcattatgatatctactgtatgctattgtgatagttttatgaaatgcttacattttaatcaaatatgtaaatttcagaagctcttttttcctacccaccagtaccttaatcattggtttatcacattggattcaaattcaggttccttttttgataaagaggaaatttgttttccatgcttgtgattttgtgtttgtaaacatttcaggaggaatttaggagtgtaactatagtttatacttctataatgttgtcttacatttacatttttaagtgcctaattgttaaaactgatttatgtttctcttctaaagaggatatgtgtacttggtttctaatctctttggttttgctttttaaaaaatgcaagagcctatactttgtatttacctaataaaccacagtgacatcaacagtcttttcaaaattaa

SEQ ID NO: 10001 - DNA, 2207 bp, Homo sapiens
ctttgtaagcaaatattctaaggagaatcaatcttattttttaattgaactttttgaaattagggatactataataactgataaagatgaatttctgtgtttctaaagaatctaatttcaattactaccattaacatataaatgtgcttccaaaatccaagcaggtccatacaatttagagatttgaacactgttatcatgctttaattcagtcattcattaaaatattatctattcacttatttgatgattccaaacatttgatattgtattgtgtttttataattatttgaaatctgttcaccaatgctttgtaatggttttattaattgtgtagccattgctacttagatagtaacccactgagcaaaggcagtcatttattttcatccttgaagtaggggaagaaaattattaatttattagttctactttttcctgcattgcttattttgtaaacattttactatgaataatctgttctctttcactgtattaaaaggagaagaaaatgaacatttgagaatggaaaaaagtaataatatacaaataatctagtgctataaaatgcattatagtaagacacttttggtgtcttcgagtgcactatgttggaataaattttatacttgttgcttagtaaatctcagtcatacgtttggtttgaagctgtttttttttttaatttgaagtttaattttaaaagtgccacattgtaaaagttaccgttaaatactatgtagtataaaaaaccaacccaagctattgttaatgctctgaatgtttttctttgaaaatttaagtttagagaagaaattccttcatttttctcccctttgctaaaagaaagaaaatctataatatgtaagtctatgaatctttaaataactgaaggaattttagcagtactttgtataataaaaatattttttaaactataacttgccttagagcatggggtttcagaaagttttgacgaaaaactcatcttcattaaagagtctggataacttcatcagatggtaatttaatatgtcatgaaggggacactcaacattgggtcatctaccgtctaaataaatacggatttcatggtggcatttgaagcacattttgcaaacattatgatgttctattgtcttgctgaattctttattataacactacctcaagacaaatgatagactgttggtaaggtaaattgggttttcaatgtcaggaacaaataaaattttgcaaatagaagtcatcaaataattcaacaggaagaccatactggacacagatgttgtcagttacttctggacaatgtggtaacatggatatttcagtcactggtaacaatgtcagggttaacacccaatgaattatttgaaacaatttgggttgcaaaatttgaaattaattagtctattttgagattgattttctacgtgggccaattttatgtccattacctaaagccacaatctcccgctctaaggagttaaaggatgaaaacacccaactgctacactggaatggcagactggatattcaagcattttggcatttaatgcctgctaaatttttgtccgattatatatagatttgatgtatattattacccagtaaattcttcttgggaattttgtatacattatggaatattaggataagtttttgtaggtcagaagaatttcaagtagtttttagacaaaacatatccatgagtgtgaaaaaagctgtgttgacgaatagattacatttcacatttaccagcaagtcagtaaaaaatagtgcttatttacatagtcaatataatttaatgttctaaaaataatatcttcgatctgcccaatatttaatgtatcatttgagatttttaaaaatgcatccgctccattatgtaaacattaagatatgcctatgtttctttaactatacagcctctttacaataaatttcttgatttttgtgcacaggatagtattgcaacctgctatttagcctttggtgccttagaattattataaatatttaacaatatgtacataatgtaaatactgccaagagatcagtaaggccaaatattttctctattcactttttattgctcttgctttctattgctactaaagcctcttttatccagctttgtaatagttccaacattgtagcgaatgtaaatgtttactttcaataaatctgaacttgttcaacaagta

SEQ ID NO: 10002 - DNA, 1950 bp, Homo sapiens
aacatttgatattgtattgtgtttttataattatttgaaatctgttcaccgtgctttgtaatggttttattaattgtgtagccattgctacttagatagtaacccactgagcaaaggcagtcatttattttcatccttgaagtaggggaagtaaaattaataatttattagttctactttttcctagcattgacttattttgtaaacattttattatgaataatctgttctctttcactgtattaaaaggagaagaaaatgaacatttgagaatggaaaaaagtaataatatacaaataatctagtgctataaaatgcattatagtaagacacttttggtgtcttcgagtgcactatgttggaataaattttatacttgttgcttagtaaatctcagtcatacgttggttgaagctgtttttttttttaatttgaagtttaattttaaaagtgccacattgtaaaagttaccgttaaatactatgtagtataaaaaaccaacccaagctatgttaatgctctgaatgtttttctttgaaaatttaagtttagagaagaaattccttcatttttctccccttgctaaaagaaagaaaatctataatatgtaagtctatgaatctttaaataactgaaggaattttagcagtactttgtataataaaaatattttttaaactataacttgccttagagcatggggtttcagaaagttttgacgaaaaactcatcttcattaaagagtctggataacttcatcagatggtaatttaatatgtcatgaaggggacactcaacattgggtcatctaccgtctaaataaatacggatttcatggtggcatttgaagcacattttgcaaacattatgatgttctattgtcttgctgaattctttattataacactacctcaagacaaatgatagactgttggtaaggtaaattgggttttcaatgtcaggaacaaataaaattttgcaaatagaagtcatcaaataattcaacaggaagaccatactggacacagatgttgtcagttacttctggacaatgtggtaacatggatatttcagtcactggtaacaatgtcagggttaacacccaatgaattatttgaaacaatttgggttgcaaaatttgaaattaattagtctattttgagattgattttctacgtgggccaattttatgtccattacctaaagccacaatctcccgctctaaggagttaaaggatgaaaacacccaactgctacactggaatggcagactggatattcaagcattttggcatttaatgcctgctaaatttttgtccgattatatatagatttgatgtatattattacccagtaaattcttcttgggaattttgtatacattatggaatattaggataagtttttgtaggtcagaagaatttcaagtagtttttagacaaaacatatccatgagtgtgaaaaaagctgtgttgacgaatagattacatttcacatttaccagcaagtcagtaaaaaatagtgcttatttacatagtcaatataatttaatgttctaaaaataatatcttcgatctgcccaatatttaatgtatcatttgagatttttaaaaatgcagccgctccattatgtaaacattaagatatgcctatgtttctttaactatacagcctctttacaataaatttcttgatttttgtgcacaggatagtattgcaacctgctatttagcctttggtgccttagaattattataaatatttaacaatatgtacataatgtaaatactgccaagagatcagtaaggccaaatattttctctattcactttttattgctcttgctttctattgctactaaagcctcttttatccagctttgtaatagttccaacattgtagcgaatgtaaatgtttactttcaataaatctgaacttgttcaacaagta

SEQ ID NO: 10003 - DNA, 21619 bp, Homo sapiens
caggcaccatatctggaaatcaagaagcaaatggataaacaggacccccttgctcatcccttactgcaatggtataaaattctagttttcctcttaatgaaaacagcatccttttctactgcttgatttaaggaaaaaaaccaaacaaacaaaagtaaacctgtcttacaagccctgcaatgctatagttctacaagcttatgagacctggtgattttacaaccttagagtccttaatgactctcactttaattaaaacttatacatcacaaggggaagagaatgctgtcacatgcactaccagggataaatagtgcatttgacagcagtttgcctatagttttaaaagatgtgattaactagcttatgtggcaaaagcattttggttcatttaattttctagttcagtgaggactaagtgatcaaactcagtgtttcaacctttattattgaaatctttctaatctaaaataaatgttttatattttgctcccttaacaaggcagtataaatatgattaactcttaactctctgcttgctcagtgcagaagatgcacagtttcagagtgagcctggtgagggatgtagtgttaccccagcatgaattctagaaggagggctagactgtgaagaggagagaagtcaccttgctgtgatgcccatttcaaataatttgccctcttctacttctaataatttcctctcttgtttctcatttgcaaaatgaagacactagtttctactcaacatcccttataagggttttatacacatgtctctttgaattaactttgaaaactccaactccgtgagatttaccatacagtaatacaaatgtaaggcttataagagattgatatgaatgagcacttataccatgctacgaccaggaagttttaaaaaaatatgtaaaggtgggcagatgcaaaagaatctggcttcctcaagattctgattacttaactttcacttcattaaaattttatagtacacatttaatttagtctaacaagattataacaaaaattaggtatagaagccttccttctttgtatctgttatgatctgttactaaattctgaaacaattaagtaaaataacactaaatttccattgtaacctttaaatttttctcattgttatattcagattgaaggtaaaaattgcatatatctagttgctttctttttttccttgtagtcagatggttaacttttaattcttgtgatcatttccttcagcttgttagtcactcttctttcaagatgaagagagtctaccaaaacttattattttgtgtgcttatagagcagttcctttcagatacttcaatttaatttttttcaactgcagagtctacgtatgttggattttgtatgtaaaccattgtatatatatcagctcaaagagatcctcaaatatttaaagaaaaaaaatcttcataagaacttatccttaatttaagcaatgtaagagaggaataaaagaagcagatccatgactcactgctcttatttgtatttggattatcattatttgaaagtacattcagaaatgttcaaatgttcattttgctgatacttgaggttatgcttattaaaaactatgtcttaagttttagggaacaacttcctagtgtgttttctcagattaaaatattaccttttttgttacataagctctttaaattgtttcaggaaacaaacctaaattatgcgactaaatgaaattatttccaagtttagtttatggcacagcaaaaataagttttaatcggttgccaactaagaaaaagaactttaaatatatttggcatgtatttgtgactaatggatcattttaatttcagggttatatcaagtaatagatcacatattgtgaaactgccagttaacagggtaagttgttttttttttttttacatatgcatacagaaatgggaggagtacttatcagttgggagaacctaccttgtaatttttagccagactctccaagaattgaagtaaacccaggttaaatataattctttagtttgaaatagccattgctcactagctccaaacctttccaagataacaaattcaaattcagtctgctgtcctgactttttaagtgaataaaaacatcaatatgaaatcatttagttattccacaagcaattgaaaaatattatatggagattaaccagaaggaagttaatgtgctttataatcgttgtcagtttcatgttggcacatttccacttttctacagctgagaagctattgacctcagacaacttatttatcagcctagtaagcttaaaaaataataatttgtaaaaagctaatagactctggatttcagttctgatcatcacctaagatctgtacctaaaaatctcatttttgccatctgtgaatctctaaatgtgagattcctatgcattatattcctgcataactatattcctaagagaaagggaaacacttagaagatgttttcaagctattaatccaaaagattctgctttcatttctttccatgaccaaggaggagactatatttgaatgtaggcaaaaattctcaattttataaatatatgcaaataaagcataataataatttttgcagttttataaacttttcttttctgcttagcaaactccagaatatttccccaattgaatagctagtatatacttagggactcaataataaaaatgttaaaagaaatgtaattaagaaggcagatctgcttaaacatgattgcatactgtattccaaagctaaatataaatggctttggattgtctgtttcctattcctttcccatttgcccaaagaattgttcttcatatttgcaattccatgtgacttatcacttgcgtagagttttaaaaacattatacaaattagcttgctaatgtggttagtggaaaattactatagtttgaaagtgggtaattcttaaaccaataaaatttgaaattgtcatcagcctgaatatatgttaagttttacatgtttttgtttgtctttatcttaaatggcagcaattgaagtttatgcatactccacatcagttccttcttctcagcagtccaccagccaaagaatccaattttagagctgctaaaaaactctttggaagcacctttgcatttcagtgagtaaggcttaatgttaatgggggtgtgctcccattaacattttccagaaatgtatggggaagatatcactgtctttcagtaaatgatcattcagtagatggtcattcaacagatggtcatgtagtcaactacataatacttgatttggcaatccagaaccttcagaaggcaccatgacttattatgttttgaccactttgaagataattaattttctggttttgctttttcctttccgtctgtttttttagtggctcacacattgaaaactggcactccatcctgaggaatggtctggttgttgcttctaatacacgattgcaggtagattttctgaatgctttcacaagacttcattcttcttcagaattgagattcagtaagcaaccctgttgttaggtttaacttgcaaaagaggaagcatgtgagtaagacattatatggaatttctagtaggcatactagaactgaagcagaactgatctatacacaatgatgtaaacacaaaatggatcacacaatgaaaagaaaaagaaaggatgggtgcagtggctcacacctgtaaccccagcactttgggaagctgaggcgggcagatcgcttgaggccaggagtttgagaccagcctggccaacatggcaaaaccctgtctctattaaaaatacaaattatatatatatatatatatttatccaggcgtggtagcacatgcctacaattgaagctaattgggagaataatttgaacccgggaggtgaaggtgaaggtggcagtgagctgagatcacaccactgtacctcagcctgggtgacagcaagactgtctcaacaacaaaaaaagaaaaaaaaagaaaagaaaagagagtttaattccctctgagaaaacagtaaaacaaatcacactttttacttaagtagaaaaacattatcatgcacaaagtaaaatcatacaggcattctgttaattcaatgtacatttctagagcactgggcctcaatatgaatgcttttagagaataaaatgtagaaataagtgaagattgcatgctagagagccatctgatacctgcttttccgcctccaggacagtacttggtgttagcaggatatcatggcagtcatcttcatctttatttatgcctttcatcctgcacatttcacttcactctcctgcagctgaattttttttcatctgacagcataaggacataaggaaatgagatgcttaacccagtcacttgagctagatctcatattatgatgacattttagatgattcaattaaatgttaaatgtgtttagtattcaattcatactaatagtgtgtgagggcccagaacacagagataataagaaagaaatttagttgatctgagtatagtttcagttaatgaaacttatgtaacctgaaaaatgtaacaggataagaacaggatgacagatagtattattaatgaaaatctgagcaggacgctttgtttatacactaacatataaatcctaatcagaatgcgttactgtgtctttcggaccaagtttagtttctgaaattttagatccattaaaataaaggcctactagtgtactttataataaatgattgtctttattaatggtaggatggaaaacatttatcaagaatatttttcctctagataccatttttctaagcacaaggatattagtactgttttcaaattagaccttggaatagaagctctgtcatttttttgtaagactgaatgttctgacatgaaactgattgctttgtcaaatattatcatttaaaccatgaacagacctctctctctctcccactcttcccatcttagctccatggtgcaatgtatggaagtggaatctatcttagtccaatgtcaagcatatcatttggttactcaggtaattcctgtatttcatttctaaagtcacatttattaggttttaattttcttattgtttatactctattcacagctttctattgtgccttattagatatatttttattaaatttgtttgctaaatgtcaaaagcaaaaacaaagcccattttcaagatgaatttataatactctccctagtgtacaagatggaatatatgtttcatcaatttaaaaaaatatttaatattccttacatttattccttccacaaatgaatattgagactataatatatgcaaagcactatgtagggcactgagaagtacacatacataatatctttaagtgtaattctatatcatgctaatttcttatctttgtaatattattcataaagaagctttgaacattgtggaaacattagagtagaaaaacaccctcaaaatcatctttcttgttaacaactttttgtaaatttggtgagattgtgggaaaaaatactttggaaaaaattgaaaacttgtgctgtgcaggagcctggtgagttcaaaatgtagaaagaatgatcaccaaattgttagcattacttatccttggtggaattggtgatgttttcttctttgcacttaaaaaatttttggaatattttacaatgatcagcatgatttatataacaactaacctattctggtttaaatataaaataattatgctcattgtataaattcaagctacacagaatttttgaagtagcagatgaaaattttctctcctttactacagcttcagtgttctgtgtatgttccttcacacttttaagtggttttatatacatataactgcatatgtaattagttttgcttgtgtgctcatgcgtgtgtgtgtgtgtgtgtgtgtgtgtgattatgtgatcacgttacacgttttaggagatgtcattcacatggtgcctgaatggtgagtcttaatatcctcatgttataggaaaggatatttagagaggtctgataaccaggtgaacattaaagagaactacctaatttatttaccaaagttcatgttcttccaaccataacaagttgtttctcaatgataggaaacttggaacgcttaaaaccagatttataattagaaatactaaaagaaatcagcaacattgataaatggtaaaatgctgatggaaagaaaactttaaaaaatgagaaggttgcatgttaacaaaaaaagaaaaattagaaatatatgaaaaattaaaacataattattcaagtaactattgctgttcaacaaacaccttaaccttagggcaaaataacagcttcattacgctcatagattctttgggtcaggaatctaggatgggacctggctaagtgattctttagcccctcaaagtatccactgaatgccgctcagctgatggatgggctgcgctggcaggcctgagacagcctgactcatattcaagagttggggaattggactccatctcttgttagcaaagaaatactgtttcagtgatctctgaaaatacaatatgccaaaataacacaaagaaaataaataccaggaagtgtaagataccgtagagataggaaatggagttacaaagaagaaatctattaaaatcagactctaaatcttgctaaaacagtacaaaataaaaagctaagaaaccagctgaaataaataaatacattctcagcataaagaaaaaacacagcaaatcatcaagtactgtaattttctgttttttatactggtatatagactccttcaatgggtacatggaaagaattgtggaagggtttacaaaccatgtgaatggatgtaaaaatttgtgttatatgtgctttttttctggagagggagcacttacctttcctcaaattcttgaagggctcttgatctaaaacaaatgtaagaatcactacagtaagatgacgtagcatctgtcgttgattttgagggctgaaagtgtaggggtaagagaacaggacagcttctctgcatatatatcctttgctttttgttcagaattggcatttgaaatccaaggccttctcctcaacctgtccccatccacccctccacctttttggaaggcctggaaaagttggataaatgtactttgcaaaatttgtaaacaggcttttccccttctcattaagccatttgctgaaacaactacaaaaatcaacacctatctcaacttctggtgtaacagtagatgaacactttctaataaagtgtagatacaaatctacctattctaaaacagatgtgtattttagttctgcttttctaaattattcacagtaagaaattatggcatttacagagtaagctaaaatttgtgaatattacagacaaaaaaacttacataatttgtcttaattagaagaaatgttaaattctgcatagaatttaagaacaaataacaacaaaagttcagttgtaatgtaaaaatatttttctgacattgttcacatttcccaccctttattttctccttctcctagccagatagtgggaatgaaagttaggttctaaaagccttttaaaatcaagttttaagaatttttaaattatattaattttatgcagaagaattttcgatccttgctttcaatgcaaaaaaataactttcccaggacttcccaaacccactgatcttccacctcaggggctaagggcacagccctttgttactgtctctagcctaatgtgatcaaacctttacctagaatggaactttgcatagtaggtcgattgtactttcagctgcatcagacagctttgtccctaaattattattttgccgatgttttcagggatgaacaagaaacagaaggtgtcagccaaggacgagccagcttcaagcagtaaaagcagcaatacatcacaggtgttgtagtgactttagtgactgcttatgattagtgaactgtggcctcatcagccagcagagcatggaaaaataggctttttaagtctgaaaaattatttaatgtggtcattacttataaaggaataaaactcactctgaaatgcagtaactgaattgcctctatacaataattaatcaacagatatttatttatctcccactataataccagagatactcctaggcagtagagtgtagtgatggccaaaagtagacacatattccgtctcttggagcctacatcctactgaggggtataaataaattaaatacatatttagatagatagaatgctagatattatgaagaaaaataaatcagggaaatgagacatttaatgctgtcaggtggaagagggatctgggatgaatgttaaatgggatggtcaggaaaggatactctgagaaggtgacatttgagtcaagacctacagatgatgagtgcgtgagccatgtgactctctaggagaaagaacattctgggcagagagtagaatgaccatcaatcccatgttgtttcagagaaaacaagtatattctgggaaaattaaaaaatcatctgataagtagtgtgactttaaatttaaaaaaagagagtatagctaatctaatatctgaaaaaaaaaaaaatcccagattttctacatgaaatgtttctgtaacctccgtgacctagtacatgatgctattaaaaaaatgggttggttttggagtaggtgatctgaaataattgattttgatgtttgaaaagatcaagcaaatttaattttgtttaccttgaaataaagaggccaagcttttagtaaaaataaatttgagttctaattctgtgttgtaagattattgaaccctaatttagcatttttcagttcacttatctcaagaataatttagtaatgatgatgtacagaaattaaaaataacttaatattaagagagtgcaaggaaattgatgctagtctagataggctttttttttttgacctggagccatcttagtgactattactttttaatgatgaacagcttttttcacaaagtgtttcattctgactctaagttttaattgtttttggaatttagtcacagaaaaaaggacagcaatcccaattcctgcaaagccgtaacttaaaatgcatagccttatgtgaaggtaagttgaaagttttacaaacctcatagtgttagttcctagctcatctataattaaaaatataagtatatttacagagtgcttacggtggaatagggaaagcattattccttatgatcatctcaaagggcacaaatgcaaaaacgggtaccgtagagatcataaaggttcaaaccaaattgcagaattggcaagaattcagagagtgatatattttatttctggcagatatttccagaatggtaattatatctttctgatcaagtaatgcttatctctttagttaatgtgctaccttcctcttaaagttggtatttgaatatatgatactatgaaaaatgtgaaagatgaaccaagcactgagaagataacctattaggtctttctgttcctgcactgaaattattatattattctgtactgaggacagaaaaattgatgggtgatttgcaagatgatatacttttctttgttcttgctttaaaatatgactgcctaaaaattcattttttcttcttgtgttaggagttttagtagctgctgtcaactgtcttttaagttttcaacacacggtagttatataggacatgaacttgctgtctacatagttcttaagtcaggacctatctgcttttggtaatacttagatgagtccctttttattgttataccagttgttattcaaattataaagttgttacatggtctttcactgtttttatctatatttcttcatagacaataaggctaaacaatttttatgtgttcattagtgcttgtatttttgctttagatttcaacgagaagagatatattaagtcggaatggactaggattcctttagaataaagtggttctttaattttattttccacttaacagtgatcacctcatctgacctgcacaaacatggagagatatgggttgtccccaatactgaccatgtctgcacacgattctttttcgtgtaagtggaaatgctcaaatttgtatattactgtctttgccacaaatgggttagtggtgactgaattatcgtttggtctctttagctgccaaaatataacaggtaattgagtttaacatcaactaatgtttttgttttattttcagtaagccattaaaaaaatctaaataatttttaaatgctgttaacttagaagagctcatgaaaaacacctgttaacttacaactaaaaaaaacaccatcttagtcaagcctggtggcccacacctgtaatcccaatactttgggaagccgaggcgggtggatcacctaaggtcaggagtttgagaccagcctggctaacatggtgaaacgctatctctactaaaaatacaaaaattagctgggcgcggtggtgcatgcctgtagtcccagctcctggggctgaggcaggagaatcgcttgaacccaagaggtggaggttgcagtgagccaagatagcaccacttactccagcctgggtgacagggagaatctgtctcaaaaagaaaaaaaaagaaaaaagaaaaacaccatctctgtctctctagccatctctctgtatgtatatatgtatacatgtgtttatacacctccatacacacatatacttttgttaattttaaaaatttagaactgggatgaagaatacaataatgaaaaggtctgtcctataaaagattgatctacattccatataatacaggctggcaatgcagtacatgtcaatgtggggtttttttttggcacagctgtatcataagagttgcattaaaatataaaagcattatttttcattcctaaataatgggtgcagtagaccagtctaattttcactctacccttggcttccaacccgtttcccatgctgttcccaccttatccatgatcttgtcacagaaaggatttcagggaagagttgagcatatctgttttgtactttatgtagtatatttaaaagaaactgaaaaatggaactgttaaggttgcttcggtatactgtatatcctgagtaccctgtgtattcagcattggatctgttggcttgttgacagactattcacagtgagacttacaagctgcctggttttcttttggatgatttgaaaactgtgattgttcttaccatagatatttgctgactatagatttctttcttaacagtgaggcagcagtgagtataggagaaggagcccgcttttgatcagatagtttgaatcctggctgaatagtaattagtaagatgatattgcctggttgtataacacgtctaagcttcatcggtaaaatgataataatatacctgtatcagtcagaatccaaacaagaaacagatgacccatgaaaaatatttttgggtcatccacaattagattatttacaagggtatgattataaggaaaccgcaagtccagtgtagtaacctggatctattagcaccagagctgttatacattcccaggtacaaaaggacacagacaggaagcagtcctgttgggaagccccattggccaaagcctgccagaagctagagaacaatgaagcttattgagaaagtccttacaggtcaggctcctggggcagaacgaaggcagagaaagactccaagaggatcctgggggctcctagagaagctaactgcacacagtacctataaagtttattatgaggattaatttagcacaatgcaggtcttggccactgaaaagcttattaaatatttttttctgtcttctttcttaactatcttgattgttatccactattagatgcttggccttgcaaaaagaagctttcagtcaccaagttatttcactgagaaatcttgagattttggccgaaaagtaactccagagtgctttccttagcctgtcatctaatcagttcatctactccttctgcatcttgctaaaattcaaattaattgagccaaataaacaaccttagatatttaaataggcagtaccatttttagtattatttcttttgaacttttagataaattatacataaagcctatctgtagggatgtacatgttgcggggggtgtttactggagaaaagaatttctgtatttcataagcaaaaattgaggttaaatcatgtgaataaaagagaagtacactcagatacttcctaaataatacaaggaaaaatttcgtattatcatattaagataattgtcattgctttatgaacacaaatgagatttcatcctttttgcaccctcaggagagaagagactcattaaggaaaattgataaattcaaaacacatcagaaggggaatctgtttcattaatatgcattctaattacaaccatcagtttctctataaaagatatgatcacagagttctattagtagtgagccaccctaatgtgtggtaacacctagaagaagaataaatcgatgagaatgaagataagacaaaaactcaatttctgttctttttattttaattttttgatacattatgtgatcctggatgttagaagctttgcctaatggctaggatatgagttaacatggttaccttttttaaaagtctattatcaggtaacaatattaaaaattaaaataactcccatgctaatctgattcccacagttgagatgataaaacagtcacatagtatgctaaacacatgttttccagcaagtaagcagcacagaatgagagaaaaattggagggaaattttagggaacaggctggtgcatcagaaaaaaaatggaagtaaaaatttaaaggaagatatcaattaaaaaaaaaagaagagaattagaagttcaaaaaatttttgttggaaaattccaaaatgaagaaacttaattaaatataagtgctccaggcaaaatgtaatagatcagatgttatgaacagatccaagccaattcctagtttctagaaactgtgagtaaagcttgattacatgactaaccttgaaacgcatgtgtactaggacattgagacccatatgtagaaattaggaagctattttcaaaagggctggagatgtgaatgtaggaatgaataaaatgctcacgttataactgtttgatgagtatttgccctcaaaaagggctaatacctcaaaatcaatatacaaataggaacccattatttaaattccctggccaacatctcaccttctccagtctgtgcagtaattttatacatcaaagagactcgaaacctgagctgtagttttccatttctttttccttgctcactacagtagtcatcaattcccaagtttatcttttcacaattttgtcccaatgcctttattcccatggatatattattctctcccctagaatatatcaaaaggtcattagttctccctgcttctactttcttcatcactcttagcctcctttgtgcaatgcaagacttattaaacattaccgttattacactagtgatatacctctttaatattcagaaattgaagataagccaaaaaaaggagaaaattttccatattatccccatttagagttaactaggattaatcttttggtgtacagcctacattcctatgcatataaaattctaagatcatactatttataccatattcatttccctaaagcagtgttttgattattcactgcccagacaggctgatagttaaatagaagcatggcattctccaacatatagagtcgcttctaccttacttcagttacatgcacaaaccactgattaagtgaaattcttgtccaagctgtttctttaaaacaacttggagttgtatttcccactattgtgcctttgttcagtcaatccaaatgatttggccttcttaccacctagaccattagcctatttttcaaggctcattcaaacatggtcttttccttggcaccttccctgacctcccagtctgaaatgattctgtcttttctctgaattctgctcaccctatgtttggacagctcaggctgccttgtcattttttttaatttgtagagatgaggtcttagctatgttactcaggtgggtctcaaactcctgggctcaagtgatcctcccaccaagttgtcaataatttcaaaagtttttatttatgaaatgttcttacatacctaagaaatttccaggcagctaagtttcatctaatttcctagtttctattatttttaaagcaaattggttaatttttcgttaaaattttagtaatctttttacactcctgggaatatgaataattcttgtctccttttagacgttttcatttttcattctaccaaaacccagtccaatgtatcatctccctagtggttatcattcatgttctatttctcttaaattctgttgctttccagacataaaagaactttactcttaaatcataaatagctgtgacatgttctgtataccctattgtaataaatactctaataccactagcaacttatgtatctaagccttgccagttgcccaaattaaatggatgtttgatttttcttgattattatatatgcatcaaatttaaaacacctgaatgcctttggtcaactttgtccttcaacccatgactgttgtgcttccttgtgggtttcctagacagtagaaaaatatgcattttatttaatacttttaagcatactgtctctctctttctttctctctctctctctctctctctctctagttctcactcttgccttcactcccacttttgctctctgctctctcttcctctgtgctctttcagtcttaaattattacagtttatgcaaagaatttaaatctcatatcttctccactaacttctaatgctttttaagtgtcagggtacatataatatttgggtagacaaacccttccatctgactgaaaagagtgatgggggagtgatggggcatgactggagaggaaatctgtatttgaatgatgaaggaactcgtattgccaataacttggattttgttctgtaagtgagatggaggccatttttctatcgcttttgcagggtggagaatagatcttgtaggacagatgatggggataagtgtagagacagagatcagttataatgttataacaacattctaggtcagtttttcttaccacaaaaagaaatgtgtttgacattgtgacttagaaaaaaataattctttctatctgtggtgaagtcaatgttctctattctattctattctgtttgattcgattcgattcaattctatcttaatcacttaaaatgctggtctggacaacctaaattaatttaaaaacccactagttatacacaatctgcaacttgaaaaccactcatttagatgaatgacaatggaggcctaaacaaaggtagagagaagatttaagaaaatggaaacaagatagcttggtgattagttgggtttaggcacaaagaagagccaagaatgactaaaggttttgtgttgctggatgacggtacatcaaattgagatatggagagcataaaaaatagcagtcctagggtcaaaaaataagggctttgaatatactgaatttgtgttatctgtagcaaagttatatagagagaaaaatttaaggatcggagatagagctttaggaatgagcatgtgggtgatagttaaaacttgaacggggctgaaatcattgattttgcatatcatgagagagagaaaactgaggtgtgattcatgtataaaaccatcattgaaatgagagtccaaggaagaggatgcaataaaagtcatggagaattaatctcagtaacagagcacttactgtcctgagaaaatatttgtaattgggctgtgtaccacatatcccattctttttcttagggtaatgtttcaccatgaggtgtcatttccatgtatatgtaagttgaaacttgctaagtatatctaaaacagcgataagaattagccaaatagacaaccttgggtcatttagttaagaatttagacttggtacaaatgcagttatcacttgatggttaagcagtggattacataaggagccaagttctctctgctgtatgtcatcttttcattttcctttattttgctatttcaggaaaagatagtggctagtattaatctttgagatgctgtgcttatatccctggttatctgttttcaagtaattaccacttttctaaagcttctgtcttgaagccatttttatgaagtaaaattaatttgtcacttgttcccctctgaatatgatcatgaaagcttgaaaattcattcttaagaaattcttattgcccaagtaactgtatttgagaaaaatgaattaccatctaaaatgtaactatttctttttaaagaacttagtaattgctgttctttagtattatattttcccttctactgataaagtaaacttagcaggcttgcattcttttatgaactgccagaataaataagaatatgttacagtcagactaaatagtgcgaccagtgataagaaaaaagggcagcactgattatggctgaataattattagaaggcaggcatggcaaagaagcagtggtagaaagtgaagtgtcttcagtcagaaaataaagaaatgatcgaagtaggagtagaattaagaagtccagaatcttagcaacataaagttgaagctgttatatttttttatagtagacttcgtagcagctgctatgggaaatgcctgcaaggccaaagacactgagaagcttcttgcaactcagacagtcttttatgcggggataaaaaaaaaaatggaagaaaggggaaaatttaggcatgacatagaatgggctgttctgtgtttcgcaatgagaacacattgttaaatacacctgaaaaacaaccgtataatttgcttttgattctcttgggctatattttaggtatcaaatagcatttctaagctgttttaaatgctgccatcttttaaaatgtttttatatttttatgttttgtatttcagctatgaagacggccaagtgggagatgcaaatattaatacacaagaaggaggcattcacaaagagatcctccgagtaattggtaatcaaactgctactggttaaaggaccaccatttaattaacatgattcgaaagccttcctcgggttcaaagctggattttgaactgaagaagattataaaattatttattgttattataaacaaaattaaccctttgaatactgattttttttcttagtatttctaagtatctcattaaatacctaaaatggtataagatttatcaattgtagggttatggaatctagtaataaaatttcaacagcacttaaactgaagtttgggttgctcatacaataaacagattgaaaaaactgttttgtgctgatatttttatactaaactctttaactggatatttggtattatataccgacattttaggttaccaaaatagaattgagaacattttataatggcatctaaatctatcagatactttgcaataagtatactgtttgcacattctgatgtgctatatcattagtagtatgggcattctaatgttttggaaggggtgttccctattctatttttcttcataaaaaaagaagtaggtcttagaagcagtgctttgccaaaaagtatgtaatatacacatctatacattcatgcatcaaaatgtgtggttgtgaatatatttgtgtatattcacacgtatgttttgacaagaaagatggcttagcttcacaattctatcctcgtttaatggaaagaagataatatttagtaagcaataaatttggacataaatcaagatatgagccagatttaccaccattcattcactgaaaatatttgcagacaatttttctgtttgtctgaagaaattcagcccttttaaaatgttatctaaaagtcataatttggggaacatacatggcctggtagaccgaatctatattcaaatgattatgtatttaaaagaaagacctcagaatttaaagaaaccatatatattttttatttactacaaaaaaattatacaattttatttatgccacaccagcatttttatatttgttcatctaatatctctgcttatttttttcatattgagaaagaacacaaactttgatgcttcttttatattaaaagaccacaaataagtttatagagaacagtaacaccagctctcagcatttccttttcaagagtcataatttcatcaaaatcatttcttattctttgagtcctagagttcttattcatcaagttttaattgacagtgtttattttcccacatgttgtctttggaataaggccattcatgaaagcagtttaattagtgagtctgccactctattcaaaccctgaatcaaggctctatctgattttaatttatgtaaaaaaaaataaaaatgtatagtcatttgcaagtataatgtgataactgctgtgtttatttcctttgtctggcataaaaggtgagaaaaaggtcatacatgttgttaagggtagcagtttaggaagtgttttctaataatttgttttgttttattgcaaataattgatatgccacttatttctgcaagaaaaataggcttgaagtggttgggatattaatcattttgatagtatctacttaaagcattgatctgttttgacttgtggctctgaaccctgggctaggctgagggataatagtagtggagtagggcaaagatataatatcctatccagtgttttgtgaccacttatttgaagattagtgtgggacatgaggaccttgctacttttttgccaagatgctgcaagtctcccaaatcacttcaactgtgtttttaaaacatgtttaagcaacagaattatttttttgaaattagtctatacgttagacagtctatacatgacaaacatgaagatctaatatcaagatttgggagacgggatcttggaactccacctgtttgaccactaggaccactgaggcacctccaataagctctgtagagtgcctccagcataattcaaaatccactgacctaatccattatggctttacttaacattggagtgatccgtaaagaatatagtattggagtctgaactggaacggtaactcgtaagactcaagaaagaccgtttaaggaaaattggcataatacaaactgttcctgttgacttaagaataacagtaggttcacctatctgaggaaattaagtagttgatagtttaatgctaggcatcttttatgataataaagtaagatgtcttcttatgacagttaattgagttgtatcatgatacagaatgacagattttgtttcaaacaattgcgtcagaacctttgtaagcaaatattctaaggagaatcaatcttattttttaattgaactttttaaaattagggatactataataactgataaagatgaatttctgtgtttctaaagaatctaatttcaattactaccattaacatataaatgtgcttccaaaatccaagcaggtccatacaatttagagatttgaacactgttatcatgctttaattcagtcattcattaaaatattatctattcacttatttgatgattccaaacatttgatattgtattgtgtttttataattatttgaaatctgttcaccagtgctttgtaatggttttattaattgtgtagccattgctacttagatagtaacccactgagcaaaggcagtcatttattttcatccttgaagtaggggaagaaaattattaatttattagttctactttttcctgcattgcttattttgtaaacattttattatgaataatctgttctctttcactgtattaaaaggagaagaaaatgaacatttgagaatggaaaaaagtaataatatacaaataatctagtgctataaaatgcattatagtaagacacttttggtgtcttcgagtgcactatgttggaataaattttatacttgttgcttagtaaatctcagtcatacgtttggtttgaagctgtttttttttttaatttgaagtttaattttaaaagtgccacattgtaaaagttaccgttaaatactatgtagtataaaaaaccaacccaagctattgttaatgctctgaatgtttttctttgaaaatttaagtttagagaagaaattccttcatttttctcccctttgctaaaagaaagaaaatctataatatgtaagtctatgaatctttaaataactgaaggaattttagcagtactttgtataataaaaatattttttaaactataacttgccttagagcatggggtttcagaaagttttgacgaaaaactcatcttcattaaagagtctggataacttcatcagatggtaatttaatatgtcatgaaggggacactcaacattgggtcatctaccgtctaaataaatacggatttcatggtggcatttgaagcacattttgcaaacattatgatgttctattgtcttgctgaattctttattataacactacctcaagacaaatgatagactgttggtaaggtaaattgggttttcaatgtcaggaacaaataaaattttgcaaatagaagtcatcaaataattcaacaggaagaccatactggacacagatgttgtcagttacttctggacaatgtggtaacatggatatttcagtcactggtaacaatgtcagggttaacacccaatgaattatttgaaacaatttgggttgcaaaatttgaaattaattagtctattttgagattgattttctacgtgggccaattttatgtccattacctaaagccacaatctcccgctctaaggagttaaaggatgaaaacacccaactgctacactggaatggcagactggatattcaagcattttggcatttaatgcctgctaaatttttgtccgattatatatagatttgatgtatattattacccagtaaattcttcttgggaattttgtatacattatggaatattaggataagtttttgtaggtcagaagaatttcaagtagtttttagacaaaacatatccatgagtgtgaaaaaagctgtgttgacgaatagattacatttcacatttaccagcaagtcagtaaaaaatagtgcttatttacatagtcaatataatttaatgttctaaaaataatatcttcgatctgcccaatatttaatgtatcatttgagatttttaaaaatgcagccgctccattatgtaaacattaagatatgcctatgtttctttaactatacagcctctttacaataaatttcttgatttttgtgcacaggatagtattgcaacctgctatttagcctttggtgccttagaattattataaatatttaacaatatgtacataatgtaaatactgccaagagatcagtaaggccaaatattttctctattcactttttattgctcttgctttctattgctactaaagcctcttttatccagctttgtaatagttccaacattgtagcgaatgtaaatgtttactttcaataaatctgaacttgttcaacaagta

SEQ ID NO: 10004 - DNA, 458 bp, Homo sapiens
aagatataatatcctatccagtgttttgtgaccacttatttgaagattagtgtgggacatgaggaccttgctacttttttgccaagatgctgcaagtctcccaaatcacttcaactgtgtttttaaaacatgtttaagcaacagaattatttttttgaaattagtctatacgttagacagtctatacatgacaaacatgaagatctaatatcaagatttgggagacgggatcttggaactccacctgtttgaccactaggaccactgaggcacctccaataagctctgtagagtgcctccagcataattcaaaatccactgacctaatccattatggctttacttaacattggagtgatccgtaaagaatatagtattggagtctgaactggaacggtaactcgtaagactcaagaaagaccgtttaaggaaaattggcataatacaaactgttcctg

SEQ ID NO: 10005 - DNA, 458 bp, Homo sapiens; identical to SEQ ID NO: 10004

SEQ ID NO: 10006 - DNA, 140 bp, Homo sapiens
ggacataggctagtgtaaatggaagccaggctaaaatcgggacaagtcttttaacacagtgtttgggcaagtcattttggtggcatgaaagttcacaattcccatcatcttgggagaaaagactagggcaattgttgttg

SEQ ID NO: 10007 - DNA, 1879 bp, Homo sapiens
tgtggaaccctgtattattagttccagtcctggaggcctgcctcctgagtttcccagctagttgggacaggccccaatatcccttcttcctgtaacccaaacagtcatgaatttgctttggcaggtggatggagacttgggaacttccacctcacccactaagccaggcccaggctatggggcattgtggctaaccccaccaggtggatacttggtctgaggacgcatcttattctgggcctttagggagctaaggcagtgagaattggcaggaggactgctgtgaatgccttgtaggtcgggggattggagggggtcctctgctccctgtctctcaggatggcaatgtacctctcacccccagtgtcagctgaggtaggatccataatcagtaatattcctgcaacaaaatgttcctaagtggaatcaatgaagaccaaaatttatttgtataacaactctaaacctgctctgctctgctgtgtttacaatgtgctttgtgatcatccagcccagggagtcccagtctctggctgtctatctgctctaaggaagagagcccacagttctctatagtgccatagtctgtgatgaataaagttccagatttgaggtcaacccccgaccacccttaaagtgcttgttggtctcctgctttggtttgtcttcagcatccaactgatgcacatttgtcaagaacccactgaggctagaaaccccccaaacactcaaggtaccttgagaacatgtatcccaagacctgcaaagaccaaacacatggcctgtaactacttttcactttcaagccctggaacttgtctgtaccaaaaatctttctgaaccattcaccaaatctcttgtcaagggccagaataaattaagagattggcttttggttttcaattaggctttcaagtcctaagcccaacccctcctatcccacctaggcagaaatcacttcagatccttgcttcctagtttaatttcttctctgcctcagttataacatccataaaatggaaataataatacccacctcacacaggggttaggagtgtttttttgttggtttttttccagacagggtctcactctgtctcccaggctggagtgcagtggcacaatctcggctcactgtaccctccgcctcccaggttcaagcagttctcatgcctcagcctcccaagtagctgggattacaggtgcctgccaccacgcccggctaatttttgtattaatagagacagggtttcaccgtgttgggcaggctggtcctgaactcctgacctcaagtgatccacccgcctcggcctcccaaagtgctgggattacaggcgtgagccaccacacctggcctaggagttaagagtattaaatgttaagaacagaccaagtccatcaaacagctccacacccttgttccatgttctggattggggagttgtgggggtggaggtgtagaacttttaaaaagcttcttaaaataagttgctgtgaatacttcaggtatataaaaaaacattggttgacaataagccagtgttctgccattcttacctgcttatcaagacaaaacctgctcaagtccctgcccagctgcattccaagtgttttcaagtttggtggtaagacctgacctgaggcttcttataacctttactcagtgggaatatgcatacagttcactacagaaatatttgtgtttacttagaggaagtgccctggatctgggggcgggggggggcggggggaatgggtcttttctaaattgttaaaagcagttcatgccattattcttaataaacatttctaatatgctgtgaaagagtatattcgtttttttaatgcatatatccatttactcattgttcccatgaaa

SEQ ID NO: 10008 - DNA, 483 bp, Homo sapiens
tggcacatcaacgagagggaggcttggagaatatttggttggtgggcgggcagggactgccagagggttaggtgtacattgaggcctgaggcctgctggaattgggtttccttaactggtctcttatcttagtcccattgttctgagaacataagcacctaatctcatggcgtgagctaatccctatcataaatagtggtaccagttcattccttcccctgaaatgatgggggttgggcagagatgcactgaactcatctttgtgtatgagggccatgagagaggcctggtttgaaaacaatgctaagagctcagattccaggatttatgtaggggctcttctacttcccaggtatttgacctcaggtgagtcatttaatttcagccttatgccattttacattttctgtggagggttaggttaattggcatataaagccactgagaagagttggcaaagctctcagtcacggggatttgatc

SEQ ID NO: 10009 - DNA, 266 bp, Homo sapiens
ttctgtggcccaggctggagtactgtggcgcgatctgggctcactgcaagctccgcctcccgggttcatgccattctcctgcctcagcctccggagtagctgggactacaggagcccgccactacgcccggctatttttttgtattttttagtagagaggaggtttcaccgtgttagccaggatggtctcgatctcctggcctcgtgatccacccgcctcggcctcgcaaagtgctgggattacaggcgtgagccaccgcgcccgg

SEQ ID NO: 10010 - DNA, 7566 bp, Homo sapiens
gagatggcgccattgcactccagcctgggcaacaagaacgaaactccgtctcaaaaaaaaaaaaaagagtttttatgaaatgaaaattagcattttatgaattttgcagaaagtcaaaaagcaaaaatcaccctgaagtaatgaaaactcagcattgggaattgctagctacatgaacaaaaccaagtgtatttctaaggtccctcattctacaccttgtgcaactagatcccataatcgttatcttttgttatcaatgactcactaaaaacacaaaattgggctgggtgcggtggctcacgcctgtaatcccagcactttgggaggcctaggcgggtggatcacaaggtcaggggttcgagaccagcctgaccaacatggtgaaaccccgtctctactaaaaatacaaaaattagctgggcatggtggcgggcacctgtaatcccagctactcaggaggctgaggcaggagaattgcttgaacctgggagacggaggttgcagtgagccgagatcgcgccactgcactccagcctgggcgacagagtgagactccgtctcaaaaaaaaaaaaaaaaaaaaaaccacgaaattgtcctccatattttcatagacgtttctaaatttatcttttaaaaactagcatttctgctcctctagatttaaatttccttgttaattattagtctccctcccacactataatcatcatttgcaatattctttgacaaaaaacacactttctaaatgaacaaggtatctgttccaaggggctcaaaatcagagctgcctacctgcttcttattacttgtgagttctggtcccagagaacttgccagaaatactcatagttacagtttatcctgcacatattatttctttcttctgtacctaagaatcattaagtttttataaggcataatcaaaacagattggcatctgaattaatcctattcattttatgaaaaagtttctatgcaaattattttttctgacaaaacaatggaatttcactaaatgagaaaatatacggaaaactagttaaagaaaccaattataatactcaaaaaatagacacagtggcatgtgcctgtagttccagctactcagaggcctaagtaggaggatcacttgagcccaggagtttcagactagcctgggcaacatagtgaccctatctctaaaaaaaatttttttttggaattttaaaatctggaaacaagaggaaaaccatttttaccgacgtaattatatataaatcaggtcccattaacattaaccatgcagaagttccaattataggtcaccattaacaaaaatttcaccacaattagtatgaacttatacaaagcttttgcttaataaaaagtttgcttgtaatctgatttaaaataattctttctgattaacaacaataaaaacaacaaaactataaatgaaaaatcatgcttccaagtcaaggaaatcatggccatctcattcaaaaacatagcttatatgacagttttctgaacttgtatatatccttaattttgaaagaaaaatccattctagatacaaataagtactacacaagatgaatacttttaaaatttcaatcactttgaaaatgctcatctttcttaaaaaatataaaagcaaagtattcaccaaatcatatttaaagcctattaattaaatgtacatagaagagagattatttatgctaatctacgtaaaattggtgggatttaaaatactgctaaaaagaaactgcagtgtatagctagtacatcagctcatggttttcatgctaaatctttaaaaatgtaagcttattttctgaaatcaaaaattattttttgattaagagattaattcaaattgacaaaagctattaaggcttctgttatcaataaaggaatctgctaataaacatgggcaactattaaattcatttaatatttattcatttagtatttattgattacctaagtgtcaggcattcttctaagattttgggatatatcagtgaacaaataagaaaaagaaactcgggctgtatgtggtggctcacacctgtaatcccagcactttgggaggcggaggcgggcagatcacgaggtcaggagttcaagaccagcctggccaacatagtgaaaacccgtctctactaaaaatacaaaaaaattagccggacatggtggtggtgcttgtaataccaggtactcgggaggctgaggcaggagaatcccttgaacccgggaagcggaggttgcagtgagccaggattgcaccattgcactccaacctgggcaataagaatgaaactccgtctcaaaaaaaaaaaaaaaagaaaagaaaaagaaactctgctctcaaggagtttacattctagcactctactttttgttcccctttggttccatatttttcatgacaaaaaaatggagggggaagcacggacctctccttataagcacataaacagctaagattttccttcaccatttccctgaagaatcatcacaactgccatcctttaagctccagagtagttagagtggtagtagtagaattcccttccccataattatattccaactaaaaacaggacttcagcttcctaatgccaatgtaagtgactcccacgtcactggcattatgggtgctcataataataataataataataattttagaatttcaataataataaagttctaccttctattttaagcaaagaaaatgtattttttttaaaaaaaagctaaaagttgttatcaaaccaaaaacaaacttcaaatcttctcagagctctcatgtcaaggtggcaaaagcttttcttaatttagtacctaattttttggcaattgcataagcttcatctggtgactttgccacatatcctttgggaacggagacaccagcttcttgcaataattccatactcatgtattcatgtagtgagagattcctttgctgttgctgctgtacttggagtccatggttattaaacaatccagaacttcccagaacctagaaagattggggacatatttatatatgacagtgatttggcagtcactcttgctaactacttggttcttcataactataacaaaactgttacattacattagcaaagtacaatattcagagtacctgaattacagcataaaactaaaagctagcctatcagctaaatatcactgttaccactgtcattttaattatttcctcatcatctctattccttatttcagatttcagctttactatcatatctccaatgatctacagggcagttctacctcaatgccaaattcagcggatctaaaaccaatctcatcttttccaccaaaccaaaaatccttcccaattttcttctctctaccattcctccacacctaacaagtcacctggcactagatatgtaataataaaatgatttgataccattactctttcatacactcgatattcaaaaccatggcttcatctgtagtggatgttgcagtatgctgcccagatctccctggcactccccattcaggaccaaggcattcatagcccccactgctgctgctgggagtgctggttgctgacagctctcagccaagtcctcttactggagcctacttgcccaaagtcacacctccttcccactgtcagcctgcacccaatgactggtcaatggaatcacacatttaaatgttatccacgcatttccataatctcaatacagaatgcagtatactgaaacatggttcatatgaaacacacagtgtcctaagaattaaatttaaagaggtcatagaaacaatctgtttcttaaagtaggttcataagcttttgcctcaaaattaactgggtgcttgtaatctgcagattcctgagacccattctcaactgcactattagaatctctggactgggcccaaggaaatctgcattcataacaagtcactcagttgattcttaagaaccctacagttatgagaactactagtcttacaaatcaatcatatataatagcaacttatttctgatccatttagcaagctaaaatccttggtaacatttgacctaggtagctcaattccttgatttagtgtcacttcaatattaaaagccagcaaccaagctgggcacagtggcttacacctataatcccagctactcctgagactgaggcaggaggatcccttcagctcaggagtttgagactgcagtgagctgtgatttcaccactgtcctccagcttggtcaacagagcaagaccctgtctaaaaaaacaaataaataagttaaaaaaaaaaaaaaaaagaaaaaaaaacccagcaacctctcaaactactgtttagtatacctccaccttctgactcagaaatcccattcctgggtatgtatcaatagaaattagtccttacatctgtcaaaaggcacacataaaaatgtctagagtgtccagagcaggcttatttataacagacagaaaacagaaattagctgattgcccatcaacaggagaatggataaactgtggtatatgtatataatagtatactacagagaaataaaaagaaaaaaagtactatggctcacacatcgatggattaatctcacaaacataatgtagagagaaagaagccagaaacaagaatatatacttacatgatttatttttatagcgttcaaaaccagtcaaaattagcctatggtgacagaagtcataattggttgctaccttctgtcagggagtattgataagagagaggacatgagagccttctgagggctggaaacattgtatatcttgatgcagacgatggttacacaggtgaatacatacataaaaattaatctagctatccacttaagctgtacatcttactgtacataaattatacgtcaaaataataataaaaattagtgggtaggggagtaactagcataagcctggcaaaaagtcatacactcaaatattttttgtgatgactatgaactagacagtgggctagggacactaaaaaaataaagacacttgggtcccagccacagagttcacaggcatgtaaataaacaactgcaacacatataagagcactaggtcactagcacataagtcactaggtggcacctaattggttagttggtcagagaaaatgtcacaaggtctcatcccagtttaaatttttaaaaaatctaatgtctataaagaacactttggggacaactagaaaaatctgaatctaaactatatatattcatgttacagcaatgttgaattcctaagtatgatcactgcggttatttggaagaatgtccttattcttaaagacatatgctgaaatatctattttcaacgaaggtacactaggctaaagataccaagaaattggaggagggtcagagaacttaaacaaatgtttaaaacaggccgggtgcggtggctcaagcttgtaatcccagcactttaggaggccgaggcgggaggatcacgaggtcaggagatcgagaccgtcctggctaacacggtgaaaccccgtctttactaaaaatacaaaaaattagccggacgtggtggcaggcgcctgcagtcccagctactagggaggctgaggcaggagaatggcatgaacccgggaggcggagcttgcagtgagccaagatcgcgccactgcactccagcctgggcgacagagcaagactccgtctcaaggaaaaaaaaaaaaaaatgtggaaaacaaattgctaaattaaatgtgtgaccttgaacgagtttcttaagactccgtacttctatgtcctcatctacaaaagcaaagggttggactaaggtccttccaaactctagagctgcatttcttaataccagggtagaagacagcaactgttataaagaaaataatattggaaatttccataaggagaaatgaaggcttttaaatgaacttccaaaaagataaagattttgactagaatgaaaacgtatttgtcactaaattccccattttctaaaaactaaatagcactcttctaagattcataagaaggaagttcaaggtcaaaaagtcacttctatcgggaagcaaactcacagaactcactacccctaggctgaaagtatgaacaacttcaataaaaatgaaaaaaaaaaaaaaaggtaggggcgggagggccctaaatcaattcatactatgacatgtatgaagagttacttcagaaaaaaacccaaaactctggaattgacttaggacaccaataatgcccttccacagttttttgttgtcaaagttggaaggaagatgtttgttttcgaagttgtggagccaactcaagtacacggctttagaaccagacacctctgggattaaatctcagctttgatcttacctcctatatgacctagtccaaattacttgttctcttaaccataatatgttcaacaatgatgcaggtgttgaatgacttcctcacagttgctgaaaaacctgagaaactacacgtaaagcgcttagcacattacctggcacacatcaaatattcaaaacaaggccagtaactattatgctatagcctatccagaaataaggctatacaaaagattattttcttacctctccaactggttaggtagaaaacataatcttattactgctattaacaagtagaacagtatacaactacttggaggagaggggaaacttccctaccttgccccacaaaaggcaagtcagtaagcaccgctggtcctctgacattcccacctatgacagctcccaagaaacacaaaagtacttttgaagggcattcccccctgcccaaaaaggggcggcgcaagtctcagcccaccgtgccagacgccggaatggcagcagaaaatgtcctgaccccctcacctccactcagagcccacctgctcccgcccatctcttagaaactgcaggagcagccacggccgggccgccggggatcctcgcggactaagggctgggtcagagccgcgcaaacatgggctcgctcgtagtcctggcgagcagcactcccaggcaagtcgcccgagggccttgcagggcacccaaaaaatgtcactgccggcgaagtgaccccgagccgggccacgggacccctcacacctcaccctttctcctgccgaccctcgagacgacagcggactggaaggcattacctgagcagcagcccgctgggccgtccgaggccggtggttccgaagggtggccacggccactagcctgccgtagaacatggaggccgccatttctgagtcggaccccgtcccctcggcgccgcgcgcaggcgcacaggcgacaggcggcccaaggcgcagcctctctgcagcgctcacctacgccccgcctcgcgccacccgttgggggcggggcctcgggttaacactgcagccgctagaccagctccctggcgggcgcggagcaagctttgacctttggaactgggcaccgcagccccaatatctgccctgcggtcagagcaacctgaacacttcctagtgaattgcaatgtaaaggtgaccagcgccgccacttgggtgatcttaacttct

SEQ ID NO: 10011 - DNA, 441 bp, Homo sapiens
tgtgagcaataaggctgtttattttaactgggtgcaggcgggctgagtccgaaaagagagtcagcaaagggagataggggtggggctgttttataggatttggatgggtagcggaaaattacaaagggggtttttctcttacgggcaggggcgggggtcacaaggtgctcagtgggggaggttctgagccaggagaaggaatttcacaaggttaatcactcagttaaggtggggcaggaacaaatcacaatggtggaatgtcatcagttaaggcaggaaccggccaatttcccttcttttgtgattcttcacttgcttcaggccatctggatgtacacgtgcaggcttgggctcagaggcctgacagtcggccactagttaccaaagctggtggcaggctggagtctccagggaagctattgattgattgattgactgatt

SEQ ID NO: 10012 - DNA, 570 bp, Homo sapiens
ctcttacatatatcatttgttgttttgcttccccatcagaaaagaggcccaggagggcagaatctttgttgtattcatagatgttaacaagcgtctgggagagttcctagcacataatattttgctgaatgttgaaaaaaaggaacatttaaaaatatgaacagaattcttataaatctagatttcttcactgctcttacgaaaactcccaatgggaaaaactgggtgcacagtactacaactagagctgattagaaaaagtatcttgtttagataagacaaacccttttcaattaccctgtctctactattcacaaatgtatcacaactaatattaggtaacaaatagaaacaactcagaaatttccttaaaaccaacaataacgttcttattgagaatactacaggttgtctctgaaccatggcaaattagagagtttgtgcccaaacggaagggagcagccactatttattccacttgtttctgtttacctgtccagtcctgattttccagcactttaaatatttgtttatatccgaagaagagaactacaaggcaaacagtgcaaa

SEQ ID NO: 10013 - DNA, 2851 bp, Homo sapiens
cccagcgcaccgccccggggcccagtcctgcctgcggagccccggggagcacgtgggcggcatggaccaatggaaagacagacaggggaaagggaggagacggagggaggcgagacccgaggattgggaggctggaaggcgccggaaaggggaaacccgggtcccgcagcagcctcttggcggagggtgccctcttcatcccgcgtgggactggactcgcggagagggcgtggccagaacctctagtgccaatgagctcccgggagcttcaccctccacccctccctagcaaggtcggggggcaggcccgagctgcacaggccaaggaattccacagagggtgtgacccaaagcccctaacaacagactcgctgggaccccctagacttggcatggaggctgggtaagcccgcgtccactatgcccaggtgggtctggagggagagggggccggcccacggagcaggaaaggcaacaacttccccctccagcactaggaacggggccagactccccaaggccgacaaacttgcttggagtcggcttaaactgaagggcgggactaagctgggcaaccccggaaaaaaagcgaaaacggggccgggcgagagtgggcggggcggcccgcctgaggcgtggcccgcggggctagcccgggtccgtcttacgtagcctgggcggaggcgatgggctcctggtccagcgaggggccttcggcggacgaggttgcggtggcagcgggggggcgggtacctggcggggtgggggagccgcggcggggaaggtgctacttctgggaaagagcggggacagcagcagtgccagctcggggctggccaggcagggcaaggctccccgagtcggaggcgaataggctcccaccggggacaggcggacgggcagcagctgctcctctggggggctcggcgcccccagcagccgcagcccggcgccgggccacccggccagaggagccaggagcagagacccagctgcgcctgcgcccccaccctccaacagggggcgcccgtcggccgagaaccggaaaaccaggggccgagggagcaggaggggaccggctgcaggcgggattggcggggccaggcgcagagggaaggagggcagcgggatgggcagccaggcaagaaggggcgggaagaagagggagcaaacagttagtcccataacccaatgacccacccagtttccctttcccggagcgctccctggtagaaggggcggggaggatgggtgacacagaatggagggaagacagggggccgggttggaagcctaggaggcgtgagcggccgaagcccagccctcctcccgcttcttgcgacctcttaccctccaggccggcctgcgcgcccggctccttcgcggctggggcctcctcgccagccgctgggctgacagcccggccctcctcggactgcccctccgctatgggctgcagtccaggtcggttcttcttccttcggggagggacaggcgggggtgggggccggggcgggaccaaagcccagccaactggggggtctcgaggcgggactggcggggctggggcccggcttcgggaccggagttccttgaaggtggtgacttcccgaggaggtgccgaggagccgcccggcgaccccgagggggggagctcggtgtcgggcgagaagactatgagccagtcactgcgatctttcttcgcctgcgggacaaggggcagccctgggccccgcttgcgcttctgggccagctcgtggaaggacgtgattgtccggtggggcaccggctcctcgctgacgtcacttctccatcctccatcaattttccctgcatctgttttcgagccagaatcagttattcttgtgttggttttccaaccagagtcgaatttttcaggttcacttttccagctagagttaacattcccgttgtttttccaaccagtgttattgttttcagtggttttccattcagctttagttttctctgtgtcaattttccaaattgggttaatcttccaactgggctccgttttcccagcgtcgattttcccatcatccgcctctaagagctcagaggtagggagatcctgctccgccctctcgtcctcttcctccaagcctggggaagggacgtcctggcaggtggtcagggcgttgcagttcgagtccaggccaggatcgggtgaagaagaagctccggagcaggaatcaggagagcagcagaagctgtccggtgagcaggtgccagggcctgctgaagccagtggggagccctgctccagggggatgatactgggctgagggtgggcatcctcatcaccagggaggtcccgcaagtagactgagacaggggactcatcggggctaagatctgagcaggagctgagtgaggaggagcagcctgggtctgagggagaggcagccccctcttcctcctgtgacgggtcctgccggttttctaggcccggaccgtgctcctggcagcaccggcagggcacagctgggctgttggaattggcgtccaccagggtgccactgcaggggcccctgctctccttgcccccagtgtctcctggaggagggggtgtgctcaaaggcccctcctgtagctcaggacggcgggacaagtgcaggcccagggagacgtgctggaggtggatgtggttgaggttgcagagtaaagctctctgaggggacagcatgatgctagcggcgatgggatggcttctagagaaccagaagggtagggtctctcacatccacctacctggcaaccacaggtgcagacctagaagacagaggtggtgaagcccggccagtgaggacaagagctgcggggaaggaca

SEQ ID NO: 10014 - DNA, 2851 bp, Homo sapiens; identical to SEQ ID NO: 10013

SEQ ID NO: 10015 - DNA, 3784 bp, Homo sapiens
ttacctatgggtttgcaccatcctgggtgctgaggcctcaagctcctgaggagaaggcatctcgggaggtgccccccgcttcacaagagccaacacactcactgtcgggggcagccagctagatggtctcctaaaagaagggacatagggtcacagctcaacccacttccagaaaacccaagaaccctggggtttggagggagggagaggctaaggggcctaattgtggttcaaaagaggtcaggggttagtcactgctgagggcagagtgttcattattggacacaggcacttttaggctgatgagggagatgacaacaaaagtccacaacaccacaaatcacaaggaacctatggacccagcagggtctagacaggctcagaatgaaatggccactagagagtatctcaagccattaaagagccaccagttgttgaagcctggagcaggggttggcattttgtttgtttgtttggagaggagacagggtctcgctctgtcgcccaggctggaatgcagcagtgtgattacagctcactgcagccttgacctcctaggctcaagcagtcctcccacctcagcctcctagagtagctgggactaccaccacgtgtgtgccaccatgcccagctaatttttgtatttttctgtagagacagggtttcaccatgttgcccaggctgtttttcatttttctaaacgaccagatagtaaatacagttgacccttaaacaaagcaggtttgaaatgcacaagttcacctatatgcaggtttttttcaaccgaacaaaaaatactgtattctcaggatgtaataccacatatactgagggctgtcttttcctatacatcaactgtaggatttgagtatgtcagattttagtgtatgtgagggtcctagaaccaatcccccacatgtacctggggataactatattttaggacctagggccaagagagaaaattgagatcattatgtaggcacttaacataaccattaaaatgtaaccatttttagctcatggctgtagaaaaacagaccgccaatctctgccctaaaggatcatcactagagagtttcaaatgaagccgctaggagatctgagagagtcagaaggtcatagaaaggacaaggtaccccattacctggactttagggctccattctcattttctgcggggcccccaggcactccaaatagtcttcccaaccagaggcccctgcctggtgccatctcatctgtgggcaggggtctctcctgtgcaccttcttcagctgcagtcccatgacgccccggtgcccatcgggaaagaggaaagccctcagtgcccccagaggcatagacccgggaggcctgggtcaactgctcccaccagctccctggtgtgggaaggtttggagagtcagaggggtctgaagcagcttccttggaagtcccccgaaggctctgggccagccggcccccaaagtgcagcatggcttgcatagtctgctgcagagctggaggtgggcctggaggggcaggggcctgaggtgggcccaggggcaggtggtggtggtgctcaaagagcaggtccaggtggaaagtgagcaccgacaatggctgcagcaggagcagcagctctgtggacagggagggacaaccaccgcgggccagggagaaaaatcctgttggcaggtacaggagggagagcaggcctggaaaagagcaggccaacatcagctcctgccctggacctagtcccagaagaccccccagagcagcccaccagtcagcacacatcttcccaggcctcactctgctgggcactggggcagagaggaggaaggatgtggtgggctataggactgacatccccgcctgcatggaacctagcccaaataggaagacacacacagcaagtggtgacaagtaacagagacagtgcaaaggctacagaggaggaggacaggagagccatagaagcacatacaaaatgaggcgtgggggttggcctagtccgagggtagaggtagggcctcactggggaaggactcaaaggatgaatgatagttcagaggaagcaggaggggcagaaggtagaggaacagcataagcagggccctggagcaggaagggccaggcgggaagactgttggcaagaccctccaaggcaggggaagagggcagaggccagacagccaaggctttgggtctttcatcctatgggcgatgggcctccttagaaagttttaattagaagagtaataagatcggagatctggattaatggcattctggcagcagtgggaaccagcaggagagaactctttccttcccatcctcccagcccatcagccccatcctctaccatctgaacctctgacctgcatcttcctggagactggaaaaccacagctccaactgcttggtgctaggggagaaaagagggaatggaagttcagggaggtggaggactccagtcctctctgggtggaggatgggagatgagattggaagagggggggccttctctggggatgtgaggcactactactgtgtcccacccatgacgctcctgcagtcccaggtcgtgggaagggcactggaaagaaggcaactcacttgaggaggcccaggataaaggcatggaagcggctacggctgctgctcagcggggctagacggctgacctggctatacagggttccaagggagcgggtgctggagcctgagaacgtggggtgcagtcagccaagcccggccctgccctgcgcactgccgggtcccacgccctcctggctcacctggcttcaccgacgcctccaccacgctccaggggctgctcctgcgctgcccggtgatgaggtccttccggaaaggcttcagcccgtccgccaccagggcgtggagggccgggcagagggtggtcagcaccaggtgccccacatccgggctcagccggctatcacccaactgggcctggaggtggcgcgatgccgatggctccagagatccctccagacacctcccagccacctcccgccaaccattcccgcaccccccgcggagctccattactctcctcatcccaacagcctccccccagccaccttcaccttctgcaccaagttccgggcggccccgaaatgcgagatgattttatcaacggagacgctgacggctatcagaagacctgggaggagtgggaaagggaagacgctaggaggccgcgcccctacccaggcttgcccgaggggcgtggagagactgccttcggacagcctgagagcagggccgggggcgaagggcagtttattcggaagcgcggggtcgggagtcagggtgccctacctttcttctgctcctgcagctgaccagtcccactctgggcttctgccatccacagccgctgggctccggggacaccggcgaaggaccacgaactacggactggcgtaagggaagaagggcgcggtaacacttaccaagtgttattccgaggactccgggctcccgcacaagttgtctccggcgggtctgcagtgctgtgtccccgaagggtcttggggagaggaggcgcaggaccgcctgaagcacggggtagctcgacccgagccccggagtgaaatctcgcacacttcccagcactcgctgtcccccagccccatcccggttccctgtgccctccctcagggcacagcccccacctccaggatcccggaactccgggagcgggatggccgcgctcacctcccgcctgccctgctagggcctgtagggcgggagaggacggggcgcg

SEQ ID NO: 10016 - DNA, 11870 bp, Homo sapiens
  SITE (7240): n equals a,t,g, or c
gaaggttacacgattatttattgagagcctcctctccccgcccttgcaatctctaggtcactttctccgcttgtagattttgcgcgcaagccccagaaagacggctgggggcaggggtgctgcgtactgttcaatgagagccataatgtggctgtaactgtcttcctcatattgcaagaacactgctggcagatccagctcctcatatagcgccttcacccgggccactttctcagcctccttctgcccgtaattttcctggaagaggttgaaagacaggaaaacgggcttggccttccccagagcctccaggacccctccactcccctcattcacatattccagaacatctccaaagccacccactcctttcctccctccaattttcaagtgtctctacgtagctaaaatcccaagcttcccttccctatcccaaatattgcctcataccaggcatcctctactccagggtttctccaccttggcactattgaaatttgggaccagataatcctgtctgggggagctgttctgtgtactacatgtttggcaacatctttggctcctgccaactagatgtctgtaccacatgcacacacacagagttgtaatgacaatggcaaaaaatgtctgctgacattgccaaatgtcccctcgggaggaaaactgcctctagttgagaaccactgctctatccctttccaccaactcagggacccaccaccctctctcaggcaccttcaggatctggtactgttctggagtggcccgttgcagacactgaaccaccagccagctgcatttgttgtcctggatgtcagtgccaattttgccggtcacactggggtccccaaagaggtcaaggtaatcatcctgggcagggagggggagggcagcaaaagaggaaggatgaggttcctgggcagaggaggagtgaagctggtgcctgttctctgctactgcctcctgccttcttacctgaatctgaaagaactcccccatctccagcaggatcttcttggcattggcgtgctccttctcgccatcaattcctgcctgcagggaaaggggggttaataagccaaaccccaggggtgccggcatcttcctggctgcttcctcccatggggtcttgccctactgcagccccaaatctttcctctctcttcagacatcttggcttccctgacctagacagtcctgactgatggtccaacctcaatcccacttatttttggctaggccttcctgggagtcataaaagagatgaatccattctagaggtgcacagcctgtctcttccctcacaaatgtcagtccccaagtcattctgatccaccttcctaatatttttgccacctccaacttctttcaagatgaaaaggaaatgtagagaagcaaggtcagggtagacacttaatcccactgactgtctttaatccactcttctccctctcaacctggatgatctccacactcctatccatactcagatacaggatatattgttcccctattatgtgctaagcactttcatatcccttgccttgcttaatctttacagtcctgtgaagtaggaattttatccccagctgaggaaagagactgagcgagaccgacttgctcaaggtcacacagtttttcaccaggggtagcagtgttcacgttttctgctctatgccttgctgtccaaaagcccccatcagcagagcagagaggggtgaggaggctcactcaccatgtacatggctgcagctataggaaggtagaaggagtagaaagctgtcttgtacttgacaatagatttgtacctgagtaaggggagaagagaaactcctcaggagggcaatgcacatcctgagccctccctcgctgtccagacatggttcgcgctgtccctcacctcccctcacctcttttcagtgaatctgacaagatccacattgccctggggggctgtgaggaggtccagggtctgcccaatctcagtctgataggaactctaagcaagacaaagacggtccatgagccaggctttctccagatatgcgaaaccctggtatcccaagcccaacatcccataccagctgacaactgggcagaatcagaaaggcaacagaaggggagaaagccccaaaacttaaggcccatattcatacacacagtcctttatcaccctttcttccaattacacaggacagagaagccctttcttgccactaccacaaccccacttcccaacacccttcctcgctttctttcccttccaggcacgctgcaatcctgtaccctgaaaccagctagatgagcatgtcctatagaggccaaggctaccatgggcaccctctgggcatcgggccctgtctgcaatacacctgcaggaagagctcgatcaggttcaggtaatagggctgctcccggcaatagagcttcagcaggcggtagatacatgcttccaggaggttagcatcattgatggcatccaaacccacgcccggctgtcatgacagacagaaaaacaagcaatcaatctctagtctcggttcatactaagagccatcaccccaacacctcaaccaggccatatataaccacctccctgtggcctgtccccatacccactgctattttcctgcccacattaccttctgataccagcagatctgtccccggcgggtaagggatgaatccatgatgtcatctgccaccaggaagaaagcttgcagctagaaagagtggaataagacctgcagggctcctcattactgttccttctatcagcaacagagctgctactttatatctgtatatagttttgcttttttttggtaggggacagagtctcactattatccagtgcagtggtgcagtcacagctcactgtagcctctaactcccaggctcaagtgatcctcccacttcagcttcctgagttcctgagaccataggcacataccccatgcctggctattttttttttttaatttattttttgtagagacagggtcccactatgttgctcaggctggttttgaacccctgggttcaaatgatcctcctgcctcagcctcccaaattactgggattacaggcatgaggcatcacagccggccagagctgctgcctttgacagtccctatgagctgggaaagtcaggatggggagacagaagacttctgtgctatggagacttggaaagtgacataacatgtttggctcagactccccgcctataaaatggaactaaaacactcttgttttaggttaagaaactagaacagatctttgacatctctaatgagccctagattattcctggtgtcagggagattaggaaacaccttcatataccgtactctattcttgccaaaaacctcaatgaatgcttaaagtaagatctattcatgaaactgacttcacattacttcctaaataaaagaaggctattcccacattgcccccagcactgtgtttgaacaccctggtgactaggaacacagccttacctaaagcagctccttagcagtgcaggtctaataaggtggaactgaaatctgactttgacctatgagtctcagacatctttaaacatctttaaacattaactaagggcttactcttctgagtgcccatctgaaggtacctgaacgtgtcgggtttcccactagaccatgatctccttggaagcagggacagtaacttccccctcttagcatttgcagagcctagcacagcattaggcctggagtgagagtttcctaaacacttgtctgacaaagaaattaataaaacactctaacattccctgtgatacttcttgcagtcagtcaaactatgttttggttccttaaatagcttttctttttttttttttttgagatagagtctcactctatcacccaagctggagtgcagtggcgccatgtgggttcactgtaacctccgcctcccaaattcaagcgattctcctgcctcagcctcccaagtagctgggactacaggcacctgccaccaccaactgctaggccagctaatttttgtattttcattcagtagagactgggttttgccatgttggccaggctggtcttgaactcctgacctcaagtgatccgcctgcctcggcctcccaaagtgctgggattacaggcgtgagccatcgtgtctgaccattaaatagcttttcaagacatggtttgggttgcttttttaaagagacaagggtcttgtcatgttgcccaagttggacttgaactcctgggctcaagtgatcctcctgtctcaactcttgagaatctagggatataggcacacaccagcgcacccagctcaagacatggtttttattttcataacttatttcctttttttgtttttccacttctagatacatacccaggtttttgtttttgagatggagtttcactctcattgtccaggctggagtgcaatggcgcaatctcggctcactgcaacctccgcctcccgggttcacgcgattctcctgcctcagcctcccaagtagctgggattacaggcacgtgccatcacacccggctaatttttgtgtttttagtagagacaaggtttcaccatgttggtcaggctggtctcgaactcctgacctcacgtgatccatccaccttggcctcccaaagtgctgggattttaagtgtgagccaatgcacccggccctatacccaggttttaatttttattattattttcttttgagacaggatctcactctgtcacccaggcttgagcagaagacatggtttgtgtgtttttttttttttgagatggagtttcgctcttgttgcccaggctggagtgcaatagcgcgatcttggctcactgcaacctccgcctcccgggttcaagcgattttcctgcctcagcctcctgagtagctgggattataggcatgtgcctccacgcctggctaattttttttttgttttttgttttttgtttttttttgagacagagtctcgctcttgttgcccaggctggagtgcagtggcacaatctcagctcactgcaagctccgcctcccaggttcacgccattctcctacctcagcctcccaaatagctgggactacaggcgcctgccaccatgcccggctaatattttttttgtattcttagtagagacggggtttcaccatgttagccaggatggtctcgatctcctgacttcatgatccgcccgcctcagcctcccaaagtgctgggattacaggcatgagccactgcgcccagcctaattttgtattttcagtagagatggggtttccccatgttggtcaggctggtctcgaactcctgacctcaggtgatccacctgcctcagcctcccaaagtgctgggattacaggcatgagccactacacttggcctagaagacatggtttttaagactttatcccatcctaatcctgtgtgctgtagtggatccacattgcaaaggaagcatgcaacaccgcctgccagagcccagcatgggccgtggggaaaggaccgttgcaatcactgctgttataggcagggtcctcagggaaggaggcatccatctgcatctttacctctgacctaaactcagaagagtagtgtggaggtcctgggctttccacatcaaaggcacatgtttaattgactctgtgtttatttggagtagcatggtttccctgaagccacccattcactgcctctcccaagggtgactgcaaggacaatcttgtttcagccaccaccactcaaccatgatggtctccaagataattaattccatggcctccccaaatttcctctgcctcctagcactgattcttaaccccaccagcactttctatttattagggaaattaaaaaaaaaaaaaaaacccaggccaggcacagtggctcacacctgttatcccagtactctgggaggccgaggcaggcagatcacttgagcccgggagttcaagaccagcctgggcaacatagtgacactccatctctaccaaaaaactatttaaaaagccgggcgtggtggtaggcacctgtagtctcagctacttgggaggctgaggtggaaggatcgcttgagcccaggaggtcgaggctacagtacaccatgattgcaccactacactcaagcctgggcaacagaatgaggctttgtctctaaaaaaaaatttagaccaggcgtggtggctcacgcctgtaatcccaacactttaggaggccgagatgggcagatcactcgatgccacaagttcaagaccagcctcagcaacatggtgaaacctagtctctaaaaaaaaaaagccaagtagaggctcgctcctgtagtctcagctacttgggaggctgaggcggtggaagggtggcttccgctccagaggcagagattgcagtgagccaagatcatgccactgcactccagcctgggtaacagagtaagaccctgtatcaaaaaaaaaaaaaaattaaaaatttttaaaaacttacaggtgaaactagggtgctgctagggttaagaactgattctaggccaggtgcagtggctcacacctgtaacgcctgtaatcccagcgctttaggagggcgaggcagatggatcacaaggtcaggagttccagaccagcctgaccaatatggtgaaaccccgtctctactaaaaatacaaaaattagccagggatggtggcatgtgcctataatcccagctacttaggagactgaggcaggagaattgcttgaacctgggaggcagaggttgcagtgagccaagatggtgccactgcactccagcctgggcaacagagagagactccatctcaaaaaaaaaatgaactgattctaccagttaaccactggcccctcaaggtcttgctttcccttggcccccatagctttactcctctgctctgccctcatcctccttcccttccttccttgcctgtcatctccatattttgaacccctcagcccctcagcatccctgtcatccagggccctctccctggatgccatgggcctattacctccttggaagcaaatctctattctccagacccatctccccgacaagttccagactggaatttccaccgcccacaggacaggcagatccacctgctccacccataccaagaacgtacccgggctgactgtgctcagcacgtcttcccttgagccagctgctcctctcaggccaggcactcagcatcatcgtcactcaccaagttntgaatgctcttcccttttgggctcactgccaccctcctcgggcatggcacccctcccagaacccagtccccctgccactaatgaaagctttaggccatgccagcaaactagacaccttcaagaccaagacgaactggtatagaagacaaggggatgtggggattggagcaaactagagaaagcacacaggagaacacatgccgtcttgcagaagttgcatccactcagcttcagccaattgttgctatgcgggaacatggacccaaatcttacaatttcccaagccatgctagaaatctaggttttagtgtgaaatctctttgttaaatttaggagacttaattgtaaaacattttcaaaatactgtcagtgagctgccagttttcaatttctgcttctgaatagcctttggaagacctctgtcacctttttttttttttttttttttgagatggagtttcgctgttgttgcccaggctggagtgcaatggtgcaatctcagctcatcgcaacctctgcctcccaggttcaagcgattctcctgcctcagcctcccgagtagctgggattacaggcatgtgccaccacatccagctaactttgtattttgagtagagatggggtttctccatgttggtcaggctggtctcgaactccagaactcagatgatcctcccccttggcctcccaaagtgctgggattgcaggtgtcagccaccatgcccggcctcctctgtcacttttatagccatcctctgctcagaggaaagagctgacacctctctgcccagtctcgaggccccagtccacactgtctacaactatctacagccatcttcatacctaatgccaaaagaggctccccacattagttaacccttggagtgattcactctaaatttggccgtagcacactagagacaaagaaacacaaacacaacccagaaataagtttcaggcccatccctccccttcccacccaagtcaccaccattgcaggaaacttcttctcccttgccctacccctctcaccagttccacacaccagcccacagtccaggcccgctggagactatcagcatcctgtttccttggctccaccagctcccggaatgctactaccaccgtcaaaccccggttatacttgcctccaatggcattgtactccaggacctggagggcaaggaaagaggtacagggtatcagggtccatacagcagctactgtgagttttctccttgctctctcccatttccaaccaccacctaactttatcctccccaaccccaactcctcttcaaggagcctctggaattgctactgtctttactccttccccaaatttctggagcaaagctagaagaggtcccagtacccaggcacattctttctgcatggtctaccctagtaaatttattttttgtttttatttatttatttatttatttatttttttgagatgaattctctctctgttacccaggctggagtgcagtggcacgatcttggctcactgcaacctctgtctccgggttcatgaaattctcctggctcagcctctcgagtagctgggattacaggtgcccaccaccatgcccatctaatttttgtatttttagtagagacagagtttcaccatgttggctaggctggtttcgaactactgacctcaagtcatccacccgccttggcctcccaataaatttaaaacctccatagtgcagattaaatgctgctcccaaacccagaacagggcttgaacccacggaaaactcagtacatgctatagggatgactggcttgttcaggtccctccccagtttccttccccatccccacctctcctagacttccccttcacaacccatccctacttttccagccacctctgcctaccagggttcaaccctcctgcaaatgaaaagcctccttcattatattaaaacaaagcctctccaaagtcagccagaagacagcttacaggggacccacgctgtgggatccatctcccactcctccagtagtgtctcctcttgcatctcactttgccttctgctgcctggctatcaatcagacctaactaacagggaagacttcatctcgctatgtcactcaggctggagtgcagtggcacaatcacggctcactgcaacctccgcctcccaggttcaagtgattctcctgcctcagcctcctgagtagctgggactacatgtgggcgccaccacgcccagctaatttttgtatttttagtagagacgggggtttcaccatgttgaccaggctggtctcgaactcctgacctcatgatcccccccacctcagcctcccaaagtcctgggattacaggcgtgagccaccatgccgggccaagactcttttaatccccattccagtataggcaaagcccccctttcccttcattcccctgagatatatgagatagacagcatttataaaaagaattttaatagatactccagaatcaacaggaaaaaaattggcaagtatcacagcaatagttcatgttctagaataggggtttctaatgatacaataacttcactcaggccccagggagataggacaatatcagactgccttcttccccggtctctgccaacctaacagcttctgatttcaggacacaaaatctaagacttgccaggttcaaggcctccacccccaaagcaaagcagtttggatgacccaccttccatcagagccaaaagtccggttgatggactgagtaagtatacttgcccaggccccaacctctccagagcagactcgagtccctcaggtaaaagctttctcggccaggcgcggtggctcacacctgtaatcccagcactttgggaggccgaggtgggtggatcacctgaggtcaggagttcgagaccagcctggtcaacacagtgaaaccccgtctctattaaaaatacaaaagtttgctggatgtggtggcacgcacctgtaatcccagctactcagaaggctgaggcaggagaatcacttgaacccaggaggtggaggttgcagcaagccgagatcacaccatcgcactccagcccaggtgacagagcaaggctctgtctcaaaaaaaaaaaaaaagctttctctcacatctgtcaaaagtcccccataagccacaggtgaatgccacacaggtacagagcaactgaaccaaagccttactcccccaagtcatgaatccctcacctccttgagccgggcaatagcatctcctatctctgggtgccccatctcatcctcagtcagcaccctaacgatctgggagaagtgctgaacgaaatcctgcttttcttgggcataaacatctgaattctggtctccgttcattctgagggaggagcaaagggctctaagtagaagaaaaacaagtcagaaacctgatcagctgctcccctccccaaggcccctcaccccaaccacactcaccgaggttcctctgtccacgcttggcaccagcagcgggcactgtgccaggccaggactgggtacccgtgcaccagggagggccgccgtagggaacccagccacctctcccggggtgcccagtagggggctggcagcaggaagacccccacagatctcaaccagcgggacaggggcatcctgggagtggcatagggagggggcactaagcactccctgcaggggcaagcaccaaaggcagaggcatggtggcagctccccagataactcccaccccagccttagcccagagtgcccctccctcttgtggaatgtgcttggggacaattacaggaaggatacgcagggaacaaaaaagtatggctgggtgactgagacccaactaatcaccacttacaataaacaggctagaactcagtgccttcaagatggcgtgcacaaggctgggtaaggaggcggtacagagtaaagtaccccaggattaggggctgaaaggacccttaagtcatcctattttacacaagccaaactgaggctctaggaggtaggaagatagtagaggcagagccaaatctagaacccaggtctcccctgggcagtggagaggggtgcccagggtctgagttacgccccaaggaggaaagaagcattggagcgagaacccatgggtgctgcatccatatggtccggggtgcttgaaccgcgcgtcccaagccccacaggaatcgctaggactgagcagataggctcggagcaactctggacgggagagaagggctcgcagcaaaggagtaaaccggggtccgggcatattggggattccaggaaagcacaagggcagagttgggaagtctccacacccctagaaggccagccagtctagcccaccgaccttcaaaacggacacaacaggctggccttccgatgcctcacagtatcgttacagaagtaaggcccggtctcggcccccttcctccaaggcccagcacacatcctctctcacctgttcccagatacggattcctgctcggtcccgcttgttggcgggtactcctaaaagcagaatccgctccgcgatcggctctgtgggtcgagtagttcccgctctccccacactaagggcggaaatatataattagactacaactcccaatgtgcccgcgggagggac

SEQ ID NO: 10017 - DNA, 11870 bp, Homo sapiens
gaaggttacacgattatttattgagagcctcctctccccgcccttgcaatctctaggtcactttctccgcttgtagattttgcgcgcaagccccagaaagacggctgggggcaggggtgctgcgtactgttcaatgagagccataatgtggctgtaactgtcttcctcatattgcaagaacactgctggcagatccagctcctcatatagcgccttcacccgggccactttctcagcctccttctgcccgtaattttcctggaagaggttgaaagacaggaaaacgggcttggccttccccagagcctccaggacccctccactcccctcattcacatattccagaacatctccaaagccacccactcctttcctccctccaattttcaagtgtctctacgtagctaaaatcccaagcttcccttccctatcccaaatattgcctcataccaggcatcctctactccagggtttctccaccttggcactattgaaatttgggaccagataatcctgtctgggggagctgttctgtgtactacatgtttggcaacatctttggctcctgccaactagatgtctgtaccacatgcacacacacagagttgtaatgacaatggcaaaaaatgtctgctgacattgccaaatgtcccctcgggaggaaaactgcctctagttgagaaccactgctctatccctttccaccaactcagggacccaccaccctctctcaggcaccttcaggatctggtactgttctggagtggcccgttgcagacactgaaccaccagccagctgcatttgttgtcctggatgtcagtgccaattttgccggtcacactggggtccccaaagaggtcaaggtaatcatcctgggcagggagggggagggcagcaaaagaggaaggatgaggttcctgggcagaggaggagtgaagctggtgcctgttctctgctactgcctcctgccttcttacctgaatctgaaagaactcccccatctccagcaggatcttcttggcattggcgtgctccttctcgccatcaattcctgcctgcagggaaaggggggttaataagccaaaccccaggggtgccggcatcttcctggctgcttcctcccatggggtcttgccctactgcagccccaaatctttcctctctcttcagacatcttggcttccctgacctagacagtcctgactgatggtccaacctcaatcccacttatttttggctaggccttcctgggagtcataaaagagatgaatccattctagaggtgcacagcctgtctcttccctcacaaatgtcagtccccaagtcattctgatccaccttcctaatatttttgccacctccaacttctttcaagatgaaaaggaaatgtagagaagcaaggtcagggtagacacttaatcccactgactgtctttaatccactcttctccctctcaacctggatgatctccacactcctatccatactcagatacaggatatattgttcccctattatgtgctaagcactttcatatcccttgccttgcttaatctttacagtcctgtgaagtaggaattttatccccagctgaggaaagagactgagcgagaccgacttgctcaaggtcacacagtttttcaccaggggtagcagtgttcacgttttctgctctatgccttgctgtccaaaagcccccatcagcagagcagagaggggtgaggaggctcactcaccatgtacatggctgcagctataggaaggtagaaggagtagaaagctgtcttgtacttgacaatagatttgtacctgagtaaggggagaagagaaactcctcaggagggcaatgcacatcctgagccctccctcgctgtccagacatggttcgcgctgtccctcacctcccctcacctcttttcagtgaatctgacaagatccacattgccctggggggctgtgaggaggtccagggtctgcccaatctcagtctgataggaactctaagcaagacaaagacggtccatgagccaggctttctccagatatgcgaaaccctggtatcccaagcccaacatcccataccagctgacaactgggcagaatcagaaaggcaacagaaggggagaaagccccaaaacttaaggcccatattcatacacacagtcctttatcaccctttcttccaattacacaggacagagaagccctttcttgccactaccacaaccccacttcccaacacccttcctcgctttctttcccttccaggcacgctgcaatcctgtaccctgaaaccagctagatgagcatgtcctatagaggccaaggctaccatgggcaccctctgggcatcgggccctgtctgcaatacacctgcaggaagagctcgatcaggttcaggtaatagggctgctcccggcaatagagcttcagcaggcggtagatacatgcttccaggaggttagcatcattgatggcatccaaacccacgcccggctgtcatgacagacagaaaaacaagcaatcaatctctagtctcggttcatactaagagccatcaccccaacacctcaaccaggccatatataaccacctccctgtggcctgtccccatacccactgctattttcctgcccacattaccttctgataccagcagatctgtccccggcgggtaagggatgaatccatgatgtcatctgccaccaggaagaaagcttgcagctagaaagagtggaataagacctgcagggctcctcattactgttccttctatcagcaacagagctgctactttatatctgtatatagttttgcttttttttggtaggggacagagtctcactattatccagtgcagtggtgcagtcacagctcactgtagcctctaactcccaggctcaagtgatcctcccacttcagcttcctgagttcctgagaccataggcacataccccatgcctggctattttttttttttaatttattttttgtagagacagggtcccactatgttgctcaggctggttttgaacccctgggttcaaatgatcctcctgcctcagcctcccaaattactgggattacaggcatgaggcatcacagccggccagagctgctgcctttgacagtccctatgagctgggaaagtcaggatggggagacagaagacttctgtgctatggagacttggaaagtgacataacatgtttggctcagactccccgcctataaaatggaactaaaacactcttgttttaggttaagaaactagaacagatctttgacatctctaatgagccctagattattcctggtgtcagggagattaggaaacaccttcatataccgtactctattcttgccaaaaacctcaatgaatgcttaaagtaagatctattcatgaaactgacttcacattacttcctaaataaaagaaggctattcccacattgcccccagcactgtgtttgaacaccctggtgactaggaacacagccttacctaaagcagctccttagcagtgcaggtctaataaggtggaactgaaatctgactttgacctatgagtctcagacatctttaaacatctttaaacattaactaagggcttactcttctgagtgcccatctgaaggtacctgaacgtgtcgggtttcccactagaccatgatctccttggaagcagggacagtaacttccccctcttagcatttgcagagcctagcacagcattaggcctggagtgagagtttcctaaacacttgtctgacaaagaaattaataaaacactctaacattccctgtgatacttcttgcagtcagtcaaactatgttttggttccttaaatagcttttctttttttttttttttgagatagagtctcactctatcacccaagctggagtgcagtggcgccatgtgggttcactgtaacctccgcctcccaaattcaagcgattctcctgcctcagcctcccaagtagctgggactacaggcacctgccaccaccaactgctaggccagctaatttttgtattttcattcagtagagactgggttttgccatgttggccaggctggtcttgaactcctgacctcaagtgatccgcctgcctcggcctcccaaagtgctgggattacaggcgtgagccatcgtgtctgaccattaaatagcttttcaagacatggtttgggttgcttttttaaagagacaagggtcttgtcatgttgcccaagttggacttgaactcctgggctcaagtgatcctcctgtctcaactcttgagaatctagggatataggcacacaccagcgcacccagctcaagacatggtttttattttcataacttatttcctttttttgtttttccacttctagatacatacccaggtttttgtttttgagatggagtttcactctcattgtccaggctggagtgcaatggcgcaatctcggctcactgcaacctccgcctcccgggttcacgcgattctcctgcctcagcctcccaagtagctgggattacaggcacgtgccatcacacccggctaatttttgtgtttttagtagagacaaggtttcaccatgttggtcaggctggtctcgaactcctgacctcacgtgatccatccaccttggcctcccaaagtgctgggattttaagtgtgagccaatgcacccggccctatacccaggttttaatttttattattattttcttttgagacaggatctcactctgtcacccaggcttgagcagaagacatggtttgtgtgtttttttttttttgagatggagtttcgctcttgttgcccaggctggagtgcaatagcgcgatcttggctcactgcaacctccgcctcccgggttcaagcgattttcctgcctcagcctcctgagtagctgggattataggcatgtgcctccacgcctggctaattttttttttgttttttgttttttgtttttttttgagacagagtctcgctcttgttgcccaggctggagtgcagtggcacaatctcagctcactgcaagctccgcctcccaggttcacgccattctcctacctcagcctcccaaatagctgggactacaggcgcctgccaccatgcccggctaatattttttttgtattcttagtagagacggggtttcaccatgttagccaggatggtctcgatctcctgacttcatgatccgcccgcctcagcctcccaaagtgctgggattacaggcatgagccactgcgcccagcctaattttgtattttcagtagagatggggtttccccatgttggtcaggctggtctcgaactcctgacctcaggtgatccacctgcctcagcctcccaaagtgctgggattacaggcatgagccactacacttggcctagaagacatggtttttaagactttatcccatcctaatcctgtgtgctgtagtggatccacattgcaaaggaagcatgcaacaccgcctgccagagcccagcatgggccgtggggaaaggaccgttgcaatcactgctgttataggcagggtcctcagggaaggaggcatccatctgcatctttacctctgacctaaactcagaagagtagtgtggaggtcctgggctttccacatcaaaggcacatgtttaattgactctgtgtttatttggagtagcatggtttccctgaagccacccattcactgcctctcccaagggtgactgcaaggacaatcttgtttcagccaccaccactcaaccatgatggtctccaagataattaattccatggcctccccaaatttcctctgcctcctagcactgattcttaaccccaccagcactttctatttattagggaaattaaaaaaaaaaaaaaaacccaggccaggcacagtggctcacacctgttatcccagtactctgggaggccgaggcaggcagatcacttgagcccgggagttcaagaccagcctgggcaacatagtgacactccatctctaccaaaaaactatttaaaaagccgggcgtggtggtaggcacctgtagtctcagctacttgggaggctgaggtggaaggatcgcttgagcccaggaggtcgaggctacagtacaccatgattgcaccactacactcaagcctgggcaacagaatgaggctttgtctctaaaaaaaaatttagaccaggcgtggtggctcacgcctgtaatcccaacactttaggaggccgagatgggcagatcactcgatgccacaagttcaagaccagcctcagcaacatggtgaaacctagtctctaaaaaaaaaaagccaagtagaggctcgctcctgtagtctcagctacttgggaggctgaggcggtggaagggtggcttccgctccagaggcagagattgcagtgagccaagatcatgccactgcactccagcctgggtaacagagtaagaccctgtatcaaaaaaaaaaaaaaattaaaaatttttaaaaacttacaggtgaaactagggtgctgctagggttaagaactgattctaggccaggtgcagtggctcacacctgtaacgcctgtaatcccagcgctttaggagggcgaggcagatggatcacaaggtcaggagttccagaccagcctgaccaatatggtgaaaccccgtctctactaaaaatacaaaaattagccagggatggtggcatgtgcctataatcccagctacttaggagactgaggcaggagaattgcttgaacctgggaggcagaggttgcagtgagccaagatggtgccactgcactccagcctgggcaacagagagagactccatctcaaaaaaaaaatgaactgattctaccagttaaccactggcccctcaaggtcttgctttcccttggcccccatagctttactcctctgctctgccctcatcctccttcccttccttccttgcctgtcatctccatattttgaacccctcagcccctcagcatccctgtcatccagggccctctccctggatgccatgggcctattacctccttggaagcaaatctctattctccagacccatctccccgacaagttccagactggaatttccaccgcccacaggacaggcagatccacctgctccacccataccaagaacgtacccgggctgactgtgctcagcacgtcttcccttgagccagctgctcctctcaggccaggcactcagcatcatcgtcactcaccaagttttgaatgctcttcccttttgggctcactgccaccctcctcgggcatggcacccctcccagaacccagtccccctgccactaatgaaagctttaggccatgccagcaaactagacaccttcaagaccaagacgaactggtatagaagacaaggggatgtggggattggagcaaactagagaaagcacacaggagaacacatgccgtcttgcagaagttgcatccactcagcttcagccaattgttgctatgcgggaacatggacccaaatcttacaatttcccaagccatgctagaaatctaggttttagtgtgaaatctctttgttaaatttaggagacttaattgtaaaacattttcaaaatactgtcagtgagctgccagttttcaatttctgcttctgaatagcctttggaagacctctgtcacctttttttttttttttttttttgagatggagtttcgctgttgttgcccaggctggagtgcaatggtgcaatctcagctcatcgcaacctctgcctcccaggttcaagcgattctcctgcctcagcctcccgagtagctgggattacaggcatgtgccaccacatccagctaactttgtattttgagtagagatggggtttctccatgttggtcaggctggtctcgaactccagaactcagatgatcctcccccttggcctcccaaagtgctgggattgcaggtgtcagccaccatgcccggcctcctctgtcacttttatagccatcctctgctcagaggaaagagctgacacctctctgcccagtctcgaggccccagtccacactgtctacaactatctacagccatcttcatacctaatgccaaaagaggctccccacattagttaacccttggagtgattcactctaaatttggccgtagcacactagagacaaagaaacacaaacacaacccagaaataagtttcaggcccatccctccccttcccacccaagtcaccaccattgcaggaaacttcttctcccttgccctacccctctcaccagttccacacaccagcccacagtccaggcccgctggagactatcagcatcctgtttccttggctccaccagctcccggaatgctactaccaccgtcaaaccccggttatacttgcctccaatggcattgtactccaggacctggagggcaaggaaagaggtacagggtatcagggtccatacagcagctactgtgagttttctccttgctctctcccatttccaaccaccacctaactttatcctccccaaccccaactcctcttcaaggagcctctggaattgctactgtctttactccttccccaaatttctggagcaaagctagaagaggtcccagtacccaggcacattctttctgcatggtctaccctagtaaatttattttttgtttttatttatttatttatttatttatttttttgagatgaattctctctctgttacccaggctggagtgcagtggcacgatcttggctcactgcaacctctgtctccgggttcatgaaattctcctggctcagcctctcgagtagctgggattacaggtgcccaccaccatgcccatctaatttttgtatttttagtagagacagagtttcaccatgttggctaggctggtttcgaactactgacctcaagtcatccacccgccttggcctcccaataaatttaaaacctccatagtgcagattaaatgctgctcccaaacccagaacagggcttgaacccacggaaaactcagtacatgctatagggatgactggcttgttcaggtccctccccagtttccttccccatccccacctctcctagacttccccttcacaacccatccctacttttccagccacctctgcctaccagggttcaaccctcctgcaaatgaaaagcctccttcattatattaaaacaaagcctctccaaagtcagccagaagacagcttacaggggacccacgctgtgggatccatctcccactcctccagtagtgtctcctcttgcatctcactttgccttctgctgcctggctatcaatcagacctaactaacagggaagacttcatctcgctatgtcactcaggctggagtgcagtggcacaatcacggctcactgcaacctccgcctcccaggttcaagtgattctcctgcctcagcctcctgagtagctgggactacatgtgggcgccaccacgcccagctaatttttgtatttttagtagagacgggggtttcaccatgttgaccaggctggtctcgaactcctgacctcatgatcccccccacctcagcctcccaaagtcctgggattacaggcgtgagccaccatgccgggccaagactcttttaatccccattccagtataggcaaagcccccctttcccttcattcccctgagatatatgagatagacagcatttataaaaagaattttaatagatactccagaatcaacaggaaaaaaattggcaagtatcacagcaatagttcatgttctagaataggggtttctaatgatacaataacttcactcaggccccagggagataggacaatatcagactgccttcttccccggtctctgccaacctaacagcttctgatttcaggacacaaaatctaagacttgccaggttcaaggcctccacccccaaagcaaagcagtttggatgacccaccttccatcagagccaaaagtccggttgatggactgagtaagtatacttgcccaggccccaacctctccagagcagactcgagtccctcaggtaaaagctttctcggccaggcgcggtggctcacacctgtaatcccagcactttgggaggccgaggtgggtggatcacctgaggtcaggagttcgagaccagcctggtcaacacagtgaaaccccgtctctattaaaaatacaaaagtttgctggatgtggtggcacgcacctgtaatcccagctactcagaaggctgaggcaggagaatcacttgaacccaggaggtggaggttgcagcaagccgagatcacaccatcgcactccagcccaggtgacagagcaaggctctgtctcaaaaaaaaaaaaaaagctttctctcacatctgtcaaaagtcccccataagccacaggtgaatgccacacaggtacagagcaactgaaccaaagccttactcccccaagtcatgaatccctcacctccttgagccgggcaatagcatctcctatctctgggtgccccatctcatcctcagtcagcaccctaacgatctgggagaagtgctgaacgaaatcctgcttttcttgggcataaacatctgaattctggtctccgttcattctgagggaggagcaaagggctctaagtagaagaaaaacaagtcagaaacctgatcagctgctcccctccccaaggcccctcaccccaaccacactcaccgaggttcctctgtccacgcttggcaccagcagcgggcactgtgccaggccaggactgggtacccgtgcaccagggagggccgccgtagggaacccagccacctctcccggggtgcccagtagggggctggcagcaggaagacccccacagatctcaaccagcgggacaggggcatcctgggagtggcatagggagggggcactaagcactccctgcaggggcaagcaccaaaggcagaggcatggtggcagctccccagataactcccaccccagccttagcccagagtgcccctccctcttgtggaatgtgcttggggacaattacaggaaggatacgcagggaacaaaaaagtatggctgggtgactgagacccaactaatcaccacttacaataaacaggctagaactcagtgccttcaagatggcgtgcacaaggctgggtaaggaggcggtacagagtaaagtaccccaggattaggggctgaaaggacccttaagtcatcctattttacacaagccaaactgaggctctaggaggtaggaagatagtagaggcagagccaaatctagaacccaggtctcccctgggcagtggagaggggtgcccagggtctgagttacgccccaaggaggaaagaagcattggagcgagaacccatgggtgctgcatccatatggtccggggtgcttgaaccgcgcgtcccaagccccacaggaatcgctaggactgagcagataggctcggagcaactctggacgggagagaagggctcgcagcaaaggagtaaaccggggtccgggcatattggggattccaggaaagcacaagggcagagttgggaagtctccacacccctagaaggccagccagtctagcccaccgaccttcaaaacggacacaacaggctggccttccgatgcctcacagtatcgttacagaagtaaggcccggtctcggcccccttcctccaaggcccagcacacatcctctctcacctgttcccagatacggattcctgctcggtcccgcttgttggcgggtactcctaaaagcagaatccgctccgcgatcggctctgtgggtcgagtagttcccgctctccccacactaagggcggaaatatataattagactacaactcccaatgtgcccgcgggagggac

SEQ ID NO: 10018 - DNA, 3784 bp, Homo sapiens; identical to SEQ ID NO: 10015

SEQ ID NO: 10019 - DNA, 8764 bp, Homo sapiens
ggccgttgaaaaatggcgactgtggcagagttgaaggctggtgagtgcgagcagggaggcctccacatgggaagcgtcgggccttcatcttgtggaaaggatgggatgggaggagagcgcgcggaacacatgggttggcttttacaggcgtcattcttcggtgtgagggcctgcggggagcgtctggctgctgtcttggcccgtgcgcggggagctcttatggggaagaggttgcccactggcgagttttaagccagtttggagctaaaggaggagttgcgtaatcttcaggcatctaagaggcctacaggcctgcatcttgggcccctggctcatcttcttggaccctgccgggggctggaggacttggaccaggcttggcactcagggctgatgactacaattcccacaacccctattgggttaggcactgccctaaacaatttgcttggttgtctcgttgggtccttacaacaacctgttaagtagccctcccctccttgctttttttttttttttttaaagagagggtctctctgtcgcccaggctggagtgcagtagcgcgatcacagctcactgcagcttcgaactccgggactccagctatcctcccacctcagcttccagagcaggtgggaatacaggggctcttcactacgcccggctaatttttgtattttttgtagacacggggtcttactgtcgaactcctggtctcaagctatcctcctgccttggccccctcaaagtgctgggattacaggtgtgagcgcctggcccctttttcatcagaagaaactagaggcaaaaagtttgctggcctggccattctcctgtcttttcaggaaaagatactctaagctagttatgtttgagtcattaatgacatttgtacgctgtttactttgaagcaaatgtccagacaagtaatagtaataatagttatcattgagcctcatgtgtcaggcactactcaactcagcctgtgtgttacctgattgtaacaaccctatgcccatttcatagactgggaaacgaggtactgagaagtgaaatagctcaaagtgatttcactggaaagagacacagcatgggaacctagttgtgacgcactggagcgccaggtcttaatcactgagcaagattgctgtccaaaaaataaaaccagttccactttgcagggaacccagggtttaaactagtaattcttagatattttagggaggagacgtgtataaaagtgtgtatttggggacagggctggtgaacaatcataaaacagaacaggcatgcatctgtccacaagaacagacttcacgagtctacagatgctgttcccagggaaatacacatcacatgtaatattgcatacattttcagaggatttaaaggtacacttggaatgggccaagcacagtggctcatgcctgtaatcctaacactttgggaggatcgcttgagcccagaagtttaagaccagcctggccaacatggtgagaccccatctttatttaaaaaataaaaattaaaaaaaagagccgggcatagtggcctgtggtagttccagctaccccacaggctgaaacaggaagatagcttgagcccaggagatagaggtgacaatgagctacagtggtgccactgcactccagcctgggcaacaaaatgagaccttgtctcaaaaaaaaaaacaaattaaaaaataaaataaaaaaggtactcttgaaatataagcgaggttaagacctttccgaagaagttttgatggcgcagtgttctaagcataatagagggaaaggtaaaatgctatggacctccaaaagaaacccggtgaaaacttgtttgccagccagttaccttacattttatgggcatttaccttttttaagcacgatcacgtttttccttcttacttggttctatctctgagaggtagagctcattattttagagaaggcaactgaggcatgggttggtaatccaccactgaggtgctgatgagacatgctagctttcctcattccactgtcactaattctcgtttctctgtccagtttgaggctgtcctgtgtgcaatacagagtaattgggacaggatccttgccagtgacaaaatctctccatccaatttccaaagatggaattagagaataggggttcagttatgattctaagagtacaataaggctgtaccttccttttatggacctgttacaaactctgatctggtgataactgtacttaacctatctgcaagaaggttgaagggatgctttaaaaatgaggggaaagaaaggtcaaaagtcagtgaagattctatctctttagtcatatgatccagggttattgttgacgttatttattgaagcttagaaagatcttatgtccatactgacttggataagctcctgggctctctttatggatttttgttattgtgatgtacttacttggtgcctttggcagggtgcagaacagtgttaaactacattgatttcccagtagtgtacagcaatgtattataatccttctaggtgacacctactgagctcttgctctgttcttgactctgtggatgagatgtgttcattctctgaagttgtcatttagccagtaggaactgtttgaaaataaaagttgcagatcactacaagggatggtgccaattcagtcctaagatccccattatctatactaagtatgtacagccaaatcccatgatcataactgctttgtcatggtgactctggctaatcagtaagttagatttccattctgcatacacatccctgactccttaagatggcattgatacagtcacgtggtagatttctaactaggcttaaaatttcagaatcctactgttctaaggaattaactcatagttgtctttaaaacaacgaggccagtgggcgcagtggctcatgcctgtaatcccagtactttgggaggctgaggcgggtggatcacgaggtcaggagatggagaccatcctggccaacatagtgaaaccctgtctctactaaaaatacaaaaattagccagtcgtggtatcgcacacctgtaatcccagctatttgggaggctgaggcaggagaattgcttgaaccagggagcctggagattgcagtgagccgagatcgtgccactgcactccaacctggcgacagagcgagattgtttcaaaataacaacaatgaaaaacccaacaccttttcactccctaaagcgttgtggattatcaaaggtttgtgtttttttttttggttggttggttggttggttgttttaaacagagtctcactctttcgcccaggctagagtgcagtggcaccacctcagctcactgcaccctccacctcccaggttcaagtaattcttgtgcctcagcctcccaagttgctgggactacaggtgcgtgccaccacacccggctaattttttgtatttttttagtagagagggggatttcaccttgttagccaagatggtctcaatttgctgatctcgtgatccgcccgcctgagcctcccaaagtgctgggttacaggcatgagccaccatgccctgccatcaaggtttttacacagtaacccaacagacttcttttatggaatgtagttgttttctttaatcatctttctagaccagaggttgttagtgacaagcagaacctgtgtgcagtggcagacactcttgaaaatatatgagagactggggcttaagttcaggtctcagtaagcaactataatcctatcccccgccttttcccctcactaaagaattatgtattggccgggcacggtggctgacacctgtaatcccaacactttgggaggctgaggtgggtggatcacgaggtcaggagattgagaccatcctggccaacacagtgaaaccccgtctctactaaaaatacaaaaaagaaatagttgggcgtggtggcacgtgcctgtagtcccaactaccctggaggctgaggcaggagaattgcttgaacctgggaggcagaggttgcagtgagctgagatcgtgccactgcactccagcctgggtgaaagagcgagactgtgtctcaaaaaaaataataaataaaataaaaaagaatatgtattagactacagcccctgacagtgctgatgatgtaggaataaacttgaatttgctcaaatatattaagactaaatcactgcaacatgagaactatatgttttagtataaacatggctggtggtagtgtaattgtttaataatttgtcacaatgtttagattaagagctgcttgagagctgtttttgtaccatttaccttttcaacatttcttttcaaagtatgcctaagaatgacaaatttactctgtaactgaagccttaatattttatatcgaacagttttaaaggacaccttggaaaaaaagggggtattagggcatttaaaagcaaggatccgagctgaagttttcaatgccctagatgatgaccgtgaaccccgaccatcattgtctcatgaaaaccttctaattaatgaattaattcgagagtatttagaattcaacaaatataagtatacagcatctgtcctcatagcaggtaagtggttattatttatcacataaaatctgtttctcccctttccccaattctcagaaactgtttatcctagaaatctaattcccttaccagatagtgccatctgggtgactgggacacaaaaatcacatgggttctttctgtagcttaaacagattcttacaagagaaaatacataactaaataatcacttaaactaggcatatacttggaaaaatcatctataattcctgtaaccgagaataaacaattgttgacgttttgtcctgtttgccaccagttttttcctgtgtattaagctttaaaaatatacgctgattaagtatattatttgttaaaaaataggctgggtaggtggctcacacctgtaatctcagtgctttgggaggccgaggcaagattacttgagcccaggagttcgcgaccagcctgggcaacacagggagaccccatctctggaaaagagtttttaaaattagccatgcatggtggcacgtgtctgttgtcctagctgaggctgagcaggggtcggggagggggtgatcatgtgagcccatgtgctctgggctttagtgagccatgatcgcatcactgcactccagtctgggcaacagagagagaccctgtctcttttttctttttccagagacagaatctcactctgttgcaaaggctggactgcagtggtgcgatcatggcttattgcaactttcacctcctgggctcaagcagtcttcctgcgtcagtctcctgagtagctgggaccacaggtgcatgcctccatgcccagctaaatttttttattatttatagagatgagctctcactatgttgcccagcctggtattgaactcctgggctcaggtgatccacctatctcacactccccaaatgctgggattacaggcatgagccactgcacccaacccctgtcttttttttctttctttttttttgagacggagtctcactctattgtgatctcagctcactgcatcctccgcctcctgggttcaagcagttctcctgcctcagcctcccgagtacctggaactacaggtgtgtgctgccaggcccggcgaatttttgtattttttagtagagacggggtttcactatattggacaggctggtccaactcctgtctcttaaaagaaaaaaaactgtccctgtctatatatagatatgtagatatatgtctatttgtgtgtgtgtgtgtgtgtatctagatagatagatagatagatagatagatagatagatagatagatagatataatggagataaaactttgaaatattactactatgtagtgcttaggtacatttacaaatgtatgtatctaaaagcatggtatttataaaggactaggctggtatattaggttgtttttggattgctataaataaacacctgagactgggtaatttatgaagagaagaggtttttttgtatgtttgtttgtttgtttgtttgttttgagacagagtcttgctctgtcacccaggctggagtgtggattgatctcggctcactgcaacgtctacctcctgggttcaagtgattctcctgcctcagcctcccaagtagctgggactacaggccatgcccagctaattttttgtatttttagtagagacagggtttcaccgttagccaggatggtctcagtctcctgacctcgtgatccgccctcctcggcctcccaaaatgttgggattacaggcgtgagccaccgcacccggttgaagaaaagaggtttacttggctcacggttctgcagactgtacaagcatggcactggcatctgcttagcttctgggaggcctcagggagcttttgctcactgcagcaagcacgttacatggtgaaggcaggggccaagggtggggaaggttagtgccacacacttataaatgacctgttctcatgagaacccactcactgtggtaaggacagcaccaggccatgagggatccacccccatgacccaaacaactcccgccaggtcccacttccaacactggggagtgcgttgcaacatgagatttgggcggagacaaatatccagactctagcagcgggaaactccaaactcatcctagtgataggaggcagagaatgatattgggggttgggggtggggagataaagataaattccctttatctgttgaattttatttcttgagaaataaatttgctcttcaagtgtaacagttattgagtggtgagaatatttttaatatcttctgctgacttttaaatgtcttctttcaaaaaagtgaggagagactggatggatataaataagtcagaatcctggttacccctggacttggtggggtgggggatgcagctgggggttggtctgaggcaccctgaatgtgtgtcatcggattccctcgtttcaggttccatctctgctttgactacttcatgcctcagcaaagaagcgaggccaggaagtagattttgcaagagagaatgaattctttgtgaagttagaatttttcgttacagatcctttatttaatattaaacatacgtctgaactacataaagactcatgatttttatggtttaaggatctttgatatcagcatctctgctttcctttgtttgttatagatggctgtatgataccagttacacccagaaaagaagaaattatgaaaatagtggggacttgggattcactagaatgaaatatagtgacagtagtcaagttttcatattaaatggtttggctttttttaaaaaactgggatataatttacatacaataaaatttaccttttaaactgtacagttctgtactttagtcaaatgcctgcagttgtgtaattactaccagatcacaatcaagatatcaccagcctttttggcaccagggactggtttcatggaagacaatttttccatggacctgggaggatggttcgggatgattcaagcatactccatttattgtgcattttatttctatgattgtgttgtaatatataatgaaataattataactcaccataatgtagaatcagtgggagccctaagcctgttttcctgcaactagatggtcccatctgggggtgatgggaggcagtgagagatcatcaggccttagattctcataaggagtgcacagcccagatccctcgcatgtgcagttcacaatagggttcacgcttctatgagaatctaattctgccaacaggaggctgagctcaggcagtgatgctagtgatgggcagcagctgtaaacacagatcaagcttccctcacttgcttgcccactcctcacctcctgctgtgtggcccagtttctaatctgtggctcgggggttggggacccttgctgtagatggaaccgtacatgatgtagccttttgagtctgccttttttcacttagtgtaatacattcaagattcagccatgtttgtttttcctttgaacactgttctattgtgtggctgtgctagtttgctcatctatgaccagttgatgggcattgagttgtttctagttttagcagttaggaatcaagctgccataaacatttacatacaggtttttgtgagaacataagttttcattaatcttgggtagaaagctaagagtgagattgctgggttgtgtggttaagtgcacgctcacctttataagaaaactgctcaactgttttccaaagtgcctgtaccattgtgctttcccaccagcaaagtgtgaaagttccagctgccccacacttcaggttaactttaatttttatttataagtattgtcaccaagtggatattcttttcaaaaataagttattgataaacagacttccaaaatttagtattataatttggatatagaaatggtatttttccaaccaaacactggggaatttaaaaagtgaatttatgttaaactgtattaagacatgcatttaacaaaagagatattttgaaagtcataaaatcacaggcaatttgatctgtcttggtgtgtgttgtcatcattcttccaaaatctaaaaagtgtatgtctggtaaatgtgattcttttcaaaatcttatttgctttttagtttaatagactgagtgttctcatgaatttatttctcccagaatctggtcaacctgtagttccgttggacagacagtttctcatccatgaactaaa

SEQ ID NO: 10020 - DNA, 367 bp, Homo sapiens
ttagggtacattattcccctgttccttttcctttacttccatgggatgttggagcttattccttcattagttagttccataaaaagctcctggactccttacatgcactgtgtaagtgcgagtggaagaggacaggctggtgaccttggttaagtctcttcagcgatggaggactctgtttccttcattgtaaaaacggcgtgatcataaggaaataatgcgctaaggcgtcacagtaagtgcttaatacagtggttctcgaggtgtgatctccagaccgaccagcagtaccagtaccacctgggaactcgatagaaatgcaaatcctagggcctcaccccagatttacagaatcagaaactctatg

SEQ ID NO: 10021 - DNA, 684 bp, Homo sapiens
tcagatctagtgtgtgtcaagcattgtcctaaatccagggtgtgcagcagtgaataagtcagatgagatctgtgtttgctgaagctacaattacatggcttcagagtgactcagcatcttctttctggagttagctccttttgacttcttgatcctttgtccttctaaggctttgtttgttttttaatttataatttcaacttttatttgtattttcaaattatttttgtagaggcaaggcctcgcttttttgcccaggctggtctcgaactcctgacctcaagtgatcttcctgccttggcctcccaaagtgctagggttgcaggtgtgagccctccatgcctggcctctgagactttgccttgtcagttgttttcttcatatttaactcttccttcactccaacttaggaatgtactcagatctctcctctcctaaaacaaaaacaaaaacaaaaacaaaaactatgaacttccaaccccaagcttctgctcgaatacctttttctaccaagattactgaatcagcccactgctttcgttactattactctgtcctttgccctctgtgtacctcctctcaccaactatgctcttgaaaaggaggatgaccactttctagttttcttagtttttttctatttcagtgtttcttaaactttttctggagagtccctgtatagcc

SEQ ID NO: 10022 - DNA, 956 bp, Homo sapiens
tgccaaaccctttttctgtgagaactaggagcctgtcctccatgttttataagtattgacattacacagtgttaacaatgcatccacagaggtaagctcgactttttaaccatcttttttccccctccctctgagacatccgaattgtgggcgagcagtgtgatttctctgtggctggccgtgccacactcacccccagagcacttatgttaacttggaactgtttagagagaatttttttgctttcttgggtcacatggctcagtagccattagccatagcttgattttgcaaactggcaagggcctggcacacctttccttccaccagggcatggtgtttctggaagagtttgaagctagatcctggtatgccaaaaaagaagcttttttttttccttctttttttttttttctttccctcttccctctctcttcccctctctctctctctgagcagttccccccctcccacccctgcactattgtcttctcttttgccacatgccctgctgggggaagaaaatggaaggtaagcaaacaggctcctctccaaggagagctcatggcagacagcagagcaggcaagtttgcctctccaaagaggttctgggaaggctggataagttttgacaagagaggagcgtgtttgcaaaagaattgtgccctcagcagagcagtgctaaggagagtctagctcctggggcctaggtgggtggtggtgtctgtacacggtcttctcttattctacagagcttctgcacttgaaactacattgttcagcctgttttcctgacttaggttgctacagagtgttctgcaagccagcctacagccagcaaatgtttctgaaagtgttttctaggctttggaggaagttttttggagtagggatggggactggggggtggggggagagatcttggacaacatcctgcaaaaaaaaaaaaaaaaaaa

SEQ ID NO: 10023 - DNA, 162 bp, Homo sapiens
tttaggtgactgtttgaatccactgtttttcctgataacctgcagctaggattgaagattatacttcctgtttaccctgagtcaggggagaaatgttcagttcattgtgacttgactctagacctttaatggggtttgtttggatattcaaactgtgagtag

SEQ ID NO: 10024 - DNA, 287 bp, Homo sapiens
gagaggggtcccccttggcatcgtggcagggcgacaggaacccacgttgattttgcctgcaggactggctaagcagggcgcgagaggcccacggctccctggcctgccttgcaaggaggcatggggacaatgactatgcaaacttgaccactctgctcccctcctcccctcagcagctactcctcgctcctctgagaagccagggctgctctctgctgatttttcggggctcccccgggctgcctgcttcccccagcttctcagaggcctgcctcaagccccttttt

SEQ ID NO: 10025 - DNA, 4059 bp, Homo sapiens
tgagagatcaagagcaggtgacgtgtttattgtgggacgcctctttctgggggtcgtgctggctgtgagggaaccctcacaatccccaggtcccagaacagacagatacaagaacttgaatccaaactgcttgcacataaatagaacggaggttggcaaaggaaaaaaaaacaacaacaaatgaacgtgcagcctcctatgctagtgtgacacggtggcagagtcttatccacaccccgtctcttttcttactgtctccatgctgagattttcagctgctctggaaagattcaccaccttccgatctgactcagcagcagacagctgccttcctggcggcccctgccacagtctccaggactggcaaggggctaaggaatccaagacaggtattcctcaaacaaaacaaaaattgcttccacggtcctttgcacctcccagttctgctgggtgaacaatgtgtcccccaaccccaaactaaaccaaagaacatgctgagcacaagctgcgagtcagaataaaaacatattgcacatggttacaagagtcttcctgagggccctctcgctgcagatccctaaatactggcttttgatccaaccagtcgcttgcctatcaatggtggtatcaaacgcccatgtacatcccactccccaaatacaggtgggactaagcaaattttccacattgctatccttcgctatcagccacactcaaagcctagactgggttaaactcatgccctgtaagtatgtggtggagagaggtgggaactgtttaaatctttgtcttcctttcaacgagcttctccctccctgggtagttattaaagttctagtggtgaacacagcctccaagacgtggaatcttccggaaccgagagctgggaaaatggttctctccaaccatatgccttcaaaaaggaagctctgtggttacctgcgggtccatcacaagttgggttcaaacttgggttccaaattaacagccctcatgtgggacaggcagtgtggcaattaaatttgtttttttctccaaaggaattttcaagtatcaccaaatccctgatacagtgtgtaaacaagacatcttacgaaacagaaagcaagaccacttcgggaagcagcagcacatgacatatctaaaaggctgaaaatggttttaggttcgaaaacaaaggcaagacagccacccactgtgcctcgcaaggcaaacactcaggcatacacaccaactcaggcccctctgcatagagccagggaaagaaaagcacccaatatgggatcctccgggggtcctgagaacacgccaggctgcccctcctttttcagcggtgtagctgccatcagcaaagaatagaaaagtctttaatgctaaaaactggacatgcttgagatcagtggtctgtgtccagttcccactctcctggcctcttatcaagtctttctcgattcactgggcccctgtgtggggggacggccaccaagccatccttttgtaccctagccacacgtggcagacgtttctcagaggaatgctctcgggtgaggtatgttattgaatgttttgctctgggtcagttttatttaaaaggagcacagaccctccacgttccaaggctcttcagggatggcctcctgctgcctcacttggctgagctctcctcttcagtgtcctcttcctctgcccacatctccaaggcttcctcgtgaggtctggaggtggcctatctgtcaaagcagccggtggggaacatgtggctcccactgaagtagctgcttccataggtggtggcgaggcagtgcctgggctcagctgcaatggccatatgcatgctaagggatgcagggacgggcacgggacacatatccaagggctgcagcggttggtacggggtgtggagggatgagcctgtactccccgagagcaggctccctgaacggtgggcctgcaaggagtcccgataggccaagcataggtcctgcacgggggtctggaactgtgccagggtggtcgctggctggccgagggccgggtaggctggtggctggaacagcacttgagtgggggtggggggtgtgccgggcaccattgccaaggcctggctcttgacggctacggcatccttgaggacgttgtcatacactctgaaacgagaagacctgggtgagaactggaggccaaaagccaccagatgcctgtgtgtgtctctacctgtcttgctaagtgggactggaagagatgcgtgtgtcctgtgtccaccaggccttacctggctgtgctcactgtgtgtggcaccgctccagctgttcacaaactagattcaggccttggctctcagcttggatctgcttcctacagaaaatttcttctggcccctccagactaggctggctgtccccacagccccatgctgccctatctccacagtcaataccccagagagtaacctgctccagagggtaacttctagttacctggcttccaggaggatggcgcctgcttgtgctcaccaatgccttcccatcccctggcactggagtgttcctggggcctgaatgagcccaatctctgctttccaggcaattctgggccagctccatccccagcggggtcactccttagctagctgatatcaaccaaattgaccgctggggcctaggatttttcatctgaaaagggggctggaacagagatttttgccatctcaaaaaaagcttcccatatagctttttgggaaaacaaaacaattagaggcttatgtaaggcatgcaccgacactcagaccaggctttggggaccttctcaaaaacacaaattttaaaataaggcctacggagtaggactgacttttcagaggaatgagataaagacagctgccagcaaagcttcccacatcggggagggctctcttcaggggtctaagggcttccgctttgcccacacagcccaccagtcagtcaggccagcacccaggatacgcagtgcctggcaggtggaaggggaactggacagtgtgtgcctactgggaatggctctgtcctgtttgccttgctccctgcagtaactatggggcacatttacctccagtgtcagtttcagggtgttgggctcatgatgcctttaagtatcttctctgacacactgaacatttcctccccaagattcccagggacccttgcagaggctgtggcgcttaggggagcttactggctaagaggtcagctttgtgaccatgtctgagaaaagtagcttataatggaagtccttcaatgcgattatctataagattacactgggacttagatcaaatagcctagacatttaaaggtgcaaacagcccgcttctcccttgctgcctgactttaaagatgtaaacccggtcgggcgcagtggctcacacctgtaatcccagcactttgggaagctgaggtgggtggatcatgaggtcaggagttcaagaccagcctgaccaacatggtgaaaccccgtctctactaaaaatacaaaaattagccaagcgtggtggcgcgcacctgtaatctcagctacttaggaggctgaggcaggagaatcgcttgaacccgggaggcggaggttgcagtgagccgagatcgtgccattgcactccagcctgggtgacagagcgagactctgtctcaaaaaaaaaataaaataaaataaaaagcaaacctgaagctattcaaaataggaagaactggttctcgaaaccccacttctaccaggagtcaccatggcccactttccctgagaccctgtagctggaagaaccaccacaagttccagactctggaaactgcccgtggcctgaggcaggcctcaaggcaagaggaacctcactatttcagaaacacaggattcaggggagaaacttacaccagcaggatttcaatacacgtgctgaggtgctccagggaatagcttgagatcctctgcaggtctctggtccagtagggagaaagctgcaggcaaatcctggaggccccaacacaggccgcagcgaccacagaaggctggaatttgtagaatatgtgatct

SEQ ID NO: 10026 - DNA, 87 bp, Homo sapiens
ctcacatctgtaatcccagcactttgggaggccaaggcaggtggatcacgaggtcaggagttcgagaccagcctggccaacatggtg

SEQ ID NO: 10027 - DNA, 845 bp, Homo sapiens; identical to SEQ ID NO: 5916

SEQ ID NO: 10028 - DNA, 776 bp, Homo sapiens; identical to SEQ ID NO: 5917
  SITE (709): n equals a,t,g, or c
  SITE (738): n equals a,t,g, or c

SEQ ID NO: 10029 - DNA, 878 bp, Homo sapiens
  SITE (741): n equals a,t,g, or c
gaaaaccctggcgttacccaacttaatcgccttgcagcacatccccctttcgccagctggcgtaatagcgaagaggcccgcaccgatcgcccttcccaacagttgcgcagcctgaatggcgaatggcgcctgatgcggtattttctccttacgcatctgtgcggtatttcacaccgcatatggtgcactctcagtacaatctgctctgatgccgcatagttaagccagccccgacacccgccaacacccgctgacgcgccctgacgggcttgtctgctcccggcatccgcttacagacaagctgtgaccgtctccgggagctgcatgtgtcagaggttttcaccgtcatcaccgaaacgcgcgagacgaaagggcctcgtgatacgcctatttttataggttaatgtcatgataataatggtttcttagacgtcaggtggcacttttcggggaaatgtgcgcggaacccctatttgtttatttttctaaatacattcaaatatgtatccgctcatgagacaataaccctgataaatgcttcaataatattgaaaaaggaagagtatgagtattcaacatttccgtgtcgcccttattcccttttttgcggcattttgccttcctgtttttgctcacccagaaaacgctgtgaaaagtaaagatgctgaagatcagttgggtgcacgagtgggttacatcgaactggatctcaacagcggtaaaaaccttgagagttttcgnccccgagaacgtttttcaatgatgagcacttttaaagttctgctatgtggcgcggtattaatccctatttacgcccgggcagaagcactcggtcgccggatacactattctagaatgacttggttgagtactaacca

SEQ ID NO: 10030 - DNA, 150 bp, Homo sapiens; identical to SEQ ID NO: 5918

SEQ ID NO: 10031 - DNA, 845 bp, Homo sapiens; identical to SEQ ID NO: 5916

SEQ ID NO: 10032 - DNA, 776 bp, Homo sapiens; identical to SEQ ID NO: 5917
  SITE (709): n equals a,t,g, or c
  SITE (738): n equals a,t,g, or c

SEQ ID NO: 10033 - DNA, 878 bp, Homo sapiens; identical to SEQ ID NO: 10029
  SITE (741): n equals a,t,g, or c

SEQ ID NO: 10034 - DNA, 191 bp, Homo sapiens
agaattcgccctatagtgagtcgtattacaattcactggccgtcgttttacaacgtcgtgactgggaaaaccctggcgttacccaacttaatcgccttgcagcacatccccctttcgccagctggcgtaatagcgaagaggcccgcaccgatcgcccttcccaacagttgcgcagctgaatggcgaatggc

SEQ ID NO: 10035 - DNA, 302 bp, Homo sapiens
agaattcgccctatagtgagtcgtattacaattcactggccgtcgttttacaacgtcgtgactgggaaaaccctggcgttacccaacttaatcgccttgcagcacatccccctttcgccagctggcgtaatagcgaagaggcccgcaccgatcgcccttcccaacagttgcgcagctgaatggcgaatggcgcctgatgcggtattttctccttacgcatctgtgcggtatttcacaccgcatatggtgcactctcagtacaatctgctctgatgccgcatagttaagccagccccgacacc

SEQ ID NO: 10036 - DNA, 150 bp, Homo sapiens; identical to SEQ ID NO: 5918

SEQ ID NO: 10037 - DNA, 358 bp, Homo sapiens
gtttaaagtgcttagtaaaactagttaatagttagcataactattctgagtttaaatgcgttctatctctcttctcagttaatcaagcccgtgtagattctggatacttagatcatgaggtcctatcaagatactatcacttagcttgagacacattagatctcagtttcaatgaaggtatccagtgggaaagagatagcctcctgattagggccgtgagcattcagctttttcaagtaggagacattgtaacttgctaaatgatgaactttagcttggcagatcatagacagtttcccccagtctcccttaataacaggacaaaatattgactgttatgggaaaattcttccagtgt

SEQ ID NO: 10038 - DNA, 75 bp, Homo sapiens
atctgcatcaacttaacgtaaaaacaacttcagacaatacaaatcagcgacactgaatacggggcaacctcatgt

SEQ ID NO: 10039 - DNA, 1010 bp, Homo sapiens; identical to SEQ ID NO: 8899

SEQ ID NO: 10040 - DNA, 680 bp, Homo sapiens
  SITE (22): n equals a,t,g, or c
  SITE (598): n equals a,t,g, or c
  SITE (630): n equals a,t,g, or c
acccccggccctgcgggccgcncggtgaaaaccactactctgatcgttttttcactgacccggtgaggcgggggggcgagccccgaggggctctcgcttctggcgccaagcgcccggccgcgcgccggccgggcgcgacccgctccggggacagtgccaggtggggagtttgactggggcggtacacctgtcaaacggtaacgcaggtgtcctaaggcgagctcagggaggacagaaacctcccgtggagcagaagggcaaaagctcgcttgatcttgattttcagtacgaatacagaccgtgaaagcggggcctcacgatccttctgaccttttgggttttaagcaggaggtgtcagaaaagttaccacagggataactggcttgtggcggccaagcgttcatagcgacgtcgctttttgatccttcgatgtcggctcttcctatcattgtgaagcagaattcaccaagcgttggattgttcacccactaatagggaacgtgagctgggtttagaccgtcgtgagacaggttagttttaccctactgatgatgtgttgttgccatggtaatcctgctcagtacgagaggaaccgcangttcagacatttggtgtatgtgcttggctgangagccaatggggcgaagctaccatctgtgggattatgactgaacgcctca

SEQ ID NO: 10041 - DNA, 20746 bp, Homo sapiens
tcttttttttttttttttaattttttttttttaattatactctaagttttagggtacatgtgcacattgtgcaggttagttacatatgtatacatgtgccatgctggtgcactgcacccactaacgtgtcatctagcattaggtatatctcccaatgctatccctcccccctcccccgaccccaccacagtccccagagtgtgatattccccttcctgtgtccatgtgatctcattgttcaattcccacctatgagtgagaatatgcggtgtttggttttttgttcttgcgatagtttactgagaatgatggtttccaatttcatccatgtccctacaaaggacatgaactcatcatttccggggacagtgccaggtggggagtttgactggggctgtacacctgtcaaacggtaacgcaggtgtcctaaggcgagctcagggaggacagaaacctcccgtggagcagaagggcaaaagctcgcttgatcttgattttcagtacgaatacagaccgtgaaagcggggcctcacgatccttctgaccttttgggttttaagcaggaggtgtcagaaaagttaccacagggataactggcttgtggcggccaagcgttcatagcgacgtcgctttttgatccttcgatgtcggctcttcctatcattgtgaagcagaattcaccaagcgttggattgttcacccactaatagggaacgtgagctggaggttctatttcatagacaagactgatgaaatcactggccattgctaattaaacttgatcttcagcccctgaatggataagtcatctccattacttattctataagatgtgaatgttttattaggaaccttaacggttacttcatcccttagggatattgtgaacaagttacttcgatagattgtcttttgatcaaatataatacagtacagtcataaagtgtttccttgtttttagaactttgcagagaagtagttcttacattgaaatggttattggatatagtgtttgggatgatttaatctgctaatatacttagtttatatcttttcctttttggggggatacacaatgctgatttgattggctaggaaaactgtcttatctggtagcttctgtggcgtgaaatgcagttgctgacaacttttaattcataacaagtctgttaacttattcctataaattgaatatgttaatataattcagtaacttgaatcacttcagttaaatttaaatactattaggtgttatgaaatttactatttactgtgactatatttagtggctttttctctctcttaagcactttactgactttaaatggaacattagttatctgttgttgtataataaaattatcccaaaatgtagtagtttaaaacaacaatgaacattattatctctcacagtttctccaggctaggaatttaggaacaacttagctagtagttctggcttaggctctcttgtgagaatgcgtaaaggtattgggggcctctcacaagaaggccacaatcaaaatgttagccatgctgcagtcatctgaaagcttgacaggagctatcaggtctctcttcaaggtggcttgctgtccttgactgaaaagtcagtgctggttgttggcaggagacctcagtacctctccacctgggcctcttcatagggttgtttgagtgctttctttatattgtgactagctctccacagagtgagagatctaagagaccatggggaaggggcaatgtcttttattacctagccttgtaagtcaaacatttacacttctgcagtactctgctagttagacaggccagtcctgattcagcgattcaatttgtaggagactgtaaaggggtgaggagcaggcaaggatcattgggctgttttggaggatgactgccacaaatggatttatctgagttttaggaaagtagaaagacatacttcagtggtaaactagcaagttatattttaggagaatgtttagcttttttgtttgagtaaaccataatctatgagtgtttttaagggggccaattttatgctagtttttcatattccaagcaagtgttacacgtgagaaaatatgtgggtcttttttttgtttgcagattatttaaaatatctgacaatatacatgggagtgcttattctaatgacaatgaattggactctcacattggctcagtgaaaattgtacaaacagaaatgaacaaagggaaatcaaggaactatagcaatagtaagcaaaaatttcagtattctgcaaatgtgtttacagcaaataatgctttttctgcttctgaaatcggagaaggcatgttcaaagcaccatctttttcagttgctttccaacctcatgatattcaaggtaatttcttgctttttcagttcattttatgagtacagactaaaccacatttcttagcatgggggaaaatgtaaaaatatagtaaatttgagtaaattatctctctgtgcaatttctgcatttttttattatattgcattattttctaagctgtgctgtgtgttaaaatattttatcctgtgtgctaaaaatatttttaactttgctctcaataaaaagttgtgttagttttattgaaacagtttttatggaaaggttaaaaatattcatttcaggtcctagcttctgaccattaatttttttttgatatttatataaatatgtagcatttttttttcagaggtaacagaaaatggtttaggttccttgaaggctgtcacagaaattcgtatcctttaagttatttacaatagctgctttgtatttattaaatcataattttaaaacatttgtttaattgtgtttgtttattttggttgatggagaaaaagagggaaaaattaatctttttggtgttgtaagaggtacatgtggccgggtgcggtggttcacacctgtaattccagcactttgggaggctgaggcaggcagatcacgaggtcaggagttcgagaccagcctgactaacatggtgaaaccttgtctctactaaaaatgtaaaaaattagctgggcctggtggtgtgcacctgtaatcccagctactcagggggctgagggaggagaatcgcttgaacctgggaggcagaggttgcagtgagctgagattgtgccattgcattctagcatggcaaaagagtgagactccatctcaaaaaaaaaaaaaaagatgtatgtgtgtgatagtgctactcagggtgtgattgcagactggtgccgatttgtgacctgtttgttatcagtttatggcaaattaagtacagaagtcagatttgtattattggcagaactctgagcatatttacttacaaataggtacagataatttctcatcctttgagaaagagcagccaaattgggttgaactgggtaggggaaatggatgagaatgggatattgtgtggattggggacatttctacagatctagtatttttgaaaatctaatttggagtttatacctagaatccaattttcatgtctggacatttccagtgtaaatattttgagtatgtttgtgtgttctggaggtaacattgtttttgcttctttaataccctgtgtatgcctatgatagtgcacttattttgttttaattcaccagcagtttatgtgactgtttccccatgatctatgaactctttgaaggcaaacatcatgacttatttacctgcctatttccaaatacattgaaaggcagataaagtaaggcaggtaaagtaaggaaattgttctggcaaaagtagagacataagcaagggtggaggtaaaaaagtatgaaatacatttggaaagaataagctttccagtttggctaaagtgacagatatgattaaagaagtaataagaaatattagatagttatcttagaatcatatcatataatgtcatgaataccaaggtcaaaggtttttttattttatttttattttttattttttcccccagctttgttgaggtataattgacaaataaaaatggtatattttttaaggagtacaacatgatattttttaatatgtaaacattgcaaaaataattaccacaatcaggctaattaatgtatctatcgcctctcatagttacttcttttttgtagtgaaaatgcaatctctgtaatgaggagaaaccatgcaatattttttaagcagttcaaatatcatttaaactatgctttaggaatatataattagtgactcaatgcttggcaatgctctagcatccacaaaagttatggtctagttgacaaaatgaaaaatgaattccagatattgcatagctgtgctagagaaatctaggcaacaataactctaatcctgggcactcgaaggatcatctgacataattctgaagtatggttagaaaatacttgcctgacttctcatgaaaagttgcctccaatgcagatggctgatttgattaaaaatgagggagagggatcaataagagagttatacatgttgatatagtaactataaacatagccagtgtttagcactttattcagcatagtgtctcaatgctgccacattttcttttctgtggtgatcaaaataggatggaaacataggaaatatattagcagtaagctgttaaagatgtttaattatctgtacgatggctgattcttcttatcccttactggaaagcctttccataatatgacactggcttttaaagagctttgaggatttttatgctatattagcacagctgaagtgattctgttgtttaggggtctttattagttaggactactgcctacacttgtgtccactgatttattgtccaaaaagttcattttgtgtaaaactcattgtcctataccttattgtttccaagtatgtattttaaagtggaagactgaatgctatttgtgataatttgagagtttgtagattacttggacacaccttattttcttattctctttaaatattttactgcatttgaatcctcagggcaatagacgttttctcagattggtcctaccacagtagtcttgtcattttcagttctgcagacatttccccattatttcagtgacactgctgagagtttattgaatgtaaggaaaaaaattgatttcaagtgttgatagtgatgataaatgatgttagcagttgagttttcttatgagctgaaatactgattctatactctgaatcaaagattcattttgtgaatgatatggaactatctaatgagagaaaaaccaacatgatggcccactcgtgggcttgttacaaataaatatttgatagaaagagacatgttttgaaggaaaattgagattccttctaaagctgatggattttcaaactcaaaattacgtttttgttttggcacagatatgacactttgcacatcagaaagtaaaatgaggatttataaattaactgcttgatgtaataattgcaaacctatattaactgagttatgtgtcaggcactgttctaagtatttgggatatgtcacttaagaaaacagacaatgaatccttgcttttgaggagatgacattcttgggatgagggtggggaggaagctagatctcaacaactataataacatataaataagtcagagttttttagaaagtggtgactattatgggaaaagaaaaaagtagagcagggtaagcgggttaaattgggactgctgggatttgtggctcagggtgtagaattaaacagtacttagggtagaccttgagaaggtcagatttaagcacttaatggagggaaaagagccaaggaaatatggaaggaataacagtctaggcagagggaaggcctcatggcaggatcgtagctgatgtttttgaagaacagcagagttcagtatagctagaggagatgagtcagggagaaagagtagtaggacatgatgtcagagagataaaggcaggggctgatgcggggagggagtggcagtggggagacgatcatgtggagccttatagccatacactttgagagaaagggaggaatttgatcagagaagtaatatgatgtaagtttaaacaggatcactacagcaatccatcagttcttgtatatctttataaaaatccagttgtttaagtaactgtgtacttgtgttctcagatatgttcttaaccatcttataacttctaatagattataacagtctcaattgtaggaactcattttcttctttatttatagcttcccacagctttctaaatctagtaatgtattctgtatatagtgttcaatgactgtagttgatatattgtaagaagaataccatgtaaatacagatatctcccaatctgtcaatagaccctcaccttggagaggggacagtttattcttcatatctgttaatatttttgaactttcttacaggggaaggatgatttaagttcttcctgtcaagccagtatgttgatagttataattaaacccaccacttaacacaaccaaattatcaaaaacaaagagatttggtattaggtaaccagaaacacatcagctaatgaagtacaatcaatgcttaatgaaatagttgagtgaaattctgtacattaaagaagagataaaaatcaagtggccttgtcaaggtaaataagaaaaagcactactctggaaaagataaactagaagtgtagttctgatttacttgccattatgtacttgcatctcttccatcatatttagcactcaggtataacccttatataatctcttatttccctataagaactttgcaaattcttttcagaatatggagtgtgactggagactagaataatttatgataattcttttcctaagatgccagatagcaaatgttaaaacctcatcattaaatattgtcagaatctatattaatgtaacttagttttaaaataaaagtaactaattttttaaattctgaaatatttgactccttaatgttattgtaagcggcaaaatttagaagtattttcaaagaatttccatatttcaactatatacagtccaaggcctttgatgatgtaagtattttattttacttatttatttttctacctttcactaggttatgatcactagattgggacagctgggatttactagatctttatgtctgcactgccacactccatgtctagcacatttaggagctcagaaaatatttggtaaatgaatacatgtgattttcataggtggatttgtttgtatttgagtgcagtggtgaaatctcagctcactgcaacttctgcttcccaggttcaagcgattttcctgcctcagccacccaagtaactgggattacaggcttgagacaccactcctggctaagttttctatttgtagtggagacagagttttgctctgttggccaggctggtctcgaactcctgacctcaagtgatctgccttccttggcttcccaaagtgctgggattacaggtgtaagccatcgcactcagccaggaatgattttctcctaggtctacattgacaaataaaacagcatgataaaatactaatagtgttatttttcgagagtggaggctctggagcaaagttacaatttttataactttagaggaaaaatgtttgaactattattccttagattcttactaagactttttttttaacaaattgagaatgtgtgtgaaaaagtctatatgttacatgattgattactttttattttttagcttctttacacagataggaattttgtgatttgtgctccaactggttctggaaaaactgtagtgtttgaactagctataacaagattgttaatggaagtaccattgccatggttgaatattaaaattgtttacagtaagtatttattataagagtgatgactaattataataatgaaaaaccattgaagcaaaatgaagaaataaattcagtttctggcctcaggaattacttgattttctatatatttctagtaaagtctggtcttatttgtcattaaatttaaaacacattttccaaaattataaataaaaagtaatatttgaattgagaatttgacttttacatgcttattttttaaaggacaggcaaaatgaacaaataaaatcaaatattttgtaattctagaaatttgcataggaacttttactctcctttcttaggtatgtatttaaaaaattttttttaatcaaagtaatatatgtatatggattaaaaatcaaatatcagtaaaggccttatagtgaaaagcaataatcttctgccctacctttctccacttttagttacacttgcctgagaaatcatttctatttctatttttagttctttttggctattaccttgatatctctaaatcaagcttgtctaacttgtggcctgcaggctgcatgtggcccaggatggctttgaatgcggcccagcacaaatttgtaaacttacgacaaatttgtaatgtttgtaaaacattatgagaattttttttctttagcttatcagtcatcgtcagtgttagcatattttatgtgtggctcaatacagttcttcttccagtgtggcccagggaagccaaaagactggacacccctgctgtaaataatgtgcctatattgttcatttttaatttatcaatattaggagtatgtagatgtgtattttttatgctaactttattaaccaaagtttgtgaaaagaattttaaaattgaactgatgttcaaagtaaatattttatattgttacagtggcaccaataaaagccttgtgcagtcagcgttttgatgactggaaagaaaaatttggaccaataggattgaattgtaaagaacttactggagatacagtaatggatgatctatttgagattcagcatgcccatattattatgacaactccagtaggtattatttatactttatgatttctttagtttgttagaaaatacctatttttctttactgagataaaaagtttaaaaaatataaactagaaacatatatttacaatgcaaacaaacaaacattaaaaaaatactacaattcaaggtacagacagaatacctacaaatcagtaagtaaaagacaaatgaccaaattggaaaaattgacaaagaataggcagtttgttattgtggatactttgtaatcatatttattgcttttttcttttacctaagtagtatgttttatagagggaggtccttggtagaatttaaaaataggtaacaaaacttggactttgaatattttgtggttcagtgtaaaaacaattgagggcccagttttaaaaatacctttaagactgtaaaaattctttaagtattttttaattttaaaatatttttcagaatactcttaagggatcaaccaaaattgcctattatttgtaatacgtcatgttaaaaatgtttttgatatcttaatatttattataattccttatcacattaaactacttgtatgcttttttttctctctaggaaaaatgggatagcatgactaggaaatggagagacaactctttggttcagctggttcgactgtttctcattgatgaggtaatgaatgcattcgctttcagagataaacataaaaggataattagaataagacagaaagaaaaaagacattgcaaccaaactatatgtttgttttatcccttcaagtggaaaatgctcattttctcaagcaagaatgttaatattattgaatattttaattgattaaatgtatttttaattctatagctaatgattttttcttgatttcctgcttaggtacatattgtaaaagatgaaaatcgtggtccaactcttgaagttgtagttagcagaatgaaaactgtacagtctgtttctcagactttaaaaaataccagcactgctattccaatgcgatttgtagctgtatctgcaacaattccaaatgctgaggatgtgagttacaattttaactgagctcttaggttttttatgacttgtgaaatatttagtcatcttgatcatagagaaaagtgaatttttttgtcctttcctttaataggaaagtatgttgtagaaagttgtggctagatctcataaatataacagtattaaggccataaaatttggttaatcaggtttaataaaacattttttgtggacatgtggacatctcgtttgctagtatctaacagtcttagtttcctgggtttcaggtgcctcatagtaacttcactaacaatatgtgatggttgttgtaactagctgactctaattgtatagcaaagtatggtggagaataaaaataattgcttagatgattaccacttgctcctcaattctgtatgcttggcattgtggtaagcactaaatatagatgcaaaagtgaaaatatatggactccgtccttgaggaggatctcatggttaatggggtacatggacatgtaaagaaataatcatgtgcactattatactttccataatgaatatatgacttaattttttcttcaatttttaagtaaacgtcttgaaaaataatagtctcactctactttctcactcctacttacttctcagcctactataatactggttttcccctactacttcttagaaattgttttcacaaatagccactatattgtctattccaatggaatattttgtctttatcgttaatttggcacaattaatcattttcttgttcttgaaatgacaacttgttttgttcatatttttcaagaataatatagaaaaatttaaagtttattacaacaacaaaactaaatcctagcgtttatctttacacatgtaggaagcataatgtacatacttttttttgtaagcatgtaggaatcataatgtacatactctttttttgacctgcatttcacctttaaacatttttatatcattaaatattcttcaatactatttttgtggttttattgtaatttatttatcaaacactataacaatggaagattaagttatttccaatttttgctattgtaaacagtgaaattaatgtatctgaaacatccatgattatttccttaggatgaacttctagaatgaattaactgaatcaaaggatatataaaactctaaagaagtgcttctttcaataaatgttatattcatttacacttctaccagaggctattttcctgtatcctaacactggatagtataataatggaattattattgctattattatttttaaatatttataggatttattgttgagtgtagtatctcatttaaaaattttttacttctttgatttctactaaggtaaaattttaaatatatttatcaactactttgagttctttttttaaaacttgccaggttatgtcatttgcctttttttcacattggaatactaaatttttcttaacttatttgtaagcaattattatgtactagtactgtctaattcttgaaacttttcccctttgtgataaacactacttgtgtgaatgctgtttctgtctcttttgtcagatcttcttcctccgtttttccctaaattaaggtttttattcttggccttctgctcccctctgtctgtaaattcttatgtgatcttatccctactcatgataaccttgagattattttaatgttttctacctgtcaaaacaacagtcaatttcatagcagagcatggagcctgattattaactgggctatgtaaagataaggattgcttaccacagttccagaatctagcttgagtctgaagtttgcttttggcactggcatctctcaagtgtttgttgtttgcttaaaaacttgtcaacccttgccaacctaaaccaactattaatttgctgctatttatctaatatttaggacaacacaaaagagatgtcagccattttgaggcgtagttttcaaaaatagcaaagaagttaaaataatagtgagaaatttggcctctatgacaaaattgataatttttctttggattcttatgaaggaaaataaaacaaaataataataattaattggaagtttaccatggtgaaaagtgggtataatcttgaaatactactattggtagtgttgaccactatatcaacagaataatattaatggaatatgtaatattgaaaaagacagcatacttgattaaatacttttatagcttgaccttaaagtgctttgtaattgggttgtttttagcaataaaactttactagaagaaaattttaatgcacatatttttgtgtttcaaagattgcagaatggctttcagatggtgaaagaccagctgtgtgtctgaaaatggatgagagccatagaccagtgaaacttcagaaagtggtccttggatttccctgcagtagtaaccaaactgagtttaagtttgatttaaccctcaactacaaaattgccagtgttatacaaatgtactctgatcagaaacccacacttgtggtatggattgttgatagcttattttttagtatattcagtttttaacatgattaatacaaacgttatgaatttattttcagttttgtgcaacaaggaagggtgtgcaacaggctgcttctgttcttgtgaaagatgctaaatttattatgactgtggaacagaaacagaggtatagtattttattttttcatggaagtagaaggacttttagggctcatctagatgacatgagaaaattaggcttgtcccataaccttggggtaaacctcagtgtcctcatctataaaataaggataatgataattttgaggattaagtgagatagtgaatcttcgtacaggggtgatccagatttcttgaatgataaagattatccatactactatctattttttttaacctaatttcaatccagcatcttttatagtctttcactaaagctgatcttgcgaattaatctttaaggactctctatcatatttggccacttccaccttacttaaacactctggactctgtgcttccatgatcatttctactgattttcttcctcctttgcaggctgttcgttctcagtccccttttcacctcttctacccaactcttaaatgttgacattcgagtgagtatacctgaggttcattctttctaatgccacactcttaggtgtttgtaagtactcacatgaagttcagataatatttatgcatgtctatgaattcccacatttatgccttcggcccagacttccttactgagctccaggcctatagtccatctgtgtaactgaatccagttgtatgtctaccaacagttatctcaaactcactatgtaccaaatagaaccttggttcttgctctcagaccagctccttctccagtgttccccatcttaattatacattatctccttagttactcatagcagaaaactatgattgatatcttcttcaccttataccccacaatcaattacgaagtcctgtttattcttacttctaaatatatctcaaatatgtcattttgtctccatcaacactgccacttccctaattcaagtcactagtaatctcttgcctaggctgtatccttttctttaatcactacacacacactctcttatccagctttattctctacatagcatagattgtgtaagattgcaaatctaaatggcagtttcctgcctaaaaccctttaatagattcttattgttctggggattaaatgctaaatccttagtgtagcctgcagtagcccatgtaatgtgatgcctagccaattctccagacttttcatgaccattctccccctttaatcatcacggtcaagctgtattagcctctgtgttctgtgaatacaccaaactgttactctgtacagcattgtcttgcatggtgcttgcttttactggaatggttttcacctaactcctatttatccttcatgtctaaactttaatatcagttttccatagccatcagtttccctgtatttacttttataagcaacctgtacttgatttcatagcacttactataattataatatccttttgtttaatagttattttaatatcttttctattaattagattatcaacttcttgaggaaagggggactcatgttcatcctgcttaccactcaatcttagcaggtgtattaggtcattcttgcattgatataaagaaatttctgagcctgggtaatttataaagaagggaggtttaattggctcacagttttgcaggctgtacaagaaacatggcaccacatctgctcggcttctggtgaggccttgggctgcttacagtcatggcagaaggcaaaggatgagttggtgtatcacatggtgagagcaggagtaggggtcggggggtaccatacacttttaagcaactagatgtcacaaaaactcactcactattgtaagaatagcaccaagccatgaggatctgcccccatgatccattcacctcctaccaggcctcaccttcaatactggagattacaatttagcatgagatttaaatggacagcatccaaattatagcagaaggtctcagcagagtgctagcacatgattactatgtaatgaacattaacttattattattgttaataacttctggaaatcagtaaatatgtttagtggtagacctcagactaaaattggacatgtggatatgagcagatacttattttttctgcctaattttgtatggtgggggaatatacttctctccgctttgggtcagatcagctttccaattaccagtctgttcctttgccaccacctctggttgcttgtcaaccaaagatatgtagcaagcctagaggagccaatttagtcttctttacattctttgtttttttttaatccactaaaaaggtagactataaagatagtctattaaagaattacaaacatagccacttattcaccctctagatactattttgacacttttccttccatttaaaggatttaacttgatcttcttagttactaccatatgaaaaaaaatctctagggtgtgaagcatgtagagtagttcttttataatacacgtcaacaaagcaagattaagcaataagaaacagtagagagcaagacagaatgagaaaaaccaacaaagagctcacagtcaaaaagtagatgaagtctgagaggtagaaagaaagggagaaagtgaaattattgctaataagaataccatcaaaaaatgattaataattttcataccaactgcatgtagttttatagcattcttatgaattttcttttttttattatactttaagttttagggtacatgtgcacaacgtgcagttttgttacatatgtatacatgtggtgttggtgtgctgcacccattaactcatcatttaacattagggatatctcctaatgctatccctccccattcaccccacccacaacaggccccagtgtgtgatgttccccttcctgtgtccatgtgttctcattgttcaattcccacctatgaatgagaacatgtggtgtttggttttttgtccttgcgatagtttgctgcgaatgatagtttccaggttcatccatgtccctacaaaggacataactcatcattttttatggctgcatagtattccatggtgtacatgtgccacattttcttaatccagtctatcattgttggacatttgggttggttccaagtctttgctattgtgaatagtgcctcaataaacacacgtgcacatgtgcctttatagcagcatgatttgtaatcctttgggtatatacccagtaatgggatggctggatcaaatggtatttctagttgtagatccccgaggaatcgccacaatgacttccacaatggttgaactagtttacagtcccaccaacagtgtaaaagtgttcctatttctccacatcctctccagcacctgttgtttcctgactttttaatgatcaccattctaactggtgtgagatggtatctcattgtggttttgattttcatttctctgatggccagtgatgatgagcattttttcatgtgtctgttggctgcataaatgtcttcttttgagaagtgtctgttcatatccttcacccactttttgatggggttgtttgatattttcttgtaaatttgtttgagttcattgtagattctggatattagccctttgtcagatgagtagattgcaaaaattttctcccattctgtaggctgcctattcactctgatggtagtttcttttgctgtacagaagctctttaattagatcccatttgtcaagtttggcttttgttgccattgcttttaatgttttagacatgaagtccttgcccatgcctatgtcctgaatggtattgcctaggttttcttctagggtttttatggttttaggtctaacatttaagtctttaatgcatcttgaattaatttttgtataaggtgtaaggaagggatccagtttcagctttctatatatggctagccagttttcccagcaccatttattaaatagggaatcctttccccatttcttgtttttctcaggtttgtcaaagatcagatggttgtagatatgtggcattatttctgagggctctgttctgttccattggtctatatctctgttttggtaccagtatcatgctgttttggttactgtagccttgtagtatagtttgaagtcaggtagtgtgatgcctccagctttgttcttttggcatagaattgacttggcaatgcgggctctttttcggttccatgtgaactttaaagtagttttttccaattctgtgaagaaagtcatttgtagcttgatggggatggcattgtatctataaattaccttgggcagtatggccattttcaggatattgattcttcctacccatgagcatggaatgttcttccatttgtttgtatcctcttttatttccttgagcagtggtttgtagttctccttgaagaggtccttcacatcccttgtaagttggattcctaagtattttattctctttgaagcaattgtgaatgggagttcactcatgatttggctctctgtttgtctgttattggtgtataagaatgcttgtgatttttgtacattgattttgtatcctgagactttgctgaagttatctatcagcttaaggagattttgcgctgggaacatggggttttctaaatatacaatcatgtcttctgcaaacagggacaatttgacttcctcttttcctaattgaataccctttatttctttctcctgcctgattgccctggccagaacttccaacactatgttgaataggagtggtgagagagggcatccctatcttgtgccagttttcaaagggaatgcttccagtttttgcccattcagtatgatattggctgtgggtttgtcatagatagctcttattattttgagatacatccaatcaatacctaatttattgagagtttttagcatgaagggttgttgaattttgtcaaaggccttttctgcatctattgagataatcatgtggtttttgtctttggttctgtttatatgctggattacgtgtattgattttcgtgtgttgaaccaggcttgcatcccagggatgaagcccacttgatcatggtggacaagctttttgatgtgctgctggatttggtttgccagtattttattgaggatttttgcatcgatgttcatcagggatattggtctaaaattctctttttttgttgtgtctctgccaggctttggtatcaggatgatgctggcctcataaaatgcgttagggaggattccctctttttctattgattggaatagtttcagaaggaatggtaacaactcctccttgtacctctggtagaattcggctgtgaatccatctggtcctggactttttttggttggtaagctattaattattgcctcaattttagagcctgttattggtctattcagagattcaacttctcctgggttagtcttgggagggtgtatgtgttgaggaatttatccatttcttctagattttctagtttatttgcgtagaggtgtttatagtattctctgatggtagtttgtatttctgtgggatcggtggctatatcccctttatcattttttattgcgtctatttgattcttctctcttttcttctttattagtcttgctagtggtttatcaattttgttgatcttctcaaaaaaccagttcctggattcattgatttttggaagggttttttgtgtctctatttccttcagttctgctctgatcttagttatttcttgccttctgctagcttttgaatgtgtttgctcttgcttccctagttcttttaattgtgatgttagggtgtcaatttttatctttcctgctttctcttgtgggcatttagtgctataaatttccctctacacactgttttgaatgtgtcccagagattgttacattgtgtctttgttctcattggtttcaaagaacatctttatttctgccttcatttcattatgtacccagtagtcattcaggttgttcagtttccatgtagttgagcggttttgagtgagtttcttaatcctgagttctagtgtgattgcactgtggtctgagagacagtttgttataatttctgttcttttacatttgctgaggagtgctttacttccaactatgtggtcaattttggaataggtgtggtgtggtgctgaaaagaatgtatattctgtttatttggggtggagagttctgtagatgtctattaggtctggttggtgcagtgctgagttcagttcctggatatccttgttaatgttctgtctcgttgatctgtctaatgttgacagtggggtgtgaaagtctcccattattattgtgtgggagtctaagtctctttgtaggtctctaaggacttgctttatgaatctgggtgctcctgtattgggtgcatatatatttaggatagttagctcttcttgttgaattgatccgtttaccattatgtaatagtcttctttgcctcttttgatctttgttggcttaaagtctgttttatcagagactaggattgcaacccctgcctttttttgttttccatttgcttggtagatcttcctccatccctttattttgagcatatatgtgtctctgcacgtgagatgggtttcctgaatacagcacactgatgggtcttaactctttctccagtttgccagtctgtgtcttttaattggagcatttagcccatttacagttaaggttaatattgttatgtgtgaatttgatcctgtcattatgatgttagctggttattttgctcgttagtggatgcagtttcttcctagccttgatggtctttacaatttggcatgtttttgcagtggctggtaccagttgttcctttccatgtttattgcttccttcaggagctcttttagggcagggctggtggtgacaaaaatctctcagcatttgcttgtctgtaaaggattttatttctccttcacttatgaagcttagtttggctggatatgaaattctgggttgaaaattcgtttctttaagaatgttgaatatttgcccccactctcttctggtttgtagagtttctgccgagagatcagctgttagtctgttgggtttccctttgttggtaacccaacctttctctctggctactcttaacattttttccttcatttcaactttggtgaatctgacaattatgtgtcttggagttgctcttcttgaggagtatctttgtggcgttctctgtatttcctaaatttgaatgttggcctgccttgctagattggagaagttctcctggataatatcctgcagagagttttccaacttggttccattctccccgtcactttcaggtacaccaatgagatgtagttttggtcttttcacatagtcccatatttcttggaggctttgtttgtttctttttattcttttttctctaaacttctcacttcatttcatttatttgatcttccatccctgataccctttcttccagttgatcacatcggctactgaggcttgtgcattcgtcacatagttctcgtgctgtggttttcagctccatcaggtcctttaaggacttctctgcgttggttattctagttagccattcgtctaattttttttcaaggtttttaacttctttgccatgggttcaaacttcctcctttagcttggagtagtttgatcttctgaagccttcctctctcaactcgtcagtcattctccgtccagctgtgttccattgctggtgaggagctgtgttcctttggaggaggataggcactctgatttttagagtttccggtttttctgctctgttttttccccatctttatggttttatctacctttggtctttgatgatggtgacgtacaggtgggtttttggtgtggatgtcctttctgtttgttagttttccttctaacagtcaggaccctcagctgcaggtctgttggagtttactggaggtccactccagaccctgtttgcctgggtatcagcagcggtggctgcagaacagcggatattggtgaaccgcaaatgctgctgcctgattgttcctctggaagttttgtctcagaggagtacccagctgtgtgaggtgtcagtccgcccctactggtcggtgcctctcagttaggcttgggggtcagggacccacttgtggaggtagtctgtccgttctcagatctcaagctgcgtgctgggagaaccactactgtcttccaatgtgtcagacagggacatttaagtctgcagaggtttctgctg

SEQ ID NO: 10042 - DNA, 1678 bp, Homo sapiens; identical to SEQ ID NO: 8901

SEQ ID NO: 10043 - DNA, 13076 bp, Homo sapiens; identical to SEQ ID NO: 8902
  SITE (1259): n equals a,t,g, or c
  SITE (1260): n equals a,t,g, or c
  SITE (1261): n equals a,t,g, or c
  SITE (1262): n equals a,t,g, or c
  SITE (1263): n equals a,t,g, or c
  SITE (1269): n equals a,t,g, or c
  SITE (1270): n equals a,t,g, or c
  SITE (1271): n equals a,t,g, or c
  SITE (1272): n equals a,t,g, or c
  SITE (1274): n equals a,t,g, or c
  SITE (1275): n equals a,t,g, or c
  SITE (1291): n equals a,t,g, or c
  SITE (1299): n equals a,t,g, or c
  SITE (1311): n equals a,t,g, or c
  SITE (1313): n equals a,t,g, or c
  SITE (4089): n equals a,t,g, or c
  SITE (5583): n equals a,t,g, or c
  SITE (5606): n equals a,t,g, or c
  SITE (5953): n equals a,t,g, or c
  SITE (11536): n equals a,t,g, or c

SEQ ID NO: 10044 - DNA, 123 bp, Homo sapiens
gcctgtaatcctagctactcaggaggctgaggcaggagaatcacttgaacccgggaggcggagcttgcagtgagccgagatcacaccactgcactccagcctgggtgacagagcgagactcca

SEQ ID NO: 10045 - DNA, 260 bp, Homo sapiens; identical to SEQ ID NO: 8903

SEQ ID NO: 10046 - DNA, 355 bp, Homo sapiens
tcaatttcttaatcaatattgtatatgtgagaatcaatcatctcaccatgtttctatgataattaaataagcgacatttctaagatacctaacagtgggtagcagagtttgtacttaatagtaacatgcctttcctcttgccttatcttcattccattgtgaatccttaaaaaaagtcatgagtgttatcataaaaataattcatcctagtgtcatatctgcaacaaggaagtagaaaaatactagatgtttttatatacttaagaaccaagcctaccaacttccaaaatcttttaatgtacccagaattcattttcaaattatcaacacactttcttaacttcctcttgtcttt

SEQ ID NO: 10047 - DNA, 368 bp, Homo sapiens; identical to SEQ ID NO: 8904

SEQ ID NO: 10048 - DNA, 405 bp, Homo sapiens
caaccacttgttttttaaaaattgttgcaacacagtcatatccattcatttatgtattgcctatggctgcttttgcagtacaaggaagttgggtagttgctacaaagactggtccacagagccaaaaaatactatctggcctctgtcaggaactttgctcaccagcaaacttgtgaaagtggcagcccaattgctaaaatgttctctaggctgatttgagagaatgttctagtagaggggaacaccctggcaagaacaatcatttggccacttgaaaagcaggtatgggttggtttgcaggaaaatgcagaggagggcaatagagttggttggctggcactaaattgcattgacccactagagagagataataaaaaaaagatgaggttgttaacaattaaaaac

SEQ ID NO: 10049 - DNA, 222 bp, Homo sapiens
caaaaatctgtatttctatacaccaataacatttaagctgatagccaaatcaagaacacaatcccatttacaacagccacacacacacatacaaaatacctagagatacacctaaccatgcaggtaaaagatctctaaggaggactacaaaacattgctgaaataatcatagatgacacaaagaaatggaaaaccattccacactcctgggttggaagaacc

SEQ ID NO: 10050 - DNA, 103 bp, Homo sapiens
atcccagcactttgggaggccgagatgggcagatcatgaggtcaggagatcgagaccatcttggctagcacggtgaaaccccatctctactaaaaatacaaaa

SEQ ID NO: 10051 - DNA, 11627 bp, Homo sapiens
agttcaagaccagcctgaccaacacgtgaagccccatctctactaaaaatacaaaaattagccgggcctggtggcatgcgcctgtaatccaagctactcaggaggctgagacaggagaatcgcttgaacccaggaggcagaggttgcaggagccgagatcacaccattgcactctagcctggccaacagagtgacacgccatctcagaaaaaaaaaaaagttttttaattttgatgaagaccagtttatctgttttttttctcttgttgcctgtgcctttggtatcatatccaagaaatcattgtgaaatccagtgtcatgaagatttaaccttatgttatcttctaagagatttagagttttatcttttaagttaaagtctttaattcatttcgagtgaatttctgcatagggtaaaaaaaaaaaagggggttcaacttcattcttttgcatgtagagctccagttttctaaacatcatttgttgaaaagattgtcctttccccattgaatggtcctggcatcactgttgaaaaccatttgatcatgtattatgtaaaggcttatttcttttttttttttttttttttttgagacggagtctcgctctgtcgcccaggctagagtgcagtggcgtgatctcggctcactgcaagctccgcctcccgggttcacgcaattctcctgcctcagcctcccgagtagctgggactacatgcccctgccaccacgcccaactaattttttgtacttttagtagagacggggtttcaccatgttagccaggatggtctcaatctcctgacctcgtgatccgcccacctcggccgcccaaagtgctgggattacaggcgtgagccaccgcgcccggcttgaaggcttatttctgtgcgctctattctgttccattgctatatgcatgttcttttttttttttttttttttttgagacagagtgttgctctctgtcattcaggctggagtacagtagtgcaatttcagctcactgcaacctttgcctccaggattcaagcaattcttgtgcctcagcctcctgagtagctgggattacaggtgtatgctaccacacttggctacattttgtatttttggtagagaagaggtttcaccatgttggccagactggtctcgaactcccaacctcaggtgattcgcctgcctcggcctcacaaagtgctggtatgcatctgttcttatgccagaactacactgttttgactatgtagttttgtaggaagttttgaaatcagaaagtatgaatcctccagctttgtgcatcttttcaaagactgctttggctatttggggtcctttaatattccatatgaattttcagatgggtttttctgtttctgtaaaaaatgtgattgggactttggtaaggggcgcattgcatctgttgatcactttgggtggaattgtcatctaaacattgtcccaatccatgaacatgaatgtctttctgtaggtgggttattaaaaaaaaaaaactacctatgtgaaaatgatacttgtatattaataaaaagtcaaataatatagcaatgtacaaaggaagaaagaacacattactccagatctcactactcattgataaccactgttaagtttctggtgaacatctttctgagcacctctcttacaattttacataaataggatccatttgtctcccatttaatatgtaatagttgttttctgatgtcaatgactagatttaaattatgtttgtctcatcatttacttaagcaaacttaccctgatagacatttaatttgttgtctgtgtactgtgagtaatttttattaatatcatagtattaatggccatccatagctattgtggactagtttcttctctgtcctagtagacctttaaaaagtttagggaaaactgtataattttgaatgcttaatgttgttgcttttgaataaagaaaagtacaaagtttttcatctaatcagttcctgcatatctgatgtactgtaatgcataaataatagatctttggtgtgataatttgtgaagcaataaagggcagagaaccagatacttgtttagagatttatttattctctagttcttctatagcctagtgaataaaaataatggtgcatccaaatgaaatcaaattttataaaaccataggaactgggtattcagtttattctcattttcctacctttacaggaagaagccatggatttaataaatagagaaacaatgtctgaatggtgagtactgtactttgaattactattctgataatttgtatacttaattatatcttttctttcagataggcaaactgcagttttgatttcttttgtaggaagctacaaagtgagatacagataagtcactcttgggaagaaggcttgaaactggtatgatattataacttcagttttgtagaaaatttcaaatttttactgacttacagtgtcggcatatctagttttgctgtaatttctagaaatctaagctctattttgaaacaaaaattgtatctgttgcataaataatttttgagtgctctttttaatttttttttttgagacaaggtctcactatgttgtccaggctggtcttgaactcctgagctcaatggatcgtcctgcctcaacctcccaaaatgctaggattacaggcttgagccattgcgcctagcccttgattgctcttcagaaatacttcatgatttactcataaaaatagctatcattatttgaaagtggggttcaaagtaaacagttttgtgacacaaaaccatagctattgtggaccagtttcttctctgtcctagtaggcataataaaagttcagttgcactagttaaagtgcttagataacaaaacaataaatgatttcactcccttctccataatttatgaactatatattaggagtcttaaaccacagacaatagactctctagaaaattattgcatttttatgcctgtgtgttagtccgttctcacattgctataaggaaatacccaagactgggtaatttacaaaggaaagaggtttaattgactcacagttctgcatggctggggaggcctcaggaaacttacgattatggcagaaggcacctcttcacagggcggcaggagatagaatgagtgccagcaggggaaattccagatgcttataaagccgtcaaatctcgtgagaactcactcactaccacgagaacagcattggggaatttgcccccatgattctattacctcccaccaggttccttccacaacacgtggggattatggggattacagttcaagatgagatttgagtggggacacagccacaccattatcagcctgtaacacattctcccactaacattttaatataaaacctttaatttaaacatacttagaatttagtttcatctcttgttaacatttttaaatgtctgtgtgcacactgtggttacctagttgtggtagctgaatgatatttagtgttcttttctatggacatcccagatagtgacaaaacaagtactgagctgaaaattgaataggagagattctaactaatgtcaatcttcagatttgggaattatttgatatggaaatggatcatcagcagaagcaatggcattttattttcctttgagccctgagtaccttacatgagcagttatccctgattttggagtaggtccaggagaatgagtaggtcatctctggagcctgtcactttttgtgttttggtgctaatacaattgatcgatactgctggagtcctttaactggcccaattctaattactttaggtattggcatggatgagtaagagaatcgtaagtgtgttaggaagaggaagggcacatgtaatacacacttggcttgttttagaaagaaaagggcagattttaaaatcctgaattatgaagtactgattttgtctatgtaaaatctagagacaatttccataaatgtagttattcctgctgtctcatttgcttctaagttctagccaaaacctttttggtcctttcctggatgtagtattatagttttcaataacaaagcacaggtcaaagccaaagagaagagcttaaatttaggatttgtgtttatagtgttgagtactcacattctaggactttctggcatgctgggaagcccctcaatcaccatatagccctcatccccaaaagggaaaagggtgcctttgcttattgaagtgaattttgggttccctgattgctttaggatggcgagagctcttcaccatggtgcagccagtgactcagtagtaaggactcacttccctgtgcaacaggtatctcaagtatttgattaataagcaattggtgctacaattgtacactgctttctgcttacacagaatgacaatggcttacagaaatcatcctctctaaagtgcattgatttaactccagtatcctcaatggcttcttccatcaagaagactgggaaggtaagaaaggagtacctaaaagtctatgtctcttgaaatagttaggaaatatttaggaacattaatggtcaccaaaacaaatattttgggggatatattttgtcacagtacatctgattctaactaacatttttcccttctttttcatttcttcaagtattacttacatgtaataaaattcaccaactttaaagcatagggttagattaattttggtaattgtgtacaatcctgtagccacaaccataatcaagatattgaacagttcccacactcaaaacaatttcctaatgatcttttgtaccccagtctccctccctaccatccctgcccctccctaggaaaccaatgatctgctttccgagaaaagtggcggttttaaaacctctgttccaatttgattttagcagtgtttctctccatcattacaaacttgtgtgagttgcactggttcgccttcaagtcctattcccagtcctatgcaacaatacatcatgtaagtttatgttatatgaaaataccaaattgcttataaaataagaattatagaaacctaaaagaaattatagctccaagttttgtgccaaccaaagaagtgacttctttttagggaaattaaaatgtcattgtttcggctgggcacggtggctcctgcctgtaatcccagcactttgggaggccgaggcgggtggatcacctgaggtaggaagttcaagaccagcctgagcaacatggagaaaccccgtctctactaaaaatacaaaaatagccgggcatggtggtgcatgtctgtaatcccagctactcaggaggctgaggcaggagaatcgtttgaacccaggaggtggaggttgtggtgagctgagatcgtgccattgccctccagcctgggcaacaagagcaaaactccatctcaaaaaaaaaaaaaagtcactgtttcagtttatcattttgtatattgaaaaagtcaggtgactaagaacataagaagaatttagtaattccttcaccctgctaatacataatctttctctaaccaagtttgttaataaggatcagagctatctctagaactttaaacaacttcatccgtgattctcaccttcattcaaggcaagtcccagccaggaatgtaggtttttgtagactctaggattcaaaatcctgaatccttgagaattagaagatagtttgctcctaaggcattccagtttttacccatatgtaaagaaaagcagtaaaatggccgagcatggtggctcacacctgtaatcccaacacttttggaggccaaggcaggcagatcacctaaggtcaggagttcgagaccagcctggccaacatggtgaaaccctgtgtctactaaaaaaatacaaaattagccgagtgtggtggtgcatgcctgtaatcccagctacttgggaggctgaggcaggagaatcacttgaacccaggaggcggaggctgcagtgagcttaaatcacgccactgcactccagcctcggtgacaagagccaaactgcatctcagaaaaaaagtaaaaataaaaacaaagaaaagcagtaaaatgatgtaatatcctacacagagtcccgtttttgtgtatgtccttagatctgttataatgaaatagtcattgttgattttgttaaaaaaaatttcttataatgatcatgatgattttattttagaagaagtcaaaatcctaccaacattattagaccaagtatccttggaccattaaaaagaaaaggtacttttatctaacagtagaagtaaatataactttaagttattttataaaatatctaaaatcaaatgttatacaaaaatgtatttttaaaggctttatttatttaaaatatatttaataagctattagaggcctttcattttatgcaactagaaatatgtataaggacattttgaaaactctaaaatgctatataaatgtgaattgagaaatttaattccaatttagttggctattaggattttcaatataattcaccaaggtagctatcttcattactttctaaaacaatgtagagaataaatgaatgaatgaacagagtgagtcagtcatcaagtattttgctgaatgtcaacccctgcctcactgccacacacacacattgctatcatatgaataagttgacacaaattagatccacttacaacactaaaaatatatatgaaggtgtatgttctttggtgtttagtttctttatgggagttatttttggttaaatatatggaaagtgacccacctactcagtaataaaagggcagtggaaagaataaaagggcagtggaaagatgtcttttttaaaaactcctgcaatcctggatcccacttctcaatggtacctcactaaattatgctcttcttccttttttttttttttttttttttttttttcttgagacagagtcttgctctgtcacccaggctggagtgcagtggcacaatcttggctcactgcaacctcttcctcccgggttcaagcgattctcctgcctcagcctcaccagtagctgggattacaggtgcctgccaccatgcccagctaatttttttgtatttttagtagagacagagtttcaccatgttggccaggctgttctcgaactcctgacctcaggtgatccacccacctcggcctcccaaagtgctgagattgcaagcataagcctgtatatttagtacaatttttgactacaatggggaggggaaatgggtgaataggaaaggagattaaacttaaaaatgtgtattgtgaaaaatctattaaggtaagaaagaggagtaagaagaataagaggagagaaactgaaatatgctttaatgttctttgtatattttcgattaattaatggcagtcttcctaacaacataactaactcagcatgtactttttgtattctaagattaagggctagataaattctggaaaatactcttttccaaagtaagcacattgttttatgaagatgcttcggttactaagcttaggggtcttttacctgtgctgtgaaattcgggctagtgttgaaaaaatattcaaatatatcagcagtttaagagctgttagaagtcaagggtcaattgagtatttaaaataaagtacgcttaaattgaggagtgttttaccagattaaaatagttctccttttgagacatgtatacataaataggttatcacatgaaaagtatctcgagttttcttagaatttatgattgaaaaattatttttatagatcaattttaacataaaagatgtagtttctgcccagtgtcttcggagatgtgacctgtctcacacttggttttcagctgctctgaaagacgactgccttattcctttgaggtgtccctgagggaactccaaagcgaattctgtatataccacctagtccatattttcagtcataccccaccctccaaagcatgccctgtacaaatgtgctgaaaattcatttggccatttttggccagatacaataacagataaacagaaattgaaatttattcatatattttggaatatgcatattcatttgggaaacaacaaactatgtcctatttggaccccattaatacaaatgaaatgtgggagaaaggtaccataaaaataaaagagaggtcctgaggcagggggcggggggaactaaaaagaatgatgattatgtgaagtgagatcaagattagagtctccaaagcatatgatgtcatattttatggtgagaagcagcagtgacttccattaggaataagcaagagcatgggccgggcacagtggctcatgcctgtaatcccagcactttgggaggccgaggcgggcggatgacttgaggtcaggaattcaagaccagcctggccaacatgacaaaaccctgtctctactaaaaatacaaaaattagccaagggtggtggtgtgtgcctgtaatcccagctactcaggagactgaggcaggagaatcgcctgaatccaggaggcggaagttgcagtgagccgagatcacaccactgcactccagcctggacaacagagtaagactctgtctggaaaaaaaaaaaaaaaggaataagcgagagcaaataagccttcacatcggaatactgcagaaattgggcagctataaatatcgtttgacaagtaatgctggttttagcaaagaaagatctaattttcttttatgaggaatatgttttgatttgtcatgttttcaatgttaaaccaaaaaagagagctgagtagtttttctgtagtgacataaatgtaatctggcaaggcacgggacaccagacttcttttaaactttatgagccatgattacacttctgtggaaggtctatgcaatatcttaatggtgaccttagggttttatcattcaaatagaagttatgggcttgaatgtcagttttgctcaggtccagaaatgattatcatatgaatgtgaaacactgtgcagattttaacatttacttcaaggcaaagattacaaaaatgcagttgttgttttttttgagattagatgttctaccttaatctctaaagatacaattattttgttcattgtgtgctgtaaaagaacttacctatttagttcattgtgtacatttagcaaaataaagatagcaacaacctaaagttttaaaataaggaatgacattaaactcattaaacagccttactacatagctatatcaaatcatcttgcaggccgggcacagtggctcacgcctgtaatcccagcattttgggaggccaaggtgggtggatcacctgaggccaggaatttgagaccagcctggccaacatggtgaaaccccgtctctactaaaaatataaaaaatagctgggcatggtggtttgcacctgtaatcccagctactctggaggctgaagcacgagaattgctggaacctgggaggtggaggttgaagtgagcccagatcatgccactgcactccagcctgggtgacagagcgacttcttcacaaaataataataataataataataatatcatcttatagaatttagttaataatataagaaaattataatcattgaaaacaaaaagtaaatctaaaaacattatatacggtacaaacccaattttatttaaaaaacaattgtgtatacaacatattcaaaaattactaaagaatggttatgtctggataatgattacttaaaattgttttctttgtgcttttctgtattttataaattaattgcagtgaataagtattacttttgcaattaaaataataataaacatgttaaataaaacatctaccttgatctgctgtattgtcataggtgaaatggcatttcaatatcaaccaaaaaagattttccaaggcacaaccaacatgctttcttctgatacttcccaactgtcagaaaataatgtgtagtgagtattaacatgagattttaaacattcattgatcatttttgcttcgttgttaagtctactttggctattgtacgtattcagaagtatggtacattattaactgttcttagaagttttaaaactaatattccaagtggatactataaacctgagttattttattttcttttttttctttttctgaggcagggtctcactctgtcacccaggctgggaatgcagtggcacaatcttggctcactgcaacctccacctcccaggctcaagcagtcctcccacctcagcctcctgagtagctgggaccacagtagctgtgcaccaccgcgcctggctaatttttgtattttttgtagagatggggtttttccatgttgcccaggctggtctcaaactcctgagctcaagcaatccgcttgccttggcctcctaaagtgctgggattacaggcgtgagtcacgtcacctggcagagtgtttttcttatgagatgtgtgtgacactaatatatggtggatacatttttagaagtgagattttggcattagattaagagatattagagaaatacataaaaatgcatccttggaaaaagtcatcttctgcccatcttccttggatttttgtctaccttgttgggttgagagtattattgaaaagcatgcctaagaaagcatgtcttaatgataaaaataggaaatactggaatagatttctttctttttttttttttgttttgttttagacggagtctcgctctgtctcccaggctggagtgcagtggcaccatctcggcttactgcaacctctacctcctgggttcaaacaattctcctgcctcagcctcctgagtagctgggactacaggcgtgtgccaccacacctggctaatttttgtatttttagtatagatggggtttcaccttattggtcaggccggtcttgaactcctgacctcgtgatccacctgccttggccttgcaaagtgcttggattacaggcataagccaccacacctggccatggatttctatttattgttactggtggtttcattgtatgactcttaaaaaactttgcttgtgacaagtgccagttgttagtcatgtattttgcattcatgtgtagacaaagcagagtatacagagagatctcttgagttctgctatcaatgagtggcattttcttcttctagtctacttccagctacttttgatggaaacgacagcaatgctggatcttctggtaattcgtcagctgaaatcggcactgtcacaaactctcctgtgtcaccttctgatactggttctcatttgttctagtagacaaactttcaactaaatgattcacccatcccaagactttctcaccagtggagaaacacacacatcaagcaaaccaagtcagagcaatgagaattgtactgtataatttaaactatctcctatttatcttttttcctcaatttcctaaaattctatttatctacagaacttgcgtgtataattcttgtgtacatccttaaatttaatgtaataacatgttaaagatgttttccaaatcagaaccatgttgaagatacaagcgtaaattgttaggctgctattttctagaaaatgctgtaccttgactttttaaaataatcttatgaaacataattctgataaaatataattgttcaattaacaaagtaaaatgatgtttgacaattatgta

SEQ ID NO: 10052 - DNA, 126 bp, Homo sapiens
tgcctgtaatcccagctgctcaggaggctgaggcaggagaattgcttgaatccgggaggcagaggttgcagtgagctgagattgcgccattgcactccagcctgggcaacaggagcaaaactccgt

SEQ ID NO: 10053 - DNA, 323 bp, Homo sapiens
atgactaagttataccatactgatccaaggattgcttattttgcacatgaatccttagatattcaatttgttgggaagcagtaggtaggagaagagcaagacaaattaaagttaattgaatagaaagaaaataatatgtaattgaggcttcactcaatttgtactcaacctgattaaccctgattaattttgtattctaattaagtgtgggaaaatgttgataagttgtagtcttttacatttttatcacttacgttttattcatcatcatgactaccgatttgattaaatacaggcttaatatgtcagggcttttctgcgaa

SEQ ID NO: 10054 - DNA, 1317 bp, Homo sapiens
ccagactataaattgggacagctgagcttgcagaatccagacaaccaaactccatcaatcaagaggaacttaatccagggaggtagggtagggggttgagatcaggagcagtagtttagaaaagtctctattttgggcttttactagactattggggaaagaagggggaatagagtagatggttataaaatttcagaatcaaaaaagtttaatctgagagtcccagttgatgatgaataccatgggatgttggtattgggtacttagaagaatgccaaattggaaagaattatgggcttagtcagagtttcttctctttctaggcatgtagaagagcctatttacatcattaacttgccaactttgtgtatatacatgtgcagacacgcatgcataatataccataaggcagcataactgatagtggaccttaaggtatgtttctgtgtcctttctatcagttcacaaattacaagtaggcaagaagcgctgccttagaccttggattttcagttttctgctgtttggtctgtatgttttatatttttagccctttgaaaaaaatgtcatccttttcccagggttcttctgctcactgggtcagaagcatccgatttcctgtcatcggttgcggttcagccatgttaatactgaaagtataagaatatcataatcccagagtgatataaagacctttccaaggaagatgagatacccggaggctgtgaaggagaagtctgaaggatttgaacgcgttcaaatgaaaacctttggttcagcaaaacaccagaaacaaattcaaaagataaaatacactccggagaagcccattctctcaacgcatctgacagttcacaaagagcaactgcagtccaacttaaaaaataaagaaaatggtaggaaaatgggcaacatgcactgaggcaatatataagaagaaggaatgcgcaattaatcaacaaaagcctgctctttcctaacgagtgaagatacaagcttagtaaatattaaaatttattgaagataaaaatggacacttccggccatatataaaagcattgttggtaagagagtggggtaattgacatgctcctgggaaataatacgcattcagacaacctctaatgagtgaatccactgggggtatccactaggaatagaaaacgaccaccaatgcccaagtttgtggtccagaatttgagcagcgatctaacaaagtagagtctccccctgtgtcatgggccccacttcttaagcaaagaagaatgcctcattttggtaactcacccaaataaacagaaattttttttgataatc

SEQ ID NO: 10055 - DNA, 1318 bp, Homo sapiens
ccagactataaattgggacagctgagcttgcagaatccagacaaccaaactccatcaatcaagaggaacttaatccagggaggtagggtagggggttgagatccaggagcagtagtttagaaaagtctctattttgggcttttactagactattggggaaagaagggggaatagagtagatggttataaaatttcagaatcaaaaaagtttaatctgagagtcccagttgatgatgaataccatgggatgttggtattgggtacttagaagaatgccaaattggaaagaattatgggcttagtcagagtttcttctctttctaggcatgtagaagagcctatttacatcattaacttgccaactttgtgtatatacatgtgcagacacgcatgcataatataccataaggcagcataactgatagtggaccttaaggtatgtttctgtgtcctttctatcagttcacaaattacaagtaggcaagaagcgctgccttagaccttggattttcagttttctgctgtttggtctgtatgttttatatttttagccctttgaaaaaaatgtcatccttttcccagggttcttctgctcactgggtcagaagcatccgatttcctgtcatcggttgcggttcagccatgttaatactgaaagtataagaatatcataatcccagagtgatataaagacctttccaaggaagatgagatacccggaggctgtgaaggagaagtctgaaggatttgaacgcgttcaaatgaaaacctttggttcagcaaaacaccagaaacaaattcaaaagataaaatacactccggagaagcccattctctcaacgcatctgacagttcacaaagagcaactgcagtccaacttaaaaaataaagaaaatggtaggaaaatgggcaacatgcactgaggcaatatataagaagaaggaatgcgcaattaatcaacaaaagcctgctctttcctaacgagtgaagatacaagcttagtaaatattaaaatttattgaagataaaaatggacacttccggccatatataaaagcattgttggtaagagagtggggtaattgacatgctcctgggaaataatacgcattcagacaacctctaatgagtgaatccactgggggtatccactaggaatagaaaacgaccaccaatgcccaagtttgtggtccagaatttgagcagcgatctaacaaagtagagtctccccctgtgtcatgggccccacttcttaagcaaagaagaatgcctcattttggtaactcacccaaataaacagaaattttttttgataatc

SEQ ID NO: 10056 - DNA, 278 bp, Homo sapiens
agtgctaaggagaagaaaccctgtcctagggtcaaggttggatgctgacaagactaatttcaagtgatttcaaacgattgtggggaaaatacccagaagttgacaggagcaatatgtagatatttccttctgtaaattatatttccctaatgctaatgctggagcatttggaaacatgtgtataaatatttgaagcacaaaaccagagagatgctcttatgtatttagcttctagttttaaataatagatactacaataaaccttgattaaaccttga

SEQ ID NO: 10057 - DNA, 278 bp, Homo sapiens
agtgctaaggagaagaaaccctgtcctagggtcaaggttggatgctgacaagactaatttcaagtgatttcaaacgattgtggggaaaatacccagaagttgacaggagcaatatgtagatatttccttctgtaaattatatttccctaatgctaatgctggagcatttggaaacacgtgtataaatatttgaagcacaaaaccagagagatgctcttatgtatttagcttctagttttaaataatagatactacaataaaccttgattaaaccttga

SEQ ID NO: 10058 - DNA, 74 bp, Homo sapiens
ggcattaagtgtaactgaaaccctgattaaacccttggaaaaattcagaaaagagcaacttggagctgtaaagg

SEQ ID NO: 10059 - DNA, 348 bp, Homo sapiens
tggcatcacaagaaactgcctcacagatttaggcatgattatatattgaggacaaaattaaaactgacctaagtgaagtggcagattcatgtttgttaaattaaaaaaagaaaaaaaggccatgtgcagtagctcacacctgtaatcccagcactttaggaggctgaggcaggaggatcacttgagctcgggagttcaagaccagcctggttaacatagcaagaccccgtctctacaaaacattagccaggcatgttgacgtgcacctgtggtcccagctacttgggaggctgaggtgggaggactgcttgagccgggtaggtagaggttgcagtaaattgtgattgc

SEQ ID NO: 10060 - DNA, 274 bp, Homo sapiens
ggaacctaagaataggaattaatagccaagccttcattagggacaggaatcaggaactagagagctgtctcaaacttatatctccctcttctccttttccttcccttcttctaccactgacctaatataggaatgtgtattattaacttagcaggatggagggggcagtccacacattacacatatatgtttactgtagacctagtatgttcattatgcaggtatttctatgtaattttattgtatagcatctcaagaggttttacgtgttaaa

SEQ ID NO: 10061 - DNA, 283 bp, Homo sapiens
ggaacctaagaataggaattaatagccaagcctcattagggacaggaatcaggaactagagagctgtctcaaacttatatctccctcttctccttttccttcccttcttctaccactgacctaatataggaatgtgtattattaacttagcaggatggagggggcagtccacacattacacatatatgtttactgtagacctagtatggacattatgcaggtatttctatgtaattttattgtatagcatctcaagaggttttacgtgttaaataactatctt

SEQ ID NO: 10062 - DNA, 588 bp, Homo sapiens
gcactcaaggggacacattttctaatagccacagtgggagacaaatgtcataattcttgtctaataagttgccttgtgaggtcattctaagttctacgtgccctaaaaccatgtacttactgaaaagcctgacaaactgttatgaaactgtgcaactgtcagaagaaaagttattccaccttagaatgtgctcttgtatttaagacccttttcaagaaatgagcatacaaaatgcacactgacaaattcaactgatcaaagactccacagtggagcatcaaagaaggcaggatgctttgttcagtcttgaacgtgttaacataaggtttattatgtgttacagaaaacctttctggaggttaagaaaatccatcagctattctagatttgttaacaagaaacaaaattttcaaaaattatcgttaaaagggatgtgtctatagggaaagactggtgttcaaattctgaagcaaatgccctgaggctcacagatttattatagcgaatcagacaggcgacagtacaggagaaaagtagtgcatgtgtagtgagatggacaacatttgggacctctccttgtcgaagagt

SEQ ID NO: 10063 - DNA, 298 bp, Homo sapiens
ttcatttgttacatttgatgaacaaatgctgatacattattattaactgaagttcatagtttacatcagaatcagtttgtgtatgttgtacagttttgtggatttgccaaatacacagtcatgtatccttcattacagtatcatgcataatatatcacttccctaaaaatccctgtaatctgtgaaaaatccctgaagtctgagtacttgatactaggaaataaaaaggaagagtcttaaaatcataggaccagaggtagcagtcttggcaaggtaccatttctaatgaagagaaggg

SEQ ID NO: 10064 - DNA, 298 bp, Homo sapiens; identical to SEQ ID NO: 10063

SEQ ID NO: 10065 - DNA, 325 bp, Homo sapiens
ttggccgggtgcagtggctcacacctataatcccagcactttgggaggccaaggcaggcagatcatgaggtcaggagatcgagaccattctggttaacatggtgaaaccccatcgctactaaaaatacaaaaaaaattagccaggcgtggtggcgggcgcctgtagtcccagctactcgggaggctgaggcaggagaatggcgtgaacccgggaggcggagcttgcagtgagccgagattgcgccactgcactccagcctgggcgacagagcgagactccgtctcaaaaaaaaaaaaaaaaaaaaaaaaaaaggaaaggccgttt

SEQ ID NO: 10066 - DNA, 340 bp, Homo sapiens
ttttttttttttattatactttaagttctagggtacatgtgcacattgtgcaggttagttacatatgtatacatgtgccatgctggtgcgctgcacccactaactcgtcatctagcattattcacaatagcaaagacttggaaccaacccaaatgtccaacaatgatagactggattaagaaaatgtggcacatatacaccatggaatactatgcagccataaaaaaggatgagttcatgtcctttgtagggacatggatgaagctggaaaccatcattttcagcaaactctcacaaggacagaaaaccaaacaccacatgttctcactcataggtggga

SEQ ID NO: 10067 - DNA, 268 bp, Homo sapiens
gagtctcactctgtcgcccaggctgtagcgcagtcgcgccatcttggctcactgcaagctccgcctcctgggttcacgacattctcctgcctcagcctccccagtagctgggattacaggcgtccgccaccatgcccggctaattttttgtattttttagtagaaacggaggtttcaccgtgttagccaggatggtctccatctcctgacctcgtgatccacccaccttgtcctcccaaagtgctgggattacaggcgtgagccactg

SEQ ID NO: 10068 - DNA, 2583 bp, Homo sapiens
caaaagttcatttccaacactcagcagaattaatcaagcacctaataaaagctggagtgaattatactatgcaggtaagctactttcttagaagaacgtgttttcctgctgtgttttttcacttgtgagatacgcaacacagcttctctattattccattctccctactattattttttaatatgttttttagttaccaaagattgtgttctctgttcctaattacaccgagaatgtggatgaactcatgctttacaagtgaattgcatgaatcctttctaaattgtcattttcctctcagacttattcatatcccaaatattgaattcttttaaaagtaacaagtttctacttcccttcttgttccttttatcttttcttccttttgttgttcctttcttccttttcttgttccttttgtcttgttcctttgtctttattattaaatatgagagtttattattaatttatttttaaatatgataatttataattctcataataaatagtggataaaaaatgtttggggaaatattacaagaaaagaagagaggataaaaggccatttgcactaccatttatgtctgtgcattcatacatttaatatatatttatcaaggacattacagtggtcactctgctctatgagtaacaagacatacattacactgtcaaggaggttccagtctgatataagagtcatagaaggaaaaagtaaagtcatttaaatttctcagcattcagaagaaccaaaagttgctcaacctgtctaaaacacaaactaccacgtttaggataatgaaatatgaagctatacagataaacaaatgtcaggtcattccataagcaatgttgaggagtatggagttttattcaaagggcaatgaggcgccatttaaacctttgtactcaggaattaatgggataatatttgtattttttatttgtattttagaaacagtaacaattttgtttacattggaaagggaattgtcaaagtaaataattgcaccagacaatgttaaagaggcaaggaagaccttatgaaaaactactgcaaaggagacaaagactgaactcaatgctctttaaataaagagctggaaagttttctaaactaaatactcctaaaaaggggaggagaggccaagggcctttagtcaaaaagaaactgtccaaagtttagtcaagctgagggcaaggttagtccatctcagtcaacataaacatgaaaaagtctaccttttatggccaacatattctaatttaaataccaaatattaattgacatgattacaattgttttaaaagtttagcatgaataacttagagttgaattaggtttgattttggtcagatattattactcaaagtttccatgacgttagggctcagaaaatgaatgcgagagacaatagcttcttggataatttgaaatcttctttctcctcaatatcttaggtctacccagatgaaggtcataacgtatctgagaagagcaagtatcatctctacagcacaatcctcaaattcttcagtgattgtttgaaggaagaaatatctgtgctaccacaggaaccagaagaagatgaataatggaccgtatttatacagaactgaagggaatattgaggctcaatgaaacctgacaaagagactgtaatattgtagttgctccagaatgtcaagggcagcttacggagatgtcactggagcagcacgctcagagacagtgaactagcatttgaatacacaagtccaagtctactgtgttgctaggggtgcagaacccgtttctttgtatgagagaggtcaaagggttggtttcctgggagaaattagttttgcattaaagtaggagtagtgcatgttttcttctgttatccccctgtttgttctgtaactagttgctctcattttaatttcactggccaccatcatctttgcatataatgcacaatctatcatctgtcctacagtccctgatctttcatggctgagctgcaatctaacactttactgtacctttataataagtgcaattctttcattgtctattattatgcttaagaaaatattcagttaataaaaaacagagtattttatgtaatttctgtttttaaaaagacattattaaatgggtcaaaggacatatagaaatgtggatttcagcaccttccaaagttcagccagttatcagtagatacaatatctttaaatgaacacacgagtgtatgtctcacaatatatatacacaagtgtgcatatacagttaatgaaactatctttaaatgttattcatgctataaagagtaaacgtttgatgaattagaagagatgctcttttccaagctataatggatgctttgtttaatgagccaaatatgatgaaacattttttccaattcaaattctagctattgctttcctataaatgtttgggttgtgtttggtattgtttttagtggttaatagttttccagttgcatttaattttttgaatatgataccttgtcacatgtaaattagatacttaaatattaaattatagtttctgataaagaaattttgttaacaatgcaa

SEQ ID NO: 10069 - DNA, 2583 bp, Homo sapiens
caaaagttcatttccaacactcagcagaattaatcaagcacctaataaaagctggagtgaattatactatgcaggtaagctactttcttagaagaacgtgttttcctgctgtgttttttcacttgtgagatacgcaacacagcttctctattattccattctccctactattattttttaatatgttttttagttaccaaagattgtgttctctgttcctgattacaccgagaatgtggatgaactcatgctttacaagtgaattgcatgaatcctttctaaattgtcattttcctctcagacttattcatatcccaaatattgaattcttttaaaagtaacaagtttctacttcccttcttgttccttttatcttttcttccttttgttgttcctttcttccttttcttgttccttttgtcttgttcctttgtctttattattaaatatgagagtttattattaatttatttttaaatatgataatttataattctcataataaatagtggataaaaaatgtttggggaaatattacaagaaaagaagagaggataaaaggccatttgcactaccatttatgtctgtgcattcatacatttaatatatatttatcaaggacattacagtggtcactctgctctatgagtaacaagacatacattacactgtcaaggaggttccagtctgatataagagtcatagaaggaaaaagtaaagtcatttaaatttctcagcattcagaagaaccaaaagttgctcaacctgtctaaaacacaaactaccacgtttaggataatgaaatatgaagctatacagataaacaaatgtcaggtcattccataagcaatgttgaggagtatggagttttattcaaagggcaatgaggcgccatttaaacctttgtactcaggaattaatgggataatatttgtattttttatttgtattttagaaacagtaacaattttgtttacattggaaagggaattgtcaaagtaaataattgcaccagacaatgttaaagaggcaaggaagaccttatgaaaaactactgcaaaggagacaaagactgaactcaatgctctttaaataaagagctggaaagttttctaaactaaatactcctaaaaaggggaggagaggccaagggcctttagtcaaaaagaaactgtccaaagtttagtcaagctgagggcaaggttagtccatctcagtcaacataaacatgaaaaagtctaccttttatggccaacatattctaatttaaataccaaatattaattgacatgattacaattgttttaaaagtttagcatgaataacttagagtagaattaggtttgattttggtcagatattattactcaaagtttccatgacgttagggctcagaaaatgaatgcgagagacaatagcttcttggataatttgaaatcttctttctcctcaatatcttaggtctacccagatgaaggtcataacgtatctgagaagagcaagtatcatctctacagcacaatcctcaaattcttcagtgattgtttgaaggaagaaatatctgtgctaccacaggaaccagaagaagatgaataatggactgtatttatacagaactgaagggaatattgaggctcaatgaaacctgacaaagagactgtaatattgtagttgctccagaatgtcaagggcagcttacggagatgtcactggagcagcacgctcagagacagtgaactagcatttgaatacacaagtccaagtctactgtgttgctaggggtgcagaacccgtttctttgtatgagagaggtcaaagggttggtttcctgggagaaattagttttgcattaaagtaggagtagtgcatgttttcttctgttatccccctgtttgttctgtaactagttgctctcattttaatttcactggccaccatcatctttgcatataatgcacaatctatcatctgtcctacagtccctgatctttcatggctgagctgcaatctaacactttactgtacctttataataagtgcaattctttcattgtctattattatgcttaagaaaatattcagttaataaaaaacagagtattttatgtaatttctgtttttaaaaagacattattaaatgggtcaaaggacatatagaaatgtggatttcagcaccttccaaagttcagccagttatcagtagatacaatatctttaaatgaacacacgagtgtatgtctcacaatatatatacacaagtgtgcatatacagttaatgaaactatctttaaatgttattcatgctataaagagtaaacgtttgatgaattagaagagatgctcttttccaagctataatggatgctttgtttaatgagccaaatatgatgaaacattttttccaattcaaattctagctattgctttcctataaatgtttgggttgtgtttggtattgtttttagtggttaatagttttccagttgcatttaattttttgaatatgataccttgtcacatgtaaattagatacttaaatattaaattatagtttctgataaagaaattttgttaacaatgcaa

SEQ ID NO: 10070 - DNA, 98 bp, Homo sapiens
gagatgggatttcaccgagttagccaggatggtctcgatctcctgaccttgtgatcggcccacctcggcctcccaaagtgctgagattacaggcgtga

SEQ ID NO: 10071 - DNA, 454 bp, Homo sapiens
caggaggaaactttaaaatatcaaggaatcactcagtcaccctcctgttttgttgaaggatcaaccccaaattctgggtatttgagtacatgtgaatcatggatttggtattcaactttttccctggatgctttggaatcgtgtcttccatgctccactgggttcaatttaaaataggagaggctttctcttctgaaagatccattttaggtctttttcaagaatagtgaacacattttttaacaaaataagttgtaattttaaaaggaaagttttgcctattttattaagatggaaatttctttttaggctaatttgaaatccaactgaagctttttaaccaatattttaaatttgaaccactagagttttttatgatgcaaatgattatgttgtctgaaaggtgtggttttattgaatgtctatttgagtatcatttaaaaagtagatgcct

SEQ ID NO: 10072 - DNA, 458 bp, Homo sapiens
caggaggaaactttaaaatatcaaggaatcactcagtcaccctcctgttttgttgaaggatcaaccccaaattctgggtatttgagtacatgtgaatcatggatttggtattcaactttttccctggatgctttggaatcgtgtcttccatgctccattgggttcaatttaaaataggagaggctttctcttctgaaagatccattttaggtctttttcaagaatagtgaacacattttttaacaaaataagttgtaattttaaaaggaaagttttgcctattttattaagatggaaatttctttttaggctaatttgaaatccaactgaagctttttaaccaatattttaaatttgaacccctagagttttttatgatgcaaatgattatgttgtctgaaaggtgtggttttattgaatgtctatttgagtatcatttaaaaagtatttgcctttta

SEQ ID NO: 10073 - DNA, 98 bp, Homo sapiens; identical to SEQ ID NO: 10070

SEQ ID NO: 10074 - DNA, 888 bp, Homo sapiens
ggagggcactgccctcctggaagagatgcattagatcggtaggcacagaatacctttacatgagaccatttagagaatgattaggggccaaaggtaaggggtggactgttaagccaacagggactcagagaaagcaagggtcagggtgaccagaaatagagaaaaaaaagcctcacagaggaagaggacctggacctgagccacagaggatgggtagaacttagaaggagggaatgagcccagtctgaatgatatgtctacaaagtatacaatatgcaatgatgattaactgaaaaattgggctggccatttgtgagatccatgaataaaagtagatcagaaagtcagtgtgagttttaaatatatatattttattataaaacgttaatcacataatatgtgaaatcactattgataaccttttctattggtcctagtgttttgctatttaagataatactgcatcaaatattcttagtgtagccatccatttacaagtgttattttcaagagcaaaatttatgcctttaaactgtgataattaaattaatactggtgagaactatcagatataccactgtgacagaacagatggcctagagacagtgatacctttaaaagttaaataattgctgagcgcggtggcttacgcctgtaatcccagcactttgggaggccgcggtgtgtggatcacggggtcaggagttcaagaccagcctggccaagatggtgaaaccccatctctactaaaaatacaggtgggcgcctataatcccagctactcaggaggctgaggcagagaattgcttgaacccaggaggcggaggttgcagtgagccaagatcgcgccactgcactccagcctaggtgacagcgagactccgtctc

SEQ ID NO: 10075 - DNA, 296 bp, Homo sapiens
aagccaaaggtcacaagggaaaaaactgatagatttgtctgtgatattgagagatgtatgcacatatacatacaacagtcatagtaagacaccgttagacaaaagaaagtgatggtttggaaaaaaatttccaacataaaataaaactaatatttaattattagaaaataatagcaaacaacctggtagaagagagaacaaaaatattcatatacgataacgtgaccattgaatgtgtgaaggatgatatcacacaaattcaaatgaaattatcttactacatgttagattggccc
